United States Patent Application Publication US 2022/0090207 A1 - sequence listing, part 15

SEQ ID NO: 210304 - DNA, 159 bp, Homo sapiens
  chr5:132001670-132001829
  hypo
gaacgcaacgcagggcgaaggcggagcagggagatgagcgccaaggtgcctgcagagatgctggtggggagcgatggtgcttgtggtagtggaggactggagaggggcgtgtgtgtaagatgcatgtatacattatactgctatcgtatacattattta

SEQ ID NO: 210305 - DNA, 199 bp, Homo sapiens
  chr5:132095787-132095986
  hypo
tcctcccttaagccctgcgggcccttcagaacagctgtgtggtgaccagtctccaggaggccagtgttggctggcgcgagtgcccgcagttctccatcaccacctgccagccaatacgggctccacaccactgccccacagactgaggagggatgcgccacaggtgtccaagcagaaaccaccacggcttttggaatct

SEQ ID NO: 210306 - DNA, 68 bp, Homo sapiens
  chr5:132167162-132167230
  hypo
ccaagaaatgctccgttcctgagaggggctggggaccctttgatgagcctctccggctctcaggtctc

SEQ ID NO: 210307 - DNA, 38 bp, Homo sapiens
  chr5:132267350-132267388
  hypo
aaaagcaaagaacgcggccaggcgcggtgactcacacc

SEQ ID NO: 210308 - DNA, 805 bp, Homo sapiens; identical to SEQ ID NO: 200031
  chr5:132386958-132387763
  hypo

SEQ ID NO: 210309 - DNA, 201 bp, Homo sapiens
  chr5:132607918-132608119
  hypo
tgaaaattaatgacacggccatttcttgaagccaacaaccaaaggaatgagtgtttgccaagaagcaatagctcttgtaacacttacactcactgcattcttaacgcattgtttgtctgtggaaaaagcagtttgcccagcgtggtggtaaggagggcatgatggaaagccggcgtggagggagagaggaggcacgcgcgt

SEQ ID NO: 210310 - DNA, 92 bp, Homo sapiens
  chr5:133240405-133240497
  hypo
ggccacctcctatggggccctcagttccaggcacagagaaaaacacccgggaaagcctcgtgcctcactccagggaacggaccacgtggggg

SEQ ID NO: 210311 - DNA, 198 bp, Homo sapiens
  chr5:133456100-133456298
  hypo
tcttgcagtgaagtcgaagccactcatcacagccgagtgcctgggtggcccccgccagccgcccctcatcacctgcaccagcctcttgctgtctccctgacagcagtcccctccctgtcctagggggtcttacagccagcaacttctttccaccccaggactcttgcactgcttccctccgctcggaagtctcttccc

SEQ ID NO: 210312 - DNA, 90 bp, Homo sapiens
  chr5:133457288-133457378
  hypo
aaaaatgcaaaaaaccctcatggccatcagcctgggaagccgtggccaccctgtgcgtgcccctcattcttgccacgatgccacaggtgt

SEQ ID NO: 210313 - DNA, 207 bp, Homo sapiens
  chr5:133459375-133459582
  hypo
ttggtgctggggcagcgctggttccagagcctgggagaagctgatgggcgcatgcagcatgttggcatcatggtagggcaaggcggtacccacccacagatggtgtgaattggacatggcggacaaaggcggggagagccagctgctggggcagggtggatgctaggaggcatggggatcatgggaggaactcgaacagagccaagg

SEQ ID NO: 210314 - DNA, 77 bp, Homo sapiens
  chr5:133464194-133464271
  hypo
gagcgcttcatgaccgtggcggcctcagggcaggactgtcctcctagggctggtgcaggctgcgggacagaacacat

SEQ ID NO: 210315 - DNA, 207 bp, Homo sapiens
  chr5:133465710-133465917
  hypo
acagggcatccagcacgctgtgggcagggagcttgcgggccgtcctttggagagcaccgtgtcctgggcagtggtgcctggagcgggggctagggataaaagggcatgagcaggggcgcctccagcctggctggcgcactcagccctactggagtatatctgcagagatggggtctgcgaaagcccacaaatcgaggcctggtccat

SEQ ID NO: 210316 - DNA, 110 bp, Homo sapiens
  chr5:133469215-133469325
  hypo
ggccctggagtgggacgttccactgggcgagggggacatgggtgccaggccctgtgctagacggtttcccctggctcctaccaccgggcgcaaagcgggctggggattga

SEQ ID NO: 210317 - DNA, 180 bp, Homo sapiens
  chr5:133819260-133819440
  hypo
tcaaactggaaatgtaaagaagctgtcttgattatataaaggctgtctttaaagaaataaaacaaggattatacctcgtggtaaaacaatgaaagttttccctttgaaaactggaacaaaacagagacattcattactacatttttttttttttttttttgagactcccgtctcgccctg

SEQ ID NO: 210318 - DNA, 902 bp, Homo sapiens; identical to SEQ ID NO: 200032
  chr5:133862723-133863625
  hypo

SEQ ID NO: 210319 - DNA, 318 bp, Homo sapiens
  chr5:133907414-133907732
  hypo
gcttcccttggcctggctcagtcaagcttcagcacctggcctcctcccttgccagccccgacactcctcactgctcccttcagattcctgccacgaggctctgctctgcctcccccagcctggcctggcttggattcctcgttcccaggctctgccctgccgtgtgatcaactcccactcccactggctgcttgtgtgtccaagacgccttgctcagcacccccaagtgtgggtcggagccacctggtcctgtcagtagttggtcagcacctacctcccctgagaagaaaggggccccagcggcgttgctcacttgag

SEQ ID NO: 210320 - DNA, 39 bp, Homo sapiens
  chr5:134256617-134256656
  hypo
agtgttgggaatacaggcgttgagcccagctgctgaggc

SEQ ID NO: 210321 - DNA, 157 bp, Homo sapiens
  chr5:134278932-134279089
  hypo
gaaatccatggtgaccgaagcacttgtgacttcggagcagtgtgatctgattttgaagtggttttgaaaactggggacggtatacataaggtgcaaagatcacggaaacatgaattagcaagtggggcctcagtctaggttacgagtgctttaggac

SEQ ID NO: 210322 - DNA, 166 bp, Homo sapiens
  chr5:134303558-134303724
  hypo
caaggattcccttcgtggccccttctctgctgcctctcagaatccagacgctaaggaaaatccctaagcagagattttctgttggatgctaaaagcaaggaataaaagttgaaaatttggaaaatgtctcaacaccgtcaccagcgccactcgagagtcatttcta

SEQ ID NO: 210323 - DNA, 185 bp, Homo sapiens; identical to SEQ ID NO: 200037
  chr5:134370268-134370453
  hypo

SEQ ID NO: 210324 - DNA, 223 bp, Homo sapiens
  chr5:134436703-134436926
  hypo
gtaaaatcacttggccgggtctgtgggtgcagatttccatcattagcctgtcttcgctgtaggcctcgctttggtgcttttcccttggtccttctgcacagcggcactgacatctcccttttttccacagatggaaattctggctgatcttgaaggctcagctcaaatcttcatctggctctttttcgaagtcttctctacctggcctcgtccgaagctcagg

SEQ ID NO: 210325 - DNA, 186 bp, Homo sapiens
  chr5:134453700-134453886
  hypo
gcaagctttcagagtcgggttctgattttgcacccctgctgcgaccattttgtattcctatcttaaatgctggcagacaatctggctgacttgtgtccgagaagcagttggccgtgctgggattgtgaccccagtgtgtggtgtattaccccagtgaggagtagatggacccggcctgggacagga

SEQ ID NO: 210326 - DNA, 219 bp, Homo sapiens; identical to SEQ ID NO: 200039
  chr5:134463605-134463824
  hypo

SEQ ID NO: 210327 - DNA, 154 bp, Homo sapiens
  chr5:134513710-134513864
  hypo
tggggcctggcaccccgacactctgtaggggctcaggaccccatttgctgaggtgagaccacatttcctcaagaagtggcaggagtcactcagtgggcacgtcttcacccccatgttctagagtaaagcagtgatgccgcgcggtgatgccact

SEQ ID NO: 210328 - DNA, 84 bp, Homo sapiens
  chr5:134582958-134583042
  hypo
ctaatagcatgaggcgcctttctcctggcactgcgaagtgcaccggtggccttgccgtcttccctgggggcgtgggggagaagg

SEQ ID NO: 210329 - DNA, 76 bp, Homo sapiens
  chr5:134583162-134583238
  hypo
cggaatgatggggtaatgccagtgagccgccccttctccacagggtactgagaacgaggccaggcagcagctgtcc

SEQ ID NO: 210330 - DNA, 151 bp, Homo sapiens
  chr5:134608288-134608439
  hypo
cctgcatgggagtggcggggaggccgagggccactccccagggaaagggctcctcagggctttcggcactctgagggctccataatgcaggtccctgtggtgatacgagaccagtgcctgactacagcgtaggttccggaaaagtaagggg

SEQ ID NO: 210331 - DNA, 38 bp, Homo sapiens
  chr5:134673488-134673526
  hypo
taatagagagcagacggttccaccggaatgtccctggc

SEQ ID NO: 210332 - DNA, 432 bp, Homo sapiens
  chr5:135091170-135091602
  hypo
tatcatatctagtgttgatgcgctatggtattaatgaaatatcactgtggtatttatcatatctaatgtcaacacactatggtgttaatgaaatatcgctgtgatatttaccatatgtagcgtcaacgcactatggtattaatgaaatatcgctgtgatatttatcatatctaatgacaacgaactatagtattaattaaatattgctgtggtatttcttatatctagtgtcaacgcactatcttattaaggaaatatcgctgtgatatatatatatggtcatacgtagtgtcaatgcactatggtatgaatgaaatatcgctgcgacatttatctcatatctaatgtcaatgcagtgtagtattaatgaaatatcgctgtgatatttatcatatcatatttagtgtcaacgcactatgatagtaataaaat

SEQ ID NO: 210333 - DNA, 230 bp, Homo sapiens; identical to SEQ ID NO: 200047
  chr5:135468336-135468566
  hypo

SEQ ID NO: 210334 - DNA, 749 bp, Homo sapiens
  chr5:135692313-135693062
  hypo
gttggctagtctggctaactcgttgctgagctccagggcggtgaggacagggtcttcgctggacagggacaagtaggcagcactcgccagtcctttgtaggcgttcatgcgcgagcgcgagtggctgaaggagtctttccgctgtttctcggtgcactcattgcacttgcagaagtagtcgtggggccgctcgatgcgggcgcccttgagcagcaggatgtgcacgatctcatactcctggcagtgcgccgccaggatgatgggcgtgatgtcgtgggagaagcgcgtgccgtcctcgtcgtaggcatagaagtcgtcgtcgcgcagctcctgttccagcgggctgagcgtcaggcgctggccctgcgcgaaggccgggtggttgaggatggcctccacgatgcgcacatagcccttgctgatggccagcagcagcgcgtcccccacccgtgccaggttctccttcttcagcagcagctccgtgacctctaggtgctcgttgcccacggccagctgcagagcgttctgccccatgtagtccacacagttgaagttaagggtcttggactcctccagcattttccggaccaccgggatgttgccatactcagccgagtccaggaagcgctcctcctcgggcgtcagactggtgcccttctcgttgaacatgtaggcgggaccccggatggcctggcgacggcccttctccctcagcgttgtgtgccggcgctgcatgtttttgaaggtgc

SEQ ID NO: 210335 - DNA, 34 bp, Homo sapiens
  chr5:135989645-135989679
  hypo
attctcagctgggtgcggtggctcacgcctgtaa

SEQ ID NO: 210336 - DNA, 131 bp, Homo sapiens
  chr5:136983257-136983388
  hypo
caggcccagccagtcggtccctcgggccagggcaggaagcgagagtctctcttaccctggtgcgtggggccgcagggctaacaccaacaattcatccgatggagcatgtcgaggtcgagccagaagacttg

SEQ ID NO: 210337 - DNA, 35 bp, Homo sapiens
  chr5:137470416-137470451
  hypo
acttttttttttttttgagacggagtctcgctctg

SEQ ID NO: 210338 - DNA, 81 bp, Homo sapiens
  chr5:137529621-137529702
  hypo
gggcaacaaaagcaaaactccgtctccaaaaaaaaaaaaaaggtagcgctctaagtttccgtctcacacaagaatcaaagc

SEQ ID NO: 210339 - DNA, 466 bp, Homo sapiens
  chr5:137803075-137803541
  hypo
cccagctcatcaaacccagccgcatgcgcaagtaccccaaccggcccagcaagacgcccccccacgaacgcccttacgcttgcccagtggagtcctgtgatcgccgcttctcccgctccgacgagctcacccgccacatccgcatccacacaggccagaagcccttccagtgccgcatctgcatgcgcaacttcagccgcagcgaccacctcaccacccacatccgcacccacacaggcgaaaagcccttcgcctgcgacatctgtggaagaaagtttgccaggagcgatgaacgcaagaggcataccaagatccacttgcggcagaaggacaagaaagcagacaaaagtgttgtggcctcttcggccacctcctctctctcttcctacccgtccccggttgctacctcttacccgtccccggttactacctcttatccatccccggccaccacctcatacccatc

SEQ ID NO: 210340 - DNA, 96 bp, Homo sapiens
  chr5:137865653-137865749
  hypo
actcttgggcccaaacactcctcccacctcagactcactgagcagctaaggttataggcgcaagcgaccgtgcccgcctgacccacaaggatctta

SEQ ID NO: 210341 - DNA, 64 bp, Homo sapiens
  chr5:137911812-137911876
  hypo
gaacattaggccaattagcctgcacaaagggaaaaaaaaatagctgagcttggccgggcgctca

SEQ ID NO: 210342 - DNA, 119 bp, Homo sapiens
  chr5:137912556-137912675
  hypo
gagccaccgcgcccaacccagttttagatttttaagaagaggaattaattgattcaacagatatgttttggcatgcctaccgtgtgtcagtcactctcccaggtggtaggaatacagcg

SEQ ID NO: 210343 - DNA, 101 bp, Homo sapiens
  chr5:137945777-137945878
  hypo
agctgggaaggttccagtggcgcgctcctgagaagcagtgggaagggccaaggttacgagttacccaggcatgggggcgaaccctggctccctcacttgct

SEQ ID NO: 210344 - DNA, 81 bp, Homo sapiens; identical to SEQ ID NO: 200054
  chr5:138088596-138088677
  hypo

SEQ ID NO: 210345 - DNA, 277 bp, Homo sapiens; identical to SEQ ID NO: 200055
  chr5:138089667-138089944
  hypo

SEQ ID NO: 210346 - DNA, 92 bp, Homo sapiens
  chr5:138119912-138120004
  hypo
ttaggtttcttttccagtcggagaatttcaacaatgatgtaggttttttaggttattggatatcagctaaggtaaatcgagccctgctattt

SEQ ID NO: 210347 - DNA, 33 bp, Homo sapiens
  chr5:138179955-138179988
  hypo
attatagacacaagccaccgcacctggccccag

SEQ ID NO: 210348 - DNA, 266 bp, Homo sapiens
  chr5:138280666-138280932
  hypo
gcccccaggtgcccgttcctccatcctcgctcccagaaatcctctcaagagcacctggcccaaagcctccctctgctttacagaatcgctgctgagggcagcacacctgggggcagaggggacactggggactgcagttaggcccctactagtggcactcctcccatagggacgctttccacaccccgggccagaccctggtggtcacagaggcctccagggccagcctggtcctgacacagccgagcgcccggcctggcctcccc

SEQ ID NO: 210349 - DNA, 31 bp, Homo sapiens
  chr5:138659303-138659334
  hypo
atgtcggagtcaggcgggcccagtggctcac

SEQ ID NO: 210350 - DNA, 55 bp, Homo sapiens
  chr5:138928998-138929053
  hypo
gggtcttggcggccccgcactccgagcggccggctggcgccgtgggcccaggaag

SEQ ID NO: 210351 - DNA, 33 bp, Homo sapiens
  chr5:138945975-138946008
  hypo
gggtcatgcacagtgggtcacgcctgtaatccc

SEQ ID NO: 210352 - DNA, 1063 bp, Homo sapiens; identical to SEQ ID NO: 200057
  chr5:139016856-139017919
  hypo

SEQ ID NO: 210353 - DNA, 64 bp, Homo sapiens; identical to SEQ ID NO: 200058
  chr5:139039951-139040015
  hypo

SEQ ID NO: 210354 - DNA, 51 bp, Homo sapiens
  chr5:139060689-139060740
  hypo
ggctgtggcaggtgccgaagccctcaatggccagtccgacttcccctacct

SEQ ID NO: 210355 - DNA, 459 bp, Homo sapiens; identical to SEQ ID NO: 200060
  chr5:139088871-139089330
  hypo

SEQ ID NO: 210356 - DNA, 122 bp, Homo sapiens; identical to SEQ ID NO: 200065
  chr5:139284463-139284585
  hypo

SEQ ID NO: 210357 - DNA, 265 bp, Homo sapiens; identical to SEQ ID NO: 200067
  chr5:139554319-139554584
  hypo

SEQ ID NO: 210358 - DNA, 105 bp, Homo sapiens
  chr5:139632450-139632555
  hypo
atgtgccctgagccgccagcctggatgggtgaggagggccaacagaggcaggcaaaaccccacacctgagagacaggtctaagcggtccacggatatgcccactt

SEQ ID NO: 210359 - DNA, 151 bp, Homo sapiens; identical to SEQ ID NO: 200068
  chr5:139725997-139726148
  hypo

SEQ ID NO: 210360 - DNA, 32 bp, Homo sapiens
  chr5:140088250-140088282
  hypo
cttttttgagacagtcgctctgttgcccaggc

SEQ ID NO: 210361 - DNA, 32 bp, Homo sapiens
  chr5:140088522-140088554
  hypo
ttagccaccgcgcccagcctctttcaggtctt

SEQ ID NO: 210362 - DNA, 34 bp, Homo sapiens
  chr5:141002378-141002412
  hypo
tcagaaagttacttaagtctcgccgggggcggtg

SEQ ID NO: 210363 - DNA, 60 bp, Homo sapiens; identical to SEQ ID NO: 200076
  chr5:141030747-141030807
  hypo

SEQ ID NO: 210364 - DNA, 216 bp, Homo sapiens; identical to SEQ ID NO: 200077
  chr5:141030884-141031100
  hypo

SEQ ID NO: 210365 - DNA, 80 bp, Homo sapiens; identical to SEQ ID NO: 200078
  chr5:141031150-141031230
  hypo

SEQ ID NO: 210366 - DNA, 144 bp, Homo sapiens
  chr5:141051473-141051617
  hypo
attactccagacactcgtgtccagcttcaggctctgcaccttggagatcccagaacccagggcccggtgctgacctgtgagggtgtgagggtgtgtgagggtgtgtgagggtgtgaggggcatgtggcacgggtaccctgagcc

SEQ ID NO: 210367 - DNA, 93 bp, Homo sapiens
  chr5:141052407-141052500
  hypo
ggtggttgggggggccgggggtggcccaggaggcgctgctccttcagacaggactgcagcgtggagcaccacatgtcccgctgagctggtggg

SEQ ID NO: 210368 - DNA, 392 bp, Homo sapiens
  chr5:141248096-141248488
  hypo
gggtcaccctgacagttatacggagggggcctctcacctggatgaccgagtggcctatggggctattctcagatagttcggcctcataggagggccgctcaaacttgggggcgttgtcattggtgtcaagcacggtgacacgcagcagggcactgctggcgcgtggggggctgccgccatcctgcaccttgatggtgaggtcataggagtcccagcgctcacggtccaggttgcccatcacaatgagctgtggttgcttctcctcctggtcctctgccacctgcagcccaaatagctcctgggcctcaggcccagcctgcagctcataggatgccacaccgttgggaccagcatcacggtctgaagccagcgggatggggaagagtgagccg

SEQ ID NO: 210369 - DNA, 780 bp, Homo sapiens; identical to SEQ ID NO: 200081
  chr5:141257230-141258010
  hypo

SEQ ID NO: 210370 - DNA, 34 bp, Homo sapiens
  chr5:141674168-141674202
  hypo
ttaattttcaatacacggccgggcacggtggctc

SEQ ID NO: 210371 - DNA, 34 bp, Homo sapiens
  chr5:141674502-141674536
  hypo
tgctgctggatcagatgtacggtaggaaataaag

SEQ ID NO: 210372 - DNA, 265 bp, Homo sapiens; identical to SEQ ID NO: 200082
  chr5:141704448-141704713
  hypo

SEQ ID NO: 210373 - DNA, 341 bp, Homo sapiens; identical to SEQ ID NO: 200084
  chr5:141736299-141736640
  hypo

SEQ ID NO: 210374 - DNA, 279 bp, Homo sapiens
  chr5:141788585-141788864
  hypo
gcgcatgttatgggcgctgggtcggaacaggggccactttgaatggcaaggagggagaatcgctccagcgaagctggaacggccaagaagctgggatgtcaataaacacaggcaggacacagaaagccttttccgaagagatggaaggcggggaagcgaaggaaaggcagtgcctcactcccggtgcatttgagaaggaaaatgcttgaggtaacccgtgttggcagcttttatagcttcctctcgataatgtgctgggcagaccctgaacaggctggt

SEQ ID NO: 210375 - DNA, 33 bp, Homo sapiens
  chr5:141803864-141803897
  hypo
ttataggtgtgagccaccgcgcctggctgccag

SEQ ID NO: 210376 - DNA, 150 bp, Homo sapiens
  chr5:141850813-141850963
  hypo
tctgattattagcaacggtaacacacaaagaggagcggggttggggtgggcttgttggaaaagccttgaacctggagtcagagagacccaagtgttgaatcctgattgtgtaactctggtaagcctcagtttgtcatcttgaaaatggga

SEQ ID NO: 210377 - DNA, 45 bp, Homo sapiens
  chr5:142625530-142625575
  hypo
tcctggggtggccacggtcatgccaagtctcagtgccccctccgc

SEQ ID NO: 210378 - DNA, 398 bp, Homo sapiens; identical to SEQ ID NO: 200087
  chr5:142781875-142782273
  hypo

SEQ ID NO: 210379 - DNA, 512 bp, Homo sapiens; identical to SEQ ID NO: 200088
  chr5:142784163-142784675
  hypo

SEQ ID NO: 210380 - DNA, 158 bp, Homo sapiens
  chr5:145379611-145379769
  hypo
ccattgcaggtgcctcgagcaaaggccttatgcaactacagagggcagaatcccggtgacctaaggtttaataagggagatatcatccttctccggagacagcttgatgagaattggtaccagggggaaatcaatggcatcagcgggaacttcccagc

SEQ ID NO: 210381 - DNA, 94 bp, Homo sapiens; identical to SEQ ID NO: 200094
  chr5:145718301-145718395
  hypo

SEQ ID NO: 210382 - DNA, 160 bp, Homo sapiens; identical to SEQ ID NO: 200095
  chr5:145718501-145718661
  hypo

SEQ ID NO: 210383 - DNA, 323 bp, Homo sapiens
  chr5:147040615-147040938
  hypo
gatcatattgctcagagcctcgtccacctgcttcttggccgttttcaggtccgcaatttcctgtaagagcttaaggcgctctgtgtcaaacagtttccgggcctcctcccgggcctcaatggtgagcgctgtccttactttgtcactgctgccgtcgcggagagcacagagagcagacttgagcctctggatctctccatcacgtaccttcaccgtccttgacatttcctgctcgtgctgcttgataaggttctccctcacagcctgcagctccttcatcttctcctcatggagcttggctttgagttctgtcaccagcaccg

SEQ ID NO: 210384 - DNA, 31 bp, Homo sapiens
  chr5:147055597-147055628
  hypo
aaaaaagagagtgcctggaccgggtgcggtg

SEQ ID NO: 210385 - DNA, 43 bp, Homo sapiens
  chr5:147274326-147274369
  hypo
aaaaaagggagggatcggccgggaatggtggctcacacctgta

SEQ ID NO: 210386 - DNA, 272 bp, Homo sapiens; identical to SEQ ID NO: 200103
  chr5:148650951-148651223
  hypo

SEQ ID NO: 210387 - DNA, 106 bp, Homo sapiens; identical to SEQ ID NO: 200104
  chr5:148724797-148724903
  hypo

SEQ ID NO: 210388 - DNA, 33 bp, Homo sapiens
  chr5:148868824-148868857
  hypo
ggcaccgcgcccgccctactcatcctttcagat

SEQ ID NO: 210389 - DNA, 61 bp, Homo sapiens
  chr5:148980120-148980181
  hypo
cctaggctaaaaccccggttcagcttttcttccccactgagtactccgtctgttcctctct

SEQ ID NO: 210390 - DNA, 41 bp, Homo sapiens
  chr5:148981578-148981619
  hypo
agtggggaagtgacacggtttgatttatgtttttcttttct

SEQ ID NO: 210391 - DNA, 144 bp, Homo sapiens
  chr5:148989228-148989372
  hypo
gcacatccagggcatcgttgaggcggtggtgtgagtagaacggccagtgagcactcgctcctaccccactgacccggttcaggagcagctatggtctcacccctttttcatgccattcgtgctgcttcacgagtgttgctctgt

SEQ ID NO: 210392 - DNA, 36 bp, Homo sapiens
  chr5:148999330-148999366
  hypo
atgggaaaaaacaaacgcactgctgggtgcagtggc

SEQ ID NO: 210393 - DNA, 43 bp, Homo sapiens
  chr5:149006876-149006919
  hypo
ccaccccacagaagccggtgcagagacccgggcactcttgtgg

SEQ ID NO: 210394 - DNA, 300 bp, Homo sapiens
  chr5:149189244-149189544
  hypo
tttcttaaaaaaaaaaaaaaaaaaaaaaaaaaattaatcaatttcatgttatttatattttaccacaatttaaaaacatactgataaaaggaggcaggggatagcagagaatgataagtgctaatcgagggaattccagcagggtgctaggtaggccagagacgggatggccatttggggtgcagtggtcagggaggcccatctggggagggacgttcaacctgggatgaggatagaaagaagggagccgctatgggagatgaaggagagagaaggcgttccaggctgaggaaggctcca

SEQ ID NO: 210395 - DNA, 281 bp, Homo sapiens
  chr5:149323764-149324045
  hypo
cctctgtgttggggacgttagcaatcttcttagagtgtgcgacatggcccacgatgcccatgtccaaagggaagacgatctcttggtcgggcatcaccaggcagtcctcgaggacagcatccttgtggacattgaaaagcctggtggccagctctgcgatgccattgcgggtccggtacatgaacaggctcatgcggtctgcctgcaggaggaagcacagcttcttcatgacattgaagatgcatttctctgtctgtaaattctcctgaaagtcccgcagg

SEQ ID NO: 210396 - DNA, 33 bp, Homo sapiens
  chr5:149375068-149375101
  hypo
caagaggatccggcgttccgccctcttcatcct

SEQ ID NO: 210397 - DNA, 94 bp, Homo sapiens
  chr5:149375680-149375774
  hypo
gtcatcataaagagcgctcctcatccttttccgctggggtcccacggatgcctcccgcaccttttcttcaaatttggtgcgatcctttaagaat

SEQ ID NO: 210398 - DNA, 39 bp, Homo sapiens
  chr5:149501436-149501475
  hypo
acccaccagagggaacgtagttatcgtaaggggccatgt

SEQ ID NO: 210399 - DNA, 188 bp, Homo sapiens
  chr5:149725941-149726129
  hypo
gagatttacttttctcggtaccctttgcatacctttacacgtttgcatcatgtgtatacatcatcttctccaaaaacaggtttcagtttttgaactacattctccactggaatccagtgctctggccgtgtgagcaggctgacctttcagaggtggtgatggtggggtgactcgcggtcagtaagtgg

SEQ ID NO: 210400 - DNA, 147 bp, Homo sapiens
  chr5:149800713-149800860
  hypo
tttaaattgggtaggcggtttggggacggagatggaaaaaaaaattttttttaagtttgaaactgatgtaaagaggatggtgaagatctgctactcattttacagcaaatcttgtagaactatttgattcttgtttgcttgtttgag

SEQ ID NO: 210401 - DNA, 54 bp, Homo sapiens
  chr5:150028668-150028722
  hypo
ccagacaggagcccccggccacagagacacataatgtcccgcagccccatggtg

SEQ ID NO: 210402 - DNA, 39 bp, Homo sapiens
  chr5:150066938-150066977
  hypo
tgatggggctgggcacggtgactcatgcctataatctca

SEQ ID NO: 210403 - DNA, 293 bp, Homo sapiens; identical to SEQ ID NO: 200114
  chr5:151150270-151150563
  hypo

SEQ ID NO: 210404 - DNA, 151 bp, Homo sapiens; identical to SEQ ID NO: 200115
  chr5:151150681-151150832
  hypo

SEQ ID NO: 210405 - DNA, 49 bp, Homo sapiens
  chr5:153786052-153786101
  hypo
catttaaaatatttgttcagtgggccgggcgtggtggctcatgcctgta

SEQ ID NO: 210406 - DNA, 36 bp, Homo sapiens
  chr5:153798341-153798377
  hypo
ccctgtgcttgcaacgcttacgtgttgatcccagtg

SEQ ID NO: 210407 - DNA, 34 bp, Homo sapiens
  chr5:154218388-154218422
  hypo
ccttgtgatccgccagcctcggcctcccaaagtg

SEQ ID NO: 210408 - DNA, 42 bp, Homo sapiens
  chr5:156485285-156485327
  hypo
gaaacagggccgggcgcggtggctcaaacctgtaatcctagc

SEQ ID NO: 210409 - DNA, 102 bp, Homo sapiens
  chr5:156485567-156485669
  hypo
tccgtctcaaaaaacaaaacaaaaaaaaagaaaagaaaaggaaactggaagcagagaaccagcgtggctcaatggcagcacgagagcaaatgccagccttcc

SEQ ID NO: 210410 - DNA, 253 bp, Homo sapiens
  chr5:156895563-156895816
  hypo
ctgggactgaccttcgatcagactctccagggagagagcgtatggatcaagattttaaggaatgctggtctgggattctccagcttgttgcacacggaattattcgtctggaatggagatggtgcttctgcgccatgctagcctcttttctcccttcgtttcctagtggctgctggagaagttgccaactttggagcctacgcatttgcacctgcaacagtcgtcacgcctctgggagcgctgagtgtcctca

SEQ ID NO: 210411 - DNA, 287 bp, Homo sapiens; identical to SEQ ID NO: 200126
  chr5:157002817-157003104
  hypo

SEQ ID NO: 210412 - DNA, 1211 bp, Homo sapiens; identical to SEQ ID NO: 200129
  chr5:158634801-158636012
  hypo

SEQ ID NO: 210413 - DNA, 31 bp, Homo sapiens
  chr5:158884900-158884931
  hypo
caaagggggatcaaacgtgaggtttaggcca

SEQ ID NO: 210414 - DNA, 82 bp, Homo sapiens; identical to SEQ ID NO: 200130
  chr5:159343305-159343387
  hypo

SEQ ID NO: 210415 - DNA, 44 bp, Homo sapiens
  chr5:159669397-159669441
  hypo
agaccttcccttcctcggtcacagaggagttacaaggataaagg

SEQ ID NO: 210416 - DNA, 323 bp, Homo sapiens
  chr5:159686736-159687059
  hypo
gctccaacttggggacgtggtcttcccgatcctcgaacttacctgtcggggagcaggggaagcaggggttactggaagacatttacctgaacccaggaagctaacggcccaccttacagtgcctggacattgctggcaaagaagacagaaagcagacaggccagactgcggaggaataggagcacacattccagatctgtcaaacctaggcttgaatccacaagccatcacttcccactgggggatcatggctaggtgtctcaacctctctgtgactcagtttcctcatctgtaagatggaacctatacttcataaggctttt

SEQ ID NO: 210417 - DNA, 158 bp, Homo sapiens
  chr5:159776168-159776326
  hypo
gcatgtctatacctcgttggggtcatcctggtcggcatagattaggaagcccgtaaagaggctgtctgtccagtaagggtcatagaagagcccgttctgctctgagtagaagatctgcagccaaacttcgtcaccctgcttgagagccaggatggtgg

SEQ ID NO: 210418 - DNA, 148 bp, Homo sapiens
  chr5:159776588-159776736
  hypo
ggtatggccactgccacagctgcaggggcctgggaggcctggctcccccttcttgcccttgggccccttcttgcctggtgtgccatgcttcccgggggtaccgttgacccccttggggccacgggggccagcccgcccaatggccccg

SEQ ID NO: 210419 - DNA, 173 bp, Homo sapiens; identical to SEQ ID NO: 200134
  chr5:159826416-159826589
  hypo

SEQ ID NO: 210420 - DNA, 103 bp, Homo sapiens
  chr5:166477138-166477241
  hypo
gggattcccaacccccgggctgcggactggtgttggtccatggcctcttacgaacagggctgcatggcaggaggtgagcagcaggtaagctagaattaccacc

SEQ ID NO: 210421 - DNA, 56 bp, Homo sapiens
  chr5:167652913-167652969
  hypo
tcacagctgtttctccgggcataatagggttttgactgtgacgaggggcctcagtg

SEQ ID NO: 210422 - DNA, 48 bp, Homo sapiens
  chr5:167671586-167671634
  hypo
tacttcttcaatgggcgcctggctgggcttcagcgtggggccatgagc

SEQ ID NO: 210423 - DNA, 223 bp, Homo sapiens; identical to SEQ ID NO: 200143
  chr5:167718508-167718731
  hypo

SEQ ID NO: 210424 - DNA, 377 bp, Homo sapiens; identical to SEQ ID NO: 200144
  chr5:167718952-167719329
  hypo

SEQ ID NO: 210425 - DNA, 42 bp, Homo sapiens
  chr5:167847701-167847743
  hypo
ggccacttggctgcccgtagcagtaaccgcacagtcttccac

SEQ ID NO: 210426 - DNA, 178 bp, Homo sapiens
  chr5:167853641-167853819
  hypo
aagcaggaggtctccgcgggctcagcaggcatgggacgcaggctcagcttccccatcaccagcacttgcagtctcccagacccgccttgtcacccatcgccgtccccggcctgccatgccctggactctgtgcccctcaatgctgcgagcccttgccctgctccggtctgcccgcagg

SEQ ID NO: 210427 - DNA, 44 bp, Homo sapiens
  chr5:167897879-167897923
  hypo
cccactgaactatcccgcccaccctgggacggtccccagtgcca

SEQ ID NO: 210428 - DNA, 237 bp, Homo sapiens
  chr5:168112661-168112898
  hypo
cttccaagggcagggcagggcgggacacacctgcagggagatgttggcctggggtcggaccttggcggaggccagttccacgtaggagtctttgcccacgaagttgacagtgatgagcttctcgcatctggggccggcgaagcctggtgggcagcggcaggtgggctcctgctgcaccacgatgcactgggccccgttctggcactcgtactggtcgcatgggctggtctgcagtag

SEQ ID NO: 210429 - DNA, 42 bp, Homo sapiens
  chr5:168124523-168124565
  hypo
tcactccatctatgagtgtgcgcttcagcttcagatctggaa

SEQ ID NO: 210430 - DNA, 83 bp, Homo sapiens
  chr5:168184345-168184428
  hypo
ttttatggccttgcacgcagccaagttccacatttgtgctactcccaggctcctgaaagtgtctgggtgtgcaacccctattt

SEQ ID NO: 210431 - DNA, 44 bp, Homo sapiens
  chr5:168189441-168189485
  hypo
ctgagccaggaaggggtcaccgccaggagaccctgcccacgctg

SEQ ID NO: 210432 - DNA, 245 bp, Homo sapiens
  chr5:168189515-168189760
  hypo
agggagttcacgccgaggttggacttacaggtcggtgacatattcagggaggtggcttgggatgcggaccagcttctggttggagcagtccacaatcgtgccctcacagcgacacttctcggggcacacgaggtccatgaagcactcgctgctgaacctgctgcggtaatcctcggagcctgggaggggccaaagaggggacgtcagcgtcacccgagttccacgcacagccccaggttgtgggt

SEQ ID NO: 210433 - DNA, 150 bp, Homo sapiens
  chr5:168195266-168195416
  hypo
aaggtcaggaagcagcgtcagagagaggacaggagcgctcagaggaagcagcgtggagaagcggaagccggagcaggcccccactgagcgtgattagtatcaggagtggggttccactggaacacttccgaagattgcagccctgctgcc

SEQ ID NO: 210434 - DNA, 305 bp, Homo sapiens
  chr5:168199738-168200043
  hypo
ctgcattctgagtcagaaagcggggcccagccccgtaacctgattacctgagcagcggaacttcttgctcttgatctggctgatgcgcttgttggcgagtcggcgcgggctgctgcagcgggccccgcttgtctcgatggggttgtcctggaggtagtcggccagccacttcaagtggcagtcgcacacaaatgggttttgggctaagtggctgcgagagggatggggccgttaatcaggagtgacccacggcgtcttgctccaccaccaccaccctgcctcgcgctgggccctggcaatccact

SEQ ID NO: 210435 - DNA, 74 bp, Homo sapiens
  chr5:168244376-168244450
  hypo
gtgtgaactggccaactgtccgtcgctgtcgcagccaatccgagagccaggccaggtggcagtcgcagtacagg

SEQ ID NO: 210436 - DNA, 185 bp, Homo sapiens
  chr5:168284804-168284989
  hypo
ggtattaacttctaccaaagcgctccacggaaaaccaccgagcttaaaagccctcaacggtgtgcctatcaggtagagattcacgtaggagttcttaggcgggacaagactggctctccagcttctggatgcatacggggttagacacaaggtgtcgggccaccggggatccttctaccccatct

SEQ ID NO: 210437 - DNA, 319 bp, Homo sapiens
  chr5:169484411-169484730
  hypo
tcttaagggtaaggtgagagcgtgtttctgggtcttgcaatatttattctgctttcgggtagatgggaggcccggggacctggctgggtttctgccaagcttctccgatacccaggtttcataaatgtgtttgttgctttcctgcccttgccacccctctgcccacggacagtccatgtggattgagagaacctccttcgtgactgcatacaagctgccggggatcctgcgctggtttgaggtggtgcacatgtcgcaggtgagtctgggacattcgtggcagggccacccttcctccgatgggcagggcacagccagt

SEQ ID NO: 210438 - DNA, 171 bp, Homo sapiens; identical to SEQ ID NO: 200146
  chr5:169930945-169931116
  hypo

SEQ ID NO: 210439 - DNA, 36 bp, Homo sapiens; identical to SEQ ID NO: 200147
  chr5:169931484-169931520
  hypo

SEQ ID NO: 210440 - DNA, 84 bp, Homo sapiens
  chr5:170863092-170863176
  hypo
ccaggtgctggttgccgaggagaacgtggacttccgcatccacgtggagaaccagacgcgggctcgggacgatgtgagccgtaa

SEQ ID NO: 210441 - DNA, 185 bp, Homo sapiens
  chr5:170883647-170883832
  hypo
aagaaggggcggccgcggaagggccccaagacccgggagaaccagcaggacgtgcatttcatgaagcgctaccccaaggggcagccggagcttcagaagcccttcaagtacacgacggtgaccaagaggtcccgtcggatccggcccacacaccctgcctaggccaccccgccgcggcccctcag

SEQ ID NO: 210442 - DNA, 276 bp, Homo sapiens
  chr5:171523262-171523538
  hypo
ccacatgccatcttacgttacctgcagcgtgggagtctgcaacctctgagctggcaataaattgcctgagccagagtcctggccttccctgcccctcccacaccagcagggccagctgagatcctgtcctcccagcccccgctaagccccactctccctggccttacggaggcggcatccacggcgtcctcctcttccccctcatcccggccgtcttcgatctcttccatcacctcggccttggcctcagccaccagctcccgcagagccttgtta

SEQ ID NO: 210443 - DNA, 188 bp, Homo sapiens
  chr5:171533431-171533619
  hypo
agggaaaaagaggcacgaagggcccgggggggctcagaaacgcctgaagacccccaggccccaacctctcctttggagctagcagcaccaggagaacgctaccactgcacctccccagccccgtccaccacatattccagccctaatcccggcgcaggcaccccggcaggtggccctgcccctgcccc

SEQ ID NO: 210444 - DNA, 85 bp, Homo sapiens; identical to SEQ ID NO: 200154
  chr5:171541758-171541843
  hypo

SEQ ID NO: 210445 - DNA, 45 bp, Homo sapiens
  chr5:171724015-171724060
  hypo
aatcccacgggcgtacggcttcaggagtctcgaatcccacgggcg

SEQ ID NO: 210446 - DNA, 506 bp, Homo sapiens
  chr5:171766370-171766876
  hypo
gctctggcctcctgctgtcccgggctggagggatgtgtttggctggcatcatcggcaaaatcacgcccggaggcttgggagtggggccccggagctgctccgtcctctgccgctcccgctcccgctccagcagctccccctccgacttgatgatggattctttccgcggagggaggctgggcttctcctccatgtcggggtctgagatctcctcgtagcctgctgacgcagacatgtctgaagatgccttcctcaggacatccttactgcccttccagtctttagaccatggcaaccccgagtccatgacaccatgcggtgcgtcaggcaggggccgggaggggcccgtggcttcgctgcccgtgttgttctccagcgctgctgcttcccccagccggagctgggtcacctcgtggggcaggggagccagaaagttgggtctcgacgcgttgctcgtcttcttgtacttgtcaatgaaggtggccggggcccacccttccttatct

SEQ ID NO: 210447 - DNA, 72 bp, Homo sapiens
  chr5:171769329-171769401
  hypo
tgtcacctcattttacgcatgcagaacggagcctcaggagagctgaggaacacacagcgggtcctgtagaag

SEQ ID NO: 210448 - DNA, 92 bp, Homo sapiens
  chr5:171777275-171777367
  hypo
tgtgaggatgagggacgatgtgagacgccttgagcacagagctggcacacaggggccctgattatcaggagcttgggcgggtgtcactcact

SEQ ID NO: 210449 - DNA, 201 bp, Homo sapiens
  chr5:171821579-171821780
  hypo
tcaattggtatcaggcgtttgacagccacgtcccggatgtggcttcgtctgaagagaatcttacctgcagaagatgagagcaaagacagtgttgtcagggaacagggacaagctctcagcaacctgagagggtgtggacatggcggttcctagggtaggtctgagtggtgccaaaattcctggctgcgatcaaggtacccc

SEQ ID NO: 210450 - DNA, 44 bp, Homo sapiens
  chr5:171858873-171858917
  hypo
ataccttatttaggccgggcgcagtggctcgtaatcctagatca

SEQ ID NO: 210451 - DNA, 333 bp, Homo sapiens
  chr5:171916860-171917193
  hypo
aggctctccctggagcgggccagctcagctggggcataggcacttgaggtggccaggccagtcacaagtccaccgtggagtggggtcagtcaatttccctgactgcctcaaggacagtgggcggcaaaagccctgcgcccctgaggcaacaggaacatggagccttctccgtgtgcccgcgaggttggaagatgaagcgggtgtcggatcataggtgaggatggaggctcctgcgtccacacgcaccccacagtcgggctacctgacctggggggagaggtgcaactaccccagtgctttaaatatcaccctgtggtggccgggtgtggtggc

SEQ ID NO: 210452 - DNA, 32 bp, Homo sapiens
  chr5:172062315-172062347
  hypo
taaaagtgacttgctcggccgggtgctgtggc

SEQ ID NO: 210453 - DNA, 339 bp, Homo sapiens
  chr5:172074242-172074581
  hypo
cagagagggaagagggagggcgccaggtcgcagcccgacaggtagcacacgctcacctgggcagtgtcgcggggtggtccgagcttctgcacacctgccctgcactaggccctttattccatcccattgaagccgtcatgagagccttgcgaggcagtcttctcatgtcacagaaggggaaactgaggctcagaggggtagtgagacctgcccggcccaggtggccaggaagtggcagagtgaattggatcccaggcacgctgggctccacaccccttcccctccatcccacggggcactgcaccctggggcctcttgcggctcctcttgctgacttgc

SEQ ID NO: 210454 - DNA, 94 bp, Homo sapiens
  chr5:172097651-172097745
  hypo
attcattcattcattcgctcactcattccttcacttcctagtttatttgctcattcattcattcactcattcactcattcgcacatgtattcat

SEQ ID NO: 210455 - DNA, 39 bp, Homo sapiens
  chr5:172105004-172105043
  hypo
tcctgggcccactaccgggcccctcgctttcagcccagg

SEQ ID NO: 210456 - DNA, 483 bp, Homo sapiens
  chr5:172113599-172114082
  hypo
aagccctgcattctcggggttgccccaacagagcccacctgagagagacattgttaacatatgtcctcttctccctttcggcagtgacggcccccagctccccgctgagccccccggtgtcccccgtgttctccccaccggagccggcaggcatcaagaatggcgagtgcacggtgtgcttcgatggcgaggtggacacggtcatctacacgtgtggacacatgtgcctgtgccacagctgcggcctgcggctcaagcgacaggcccgggcctgctgccccatctgccggcggcccatcaaggacgtcattaagatctacaggccatagcctagcctgcccacgggccttggccggtgcaaggtcacctttctgaaggccccctgggctgggcaaccacatggctgccagggagtccacgggcagcggccatctctccagtggtgggcaaggtgtgacagtcgtggagcgaggcccacagggc

SEQ ID NO: 210457 - DNA, 199 bp, Homo sapiens
  chr5:172264179-172264378
  hypo
tcttgcccttccctacggatacttctgattttcttactgcctgtagagcctggtgcaactgagttctgtgttttcctgtctgtgaaatgggaatgaggagagtactcaccgaagtagaacagttgagggatgaggcagtgcggaaagcatttagacacagagtaagcgcctcatccattttggccgccatatttatttg

SEQ ID NO: 210458 - DNA, 208 bp, Homo sapiens
  chr5:172346278-172346486
  hypo
gcacagatgaacagacgtacacgcacacctcctcactgtgggccccccgcccccggggagatgcaaccacctgggctgaaaaaatatatgtaccccagatggtgaccaagaagggatcgtgcttattcaagcacctggagtgacaacccacgagacagccctgccaccaagccctcccacctcttggcaaacacgcccaagactgcag

SEQ ID NO: 210459 - DNA, 132 bp, Homo sapiens
  chr5:172367589-172367721
  hypo
gccagttgggccagtatgaccgggatggtttttgcccaccaagaagtaccggatggcgatgacaccctcccattgcgtgctactcaaaacctgtcattcttggagagttgcgcagctcccttaactcaagtg

SEQ ID NO: 210460 - DNA, 446 bp, Homo sapiens; identical to SEQ ID NO: 200158
  chr5:172385502-172385948
  hypo

SEQ ID NO: 210461 - DNA, 34 bp, Homo sapiens
  chr5:172454588-172454622
  hypo
atatatatgtttatacgtacgtgtgggtttttgt

SEQ ID NO: 210462 - DNA, 162 bp, Homo sapiens; identical to SEQ ID NO: 200164
  chr5:172665286-172665448
  hypo

SEQ ID NO: 210463 - DNA, 209 bp, Homo sapiens; identical to SEQ ID NO: 200165
  chr5:172665949-172666158
  hypo

SEQ ID NO: 210464 - DNA, 462 bp, Homo sapiens
  chr5:172744637-172745099
  hypo
tgcagaattcaccaggcacccctgagaccccacggccccaggggtctccatctcacctgtccgttccgcgaacacacacctcgatgaagtccacagtccccacagaatcctgcgtgtgacatcccccctctctaatggtaaatgttttggaatgtccatagataagaaaatggacggcgtggaggaaagatttcgtggccaggcctttcatttcacctccggatatcagaatactcagactgttcgtcttcccactcgctgcttccggaaggtccctgagccccaaggcccccgactctgcctcgggcatgggcgtttgggtggctcttgctacctcgctcacccttggcacctcggccagtctccctactgctgggctctgggaggtgatgtcctgcttccccgtggtgggccctggagagcttggttctgtccacctggggctggcgctcggggggcgcc

SEQ ID NO: 210465 - DNA, 259 bp, Homo sapiens
  chr5:173180509-173180768
  hypo
gcagtgcgggagcgtaaccggatctgcttagagaggccccagcttgcgccattcactgggccagaaacctgagctgctcctgagagggctggaaaacagcctggggcttggagattggctcacactatcccagctattccaacgcagactaaatggcttctggcccttgttaatggcgccatctcagatcagtgccaggggaaccactggtcatttgggggcactggagggagcagggtagaggcgtggggtgatggtg

SEQ ID NO: 210466 - DNA, 57 bp, Homo sapiens
  chr5:173415949-173416006
  hypo
ccccccatccccacgcggtggtctggccctaaccctgtcaccgcatccctagggggg

SEQ ID NO: 210467 - DNA, 47 bp, Homo sapiens; identical to SEQ ID NO: 200180
  chr5:175084696-175084743
  hypo

SEQ ID NO: 210468 - DNA, 75 bp, Homo sapiens; identical to SEQ ID NO: 200181
  chr5:175084744-175084819
  hypo

SEQ ID NO: 210469 - DNA, 166 bp, Homo sapiens
  chr5:175139689-175139855
  hypo
ataactcaatgtttcggaggtctttgcagaagtcagtgccgtgtccctgacctcctcattcaaggtcacagagcacaaagtgcttctcacgtcctgagatgccactgggcaagctgctgcactggtctggcctgatcttggccctcaccaccggggccatttgggg

SEQ ID NO: 210470 - DNA, 240 bp, Homo sapiens
  chr5:175777488-175777728
  hypo
taagagctcgggagcgagactaactccacagcccccaactaactgagctggtaacttcaaaaccacagccacatttcaagccatgaacactgaaggttttgttttttcaaagttcctaagagcttacgtggagtgcttcggccactcgaaggtacttggtctcctcggtggtgaggcccttgtggggtgtgtagccagcatctctcagccctgcctgtcgctcaaaatgctgaatgcttt

SEQ ID NO: 210471 - DNA, 105 bp, Homo sapiens
  chr5:175831152-175831257
  hypo
ttgctgggtgtgactcgccacatagtagctaatagggcccaaagtcacttctgtgacgcatagtttgtgtgcctgcttgtcttcctctcaagacaagactagaga

SEQ ID NO: 210472 - DNA, 457 bp, Homo sapiens
  chr5:175831326-175831783
  hypo
caccctcagctcgcctaggggctgggtcaggagtttgtgagaagcgtccggggctgcagagcacttttttccacagccctttggggcagcggagcggagcctctaattcgcattttacaaatgagaagccaggctcagagtagttaagtgactagcccacagccagccagctgggaaaaagcagaaagtgaagtccaggtcttctgactccatctaaacctccgctgcagcctgcagtctgggtgtgggaacagccttaaggaaactcagcccccacggtgtcctgccccagtcccaaggtgccaagcctggccaaactgggcccacatctccgccacctgccaccagctgcaaggcccactgatgcactctagtgggggctatgcagggctcacccgaaacctttggcctctcctggcacgtccctttgtgcagcaggtcccgggctccggtgaac

SEQ ID NO: 210473 - DNA, 36 bp, Homo sapiens
  chr5:175871772-175871808
  hypo
agatgacaggcatgagccaccgcgcctggccaacac

SEQ ID NO: 210474 - DNA, 204 bp, Homo sapiens
  chr5:176003232-176003436
  hypo
agtgggagcctggatcgagtgacggtgtcatgtggtgctgggtggcggtgctggtggtgcagggtgtgatggcggagaatgggggtgctgggtgctctctggaagcctgtgttggtaagcagtatcatcctctgggcgatccgtgtggggctgaatagaaggccatgctgagtggaggctgacgtagaacgtcagatgatgctg

SEQ ID NO: 210475 - DNA, 162 bp, Homo sapiens
  chr5:176012687-176012849
  hypo
caggccagagaagaccgatcaggcattctgggtcaggagcagggaaggggactgagcatgggggaacacatgggagagaagctgcggggcatggggttgaggctgcggggcacggggttgaggctgcggggcacagggttgaggctgcggggcacggggttg

SEQ ID NO: 210476 - DNA, 76 bp, Homo sapiens
  chr5:176016153-176016229
  hypo
cgaggccgacgtgttcgctgggagcattcagtaactgcgggcggccccgggagggaggttgcggggaggggcccga

SEQ ID NO: 210477 - DNA, 209 bp, Homo sapiens; identical to SEQ ID NO: 200186
  chr5:176057164-176057373
  hypo

SEQ ID NO: 210478 - DNA, 97 bp, Homo sapiens
  chr5:176066073-176066170
  hypo
ttacaggcatgagccaccacagctggcctgggttttaaacaaagaagttacgtgaccagattaatattttaaatgatccccccgaggaacctggaga

SEQ ID NO: 210479 - DNA, 51 bp, Homo sapiens
  chr5:176077110-176077161
  hypo
gaatccccggcatggcggcgatcagtgccggtgggtcgtggaggtgtttgc

SEQ ID NO: 210480 - DNA, 133 bp, Homo sapiens
  chr5:176225693-176225826
  hypo
caggaattggttccaggactcggggagccgcgcggggcaggagccaggcccacagacagcaagcagcgttctgcttggctgatccacgatgtcggggctgcggcatctccgcttccgcccggagagtgacggc

SEQ ID NO: 210481 - DNA, 164 bp, Homo sapiens
  chr5:176544212-176544376
  hypo
ctgtcccagacgcccggaccctgtgtccttctgataaattccccctttttctctcgctggcttctggggccatgtcctttttaccccctctggtccaaagtagtgttttaggagatttggaagcaagcagaaccaagttgaaattacttgctccgctgggcgcg

SEQ ID NO: 210482 - DNA, 207 bp, Homo sapiens
  chr5:176558644-176558851
  hypo
tcacacagggcaacgccaaaaatggcctttctcccaggtgggctcaaagttaacagaaggcagtgagtaaacagtccactggggcaataactatgcacatttactaagccatgggaagaatagtagtcacgtggccctcgagggcggtgccctcagcttgagatggagttaactccaaatctaatcacagaaggctttctggaggag

SEQ ID NO: 210483 - DNA, 158 bp, Homo sapiens
  chr5:176558908-176559066
  hypo
cgccctagggaccaggtaactcctgaggtgagcttcttggtggggatcaagcccagggggcgacggagtccgggctgggggaagggcccgaggggctggagtcgcaagttcaggcccagcttgggctccctgtcccgcccttccgctgtcttggggga

SEQ ID NO: 210484 - DNA, 97 bp, Homo sapiens
  chr5:176663884-176663981
  hypo
gagtgcagagatgcacgaacacggttcactgcagccttgacctcctgggtttaagcaatgtttccgtctcagcctcctgagtagttgggaccaaagg

SEQ ID NO: 210485 - DNA, 76 bp, Homo sapiens
  chr5:176674064-176674140
  hypo
taaacttgtaaaaccggagagtacaatatcaagtcaacatatgatctgaaggaacatagatactgtcctataaaag

SEQ ID NO: 210486 - DNA, 162 bp, Homo sapiens
  chr5:176694903-176695065
  hypo
atacatgttctctgtcgaaatttttttttcttttgtgtattttgtgaaaagtttttttttttttttttaaatgaaaagacagtaataatctcacaaggcaggcgcattgttaacatttcggcatatgtactcccagacgtaccaatacgcagttatgccccc

SEQ ID NO: 210487 - DNA, 152 bp, Homo sapiens
  chr5:176757377-176757529
  hypo
gtggtgccgatgacgtgattgtagcagccgtggagagctcgtctctgggcctcggctctacacacctggcctaaagccctccagcacctgacaggtgagcgtcgtggatgaaatgagttatgtgcctcaatcgctccgaagcagggcctgtc

SEQ ID NO: 210488 - DNA, 196 bp, Homo sapiens
  chr5:176764238-176764434
  hypo
ggtcggtcatcacctgcagggcccagcacgctaagcacctcgcaggacagcagcctgccctcctgagcctctgtgggaccagcacagggccaccagctgccacccccaccgcctagcctgctcaccgtcagacggccccgggagtagcgcacagccaggaaggtgtcgtgatcgcggttgcggaagtcagccgtgc

SEQ ID NO: 210489 - DNA, 76 bp, Homo sapiens
  chr5:176795049-176795125
  hypo
ggcccctgcaggatggctccaaacaaggcccaccagtggggaacaggcttccgcagaggatgggtgagggcggggg

SEQ ID NO: 210490 - DNA, 147 bp, Homo sapiens
  chr5:176795288-176795435
  hypo
acaagatgctctatgggctagagtcactactcaggcccatttacgtggtggccctcattccaagttgctgtccttactgcgtctcccagcttgctctgcgtagccaacccttcagcctccttacttgtctcactacattggtcccca

SEQ ID NO: 210491 - DNA, 149 bp, Homo sapiens
  chr5:176901647-176901796
  hypo
aaaccgtccacagcgcttagaagccttttccaccactacaaagcctccaacctcgacctccctgagcaaacttcacctggtcccaaccgcaccgcggaggaggaggtggttctagccaggcctccgagttctgcgttgggtaattggct

SEQ ID NO: 210492 - DNA, 360 bp, Homo sapiens
  chr5:176919056-176919416
  hypo
ttggaggctacggggagaggacgactcaggtttcaaggggcccatttgggagtggcgatctcagtccacgcaggaccgagggctgaccgagtgcgggcgagcacgcagcgccggcggcgggaggcagcaggcggacagacaggcggacagacaggcggacatgcgtggtgccaggaccgtgcagcagcccctggctcaactccagggccctagacccgccttagctccggtttctgccctccactcccggccagggattggggtaccgagaatgtgccaggagggcgagcaggcctggccgtccaagcccacaccgcccaccgcccggatgtcccggccagcctcgtaccttctgcggtt

SEQ ID NO: 210493 - DNA, 279 bp, Homo sapiens
  chr5:176965874-176966153
  hypo
cattcagggacccctgtcagcggttacctaccgccactgcatgttctcgacctgtctgcctttcatcttcctccatgctctttcggcaactctggcagacccacagaggcatctcgcctaggagattcttgacgagctttggcatgaagtcagggggcagcttctcaccctgcaacaccagtccattttgagaagggccttcttcccagcctttgcgttcccggtgacacagcaggcagcaagtctgcacaggctggctggaggcgggggggacctgtc

SEQ ID NO: 210494 - DNA, 43 bp, Homo sapiens
  chr5:176976123-176976166
  hypo
ttgtgttaagcataccgcacttgttggaccctaacattaacca

SEQ ID NO: 210495 - DNA, 43 bp, Homo sapiens
  chr5:177031060-177031103
  hypo
tcccaggtgcttggggtagacgagttatgtgcagcctcctcgt

SEQ ID NO: 210496 - DNA, 39 bp, Homo sapiens
  chr5:177031565-177031604
  hypo
ccctcggcacccctgcccgggctcaggcttctcaggccc

SEQ ID NO: 210497 - DNA, 265 bp, Homo sapiens
  chr5:177393139-177393404
  hypo
tccacaagcagttgcgtttcctttagctggtatgagtttgtgcgcgtgggcggtggggtgtgtctgtgtggggtgggatttgtgtggggcggccgtgtgtctgtgcccacgtctgtttccgctggtgttatactccgcctagacagcagagttgcaggtgtaagctttctcaacaaggaatgccgtccccattactccacagcgtatatgtggagcctaaccgggtggactgcaaggcagttccgaccctcaccactcagggtta

SEQ ID NO: 210498 - DNA, 201 bp, Homo sapiens
  chr5:177482724-177482925
  hypo
atccggaagctcatcaaagacgggctgatcatccgcaagcctgtgacggtccattcccgggctcgatgccggaaaaacaccttggcccgccggaagggcaggcacgtggccataggtgagcagaagggtacagccaatgcccgaatgccagagaaggtcacatggatgaggagaatgacgattttgcgccggctgctcaga

SEQ ID NO: 210499 - DNA, 130 bp, Homo sapiens
  chr5:177548899-177549029
  hypo
catggacatgtaccgccgcaaccaggcactggagcaggaactgcgggcactgcgggagccccccacaccctggagtccccggctcgagtcctccaagatctgaggccagcagagcgagctgacagcagca

SEQ ID NO: 210500 - DNA, 48 bp, Homo sapiens
  chr5:177637070-177637118
  hypo
ccatcctagctcctgcgtatgctaaatggtccacgggcccctgtgccc

SEQ ID NO: 210501 - DNA, 274 bp, Homo sapiens
  chr5:177650747-177651021
  hypo
gagccctcacctgtcgccaacagtcttccctctgttgtcaccgtaggtaacacacctctctctcctatgtctgcgcctccactccatctccaccatactgcccccgtcaggcctccccacagctcacttggggcctgctggccacttcacggtcacctgacctcaagccgccgcattccaatccatcctccacatagccctggagtcagagagcagccccggccccaggtcttagcgctctcctgcttaagactctggtggttcccgggggcct

SEQ ID NO: 210502 - DNA, 213 bp, Homo sapiens
  chr5:177653975-177654188
  hypo
aaaaaagaagaagtgatcatttttctaagtgctacgatggatgccctgggagagcgagccagagggggcatgtttatgggctgagctgcacccccccacccccaatttatgtgttgaacccctaatccccggtagctcgcaatggcccgtatgtgaatggatatggagataagagaggtgattacattaagatgaggccgtcagggggcccct

SEQ ID NO: 210503 - DNA, 297 bp, Homo sapiens
  chr5:177708331-177708628
  hypo
tcacttgattaattccaaaccgtccatccgagtccttcatttcaaaattggtcccaggccgaggccccgtctcacagaccacatttcagcccagagctctcgcagtcccctggggccccggctgtcgctgctcccaggactgaggccggagatgaagtgcagtcaccgctccctcgactccagaggggcttgggcacggcgctccggggcccaggaggtgccgtgcgtgtggttttgggtgtgctcagagctgacctgtgacgcctgccagccctcgtttctgttagtcattcaggc

SEQ ID NO: 210504 - DNA, 90 bp, Homo sapiens
  chr5:177852084-177852174
  hypo
ccagcggagaaaaacgcaaagcagcctgtaaaatccaaagcaaagggtaaagggttgcggccggtttggtggctcatgcctgtaatccca

SEQ ID NO: 210505 - DNA, 120 bp, Homo sapiens
  chr5:177852474-177852594
  hypo
aaataaagccaatggtggctgtttcccgcgctcacctctgtttcagtttcctcatccgcaaaaaggtggatctgaacattgacaccacagggcagttttgagatgtatggaaatcaaacg

SEQ ID NO: 210506 - DNA, 53 bp, Homo sapiens
  chr5:177875102-177875155
  hypo
tgctagtcacagtccgttttgttctgttagtgctagtcgcagtccgttttgtt

SEQ ID NO: 210507 - DNA, 31 bp, Homo sapiens
  chr5:178195542-178195573
  hypo
cttcgtgtggtgtcgccggccctcccgctgt

SEQ ID NO: 210508 - DNA, 564 bp, Homo sapiens; identical to SEQ ID NO: 200196
  chr5:178287036-178287600
  hypo

SEQ ID NO: 210509 - DNA, 166 bp, Homo sapiens
  chr5:178289146-178289312
  hypo
atttgttctctcactcgcacagtagcacaacaattacaattcttgttttacatgtgaggaaactgaggctcagaaaagttaagtaacctgagtacagtccaagtatgcctggctctgagttccgtcggaccacccagtcgtccctgtggtgcgtctttcagagtat

SEQ ID NO: 210510 - DNA, 45 bp, Homo sapiens
  chr5:178295550-178295595
  hypo
ttccagtgaggaccacgtgggaaagacactcggtgctgtgagagt

SEQ ID NO: 210511 - DNA, 376 bp, Homo sapiens
  chr5:178295949-178296325
  hypo
gtgacagagcaagactccaactcaaaaaaaaaaaaaaaagaatggtgttcgtgaaggtccaaagaagtaaagccagtgaggagaaggtagagccaggcaccgaagagagccgcgggccttgtcatagagtttggttggtgcttgagagctaagcataggctctgaggagccataagtagcccagggcaggcccaggctgcattctgcagctgccagcgcatgtgaggaacctgaccgccacagtgcagggcttgtcaagtccagagggctcagtgatggccccttgtgccacgggcccagcgaggagctgcacggcaggcagctttggtccccatagcccctgtgctggggagagctttctcgtgatgatagcttg

SEQ ID NO: 210512 - DNA, 214 bp, Homo sapiens; identical to SEQ ID NO: 200197
  chr5:178423619-178423833
  hypo

SEQ ID NO: 210513 - DNA, 358 bp, Homo sapiens
  chr5:178551488-178551846
  hypo
tgggcctcggagcccgggctaccctcagtttcctgggattccagaccccgtatcatgcagaagcctctgcctgtgcagtgaagacacacattccactggtttcttagtacagcactgaccacgtggcagccactggcgccgtgaaacccacaggatgtggctcaggacaggagctacatccaggcccacgggccgaaaggggaatgctctggtcacctcagtcccacccaagctcagtttgggagctgaggacacgggatcaggggattgcttacctgggaccagggcccggctcgccaatgatcagggcagagctcgctgctgcaggcccggcggctctcaggccgggcgtcattgc

SEQ ID NO: 210514 - DNA, 205 bp, Homo sapiens
  chr5:178551923-178552128
  hypo
gtccaccctcagttttggagctgaggacacgggatcgggggattgcgtacctgggaccagggcccggctcgccaacgaccagggcagagctcgcggctgcaggcccggcggctctcgggccgggcgtcattgcagtgcttggcgtgcacggagcgggtggtgttgtcgtgtagcggctgaatgcagcgcacggagcgcacctgca

SEQ ID NO: 210515 - DNA, 82 bp, Homo sapiens
  chr5:178564804-178564886
  hypo
gcgtcgccgtgctcgaagtacaggtcccactggcggcactgctcctcgcggaagtcagccagggagtcggggcagtcctggc

SEQ ID NO: 210516 - DNA, 75 bp, Homo sapiens
  chr5:178576526-178576601
  hypo
ccaggaggatggaaggagccacgcagtggtcctcctgtcccaactgggcaagacggtgcctaacctggaaatgga

SEQ ID NO: 210517 - DNA, 255 bp, Homo sapiens
  chr5:178585631-178585886
  hypo
ctgggctgggccaaggctcccggggccccttgcatggccaggggctcatttccagcttcacgcctctgtggccctgcatgggtgaggctcaccttgcatgccggaaggcccaaagtcctgccgtgtgaggaagatggcgtgatcgtggtattcatcgtggcccgtgtctggcttctgctggaggtaggcccagcggcagacattctccaggctctgagaggggttcccgatctcgatgaggctcatggactgcag

SEQ ID NO: 210518 - DNA, 110 bp, Homo sapiens; identical to SEQ ID NO: 200198
  chr5:178594471-178594581
  hypo

SEQ ID NO: 210519 - DNA, 120 bp, Homo sapiens
  chr5:178652528-178652648
  hypo
taacaggcagacacaggcggctggacgtcgagaggagcgcatgaggggaggaacacacaggcggctggacgtcgagaggaacgcaccaacgagcaccagcacgctgcaggccaccgaccg

SEQ ID NO: 210520 - DNA, 137 bp, Homo sapiens
  chr5:178665271-178665408
  hypo
ctgctgggtgtccacggattcacccccagctactgtgtaggggccagctcccctcagggactgctcctgggagaccgtgggagtcaccgcagctccctgctctgtggagcggccacgctagcagaaggaacagaggg

SEQ ID NO: 210521 - DNA, 198 bp, Homo sapiens; identical to SEQ ID NO: 200199
  chr5:178770545-178770743
  hypo

SEQ ID NO: 210522 - DNA, 146 bp, Homo sapiens
  chr5:178854898-178855044
  hypo
ctgggacctgcagagcacagcgccttgtgtagtctcggccccaggccaaggctgcgcactttacagccttcagctcaccgaggtgctgcaccagctccgaggtcagtatcgccatcgcaggccgggcgcgggggctcacgcctgta

SEQ ID NO: 210523 - DNA, 162 bp, Homo sapiens
  chr5:179023533-179023695
  hypo
atttgcactcttgctggtgtcgcatccaggttgcagcactcggagcgggcgaggcagggggctgaggagcggagccacaagctgcagcaggagctgggcgggaggatcggcgccctgcagctgcagctctcccagctgcacgagcaatggtaggggccctgc

SEQ ID NO: 210524 - DNA, 46 bp, Homo sapiens
  chr5:179030602-179030648
  hypo
ctcaccagaagcagacgtggaacagagctggcgtggagctggcttc

SEQ ID NO: 210525 - DNA, 43 bp, Homo sapiens
  chr5:179106627-179106670
  hypo
ttctaggcagagggaagagccgagcagggctttctttttcttt

SEQ ID NO: 210526 - DNA, 149 bp, Homo sapiens; identical to SEQ ID NO: 200200
  chr5:179234473-179234622
  hypo

SEQ ID NO: 210527 - DNA, 752 bp, Homo sapiens; identical to SEQ ID NO: 200201
  chr5:179245837-179246589
  hypo

SEQ ID NO: 210528 - DNA, 203 bp, Homo sapiens
  chr5:179293876-179294079
  hypo
aggtggcattatggtcggttttgcaagtgtgctgcatgtcaccagctcgactgcgaaagcccagggcctagcatgctcccatcacctgggatcagatgctcccaacaggctttaaacatagcacagggatgagttctaacaggcactcaacatgcgtgtttttccttaacaaaaaacgtgacgtggaacatgaagatttttcc

SEQ ID NO: 210529 - DNA, 123 bp, Homo sapiens
  chr5:179401180-179401303
  hypo
tctctgtctctatggaccctcggctgcagtggagcctcagacatctgcagcggccggccccccgctttagctcctgaagtggcatggaaacatacgttcatccacgcggcaactccacttctg

SEQ ID NO: 210530 - DNA, 60 bp, Homo sapiens
  chr5:179401333-179401393
  hypo
atggccgacctttaagaggtctaataagaccaggtgacagttcctcggtttctaagacct

SEQ ID NO: 210531 - DNA, 42 bp, Homo sapiens
  chr5:179401683-179401725
  hypo
cagtacttggagggcgatggctttgaaagagagttttaaaaa

SEQ ID NO: 210532 - DNA, 228 bp, Homo sapiens
  chr5:179401775-179402003
  hypo
cactggaaggagcagccagccaagagaacgaggccccgaggaagggagagagcaggcacgcagcggcgcggggaggagcggcatggaccgcagcagacggcctctccggcctgcgcacccgggtcagcacgctgagggaattaaacccattgcttcctctgggcagtcaatggtgaagcggtcctctgagagtgaagaacaagcgtgtgagttaaggtgttgaagtag

SEQ ID NO: 210533 - DNA, 345 bp, Homo sapiens
  chr5:179402748-179403093
  hypo
cagtaccatagagggtgcagcgaaattccgtgaaccgtgccaaaaattctaacattcacaagcagaccacaaacacaaaccacttctatggtggcaggtgcagcgcagaaatggttcagatcaaccatggcctggaccttggtggcaggcgtggctttgcagcacgagaatcgggcgggaacttataattaaagcgcatatgcccggcctccacccgggatgcttctgaaagcctcccactgactctgatgcagtcaggtctggaaagcaatgaactaaattttaaaaagagggccagacgtcaggctcatgcctgtgatcccagcacttcaggatgctagggtg

SEQ ID NO: 210534 - DNA, 170 bp, Homo sapiens
  chr5:179473085-179473255
  hypo
gcatctgaggccccacgagaatctgtgcgcggtggaccgcggcgcgtgcaggcccacagtgctgagggacccagcgcaccctccgcagctgctggcccaggtgctaagcccctcactgaccggggcaggtgcagggcccgccaagctcacacccacgcagaactccaggg

SEQ ID NO: 210535 - DNA, 252 bp, Homo sapiens; identical to SEQ ID NO: 200202
  chr5:179498002-179498254
  hypo

SEQ ID NO: 210536 - DNA, 504 bp, Homo sapiens; identical to SEQ ID NO: 200203
  chr5:179498363-179498867
  hypo

SEQ ID NO: 210537 - DNA, 115 bp, Homo sapiens
  chr5:179643356-179643471
  hypo
tcaggcaccttggcgaacaggctggacacctgggcacacgtgtggcaaagtttttaggttcacaggacagaaaacctccaagcaagagtgagcggctgccgtgaacgtcggcagg

SEQ ID NO: 210538 - DNA, 164 bp, Homo sapiens
  chr5:179726331-179726495
  hypo
tagtggaggcagtgccgccctctccttgcaccgccagcatgcactcaccctccactttcgaactaggcagtgtatttgggggatagatacacaggtgaaactataaagaaaagcaagggaacaattggcacaaaagtcagaatggccgtcgcctcttgggcata

SEQ ID NO: 210539 - DNA, 141 bp, Homo sapiens; identical to SEQ ID NO: 200208
  chr5:180018679-180018820
  hypo

SEQ ID NO: 210540 - DNA, 314 bp, Homo sapiens
  chr5:180036577-180036891
  hypo
catggggcccctctgcccagcgctcactgaccaggcccgggacccccgaacctgccaccgaggaggagccgtccttccactggggtttctgcgctgctgaggaggggaggcctcgtgtgggggtgacgagggcataggacagaaagcagctgtgagtcgtggcatcgcaggagggcccaaatgtgcccaaggctcaccctggacttgcactttcaaaggacagtcgttgggttctgccatttgccttacgaattcctgacgctgcctcccctgaggcggccccagccctgagccgagagcgcagcccccaccct

SEQ ID NO: 210541 - DNA, 207 bp, Homo sapiens; identical to SEQ ID NO: 200209
  chr5:180047119-180047326
  hypo

SEQ ID NO: 210542 - DNA, 64 bp, Homo sapiens
  chr5:180057671-180057735
  hypo
ccttgcagtagggcctggcgtctgtgccctcgcagtctcgcaccacccccgtgtcctcgctgtc

SEQ ID NO: 210543 - DNA, 575 bp, Homo sapiens
  chr5:180218530-180219105
  hypo
gcacctaagagggaaacacaggcaggccgatgcagcctggggactgtggtcccacctcagctcatgatgtggcaaggaggggcccaggaaggacaggcaggtgctaattccagctaggatcatagccctcccacgtcagtgggggcgccaggtggacacggcggccccggaactggaaggtgacaataccccggtagccagctctcggaacccccgacttaaggtcatccatgacacccagagccttggcgaaagccttgaagctgtccctgcccgtatactgcacccgcacctcccccagctccttccggtcattggtcctcactttctccacctgcagctggggagcaccgtagacgcgggcgaggaaatctcggtcataggcctcccgctgcaggtaagacaggtccagctgggtgaagtgcacaaactgctggttcagcttgataaacttgaggtgctggtcaaagaactgcccgtggctcacacccttgcggccaaaggtcatcgttcttgagatctcagggcgtatgcaggcccgcccctgccgctgctccggccgccgcatccagtcg

SEQ ID NO: 210544 - DNA, 222 bp, Homo sapiens
  chr5:180219823-180220045
  hypo
ggctggcggggtcgccatcgagagcgctgactgagggtggcctgccaggtgctgggcgcgtccagaagaagaggagcagcagggcattccaggccacaaagaggatagcgccccacagcacaagccctgcagactgcttcttcagcatcctggcccccaccggggagggcaggccaggggacggttcaaggctgccctgggcttgcccggctcccttgcccg

SEQ ID NO: 210545 - DNA, 142 bp, Homo sapiens
  chr5:180255234-180255376
  hypo
gtgccctgccaaacctctggtggtaaggcttcgattactaaatggaagaaagggacacagggtgttttggagttgacacctagctctttggaggtgactcagatcactcaggagagtccgtaaggcccggtgggcaacaccc

SEQ ID NO: 210546 - DNA, 415 bp, Homo sapiens
  chr5:180326156-180326571
  hypo
tcagaacagcgcagtttgccctccgctcacgcagagcctctccgtggcttccgcaccttgagcattaggccagttctcctcttctctctaatccatccgtcacctctcctgtcatccgtttccatgccgtgaggtccattcacagaacacatccatggctctcatgctcagtttggttctgagtctcctcaagctgggatcaggtaagactcatctttgtttcctccttactaactaacagtttgagttctttagctacaatggttgcagcataatggaatgaaggcatctttgtcgtttccattcctttggcttctcctagcctcagcctggggaaggatcaggcgctgtggaaacaattatagtagcccccaaataatggaaacacgggtgttgaagacgcaccgtgatcgtt

SEQ ID NO: 210547 - DNA, 596 bp, Homo sapiens; identical to SEQ ID NO: 200211
  chr5:180479642-180480238
  hypo

SEQ ID NO: 210548 - DNA, 828 bp, Homo sapiens; identical to SEQ ID NO: 200212
  chr5:180480302-180481130
  hypo

SEQ ID NO: 210549 - DNA, 104 bp, Homo sapiens
  chr5:180657110-180657214
  hypo
ggaaagactctggtgcggggctcaagccacttcccctcagctgtgagcgtgggagctctctagtcttgaggctcctacctttagagaatacacacagggccggc

SEQ ID NO: 210550 - DNA, 153 bp, Homo sapiens
  chr5:180661378-180661531
  hypo
ggtgggtgctgcccgtgaatcaacccatcataaggaaaaggtgggccctgggggttcctccgtgggcagcggggatgccagctcctcgcgccatcaccatcgccgccgccggctccacctgccccagcagcccctgctccagcgggaagtgtg

SEQ ID NO: 210551 - DNA, 182 bp, Homo sapiens
  chr5:180661628-180661810
  hypo
ctggactatgaagctgggcgcctgggcttctacaacgcagagactctagcccacgtgcacaccttctcggctgccttcctgggcgagcgtgtctttcctttcttccgggtgctctccaagggcacccgcatcaagctctgcccttgattatcctgccacccgcaggggcccctctgtcagca

SEQ ID NO: 210552 - DNA, 338 bp, Homo sapiens; identical to SEQ ID NO: 200216
  chr5:180673932-180674270
  hypo

SEQ ID NO: 210553 - DNA, 120 bp, Homo sapiens
  chr5:180681264-180681384
  hypo
gggcaacagagcgagactctgtcaaacagagagagagagagagaaagaaaaagaaatcaatcaatcaatcaatccggtttagatgacaacatgaatcaggtttgttgttgttgttgttgt

SEQ ID NO: 210554 - DNA, 76 bp, Homo sapiens; identical to SEQ ID NO: 4514
  chr6:393764-393840
  hypo

SEQ ID NO: 210555 - DNA, 380 bp, Homo sapiens; identical to SEQ ID NO: 200219
  chr6:710673-711053
  hypo

SEQ ID NO: 210556 - DNA, 136 bp, Homo sapiens
  chr6:736613-736749
  hypo
acaggcgtgagccaccgcgcccggcccagctgtgctttttatgggcaacaaaaattgttttcagaattgaaattgcccttgatattttgacatgggtttgacgtctgcaaagttatttcatattacactaaaaaat

SEQ ID NO: 210557 - DNA, 577 bp, Homo sapiens
  chr6:1080628-1081205
  hypo
atcagcaactttccccacaacgctgatggatctggaaccacttctaaacccgctgcctgtttgcgaggagggcagaccactgacggtgggaaggatgcatttccccaagccacggaccacactgccgaggccctgactgtcctttcccggacccctgcctggcacgcctgggaaaggtttaccctgggggcgggggcaggttggcgccaggcagcttgcagaatgtgtgctcggaccccgggcatcgcgaagtgtgcgggccgtgggccccggctgcaccgccagcccctgcctggccaccccaccgcttacttgacctccaggaagcgcctgaaagaaagcgagctctgatatgtgcagctccagtgtgtttcaataagctgttttcaaagagtttgggtgcctcttcagactaagcccgttcgaaacctccatcttctttctagggttttcttcaacgggggcttagatgataaacggagacccctgttccctaccggttgaaactgtgtctgcggcaacagtaagcacccggccgagacacccacacccccatgtcgtgcgctcaggaccaggg

SEQ ID NO: 210558 - DNA, 113 bp, Homo sapiens; identical to SEQ ID NO: 200228
  chr6:1379978-1380091
  hypo

SEQ ID NO: 210559 - DNA, 228 bp, Homo sapiens
  chr6:1523728-1523956
  hypo
tgcaccccccggctggccagcgcgggatgtgggtggggaaatagccactacagtccggagtctccccactccctccccaggcccacttccccgacgaagtttcactccattgttcctgggcatctccaggggtgtctagtttgaacaagaaaaggaatgttctggatggctggtcctgggcgctcaccgggaatgaacgtgagccactctttcgcacacaggccactc

SEQ ID NO: 210560 - DNA, 231 bp, Homo sapiens; identical to SEQ ID NO: 200231
  chr6:1610585-1610816
  hypo

SEQ ID NO: 210561 - DNA, 334 bp, Homo sapiens; identical to SEQ ID NO: 200232
  chr6:1610864-1611198
  hypo

SEQ ID NO: 210562 - DNA, 51 bp, Homo sapiens; identical to SEQ ID NO: 200233
  chr6:1612145-1612196
  hypo

SEQ ID NO: 210563 - DNA, 186 bp, Homo sapiens; identical to SEQ ID NO: 112753
  chr6:1612300-1612486
  hypo

SEQ ID NO: 210564 - DNA, 195 bp, Homo sapiens
  chr6:1708418-1708613
  hypo
gctcaccatccacagaaaagcgtgaaacaaaatgcggcatctgggtatatctcaaaggtagggaaggaaacaactcgaaggctgtaactttcccgacacttgagacgtcactcctttgcaaggcagcattcccagcaggcagcgaagcgtgtttggagaagctggagggcagatgaggagtggagggaaggcggg

SEQ ID NO: 210565 - DNA, 102 bp, Homo sapiens
  chr6:1708643-1708745
  hypo
aggcgttgtcaatacagcaacagcaacgaggacaaacatgccacacggtgggtccaagtctgaactgcccggggctaagtcagtcaccgcacaatcgagtat

SEQ ID NO: 210566 - DNA, 281 bp, Homo sapiens
  chr6:1953249-1953530
  hypo
gcccaaactttcctaatgatcgaaagactaaaatgagtcaacataagaaaaatatcctcatcgaaagacggaaatcttcaactgatctcctgcggaaagcaaagggctgctgggtatgagaggcaggcctgccaacagccggcagcacagaacaactttctccgtcacacccctgggtcagggctttctcctccaggacgtggaccctaggaagtctcacagaaaccgaggctgctgttcttagtgtaggaaatcaaagcggctaattctacactcatact

SEQ ID NO: 210567 - DNA, 179 bp, Homo sapiens
  chr6:2108903-2109082
  hypo
aatgacaagaggtccgatataaagtatcagagtcctgcggtatcttcccctcacagttcaacgatactgcccacctcggtattctcagcttagtagtgtgacaggaagactgagtggcatcatatctgggctggagactaggtagcgtgtggctgcttatgaaccgcacgtccaggtgg

SEQ ID NO: 210568 - DNA, 96 bp, Homo sapiens
  chr6:2233026-2233122
  hypo
atctcaggcctccagatgcccgcgaccttctccccttcagcctcttccataaccacactactcctttcctccatcggcttctcccctgactgcaca

SEQ ID NO: 210569 - DNA, 385 bp, Homo sapiens
  chr6:2559179-2559564
  hypo
ggggtgggggcatgggaggtcggcactccctccttcaggaatctctgagctcgcagaaccgtccagtgcgtgggtggtagagggatcagctgacggggaagtgcaagcgtgaaggcggccacccaagacttcaggtcactgctgacctcccgtcggggctcagatctcagcactgggagggcatctgctcgccctgccaaaacaaaccagcccctgcaaggggcacattgcacaggaaggggggctggagggacaaggagctccgggtttcacttgaacagtctcaaataaccggtttacaatgatgcggtgttcttggcgttgcgggtaacaaaagggctgaggcccaactccagatctggtgagcattcgtgggcagcagcac

SEQ ID NO: 210570 - DNA, 33 bp, Homo sapiens
  chr6:2906982-2907015
  hypo
aacaatacagtataacggctatttgtacagcat

SEQ ID NO: 210571 - DNA, 92 bp, Homo sapiens
  chr6:2907135-2907227
  hypo
tgaggatccgcagagctcaatgttcgctaggatcctggaatcaatcagataccaagagacaactgtatttgctgaagcgtatttgttgaatg

SEQ ID NO: 210572 - DNA, 218 bp, Homo sapiens
  chr6:2920938-2921156
  hypo
ttcccctcctcctatccggtgactccttggaccacatcaacccagagcaacaagacccattgcccctgctacctggggcccgcatggcatgtctgagcaatgaccccatcctcgctgcccgctgcccagctggcggaccctgccaggttcttactgcgatggccactccccaaccaccacacccgcagcacctccacgctagtggctcctccccaccc

SEQ ID NO: 210573 - DNA, 43 bp, Homo sapiens
  chr6:2986010-2986053
  hypo
ttcattatttttaaacaaaggcgagcaattcactttctgggtg

SEQ ID NO: 210574 - DNA, 383 bp, Homo sapiens
  chr6:3115566-3115949
  hypo
tccctgccagtgcattttggcgctcaggatgagaggcctgcagcactgctgtccccgcgcctggctctggggccttcccttcacccccactctctcagcaccatggtgagaagaaccaagtttgcctgtgaggagttaggtacaaggcccaagctccacaagaacactgctgttaatgggcagagccaatgacgacacagaccagcaaagcagaaccgagactgtccgcacttggttcggaaacaaatactcacaccctaggttattgctggtaacggagacctccttccagctcccacagtcctgcttggtagattttctacttgttgctacaatcatcatctttgctttgggtctgtcacgtgaggttagggtttcaggaa

SEQ ID NO: 210575 - DNA, 254 bp, Homo sapiens; identical to SEQ ID NO: 200241
  chr6:3162842-3163096
  hypo

SEQ ID NO: 210576 - DNA, 40 bp, Homo sapiens
  chr6:3179684-3179724
  hypo
tcttaggaaccaatgaagcgtgtttttccagtagttggca

SEQ ID NO: 210577 - DNA, 206 bp, Homo sapiens
  chr6:3195390-3195596
  hypo
gacaaggcccagggccggcatgactctgggtcacaaggtctattcatcttggtgtggcttctttgcttattgtgctccgtcctgtgatggtctctgcagggggccacagagacgtaaagaacttgctctcctttccctgttgcaagagacaggtctaggttgaaggactaagtgagcgagggaaatgagggtcacggcagcccact

SEQ ID NO: 210578 - DNA, 178 bp, Homo sapiens
  chr6:3263636-3263814
  hypo
tgagacactaaaacgagcctttcgtgtgaaactggtcctagaacttagtagcactgtggttccagcttcatctttcccaactccgctgacctcatatgcgacatggggtccacctacttggttgttgacggacgccacccctctttccctcggcacctgtgcctgtcctctctgaacc

SEQ ID NO: 210579 - DNA, 96 bp, Homo sapiens
  chr6:3281277-3281373
  hypo
tcacctggacccctccgtgagggcaaaggaagcctcggagcccacctggagcatccagatggacagtggatagaaaagatccgccccagcacagcc

SEQ ID NO: 210580 - DNA, 194 bp, Homo sapiens
  chr6:3285535-3285729
  hypo
tttttgttaggaagacaggagtgagaccctgctggcctcagagcctgaggagaaaatggaaccttcacagtgagaccccagcaggtgcaaagggtgagcttccttgcatgtaaagtcacccacaggtcactgccgcctgcattcaagctgcgtcaagtgctgtggggtgcccctgccagccccagctctgctcc

SEQ ID NO: 210581 - DNA, 36 bp, Homo sapiens
  chr6:3289595-3289631
  hypo
caggttcaggaagggcggggccggctacaggcaggg

SEQ ID NO: 210582 - DNA, 76 bp, Homo sapiens
  chr6:3316815-3316891
  hypo
cactggggagcttgtcgaactagcatcaaaattctgcacctactcttagagcagacgagcacgttgttttttaaga

SEQ ID NO: 210583 - DNA, 203 bp, Homo sapiens
  chr6:3333155-3333358
  hypo
atgttccttcatgccctggtttaatctctaaactggaagctccacctaatgtctggtgagacccaggttcaggtttttggaagagcgtatcgcagctggtgcctgtgcgtcacggtgctgccccgcaggaggtcacctactgggaatgacgctaccactgacccatggagcaaagcggcggcgcctcagcctcccatcctaga

SEQ ID NO: 210584 - DNA, 169 bp, Homo sapiens
  chr6:3405476-3405645
  hypo
agtgcgagactgtctcaaaaaatttaaaaaaaaaaaaagtttgtcaaaggccttcggtaaactctgactcatttccttggtggaaatagccttgtgagtggagttggtcccaccaggagaagggctttttgccctgagaacttgctgctactgggaaggcccacgtatc

SEQ ID NO: 210585 - DNA, 92 bp, Homo sapiens
  chr6:3405713-3405805
  hypo
acccaaatgcagagcaaatgtttgctccccagaagcccacaaggtagctgaagccatttctagttgacatcggcaatctccattctcttcat

SEQ ID NO: 210586 - DNA, 1223 bp, Homo sapiens; identical to SEQ ID NO: 200246
  chr6:3455898-3457121
  hypo

SEQ ID NO: 210587 - DNA, 706 bp, Homo sapiens; identical to SEQ ID NO: 200247
  chr6:3457537-3458243
  hypo

SEQ ID NO: 210588 - DNA, 120 bp, Homo sapiens
  chr6:3572638-3572758
  hypo
tactgtgtgctggcgttgtgctacttgaggaaggaattctgtttccattttacagttgaggaaacagaggttgagaaactggctccagggagaagcaaagctcttggattacttccaagc

SEQ ID NO: 210589 - DNA, 221 bp, Homo sapiens
  chr6:3579860-3580081
  hypo
cctcactccgggccgcactgggcttctgtgattgggcggatcacgccggcctcatgttccttctcttgtccctctctacccctcatgaaattgtgctccttcagagcatacaggccgtcaggatgcggggtagggtcaagacttatcagactgagcgatgaacaccttggcttctccatcagaccccgtgagaaccacaatggacacgtgtcaggtagcag

SEQ ID NO: 210590 - DNA, 517 bp, Homo sapiens
  chr6:3618095-3618612
  hypo
gacatctgtctctccgagacctccaaccccagcctggagccgccgtgcctatttctggaatctgagagacctcaaattccaaaggcaccgtgagagtctcaggactcagcctttccacccttgccggggtgactcgtggagggaatcgagcctaagtcttacggcacgttgtgcagtttgggccggggcggaggaccagggcccagctgaggctggccttagtgactcagccttgatcctgccacggtgacaagggtgggagggttcccgcaggggtccagctcgtgtctgtgagaagcaccttcccttcagggtcgcacgtggaccgtggctgctaccacgctaccgttgccttcagtgctcttttgcaggagtgcagacgggcagttcagcgcgggccccagtgccgggggtggggggcagggagctcccgcagggctttgctgagaaggggcataaccatgacccactggtgatgtctgtgaggtggaggcagtggttgcggtgagattcatag

SEQ ID NO: 210591 - DNA, 390 bp, Homo sapiens
  chr6:3646960-3647350
  hypo
tcctggagtcctgtgcttcccgggtccaccagaattctgtgctcataagggcatcccgagcgccatgtgcgaagtgggtggccggggccggggacgtgcgtatcgctcaggtgctgctgtactgtcccaccaggcttacaaaaatctcagagacgcggttaggaagatttcaagacagcaacgacagagccttaaaccgagcacagggctcttccgggtgtggggtctcttgtgactgcgcaggtcatccatccaagaagccggccttgaattacagagaacaactgaaagaccgaagagaagccagttccgctctcaacagccacagggcggatgatgccttcccccagaaattcaccaacagtgcacgaggtgcccatgaagagagcc

SEQ ID NO: 210592 - DNA, 339 bp, Homo sapiens
  chr6:3724299-3724638
  hypo
gtctgtcctcagggaagaggcgcctgcctcgtgctgggccctggggacagctgagagaggagtggtcacgagctcacagcctgaccgcagcagagatgacacacggacgcacaggaggctgcgagggaacaggaggctggagaagagccggcgaggcccgtggaggtcacggggggagacaccttctagcggggaagcctgcatgtgggtacgtgtttcattcgcgctctggcagatgagaagcatccgaacatgggggacttacatggggtgtggagaactagggaagaatacaaaccccaaacataaggggacgtaaaagcccgcgatactgactcc

SEQ ID NO: 210593 - DNA, 378 bp, Homo sapiens
  chr6:3725070-3725448
  hypo
aatcccgctgacctcaagggacagggctgtgaagacagctttaaggcatttggataagaaaggctgaggctgcagaggaaggcctcccctctgactccatggccaggcctggagtgtggtgtcagcccccgcctcggcttccctatgctcacggtcctggcaacacgaggctgggacagaggccgcggcacaaagagccctagctgtgggtgggaaagctatggggggctcacggagacagagcagctctccaacttcatccagggaatgaaatctcttccccagaccagggctggatggaaacccaagggggaaccttgggcgtgccgaaaggttcaagccagtcgagggacagagccacagcgccacctcaaacag

SEQ ID NO: 210594 - DNA, 432 bp, Homo sapiens
  chr6:3725748-3726180
  hypo
ccctggggccagactcggggcagcctgctgagactctgctgtgggggccctgctgtgggcccggcggcactgggctcacaggctcgggccagacaatcagcctcgggtgccagggaggacagccacgcagggaggtgaagcctccagttccacaaagggtgtctgtgctcttggtcgctgtcaaccccccacccgacagccggtgccgtgtagaaacagatcgtccctgtgagacactggagctggaccatcgactccactgcactgcccgagattgaggagccagagaaaggcccggcaagcccaagtcggaactccctccagatgctcccgagccccatggcggcaggcgtttctttgttaggcttttctggggtcatggagattttctcggccctctctgtgagccaggcatcccggagcaggtggccg

SEQ ID NO: 210595 - DNA, 52 bp, Homo sapiens
  chr6:3821400-3821452
  hypo
cataaatagggcatccgtagacctgagcagccagttgcggagaagttgagag

SEQ ID NO: 210596 - DNA, 187 bp, Homo sapiens
  chr6:4020369-4020556
  hypo
caacaagagacattttgtaagaacatttaaaacccttctcccctggaaatcaagagatatgtatggagtctggagattccgaactcaattttctaggacaaaggcaaactcagatgattacaagaatgaaagtgatcgtcacgctgcttccaggttccaaagtatggataatttttttttttttttt

SEQ ID NO: 210597 - DNA, 154 bp, Homo sapiens
  chr6:4061559-4061713
  hypo
aaattggaagagaacgcgcttgatggatagagcgccttcagtgtactgtttcttattaactttactttttttaaatcaacttgctatagactttatatacattttgttaaatatagttcctagtgacatagaaacgatgcgtagttttcattta

SEQ ID NO: 210598 - DNA, 187 bp, Homo sapiens
  chr6:4254744-4254931
  hypo
catgagagctggcatcgaaggatacgtatgacttgactctagtacagggtttctcagtctcagcactactgactggggaccagatcactgttttactgtggggctgcccatacgtcgcagactcgggaccagatcactgttttactgtggggctgcccatacgtcgcagactcgggaccagatcact

SEQ ID NO: 210599 - DNA, 201 bp, Homo sapiens
  chr6:4494278-4494479
  hypo
tatttctggcccatacgatcatcatgaccttggacaaatgaaacttcctgggcctcaagttccttgtatcagaaaggatggcattcagctgcgtacaacagaaaaccaaatcacagtggcttatccaagaaaagttcaatttttctcaaaactacagcgtcctgggctgatgcggcagccccaggacgacctcagcatctc

SEQ ID NO: 210600 - DNA, 214 bp, Homo sapiens
  chr6:4549977-4550191
  hypo
ctggccagtggtttccggggcgcactggggcttgcggggtccccggagcaccgcctgaaacgcaccaaagaaccccactctcctcgccccttaagaaaatcaggacaaaccagctgccactcaggcagagaactcaggaaggcccaaggagaccaagacgcggcacggctgcaggagaaagctcagccttgtgcagtccagaaatcctgccttg

SEQ ID NO: 210601 - DNA, 337 bp, Homo sapiens
  chr6:4559571-4559908
  hypo
atccatcacattcacatgctcgcacatgctcacttccactctcacactcatgctcactcacgcacactcacgttcacacgcacacacgcatattcacactctcgtgcactcacactcatgcacactcccattcatacacagttttgcgagtgtacttctggagtgctttgctggcagctctaggaaggaaagagagacgctccaattaggtctggagaagaacgagggggcatggcgagagggcccagcgggccgccactccattccagaaaggagtgcccctgctttccctggggctccctgcaccagctggtatgtggcgtggcatggcacggta

SEQ ID NO: 210602 - DNA, 95 bp, Homo sapiens; identical to SEQ ID NO: 200248
  chr6:4775543-4775638
  hypo

SEQ ID NO: 210603 - DNA, 358 bp, Homo sapiens; identical to SEQ ID NO: 200249
  chr6:4775639-4775997
  hypo

SEQ ID NO: 210604 - DNA, 83 bp, Homo sapiens; identical to SEQ ID NO: 112795
  chr6:4776187-4776270
  hypo

SEQ ID NO: 210605 - DNA, 116 bp, Homo sapiens
  chr6:4874011-4874127
  hypo
gttttattgtgaataggctccgagagcctggtttgaaaccgccaagtaggaacatcgcacaggggacaccttcacatgcgccgcagctgtgcagatttcacctcctgccactgctt

SEQ ID NO: 210606 - DNA, 110 bp, Homo sapiens
  chr6:4874532-4874642
  hypo
ttgtcagttttatttcatagcgtttcttttttatatgtacatgtgcacgttattcagtgtttctgttcagcgttggcgttagggttggcgaggccttccccactgtgtgc

SEQ ID NO: 210607 - DNA, 41 bp, Homo sapiens
  chr6:4889732-4889773
  hypo
aggcgtgagccaccgtgcccggcccacatttttttactagc

SEQ ID NO: 210608 - DNA, 420 bp, Homo sapiens
  chr6:4905100-4905520
  hypo
tccccctcatccccaccccgacctccagctgagaaataattatcacagagtccatgcactgaaatggaggtgtttaatcacaagaacacctccgcagtgcctgtgtgatcggccgtccctatgtgagctgctgatctcagagacagcattaggatggcgaccactgccccagacggcccagtgctctacccctagcgtgatctgaactgctgaagtcagagaagtccacgttggataaacaaagccagcccagtagtaacctggctgtcacagtgaccgtgtgtccgtcttactgaacctgggtttacgtgactaggatgctgacacaagtgagtttgcgcatggcttgctgttctcttcaaccctctccagcctgaataggaatgttaaacccactcaggaattctcgttggtctaaag

SEQ ID NO: 210609 - DNA, 198 bp, Homo sapiens
  chr6:4909052-4909250
  hypo
ctgtgccccttcatccataccgtggcacttcctcactggaggtcacctctcctgtgcatggtcacattctgcctgtctgttgagaggctccgttcttcgctgcgttctgcttacctggttaagccacaaaaggttctatgcttagactagacgtgggatttaaaagtttccatgttcgtgtacaggagtgtacaaaat

SEQ ID NO: 210610 - DNA, 91 bp, Homo sapiens
  chr6:4909755-4909846
  hypo
ttaagggtgtgtcttcgctttctggtgtacttgagataaaattcatacttttttttgtttgtttttgagacggagtctccctctgttgccc

SEQ ID NO: 210611 - DNA, 112 bp, Homo sapiens
  chr6:4910947-4911059
  hypo
attagtcgggtttttataaagcagcagtgttggaagcgatggtttggatagaaggcatgaagtgggtagtggagtgtttctgatggtttatacacctctagaccttacctga

SEQ ID NO: 210612 - DNA, 506 bp, Homo sapiens; identical to SEQ ID NO: 200251
  chr6:4948976-4949482
  hypo

SEQ ID NO: 210613 - DNA, 277 bp, Homo sapiens
  chr6:4950659-4950936
  hypo
gaaaggaaaaccccgacagcacagagcacttcgtgcggcagcagcacaccgggagtcccactccctttcctgctgcgtttggatctgccgtgacaaggactatcagaaccactcacagtaaggtcgggtcgcgtttctaaatccactgtttatggaccgtcttttcactgagaagaagctcgtcagttcaggggtttctagaacttctccagactcttcaaaaactcatgactttctccaagttggtaatcccagcactttgggaggcccaggcggg

SEQ ID NO: 210614 - DNA, 33 bp, Homo sapiens
  chr6:5003274-5003307
  hypo
aaccaatttagaaaatcagtcgcttcggccggg

SEQ ID NO: 210615 - DNA, 149 bp, Homo sapiens
  chr6:5108213-5108362
  hypo
tgggtgacagagcgagactccatctcaaaaaaaaagactttatcctgaaatcaaaagttgtactgccaaatagaatggctacacgttacatctatttgaacgcatcattgcagcaaatctatgctctctaaaagcgactggaagacatg

SEQ ID NO: 210616 - DNA, 223 bp, Homo sapiens
  chr6:5507940-5508163
  hypo
cccacctctcagtggcctcccggctagtgggtcagactgcggacacgccatgatggcacacagagagaagaccggagggagcagagggacaagggagaagcagagagcaggggagaagaacttagaggtgtataagaatttgtttataagtgtgtagcctgttaaaacctgacgatccaaatgggatgggtggccagagcttatgccccgaggtaggagaagg

SEQ ID NO: 210617 - DNA, 132 bp, Homo sapiens
  chr6:5510683-5510815
  hypo
ccgtgagttccgccgcagcctggcctgtctttcgccctagttagtctttaagctcctgaatgcccgccgcacgcccagggctttgcacacggtgggcacacggtgccttttgagcgcgggagagggttgtga

SEQ ID NO: 210618 - DNA, 271 bp, Homo sapiens; identical to SEQ ID NO: 200257
  chr6:5999609-5999880
  hypo

SEQ ID NO: 210619 - DNA, 63 bp, Homo sapiens
  chr6:6199287-6199350
  hypo
gaacattcaggttcataggagaacggtgatggcaggcaatgcacgaaactaacaaatacatat

SEQ ID NO: 210620 - DNA, 87 bp, Homo sapiens
  chr6:6199380-6199467
  hypo
aaaccctcatggatgttaacacatctgatgtccctagcaccctataagaacagtactattggtcgggcgcagtggctcacgcctgta

SEQ ID NO: 210621 - DNA, 136 bp, Homo sapiens
  chr6:6780550-6780686
  hypo
atcaggaggatgtgtacagtcgcaccccagatcgggtatttggacagcggacttacatgcgacaagaaagatgctgtgcccgctcagcgtacctggacctctttgtacagggctcgtttatccagcacactcaaca

SEQ ID NO: 210622 - DNA, 197 bp, Homo sapiens
  chr6:6898399-6898596
  hypo
tgttgtttcagtggacgctctaatcagatgtcttctcataccacataatgaagcaggcgagctggtggattcaactgggactcagaagactgcacttgaggagatcatcgtgagttgaagatctcttgcttagtctcgcagaaacttcatcaagtctagctcacctgggagtcagttggtgccggcgaatcaattcg

SEQ ID NO: 210623 - DNA, 130 bp, Homo sapiens
  chr6:6901361-6901491
  hypo
tttccaaacccacccaggagcgcaggctgtcactaggtctacaggtgtgctctgaaatcagacactatcaagaaattctatcgtgctaaaatgaacaaggagccgggacggcacaatccatcatttttta

SEQ ID NO: 210624 - DNA, 85 bp, Homo sapiens
  chr6:6971301-6971386
  hypo
cctggatgctctgcgctgtgggcgctggctcatcgcccctctgattcacaccgttattaaaccagcactcgggcaagaagcaaaa

SEQ ID NO: 210625 - DNA, 147 bp, Homo sapiens
  chr6:7204388-7204535
  hypo
tcctccacaccctgggagagctggtgtgacctgccttccggacaagcatgactgaacccatacaacacctgaattactagaaggtgcctctgtactttacaggtggggccacaccaggaattgctcagttgccgccttgctgtcctc

SEQ ID NO: 210626 - DNA, 117 bp, Homo sapiens
  chr6:7204766-7204883
  hypo
ggacaaaaaaaagcgagcaccaggtacggatggggatgtctctataaccaggctgctagaccctgtttgaacctgttgcctccagcttggcaggtcctgggccgtgctgtgtgtgct

SEQ ID NO: 210627 - DNA, 82 bp, Homo sapiens
  chr6:7230353-7230435
  hypo
catctgcgactacatcgccgccgacaaggccgcgctcatccgccacctgcgcacgcacagtggggagcggccctacatttgc

SEQ ID NO: 210628 - DNA, 192 bp, Homo sapiens
  chr6:7237796-7237988
  hypo
aatgctgtaggtcctgagtgcgcaggtaactcactgtggttacaggtgcttttacaaatccccttctaaagcagttattcgtggcagctaccaaataaatagaatcatttgctactttctatatagatggctggccaacaagtgtttttgaaacctgcgttattataaaatactaaacgggcccgttttcct

SEQ ID NO: 210629 - DNA, 156 bp, Homo sapiens
  chr6:7246886-7247042
  hypo
gacgccgacggcgcggaagaggacgcgtcgagcaaccagagcctggacctggacttcgccaccaagctcatggacttcaagctggcggagggcgacggcgaggcaggcgccgggggcgcggcctcgcaggagcagaagctcgcctgcgacacctgt

SEQ ID NO: 210630 - DNA, 134 bp, Homo sapiens
  chr6:7269314-7269448
  hypo
cacctggagactgcgaggcgcccgagctgcaggagcggcccgatgtcatcagtgcgtctccctcctcctgcgtctgaaagagcaaagggagacagtgacctcctgagaggcttccagacgccccgccaggcact

SEQ ID NO: 210631 - DNA, 102 bp, Homo sapiens
  chr6:7294551-7294653
  hypo
actcacataaaaacaataggcgtatatgcttatagatatatagaaattaatggaaaatataaacataataccatttatgaaaaatagggccgggcgtggtgg

SEQ ID NO: 210632 - DNA, 1835 bp, Homo sapiens; identical to SEQ ID NO: 200259
  chr6:7541428-7543263
  hypo

SEQ ID NO: 210633 - DNA, 389 bp, Homo sapiens
  chr6:7882610-7882999
  hypo
gttcatgtgggctctggcttcgtgttaacatgaggaactaaagacatgtttcaccccgtgagaaacagaaggatcccctgaacagtaactgatttgacaagtatcgacacataaagttatggcatcagcattctcttactcaggcacggtcagaagtaacgctgctttcatcacggctaacctctcacactgagagaagtattcacagcaacagaagctccagcagcggccgtgaaggtatcttccagaggtgtgggtttttgcatttcaatctgctccatgctacggaccaacacagtattgagtcaactgtgaccttaagatcagaggaacgtcaatactgccacaaggccacctttccagaactcgtgggcaggtaaactatgctt

SEQ ID NO: 210634 - DNA, 559 bp, Homo sapiens
  chr6:7883236-7883795
  hypo
cacacaaagaagatacctcacgcttagtatgttctgctttctgaacagccaccactgggaacccagtggcctctgtgggactgaactcctaaacgcagggtgcgggagctgggcaggagaggtgacctccaactgtgttcctaaagttcgtctttcgcttggctcaggacaaagcggtgtaacgagtcaaggtctctgcctccactgtgctcactgactttcttccctcctcggaaaagcaataacgtggggtagcctcgtaccttaaaacaaaaaagaaaaaagtttgcaaaccagcggtccagatcacatgcaaattgcttcctaaataaaaccagatacactcctaccgttgtggctggaaaaattctgtggctaatttttaaaggtgtatattccattaaaacaggagcagactactgtttagaaagcacagccgtggggctgtgtgttcacttctgaattcaaaatgacatcattaaagatcagcctcaaaggaacgactttaccctaaagcagacgctttcagtctttactgtgcacacgatcacctgcggat

SEQ ID NO: 210635 - DNA, 327 bp, Homo sapiens
  chr6:7884326-7884653
  hypo
tgttacttcacggccttgttactcagacagcaaggcctgaaaacctgcactgaaacatggatactaactacaaagcgggcgaagaagaatgccttccctttgagagaggatctcttttgcttctccaaacaaacaactcaaagggacataaaaaccacattgttgagaagatgagagcagagtgagttatcgtggttgaggcacagttcccttgggatctgcccccatactgagagctcccataagcatccatccaagtacccaccgaatacttgctgcagatattccgttcagcagtgcagtctacttcggcgatcttgacccccg

SEQ ID NO: 210636 - DNA, 203 bp, Homo sapiens
  chr6:7885608-7885811
  hypo
ctatacagtcattcacggtaagtcttagaaccaaggttgtctggatctcacactacctgcaatccatttctgctctggtctccaagaccacgtggcatgcaggttcaggaaactgcgtagcatactgaatggctctaacagactctactggatttctctacaaaagaaatccgagtacttaaaagaaccgaggagcaaagcta

SEQ ID NO: 210637 - DNA, 355 bp, Homo sapiens
  chr6:7887534-7887889
  hypo
tgcagacctcctgccgcagccccaggctcatggttggaactgccactggacactgccacctacacagccgaaagccttgaagatcaacaccttgaaaaccaagctcatccctttcctcgagctctggccccgcccctgtgctgggtaccatcctccaccagatatgcgggaatcagactcgcctcggaccctccctccctctccgcgctgcacagcggctggactccttatgctggctttctcctcctcgccatcgcacagtcacggctgcagcatgagggaacgcatcatctttaaaggcctaatagagcagcttcccacctccagcacacgtgcatgccggtcattttcctac

SEQ ID NO: 210638 - DNA, 890 bp, Homo sapiens
  chr6:7888466-7889356
  hypo
agtcactggcctgatcgctgcggatgccctcttggctacaggtcttctaggggcctttacaacgggtaaaggaaaatgcccggagcaaggtcaggaatagaatcagggccccggggccagcagtcgagatttcatagcagaaacatgcccagcagagtcattctttaaaatgaatgaagcggaaaggaaggattctctagagatttttgacaccaaatattgtcttgggatttgtctcacatccatttcatgttttcaaaaggaaagcttttgtttgcattcgcccctgaaagcatgtgaaagtcgatgaaaaatacgtgttgaaaacgcaactggagccaaccatcagatgactgtgtccccaaactgtcattttgtccaaagcatttgaggaggcctctgagggtggggaggtggggggccgggggccacgggccacttatggggatcccgactccagcaggcacccaccttgtcagcctcgggctcagctgccagcaccggggcctctgagggcgtgacggtctccgtcgctccagtctctgtgcgctgcagctgcgactccacgtactccctcagtgactccaaatcccgctttcccttgtactgatccacctggccaagacacgggcacgcggctgagtgagtccactgaggtgttctgaatcacttaagccttcctgcaacccctgcttgcccgggtcagagctcccagatgtcttagcggtggtgcaaagtctgcatgttcatatttagacgggaatgtagagaggataactgaatgcctcggctttggtgagagaactgtacaggcccctcttccctccacggggttacacatcacagaagtctggggcagaggcctgccagcaagccgttgtgctgatggg

SEQ ID NO: 210639 - DNA, 69 bp, Homo sapiens
  chr6:7889726-7889795
  hypo
cctttttcccatctcggaaccagagaagagtgggatagccacgaacctggtttccggagcagagttcat

SEQ ID NO: 210640 - DNA, 217 bp, Homo sapiens
  chr6:7890517-7890734
  hypo
cactatgtcagcaaacgggggtaaaaatactatttcaacacctaagacccgtcagagagcagctaaggtgcggaactgaagtacaagaggcctcagcccaaggtcgggagaggacaagcatttttaagggtccagtgtaacccagccacatgtgccagggatgaagggcttcagcgtggtcacctgggcttgtgtctgctcacgcctaggtctgcta

SEQ ID NO: 210641 - DNA, 271 bp, Homo sapiens
  chr6:7893706-7893977
  hypo
accatggtacctacacgacacagctgtgtggcagtgacccacttagggaggcgctggctaggcctgccggagtcggtctgtcctgccggagtcggtccgtaacaggtgatttgggaaacacaccctgctcagagcccaagacaatcccagctgaaaatgcattcccgtagcggaaagcatgctagagttctgccgtcagggcgctggtatggatgaaataacttttagcaaaagtgggaaaaggctgaaggcctcacgataagttactgtg

SEQ ID NO: 210642 - DNA, 137 bp, Homo sapiens
  chr6:7919989-7920126
  hypo
caaaggacttagagcgaatgaataagaaggcagtacagaatgagaacactggcttttacgaatgagaagggaagtcatcggagggttttcagaagaaacacgacaggatctggcttccaattatttctacagcatgg

SEQ ID NO: 210643 - DNA, 90 bp, Homo sapiens
  chr6:7976897-7976987
  hypo
taaatgtgacagcagaggcacgcacaaaataggaccgcagtgtctcccctcaacgtcagtttaccatccgctcacttggagagttatcta

SEQ ID NO: 210644 - DNA, 46 bp, Homo sapiens
  chr6:7986658-7986704
  hypo
ggcccgcagaacgcgggttctgtaaagacacgtggagaagattcga

SEQ ID NO: 210645 - DNA, 492 bp, Homo sapiens
  chr6:10319602-10320094
  hypo
agggatgtgggcaggttttccgtggggatagagggacgtgggggttttccgtggggatggagggatgtgggcaggttttcggtggggatggcgggacgtgggcagttttccgtggggatggcgggacgtgggcagttttccgtggggatggcgggacgtgggcggttttccatggagatgacgggacgtgggcggttttccttggggatggcgggacgtgggcggttttccgtggagatgacgggacgtgggcggttttccgtagggatggtgggacgtgggtgagttttccgtggggatggagggacgtggagtgttttccatggggatggaggaacgtgggcggttttccgtggggatggagggatgtggcgggttttccgtggggatggagggacgtgggcggttttccgtggggatggagggacgtgggcggggtttcgaggcattcagaaggtgttaagagaagacgaaggaaaaatgaatggtgga

SEQ ID NO: 210646 - DNA, 148 bp, Homo sapiens
  chr6:10538235-10538383
  hypo
agagagtatcctaccgcacctcgttagcctgggaaaagaccaacattcaaaagtcaaaatatggtttctacttaaatgctcatggctttcacacatcataaggtaaaaaaaattataagttgaggccaggcgcagtggctcacgcatg

SEQ ID NO: 210647 - DNA, 41 bp, Homo sapiens
  chr6:10539696-10539737
  hypo
cagacgtgagccactgcgcccggccccgccatctctttaac

SEQ ID NO: 210648 - DNA, 180 bp, Homo sapiens
  chr6:10693035-10693215
  hypo
agtgagccaccgtgcccagccaagaaagattttggaagagtgaatgaatacaaggatttccactagactgagaattagtttgtcaacagcatttcagtgtcttgagaagtgtttacatttggcgtggacaaagctggcagatgacgtagaaagtaaaaagttgcctcttcaaagtttccc

SEQ ID NO: 210649 - DNA, 120 bp, Homo sapiens
  chr6:10693275-10693395
  hypo
acttcaagcctccttgctttgtgctaataactctgttaagccctattgtatgtaactgcgggacatgctcacaggcccaggcacgttccagctcacagcctgtttagcaaatcgggtatc

SEQ ID NO: 210650 - DNA, 87 bp, Homo sapiens
  chr6:10735102-10735189
  hypo
ccaaggaatatctttggaaatccccgtgaacatgtgcaaaggaatctgtaggttacattcctaaacgctgtgtcagagcatctcagc

SEQ ID NO: 210651 - DNA, 85 bp, Homo sapiens; identical to SEQ ID NO: 200282
  chr6:11043616-11043701
  hypo

SEQ ID NO: 210652 - DNA, 95 bp, Homo sapiens
  chr6:12287832-12287927
  hypo
gcaggtgccacccctcgcccctgacacacaaagaaaaagacacggaaattctctctctctcttctcttctcctatctctctctctctccctctct

SEQ ID NO: 210653 - DNA, 183 bp, Homo sapiens
  chr6:13296596-13296779
  hypo
gccttttgtaggacaaaactcgaacagggaaatttaacttgcgtgtaacatgcacacccagacgaccttatttcaatcatacccaattttaaaatccaggaaccggccacagtaaggaaaggcaggcatgtttcaggctgtccagcagctgggcagaaaaacggagacccactgggccaaaca

SEQ ID NO: 210654 - DNA, 135 bp, Homo sapiens
  chr6:13333029-13333164
  hypo
tggcatatgtcttacgtacatgtgattatagacttccaatactgtcctggtatatagaaacctctggctacagccataggtttcctagtgcgtatggggtcatttaacaaataatgattccgttaaccactgata

SEQ ID NO: 210655 - DNA, 83 bp, Homo sapiens
  chr6:13397453-13397536
  hypo
agccatggcgcccagcaagacagattcttaataaagtaaaacaaagccttactctaaagcccggcaattccactcctagaaat

SEQ ID NO: 210656 - DNA, 389 bp, Homo sapiens
  chr6:13456727-13457116
  hypo
ctcatgaatattgtcatgactacaggtgcaagcttattccactttcttttgcccattaaattcaggttaatttttgaactactcatcacggtcacctctaatcctttctagactaaagcaagaatctaaataaatatatagacagattagactgctctcttactgcaggtgattaaacctgaacagatgataggtcctgacatacagcctcctagggctgcaccatatagagtgggcggcctgcacgctgctcgtcttggccccgcacagatctgtcttgggagccaggaggtctgagcctcctgggaatgaaaaccttcctattcagacaatcacagggacattactgagtagaacagaaagttcacgtgagcttttcatataagaac

SEQ ID NO: 210657 - DNA, 146 bp, Homo sapiens; identical to SEQ ID NO: 200285
  chr6:13574018-13574164
  hypo

SEQ ID NO: 210658 - DNA, 37 bp, Homo sapiens
  chr6:13631319-13631356
  hypo
gtgagccaccgcgcccggcctgatttgactttttaaa

SEQ ID NO: 210659 - DNA, 126 bp, Homo sapiens
  chr6:14002319-14002445
  hypo
aaaaaaatggtgaagtttaacgttagtcggttttactaataactgtattacaaaagcttggtactacatgaagtgtaataattggagctattcaagtaacggaaggtgttgccccgagaacagtga

SEQ ID NO: 210660 - DNA, 54 bp, Homo sapiens
  chr6:14002475-14002529
  hypo
ctgctgaaggtgagaggtgacagcgggctggcagccctggctcgctctcggcgc

SEQ ID NO: 210661 - DNA, 100 bp, Homo sapiens
  chr6:14099382-14099482
  hypo
gctgggattacaggcgtgggtcaccgtacccagccctagtataagtaaatttgaacacattttcgtatgtttaaggaccggtgttatttctcttttaatg

SEQ ID NO: 210662 - DNA, 266 bp, Homo sapiens; identical to SEQ ID NO: 200287
  chr6:14117386-14117652
  hypo

SEQ ID NO: 210663 - DNA, 111 bp, Homo sapiens
  chr6:14203412-14203523
  hypo
ctgcagtaaactgcctgcacttgccacctcttcgtctgcggcccggctcataagccttcttcttgatcacttggtttcttgcctactgtcgggtggaaggaggccacagac

SEQ ID NO: 210664 - DNA, 128 bp, Homo sapiens; identical to SEQ ID NO: 200288
  chr6:14211103-14211231
  hypo

SEQ ID NO: 210665 - DNA, 434 bp, Homo sapiens
  chr6:14282463-14282897
  hypo
ccggacgaaggttcggactggaaatgtgcttggctctccctgaggacaatttctctgaggaacggggtactatagcccccttttgtggctttccctccataacaaaccgtggtctagacaggatctggctagaaattcccttattaccaccccggccagactccatttatcatcaccttgaacgtaatgctcgcgcaaaacctccaggcctctcccgttcacataacgaatcgagggaggcagagctcttacggcgctccagccagtgtctgcctgcttctggaaatacctcatcttccagaaaagcattcatttgtcaacagagggataatgctaaaaccttaaagacaaatcggccagaaggcagggatgggagaagcaggcagggtacagcccgggagagacggcagctttgcctcggtgcagttatttga

SEQ ID NO: 210666 - DNA, 148 bp, Homo sapiens
  chr6:14324570-14324718
  hypo
cacccatcagctctatactccgctgttccagcctcacactttcatctttgtccttaacggagtggcgagaaaggccacactaatcttcagaagcaggaacatacgggtgctcttccatcattttaccgctaatatcacttccacctct

SEQ ID NO: 210667 - DNA, 87 bp, Homo sapiens
  chr6:14966820-14966907
  hypo
gccaggagttcaagaccagcctaggaaatatagcgtcagagccattcagtgaccctatgtcgaatgggactgcgtaaaataaggctg

SEQ ID NO: 210668 - DNA, 39 bp, Homo sapiens
  chr6:15083849-15083888
  hypo
attatagatgtgagccaccatgcccggccaactcttagg

SEQ ID NO: 210669 - DNA, 209 bp, Homo sapiens
  chr6:15227670-15227879
  hypo
gatttatcatatttgcgacaggaaaaacattcggtttggcaggaaacaaatgatattacagggcccaaaggtgagtaattggccctaatgacttggaaataaatttgaattcgcattgggtaggctgtataaatatatactgtataactgaatgcctggtgctttggggggacaagcggggtgggagtggggggcgaggggaggggaga

SEQ ID NO: 210670 - DNA, 43 bp, Homo sapiens
  chr6:15282318-15282361
  hypo
gtgcaccatcatgctcgaccaatttctgtattttaagtagaga

SEQ ID NO: 210671 - DNA, 43 bp, Homo sapiens
  chr6:15282481-15282524
  hypo
tttagagtaggaagaaattttttccttccgaaaaccttcagcc

SEQ ID NO: 210672 - DNA, 120 bp, Homo sapiens
  chr6:15283483-15283603
  hypo
caggtgtgagccactgcgcccggccgttctggtatttattgaatatgtcgcaaatattgtctcctagtctgtcctttgtcctttaagtatttttttttttttttttgagatggagtctca

SEQ ID NO: 210673 - DNA, 152 bp, Homo sapiens
  chr6:15512506-15512658
  hypo
tgtcgtctgcttcccgggatcctttgtgtccaaagtgtgctgtgggtacagcgtgtctgaaaccgtgcactttgctaccacccagtggacaagtatgggctttgagaccgccaaggtgagcagagccggcctcctcccgcttgctgcccccg

SEQ ID NO: 210674 - DNA, 409 bp, Homo sapiens
  chr6:15513371-15513780
  hypo
tgtctgcagggaggccggtgtggggtgcgtgtgtcccctctgctggtgagcatggcaggccgtcactaaaggtgcgggccgtctcccgtgtctggcagggatacagagctgcggcagcgcaggcagctgttcgaggctggcctccactcctccgcacgctatggcagccacgatggcagcagcacggtggcggacgggaagaaaaagcctcgaaagtggctgcagttggagacgtcagagaggaggtgtcagatctgccagcacctgtgctacctgtccatggtgagcccgcctggccctgccggcgccctcgcatgtagtgcttggcctgagagctccggggttgcccccagaagagggagggcgctctctgcccaggagacctgctgtgctcccatctctggagccg

SEQ ID NO: 210675 - DNA, 62 bp, Homo sapiens
  chr6:15513981-15514043
  hypo
cccattctttctgaggcagtgaggggcgggtttccagtactgggcagcgtctgccattccct

SEQ ID NO: 210676 - DNA, 41 bp, Homo sapiens
  chr6:15518530-15518571
  hypo
gcctgtttctgtagtcggatgtgtgacgtgaccagatcctg

SEQ ID NO: 210677 - DNA, 53 bp, Homo sapiens
  chr6:15523495-15523548
  hypo
gtgaatcagaattgccgccaacagctgtggaatgtgcccgtcatgaaaggggg

SEQ ID NO: 210678 - DNA, 31 bp, Homo sapiens
  chr6:15907074-15907105
  hypo
actggaactgtaaccgccaaatgggttcacc

SEQ ID NO: 210679 - DNA, 139 bp, Homo sapiens
  chr6:16322047-16322186
  hypo
ggttttttgttaaccgacgctaataaatttttacaagggctgtgctgttctggaaagtataaaagtgaagcattaaaaaacggaaccctctcaagagattatctcctatgaagaatcatacgtggccgggcgccgtggc

SEQ ID NO: 210680 - DNA, 65 bp, Homo sapiens; identical to SEQ ID NO: 200293
  chr6:17281262-17281327
  hypo

SEQ ID NO: 210681 - DNA, 89 bp, Homo sapiens; identical to SEQ ID NO: 200294
  chr6:17281328-17281417
  hypo

SEQ ID NO: 210682 - DNA, 564 bp, Homo sapiens; identical to SEQ ID NO: 200295
  chr6:17281534-17282098
  hypo

SEQ ID NO: 210683 - DNA, 42 bp, Homo sapiens
  chr6:17761882-17761924
  hypo
ggattacaggtgtgagccactgcgctccgctaaaaactcttt

SEQ ID NO: 210684 - DNA, 76 bp, Homo sapiens
  chr6:17788886-17788962
  hypo
gtttaagacttaagacgttacatcaagaatagagcccttggacctctgaaactttaccaacagtgtacccacattt

SEQ ID NO: 210685 - DNA, 95 bp, Homo sapiens
  chr6:17797155-17797250
  hypo
tcgtgaccttaaatccgtctcttctgttttatagaaaaccataaagaaccacagaatgttagatctggaaagaaaattgggaggtaatttaactc

SEQ ID NO: 210686 - DNA, 67 bp, Homo sapiens
  chr6:17800168-17800235
  hypo
cactgtcctctcacccgacatgtcagctttttgactcggtgaatgatttccccgctgctgtctacga

SEQ ID NO: 210687 - DNA, 329 bp, Homo sapiens
  chr6:17940369-17940698
  hypo
ttccttccttccttccttctttcctttcctcctcctcctcctcctttttcctcctcttcctcttcttcttttggaacactgttttgaaggtacatcagcacaatgcttcttaaacttcaatatgtatacggatgcttcaggaacactattaagcgcagattcttcgattctgtaaatccgtggtgggtcctgagcttctgcatttctaatgagctcccagggtgtgctaatgctgctgatccacaagggattcgagcatgcaaattaagttatggagaaagcattactgtttaattttacatatggtaggaaaacgctgttagtgaacc

SEQ ID NO: 210688 - DNA, 120 bp, Homo sapiens
  chr6:18030874-18030994
  hypo
acaggcgtgagctaccgggcccggccagggtaggaaaacatttctaagacaagtcacaaaaggcataggagaaaaaattgaaaattaaacttcactaaaattaaaaacctctgcccatca

SEQ ID NO: 210689 - DNA, 98 bp, Homo sapiens
  chr6:18250345-18250443
  hypo
tatgttaagctccaacggctgttaatactttgtcatgataatattttaagttagatttgtaatttatttcatccctacaagcattaaaactgtcactg

SEQ ID NO: 210690 - DNA, 41 bp, Homo sapiens
  chr6:18259258-18259299
  hypo
tgtttagtcacaaaaatctacggtgaggcgcggtggctcat

SEQ ID NO: 210691 - DNA, 1474 bp, Homo sapiens; identical to SEQ ID NO: 200300
  chr6:18263766-18265240
  hypo

SEQ ID NO: 210692 - DNA, 33 bp, Homo sapiens
  chr6:18275933-18275966
  hypo
gaatgccaggccaggcgcagtggctcatgccta

SEQ ID NO: 210693 - DNA, 39 bp, Homo sapiens; identical to SEQ ID NO: 200302
  chr6:18278043-18278082
  hypo

SEQ ID NO: 210694 - DNA, 251 bp, Homo sapiens
  chr6:18368662-18368913
  hypo
ggggaggagatcagcgtcagcggcgtcttcagcgtgatcttccgggtcaggactgaggtcaggtccacctcatcagctatgaagtctatgaatcctgggagaatcgggacgtcgttgtaggtgaggccgtcagcgctggtgaagagctgctgtgggatgagcccgtcctcaggcacgtagccggtgcagcagttgctcagatagtccgccatgctgcgggagaccccgcgaccccacgtaaacacccgcgc

SEQ ID NO: 210695 - DNA, 43 bp, Homo sapiens
  chr6:18458440-18458483
  hypo
ttacagacataagccaccacacttgggcgatacagagggtttt

SEQ ID NO: 210696 - DNA, 180 bp, Homo sapiens
  chr6:19676997-19677177
  hypo
gcctggcagacgggacgagactctgcctaaaaaaaaaaagaaaaaaaaaaaagagttgcacagcctcccatctctaagcaactttaagttcattttctgattctttgtctactctgcgtgtgcatgtgtgatgagaccgttttccctgttttccttggtatgttcccagctatgccccgg

SEQ ID NO: 210697 - DNA, 42 bp, Homo sapiens
  chr6:19677237-19677279
  hypo
cccagccttcaagacacaagcagcggacgtacacccttaagt

SEQ ID NO: 210698 - DNA, 876 bp, Homo sapiens; identical to SEQ ID NO: 200306
  chr6:20212230-20213106
  hypo

SEQ ID NO: 210699 - DNA, 91 bp, Homo sapiens
  chr6:20640182-20640273
  hypo
agccaccgcgccgaccattttcattggttttaagaagttatttttcaagttgtaccttaagggtgctttcgaattctcttattaaagcata

SEQ ID NO: 210700 - DNA, 205 bp, Homo sapiens
  chr6:20686905-20687110
  hypo
ccctcgtgccaaaacggttgggggccactgaactaggacatccagtatgatattgaaaaggagtggtgaggggacatttttgtctttgttcgtgattttagtgggaaagcttcgagtttctcaccgttaagtatgatgttagctatagatttttgtagtctttttaactagttgaagttactctatatctcgttcactgagatct

SEQ ID NO: 210701 - DNA, 181 bp, Homo sapiens
  chr6:21277794-21277975
  hypo
aaacatctcttacattgtcacgcgcagaaacatcccaatactcacagtccttttaacctacaaaaggaggaattctgtggcatcagccactgcagaacagaaaggtggagtttgtggagagggcgcgataaggtctacttccaacttgaaacacgacaacggtgaaatgagtcatgctaaa

SEQ ID NO: 210702 - DNA, 93 bp, Homo sapiens
  chr6:21570592-21570685
  hypo
atcattgccctctcccgccctcaagtgcactgattatctgtgccatgtggccactgctgggggatgggggagtggtggtcttggcaattcagg

SEQ ID NO: 210703 - DNA, 1131 bp, Homo sapiens; identical to SEQ ID NO: 200308
  chr6:21594475-21595606
  hypo

SEQ ID NO: 210704 - DNA, 187 bp, Homo sapiens
  chr6:21602324-21602511
  hypo
cccactgggctgtcgccccagctggactaccaccatggaactcagggccgaatacctcagggagaagctgcagcgggacctggcggcggagcatgtggcggtggaggacaacacgaccctcaaccattgcgcctgtagcttctggcggtgtcggccaagttcgaggggaagccgctgcttcagagac

SEQ ID NO: 210705 - DNA, 34 bp, Homo sapiens
  chr6:22037569-22037603
  hypo
aagttggccaggcgcggtggctcacgcctgtaat

SEQ ID NO: 210706 - DNA, 263 bp, Homo sapiens; identical to SEQ ID NO: 200314
  chr6:22146853-22147116
  hypo

SEQ ID NO: 210707 - DNA, 36 bp, Homo sapiens
  chr6:22331079-22331115
  hypo
tgagccactgtacccggcaagattttttaagaaaac

SEQ ID NO: 210708 - DNA, 254 bp, Homo sapiens
  chr6:22349413-22349667
  hypo
ctgacgagtgcttgcgcattgcgcatgccatttctttctgacaggaatcattccgccacaagcgaacgagcctgggctggccttgtggaagcctagccgaggcctcagaatatggatgagatcatctgagaccatccaccccaggaagccagcaaagtggctagaacccgccataccaccgcagaatcacgattgctgttctgagtcactacatttcaggtgacttgttgagcagcaaacgagctgacgaacct

SEQ ID NO: 210709 - DNA, 161 bp, Homo sapiens
  chr6:24425299-24425460
  hypo
tcatggtgttcttgtcggaatgtgaacatacagcaccctctagcattacgaatctcttaggatttttaagattgtatttgataatacttatatttcacagggcacacttttggcacacctcagagcacactgctgctattttgggtcgtatcactgtaaaa

SEQ ID NO: 210710 - DNA, 205 bp, Homo sapiens
  chr6:24433003-24433208
  hypo
gcacgacagcagccacgcgcagtccacagcagacgagcccggctatgttccactacagctgtgtgggcgctgaaactgcactgccgtttaaacttcatatgttacaaaacattctgttttgatttcttttcaaccatctcaacatgagctgacttttttagttcatggctttacaaaattaggtggcagacgacttggccccaac

SEQ ID NO: 210711 - DNA, 125 bp, Homo sapiens
  chr6:24523039-24523164
  hypo
gatgcctttgtaaaagcattcgccgaggccatgaagaagaacctgcgcgtaggtaatggatttgaggaaggaactactcagggcccattaattaatgaaaaagcggtagaaaaggtaagtatatt

SEQ ID NO: 210712 - DNA, 138 bp, Homo sapiens
  chr6:24647204-24647342
  hypo
ctactcgtatttaccgaagagcctcagacaagttacctaatctagataaacctgtttcctcaattataaaatgaagataatagcattcatataggatgattctgggaatcaaataagataatgcacatttaaagagta

SEQ ID NO: 210713 - DNA, 120 bp, Homo sapiens
  chr6:24662784-24662904
  hypo
caccattaccctctagtcctgtcgcatccccctcaccgagatggggatagtgatcaataaatactgagggaactcagagaccagtgcccatgcagatcctccgtatgctaagcgccggtc

SEQ ID NO: 210714 - DNA, 173 bp, Homo sapiens
  chr6:25153408-25153581
  hypo
acggaaatccgaccgccaggctgcctcacacccctagtccgcctgctggaaagtgctgcagcgccggtcctgcccccagcggtgcagcgaggactcctgagcaccacccaggacttcggttacatttccgtcagccacatgggggaggtgggccccgcgcacgttaaagttca

SEQ ID NO: 210715 - DNA, 432 bp, Homo sapiens
  chr6:25726843-25727275
  hypo
ctatctgattggctgatggccgtctacccaatcagaaagtcgtactagaatcgcctcatttgcattcacgccacttcccattgtccaatcagattttggataccgaacgcggcgtttgagggccgtgcctataaataccgcatctttcatcctccagttctgtttgtttacttggcgagacttggagctgaggtcatttggagctgtttaatactgaagagctgttgagcactggaaagtgctgtgtaaccctggaaaagaaccgtgtaacgctgcagaagtgtgtggtagctatgccggaggtgtcatctaaaggtgctaccatttccaagaagggctttaagaaagctgtcgttaagacccagaaaaaggaaggcaaaaagcgcaagaggacccgtaaggagagttattctatttacatctacaaagtgc

SEQ ID NO: 210716 - DNA, 267 bp, Homo sapiens
  chr6:25727391-25727658
  hypo
agcaagcgctccaccatttcttccagagagattcagacagcagtgcgcttgctactgccgggagagctggctaaacatgctgtgtctgagggcaccaaggctgtcactaagtacaccagctccaagtaagcctgctaagtaaacgtcatttctaacccaaaggctcttttcagagccacttaaacatactgaaacagctgtgggcttcgtttttgtgtagtttctaaccgtaagggttttttttttttttgaggcggagtctcactc

SEQ ID NO: 210717 - DNA, 221 bp, Homo sapiens
  chr6:26025541-26025762
  hypo
gggattacaggcgtgagccaccttgccgggcctatatttcttaagctctatgtttcgttctgaagcttgaagtgggtggaagcaaactgatagaatttggagaggtggttaggcatcccgggaatgagaaacagcccgaagctgccactatcacaggctttggcattgctagaagttaacgtggcacttacagctaggccgtggtgttctgttgaacaaac

SEQ ID NO: 210718 - DNA, 505 bp, Homo sapiens; identical to SEQ ID NO: 200317
  chr6:26027158-26027663
  hypo

SEQ ID NO: 210719 - DNA, 213 bp, Homo sapiens; identical to SEQ ID NO: 200330
  chr6:26198924-26199137
  hypo

SEQ ID NO: 210720 - DNA, 72 bp, Homo sapiens
  chr6:26970361-26970433
  hypo
agcggcagggactcgccacccgcagccgtggagccgggccatgagcgcctgtgcggcgctgggtcgctgtcc

SEQ ID NO: 210721 - DNA, 615 bp, Homo sapiens; identical to SEQ ID NO: 200371
  chr6:27218980-27219595
  hypo

SEQ ID NO: 210722 - DNA, 171 bp, Homo sapiens; identical to SEQ ID NO: 200372
  chr6:27219656-27219827
  hypo

SEQ ID NO: 210723 - DNA, 207 bp, Homo sapiens; identical to SEQ ID NO: 200374
  chr6:27440466-27440673
  hypo

SEQ ID NO: 210724 - DNA, 159 bp, Homo sapiens
  chr6:27441962-27442121
  hypo
aaggaaacccggagataatattcccatgttttgccacttagtaaagcattttatatgcctgtgtcagcgagcacatagctgcaagtgtagcccatggccagtctgtcactgtgtccttggcagaaaaaaagaatccaacaaatcggtaggtttttatat

SEQ ID NO: 210725 - DNA, 216 bp, Homo sapiens; identical to SEQ ID NO: 200375
  chr6:27447357-27447573
  hypo

SEQ ID NO: 210726 - DNA, 120 bp, Homo sapiens
  chr6:27770799-27770919
  hypo
ccgggattataggcgcgagccaccatgcctgcctaattttaaaaaaacttttagtagagacggggttttaccatgttgtgttgagcagggcggtctcgaactcctagcctcaagtgatcc

SEQ ID NO: 210727 - DNA, 153 bp, Homo sapiens; identical to SEQ ID NO: 200392
  chr6:27805754-27805907
  hypo

SEQ ID NO: 210728 - DNA, 575 bp, Homo sapiens; identical to SEQ ID NO: 42819
  chr6:27805936-27806511
  hypo

SEQ ID NO: 210729 - DNA, 155 bp, Homo sapiens
  chr6:28327739-28327894
  hypo
ggcagctggatgagccggcgccgcaggtagaaagaacaggtttagtatctgagcgctgtggcctgtttcctcctgaaatcccagatcagagtgaggggcattcctttaacatccaggagttcttcatctcttttttgtaccgtgaacctccttgg

SEQ ID NO: 210730 - DNA, 188 bp, Homo sapiens; identical to SEQ ID NO: 200407
  chr6:28414754-28414942
  hypo

SEQ ID NO: 210731 - DNA, 178 bp, Homo sapiens
  chr6:33609019-33609197
  hypo
ttacctgtgagggctgagaccgactgacagtcagacagacaggtcctgggcgtgttgggcagggtgggagcaggcagcaacacgctgggcctgctgccaccaagtctgcccgcgtggctgctcctctggggagagcttagctgggattgtcctcgcgggggatgctggaaggggagcg

SEQ ID NO: 210732 - DNA, 38 bp, Homo sapiens
  chr6:33609227-33609265
  hypo
ctggctggctggcggccggggtccttgcccatcacttg

SEQ ID NO: 210733 - DNA, 266 bp, Homo sapiens
  chr6:33638299-33638565
  hypo
ggtcaagtttgcccgtctctggactgagatccccacagccatcaccatcaaggagtgagaggggtggaggcagggtgggcggggcaggggcagaggctggagtgggtgtatctcggggaccttcatgcctcatggcctccaccctcagctatgattccaacctcaacgcgtcccgagatgacaagaagaacaagtttgccaacaccatggagttcgtggaggactacctcaacaatgtagtcagcgaggccgtgccctttgccaac

SEQ ID NO: 210734 - DNA, 124 bp, Homo sapiens
  chr6:33653397-33653521
  hypo
cctcaccaggtctcgcccacaggccgcgtggcctccttctcgatacctggctcctcatcccgctactcgctgggccccagcctgcgccgggggcacgaggtgagcgaacgtgtgcagagcagtg

SEQ ID NO: 210735 - DNA, 245 bp, Homo sapiens
  chr6:33674159-33674404
  hypo
aggggccacaaagacgacgacccaggccagctgtggagaagctggcaggcacactacagagacaagatacacatgaattagaaaccaaccctgcccggggcaatgtgtaagtgagagccagatctgcggagcacgggccgctgcacgagacccgaggtgggagttgggcacctggctgtgctgatggggaggtgtggcaggaaagggctgagtttcactgcagcgacagtgcagagagtgaggag

SEQ ID NO: 210736 - DNA, 216 bp, Homo sapiens
  chr6:33694535-33694751
  hypo
gcacaggcgggtcaggtgggcctggtggcattgcaggccccacgggttgaagctcttcctctcaacctggtttccgttggtgtcttccaccagcgagaaggctggagtgttgaggtggggctcggacctcagaagagccttggccgggctgcggcggagtggagcacaggacggtcagagcagaggtctggggaagggcgccgctgcctgtggctg

SEQ ID NO: 210737 - DNA, 130 bp, Homo sapiens
  chr6:33748502-33748632
  hypo
tgaatggtaatcatacgggggagaagggacagcatgtttctcctgaaagccgaaggcaagacgagcaaagtgaaccaagggagaagcaggtaacaggcacacctacagtgcagcagtcaggagtgagccg

SEQ ID NO: 210738 - DNA, 83 bp, Homo sapiens
  chr6:33771001-33771084
  hypo
tgcagcacccctggccgggctagccttgcctccccatgtgctctccctcggggtcaactttttcttttccttttcttttcttc

SEQ ID NO: 210739 - DNA, 107 bp, Homo sapiens
  chr6:33907853-33907960
  hypo
agcacggaggcatctcgtggctgtaccctagagagattgccaatgttactcaagactccagagctgccctggttcctgttgatcctgagacccgttgtctagcttct

SEQ ID NO: 210740 - DNA, 40 bp, Homo sapiens
  chr6:33962224-33962264
  hypo
tcgtctttacatagacgaggaggctcgagggtagagacac

SEQ ID NO: 210741 - DNA, 35 bp, Homo sapiens
  chr6:33985261-33985296
  hypo
cgccaagcccgcgagcgccgcgcggagccatggtt

SEQ ID NO: 210742 - DNA, 116 bp, Homo sapiens
  chr6:33995832-33995948
  hypo
cccacctgctgcaaaaggagcggggcctggggcccgagagggcagaacggggccaggcactcacctggggcctcaaggttctcgcagagctcagacttggcctctccgttgggccg

SEQ ID NO: 210743 - DNA, 104 bp, Homo sapiens
  chr6:34100884-34100988
  hypo
tccttctcgatgagcgcctgcacaaaggtcagcgactgctcgagggcatgggtgtccctggagcaggtgtccagaatgcgggcgcccagcgtgatgttaggcag

SEQ ID NO: 210744 - DNA, 47 bp, Homo sapiens
  chr6:34170821-34170868
  hypo
ccgcagccacagtttgggtggctgtagccccgcccaagagggcgggg

SEQ ID NO: 210745 - DNA, 114 bp, Homo sapiens
  chr6:34219816-34219930
  hypo
gggattacaggcgtgagccaccgcgcctggctaacatcttttaactacttaaagaaaaaactctcgatctagaatattggggaaaaaaaatctgtcaaaaacaagaaataaaga

SEQ ID NO: 210746 - DNA, 41 bp, Homo sapiens
  chr6:34231475-34231516
  hypo
gcgccgcccgctccgagggaaagagcgtagattcaaatata

SEQ ID NO: 210747 - DNA, 249 bp, Homo sapiens; identical to SEQ ID NO: 200412
  chr6:34359487-34359736
  hypo

SEQ ID NO: 210748 - DNA, 76 bp, Homo sapiens; identical to SEQ ID NO: 200413
  chr6:34405060-34405136
  hypo

SEQ ID NO: 210749 - DNA, 39 bp, Homo sapiens; identical to SEQ ID NO: 200414
  chr6:34405256-34405295
  hypo

SEQ ID NO: 210750 - DNA, 243 bp, Homo sapiens
  chr6:34512043-34512286
  hypo
aaagtaggagaggtagaaggcggacaggccctgctcgggcgtggcgggtggactgggactccagtcccgtctctcgagacccactgcccccgctgccgccttctccaagcctgtccgcgacaccgtgtcggggggcagcaggaggtggctgggggatacgctgctcagacccgggctggcgctgcccatgccgctgctgtttgggctggcggctgtgtctacggaaatgaaagaggactcagg

SEQ ID NO: 210751 - DNA, 72 bp, Homo sapiens
  chr6:34518768-34518840
  hypo
aactgaataaactgctttgccgggccctcccagctggggcagccagcattattcccacttgacggacaaggg

SEQ ID NO: 210752 - DNA, 91 bp, Homo sapiens
  chr6:34518870-34518961
  hypo
tgcgtgagtgagcagggactcgaactcaagactcggctccaccctcctttctgctggtgctggcagacccggcatcttctagctcctaagg

SEQ ID NO: 210753 - DNA, 100 bp, Homo sapiens
  chr6:34683317-34683417
  hypo
gccaagctctataactttcatgtacacaaaagtacattccagttctcaactcctcatctaaaaagacagtttggagaccaggacacggtgactgctttcc

SEQ ID NO: 210754 - DNA, 81 bp, Homo sapiens
  chr6:35033867-35033948
  hypo
cctccctgttcgtcgtctgtcacgcgggccttcatttgacctacttacttcatgaggcataaactccgaagaggacacagt

SEQ ID NO: 210755 - DNA, 85 bp, Homo sapiens
  chr6:35109282-35109367
  hypo
ctggaactgctgagacgaggccagagcatgcatggggcttttcttcaggctgtttggacagccgagaagccgagccacacccagg

SEQ ID NO: 210756 - DNA, 146 bp, Homo sapiens
  chr6:35109423-35109569
  hypo
tgtgggagaagcggaggagccgccagggctggggccaggctctgcccactggggttccgcccgttgtcgccctccgcctcctgggctctagcccttgcctttcttgactctaagtctactctgtcgcccttgcagtgatgtgaaga

SEQ ID NO: 210757 - DNA, 198 bp, Homo sapiens
  chr6:35374508-35374706
  hypo
aaccacttacttacacctcccgaaactgagaacagttttaccggttctggtgaaaaaaacccactaccagctcatatgtgggagtgggagctgaggctctgctgagtaacacggcccagtgcacacagctgtcagggcctggcccggctcgagtcctgctgtgtccgaagctctgccgttttctgcttcgtcctctag

SEQ ID NO: 210758 - DNA, 318 bp, Homo sapiens
  chr6:35374886-35375204
  hypo
tcttccccagggtcaccagaggctcagatgctgtgttgtcaagtatatataccaggcagtattgtagcttttcctcctctgttactgcctgctaagcggggaccccacatcttcacgtcctcctcttcctggctctcatcaccacagcctggtgtgcattgccccgtgtccactgacacccacgccacatgggtccaaaaacagagtgtgttctcattgcctcatcccactcaccctgggctctgccgccactgcgctgtggctctcgggggtcccaccatctgacccttgtcacccgtgctgctccttctcttggga

SEQ ID NO: 210759 - DNA, 360 bp, Homo sapiens
  chr6:35454135-35454495
  hypo
cggccagcggctggcggcctccgacgtcaccaaaccggttgggtgagagggcagagagcagggggaagggccgcagtcccgcccgcgccccccggcacgcaccgtacatcttgccctcgtctgacaggatgatcttccgccggccgcagggcgggtagatggccagggcctcctggaagctctgctcgatgtccgggctccacacgccctccgcatcgttgtccagccccttgtccaggccctcgggcccatcctcccgggcctccccggggctgctgctggcgttccagctgttggacgctattgtgctggttgctctgggctctgggcctgagcccactgggcggctgagcctggggg

SEQ ID NO: 210760 - DNA, 38 bp, Homo sapiens
  chr6:35944304-35944342
  hypo
tgtatggtattagaagccctcgcttttttttttttttt

SEQ ID NO: 210761 - DNA, 130 bp, Homo sapiens
  chr6:36165692-36165822
  hypo
tggggaaggagaagatggagcggctttcatgaaagtgggcgccgcaccgcctgtctgcgctgtttggggtcggtgtggaggcagatgttctcacctcttctagggcctcggtgcctttggaggggtgggt

SEQ ID NO: 210762 - DNA, 219 bp, Homo sapiens
  chr6:36198269-36198488
  hypo
ctggaaggccgcaagaccagcatccgcaagtcagtgcaggtggcctatgaccgtgcgatgatccacctgagcagagtccgggggccccactccttcgtcacttccagctacctgtaagggcagggctgggcctgcatccgcttgccctgcctccatcccgcagggcacagagaagcctcttctgcccctgccagatgtatggccggcagcttccccctc

SEQ ID NO: 210763 - DNA, 60 bp, Homo sapiens
  chr6:36214794-36214854
  hypo
tcctcctgccccctgcctggtggtttcaccatccacttaccagcccgccgatggtgccct

SEQ ID NO: 210764 - DNA, 59 bp, Homo sapiens
  chr6:36238260-36238319
  hypo
gacccggacacccctcactccatctccttctcgggcagtggattcctctccttctacca

SEQ ID NO: 210765 - DNA, 120 bp, Homo sapiens
  chr6:36392402-36392522
  hypo
gagactccgtctcaaaaaaacaaaaacaaatacaaaaacagatgaagattcaaaatttcagtcaattcagtgctttctaaaaaatggataccaggccggtcgcggtggctcacacctgta

SEQ ID NO: 210766 - DNA, 38 bp, Homo sapiens
  chr6:36406489-36406527
  hypo
cgcccggcaggattagcgcaacaccatgttttaatgca

SEQ ID NO: 210767 - DNA, 102 bp, Homo sapiens
  chr6:36599663-36599765
  hypo
agagagcagagaaccctacacgatgtctgcaggacggggctgttcccgcctcacccctgtcttatcaaacccccttactgggctttccagctttccaaacac

SEQ ID NO: 210768 - DNA, 229 bp, Homo sapiens
  chr6:36713048-36713277
  hypo
ggctccctgaaaggcaagtgcgtgggaagagaaaccccctcccaccacccagaggcagagctggtgtggaaacagaggccttgtgagtgcctggaggcggtggcagcggcactcacctggccacgtgggtgaccacgggggcaaagttggtggggccgtacagctgcacagtgcgcaggctgcggtggtaggcctccaggatgccgtcgatgccacagcatgaggggtt

SEQ ID NO: 210769 - DNA, 45 bp, Homo sapiens
  chr6:36831606-36831651
  hypo
gcttgagttgctgtcttcctttggcttccacgactccacattctc

SEQ ID NO: 210770 - DNA, 327 bp, Homo sapiens
  chr6:37023812-37024139
  hypo
gacatgggccacatcggccacatcttctgagctgcggggtggaggcctggctgcccacctgcattccttactctgcgtacccatgatctcatcccggccctcagccacccacagggcaggaggctttgccccattgtgcagatgagacagccatgccctgccctgggatggtcatttggcctgggctcagggcactctagtgggccccaggctccggcggggtgagtggaatgtggtcacggaggccaccccacgctgtcttgttgggtttaatgagccccattggtctgtccataccctgaataagctctggtctaccgaccctcc

SEQ ID NO: 210771 - DNA, 94 bp, Homo sapiens
  chr6:37033766-37033860
  hypo
aataaggaacaaaacaagattgatggaacctgcagcggcagcccatctagagcaatttgtgaagaattaatcttgtgcacgccctaattgaaaa

SEQ ID NO: 210772 - DNA, 40 bp, Homo sapiens
  chr6:37100545-37100585
  hypo
gaaaagtagacctgccgggcgcggtggctcacgcctgcga

SEQ ID NO: 210773 - DNA, 111 bp, Homo sapiens
  chr6:37275483-37275594
  hypo
aacaacaaggacccgaatcaggtaaaccagaggctttggaaaatagaaaggccatctgcagctgaggcgttggagcctcttggtccggccggtcaggttgaatcatgctgg

SEQ ID NO: 210774 - DNA, 86 bp, Homo sapiens
  chr6:37352725-37352811
  hypo
aaggtcaggatgaggcgggagtgtccacatgcttgtactcagatagtatataacactgtattcttaagattttttttttttgagat

SEQ ID NO: 210775 - DNA, 74 bp, Homo sapiens
  chr6:37358449-37358523
  hypo
aagcagggagtccacggaagggaaatacaggctcctcatttatttatttctcttctttttctccaaagcaaaga

SEQ ID NO: 210776 - DNA, 335 bp, Homo sapiens
  chr6:37358553-37358888
  hypo
tttgaaagactgccaggtagtgcgagcctgagatggtctggaggattctctctagccgtgactccgctgctctgaaggtcaactgagaagtcttgtgggacagagacttgagttaggaagccctcagtcacttgccttccacggtggccagccctgctgccatcattggctgaagcaccaccaggattcacggcacccaactgcttcagggtacttcgtagactctgcctcactacatgtcgaaagagttatttgagttctcttctgtttttttttaatttgttgttgttgttactgttttgatacctcggaaacacctccgttgacagttgttt

SEQ ID NO: 210777 - DNA, 187 bp, Homo sapiens
  chr6:37450650-37450837
  hypo
tcttcctgcccccaccgtccaccctccgctagtcagaccatgacatttactcagcagacgggaacagctttgtgttctttattgcctctcccttgggctaagggagggaccagcaccatgtccttctggagacccggaaccccccagcaggccagggaggcaaggcctgggccgccaggaagccatg

SEQ ID NO: 210778 - DNA, 388 bp, Homo sapiens
  chr6:37461096-37461484
  hypo
ccccccgatatctattttttgataaactagcaaaagcttgttcatcgctgaaaggctcaaagcacttttcaagaactggcatccaccccgagccttatgaattcattaattaagatgctggcagacagccactccacacacgccgccatccagccgcgctaggtaatgaggttttagtctcctgacccccgtcaagtggcgcagagccagatgtaggctgccgcgagaaatcacctgcccaatggcgacctgtcgctctcgcctggcagcaggtgaggctcatttaatggtcagcggcccctgaacagtcctctgcgtgctgcgagcctttctcccagcccctggcttggggttcagggtcccagcaaggtggcgtctaaccgcctgc

SEQ ID NO: 210779 - DNA, 447 bp, Homo sapiens; identical to SEQ ID NO: 200424
  chr6:37665260-37665707
  hypo

SEQ ID NO: 210780 - DNA, 102 bp, Homo sapiens
  chr6:37721653-37721755
  hypo
ggagcgggcaggggcgcgtggggggcctggccaaggagcgggcagaggcacgtggggggcctggccagggagcgggcaggggggcacgcgggcctggccagg

SEQ ID NO: 210781 - DNA, 166 bp, Homo sapiens
  chr6:38084362-38084528
  hypo
atgaggcttcaccagtaaaacggccacgactacttgagaatacggaacggtccgaggaaaccagtcgatctaaacagaagagtcgacgtcggtgcttccagtgccaaaccaaactggagctggtgcagcaggaattgggatcgtgtcgctgcggtaagcatctccc

SEQ ID NO: 210782 - DNA, 233 bp, Homo sapiens
  chr6:38118812-38119045
  hypo
cgttttgaaagaggcggccagcagactctggggacctcagacgtctgtgctccacatgcgtatcggccgctctagagattgcctgggaagctggagggaatgggagacaccccggtgcagctgcgccctgagttctctgagcctggctcctggctccctgcagccctcccctccttgttcctgacccagagtgactttacctgtaccggctccctgctcgataggcctcttga

SEQ ID NO: 210783 - DNA, 82 bp, Homo sapiens
  chr6:38122002-38122084
  hypo
cccgaagaggctgtgcgagcccttcccggccctccccagggccccccgccccctcctctgcctgctgcgtggaggcagccat

SEQ ID NO: 210784 - DNA, 63 bp, Homo sapiens
  chr6:38134384-38134447
  hypo
agccctccacctccccgccgccctcacagcagagccctccacctcccccgcactcccatagca

SEQ ID NO: 210785 - DNA, 186 bp, Homo sapiens
  chr6:38646372-38646558
  hypo
tccctcactgctgtgtgcatcggcacctgccctctcgcttgttcagatgtccttaccagtaaacaagggcagtgcaggagccttgtgcttgtgagaaactgagaaaaactggtagggccgaatgatctccccagccctctctccacgcccagggctagggaataacactatcggaagtgtctccta

SEQ ID NO: 210786 - DNA, 93 bp, Homo sapiens
  chr6:39127059-39127152
  hypo
tgctagctgagatctcggagagaaggaggaactggcagggaagtgctagcaaaatctttgtaagggacagatactttaatactcaagaagtta

SEQ ID NO: 210787 - DNA, 382 bp, Homo sapiens
  chr6:39158588-39158970
  hypo
cgtcccggtcatctcgggacaccctagggtgaggggggaagaggccatcaaaggtggggtggggagccggccctgcctcatgtgcccttggggctgttagccttgttgtactcattcatcagctgttcgtaaggcacagagagctcagactcagtgctggtgaaggtggactcggaggaggaggggaactcgcccatgttcaggggcgccttggcttcagccccctgctgggggctctcctcccctgccaagttgtcctctagcgaggacttggaggtctcctcgtctgagaggccagcctccgtgttcacgaaggtgatgctggcgtcctggaagatgagtgggtggtagtcctgggcgtcccatggctcgcattcctcgc

SEQ ID NO: 210788 - DNA, 103 bp, Homo sapiens
  chr6:39162023-39162126
  hypo
agtcaccatgaatacgaagggtgggatcaccaggtggactaggacgccccacacgatgaagatgactgtgcacgtgatctgcgccttccgctgatggggagca

SEQ ID NO: 210789 - DNA, 208 bp, Homo sapiens
  chr6:39895167-39895375
  hypo
caggaactgcctccgcctggacacctcctgcgaggacagaccagggaggaagcatgggcccctgctaccgggctgggaagaggcacaaggagaaccgcctgccccctcccttactctgacatctgtgcggagcttccaactcttccacatgtttgggctctgcaatgttggggaagctgggattgtccctctcgttgagaaatcagct

SEQ ID NO: 210790 - DNA, 50 bp, Homo sapiens; identical to SEQ ID NO: 200428
  chr6:39902362-39902412
  hypo

SEQ ID NO: 210791 - DNA, 170 bp, Homo sapiens; identical to SEQ ID NO: 200429
  chr6:40554350-40554520
  hypo

SEQ ID NO: 210792 - DNA, 183 bp, Homo sapiens; identical to SEQ ID NO: 200430
  chr6:40554860-40555043
  hypo

SEQ ID NO: 210793 - DNA, 73 bp, Homo sapiens
  chr6:41001834-41001907
  hypo
ctgggcttgggacagcgatggggcgtccgacaggtcccacaccaggatcaaagacacccgctcctggcggccc

SEQ ID NO: 210794 - DNA, 151 bp, Homo sapiens; identical to SEQ ID NO: 200432
  chr6:41339070-41339221
  hypo

SEQ ID NO: 210795 - DNA, 360 bp, Homo sapiens; identical to SEQ ID NO: 200433
  chr6:41340090-41340450
  hypo

SEQ ID NO: 210796 - DNA, 158 bp, Homo sapiens
  chr6:41511550-41511708
  hypo
tgagccttggttccggccaccgccaaagcacctgcacctgccctgagtcctgtgaaggaacaaggacagaaagaggaccctcctgcctgctcccggtcactcccactttggagccaagggctactcttttcaaccttcttaacgaagctcttgcacca

SEQ ID NO: 210797 - DNA, 556 bp, Homo sapiens
  chr6:41773903-41774459
  hypo
tggctgagcacctggaggatggagttcatgtagcaggtgttgcccaggttgcgcaggcccgtgacgcctggggccatggccggctggcgacgcagcttgagtgtggcggcgggcactctgcgtgaggtagggagggcggcggggcgcgaggcagccgggcccgcgtcgcggggcgtgtgcaggagcagccgtgcactcttgcgcggaggggtgctggccagctcctccagcagccgccgtttcacctcgcgccgccgcctccgcgcctcctccttcttgcgctccagggcctcctcctgccgccgctgctccagcttcgcctggccccgggagctcttctcgaaccacagccgcagcgtcctggccagcaggcgctgacgccggtaccacagagccgtgagcatctgcggctgtccctgaggagcgcgctgcggcaggaccacgtcctcacccgaagccatggaccgcagcgtccgcccacgtctcaccggcgtgtcctgtttctggccccggaccgccaggagggagcttcttagcagcttcaggtccccctctg

SEQ ID NO: 210798 - DNA, 200 bp, Homo sapiens
  chr6:41827196-41827396
  hypo
cttctatgtgctctccgagcacgtgtgtactttcccttattcagcatctaccatgctgtactgtaattgtctgtctgcttgactgtgtcccaactataacaaacctgaagaagacatcgtgccgagaacagagcaggaacctaataaattttgttgaattaaagaccgagtgaataaacaaataacgttctacttcagtg

SEQ ID NO: 210799 - DNA, 203 bp, Homo sapiens
  chr6:42047606-42047809
  hypo
cattcccttggtgaatttggaaacttgaaaaacttggggacttgacagcaggctccatgttcttctggcctcactgtactgtgtaaggaaagagctgcttgtcaggaacggaagaggggacgctagtaaaaaaaaaaaaattggattccccaactggactaaataggagtttttcaggtttgtagtaacgtgaaactctccta

SEQ ID NO: 210800 - DNA, 333 bp, Homo sapiens
  chr6:42073969-42074302
  hypo
agttggagagtcttggggaatgtagtccacagagggcagggtcaggctgggggcagcctctgtctctgtcaggctgctgccgccaagactcttttcaggaacacctgggggagtgtcctttgctggcaggctcaggagagtctccttctcaggcaggcgggggcccttcttgccctccttgctctgaggggccactgttgggcctggcctgtgactgaggaatcggtcctctctcctggagccacagagataggctgccagctcgttccgcagcttttccatctggctggggtccctccagtccacaggtgctgaagacgctgtgttctctgg

SEQ ID NO: 210801 - DNA, 85 bp, Homo sapiens
  chr6:43057813-43057898
  hypo
cagcaattttaggcgagtctctacttgggcctttccaagagactcccttttccaggcactgcacagctgccgctggtgacccaga

SEQ ID NO: 210802 - DNA, 266 bp, Homo sapiens
  chr6:43096727-43096993
  hypo
cattgtcttcatcaagcagccgtcctcccaggatgcactgcaggggcgccgggcgctgcttcgctgtgaggttgaggctccgggcccggtacatgtgtactggctgctcgatggggcccctgtccaggacacggagcggcgtttcgcccagggcagcagcctgagctttgcagctgtggaccggctgcaggactctggcaccttccagtgtgtggctcgggatgatgtcactggagaagaagcccgcagtgccaacgcctccttca

SEQ ID NO: 210803 - DNA, 31 bp, Homo sapiens
  chr6:43118951-43118982
  hypo
ttttttttttttcttgagaccgagtctcgct

SEQ ID NO: 210804 - DNA, 42 bp, Homo sapiens
  chr6:43119871-43119913
  hypo
gccactgcgcccagcccacccgccctcttctttaaccttcct

SEQ ID NO: 210805 - DNA, 65 bp, Homo sapiens
  chr6:43325214-43325279
  hypo
tgtgtcatcataacggggtcttttggcctcccggctcctttcttcagatcgtatggagtagcctt

SEQ ID NO: 210806 - DNA, 101 bp, Homo sapiens
  chr6:43334539-43334640
  hypo
ttacatacacacacacgcacacaaactgtaactcccttctctgctcttagtccttttttttttgttttgtttgagacttgctctgtcgtccccagcctgga

SEQ ID NO: 210807 - DNA, 319 bp, Homo sapiens
  chr6:43456970-43457289
  hypo
gagttgtttctgccgttgatgggagagcttcttgctctgttgctcgtgttgcttgttctgagaggggagaatagtccctgttgctcctctggggctggttccctgggaagtgccacccctggccaggcggcagtgtgcagcccgtgctgttgactggcccagctgtaggccaggcacacactgccccattgtactgtgctttccgacgcagcccttgtcatagcctctaatccttgggctgcttctctcccagcccctcagagcctgtgggaggtggtgggatggactctgctggcactggtgcgggatgggttgcagc

SEQ ID NO: 210808 - DNA, 98 bp, Homo sapiens; identical to SEQ ID NO: 200449
  chr6:43596713-43596811
  hypo

SEQ ID NO: 210809 - DNA, 307 bp, Homo sapiens
  chr6:43745061-43745368
  hypo
agtaggagggacttacgttagattttggaaggacttgcctgattcggaagctccaaagagtggcattacagagctgggtggagagaggggctagccatcttttgtgtcgcccaccgggctcatgtgtcatcgcctctcatgcagtggtgaagttcatggatgtctatcagcgcagctactgccatccaatcgagaccctggtggacatcttccaggagtaccctgatgagatcgagtacatcttcaagccatcctgtgtgcccctgatgcgatgcgggggctgctgcaatgacgagggcctggagtg

SEQ ID NO: 210810 - DNA, 177 bp, Homo sapiens
  chr6:43748286-43748463
  hypo
gacacgcctgtgtgcgcccgcgcatgcctccccagagaccacctgcctcctgacacttcctccgggaagcggccctgtgtggctttgctttggtcgttcccccatccctgcccaccttaccacttcttttactccccccaccgcccccgctctctctctgtctctgtttttttattt

SEQ ID NO: 210811 - DNA, 76 bp, Homo sapiens
  chr6:43755593-43755669
  hypo
cccaatcactgaccacgtgccgacccctacattggttaacactgaatctgcacagcagccctgggaggtaggtgct

SEQ ID NO: 210812 - DNA, 117 bp, Homo sapiens
  chr6:43890879-43890996
  hypo
cacatacatgagcacgtggatacatacgcatgtacgcctatccatgaggtcaccctatacatgtacattccccaggcaccttcccacactcagacacacaaacgtcccacactgcac

SEQ ID NO: 210813 - DNA, 165 bp, Homo sapiens
  chr6:43893235-43893400
  hypo
agccactgcgtccggcctgtgtatctattaagcacctcctgtatacccagcacctgcaaagccttgggacacacaacagcaacccttcagggaagatcccaagccaggtgcctgtcttttgcctccttggatcagtgacgaagaggtcagcgtcactccatttct

SEQ ID NO: 210814 - DNA, 43 bp, Homo sapiens
  chr6:44086953-44086996
  hypo
tgttccatcaagaatactgacgtcagctgggcgcggtggctca

SEQ ID NO: 210815 - DNA, 270 bp, Homo sapiens; identical to SEQ ID NO: 200451
  chr6:44095871-44096141
  hypo

SEQ ID NO: 210816 - DNA, 218 bp, Homo sapiens
  chr6:44120364-44120582
  hypo
cgcctggatgatgtgcgtcttcacggtggtcatgacctacagtatcacctgccccatcatcgtgcccttcggtaggcaccgccgcgccgggacctgggccctgctcggggggacccaggacttcaccctctccactctaggaatgcaggccaccccgagtggacagggcccggctgggagaccggcccctcggggctcccgcccggtccctggctcag

SEQ ID NO: 210817 - DNA, 36 bp, Homo sapiens
  chr6:44166169-44166205
  hypo
gggattacaggcgtgagccaccgtgcctggcctatc

SEQ ID NO: 210818 - DNA, 522 bp, Homo sapiens
  chr6:44222494-44223016
  hypo
tttagacggccccgcgcgtagactctgagcaggagggcagcaaagaccacagccacccccagccctcccaccacagtgacagtgtggccatagagaaggcaggaaagaaggatggcaaaggcctggcggagggtcatgatgatggtgaagacggcagccccaaactgcccaatggtgtaaaagatgaagagctggccacatgcggagcagatggagagtagcagggcatgggcagcaaactcactgtgtcgccccatgaagcgggttccctccagtagggccccctgttctagcagtgagcccactgtgaagaggcaggagaagaaattgaccccaaacatcatctgcaccgatgacatcttataggcaaacagggcatcctgccagtttgaggtgaagctgtcaaaagcaatataacctgccagtaagatgaggcctgagagtgtggtggctggggagctgcggggctctggtccgctggatagcagaaacatgctgaccccaatggagatgagggtggct

SEQ ID NO: 210819 - DNA, 237 bp, Homo sapiens
  chr6:44227780-44228017
  hypo
tcctcagtcaggtcctggggcgtctcatcctccacattccgcagcagggagtcagcacccgccttgcacagagtggatgagatgcccatgagaccccggccagctgccaggtgcaggggtgtgcacccgttcagcatgcgggcatctacctgggcaccagcctggagcaggaactgtaccaggccccgctcttgggtttccacagccaggtgcagcgctgtcttaccactggtgccc

SEQ ID NO: 210820 - DNA, 207 bp, Homo sapiens
  chr6:44695947-44696154
  hypo
gtgggtgcccctctctccttttctgattaggcctctcaggccttgcgccatctcgtgctaggatgcctcttcagtctctttctcactacttttatcctcacgctctcagctctggtcgtgtgccctgccttggggcagacacctcctggactgcaccctgaaatgaatgtctgaagcctagccctgccctccggaaagaacagccag

SEQ ID NO: 210821 - DNA, 220 bp, Homo sapiens
  chr6:45608783-45609003
  hypo
ctcactttgtcggcggagggtcaggactggccctgtagtctgctcataggacctggctgtcacccacaggcaattcatcctgaccgcgtctgcaactgtgtatggaaaacaacagcagtcgctttaacagcaaaagcaacaaacacacaccaaacgggatcatccctgtgctcccaggtggtgggaggcagatacgggagggaggacacattttcctgcg

SEQ ID NO: 210822 - DNA, 373 bp, Homo sapiens; identical to SEQ ID NO: 200459
  chr6:46097249-46097622
  hypo

SEQ ID NO: 210823 - DNA, 535 bp, Homo sapiens; identical to SEQ ID NO: 113429
  chr6:46097694-46098229
  hypo

SEQ ID NO: 210824 - DNA, 87 bp, Homo sapiens; identical to SEQ ID NO: 200463
  chr6:46816765-46816852
  hypo

SEQ ID NO: 210825 - DNA, 242 bp, Homo sapiens
  chr6:47202118-47202360
  hypo
gccttccccgaaacacacatttgatagcatcatgaggataaagggtggccgatagctctccaccgggcagtgcgagctgcaaagattttggaggcgtgtcttcgccagccaatggcgaggttactctcgggccagcgtatcttgaagttttggactggtcttcctgggcaggtaattcagatgactcaactctcagctacaactggactgtggacggggagggacgaatcccaggggctctt

SEQ ID NO: 210826 - DNA, 176 bp, Homo sapiens
  chr6:47202453-47202629
  hypo
atgtagagtcacagcggagaaggggctccgactcatccacgaagaagcccttgttcttgtcctgtggggaaggctccaccgtcaggagagcggaattctcaagtttcgcgttggggctggggatggggctcgggctaagcgggctggggctcatcgggagagctagtttgtcagtt

SEQ ID NO: 210827 - DNA, 41 bp, Homo sapiens
  chr6:47412331-47412372
  hypo
gcctcgactcggcatcagagggagaccgtggaaagtgcgag

SEQ ID NO: 210828 - DNA, 98 bp, Homo sapiens
  chr6:49708447-49708545
  hypo
attctgcaacaacagaaaaacgcttgctctagtgctatgtgtcagcaaagtagcatcgaagaactgtaagacccatcctgtgtggggctggatgcggt

SEQ ID NO: 210829 - DNA, 954 bp, Homo sapiens; identical to SEQ ID NO: 200474
  chr6:52226797-52227751
  hypo

SEQ ID NO: 210830 - DNA, 289 bp, Homo sapiens
  chr6:52267886-52268175
  hypo
catagttccttgtccgtcttagctgcattcgtgtctcactgcggctttgccaattttcctttcttttctgcaggttgcataccctgtcctgagggcgcggcacggagtgcatgcgggccgctgccatgacgaccgccatcttggagcgcctgagcaccctgtcggtcagcgggcagcagctgcgccgcctgcccaagatcctggaggatgggcttcccaagatgccttgcactgtcccagaaacggatgtgccccagctcttccgggagccttacatccgcaccggcta

SEQ ID NO: 210831 - DNA, 86 bp, Homo sapiens
  chr6:52344289-52344375
  hypo
gcatattagtatgtcgtttaaagaaagctcattagtttctgtcataaatgcatacctgtgaatttatcattggagggttaatacta

SEQ ID NO: 210832 - DNA, 180 bp, Homo sapiens
  chr6:52344405-52344585
  hypo
ccaagctaagtgtgttgctaccttctctccagtgtttggtcaccggttcatcatccttgatacagacgagtatgttttgaaatacatggagagcaacgctgcccagtattcaccagaagcactcgcgtcaattcagaaccatgtccgaaagcgagaagcgcctgctccagaagcagaaag

SEQ ID NO: 210833 - DNA, 56 bp, Homo sapiens
  chr6:53052103-53052159
  hypo
gcctccacctgtatttcttcctcattcctcccaagtttacttgtcgcaggtagaaa

SEQ ID NO: 210834 - DNA, 206 bp, Homo sapiens
  chr6:53111001-53111207
  hypo
ggacaacactagttacgagctggaagcacgtgaatcctttaagagcccgagcaaagggcaaaggtttagtatgggattgttggagtttctttctattatatattgtaccttcaccaatagaactaaaagtctaaaatcacactatttaaaaaccgagaatgtatcagcattaaccagattgatcctacaggcgctgcttgactttc

SEQ ID NO: 210835 - DNA, 324 bp, Homo sapiens
  chr6:53385459-53385783
  hypo
ataaaccatctgtaacgtatgaggattgtaaggtggaatgcccgggtcgtgacttgctcttttcattacctgtatctctgagagatctgctggggcatgttaatataggaactaacctgggaaatgaagttattgtgcaaagagcctgattttcttctaatatagaagtagcctccttccggcgttttcgcatgttggcctcaactgtattgaactcggacattgttcctccgtagggctgtcctggtgtcccttcaatcatgtaactcccatactctggtctccaaagggtaggatggctacggaggagaaataacttagttc

SEQ ID NO: 210836 - DNA, 539 bp, Homo sapiens; identical to SEQ ID NO: 43077
  chr6:53409552-53410091
  hypo

SEQ ID NO: 210837 - DNA, 147 bp, Homo sapiens
  chr6:56894236-56894383
  hypo
ctgatcccgcccttcggtggaaaagttcagtctgaacgtttagcgagtgctgcctctaaagagagcaatcactacacttacggctgagactttgcgcttagtagttcagaggcccccaggcagactacagaccgtgacaaaaggtgt

SEQ ID NO: 210838 - DNA, 60 bp, Homo sapiens
  chr6:57042600-57042660
  hypo
gtagccacagtttgcgcaaaattgctgttgtactcctcctaagtctcccagcagtttgcc

SEQ ID NO: 210839 - DNA, 155 bp, Homo sapiens
  chr6:57096923-57097078
  hypo
atgcaagacaaaacaagttccgcaaaacaaaacaagcgttccgttgttgtattaatgatggttatagacatcgagtttcagagccacgttgatgagtccagattctggtcctcaaatttgtaagtttaaaaattaaaattttagggactgggcgt

SEQ ID NO: 210840 - DNA, 52 bp, Homo sapiens; identical to SEQ ID NO: 200489
  chr6:64283088-64283140
  hypo

SEQ ID NO: 210841 - DNA, 100 bp, Homo sapiens
  chr6:64354747-64354847
  hypo
atcctttccctattcgtggccccaggcagtcactaatttgttggattttttttttttttttgggcacaggttctggctcttttgccaggctggagtgcag

SEQ ID NO: 210842 - DNA, 294 bp, Homo sapiens; identical to SEQ ID NO: 200490
  chr6:69344649-69344943
  hypo

SEQ ID NO: 210843 - DNA, 276 bp, Homo sapiens; identical to SEQ ID NO: 200495
  chr6:71123138-71123414
  hypo

SEQ ID NO: 210844 - DNA, 230 bp, Homo sapiens; identical to SEQ ID NO: 200496
  chr6:71123474-71123704
  hypo

SEQ ID NO: 210845 - DNA, 304 bp, Homo sapiens; identical to SEQ ID NO: 43113
  chr6:71123746-71124050
  hypo

SEQ ID NO: 210846 - DNA, 222 bp, Homo sapiens; identical to SEQ ID NO: 200499
  chr6:71665723-71665945
  hypo

SEQ ID NO: 210847 - DNA, 38 bp, Homo sapiens
  chr6:71874697-71874735
  hypo
gggactcgccgctcgcacgcccttgggcagcggcgggg

SEQ ID NO: 210848 - DNA, 87 bp, Homo sapiens; identical to SEQ ID NO: 71805
  chr6:71874758-71874845
  hypo

SEQ ID NO: 210849 - DNA, 164 bp, Homo sapiens; identical to SEQ ID NO: 200500
  chr6:72129568-72129732
  hypo

SEQ ID NO: 210850 - DNA, 106 bp, Homo sapiens
  chr6:72806769-72806875
  hypo
acaaagtttgctgatgggtgcggtcatctctgctcctattgtcgcactaagttctgtgcgcgctgcggaggccgcgtgtctctacggtcaaacaacgtgagtattc

SEQ ID NO: 210851 - DNA, 93 bp, Homo sapiens
  chr6:72806905-72806998
  hypo
taaaaactattacgccttccaaacatgagaacacgtgcatcttagaaagcagacatgtgcataaacatacacgttaaaatgaacctccctcat

SEQ ID NO: 210852 - DNA, 55 bp, Homo sapiens; identical to SEQ ID NO: 200505
  chr6:74019358-74019413
  hypo

SEQ ID NO: 210853 - DNA, 116 bp, Homo sapiens; identical to SEQ ID NO: 200506
  chr6:74020094-74020210
  hypo

SEQ ID NO: 210854 - DNA, 178 bp, Homo sapiens; identical to SEQ ID NO: 200507
  chr6:74161321-74161499
  hypo

SEQ ID NO: 210855 - DNA, 86 bp, Homo sapiens; identical to SEQ ID NO: 200513
  chr6:76458864-76458950
  hypo

SEQ ID NO: 210856 - DNA, 104 bp, Homo sapiens; identical to SEQ ID NO: 200523
  chr6:80657600-80657704
  hypo

SEQ ID NO: 210857 - DNA, 41 bp, Homo sapiens
  chr6:82588584-82588625
  hypo
aaagataattagggccgggcgcggtggctcacgcctgtaat

SEQ ID NO: 210858 - DNA, 43 bp, Homo sapiens
  chr6:83901419-83901462
  hypo
aacatcggccgggagcggtggctcacgccagtaatcttagcac

SEQ ID NO: 210859 - DNA, 77 bp, Homo sapiens
  chr6:86325374-86325451
  hypo
ctttagggctgggagcggtcatgcctgtaatcccagctatgcgggaggctgagtgaagcaggtgaatcgcttgaacc

SEQ ID NO: 210860 - DNA, 120 bp, Homo sapiens
  chr6:87890686-87890806
  hypo
ctagggcgagcatgcagacaggtaggtgcagagaccaggaggaagctttgggctcttggccccatggtaatgtctaggggtgagtgcctgcaaccccactgttacaaagctctttctttc

SEQ ID NO: 210861 - DNA, 31 bp, Homo sapiens
  chr6:88039271-88039302
  hypo
gtgctgggattgcaggcgtgagccaccctgc

SEQ ID NO: 210862 - DNA, 101 bp, Homo sapiens
  chr6:88280033-88280134
  hypo
tttctaaaagctcctcgcacgactgttaatacatagccaaagttgtgaactattaccctaattggacactcaaagttaggtggaagagacattcccatgta

SEQ ID NO: 210863 - DNA, 120 bp, Homo sapiens
  chr6:89376382-89376502
  hypo
ctccgggacaaaccttggatgtctgtagactgggagctgtatgtggacggaagcagcttcattaacccacagagagagatgtccgctggatatgcagtggtaaaccttggacactgttat

SEQ ID NO: 210864 - DNA, 142 bp, Homo sapiens; identical to SEQ ID NO: 200550
  chr6:89827793-89827935
  hypo

SEQ ID NO: 210865 - DNA, 63 bp, Homo sapiens
  chr6:90052741-90052804
  hypo
aagactgagagaggccgagatgtttatacaaaaagccttgagtagctacggagacccatcaaa

SEQ ID NO: 210866 - DNA, 304 bp, Homo sapiens; identical to SEQ ID NO: 200552
  chr6:90121293-90121597
  hypo

SEQ ID NO: 210867 - DNA, 267 bp, Homo sapiens; identical to SEQ ID NO: 200556
  chr6:90142635-90142902
  hypo

SEQ ID NO: 210868 - DNA, 221 bp, Homo sapiens
  chr6:90367696-90367917
  hypo
acgaaattgctgaatgaggcatttttcagaatgtatccctgtctttaaaaaataactgttcagtcacgcgttgcttaaagaatgagatgtggtctgttagatgtcaacaacaaaacaaacaacaaaataaccaaacataaaccaactaatgctacacagaatgtgatgtcggacagggagaagagaccctactaagaggcagctggcggctgcagtgaaac

SEQ ID NO: 210869 - DNA, 898 bp, Homo sapiens; identical to SEQ ID NO: 200557
  chr6:91005702-91006600
  hypo

SEQ ID NO: 210870 - DNA, 94 bp, Homo sapiens
  chr6:96085019-96085113
  hypo
gtcaggctctgaggactacccgcctcttctccatgtttaccctgcagcatacagcgggggagagcggtgatgcggtaccagggttcagagtggc

SEQ ID NO: 210871 - DNA, 66 bp, Homo sapiens; identical to SEQ ID NO: 200588
  chr6:99962859-99962925
  hypo

SEQ ID NO: 210872 - DNA, 180 bp, Homo sapiens; identical to SEQ ID NO: 200589
  chr6:99963487-99963667
  hypo

SEQ ID NO: 210873 - DNA, 146 bp, Homo sapiens
  chr6:100841322-100841468
  hypo
ctaatgcttggagttcgggaaccctttcacctgctcttaccatggatcctgtggactgaagcgatgtgaggcatgctgttttcataggcttctctgctttctggggaggcctttgtcaggggcaaggctgcgcgagagccccacca

SEQ ID NO: 210874 - DNA, 155 bp, Homo sapiens; identical to SEQ ID NO: 200598
  chr6:105628083-105628238
  hypo

SEQ ID NO: 210875 - DNA, 43 bp, Homo sapiens
  chr6:105750346-105750389
  hypo
ttctgcagcgggtacggccgctccttccgcggctgctgcttgg

SEQ ID NO: 210876 - DNA, 104 bp, Homo sapiens
  chr6:105750646-105750750
  hypo
gcagcaactctttctccttcccgtgaaggtcccgagacttgatcttagccattgctgcacaggccgcccccgccgcctgctccgagggctaaatactctctttt

SEQ ID NO: 210877 - DNA, 196 bp, Homo sapiens; identical to SEQ ID NO: 200600
  chr6:106533849-106534045
  hypo

SEQ ID NO: 210878 - DNA, 156 bp, Homo sapiens; identical to SEQ ID NO: 200607
  chr6:106961023-106961179
  hypo

SEQ ID NO: 210879 - DNA, 34 bp, Homo sapiens
  chr6:107010364-107010398
  hypo
atactttaattttttttagacggggtcttgctct

SEQ ID NO: 210880 - DNA, 120 bp, Homo sapiens
  chr6:107562426-107562546
  hypo
tgggcaacagagcgagactcggtaaaaaaaaaaaaaaaaaaaagtattagtaatataagtcatgtacattttcacagctttaaggagaattaggtaattgctctacaaacctcttcttct

SEQ ID NO: 210881 - DNA, 36 bp, Homo sapiens
  chr6:107563806-107563842
  hypo
tgtgatcacagcttattgtaacgtcaaactcctggg

SEQ ID NO: 210882 - DNA, 314 bp, Homo sapiens; identical to SEQ ID NO: 200609
  chr6:107810308-107810622
  hypo

SEQ ID NO: 210883 - DNA, 183 bp, Homo sapiens; identical to SEQ ID NO: 200616
  chr6:108882164-108882347
  hypo

SEQ ID NO: 210884 - DNA, 44 bp, Homo sapiens
  chr6:108984287-108984331
  hypo
aggagttggccagcacggtggctcatgcctataatcctagcact

SEQ ID NO: 210885 - DNA, 99 bp, Homo sapiens
  chr6:109053387-109053486
  hypo
cggagtgatggatgcggcaggagtgttcaagcagtgcctctcccatctgcagcttcgtccggtttccagtcaagcactactgcacgcccagcaccccag

SEQ ID NO: 210886 - DNA, 162 bp, Homo sapiens
  chr6:109058636-109058798
  hypo
caggcatgtagatgtgtatccgtaacacaaaagcagtccaaataattcttttcagatcatagtatacagtttactggcctagaattagtttataatcagttgtggtcgggccaagaaaattattgatattgggccgggcgcggtggctcacacctgtaatcc

SEQ ID NO: 210887 - DNA, 120 bp, Homo sapiens
  chr6:109059981-109060101
  hypo
gcgcgcagggaaggatggccgccccaccctaatcttataaggcaaatcaactttccccttagctggtgccatcttctctgctccttactgtacaggtggctggcaaagaagggacgatgg

SEQ ID NO: 210888 - DNA, 429 bp, Homo sapiens; identical to SEQ ID NO: 200619
  chr6:109777177-109777606
  hypo

SEQ ID NO: 210889 - DNA, 143 bp, Homo sapiens
  chr6:109798005-109798148
  hypo
ggtcagagccttgctgcacacggtgcaggtgtacggccgctcgcctgtgtgcatcctggtgtggacctgtagcgagtgcttctgggcaaagccttttccacactcattacatttgaaaggtcgctcccctggaagaagagccc

SEQ ID NO: 210890 - DNA, 135 bp, Homo sapiens
  chr6:110768071-110768206
  hypo
tcaccatggcaagaaaaaagcgagcagccatgaaggtgtaataatcaactgcaaacgccgctgctattccaaacaaaaacatgctactgcttgtggcccacaagaccacccggcgtcctagcctgaaaaataaga

SEQ ID NO: 210891 - DNA, 48 bp, Homo sapiens
  chr6:110843341-110843389
  hypo
ggcttttgtccacatcggtgaactccactttgccgattcctgtagtgc

SEQ ID NO: 210892 - DNA, 187 bp, Homo sapiens
  chr6:110872232-110872419
  hypo
cacctcatctcccagcgccactgccctctcccggtccagtgcaagcttggacctggaccctgaatgagggaggtctatttctgggacactcctccactctcgctttccgctttgggaaatagttcctctagtgcgctgggctgagaggtaggacagagaaagggcagagggtcgtaaactaacaggg

SEQ ID NO: 210893 - DNA, 86 bp, Homo sapiens
  chr6:111022042-111022128
  hypo
gattatttccatcagtgttgcgccaggaatcgattctgaagtcaccaatgcagatgtttaagtcaactattttaataaattaattg

SEQ ID NO: 210894 - DNA, 45 bp, Homo sapiens
  chr6:111085015-111085060
  hypo
aactttgttcacagacgacgtaattgtctacgaagaaaatcccaa

SEQ ID NO: 210895 - DNA, 494 bp, Homo sapiens; identical to SEQ ID NO: 200622
  chr6:111408822-111409316
  hypo

SEQ ID NO: 210896 - DNA, 273 bp, Homo sapiens; identical to SEQ ID NO: 200623
  chr6:111409368-111409641
  hypo

SEQ ID NO: 210897 - DNA, 195 bp, Homo sapiens
  chr6:111673961-111674156
  hypo
gaaaaatgtgctcctcgtggtcagagcttcactggcaaaactgaaccgaccacctgcgtccaatccagaaggagcctctttgtggctcctcttagaacctccatgttgtgaccaccatagagaaatgtttagctataaatatgaaaatttatttcgagtggaaaattgtgtgggagagagcggaactaattatag

SEQ ID NO: 210898 - DNA, 212 bp, Homo sapiens
  chr6:111751866-111752078
  hypo
gatgccaaagcacacgccttcaagagtcccagcaaagaaaataaaaagaaagacaaagacatgcttgaagataagtttaaaagcaataatttagagagagcgcaggagcagcttgaccgcatcgtgaaggaatctggaggaaagctgaccaggcggcttgtgaacagtcagtgcaaattggaaagaagaaaaccagacggaacaacaatgtt

SEQ ID NO: 210899 - DNA, 164 bp, Homo sapiens
  chr6:111766137-111766301
  hypo
gtatagtggccaaagcgaaggagatttatggaaggcaatgattaacccagagaactaacctaggcagtcaagcaaccgatcacctcatcgttttcaagaatcaactacagataataagacggcaacaggagagaaatataagaagctctcggcatgtggccaac

SEQ ID NO: 210900 - DNA, 156 bp, Homo sapiens
  chr6:111872274-111872430
  hypo
cagccaaggcatcatcgggaggctagggcttgatggaaggggtaaggggggtggtgccgggcatctggttggagggaagtaggaacacaggcagaagcagagaagggcccttagtgctgccgagcacaggctgctgcttgacgcgcagccctcagc

SEQ ID NO: 210901 - DNA, 87 bp, Homo sapiens
  chr6:111886815-111886902
  hypo
aaactgtctcacagcgtctctataatcacggggagaaggaggattcgtagcccataaaacagccagttccaacgctgggtgattgtt

SEQ ID NO: 210902 - DNA, 796 bp, Homo sapiens; identical to SEQ ID NO: 200631
  chr6:117803613-117804409
  hypo

SEQ ID NO: 210903 - DNA, 33 bp, Homo sapiens
  chr6:119023866-119023899
  hypo
gagctggagttggccaggcacggcggctcacgc

SEQ ID NO: 210904 - DNA, 92 bp, Homo sapiens
  chr6:119254299-119254391
  hypo
gttaaatttaaatgaggtgacgatctcagaagtagcactggacagttagaaaccagctgtccaaataagaaacacttatttggggccgggcg

SEQ ID NO: 210905 - DNA, 367 bp, Homo sapiens; identical to SEQ ID NO: 200639
  chr6:123110491-123110858
  hypo

SEQ ID NO: 210906 - DNA, 275 bp, Homo sapiens; identical to SEQ ID NO: 200640
  chr6:124124018-124124293
  hypo

SEQ ID NO: 210907 - DNA, 151 bp, Homo sapiens
  chr6:126242092-126242243
  hypo
tcactgttgaagaggcaaagcgcaggaagagcacatgcagctactatgaagacgaggacgaagaggtgctgcctgtcctacggccccacagcgcgctcctggagaatatgcacatcgagcaggtgggctcgccctggccaccaagggtggg

SEQ ID NO: 210908 - DNA, 150 bp, Homo sapiens
  chr6:126426570-126426720
  hypo
ggcagtcagaagggacgtgggttgatcacgcaggaggtagctcaacatggtgcactggggaagaaccaagtacctggaagccagatgatgcggggtagaggcacagctcccccagttgttcggagacggaggcctcggtttcctcagagc

SEQ ID NO: 210909 - DNA, 139 bp, Homo sapiens; identical to SEQ ID NO: 200646
  chr6:127836526-127836665
  hypo

SEQ ID NO: 210910 - DNA, 52 bp, Homo sapiens; identical to SEQ ID NO: 200647
  chr6:127837749-127837801
  hypo

SEQ ID NO: 210911 - DNA, 335 bp, Homo sapiens
  chr6:128901370-128901705
  hypo
tctgcatcttccggataccatagcccacggacgccagcttggaggccccgctcactagcccatccagctggatagagcgcacacatgcctccagctgggtcatgtccgtcttattgtcccaaggcttgatgtccagcaggatggaggacttggccaccagcgagggattcttggccttcttggcgtacagccgcagccgctcctcccgcagccgccttgcctccttgtcttcctccttattgtcgctgccaacagatcaatgtcatcgtcctcgttatcctctgcttcttggccggggtcgtagtaaggggggcgaggggaggggcgctccactt

SEQ ID NO: 210912 - DNA, 280 bp, Homo sapiens; identical to SEQ ID NO: 200654
  chr6:131383361-131383641
  hypo

SEQ ID NO: 210913 - DNA, 110 bp, Homo sapiens
  chr6:131455849-131455959
  hypo
agcctttacgccagctgttgtggctgtgtaggggtcttcttttcttccatccctattctacgatgcattcaacataagcgaagtgttattattcacgaaaggcgctaatt

SEQ ID NO: 210914 - DNA, 82 bp, Homo sapiens
  chr6:134817633-134817715
  hypo
tccgtctcaaaaaaaaaaaaaaaaaaaaagaaacagcagtggaggatgacccagcaaagggagctgccgtgcatagccatga

SEQ ID NO: 210915 - DNA, 44 bp, Homo sapiens; identical to SEQ ID NO: 200662
  chr6:135503608-135503652
  hypo

SEQ ID NO: 210916 - DNA, 206 bp, Homo sapiens
  chr6:136682758-136682964
  hypo
gcatggccaagatggcggtccagcgagtgcatgagatccttccccagggtacagttgtgttcgtttgaagaacaattatattgacattcgtcttattaggcccagaagatgaccaattaaacaaactgtttctggaatactgcctggcaggcaatcatggggcatgtaaagatcccacctggctaccctccgagaggagttttatc

SEQ ID NO: 210917 - DNA, 563 bp, Homo sapiens; identical to SEQ ID NO: 200664
  chr6:136870742-136871305
  hypo

SEQ ID NO: 210918 - DNA, 125 bp, Homo sapiens
  chr6:136980868-136980993
  hypo
gactgatagtttaacgtgtacagagttttaatttggaagataaaaaagttcgggaggtgaatagtggtgttggctgcgtaacagtgcgaatgttcttaatgccactgaagcgtgcacttcaaatg

SEQ ID NO: 210919 - DNA, 196 bp, Homo sapiens
  chr6:137147533-137147729
  hypo
atggctcgctgcagctctgggacactgccaaagctgcagggccactgcaagtctataaagaacacgctcaggaggtaggagggaaatctttctgggctgattatttttctttcttcgactttggttgaaatccatttggggatggacacatggagaaatatcttcaggggacaagtttaaacgttagcatttctta

SEQ ID NO: 210920 - DNA, 48 bp, Homo sapiens; identical to SEQ ID NO: 200668
  chr6:137243410-137243458
  hypo

SEQ ID NO: 210921 - DNA, 203 bp, Homo sapiens; identical to SEQ ID NO: 200671
  chr6:138428387-138428590
  hypo

SEQ ID NO: 210922 - DNA, 266 bp, Homo sapiens; identical to SEQ ID NO: 200675
  chr6:138724516-138724782
  hypo

SEQ ID NO: 210923 - DNA, 283 bp, Homo sapiens
  chr6:138745379-138745662
  hypo
gtccagggaacatccctccgcagcgcccagagccccgcgggctatgctgtccacaggctccacggcttccccttctccctccgagatgacggtcatggggctgctctggatccggttccgcatgctgtacctgctgctggcggcagaaggcggcgttcggctgcggccgtacctggggccggaaaaggacagactccgaggcatcaagccttcgttcttggcccactcctcctgcgcccttctgttcttgcttggggagcagcttgacgggctctcgggggca

SEQ ID NO: 210924 - DNA, 161 bp, Homo sapiens
  chr6:138883861-138884022
  hypo
tgcctatataatcccttcaacgagaactttgtcttttctcggttacgacagcccctagatgacctggttctaacccctaatgctccaatcccttctgcacgccataaccagagcaggttccttccaatacggcttcgaccgagtattcacaatagatattt

SEQ ID NO: 210925 - DNA, 452 bp, Homo sapiens; identical to SEQ ID NO: 200676
  chr6:139013361-139013813
  hypo

SEQ ID NO: 210926 - DNA, 384 bp, Homo sapiens; identical to SEQ ID NO: 200677
  chr6:139694964-139695348
  hypo

SEQ ID NO: 210927 - DNA, 33 bp, Homo sapiens
  chr6:139871210-139871243
  hypo
tttttttttttttttgagatcgagtcttgctct

SEQ ID NO: 210928 - DNA, 212 bp, Homo sapiens
  chr6:140300532-140300744
  hypo
atgcagaaatattttttatgcgtgtatatttactgttaagtacacaatacgcctatgagaacaaccatagctaatagctttaagaactgtgcttggggcgaagggaaggaatgtgtggctggagacttagtttggcatgactgagaagcacccaagcggagtaaggacgggtgtgtcggctgcagccaggcggcagttctggtacttctcag

SEQ ID NO: 210929 - DNA, 210 bp, Homo sapiens; identical to SEQ ID NO: 200678
  chr6:142623238-142623448
  hypo

SEQ ID NO: 210930 - DNA, 65 bp, Homo sapiens
  chr6:143031708-143031773
  hypo
cacttatttgaataacgccagttatcaatggtttcatcacgtgaatggcacggatcactctgcag

SEQ ID NO: 210931 - DNA, 198 bp, Homo sapiens; identical to SEQ ID NO: 200681
  chr6:143266117-143266315
  hypo

SEQ ID NO: 210932 - DNA, 420 bp, Homo sapiens; identical to SEQ ID NO: 200683
  chr6:143999090-143999510
  hypo

SEQ ID NO: 210933 - DNA, 72 bp, Homo sapiens
  chr6:144330175-144330247
  hypo
ggcctataagcattacgtaaaaagattaagagaggtgtaaggagctcactacatgttcgggtttagaaagtc

SEQ ID NO: 210934 - DNA, 79 bp, Homo sapiens
  chr6:144508671-144508750
  hypo
gcgctgggaaggacgcaccaaagccgggagctctgccctgcagggagttgccccaaccctttccggaactcagtcttta

SEQ ID NO: 210935 - DNA, 46 bp, Homo sapiens; identical to SEQ ID NO: 200686
  chr6:144537939-144537985
  hypo

SEQ ID NO: 210936 - DNA, 487 bp, Homo sapiens; identical to SEQ ID NO: 200687
  chr6:144606893-144607380
  hypo

SEQ ID NO: 210937 - DNA, 31 bp, Homo sapiens
  chr6:146011352-146011383
  hypo
gagctaacctcaggccgggcacggtggctca

SEQ ID NO: 210938 - DNA, 535 bp, Homo sapiens; identical to SEQ ID NO: 200688
  chr6:146136028-146136563
  hypo

SEQ ID NO: 210939 - DNA, 246 bp, Homo sapiens; identical to SEQ ID NO: 200689
  chr6:146136564-146136810
  hypo

SEQ ID NO: 210940 - DNA, 254 bp, Homo sapiens; identical to SEQ ID NO: 200691
  chr6:146864508-146864762
  hypo

SEQ ID NO: 210941 - DNA, 241 bp, Homo sapiens; identical to SEQ ID NO: 200692
  chr6:146864878-146865119
  hypo

SEQ ID NO: 210942 - DNA, 137 bp, Homo sapiens
  chr6:148200360-148200497
  hypo
cacaactgcttctgcgcaagcaatagggataaagaattttgcctttccatgaaatggctcagccagggtaattatttatctgcgcaggctgatgccttaagcttagtgcccgtggactcctccgagagcagagatga

SEQ ID NO: 210943 - DNA, 39 bp, Homo sapiens
  chr6:148648689-148648728
  hypo
attacaggcgtgagccactgcgcccggccagaaatttct

SEQ ID NO: 210944 - DNA, 484 bp, Homo sapiens
  chr6:149915185-149915669
  hypo
aggaggcctacatgccgccacttgtgctgccgccatgtctctagtgatccctgaaaagtcccagcatattttgccgagtagtcaacaccaacattgatgggtggcggaaaatggcctttgccatcactgccgttaagggtgtgggccgaagatatgctcatgtggtgttgaggaaagcagacactgacctcaccaagagggcgggagaactcactgaggatgaggtggaacatgtgatcaccattatgcagaatccacactagtacaagatgccagcctggttcttgaacagacagaaggatgtaaaggatggaaaatatagccaggtcctagccaatggtctggacaacaagctctgtgaagacctggagcgactgaaaaagattcgggcccgtagagggctgcgtcacttctggggccttcgtgtccgaggccagcacaccaagaccacaggctgccgtggccgcatcgtgggtgtgtctaa

SEQ ID NO: 210945 - DNA, 84 bp, Homo sapiens
  chr6:150081971-150082055
  hypo
caagactccgtctcaaaaaacaaacaaaacaaaaagagcatgttctggaagttgtatccataatttctacgtatgttccattga

SEQ ID NO: 210946 - DNA, 263 bp, Homo sapiens; identical to SEQ ID NO: 200702
  chr6:150185378-150185641
  hypo

SEQ ID NO: 210947 - DNA, 39 bp, Homo sapiens
  chr6:150596883-150596922
  hypo
ccctttcaacttcatcgatgcctatggcaatggcttgga

SEQ ID NO: 210948 - DNA, 457 bp, Homo sapiens
  chr6:150654178-150654635
  hypo
agtgtgtatgagttgatagtttgtgccaggtgatagtgggtgagttgatagtgtgcacgagttgatagtgtgcacgtgatagtgtgtgcacgagttgacagtgtgtgagttgatagtgtgtcagttgatagcatgtgagttgatagtgtgtgcatgagttgctagtgcacgagttgattgagttgatagtatgcaagttgatagtgtgcacgagttggtattgtgtgcaagttgatagtgtgcacgagttgatagttgcaggttgatagtgtgtgcacgagttaacagtgtgcaagttgatagtgtgtgcatgagttgctagtgcgcgagttgattgagttgatagtgtgcaagttgatagtgtgcacaatttgatattgtgcgcgagttgatagtgtgcacgagttgataatgcgtgcgagttgatagtgtgtgcgaattgatagggtgcatgagt

SEQ ID NO: 210949 - DNA, 766 bp, Homo sapiens; identical to SEQ ID NO: 200707
  chr6:150921277-150922043
  hypo

SEQ ID NO: 210950 - DNA, 57 bp, Homo sapiens
  chr6:151346254-151346311
  hypo
atttcccagagtccggttaccctcaccgcaccccaggtttgccgtagaaggatgaga

SEQ ID NO: 210951 - DNA, 51 bp, Homo sapiens
  chr6:151346372-151346423
  hypo
ctccatgcccactgagcaggctcgtggacgtcggcacgtagctcagatgtg

SEQ ID NO: 210952 - DNA, 34 bp, Homo sapiens
  chr6:151546982-151547016
  hypo
cacgtgctaggccatcgtggatgagggcggtctt

SEQ ID NO: 210953 - DNA, 34 bp, Homo sapiens
  chr6:151547076-151547110
  hypo
ggccatggcggtggattacgggtgaagctgaatc

SEQ ID NO: 210954 - DNA, 70 bp, Homo sapiens; identical to SEQ ID NO: 200708
  chr6:151562596-151562666
  hypo

SEQ ID NO: 210955 - DNA, 142 bp, Homo sapiens
  chr6:152099113-152099255
  hypo
aaataaaaataaaaaattaaaatgtacaatagagtgtgtaaaaccaggaaatctacatcttgacacttaactacccaagacgcaattggttcctcgtctgatttttaaaagaagtttccactttcttcggaaaatcacgaca

SEQ ID NO: 210956 - DNA, 37 bp, Homo sapiens; identical to SEQ ID NO: 200712
  chr6:152623493-152623530
  hypo

SEQ ID NO: 210957 - DNA, 136 bp, Homo sapiens
  chr6:154764334-154764470
  hypo
ggctcattcttatcactcaggtgctggcccaaatgtcccctcccctgcaaggcttccctgaccacttaatctagaacaaggtttctcaacctcagccctactgacatttggggccagataacgcttgtggggtggg

SEQ ID NO: 210958 - DNA, 1375 bp, Homo sapiens; identical to SEQ ID NO: 200717
  chr6:154830765-154832140
  hypo

SEQ ID NO: 210959 - DNA, 175 bp, Homo sapiens
  chr6:154842637-154842812
  hypo
ttcgtggaggtccgcgtggtgaggaattgaggcctcctgctgatggctcatgctaacttgctagccgtgggagtcagctaccttggaagcaatccttcatccccagtcaagcactcagatgaccgcagctctggccaacatcttgactgcaacctgtgaacgaccctgagcagaa

SEQ ID NO: 210960 - DNA, 152 bp, Homo sapiens
  chr6:154894708-154894860
  hypo
tagctgggattacaggcatgtgccatcgtgcccggcctcattagctatttccacacttatgcatgttgttggccattcattgaattagttgatcaaaactttacagtattattttccaactccctaataaactggggcggtacttgataaag

SEQ ID NO: 210961 - DNA, 38 bp, Homo sapiens
  chr6:154970832-154970870
  hypo
cgacacagcgacactccgtctaaaaaaaaaaaaaaaaa

SEQ ID NO: 210962 - DNA, 41 bp, Homo sapiens
  chr6:155077849-155077890
  hypo
cattctgttgcattgaaatacgttctttaagctgggcgcgg

SEQ ID NO: 210963 - DNA, 111 bp, Homo sapiens
  chr6:155281630-155281741
  hypo
cctcacagctctgtccaatcttttggcacctggccacccgctgttacttgacactctcactcatgccatctaatcgcttcactggattccgatctccaagagcacacagtc

SEQ ID NO: 210964 - DNA, 296 bp, Homo sapiens
  chr6:155568912-155569208
  hypo
atcctcggaagctcccagcactccagggctctgtcagggctgtgaggcggaatcccacgctgacagctgggtgcctgacccactgatgtgttggggttttcattaaagaatggcattaggaggactatagaaatagatgatctataaatgttaaaagagaaatgaagaatttaattcaccccactgtgctcttctgaggtcttttatccatctgcttgtagctaaaactgacaaagccttcaaggcttttctggacgcccggaaccccaccaagcagcattcctccacgctggagt

SEQ ID NO: 210965 - DNA, 154 bp, Homo sapiens
  chr6:155569349-155569503
  hypo
acagggcggcgaggggctgccagccgtgccctgggcctgacagctcacctcttccccgcctagtggcacgtcctaagtcacttttcagttctgcgatggttaatcttaggtttcacgtgaatatgtgaaactagctaggcgtctgggcactcct

SEQ ID NO: 210966 - DNA, 32 bp, Homo sapiens
  chr6:156156136-156156168
  hypo
agttctgggattacaggcgtgagccaccacgc

SEQ ID NO: 210967 - DNA, 86 bp, Homo sapiens
  chr6:157193703-157193789
  hypo
ctcagcctcccaaagtgctgagccacctcccaaggtgcgagccaccactcctggcctaacccatcggttttcagtctgtttggttt

SEQ ID NO: 210968 - DNA, 227 bp, Homo sapiens
  chr6:157351860-157352087
  hypo
atgttaacatcacaccgccttgaaattgtgtcttagagtactaagtttatcaaatgctttttgattgcatagatgtatttttcattgttaccaatatttattgggtccctgtatagagacaaggttttagttcatttccaatacattcagaggacggccgctgtactcagcagcacgaggctaccgtgcgtgttctttccactgctggctaacggtgcactgagcga

SEQ ID NO: 210969 - DNA, 176 bp, Homo sapiens
  chr6:157430366-157430542
  hypo
tgccctgaccttcacggggggcgaattggtgatgatctttaggacactaatttttttctttattatttgtaattcttttgagcaatatgcctgactatgaagcagtgggtctgacggagtcagagcggttagcctgatccagccggggtcccaggaccaccgccccagaggactat

SEQ ID NO: 210970 - DNA, 224 bp, Homo sapiens
  chr6:157477823-157478047
  hypo
ccagggggccaaggcgcgggagcctcaactccaaaatcccctggtggttctggtgtggaagccagctcaggtctgaggggggcctcagagataaccgccactgcagagcacggaggcagcatggagtgggaggtttgggaggcatgctccggacgcttcctccttatgcagtcttcctgagggacatcacgtgaggagcacacagggctcgcactgggagcact

SEQ ID NO: 210971 - DNA, 76 bp, Homo sapiens
  chr6:157478478-157478554
  hypo
agcccagcaacccccacggttctgagttacgaaaggcagggatctttggaattacgtgtgtgcaacaggagtggca

SEQ ID NO: 210972 - DNA, 217 bp, Homo sapiens
  chr6:157505865-157506082
  hypo
caagtattcaaaaagattccatctacctctacacaaaataaagatcccccagtggccagtttgaatacatgtgcacttctaggaaatgccaccctacaggttcgacagctcgagctcccccgccctctttcggaaatcctcagatttgaactttagtaaaatgaagcctgggcttcgtttctaatgtcccctacccagcaagttctcacttctaggg

SEQ ID NO: 210973 - DNA, 66 bp, Homo sapiens
  chr6:157548327-157548393
  hypo
ccattcatgcacacacgtgcatgcacacccacacgtgcatgcacacacacacgtggagactggggt

SEQ ID NO: 210974 - DNA, 79 bp, Homo sapiens
  chr6:157549784-157549863
  hypo
aaaccgggaggcggcgccaggctgtgggattgggagagctgtgcccagcccagcaccaactgcccgggtctgtgcatgg

SEQ ID NO: 210975 - DNA, 31 bp, Homo sapiens
  chr6:157550095-157550126
  hypo
ctctccgtgagcatcgcgccggcagccactt

SEQ ID NO: 210976 - DNA, 59 bp, Homo sapiens; identical to SEQ ID NO: 200718
  chr6:157802884-157802943
  hypo

SEQ ID NO: 210977 - DNA, 333 bp, Homo sapiens
  chr6:158018130-158018463
  hypo
cgtggaacgcagcatttcgggttgtttatttatccaggcgggctttgaggttacggaatatttttaaacaaccaacagctggggccagggagccacctcttctctctcggatcctcatatccctcaaatcattaaagcgagagaaactgaaggagctgaagaggcaaagcatgggcctgtgagaccctctcgggctcactatgtatgttttaaagccccaggtgcatgctgccctcgtttttctgatggggtaggccctatgagggatgtctgtcgtttggtgggccctagtccagcgtcggaattgccagcagctttcgctggaatgcgtat

SEQ ID NO: 210978 - DNA, 540 bp, Homo sapiens
  chr6:158024080-158024620
  hypo
gggtgtctgaagtggatgttgccgtggcttactgcaggctgggacgtccacagtgcttcatggcagtgccagggcccagggctggacatggagagtcaggtgaggaatccagccatctctgtggaacgctttgtgaagcaagtgtttacaatgaatccagaagcacttatggagtggctgctatgtgcacgtagagggcaaagaaatttcacacaggttcgttccctgcccttaacgagttttccacgtagttatgaaaagataactaacatcataaagaagtacttgacaaggtcgtagcactcaggatggtcattttagaccaattcccgtaaaggggagaaatgagagaaaaggctgaagaaattagctggcagccacactgagaggcccttggatgcccatctaggaaagagggacttgactcagctgctggagcacgatgcttgaacaggagattgagagggctggaattcagccctaggaggactgatctggcatccgagtataaagtgagctgatgacaggtagtaggcagct

SEQ ID NO: 210979 - DNA, 66 bp, Homo sapiens
  chr6:158093709-158093775
  hypo
ccccctcctctccaccttctctttgctggcgcctcccgctctccagtgcgaccaagaccagtgcat

SEQ ID NO: 210980 - DNA, 212 bp, Homo sapiens; identical to SEQ ID NO: 200719
  chr6:158244130-158244342
  hypo

SEQ ID NO: 210981 - DNA, 199 bp, Homo sapiens
  chr6:158328733-158328932
  hypo
ggcaggtctgcctgtgtgggcgtctatacatggaagaagctgaggaaagccaccgcgtcttcaggaggcccagagaaagcagagactaactctttgctctaaaagtgcagtaaccttgcccactcatgaaacagagccccgtgaaattgggccttagccaagcacagttgctgctctcggcccactcactgagggaggt

SEQ ID NO: 210982 - DNA, 519 bp, Homo sapiens; identical to SEQ ID NO: 200720
  chr6:158402115-158402634
  hypo

SEQ ID NO: 210983 - DNA, 183 bp, Homo sapiens
  chr6:158488744-158488927
  hypo
cccttcctgtgcacacgccatctgtgccctcctttctgcctccaagggcaggtggcagagtccaccattcagagccactggggctctctgtgtcggtggtagcctgggttgctgcttgtggtgcctccagaagccattcaggatgccctccggagcaggcccatcaacgcggagagtgcttag

SEQ ID NO: 210984 - DNA, 35 bp, Homo sapiens
  chr6:158593346-158593381
  hypo
tcttttttttttttttgacacggagtcttgctctg

SEQ ID NO: 210985 - DNA, 41 bp, Homo sapiens
  chr6:158734071-158734112
  hypo
ctaactgggggagcgagaagggagacgagcaaaagaaacaa

SEQ ID NO: 210986 - DNA, 75 bp, Homo sapiens; identical to SEQ ID NO: 200723
  chr6:158957207-158957282
  hypo

SEQ ID NO: 210987 - DNA, 430 bp, Homo sapiens; identical to SEQ ID NO: 200724
  chr6:158957317-158957747
  hypo

SEQ ID NO: 210988 - DNA, 144 bp, Homo sapiens; identical to SEQ ID NO: 200725
  chr6:158957988-158958132
  hypo

SEQ ID NO: 210989 - DNA, 448 bp, Homo sapiens
  chr6:159045071-159045519
  hypo
gcgtgagccactgtacccggcagaaaagctctttaaaacaatgtttttactcccagtctttggtttgtggctgacgcagtttgaggccctgtcactgtggttctggtcggctgctcttccttcccagtcaggtgtcggggagaaccagccatgtgggctctggaacagaccccagggcccacgtctgttgctgaaggagacaccggagagcagagccttctcggtgctaaacacgctggtctagtccagtccctttgctttacgtaaggtcccagctaaagtcacttaggtgcttttgagaaaaatgatcccgattcctgctgtgctgtcctgtgctctgagccttgactgtaagaggggagctctggcgctgagaggacaggaaaggggtggggggatggcgtgggccggagccatcgaggagcggggactgcgtctaaagacactg

SEQ ID NO: 210990 - DNA, 133 bp, Homo sapiens
  chr6:159049612-159049745
  hypo
caggtcagctcctcgcgccctgttctccggaggcctcgtctctgctgagaggtgtctcagttggccccgctgcagccgtgggaaggggcagcctgtccctcctctgtacacaggaagcttggctcagtagttg

SEQ ID NO: 210991 - DNA, 181 bp, Homo sapiens
  chr6:159049883-159050064
  hypo
accgcggggctccaagcccctactgccctccagcagagcactgtggggtggctgagggctgccgtgagcctcctgtctccccccgggatatctctctcatcatcacggagatgtatccaagggtatgacagttgtggcaggttgagcctgtgtctgtagggaagagctcagaaaatactgg

SEQ ID NO: 210992 - DNA, 185 bp, Homo sapiens
  chr6:159135764-159135949
  hypo
cactgtgtttctgctcggcttctcttcatcatccccttttctgtagttgcatgcggatggtctcagtgctgcacttggctctgagacagtctctttatgtgactttaattagttgtccgtattcctcatgagccctgtgtcagctgtcacacgatgacaatggacatcaaagcactgctcttcag

SEQ ID NO: 210993 - DNA, 213 bp, Homo sapiens
  chr6:159176833-159177046
  hypo
aaccccaaacaagcgccggagtgggggcagcatgggccacagaggtcagcagcgagactcgggcctggacacagtcagtgcacgtgaatctggcctgcagtgtcggctaccagaccaagggagggagggtcactgaatttccaagctgcttttttttcacctgcaacatggtttgaattatactgacctcatagggtgcgtgtgaaagctaaa

SEQ ID NO: 210994 - DNA, 194 bp, Homo sapiens
  chr6:159190317-159190511
  hypo
gtgctgtggccgtgcggaggtgtcccccgtgcagactcaccctgtgctgccactcttcaacttcatcctccttgcgcctccgcgcctcttccaggagggcaatcttggcagtgtattctgcaagctccgcagcctgggaagggaatgccaagctcacgtcagttctgatatcctttcaacggagtccagttgtg

SEQ ID NO: 210995 - DNA, 125 bp, Homo sapiens
  chr6:159205611-159205736
  hypo
caggaaaagacatgctggagcgcacggagatggcaagatcccaacagcagggcacagcactcacttgagcatcccacggtgttccgcatgccacacctggatccggtcctcccactggtccctgg

SEQ ID NO: 210996 - DNA, 63 bp, Homo sapiens
  chr6:159299254-159299317
  hypo
caatgtgaggatttacgttaatttggccaggagcagacctgtgtttaacgtttgctgtacctg

SEQ ID NO: 210997 - DNA, 120 bp, Homo sapiens
  chr6:159419499-159419619
  hypo
caaaaaaaaaaaaagaaaaaaaaaaaggcttatgttttgttttttttctttcctatgtatgtttgaatatttgcaactgttcatggatgtaaaaacacaaactgccgtccgggcgcggtg

SEQ ID NO: 210998 - DNA, 62 bp, Homo sapiens; identical to SEQ ID NO: 200727
  chr6:159591277-159591339
  hypo

SEQ ID NO: 210999 - DNA, 216 bp, Homo sapiens
  chr6:160220520-160220736
  hypo
ctaaccttaaagattgatttgagcacctcactttgaggaccatagttccaaaacgctgttcaagtagaagcctagaattcaagggaggacactgtaaggaagaccatggactagttgcactggaaacagtaacaaaagtaaaaattaagctcacatgtatgtgatgatgtaggtagggatttccgcaaggagtgagtgcacgagataatccctggg

SEQ ID NO: 211000 - DNA, 360 bp, Homo sapiens; identical to SEQ ID NO: 200731
  chr6:160389672-160390032
  hypo

SEQ ID NO: 211001 - DNA, 56 bp, Homo sapiens
  chr6:160455508-160455564
  hypo
tttcagcggatgagcgtcataaactttgagtgcaataaaaccgcaggtaagtgtgc

SEQ ID NO: 211002 - DNA, 86 bp, Homo sapiens
  chr6:160475955-160476041
  hypo
cagtggcccagtggacgctgcgtcactcacctgcctggtctgctttgtcattggctaacactctttttcctgagagacacttcctt

SEQ ID NO: 211003 - DNA, 162 bp, Homo sapiens
  chr6:160491754-160491916
  hypo
agttgggcattaactcgggcaagaccagctcgctgggtgtcagggtggctcgccccatgctctccagcggtgggcagcagtggtaggggagcttgggatggggggctccaggagcttcaggcctgccctcttgcctggagcggcagggaagtttcctcttgg

SEQ ID NO: 211004 - DNA, 232 bp, Homo sapiens
  chr6:160512209-160512441
  hypo
gctccgtgccctggtgctgagcgcatcgccgagaaggagcaggtgctccgtgccctggtgctgagcgcatcgccgagaaggagcaggtgctccgtgccctggtgctgagcgcatcgccgagaaggagcaggtgctccgtgccctggtgctgagcgcatcgccgagaaggagcaggtgctctgtgccctggtgctgagcgcatcgccgagaaggagcaggtgctccgtgccct

SEQ ID NO: 211005 - DNA, 468 bp, Homo sapiens
  chr6:160679357-160679825
  hypo
ctgagctcactctcttacctcggtgacgatggacgagccaggcgtctcgtacacccagccgtcccggcaggggcccagtggcaggcggctcctgttggtgtccaggctggccagggggtccacgcagtcgaaggtgctctggttccagtccacctcgtagcgcctacactgtcttggggaggcttcgcccgcaggtcctgggcccggcaccgtgtagttcagttcctctgcaggactccagccgcagcgcagactcagctcggccactccggggctccggcagcggtggtcaggggtgaagcccaggaagacgatgcccacgtagatgggcgcgaaggtagccgagagcagagccaagaggaaaaacatttgcttctggaaaaagtgaaactcccctccatgctccaggacatcgtccacggtggtgggcatgatcctgcaggcaggagggcccgaggctgcccgacg

SEQ ID NO: 211006 - DNA, 168 bp, Homo sapiens
  chr6:161522588-161522756
  hypo
aggtgctctcaggctcgggtgttggctatggagagatgaaaatggagccctccttccagactctagagctctaacagactccagaggacggtctccacagcagcgctgttcacttagggggctgattctggtgggtctgtcctgtgcgttttccgctgcccactagat

SEQ ID NO: 211007 - DNA, 258 bp, Homo sapiens
  chr6:161637994-161638252
  hypo
ctttcccctcacacgtggctctgattcacctttgctcacctgctgatgcggttctcatgttacacgtgttcttcaccttcaggctttcctgtccttgtcaatttccgtttaggtgttttatcattagggcctgactccgcgtttcagcaatgaaagatgagcagacagtggagaaggcaagccaggggaggggcggagtgagcacaggcgtggggacgcgaaaggacaggggaacaccggagaactcggtcatccgct

SEQ ID NO: 211008 - DNA, 37 bp, Homo sapiens
  chr6:163009855-163009892
  hypo
tacaggcgtgagccaccgcgcccggcccagagctcat

SEQ ID NO: 211009 - DNA, 209 bp, Homo sapiens
  chr6:163591723-163591932
  hypo
tctctatttgctgtcgattccacgcagtctatgcatctgggttattttcacttttccaaaaccaactctcagccgattcactgatcttctacagggttgctccagttcctacttcttttatcgcttagacctttctttttattccctccttcattctcccactccttttcatctgtagtctcttcttaccagtacgagtccgtgttact

SEQ ID NO: 211010 - DNA, 238 bp, Homo sapiens; identical to SEQ ID NO: 200741
  chr6:163837231-163837469
  hypo

SEQ ID NO: 211011 - DNA, 137 bp, Homo sapiens
  chr6:164441373-164441510
  hypo
atattcaagggtacggatgtgtctcagctgggcagggcactcgctaacccccagctggggcgggagcaggggtacctgcggcaccagaggtacgtggggcctggccccggctgcgcggcagcttctcctttgcaaac

SEQ ID NO: 211012 - DNA, 151 bp, Homo sapiens; identical to SEQ ID NO: 5249
  chr6:166402752-166402903
  hypo

SEQ ID NO: 211013 - DNA, 48 bp, Homo sapiens
  chr6:166748326-166748374
  hypo
accaaagggctgtctcgagaagattctcaaagacgaggtgcccaactg

SEQ ID NO: 211014 - DNA, 96 bp, Homo sapiens
  chr6:167051700-167051796
  hypo
aggagcgcaagctcgcaatcactgtgcgcaaaatccacaagaccgctgaagtcaggagcacagcccgaaagccagccagccgcagactcggctgtg

SEQ ID NO: 211015 - DNA, 115 bp, Homo sapiens
  chr6:167136191-167136306
  hypo
cccattctctgaaacgcttgatacacgtgcttctccacgtgaagcaaatgcctccctttttgagattcgtccttcagtctactacttagactttacctccagtgacacttcagtt

SEQ ID NO: 211016 - DNA, 57 bp, Homo sapiens
  chr6:167136408-167136465
  hypo
catcacaactcgcgagacaccaccgcctccaaggtctgtctgtgcctacacttggcg

SEQ ID NO: 211017 - DNA, 65 bp, Homo sapiens
  chr6:167384339-167384404
  hypo
aagtcccaccctgagcgcaggaacactccccctcagagccctgaggtgaccgctctgaggtgtcg

SEQ ID NO: 211018 - DNA, 196 bp, Homo sapiens
  chr6:167511715-167511911
  hypo
aaagtgaagagattccgcttgcaagtttgattcagttcaataccttccctgatacctcctgttttacttttctcatatataattcttccgcctatacacaggaaatgcaacaatttttttccaccaagcctcttctaggtgcccagaccacccccgctaaccccagtgtgccctgcacaaacgtggggtcctgtgg

SEQ ID NO: 211019 - DNA, 84 bp, Homo sapiens
  chr6:167834931-167835015
  hypo
tccaatccccacgcagcccggtcacccggtgcctccactgccttggctggcgctgggccggggcctccaggtttctgtgtccaa

SEQ ID NO: 211020 - DNA, 545 bp, Homo sapiens
  chr6:167880207-167880752
  hypo
cttcaccaactccatgagatcgtgacgtcgagacactgcgacacatttctcagccttcactgactccgtgtgaccatgtcattgagacgctgcgacacatttctcagccttcaccgggtccgtgtgaccatgacgtcgagacgctgggacacatttctcagccttcaccgggtccgtgtgaccgtgacatcgagacgctgggacacatttcttagccttcaccgagtctgtgtgaccatgacgtcaagacactgtgacacatttctcagccttcaccgggtccgtgtgaccgtgacgtcgagacgctgggacacatttctcagccttcaccgagtctatgtgaccatgatgtcgagatgctgtgacacatttctcagccttcaccgggtccgtgtgaccatgacgtcgagacgctgggacacatttctcagccttaaccgagtccgtgtagtccgtgtgaccatgatgtcgagacactgctacgcgtttctcagccttcaccgggtccgtgtgaccatgacgtcgagacacagtgacacatttct

SEQ ID NO: 211021 - DNA, 51 bp, Homo sapiens
  chr6:168054236-168054287
  hypo
aagtcagcatacccacgatggaagtgctaacctttacgtcccccaacagac

SEQ ID NO: 211022 - DNA, 36 bp, Homo sapiens
  chr6:168131201-168131237
  hypo
acaggtttgtggctccgcttccgccactgaggatat

SEQ ID NO: 211023 - DNA, 47 bp, Homo sapiens
  chr6:168156341-168156388
  hypo
gaagcgggtgggactcgtcctggtagtgggggcgagttcaaggtaac

SEQ ID NO: 211024 - DNA, 585 bp, Homo sapiens; identical to SEQ ID NO: 200751
  chr6:168226883-168227468
  hypo

SEQ ID NO: 211025 - DNA, 33 bp, Homo sapiens; identical to SEQ ID NO: 200752
  chr6:168227910-168227943
  hypo

SEQ ID NO: 211026 - DNA, 84 bp, Homo sapiens; identical to SEQ ID NO: 200753
  chr6:168228222-168228306
  hypo

SEQ ID NO: 211027 - DNA, 40 bp, Homo sapiens
  chr6:168377608-168377648
  hypo
tgctccccaacgcccgctcctgtgctggtcactgggggca

SEQ ID NO: 211028 - DNA, 600 bp, Homo sapiens
  chr6:168378696-168379296
  hypo
tgaaataaacacagaatggttgtaaaatacagaacgctgggaagtggaggtgcgtggtcttacccgtgtttataattcagccgtcgcctaacctgagaaatcaaggatttctgcgtcgtgcgcgtgcccgctgagctgagctctgctgggatggggagtccttctccggctggaggctgagggcaggagctctcggtgagaggctgcggccagcggtgctgtgagccgggcgggggtcagcgcgggcggccggggcgaggctgacagcacagcaggggccgagctcccccgggtcaggcgggaccaggaagggatcatccttcttttgagggcacggagccaccgtcggagggcctgtgagaagggtgggaagctgagattacattcctattctgaaaatgtcacactgtggagggcggtggttcaagcgcagtaatggccatggagggagaacaccgcccggggacacccggggtggcagggaccggagccccggaaacctgagcaaaacgcgcaaaatggggaaaaccacccaggttttaatggaaattgtgcgaacagctgtcaacgaagagtcaaactctgtaaaatatttgaaga

SEQ ID NO: 211029 - DNA, 86 bp, Homo sapiens
  chr6:168387333-168387419
  hypo
ggcccctgtgaggtacgaggcctgtcattgactaaagcacagccgtgcagcccaggacggcagttccttgccgagggcccgtgtgt

SEQ ID NO: 211030 - DNA, 272 bp, Homo sapiens
  chr6:168391304-168391576
  hypo
cccgtccctctgctcctgaggccctgagcttggccgtctctgtgccaggactcgggcctgggcttagctccccggaggcaccgcaggcagcgcgcgaccccgagctcacacgcgggcatcgccgagtcacacgtgggcatcccgggcctcacacgcagcccctcttccaggacgttctgcctccccgcacctggccgggaccctcaggctcagccctggggatgcctccccgacggctcctgtggctccgtgccccgcgcgcccctggatca

SEQ ID NO: 211031 - DNA, 45 bp, Homo sapiens
  chr6:168428432-168428477
  hypo
tccgtgggtgagaaacgggttctctgtgtcgcgtctcttcagagc

SEQ ID NO: 211032 - DNA, 167 bp, Homo sapiens
  chr6:168434610-168434777
  hypo
tataccatgctgggacgccattcggacgacggccctgttctgccgcttgacccacagagtgacttaggaattatccctagagtggctgaggagctcttcaggtactgccgatggtgatgagtggggcagagaaatatggcagggaagccaggcggtcagcaccttgg

SEQ ID NO: 211033 - DNA, 336 bp, Homo sapiens
  chr6:168450728-168451064
  hypo
ggaaccacaggggcccggccccatctcggggtccggggtggcttccctgcgggggcggcctctgtgcagaggcctgaagggtccacagtggcaaagggggaatgacaaagtgtctgcctgtgccggaccgagtgatctgtactataattaccctgtgaggggcgcacgctgccgtcctagagcgtcacagacaccagcccccgggcctgttggtactcgccggaggtccctgcgtgcccagagtcccgccctggccatcgtttagtgtgaggcaggagggggccagatatgggggggacgcctggctcccccagatctctcttgcctgctctttcc

SEQ ID NO: 211034 - DNA, 266 bp, Homo sapiens
  chr6:168458057-168458323
  hypo
tctcactcccaccaccgcacacggcagccacactgcttgtggccacagagccacactccctgccaatgcccaccctgcgccgcagtgcatggccggcctgcccctggacgggtcccccagcacacacctctgcgagagaggcttggcatcttcctttgatgcatttcaggaggcccccaccttgcccagcttctttcctggggctgctttctgccttttaactcagtggacctggactcttagcgtttggtgtaatttaggatcag

SEQ ID NO: 211035 - DNA, 202 bp, Homo sapiens
  chr6:168463427-168463629
  hypo
cagcagaggcagggcgcgtccaggcagggccagccagcgcccatgaccgctgcagggatgctacacagcccagactccagtggggaagggaggagggggtgggggcaggacgaggggctctgtgaggctggagccccttcggtcacctggtagatgtgcactcccctgagggccagtcccaggatcacggtgggacgacctt

SEQ ID NO: 211036 - DNA, 119 bp, Homo sapiens
  chr6:168467750-168467869
  hypo
gcttgcagcctcagggctcaccacagtccccctgcggacagcccctctggacggagcagctgcgtggacagaaggcagcacattggtccagcacagtccaccgcggtgcctgccctctc

SEQ ID NO: 211037 - DNA, 450 bp, Homo sapiens
  chr6:168529777-168530227
  hypo
cggccccgcctaggcctcggaggtcaggtggcctcacctcccctgcgggcaccggccagctgctaaggcctgtccacgaggagagcggggtgtgggacacagacttcgcctctcagtgggaagcgtgttccgactctgccacgtgcctcttactttagaaaagtgaatccatcattgttccagttaccttgggctgcactctaaccgccaccaagtgccacggcttcaacacggttcattaattgccagcgtgtgtgtggctggtctggccacagcggccggttttcgctcgaggtccttcatgtggttgccgtcagatggtcagatggcggccggggccggggctggggtcgctggacacttgacccagctggaggcctacggggaggccttggttggagtgtctgaggcctcagctgggcccctgcctccgcgcgcctgaccagcact

SEQ ID NO: 211038 - DNA, 108 bp, Homo sapiens
  chr6:168613294-168613402
  hypo
cacttgtgtggggcgggggcggggtctacgcttgcgtggggcaggggcggcgtctacacttgtgtggtgtctacacttgcgtggggcaggggcggggtctacacttgt

SEQ ID NO: 211039 - DNA, 380 bp, Homo sapiens
  chr6:168672452-168672832
  hypo
cgctgaaatctgcctgggcggccacacgcttcctgtgcaggctgcagggacccagaggacggtgtcttgccgagggatcctccctccctccaggtacctcgccccgggacagcagaagtgagagacaatccgagcatatccatgtaatgtggaaatgctgtactatcacccatctaaacaaagctcggaactgtctgcgccccaggacggggtcccagctggcccaggagaaatcgcactcacaggcccagcagagcccaacgccagcgctcagaatcccacagtgtctagacacgcacagcagcaacacggaagcggcacagggacagccccagcggtggcgacccagctccacaggcgtgtggcaaatgcaggcaggc

SEQ ID NO: 211040 - DNA, 257 bp, Homo sapiens
  chr6:168708247-168708504
  hypo
gtccaggccagctccgcatgcccggccgccacatagcccagtgccaggtcacagtccctgctctgggcgccgccctcctcgtcgctgctgctggactcacggtctccgaatcggttggtggtgtggtcactggactctccctcgctggtctccgggatgactgacgggaaccgcgggtcacactcggccgagtgcttggagggctctgagtcgctcctggtgtaggcgtcctggcggaccagtgagggacggccccg

SEQ ID NO: 211041 - DNA, 623 bp, Homo sapiens
  chr6:168709572-168710195
  hypo
cagggggctctgtagagccacggcgtgcagggggctggggtacgggtacacctccctgccgccctgggacaccaggtcctgccgatacttggggtccggcacgtgcagcgggatatccaccccctggcagaggagcccgaggagctcggcgtccgcgctggctttctggagccccgtgtccgccggcagggctctgtcaagatcacctgggagcgagaaaaatgaacaaacacgtaactacggagacgatttagtgcactgttgatttcatttcatgcgtggcagctgggatggaaacgctgctcattcactgcttcgaggaactcctgggtcccatgggagacggcgactcacagtcactgaggtccgcgtgtagacacagggcgcggggcagacgggaatgcgtttaagacactgggcgcggggcagacgggaatgcgtttagacacagggtgcagggcctcatttgcatttagacacaggcgtggggcccgtctgcatctagacaccgcacagggccgtttgcgtgtagacacagggtgcggggccgtttgcgtgtagacacagggtgcggggccctatttgcgcctgcagcgcggccccctcagcctgttctgatcctg

SEQ ID NO: 211042 - DNA, 222 bp, Homo sapiens; identical to SEQ ID NO: 200755
  chr6:168720472-168720694
  hypo

SEQ ID NO: 211043 - DNA, 133 bp, Homo sapiens
  chr6:168813949-168814082
  hypo
gggtggcgggccctgcgggagcgtgtacgtgagcgcggcgggccctgcgggagcgtgtacgtgagcggggcgggccctgcgggagcaagtacgcaggtgtggggtttgggggactttgcgggagaggctccag

SEQ ID NO: 211044 - DNA, 354 bp, Homo sapiens
  chr6:168936432-168936786
  hypo
ggatgtcaggagagaggcagcgccgccgggggaagatgggagggagaccaatgcgcagtgacagtgatcctggggacacgtgaggaataacgcagcagtgatgcagcttcacggcacaggggcgccgccgggggaagatgggagggagacgcatgagcagtgacagggatcctggggacacgtgaggaataacgcagcagccatgcagcttcacggcacaggggcccggccgttctctctggattctggctcgaattttcacacgtgccaacctcactcggagggcctgatgggcccaggctgtgccggctcctggagtttctggcctggcaggtctgtcgtgtggccaaagtt

SEQ ID NO: 211045 - DNA, 185 bp, Homo sapiens
  chr6:169106757-169106942
  hypo
tttattcatcaaacttgtaccggagccagagtcctcaacagatgaggagccaccggcgttttgctgtcccgtgtgttcttggttgacgggcgttttgctgtcctgcgtgttcttggttgctctgggcacctgtcgggagatgctgcccgttgactccgcaggacgcttcccttgggatgagttct

SEQ ID NO: 211046 - DNA, 117 bp, Homo sapiens
  chr6:169539421-169539538
  hypo
attttcttggaagctgccagcgggcatctttggggctcaccgtggtgaatccagcacccttcgctgggtcagcctctctccgtgccccggccctccagatgcccagtgctccgcgtc

SEQ ID NO: 211047 - DNA, 350 bp, Homo sapiens
  chr6:169539703-169540053
  hypo
agcttggccttgcagggctgggagccggcaacccgccctgggcacggacacgcccttcatccctgaccgccaggctccagccctgctggggacactcaaggcaggacgccgggtccccccgcatggcctttccgcggagctctccgccgccgaggacgcccaggcctgcttttcctgccacctctcctaggccgcgagcccgggcccctggaactcagccaccgagtcacctccggcaccggactcagctctgcgcccccggcccgcgctcaccgcggagggggaaggaaccactatggaggctgcactccaacgtcctcccgaattccgcagcttctgggcttgtcttg

SEQ ID NO: 211048 - DNA, 426 bp, Homo sapiens
  chr6:169567204-169567630
  hypo
gagacagttccaaggagtggcggcccaaggcctcacactggacggaggctgagctccactgcggccccggcaggcgggcttcctaagagcagcgtggaatcccggggctctgcgcaccgtgcccggccccgggctccctgacgcgaggcaatgcctgggcacagcgtacggccaccggcaccttcactcctcacctgtgcacgcgagtgtgggggatgaagcgacatcggtgtgtggcgtctcagtgcagcgccggcacacacagccctaagcagatgcggagcagagatgacggtggagtcaccccgcgggtgcaaccccatcttagcaggagggccgggttttgggcagctcgggccttcagaaaaaggatcatgtcagcgtgcatgccacgctgcacgtcccgggagttaaatctaggaatag

SEQ ID NO: 211049 - DNA, 240 bp, Homo sapiens
  chr6:169592278-169592518
  hypo
gataatcatggccccgtgtgatcctaggggaggcaatcatgacaccgtgtgatcccgggaagagataatcatgacaccgtgtgatcctggtgggagataatcatggccccgtgtgatcctgggggagataatcatggccccgtgtgatcctgggggagataatcacgacaccgtgtgatcctgggggagataatcacgacaccgtgtgatcctgggggagataatcatggccccgtgtga

SEQ ID NO: 211050 - DNA, 212 bp, Homo sapiens
  chr6:169592578-169592790
  hypo
gtgatcctggggggagataatcacgacaccgtgtgatcctggggggagataatcacgacaccgtgtgatcctggggggagacaatcatggccccgtgtgatcctgggggagataatcatggccccgtgtgatccttggggtagataatgatgaccctgtgtaatcgttggggtagataatcatggccctgcgtaatcctagggtatataatc

SEQ ID NO: 211051 - DNA, 34 bp, Homo sapiens
  chr6:169634743-169634777
  hypo
tttcatctagtttcccaaagcgtttgtgcttttc

SEQ ID NO: 211052 - DNA, 269 bp, Homo sapiens
  chr6:169634807-169635076
  hypo
ccgcttctacccctcactcacccacggggcagctcctcttgttgcacatctgacgctcctgcacatcccccacgcaggccttccctccgtactgaggctcagggctgttgcagacccgggtgcgctcccggatcccaccggcacaggtgacagtgcaggccgaccacggggaccaggggctccagcggccatcgactgcggggaaagccaaccagggggagctcagagcaagacccggggtggagaacgtgagttggctgagtgagagg

SEQ ID NO: 211053 - DNA, 106 bp, Homo sapiens
  chr6:169641783-169641889
  hypo
tacctgctgagatgggccagcggcggagctgcccatgccctatgacccccgcggcccctgcgtgagtacccaccactctcttgaggttctcgctgagctggttcac

SEQ ID NO: 211054 - DNA, 193 bp, Homo sapiens
  chr6:169642005-169642198
  hypo
gacccaggcgcagcgtctctgtgttctcactgatggcgttgatctcagctgagggcaagcgtagaagggccgtgagcatcacagaggacggggccagcagcaggggctgggaacagagggaggatgacccgccctggctcccggagcggcctggtgctgggagacacaaggcggaggactgggccagcagcag

SEQ ID NO: 211055 - DNA, 745 bp, Homo sapiens
  chr6:169648464-169649209
  hypo
ctaagctctttcctccctcacggcggccacctccctgcagagcgtaccctgaagtgactctctctggcagagcctttggccacgtacatccggctcttttccgcctgcaggtgctcgtagaagggctcgtccagagcgaagctgtctatgaggtcgcagcccacgtgcaagctgtaggtctcgccagccacctgcacggtgacgttcttccactgcgagtcagccaggccgacgtcctccagggagaccacatgccgggtgccgtcaatccagtaggtgagatccagcgtgtccgcggggccgttggagacgatctcgaactgcctctgggagagaccggggccctccagagccaacagcgtgcccctggacttgccgtcctgcttgagctgggccgtgaggaagaagccctccttctgccgcatgatcttggtgatcttgctgaggtcatctgcgttcaccggtgggatgtagtcaaagcgcacgaagcggtaagccggcacgccggggtcgggcccgcggaactgcttggcgccaatggtcttgcggttgatgttgctgatactgaaaaggtcgaaggtcgtgtctttgtcctggtgaccagctgcaaagggaaccgcagtggagaagggtgacgtaggggaagagggcgaggttggcctgacccagggtgacaaaccagaacctcgcgtgtaaggaaattaacgaggcctcccaatatcccgcagcttctctccctttttta

SEQ ID NO: 211056 - DNA, 178 bp, Homo sapiens
  chr6:170059400-170059578
  hypo
atagcagcgacatcgccctgtcactcctaaaacgtttttacacacaaaatcccgtttactcagccagtcgttacaggatcactctgaagaaagaagaaatcagaggcacgtctcatagacagggagggccgcgtctcaggactgaccttttgatccgcagtgcggttcctcagggcac

SEQ ID NO: 211057 - DNA, 36 bp, Homo sapiens
  chr6:170061018-170061054
  hypo
cgcaggagtggggagcgtgggcgttgggccccacgt

SEQ ID NO: 211058 - DNA, 259 bp, Homo sapiens
  chr6:170065693-170065952
  hypo
tggtaccaattaacccgagaactgtcagttttacttatctctttacacgtaatatttacttacagtatttctgttagtcaagtttgaactattccaaaataatttcttcaccaaaaagtaaaacttgcacatgaatacaaatgttgaaaaccccataaacacaatgaaggctggggacatcaccccaaaaggctgcccggtgagtccaccacagatgggtcccgaggaatcccatcccacctcccgacagaaggcctgg

SEQ ID NO: 211059 - DNA, 523 bp, Homo sapiens; identical to SEQ ID NO: 200758
  chr6:170124883-170125406
  hypo

SEQ ID NO: 211060 - DNA, 226 bp, Homo sapiens
  chr6:170339178-170339404
  hypo
cggggcctcccagcccttcacgcagcgctgacggggcctctgcccaccggccaccctggtctcaagacggagcccacgtctcctgcttgggctggatgagtgacccttccctgcggccatgaacagggagctttaaacgtgttgaggttggaccctgcccagcccggctgaaccccactctgtaggaggcgcaggcatcagacgccggggacgtcatggtggagga

SEQ ID NO: 211061 - DNA, 250 bp, Homo sapiens
  chr6:170339543-170339793
  hypo
gaccaccctgagcctggtgacgtcacgggtggaggagaccgccccgagccctgtgacttcacggtggaggagaccaccctgagcccggtgacgtcacgggtggaggagaccgccccgagccctgtgacttcacggtggaggagtccaccccgagcctggtgacatcatggtggaggagaccgcccctgagcccgggtgcccctgatcccaggcactggatgggatccccgggggccatgttttaaaatca

SEQ ID NO: 211062 - DNA, 229 bp, Homo sapiens
  chr6:170453833-170454062
  hypo
tccccttgagccacagagagcgacagtgaccttgagtgtggagagcagcggtgaccttgagcgggtggagagtggtggtgccctggctgcacgtggagaccggtggtgccgttaagccgtggagagctgcggtgaccttgaacgagtggagagcagcagtgcccttgagcatgcagcgaactgcagtgccctttagtacatggagaacggcggtgccctttagtacatg

SEQ ID NO: 211063 - DNA, 699 bp, Homo sapiens
  chr6:170454200-170454899
  hypo
aacagcggtgcccttgagcacgtggagaacggcagtgccctttagtacatggagaacagcagtgcccgtgagcacctggagaacagcggtgccctttagtatatggagaacggcggtgcccttgagcatgcagcgaactgcagtgccctttagtacatggagaacggcagtgccctttagtacatggagaatggcagtgcccgtgagcacctggagaacggcggtgcccttgagcacgtggagaacggcagtgccctttagtacgtggagaacggcggtgccctttagtatatggagaacggcggtgcccttgagcatgcagcgaactgcagtgccctttagtacatggagaacggcagtgcccgtgagcacctggagaacggcagtgccctttagtacgtggagaacggcggtgccctttagtacatggagaacagcagtgcccgtgagcacctggagaacggcagtgcccttgagcatgtggagaacggcggtgccctttagtacgtggagaacgacggtgcccttgagcacgtggagaacggcggtgcccgtgagcacctggagaatggcggtgcccttgagcacgtggagaacggcggtgccctttagtacatggagaacggtggtgcccgtgagcacgtggagaacggcagtgcccttgagcactcggagaacggcagtgccctttagaggtga

SEQ ID NO: 211064 - DNA, 202 bp, Homo sapiens
  chr6:170474563-170474765
  hypo
gtgcagtgccgcccgccatcctcctgcattagcatactcctaattgattaagtggatgattgattattggacccgtgcggtctgctttccagacccgttggctgggaatggaaagccacgctcggccctcggatgcagcagaagccccctgccccgtccgctccaggctgcagagccgaggtgattggcgccaggctgccca

SEQ ID NO: 211065 - DNA, 120 bp, Homo sapiens
  chr6:170500862-170500982
  hypo
ggcaggcaggactcggacactgagattaaaggggcccaccgttcccttcacagaaccagcatcttcactcaccgtcggacgtcctaccgctcggcttaccttcccggctcatgcagcgat

SEQ ID NO: 211066 - DNA, 163 bp, Homo sapiens
  chr6:170531588-170531751
  hypo
ggcgagtggctgtctggcacaccaggcatcgatctccgcaaaacgaactggaaaatgctcttccccagaagcgcagcacctgagcgtgtgacgtgcacatgtttgtgtggaaggcccgagacgccatccaaccccgtggctctcaaaccgggtctccagaacc

SEQ ID NO: 211067 - DNA, 56 bp, Homo sapiens
  chr6:170579426-170579482
  hypo
aggggcctgagaggtgtatccgtgcacagagctccgcaccctgaaaccgctcaggg

SEQ ID NO: 211068 - DNA, 120 bp, Homo sapiens
  chr6:170894913-170895033
  hypo
cctgcctcagcctcccgagcagctgggtagcagtatatttgtaatggtacataaaataatgtctgtttttaaataaacatttacattgtaaaccaaaagttaactctccatcaatttttt

SEQ ID NO: 211069 - DNA, 139 bp, Homo sapiens
  chr7:85450-85589
  hypo
atatgggtgggtgtgtcctccgtgagtgtgtgcgtgagtgaatggtgtctgtgtgcaggtcctcaccatgggccgtgtctcgagcacatgtgcccctgcctcggtggaccgcacggccggctgggagacacagcccagg

SEQ ID NO: 211070 - DNA, 257 bp, Homo sapiens
  chr7:181259-181516
  hypo
gccagcccagctctcgggctccctggcaaggctggagccgcaaggggctcgagtttcccctgcccgcagcccccataactggaagctggctcgcccagtgccctgatcccacccgccggccccttcctgtccacacatccccgcttttccctggaagcctttggtgacaagtgcagacactctgcccctcatcgtctggggtccttggccgcctctcacctgtcccccaggtggcaggtgaggccctcgggtccact

SEQ ID NO: 211071 - DNA, 334 bp, Homo sapiens; identical to SEQ ID NO: 200762
  chr7:193278-193612
  hypo

SEQ ID NO: 211072 - DNA, 50 bp, Homo sapiens; identical to SEQ ID NO: 200763
  chr7:193708-193758
  hypo

SEQ ID NO: 211073 - DNA, 342 bp, Homo sapiens
  chr7:212459-212801
  hypo
ctcaaaaaaaaaagttttctttagtaaaggactttgctctctgcgctcatcacggctcggtgagttcctagtacaacgtcgtgaattagagagcacagtgtttctcctccgaggtgctagatgtgcggtgagagggtgtaggtgaggggccggcggtgaggtgggggccagcctggggtgctgcacagcgtgtggggggcgggatcaccaggggaagttttagggtctccgtttctaatagtcgctgaaaagcacgtagccggcacatcaacccaagcgctcctgggtgcttttgctttagggttacgttaagatatttacgttctttttttaaagtcagct

SEQ ID NO: 211074 - DNA, 120 bp, Homo sapiens
  chr7:223534-223654
  hypo
ggtggggcagatgccgtggggcggacatgtccctgcaagtgacgtctgcagccggctcgtctgtgtgtggggcgtcccggctgctgcaccgagccccgtggggacggcacctggtgcctg

SEQ ID NO: 211075 - DNA, 354 bp, Homo sapiens
  chr7:226184-226538
  hypo
agcctgggcccactgcaggccgccctcttggtgtccacgcaccccatgtcccaccacagaggacggattcccttcctctgcctcgtgaccggctaagctgtctgagtccctggagaagaccggctaggaggggccctggagggtcacagtgcagggggtggaaggtttgaaaacagatcaacgttaacagcgtgtctcctgcatgggctgactcagaggggcgtgccacaaggcctagtcaccctcacaagagtcccagcgcttaccagccaaggacgagggcccaaggctcagggaggagggagtcgctgtcccgcagccacacggccgcccggctgggcctctcaggtggcc

SEQ ID NO: 211076 - DNA, 570 bp, Homo sapiens
  chr7:287708-288278
  hypo
cacagagcccagcacccaggcgagccgtctgacaggtggagggggagggtgctccacgcagaggcgtggtcgggccttgggtcccgggtcggccctggcagacggcccacgtccctccacacctggtcacctcgcctcacaggacaatcaccacgtcctccgtcagcaagaaaagctctcgccctgcattctccatttaattaagcgagtgggagcctgtggtgtggttcagaaggagttccattaaaagtggctcctttaatttaattttgttttaaatttagccctggaatgagggcaggctttagctatgcaggcagttggtgctgtgtgcccatcagtgaggcatcgccagccccagtccctcaggggcctctcccacccccatcaccgtggggccaggcagagccaccggacctagggctgggtttattcggaggcagggacacagaggcccgctgagccgcacagagcacagaccctcccctgccccgttcttatttggaggcagggacacagaggcccgctgagccgcacagagcacagaccattccccgcccgtttcttgcc

SEQ ID NO: 211077 - DNA, 193 bp, Homo sapiens
  chr7:288328-288521
  hypo
catgaccaaggagatccgggacgtcacacgggacaagaagctctggaggaccttcttcatctctccaggtagcctggcacgggggcccgcattcatctctccaggtagcctggcacgggggcccgcattcatctctccaggtagcctggcacggggagcccacattcatctcgccaggtagcctggcacgggg

SEQ ID NO: 211078 - DNA, 258 bp, Homo sapiens
  chr7:290537-290795
  hypo
ttttttaaggggctgaaactcgcctccccaccctgggagtccagggcttcctaagcacgcctgagctccggccgctgtcagcccttgggtcgaccctgaccgcactgtccagccaccgcctcctgccccaccgtccacaggactgaccgcactgcagcccgccatgcacaccctggtgcccacggaggctgggctccgctccagtgatgcctggatgcccgactgcttcttatccacgtctttttacaatttttattg

SEQ ID NO: 211079 - DNA, 665 bp, Homo sapiens
  chr7:292736-293401
  hypo
ggcaattaggaccccagcaccgcacagctgtgtaggggccgggccgcagtcagagcccacatcttctaagccccaaacgctcacagaacacactcccctacttctcacgtaagttaccgtctgcacgttgcaaacgtcccagaggtgcacaggtcatccgtgcacagctttgcatttctgcaaggtgagcgcccccaggaccaggcccaggtcctcagcagctccggaagccactcagcccgacacagcctggacagaagggctttgccatcatccgcttcgccttttttcctgccacggtggcctgggctgggcagggcggtcctcaggactctctccagtgctgcgtccagcttaaatgcaggttgcaggagacacgtttccagcgatggacccagttcgggcacccagagccgctgccctaagtaacagtgtccgccgggcccgcagctgtccagggcacagctgtccaaggtggcagatggcagacgtccgccttgcaaaacgctcctcctgctgggtcagccccgacacagtcagcgaaaggaatggtgggagacgcttgagccgcagggtgaaggagccatcttcgtccttgccaggagccacactcttgcctgtctgcgctctccgggaggccaaccgtgatgccatttcctggtgac

SEQ ID NO: 211080 - DNA, 434 bp, Homo sapiens
  chr7:293611-294045
  hypo
ggacccccgcttcccgggcgaggggctgggcacagagcagggaggcacttgcctgaggtcacacagctccaagccctcctaaccccgcccgggaggcccctttaatacccgatttggatctgcaaagagaaatggctgtgggcccgagaaatgcctttctcttttaacacgataccatctgaaaccggcttaggcgaggacgggaggctgttaacagcagacgaattttaagcctccagccaatgagcgctcagatgaagattttcctcctgaaatggagctcctgccccggtgggggctgcctcgtccgactgtgggctgccgactaatctgtatcagcacgagacaggattgcagctggtctttccttgatcgttcgttcttacaataatgacccagcgttggcagtggggtgagggggcgcgggaaggagg

SEQ ID NO: 211081 - DNA, 850 bp, Homo sapiens
  chr7:294114-294964
  hypo
gggccaggtcggcctggcacccaccccgtttcctctccgaacctcagcttgttcagctaagaaagggcagccgggaccggccaccctcctgttcactccgctgggaagcgccctgccgaacctgccttctgatcccacggggagcctgccctgcagccaggagagacccctggaatcactcagcctggctgcataggaatgctgggactgggggagctgtgagtgaggttcggggctccggccccaacaaaaccacgttctcaccagttctacagccccaggctttccagagtttctccacaaacaaataaagcaagaaaaactagatttaatcagcaaataaatacaggaatagcgccgtcggccgggcctccagcatcagagcagtgaacccgcactgctagcgggcctggacagcgcttgcatttttctgattattctttctttattaaggtataattcatgtaccacaaaatttaccatttaaaagcgtacagttccgtggtttttagtatatccacaatggtgtgcaaccatcaccactgtctaaatccagaatgtcctgctgaccccaaaaaggagccccgtaccatgagcaggcggtcaccgttcctcaccccgcagccctcgacgagcagcgtcccacccccagtctatctggatttgcctgttctgggcgtttcatattaagagggtcatacgacgtgtggcctcctctgtctggcctccttcgcggagcacagggttctcgggttcagtgagggcttcattcctcttcttgtttcatttcgtttcgtgtcatcgcacggatggaccatgttcacctggcgtgtccactcctctcttgatg

SEQ ID NO: 211082 - DNA, 1233 bp, Homo sapiens
  chr7:295710-296943
  hypo
gagaagcaccaggcagagcccggcccggccttgggggccgtgagaccacaggtgaggacgcagccctgtgcggccctggtaacccgcagcctgtccctccccagccaacaacatctgcttctacggcgagtgttcctactactgctccacggagcacgccctgtgcgggaagccagaccagatcgagggctcgctggcggccttcctgcccgacctgtccctggccaagaggaagacctggcggaacccttggcggcgttcctaccacaagcgcaagaaggccgagtgagtgcggggccggggggctggcgtccggccaccctacggcagagggagctgggcctgggcgggcatgggagggtcggcgcccacgggggtggcagagatgggtgcagagcctgctgtgcgatgctggcctgtgtgagatgaccgcttcctgatgagacggtggcagagggcgtccttactccagtatttccatgtgcttccctgacccgggccggcctgcccaccaggtccctcgaatcggggcctctcagcgtttgagctctgctctcgccccgtccctctcctcactcctgcgggagaaacggcccctgttctttccgccccacgttgtcctcgtgagtgtgtagtccaggtcctgtttccccacagagactctgcaaaaaacacggggcccagaggtgaaggcagctccaggtggggtcaccccgaggcagggcagagcggctccgtcccctcccacacccgtgctcccgctaatgcagcctcagcgccgcagcccgggcgggtccatctgcagacgccaaggtccctgccgcagtgtttctcttctgctcctcatggcacgcgccgggctccccagaatctggcctgggccccccgtctcacgctggctccccgcaggtgggaggtggaccctgactactgcgaggaggtgaagcagacaccgccctacgacagcagccaccgcatcctggacgtcatggacatgacgatcttcgacttcctcatgggtacgtcccgcaggggcacggggtccccgtgtcactcgccttgcgtggagcggatgcacgcagggctctgcagggcacactccgtggcacggcccggctgcggtcctgtggcctgtgaaggggccagattgcttagaggtcacgctggcaggaggagacgccgctctgcagagcacagaggcctctgagctacgtggcccggctccccacgagc

SEQ ID NO: 211083 - DNA, 674 bp, Homo sapiens
  chr7:298605-299279
  hypo
tggaaggtttgggaagtattcgcacgacgagctctccatcctggtgccgctacagcagtgctgcaggtacagcccctgccggagccggctccagctccaccctcctccctactgcgcaggagacagaggaggccacagccttccccaccccaccccggccatcacatgggagagaaaaggccccgaattcaaccacagccctgaattcaacccacaccctcactcggcggcctggaggcgcagacctcacccgcccaccaccccaggcccatccagctcgagccccctcgggcctccactctgtgtccgtcctgccaccccagttacagagagagctcgaggccagggcagacgccagctgagacacagggaccctgctcccgcacgcagctgccggtctctgccactgccaccttctgcgggggttcagaccccctttcccccgtttcatggctggggacgcaggcttgcagggcaaacgctttgtacttctctaaggaggcatcacagcgcccgtgttgtgcggatgtgctgagctggggtcggtctcctgggtgagtgggccgccctcctcacctccccatcctcctgggtgagcgggccgccctcctcacctccccatcctcctgccgggcccctctgggaaatacaccggccaccacatcctgcaaggg

SEQ ID NO: 211084 - DNA, 1066 bp, Homo sapiens
  chr7:299916-300982
  hypo
actgagcacagagccgcctcggcgaggtagtgtccgccggccgctgcgctgcccgggacggagacagaggcgccggacctcccagcaagcgcatgcgcccgtcgtgaattcagtgaattcagaggcaggacgggatcatccggagtcgggagctgctgccacaggaggcgaggctccccaggtctcataggacacattttgtcagtgtttgaccagaaaagcttgggaaggaagcgctgtctgtgctcacggacagaggcggccggcgccggaggcattccatcctttctgtagggaaaggagcctttatttactattttgtatttatatttgatgaataagtatataaacagagacgtgtacacagatgccaatcacctaccaaaccaaacacgaggaccgccctccctggttctgggggcccctcaaggccaagctcacccctcaagtgctctcacactcgggacctaattcaagtaaaaaccctttctccttcctggggcctcggctcctggagggctggagggtctcgtctgaggacgggaggaggctctcgctggacgtctggcctgtgcgctggtggacggatgcctacgtggttttggaggacccgatgaccaggcgtcctgcgagtccgcccgctggcctgcagcacccacctcggacttggctgtggacggttggtgcaagtgcatcctgcagggctggctgtgcgcagctgtgggctgacctttgcagagttttgtggaatagtttgcaatgtcataaaagtgcaataaaggtacagcagatgtgtgtcggcctcacggggcgggtccctcacaccctggtgtgtggctgcctgtccaccccctctccaaagaaaaaccagtcctggaaccaggcatggccaggagtcggcattcaaggtggcctggacccgaggcctgctggggtcggagggggctgcctgccaagccctggtgcaaacaggccaggtggggccccacctccaaggcagggcggtccgtcctgggttgctctcagaggctggggccgcgacccaaagctgcggcggccccgaggg

SEQ ID NO: 211085 - DNA, 45 bp, Homo sapiens
  chr7:328541-328586
  hypo
tgggattacaggcgtgagtcaccgtgctggccgcgtttttagttt

SEQ ID NO: 211086 - DNA, 55 bp, Homo sapiens
  chr7:328625-328680
  hypo
gtgtttcagcttgagtgtgactcggatcccgagcgaggccaggcagccacagtgc

SEQ ID NO: 211087 - DNA, 34 bp, Homo sapiens
  chr7:339204-339238
  hypo
tggtggactctgtgtcgaacgagtcacgttcagc

SEQ ID NO: 211088 - DNA, 65 bp, Homo sapiens
  chr7:345230-345295
  hypo
gcagccactgtctttttcaacgctgtttgtacagagaaaggggtgcacagagccgtggacctgca

SEQ ID NO: 211089 - DNA, 69 bp, Homo sapiens
  chr7:345608-345677
  hypo
ctcacggaaccacggcaggacgtggaagaaattatgtggcttgtttgtgtgtctgcaatcgcgtcaaga

SEQ ID NO: 211090 - DNA, 261 bp, Homo sapiens
  chr7:380936-381197
  hypo
tcctcagctaattacatctgcgaagaccctgtttccaaaggtcacattcgagggtttgggtgggcacgaattttgaggggataccgtccgatccggtgcagggactttccagccgcaggctctagggaaggctctgtgctaaaatgcatccccggttcacactgcagggcaggagtgtgcgggcggaaggagccatgctgttgaggggcctgggtaactgtataacctgagggtctccatgttttccggcctgcgtgggtg

SEQ ID NO: 211091 - DNA, 145 bp, Homo sapiens
  chr7:414770-414915
  hypo
ggctcgtgggcagccctctgtgctgggggtcacgtggggcccacggccgcccgtgaaggagcctcccctgatggaggagacctgagcccaggccgctgagtgagccctgaggtgtggaacttgcaggagcccacaggggtaggat

SEQ ID NO: 211092 - DNA, 211 bp, Homo sapiens
  chr7:414945-415156
  hypo
cacccacgccaccaccggaccagctgggagatcccgggctcagaggcagcctctgccccagcgtctcctgtgcagctggagacagccaggtcctcacttggggaccgagccggcctcacctgagacaggcccttctgccctcaggcctgcctctcacagcctagctgcccatcacagcttcatgttctgggcgggccgctcgacctctctg

SEQ ID NO: 211093 - DNA, 394 bp, Homo sapiens
  chr7:418417-418811
  hypo
attaatttatttttcattcacgaagaagcccgtggggtacaactgagttagagacacaggacgctgcgccggcggtgccagctcctgaacccggccacctgcagtcactcacacgtcctgggagctgacaagctcagccccactgcgtggcggcccagggccaagggtgtggaggctgccccgtctgcgcccatttcacgactgtgggactgctccacacctggggtctcaacagacccccacaccagtcctagcgtagagaaccgaggatgccctccttgcagatgacaaccccaaggccaagagcagggaagggccctggtcacccagccaggccggcagagctgtggctggaccacgccgggtgagagcctcccccacctggacgcatggt

SEQ ID NO: 211094 - DNA, 146 bp, Homo sapiens
  chr7:429737-429883
  hypo
ggtcatgtctcagaacggtgagaagggacagaattcccttgataccctgtctttttccggagccacactagtgtgcttgtcagatgtgtggggcttagaatccttgcagtgggtcagccccgccctgacatcggcactgtcttagc

SEQ ID NO: 211095 - DNA, 512 bp, Homo sapiens
  chr7:469699-470211
  hypo
catttaaatacagccgacccggccgatgccctaacgcaggcagggcccagagaccaagagaggcccatacactgcacgtcctggcgttaaataacaccgccccggctgatgccccgtggaactcgcagagtagcctccgtgctcccgccgtgacagacttcacaccagcctggacgttcagactcaaggttagaaatctcagcttcccgaggacacacagccatgcctcctgcctccctccatcgcctccggcttcactctcacgggaagggggcttcgggatgccgggcccgcactccgagtggccatgctgggtccgggtcctgcacagagcgcccttggctgcccccacaccaggcccagcaccgcaggcagaggacttggaagaggaagacacgtggtgctcgtgggacctttggggcaggagcctcgggaaccccagggccttgaggtactcaggatgggattgcgaaggcagctcaggcctcagcggggctggaggggaactacag

SEQ ID NO: 211096 - DNA, 319 bp, Homo sapiens
  chr7:479005-479324
  hypo
tggcactcccaccacgatggccagcggacaacaacagtgtgggcacagtgatgggcacccccccgtgtccactcggccgggctgcagtgcccagcggcacggtcaagccccatccagatgccactgtggctgtgctgcaggtgtgatggacacgcacaattggctaattgcaagtgctgcagatcacgagatgtggctgggcctcagctgcagctgaagatgaacgccgaggcttcctggagaaggatttctgccccaagactgcaacataaaatcctgcccgggctcccagcctgctcccctgcgggtctgccctgca

SEQ ID NO: 211097 - DNA, 345 bp, Homo sapiens
  chr7:480950-481295
  hypo
ggccgcagcacataacgaggtaggaagagccggagaaggcctggctggccctgggagacacgtccatctcactgctggttcataagcatgtgggcacccgggaagctggagcgtggcctgtgtgacgtgggcgcccaccaccacgatgaggccggttcataaacatgtgggcacccgggaagctggagcgtggcctgtgtgacgtgggtgcccaccaccatgatggggccggttcataaacacgtgggcacccgggaagctggagcgtggcctgtgtgacgtgggcgcccaccaccaggatgaggctggttcataaacaggtgggcacccgggaagctggagcgt

SEQ ID NO: 211098 - DNA, 35 bp, Homo sapiens
  chr7:485248-485283
  hypo
ggccccaccagccagcgccccgtcaccagcacccc

SEQ ID NO: 211099 - DNA, 268 bp, Homo sapiens
  chr7:503408-503676
  hypo
gagaggagaggagcaaagcgcctcgacacattctccctcggtgatttaatggccggagcattcgtgcgatatttatgcagtaaatccttccactggggggtttcactgtgtcacgggaggctcctcccagcccgtccccatcccgtcccccccaaaaaaagaatcctgagaaaatctcatttcacagtttcccatcgagccaggtgcacagcagctgcggtgggcatggcgggcgcgggtcctggggaacaccctctgctggcgtccg

SEQ ID NO: 211100 - DNA, 399 bp, Homo sapiens
  chr7:531199-531598
  hypo
attctgtagaaaccacacgcttttcatctgagtaccctcagggagtggggttggactccagctgtgccaggccagggtgggagtccagggggcaggccaactcccgcttgctgcagtcacctttgaggccccgctgggtcccggctcccaccccagggagaacgggagcagcctcaaatgctgacggcgaagacccagggcccccagaagtgcgagggcctccttcagtgcccgctcggggccagggactctgccaagtgacctggtgtgcccagaaaggactcagcccccagcgctgggcagggcaaggtggcctgggaagtccttcagggagggcaggcagggacgcttcaagagcctggggtctagaggtctcatggtgccggccctcaccacagc

SEQ ID NO: 211101 - DNA, 201 bp, Homo sapiens
  chr7:545346-545547
  hypo
cccagagtcacacagcgttgaatctccatccctagcctgcactccttctcacctctttcacggaaagaaagcctagagtccagagccctggccccaccgccccacagccccacctgggtgtctctcgacagagacttggaatgtcactcaatccagatgctgacttgggtcatgaggaccccagctgggtgcggtggctca

SEQ ID NO: 211102 - DNA, 119 bp, Homo sapiens
  chr7:551453-551572
  hypo
caaaatatcccccaaatggacgcgggggtggagccctggagccaggtgtgagtggggcggggcacacgggtgtggtgagggtgtcggggggcagccgccggacacagcacgcgcgtccc

SEQ ID NO: 211103 - DNA, 195 bp, Homo sapiens
  chr7:551697-551892
  hypo
tgatggctcttctctcctggaagctctcttggcccagaccaggactccaggaggagcaggcgggctggggcaggagacaccctcgaaggagggaggcctcgggagaggccagagccagaggcaccagggccaggcctattttagggaggagggaacgggtggcttgcctgaggccactgcgctgggagagcgggc

SEQ ID NO: 211104 - DNA, 294 bp, Homo sapiens; identical to SEQ ID NO: 200769
  chr7:557697-557991
  hypo

SEQ ID NO: 211105 - DNA, 222 bp, Homo sapiens; identical to SEQ ID NO: 200770
  chr7:559269-559491
  hypo

SEQ ID NO: 211106 - DNA, 112 bp, Homo sapiens
  chr7:578810-578922
  hypo
ggaaggacccttccagctggcggggggctcccgtttggggacaagtgcctcagctacgccggtggagccttggtgaggaacccctgtgcccccactcactgcgggcagaggc

SEQ ID NO: 211107 - DNA, 36 bp, Homo sapiens
  chr7:579048-579084
  hypo
ggctcagggcggtgccctcctctacctgcccacaca

SEQ ID NO: 211108 - DNA, 208 bp, Homo sapiens
  chr7:601255-601463
  hypo
ccggctggccgagacggaactgatgtacgtcacacaccctgggctgcaaactgtcctcgggacgacagcgaaaacacacttcagcgggcgagccgcccaaggtcagctcctgtgccagcgtttaatggatcatccatgaggtctggggcccggcaaaggcacggcccagcagcttccgtgggaaacaagccgttcccgcggacgtcgg

SEQ ID NO: 211109 - DNA, 359 bp, Homo sapiens; identical to SEQ ID NO: 20843
  chr7:601503-601862
  hypo

SEQ ID NO: 211110 - DNA, 39 bp, Homo sapiens
  chr7:635126-635165
  hypo
caggtggggtgtgtgcggggagggcgtggagggtctcct

SEQ ID NO: 211111 - DNA, 36 bp, Homo sapiens
  chr7:636569-636605
  hypo
tgggcgctgcggccgagctgcgcctgggaaggagcc

SEQ ID NO: 211112 - DNA, 151 bp, Homo sapiens
  chr7:653116-653267
  hypo
tctgaggaagcgtacgggatcagaaccagcagctccgttcacagccaaactcgccttcaaaaggcaaggagatggcgcgccaagctcagcccctgaaatcacacacgcggggttgaacgtgagtaactcagcccatcgttccgcactgtga

SEQ ID NO: 211113 - DNA, 292 bp, Homo sapiens
  chr7:653525-653817
  hypo
ccccaggacagggaagcctgcggagccaagagggtgcagtgctgggaggtccccgcaggggcaagcagggctgccaccaagcgggtgggagacacccaaggactcgtccaccacccagggaaccggactgtgaggttcaggtcagcatggagggcgggaggcgtggcgcccacagaggggaggggagccaggcccagatgacagacgcctgcagactccacgccccgcacgcccgaccaggacaggccaacgcagggctgggcacttcttcggactcacaggaagcctctgt

SEQ ID NO: 211114 - DNA, 165 bp, Homo sapiens
  chr7:667479-667644
  hypo
gtattttccgagtgcccgctatgtacaggcaggtctgtgctgggcgccaggttgccgggaaatggggcacacacagcccctgtctcataaaggcaccagcaaaacaggggtgaacatcgaatgggtggggcccttctgactgtcactcacggaacaaacacaggc

SEQ ID NO: 211115 - DNA, 68 bp, Homo sapiens
  chr7:671703-671771
  hypo
aagaccgagctcacgtgtgagccagcgtctccgtgtgaccctcctgcgcacacgcaacagagcctggg

SEQ ID NO: 211116 - DNA, 151 bp, Homo sapiens
  chr7:675431-675582
  hypo
gttggtccaaatcacagctccgacacttactagctggatgatttcagcaggccacttaatcgccaggcctcagtttccccatctgtgaaacagagctacggacagcaggttcacgaagcattgtaaaagtaccagcaccgcgcccacacat

SEQ ID NO: 211117 - DNA, 89 bp, Homo sapiens
  chr7:778948-779037
  hypo
gtcgtggcaggtgcggccgtggcaggtgtcgactgcattaaaccctgggctgtctctgctcgagacctgccggcgccatgggtgaagac

SEQ ID NO: 211118 - DNA, 82 bp, Homo sapiens
  chr7:799679-799761
  hypo
gctcctccagctccgagggagacggggccgcgcggctcctccagctctgagggagacggggccgcgcggctcctccagctcc

SEQ ID NO: 211119 - DNA, 36 bp, Homo sapiens
  chr7:803211-803247
  hypo
cgctgcagagacggcgttggtgtgaacgggatcagg

SEQ ID NO: 211120 - DNA, 144 bp, Homo sapiens
  chr7:808384-808528
  hypo
ggctcacccgtcagcgtgcttctttttcccatcccaggagttggacttgacctgtggacatttggctgttttctttttgtttttaagccagaaacactgtcttgtttccagtttaagatgtagagagggtgaaacagtcagaaa

SEQ ID NO: 211121 - DNA, 241 bp, Homo sapiens
  chr7:808577-808818
  hypo
gactcgtgctctggcgggaggctcaagtcaggcgtcccagcagcttcggtgcaacgcctcctgcccggctgcgtggggaggccctccaagacaccagctggtctcaccgcgaggcctgacttcgagccagagcagcgagtacattgcgtctccgtgtggcaagggcaggtgcgggggtctcagtccactaccgagcagcctgctctgatgactggcggcgccagggagaaggctcacatcg

SEQ ID NO: 211122 - DNA, 403 bp, Homo sapiens
  chr7:808848-809251
  hypo
cacagttgcttggataagccagtggacgctccctctacactggcccggggccagagcgcctccttctgcggccccaacccagtccccaccctgagccttcagctcctgggcctgcaggctgagcctggcaggagacgctgcagggactctcagagctgtccttgccctgtcattcatggagacttacagggaggcggggcggccctactgcagtggggaccccttggggcgtaggatgcacagtgcaggcgcccaagcctcgcgcccaccggagagcagccacggtgcaggagcttggccctgagtgtgggcggggtgagggctgcaacgctgagaagcagatattaaagaagttctttcactgaaacaattgattttggtcgttgtttcaactattgcttga

SEQ ID NO: 211123 - DNA, 245 bp, Homo sapiens
  chr7:818258-818503
  hypo
ccagcaggaggcctcggaggatcctgtccgggcccatagatgtttgctagcgggacaagcttgggtgagttgagcatctgactccgtccttcctcctgagacacgtgcagcgagggcacccactgtgcagcgagggctcccgccgtgcagtgagcataccccctgtgcagtgagggcacctgccgtgcagtgagcataccccccatgcagcaaaagcaccccccatgcagcgagggctcccgctg

SEQ ID NO: 211124 - DNA, 38 bp, Homo sapiens
  chr7:819362-819400
  hypo
agcagggcctgggccgcctccactctgttggctggggt

SEQ ID NO: 211125 - DNA, 114 bp, Homo sapiens
  chr7:819698-819812
  hypo
tcagagcagtgtccagtacctgtaccgagagttgctggttcaccttgacgatccagagagggccatccaggatgcaattttaggtgagactccgacggcttggccttcgttccg

SEQ ID NO: 211126 - DNA, 78 bp, Homo sapiens
  chr7:834225-834303
  hypo
cagtctgcagtgcagggatccgggtccaggggatgtctctgagcccccaatcctttacggggccttttcctggggtcc

SEQ ID NO: 211127 - DNA, 338 bp, Homo sapiens
  chr7:834873-835211
  hypo
ggaccagagcctgggagggtccacacccgcagaatctaacctggacctgggcagggcagggtccacacccacagagtctgtctaatctgcagaggacaagggtggggtctcccacagagccagcctgaggggtgggtgcacctgaggggtgggcgcacctgaggggtgggctcgtcgccctctgcctcatgctggcaggacccgagaggcctgggagtgctgggaactgagaaacagtcatcaccaattaaaagtcccgctgccttttattaacaccatgcgtcacccttctgtacaatatcagtgagaaaacactcgcctaaaaaaaaccttttgtt

SEQ ID NO: 211128 - DNA, 35 bp, Homo sapiens
  chr7:878053-878088
  hypo
ggattaaatctcacgtccgcgtagtgttgacgagg

SEQ ID NO: 211129 - DNA, 122 bp, Homo sapiens
  chr7:882990-883112
  hypo
tgccattcagggaaacggggatgtgggagccgccgccgccaccgcgcacaacggcttctcctgcagcaactgcagcatgctgtccgagcgcaaggacgtgctcacggcgcaccccgcggccc

SEQ ID NO: 211130 - DNA, 202 bp, Homo sapiens
  chr7:899731-899933
  hypo
taggacatttgtgtccgtctgctgttttactaggtggacgtgcaagtcagagaaatggtgaaactcctgttttccgaagatcagcaaggcggttctctggaacagctgctgcagaggttctcatcacagtttgtgagcaaaggcgacttgcagacgatgctgcgagacctgcagctgcagatcctgcggaacgtcacccacc

SEQ ID NO: 211131 - DNA, 201 bp, Homo sapiens
  chr7:899993-900194
  hypo
cgggggcgtctggaataacagaggcggtgagtcggcgagtcggcggcaagagatgcttacagtccattctgtgctgagactgaagacctagctgtgaggtgtggatgttgatgtcttgttttaagagtggtctggctggggtgtgcttagctgacgtaagtgagatgagacgtgcctgggcagtgccgtgtgtggaggggg

SEQ ID NO: 211132 - DNA, 281 bp, Homo sapiens
  chr7:902843-903124
  hypo
ggcccctggagtgccgccctcccgagctcgcccttgctgcccagcattcaccagcgccagggcccctggagtgccgccctcccgagctcgcccttgctgcccggcgttcaccagcgccagggcccctggagtgccgccctcccgagctcgcccttgctgcccggggttgtgtgctgccttcacggccaacttggtttttgtttcttgggggttttttgtcctgctttgacaacaacattctgcctgtcctgtatcctactaagggccaaactggacttgtt

SEQ ID NO: 211133 - DNA, 393 bp, Homo sapiens
  chr7:907709-908102
  hypo
ggggcagtaaatccacagctggcatagaggagaagccggcgggtacgtgcccatcgttcaccatctcttctaaacacgaatgaaatgcgtgtgtcgtcctcacacactgaaggcaggctgcgtgcacggtctcctcctccgttgcgcacagcaacgtggctgcctgggcgcagcgtctgcaacttgtcagtcagtccctgtgtgtgcctggggacgctgtgctgcgaacagtgctctccggtcacatctgccctgcacctggaggtgggggtgcgatcgcaggccagaggcagatgtgtgcgcagcaggccgaccttgccaggctgtgcttctggggctgcaggctgcaccgtggccgggttaggttagaacgtgcattttcccagggcatca

SEQ ID NO: 211134 - DNA, 133 bp, Homo sapiens
  chr7:920785-920918
  hypo
gccatagcacccagccattttttaaaatgcttttatgtcaataaatatatgtaattgcacatttacatttaaatatttatgtaaaatgtataatttggtgaggtctgacatgaatgaactatgaccagtcaag

SEQ ID NO: 211135 - DNA, 197 bp, Homo sapiens
  chr7:920980-921177
  hypo
cccaccccaccccatccccggcacccgtgcatctgcgggctgcacttaggtgaggtggtgtttcctggagttttacgtatgtggaatcacagtgcgcactttctgtctaaccgcttgaattcattcaccacggaggctgggagactcctcctggagcgtccgcagttccttttatcgctgagtggttttccctgtgt

SEQ ID NO: 211136 - DNA, 44 bp, Homo sapiens
  chr7:921709-921753
  hypo
cgctgacaggccccagcttgattccatgtcggtgctgttgtgag

SEQ ID NO: 211137 - DNA, 777 bp, Homo sapiens
  chr7:925619-926396
  hypo
gacctgaagatgagcgggggagcgcggtggcgagggcacgtgggcgtggctcacggtctcctctctgtggcaggtacatgtcccagagcaagcacacggaggcccgggagctcatgtactcgggagccctgctcttcttcagccatggccaggtaagccgtcttgcttcctcctgcatccctttctgctccgggcaggcaagtggaggtgggaatgacctcccacctccactgatgggcaaccttgcgctgccctgggcctcggccactggggctgtgggtggcagaggggcccagagtcccccctggcttggctgctccactctcaagactggggctctgcgctgcgtttgtgcacgatggggctgagagggcgttgtgttggtataaacgtccccgtccattttcatgtgattctcggccaggagctctctttttcggcggcattgccaagggacgtggtgctcagaagagactcctcagcaccggccgcactctggcttctgctggaaacccagccttgtctttgctgtcctgaacaggtcagggctttgttcttgattcttgtgtgttgctttctcttgtagcaaaacagtgcagcagacttgtccatgctggtcctggagtccctggagaaggcggaagtggaggtggctgacgagctgctgggtgagcatccggcccttcaccccgggaccctgtgacagcggccccagtacgcccctccccgggtctctgcgctgtgtttcgtgtctgcgtttgggggtcttgtgtgctg

SEQ ID NO: 211138 - DNA, 68 bp, Homo sapiens
  chr7:931095-931163
  hypo
gccaggctccgggcgctgtctgctcctgcgtggtcccttccgccagctcgggcgctgtctgctcctgc

SEQ ID NO: 211139 - DNA, 303 bp, Homo sapiens
  chr7:943679-943982
  hypo
caagcacccaccttcctgcgccacccgggcctgagggcccaccctcctgtgccacccgggcccgagtgctcgccagcacccaccttcccgtcctcatggtagatgaagatgttacgggtgctgttgtccttcaggtaggtgacctgcaggccgtgggggtggccgatcttggccggctggaaggtggcgttcaggtgctcgatcttcatcacggccttgggctccttggcctgagaaggggtggggtctaagcacctcacaggggccgtcgtccaagctcaagggagcaggaagggcagaccc

SEQ ID NO: 211140 - DNA, 117 bp, Homo sapiens
  chr7:944012-944129
  hypo
gtgtggctttgggcaagttacttaagcgctctgagccttggcctcccggtctgtaagcagaaggtaacagcacctccctcccaggagtgatggggacctcaacgacactgtgcaggt

SEQ ID NO: 211141 - DNA, 152 bp, Homo sapiens
  chr7:955105-955257
  hypo
gggcttcagaggccggcaggcaaggccaaggccttgggctccgaccctgcgagcaagcgtgtgcctgaaaacctctgccccgactctaccctgctgggaggcctctccctccctccaacccctgcccgagggtcacacgggaggctttagct

SEQ ID NO: 211142 - DNA, 102 bp, Homo sapiens
  chr7:959972-960074
  hypo
cctctccttcccaccttggcctcagctgatgccccacagggctggggtacaggggttgagccaggcccccccaccccgagtcacacgcccctgggccctccc

SEQ ID NO: 211143 - DNA, 210 bp, Homo sapiens
  chr7:960104-960314
  hypo
gggaagtggccgcggcgccgccctccacccaccgtgctgccaccttgcaccccccgtgccgccctccacccgccgtgccgccctccacgtggttctgagacacaggacggagctatcagggcacccgtcgaggtcaggaggcgtccggggcatcaggagaaactaccggcaaatacccaagaatccaggaagacccgggatgaggagaag

SEQ ID NO: 211144 - DNA, 141 bp, Homo sapiens
  chr7:965831-965972
  hypo
aggccccgaaacaacagccgcccctcccgttcccctcccagaccgccaggagcacctgggagggcccctcagatccacccgagacccccaaggcctcagcgaacctgggtgggctgtagctactgatgcacaatgaccttc

SEQ ID NO: 211145 - DNA, 302 bp, Homo sapiens
  chr7:966009-966311
  hypo
gcccggtggtggccagcagacacaggcggcacctcggggtctgggggacgcagctgcggctggcttctccccgaccctgtgggcggcacccaactccccaccctgccgggtcctcccggggccatctcggagccacccagcacttgaccatggccctgacaaggcccctttgtactcactggcagtcggagggcgtgggccggtagtagaaggagggtactttggactcaaacctggctctcgcggcgtcgttcccgtgggaggccatgaactgcaagagaggaggggccgggtcagaggcc

SEQ ID NO: 211146 - DNA, 110 bp, Homo sapiens
  chr7:986124-986234
  hypo
ctcccagcagcacccggacacagtccattttcagaatcccccaaggacccccccaggctctgccctgcccctgccctcccaccctctctccctcctggtgctccagcccc

SEQ ID NO: 211147 - DNA, 186 bp, Homo sapiens
  chr7:986336-986522
  hypo
ttcagggccctcgcacagggccgactcctctgcggcccatctggtctctcggctgtcaaaccctatttttggaactcgatagaggtggtggttgaacagcatggagaacgttctaaatgccactgaattttcactttgaaatgattaacctgaggccgggcggggcggctcacgcctgcaatctca

SEQ ID NO: 211148 - DNA, 98 bp, Homo sapiens
  chr7:986582-986680
  hypo
catagtgagacaccgcgactccatccttatgaaaaaattttctataaaaggttaatttttcatatgaattgcacctcgatttggggttttgttttttt

SEQ ID NO: 211149 - DNA, 266 bp, Homo sapiens; identical to SEQ ID NO: 200776
  chr7:1001818-1002084
  hypo

SEQ ID NO: 211150 - DNA, 802 bp, Homo sapiens; identical to SEQ ID NO: 200777
  chr7:1007358-1008160
  hypo

SEQ ID NO: 211151 - DNA, 88 bp, Homo sapiens
  chr7:1029912-1030000
  hypo
cagtgtgacagtggcgcgtgtgctgggggtggtgtggtcggcagtgtgacagtggcgcgtgtgctgggggcggtgtggtcggcagtgt

SEQ ID NO: 211152 - DNA, 212 bp, Homo sapiens
  chr7:1052679-1052891
  hypo
gaatgggagcagcgcgggagggtggtggggccgccaggatcgggcgtggtaatgccgggacctgctgcttgctctgcttggcctgcacagtgtctggcccggagagcacaggtgagcaaggtaggacggctgtcacccacagacgagcagcggagaactttctctaactgccacccacgtgccgaccctccaaagaacgcgggtttcactag

SEQ ID NO: 211153 - DNA, 256 bp, Homo sapiens; identical to SEQ ID NO: 200778
  chr7:1069637-1069893
  hypo

SEQ ID NO: 211154 - DNA, 48 bp, Homo sapiens
  chr7:1071763-1071811
  hypo
cccagacacaccacgccccagagaatgcagggtagatgggccccagat

SEQ ID NO: 211155 - DNA, 42 bp, Homo sapiens
  chr7:1071841-1071883
  hypo
ccccaacacgtccctcgcactcggcccgcctgaaaataaagt

SEQ ID NO: 211156 - DNA, 38 bp, Homo sapiens
  chr7:1097390-1097428
  hypo
ccctgtgcacctgctcggccccccgagctcccggtggg

SEQ ID NO: 211157 - DNA, 44 bp, Homo sapiens
  chr7:1113683-1113727
  hypo
cgtgacccccgaccccgacaccctgctgccgtgatgttccccca

SEQ ID NO: 211158 - DNA, 177 bp, Homo sapiens
  chr7:1115545-1115722
  hypo
ttattaaaaaaaaaaaccctcctgacctcaggtaggaacagcagagtctgagtcaccaaagcccggggctgccactctccagggcgccccactcccagctccagcggctgagtccaccaagccaggacaggcccaaggaccagagggcgaggtgattcacagtggagctcggaaaga

SEQ ID NO: 211159 - DNA, 178 bp, Homo sapiens
  chr7:1124308-1124486
  hypo
gggatctcacagaaccgtgtagacccacgcacccccactgtacagatgggcactgaggctcaggaaggttagagacgttgcccggtatcacacagcacgtggggtgaggaagtggaacccgggctggagccggcaacgctgaaaaccagggttgtttggacggcgacatgcaactccc

SEQ ID NO: 211160 - DNA, 127 bp, Homo sapiens
  chr7:1132022-1132149
  hypo
cgctgggcttcatcgtgcccttcgccatcatcggcctgtgctactccctcattgtccgggtgctggtcagggcgcaccggcaccgtgggctgcggccccggcggcagaaggcgctccgcatgatcct

SEQ ID NO: 211161 - DNA, 360 bp, Homo sapiens
  chr7:1141952-1142312
  hypo
gcagtcccactaaagctgcgggcagctcttgatttgtgtatcttacaagaagaagaggagggggagaagaagggaaaagtcggcgtctgcagccacactcaagttcttccgctcatccacgactgtgaagctcacagctccggccacgctggcgttcaacaccaggtcactgtcacttccacaggggacggtcttgcttctttggtaaaaccaaaggagtgtttcaaaccatgcccaccttccattcacctgtttttaaaatttttttttttttcagagcaggagcggacgtttattaaaaagctttaagagagaaaggaaggtgcactcggaagagaacccagcgggcgacctggagaa

SEQ ID NO: 211162 - DNA, 77 bp, Homo sapiens
  chr7:1225056-1225133
  hypo
actgtggcctcaggagtcaacgcctcgctgtgcacctctcccctgcctcggtctcccgacctgccatgccctgaaag

SEQ ID NO: 211163 - DNA, 68 bp, Homo sapiens
  chr7:1225226-1225294
  hypo
ccgccttttccgtccaccctccccctccgtggaggactttccttgccgccttttctgtccaccctcag

SEQ ID NO: 211164 - DNA, 71 bp, Homo sapiens
  chr7:1303352-1303423
  hypo
attaccccgctccccgcctgggaacatgtggcctggcatatgtggggccaacctcagcagaaatccacgtg

SEQ ID NO: 211165 - DNA, 101 bp, Homo sapiens
  chr7:1308186-1308287
  hypo
agagaagacggctcgccacaggccctcagaacaccctcctggtctacagaggggacgctgaggctgggagcgggaatgtggctggtccctgctgctccctc

SEQ ID NO: 211166 - DNA, 139 bp, Homo sapiens
  chr7:1315705-1315844
  hypo
cgggtgacccgcctcggcccgctgagcagccgaacgcgctgacggatccattaggccgctcccggccccggccccctctccctccattcctggccggcgctgtaaatctccgccaatttcggtcctaatcatcattata

SEQ ID NO: 211167 - DNA, 199 bp, Homo sapiens
  chr7:1333680-1333879
  hypo
cccgaggggctgtgggaccccgggaccgggtgctcgctgagggacggcccttgtctgcggtcatccctcccctcctgagtggaaggtgatgccgtgggcccagggctggctgcgtctgccaggcatgccctgcattcaggcagaactcgagggaggactcatctccaaacagaagagcgggcagcaagtgccactcagg

SEQ ID NO: 211168 - DNA, 236 bp, Homo sapiens
  chr7:1347154-1347390
  hypo
caccccccaggagccatgaacgtctcctgcccccgccctggctccaccatgaactccgagcctgcaacagtgtgtccaccatcttatccagggacgtggcaagggtcaaaaccagtcgatggtgttcgatgggggcccgatgtgtgggttggaccctgatatcggaggcgccatgcctactgcttagcgaaccagcccttaaaaccaggactctcccatgtggggcgatgcagtga

SEQ ID NO: 211169 - DNA, 303 bp, Homo sapiens
  chr7:1347435-1347738
  hypo
ccttatggagagtgactcggcaacatgcactctgcgccatggaaatgctcagcacctctgacccagtgacgccgcctctgggatgctcttccgggggaaattatccacaatatggggagagatttaagccaaagatattcatggcaacattatctttgatgaccaaaaaaaaattggaagcagctgaaatgtccaacaatcggggagttgtttagtagattacgacatacacactcggtggaatactaggcagtcattaaaagtgctaattgcgaagactgggtggttatgtacaaacacgcc

SEQ ID NO: 211170 - DNA, 39 bp, Homo sapiens
  chr7:1351444-1351483
  hypo
ccatgggctggggcagcagccgtagctgggcggtgtggg

SEQ ID NO: 211171 - DNA, 215 bp, Homo sapiens
  chr7:1351606-1351821
  hypo
ggtggtgccggccccagagcgcatggccacagccagcctggtccacccgacattgaagcctccctgtcataattggcaattttgtcatatttattcacaacagatcgggctgtcaggagcttgtgggggctctccggaggcccgccgtgaaatcggtttgaaatggcgtgtcaggtttttctctccctgctgaagcgaccatctggctgatagac

SEQ ID NO: 211172 - DNA, 295 bp, Homo sapiens
  chr7:1370182-1370477
  hypo
tgagtccaggagaggagagtttccctggaggtggaggtcaggcccggcagtcagcaggccaagctccttcgggccagggcaagccggagggcttcccagagcgggcacagtggacagctgagcaggccagactctgacatgaggtctggacaggcccttccgcccttccggatgccagtccccctgcttgtctgaccactggcccgcctgcccacggggcggctgagatgctggcgtgtgcgtgcgcatgtgcacgtgtgtttgtgtgcgcgtggggctttctgacagccgataa

SEQ ID NO: 211173 - DNA, 39 bp, Homo sapiens; identical to SEQ ID NO: 200784
  chr7:1408440-1408479
  hypo

SEQ ID NO: 211174 - DNA, 144 bp, Homo sapiens
  chr7:1451100-1451244
  hypo
taattaagaagtgttctctgcgtatccggggtgttcgaacaattgtgcggcgccgacgatgcaagctgttgacctgcacagataaaccgtgcgtgcggaggaatcgggggcggcggacggggtggggggagtgtacatggctgt

SEQ ID NO: 211175 - DNA, 121 bp, Homo sapiens
  chr7:1460652-1460773
  hypo
tgtgtgtgatgtgactgatacgtaacacgcatcccatgggcgtcccgtgccaggaattgagggggccacaccctactcaacgcgggggacagtctccgggctccgtggctcacggatggtg

SEQ ID NO: 211176 - DNA, 51 bp, Homo sapiens
  chr7:1460958-1461009
  hypo
cagatgtgatgtatacctcgcacgaaagacgttgtgttcatcaacaaatca

SEQ ID NO: 211177 - DNA, 587 bp, Homo sapiens
  chr7:1473773-1474360
  hypo
ccagcctgtaccgacgtctcctctgaggctcccaccagcccatctgtgccaggaagctatgaaagggcccaccttcgagggccaggccctgagagggtcggctcctgcccgaggccacagagcacgtccgtcctgcaggcaagagctgggaggcaggcgagaccccaggcaggtgcggggccgcccaggggcaccgaggcaaacacggaggcacgtaggagtccggggccatgtggtcggtttctttattgagaccacagacggtagcgcaggtccctgctgtccacatgccccttgtagggacaggaggcccttcccgagtccaagtccgaatgccgggtccgggccgagcccacggccccgagtacaagtccgggttccgggtccgggccaagcccatggccccgagtccaagtccggatgccaggtccgggccgagcccacggccctactggctactactgggaggggctgcttttgctttttggtgaccagatcttggacaagcggaacttggacttcttcctctggaggcctaggggacaggtggacagtgaggccgtgctcaacgccgcagccgcacagcc

SEQ ID NO: 211178 - DNA, 319 bp, Homo sapiens
  chr7:1475085-1475404
  hypo
ctggacaggagggcctgggccgaccacaccggtgacctgggacaggagggcctgggccgaccacacaggtgatgtgggacaggagggcctgggccgaccacaccagtgacctgggacagaagggcctcggccgacccatgccaaggccccgtcacgctcccagagggtctcatagaggtggacttcaggtgccgacccagaatgccatgtgctggacccctcatgagacgagacaggaaagctgtcggggacagtcacacagtccgtgcaggagccaggagacgcacgtggccttggaagttcaagttaaaaactaaga

SEQ ID NO: 211179 - DNA, 1800 bp, Homo sapiens
  chr7:1476253-1478053
  hypo
cagtcagcatagacaataaccgcctggtcagaaagttctacggggctggctgaccctgagggccgggagcatggaccaggcgacctggcctggctgggaggggcccccggcacctgcccctcaccggagccggtcctcgtccagcgagtccacgatgtcactgcggtcgttcacggtgctcacgtactgctccagcagctcctgctcccgccgccgctcctgcagtgacttcagagcctctgtggggatggctcgtcagcaggagccccccccaccactgccatgcccctcacaggacacaatgtccccaccacccaagcgccaggctcctcttttggaggaagaaggtggggtcttggggggatccggagcagaatgaatgagtgaataagtgaatgaaggaaggaacggccacgtcagagcccgtgtgctgggatccttccccatcatctcgcagaaacaccactcgctgcagagatatggacactgaggctcagggcgtcgctgtccctgcagcacagcaaggaaagggcagaggcagacggcctgggcctgtgccctcagccagggcaccctgcatcacgagacaaatgcctatggctcgccctgactgctgctacactaaatgccttgtgcgaattgattcgtttaatcctcacaacagctgcgtgaggtgggtgctacaagcatcctcactttgcagaggatgaaacccaagcacagcaaggttaagtaccttggctgaggacacacagccaggaggtgggagatttgaaactcaaacgtgggctcgcctggctccagggaaggtctcaccaccaggacagtcaggtggcctcacagagccggcccccagacatcctgggctccgcggcatccctggctggggccccttggctggcgcgcgggggacgcaccgggcttggccatgagccggcgcagctcgccctcgatgtccagctgctgctcctccagacgctgggccttggacctgccgcacagacacgcgtctgaggcctgactctgccgccctgtcccccgcctggcccgcccagcccgcaacgaggtcctggacctgccacacagacacgagtctgaggcctgactcgccgcccgtcccccgcctggcccacccagaccgcaacgaggtcctggacctgccgcacagacatgcatctgaggcctgactctgcgctcctgtcccccgcctggcctgcccagcccgcaacgaggtcctggccttcgaggaggggcccacggctgggctctcacttgtacatcagctctgactcctgtctcagcagaagctgcttctcgtgaatgagccagaaccagtccaccatgaggctatcctcagcgtcatctggggagaggagccagctggggcaggggggcccgccagagttcatggcccccagccccaggactgagggtgtctgtgggagtcgggctggcccagggccaggccgaggcgctcacctccctcggccgcccgcagtcgcttctccagctccacgccgcggagctccagggcgtccagccgcctctcgatgtcctgcagctgcctctgtatctcctccggggagaggtagtcggggtgcagctgggaacggaggggcggtgaggatgccggagggctgggcccctgcccggctccccaccactactcaccctgactggggaggtcaccgtctcgccaggcagagcagggacattggccggggacaagggtctccctggagaaggagcagggtgagcctctgggacctgggccaccaggcccaacgtgaccaggacaca

SEQ ID NO: 211180 - DNA, 224 bp, Homo sapiens
  chr7:1479246-1479470
  hypo
tcacatacatgaacagacacatggacatgcatcacgtgcacatgcatcacacacatgaacacagatgtacacatgcgcacacatgcatcacgcatggatacaggcatcacatacatgaacacatgcacacatgcatcacacacatgcacacatgtacacacaagcctgcccaggactaccagcttctctggctgaccggagcgcctctccgcacaccccaggag

SEQ ID NO: 211181 - DNA, 360 bp, Homo sapiens
  chr7:1479760-1480120
  hypo
cccagggcctggcccacctggaggggctcccaggccatatgcagaccagccggagggagcaggtggccttctgagcaaatgccacctcccagcccactgactacacctgctgggaccctcctgcaaacacacgtgtccatcgctacctgccgtggtgcgaagcagattccaggcgtgagctccgggccccacgggacccacacatggggagactccaccccagctgcaggcatggtgcgtgaacccacacgggtgctgccatgcccaggtgagacacgcaacgctgcccccaaaccagggacagcggcccccatgtccctcaggcaggggtgacctggcctctgctactcacagggaggt

SEQ ID NO: 211182 - DNA, 821 bp, Homo sapiens
  chr7:1491121-1491942
  hypo
ctgagaccccgtctcagaaaaacaaaaatatagtgatcgtgacccgtctgtccacgttgctgcctgtggggtcccggacagcagctgctgccatgtcagcgtgaactggactgttctagaagcttcctggccccacagagggagctggggctgcaagccgtgtcctgcctcaccccggcctgcatgtctgaccccggccagcctcggtctcagggcctcagtctccctgtctgggaggacaaccgcagctcctggtggcgaatctgacggccgtagctgcagcaaacaggaaggctgggcaggtctcaaacggagaagtgggggccgagacccctgtggccacgcagcctgggcggcctagttctgagcccagcctgcacagcccttgccaggccctgacccccataagaatgctccgaggcccggacagtgagcccatttcacctgtttcacagatggggaaactgaggccaggcagcagccacacggtggggtgggggcagtgggatgggggctgcaggctgcccacctctctccttaggaagcccccgccccgtccgcctgcagccctgccgtccatcaatctgctgggatccttgggaaccctccaccgtttccagcttggaccccctcccaggtaacaggtttcagacggcaggaccacccgtctgcacaggcggagcttctgcacgccggacaagatggggcgcggactcctctccgtgtggacagatgacgaggagccccctccctgggctcagtggcagcgaaagcggtttccgtctgctcgggcctgggccgatgcctctgtctgcctgggc

SEQ ID NO: 211183 - DNA, 808 bp, Homo sapiens; identical to SEQ ID NO: 200785
  chr7:1498585-1499393
  hypo

SEQ ID NO: 211184 - DNA, 280 bp, Homo sapiens
  chr7:1519129-1519409
  hypo
accagggcaccgccgtgtggggagctgagcagggtggcgagggcctgcaggacacgcaccgtgatgcccggcacctcggggctgccctggacgacgcgggccagctcctggcccagggcctgctgcagggcgagggccacggggcggggactggagctctgccaccgagggtccgggctgagcgggaaaatctggaacggggaaggccagtgtcaggaggaagcggaggagaaggaggaggagcgcagcggagaggctaagcgcccggtgcagctccgtg

SEQ ID NO: 211185 - DNA, 44 bp, Homo sapiens
  chr7:1533021-1533065
  hypo
ccgcaagccctcggggcagagccacggacgaggcgcgagctgga

SEQ ID NO: 211186 - DNA, 550 bp, Homo sapiens
  chr7:1533908-1534458
  hypo
cctccaaagcctgaccggaaggccgcagtgaaggtgaacagagcgcccagggcacgaggtgggggcagggtgaactggcaggagccccaggcggggctggaggggagtgtagaccaagaacccacggggtcacccatggggcttgaagggggacagagctgtgaggccagccggctggggaaggacagtgtgcggctgtctggacagaagcaggggcagacggtgcatctgagactgcgtgaagggtggcgtgcccgtggacgccctggaagcaactggaaggcgggggtccgggggaggctgcggctggggcttggagtcacgtggacgcagacggcagctgaatccctacagtggcgctgggacgccagcatgggagtgggagaagggtggcacccaggattgtggaggaggagcaggatggtgctgtgaccatgggaacagccgcccaactcccactggcccttcctgccgcagccggcccggcaccccgcagccccgcccagcccggcacacaggagccccaggcggcagcgcactcacttgcggt

SEQ ID NO: 211187 - DNA, 144 bp, Homo sapiens
  chr7:1534752-1534896
  hypo
ccctttacaaaatcgctgcagagaaatgcagccccagcctggcagccccaccccaaccaaggcagaggctccacgggaggctccaatgcacagggtgacctgcctggagcctaacggctgctgctgtccgcagagaggggacag

SEQ ID NO: 211188 - DNA, 197 bp, Homo sapiens
  chr7:1535457-1535654
  hypo
ataatcaaacacccggactgccccaaacaccacctcccctccccactcccgcccgtggctggggccaccacgcctgcaatgcccccatgctgggccagaactggagcacacaaaggacgctcatgggaacagggtctgagcctgcagctggggtgaggcccggatggacaggaacggggacggcagcttccaggctc

SEQ ID NO: 211189 - DNA, 68 bp, Homo sapiens
  chr7:1537961-1538029
  hypo
accggcctccccagacgccacgtgcccctccagcccagagccccatattccggcgtggagggcaaggc

SEQ ID NO: 211190 - DNA, 221 bp, Homo sapiens
  chr7:1563390-1563611
  hypo
gggccacctctcacacgccatgctcagggctcctgcctgtcttctccctgcagtagaattgatcctggtggtctccgtgtcccttcctttccccgacctcagccggggccacctgagtcccccgggttaccctgcatacctccaactctcaggaagaagcgagggtaggagggaccccacccctcccggggcgccccgggctcatggtgcaactggactcg

SEQ ID NO: 211191 - DNA, 205 bp, Homo sapiens
  chr7:1574223-1574428
  hypo
cccgcatcccacatcctcggagacccgcggagaatagaagtggaagggccactccgtcttggtcagactggctgggcagctgagggggtggggcatggagtctgtgtcatcattcaccccttgggcaagaacaagtgacccatccagagcccccatgctggcctcgtagagcgagcggcagccccgatgcgtcctctcatctggg

SEQ ID NO: 211192 - DNA, 210 bp, Homo sapiens
  chr7:1575803-1576013
  hypo
cggctgctggggccccacagcggaaactcagacccgcccacccaggcccccgctgtggcgctgaacactgcacttctctggtgaccaccgaaactcagaggagctcggggtgtcgggtgcttgtgcgtggcgatgctggtgttttgttagctgctgggcgtaagacacaatgcgaggacgtcgttcctcgggggctgctggaggggagct

SEQ ID NO: 211193 - DNA, 540 bp, Homo sapiens
  chr7:1578591-1579131
  hypo
ccgggccaggatgcctcaccccctgggaagcccctcaggacgggctgggcccggatggtgccccgtcttgttttcatggtgctgtgactgtccaccccgggctgagaagcatccctgcatgggaggtgggcaccctgtccggcgctgccggccctgacctgtgctggcttctctgcttgtccatgttttccagctacgagttccagggagctctgtcctggtgaccgtgcccgggttatgacgactaatcccaaaccgaataaggcattaaaggtaaggctggttccaagcaggccccgtctcaagcacaggcgtgggaaaggcccccggcccgacagcccctgctatcccagggccgtcctgagcctgtgatggaggcctccctgttgccaggaggaggggggctgctgtggccgagggatgttcacaggagaggtggagtcaggatcggggactgtggttccaggcgatgactcccaggctgagggcgtggcagggtctgctgccttcccgcctgggctgtgtgtccgccgggcgcta

SEQ ID NO: 211194 - DNA, 55 bp, Homo sapiens
  chr7:1579574-1579629
  hypo
aggtcaagaaggaggcgggcgagaacgccccggtgctcagcgatgatgagctggt

SEQ ID NO: 211195 - DNA, 63 bp, Homo sapiens
  chr7:1582574-1582637
  hypo
cgccgccctgccccgtccctgcggccaccacctaatttattgccgtgcgtcctgctgctgtga

SEQ ID NO: 211196 - DNA, 425 bp, Homo sapiens
  chr7:1583986-1584411
  hypo
ctggggattttcagctggaccatctcccagagaaggatactgaggccaggagaggctagagagcttggcgggtgcgctgggcccagatacgcggctcctgcctgcctcatggcctgctcctctgtcggggcctgtcaccgggaaaccccttttttagcagcgatgacgacactggaaccacgctagtctccgtccctcccgctcacatgcgcccacgctccccctcgaggcaggttgagccccggcctggaccgccccacgctgccttccgtccacgcagagcgggctcggccctcagggctttccttcgagtcgtgttggaaagaagcagaagcagcctcacccgtggggcggaggcgtctgagggtcaggaggcagggaggagagagggcctctgtggagccggctgcctggtgtccaagtcc

SEQ ID NO: 211197 - DNA, 205 bp, Homo sapiens
  chr7:1589281-1589486
  hypo
tagcccagccggacgccaggcctgccttgttgggccccaccgctgggccccaggggacccagtgcccacctcatgccaggtgcccccgcagctcccaccttacttgagcccagctggacgccaagtccgcctcgttgggccccactcccgggccccgggggacccagtgcccacctcatgccaggtgtccccgcagctcccgcct

SEQ ID NO: 211198 - DNA, 57 bp, Homo sapiens
  chr7:1590461-1590518
  hypo
agtcccgcacagagtcgaagtagacgtagtactggtggtctccgaggaggaggaggc

SEQ ID NO: 211199 - DNA, 297 bp, Homo sapiens
  chr7:1615093-1615390
  hypo
cgcagaattgagagtcgagcacgtcgctttgttttctgccaaacttagccaagctccggtcttaaaatcttttcgttcctagcgtgaggctttctgtctttgttgcaaatattgaaacctgccacgtcacctcttgcactatttgtttagttctttaagaaatgaaaccttaatccatgtacaatttctaaaagcctttatttcaatattttaagaagttatttcccctggcaaagaagccgccctgttgcccggtgtggagctcgatgacaaagctcatcagcctgagtggaagct

SEQ ID NO: 211200 - DNA, 101 bp, Homo sapiens
  chr7:1615444-1615545
  hypo
ctgtgtgtcacggtccctggatgaacgtttgtggaactggattgaattaaacaagacgtgcaaagcaagtggttcacgaggtagtgtgggggtgtagggat

SEQ ID NO: 211201 - DNA, 76 bp, Homo sapiens
  chr7:1650398-1650474
  hypo
ggggtgggggcagcggggcggcgggggcaatggctctgagggtgggcgaggaccaagtgccgccaaggagcgataa

SEQ ID NO: 211202 - DNA, 179 bp, Homo sapiens
  chr7:1659734-1659913
  hypo
gggcagcgaagaacccggaaaaacaggttcgaggcagacacaagatccaggccccggcaggctccgtgtctgccgaaggcttcctgggtcataggcgacaccttcccgccgtgccctcttgtgggaaaggggtgagggagccctctggggctccttttatttatttttaattttttaat

SEQ ID NO: 211203 - DNA, 72 bp, Homo sapiens
  chr7:1681117-1681189
  hypo
caccacccaggtctcggctcaaaatccctctcctgggagaggccattccggaaccccaggttcaagcacagt

SEQ ID NO: 211204 - DNA, 38 bp, Homo sapiens
  chr7:1681239-1681277
  hypo
gacttacttcactgtctgaaatccgttcttccctcccc

SEQ ID NO: 211205 - DNA, 64 bp, Homo sapiens; identical to SEQ ID NO: 200788
  chr7:1705153-1705217
  hypo

SEQ ID NO: 211206 - DNA, 258 bp, Homo sapiens; identical to SEQ ID NO: 200789
  chr7:1705937-1706195
  hypo

SEQ ID NO: 211207 - DNA, 154 bp, Homo sapiens; identical to SEQ ID NO: 200790
  chr7:1708906-1709060
  hypo

SEQ ID NO: 211208 - DNA, 226 bp, Homo sapiens
  chr7:1718471-1718697
  hypo
acagcagcgaaatcgggagtgtggggtgcgggcatcgcgtggacacgctgtgaactgggatttggagcacgggtgatgccagagtgggtgatgtcaggggctggcctgtgctcccaggagtgctcaccccgaggaactggccttgggtggcagaggagaggagaggcctggggaccctgaccctcatctcccatcacctccgctgggctgcgtgaccctgagttac

SEQ ID NO: 211209 - DNA, 294 bp, Homo sapiens
  chr7:1783932-1784226
  hypo
cttgcagcaggaacgtcggagcaggaggagtcagtggagccatcaggacacccaggcccatggggcaggaggcctcggtcaccacaggactggggcggaagacgagaggcggccggccgtgagggaggcgccctccctccccgcgcttacgtcgcgcggccatgcggtttgggacaggacacccctgagagtgcaggcacctccccctcccgcccctccatccctctgggggctggcgcctggccccccacctggtccccctgggcaggctgaattggggctccctgcagggcg

SEQ ID NO: 211210 - DNA, 233 bp, Homo sapiens
  chr7:1784457-1784690
  hypo
cagtacgcctcgctcagccgctttggcaacctcacgtacctcaacctcaccaagaacgagatcggctacatcgaggacggcgccttctcgggccagttcaacctgcaggtgctgcagctgggctacaaccggctgcgcaacctcacggagggcatgctgcgcggcctgggcaagctggagtacctgtacctgcaggccaacctcatcgaggtggtcatggccagcagcttctg

SEQ ID NO: 211211 - DNA, 75 bp, Homo sapiens
  chr7:1847553-1847628
  hypo
tgtctatatgacacggcgcacacatgatgtaactgcttgtctatatgacacggtgcacacgtgatgtctgtagct

SEQ ID NO: 211212 - DNA, 363 bp, Homo sapiens
  chr7:1855556-1855919
  hypo
cgacgtaggtcccagcgtgtctgtcagtcatgctgctgccctgtggggctggagaggcaggacgtgcacccagcctgtggctggcggggcaggggacctgcaggtcaggccaagcagagtggctccggctatgcccccgagcctgcaggctacgccacggtctggcggctgaagagctcgagggtgagcgagctgaggaaggcagggatgctgtcctggcgccgcaggtgcacctcgatgagctcgcccacggtgtgtgagaactctgtctccagtagctgcatcttggaacccgaggggctggtggcctgcggggcagtcaagaaagagacaagacagcggtcagcccgacaggcctctccc

SEQ ID NO: 211213 - DNA, 289 bp, Homo sapiens
  chr7:1865909-1866198
  hypo
cctggcccgtccgcgctctgaggagggagagagcaagcttctcgctgctggtgtattacctcggccgagggcctcctcctccaggctggccacaggacttgttacagcctatgcctgactcccccgctcatggcctcactccctcatggatgcccatggccggcccagccccaccctgcacaagccctccagctccaggcccagcccagctcagctccgcggagctcctggtccagaggtccaggtttgaccccaggacaccctgctgtgtgcacgaccctcagctccc

SEQ ID NO: 211214 - DNA, 122 bp, Homo sapiens
  chr7:1885181-1885303
  hypo
tccggctctggttcacggggaagagcgctgtttaggagacggacgtgctccacgcagacatgcgtccggctctggttcacggggaagagcgctgtttaggagacggacgtgctccacgcaga

SEQ ID NO: 211215 - DNA, 190 bp, Homo sapiens
  chr7:1913834-1914024
  hypo
ccgtctcggtgcacggctggtaagacccggggtctcccaccagcgcatcagctttggggaggtgacacacactggcagacaaccgtgtcatcgcacggccaggctgggccacagtgcagaggacagagggggtgaccgtggcttgggatggtcagggaagcgtctcaggaggagacgttgcagcagcacc

SEQ ID NO: 211216 - DNA, 209 bp, Homo sapiens
  chr7:1931660-1931869
  hypo
acccgccagccctgcgagctccgttcacggtgagcaccctacgcaggtgcaccgtcttccacccttcatacatcatgtttatggcaccttttccatatttaaacacgtacagacacgcagatgcttagcactgcgccacggtggtctactgcattcagcacagtcacgcactgcacacttttgcagcttggcagcagccggctaaacca

SEQ ID NO: 211217 - DNA, 234 bp, Homo sapiens
  chr7:1932169-1932403
  hypo
tctggtatcggaaacgctccattaagcatttcctttgagtgacagacccacaataaaaaaagctgtggattttggaacattcccgacttcaggttttcgaatcggggaggctggacctgtatacctttccccctcatccatatgacaaacccggtaggtcgacatcgccacatgtttgtgcagttccggaatctgtgccgtccacgcctctggccctgacgcccaccctgcagg

SEQ ID NO: 211218 - DNA, 79 bp, Homo sapiens
  chr7:1946383-1946462
  hypo
tgcgtgttgaacacgcaggtgagcgaagccaccatcccctacagacctgagctcctgcccctgcgcaagctacacagtc

SEQ ID NO: 211219 - DNA, 152 bp, Homo sapiens
  chr7:1950266-1950418
  hypo
tccctagagctcacgagcatctgagatcgcgtgtttgcccgtgtcctggcctctcttccacctggaacacgttcgtcaggtgagagcctgctcgggctttgagtaggtgcctgtccggggcaggaacacgcagcctcgctgcacccatccca

SEQ ID NO: 211220 - DNA, 180 bp, Homo sapiens
  chr7:1950693-1950873
  hypo
tcataactgcaggcgtgcctcatgtctaagtgctactcccacagttcccgctcctgggcggccgcctctccctccatcccccgcaccccttgagccagacaacttgagttgccttcggccttcctggattcagcactcaacacccgctggacaccaggtttcaacgctctgtcctcacca

SEQ ID NO: 211221 - DNA, 42 bp, Homo sapiens
  chr7:1962511-1962553
  hypo
gtaatttttccttttggcgagctgacgcgatggattgtacca

SEQ ID NO: 211222 - DNA, 147 bp, Homo sapiens
  chr7:1969179-1969326
  hypo
ctgcctgaacttccgagcagggactcagatccccgagagcaggggcctctttatgtgtttctgtgtcttctctgaccggaggtctggggcccacaccagagacagcccttggggaagccgtggcaaacacgaaagggagctcttgac

SEQ ID NO: 211223 - DNA, 118 bp, Homo sapiens
  chr7:1995853-1995971
  hypo
cagggccaccctggacgtccccccactaagggtgtaatcgcagggggtgtcagaagtggtggcagctggagggctgtctggaagtttccaacactccacaggccgaaccccagtggcc

SEQ ID NO: 211224 - DNA, 303 bp, Homo sapiens
  chr7:1997041-1997344
  hypo
tgggtggtgcgggccgcagaggactccagaggcagccagtgcaggcctgtcagcggcatggcctccctgccaggcaagggggtgcacatgggagggaggagagttcagacagacgagccagaaaacgggtgttctgtggcagcaggaaccacggtcgttcacgacgcccaaagaaatgagaggcccaggcagtgcctcacccagaggctgccccgccctcacctgcagagctcgccgctccagctgtgcctccagcatcctcttttcctcctccagccgactccgctcgccttccagctcctc

SEQ ID NO: 211225 - DNA, 181 bp, Homo sapiens
  chr7:2006411-2006592
  hypo
gtgaggaggaggaacgccgcaatcgtggcgtgctgggaggcgagggccgcgggccgcgctgcgtgcgcagggcagagctccttcaggaacacgagaggaataaagacggacccacccgagggaaaccgtgaggaatcgtagccacctgctctccaggagaggctgccggaaatccttcaga

SEQ ID NO: 211226 - DNA, 123 bp, Homo sapiens
  chr7:2024689-2024812
  hypo
ctttatagtctgtgacggttcattccatgtgtccactggacaggacctggggtactcagatcaaaacactttctgggtgtgtctgggagggtttgtggatgagatcagcatttgaatcgggga

SEQ ID NO: 211227 - DNA, 360 bp, Homo sapiens
  chr7:2024842-2025202
  hypo
ggcctcctccaaccccttgaggccggaatgaaatgaaaactggaggaggcgaccgttcctcccttgcctgcctggtggcctgagcggggcagctcccgttttccgcccaggactggggctttcaccacaggctccgctggttctcaggcctgcagagcggactgggcacagcacaggctcttccaggtctgctgtgcacagatgcagaccacgggatcctggctccatggccaagagcgagggcctcacagtcactctctcgggatagaccagtctaccgcacctggtgctctagggagcctaacatgcagctcgatctgctctccccacctgatactacctttagatggtgtgtctgtg

SEQ ID NO: 211228 - DNA, 73 bp, Homo sapiens
  chr7:2027225-2027298
  hypo
ggaagagcaaatgcgaggatggtcccggggtgctctcggcaccaactgcagtgccctcgcccagccgccgggc

SEQ ID NO: 211229 - DNA, 96 bp, Homo sapiens
  chr7:2040770-2040866
  hypo
cggctcacagtcacgagctggcaagcaaggatgcccgacgggagcctcgacctgggctgcaggccctggggtccgtacaacgccgacagcagctct

SEQ ID NO: 211230 - DNA, 569 bp, Homo sapiens
  chr7:2041377-2041946
  hypo
tggacagacccctcgtaggctctcacacctgctttgccccgacaccgtggcctcatgcggcaaacatgtcactggccccctgccacaaacacggtggtggggcccgaggggctgtgctccccgccggcgcatgccacctgtcactagtagagatgggactcaggctcctcacacacccttccccgctcaacgcagcttccgacgacagaagaggcagccatgcactggcgcctgcagcctaaaggcttatggggacaggcgtccctgcccagacccagggtccaggtgccctgaatcccagccactcccgcgtctgactcaccatgtctgctctttgtttctggcctcccagctcctccagggcctgcgacagctgagcctgcaagacaagacaggattcggcctgagactgtggtgggccaggccccatttctaggactgcagggaacacaacccccaccaccccgcagcctccactctctggggagcaacgggacccaggagctgggaagtgggcagccagagggtgggcaggggccagtgtggctgccccgcgaggccgagagccc

SEQ ID NO: 211231 - DNA, 134 bp, Homo sapiens
  chr7:2069775-2069909
  hypo
gagtgccccagaaacgcggaacccagagctgtgtacaggtgcatgtccgctacgccccgccccgcgctccacggaaggtccacacacagcctgaggaggttcccccagcccacagtgacgcccggggtggaggt

SEQ ID NO: 211232 - DNA, 165 bp, Homo sapiens
  chr7:2070136-2070301
  hypo
tagagcctgttacacgcgggcccctgaacagccttgatgtgcagaggcccctgggtaagccagggcgccagtgacaggtggccggaccccgcaggagtggaacctgcccatctgcgcttgacgaaaatgcctccaaaacaaaccagacgccgccccggcagagga

SEQ ID NO: 211233 - DNA, 223 bp, Homo sapiens
  chr7:2071761-2071984
  hypo
gacccctcattcatgcgggacgcccggccccagtccctgtccagtgcctggaacagaacaggtgctcaggaactgtgtgttcaattaaaaaatgaacgagtgaaaccatcagccaatcagtcctcggaaccacctcctgaggcaggctggagtcctccctttcagatgaggacaaggctccaggggaaggcgcgcgccccaggtctccagcctccgtgaagcc

SEQ ID NO: 211234 - DNA, 640 bp, Homo sapiens; identical to SEQ ID NO: 72943
  chr7:2094462-2095102
  hypo

SEQ ID NO: 211235 - DNA, 47 bp, Homo sapiens
  chr7:2099514-2099561
  hypo
acaacatgaaaactgcgtcgaatgttcaaatacgcagggcagaaagt

SEQ ID NO: 211236 - DNA, 46 bp, Homo sapiens
  chr7:2105354-2105400
  hypo
gacgtgagtccgacgccgctggacacccagcgtcaactgctccccc

SEQ ID NO: 211237 - DNA, 322 bp, Homo sapiens
  chr7:2113624-2113946
  hypo
actgtaaaaatccaacaccaagacgtgacaaggagacgacactgtggaatgctcgccaagaaccatgtccgggatgtttgccactcacacctgactggcaggcgagtctacccagtctgttcagcacacgggatgtgggtgaggacggccacatgccgttccaggcagcagagatggcagcacggaacaccgcagccagcctgggctcgctgggcctccattctactggggtgggaatctcaagcaaagaagccacgcgtgtggcatgagcagagaatctcacggcgggtgcaggtactgaggtcaccgagagcagaaggaa

SEQ ID NO: 211238 - DNA, 49 bp, Homo sapiens
  chr7:2148951-2149000
  hypo
acacaatcaggtgacgagaagcggctgcagcagccgcagggaacacggc

SEQ ID NO: 211239 - DNA, 195 bp, Homo sapiens
  chr7:2158523-2158718
  hypo
aggagaagccaccccgcgattgtgcctcccgtctctctccttgacctgcagtgcagacctggagctgagacgtcctccatcaaggccaaaagctccacacgcccagctgcctgggctcgccccagcctccagccccacgtgacggtctgcctcccagacccctgcgcggacaagcaggagcggctgggctcgagc

SEQ ID NO: 211240 - DNA, 170 bp, Homo sapiens
  chr7:2160716-2160886
  hypo
aggacactcccggcgcaggctcccagggcaggcgccccgccacagcattcaccaggacgagctggaccaggtggctctggggcccttcccgcctgaggcctcacgatctgagtctccactcactggtgagccccatttccatgtgaggtgtaggcgctgggtgctgccaa

SEQ ID NO: 211241 - DNA, 163 bp, Homo sapiens
  chr7:2162503-2162666
  hypo
gtggtgacggccgccgtccacccagcgcccctcccaggtgagcttccccgtcaccgtctgcccatcctgccctggtagagaagtgtattatcaaggcgaccggtacctcacctgcctcccttctgctgagtctggcttaaaaagcagcaggggagccgggcgc

SEQ ID NO: 211242 - DNA, 328 bp, Homo sapiens
  chr7:2162966-2163294
  hypo
gctcagccagctcagggactgagatgaaactgcacgctacagcttggagacattgcgggagggctcccagcaagcgaaactgggctggggtgcaggacggagagagggcgctggtgaggccctggtcctgtgtgtgagggcggctgacacccggtgggctctgtttgcgcttgagctggtgacggtagggtttccttccctgtcaagcaggagagcaccccagtccacccagggagcacccaggaggagccagccccgccaagggcacgcatgggaggcgtcaatccgctggagggcagcagccctcaagcgaggactcacggggaca

SEQ ID NO: 211243 - DNA, 99 bp, Homo sapiens
  chr7:2163467-2163566
  hypo
aagccagaaataaataaataaagctgccaattagccagcgcccttttccgctctggcaagggctttttagcttctccaaatacaccagagtcctgcaag

SEQ ID NO: 211244 - DNA, 218 bp, Homo sapiens
  chr7:2169012-2169230
  hypo
aatgtggacaggcacgagcaggccaagccacccagcaggctcacggcggctcctgtccacacggctcctgctaggcagcgcccctcctgccgtgggtctgaatccgtcacctgccagtgacgaggacgcgaggaacacgcgcttctcagagtccagtcacacacgaggcagcaggacaggaaccccaggtgcctcccgtcatgaggagagagcacaca

SEQ ID NO: 211245 - DNA, 202 bp, Homo sapiens; identical to SEQ ID NO: 200791
  chr7:2195725-2195927
  hypo

SEQ ID NO: 211246 - DNA, 416 bp, Homo sapiens
  chr7:2196794-2197210
  hypo
atatatactggaacgtcttcaaaagagtgctaagtaatacaatattttaagaatagaaatcaatagtaagaaggcgatgggaacactgttgtggggaggcctggctccactgaccactccagcagtgcaggtcaccgtgatcaggaagcggtaatgatggaacaaatcacagcactcagagggctcctccccttcatgttaccatttgagctccccaccatgcaagtccacacctcacatgcgtaagaacccgcaaaaactaagagactgagaagagaaaagcagcacagcatgctcccgacacggaagacgctgcccatctgggaggagtgggagagccggtcccctacagtctctgctcagtgcagcacaggcccagggccctgggacacagggcagagggtgtctgaaagagg

SEQ ID NO: 211247 - DNA, 325 bp, Homo sapiens
  chr7:2208345-2208670
  hypo
gcgtggagggcgccacgaggtcaaggtcctgaggccggaacaccaaggagctctgggagggtggaggaagaacacaagcctggagcagggggcagacacacggggcgtggggcccagaggccaccgggaggactcaggttttattccgagtgtgctaaggagccagggattgtggctgaagcgggaggaacacgctaaggagccagggatggcggctgaagcgggaggaacacgcgctcggacttgctgatgggctcttacgtgggcttttccccagctgaagaatgagttactaaatgtgttttaaaatgcaaaaatgtgtacc

SEQ ID NO: 211248 - DNA, 112 bp, Homo sapiens
  chr7:2208844-2208956
  hypo
accttttaaagtccgcatgtagacagtgaaaatctacaaaggtaaaccggaatctcctaagagcgggtagggatgcgactggtgggattacgggggattggcagtcttcttt

SEQ ID NO: 211249 - DNA, 436 bp, Homo sapiens
  chr7:2212246-2212682
  hypo
cggctcaacttcccagcagcatccagcaaagccgtcagtagtcctcgtggtgccagctcgagtgcctgatgggccctcgcacgggtctccgtgggacagaggtaagggatagaggaccgaggccctaaccagctgagaacccacgtggctggccgcagtcccatcccagccctgctggctgccaggtcaaggctggagccccagatgggctcccgtggggcgaagtcagaagtcagaggtgctcgaggctgccccatcagatggctcctgggagcgtgcacaccgcggtctgtgcgcacagaagaccccagacggtgccaggcaccctgcacacatgcctctggctgagactacagcacctgctagcatgcccctggcattcccagtcgaatctccttttcttccatgtatacgtattcctcgtgaagttacataa

SEQ ID NO: 211250 - DNA, 240 bp, Homo sapiens
  chr7:2222236-2222476
  hypo
gacacaatggggtatgaccacgtgccatgtggtggaagggagcgctgatccgtgccacagggtagacgccccttgagaacgtgctgagaggaaagcgccagcacagaggccacctatggtgcgattccactgatacacaacgtccagaacaggtaaacccagagacaaagagcagaggagtgactgccaggggctggggaaaggagaacagggaacttcggccaactgggcttcctttgg

SEQ ID NO: 211251 - DNA, 47 bp, Homo sapiens
  chr7:2232844-2232891
  hypo
ggtgcaggctcacaaaccatcggcccaagccacgccccagcatactc

SEQ ID NO: 211252 - DNA, 236 bp, Homo sapiens
  chr7:2233056-2233292
  hypo
attgctgtgctgagtttcagcacagggaccgtgcgtcctgctctctgctgcatctcccagccagtatacaccacggtacgtcataagccctcaacaaatatttgttgaatggaacagacgtgatcacaatatgtgctcctgggaaccctcggctaccagaaaaaaaggcgagacagaaatgagcacttctcaaccctgggagcaaatttataagggttttatcccttcaaaattat

SEQ ID NO: 211253 - DNA, 121 bp, Homo sapiens
  chr7:2233470-2233591
  hypo
aatctggaaaggaagaaaccaccatgatgctgtgtgggcagcaaaaggctctgcatgggaaagaaaagctgcagggaaaaggcagcaaggctctgcatggatttttttttttttttttttt

SEQ ID NO: 211254 - DNA, 150 bp, Homo sapiens
  chr7:2237968-2238118
  hypo
atctcccaagagcccgcctttgcttctgccagccactcacgctctccacaggctgcagccaggtacacaccccccttcaagcaacaaaaccactgcctgagcacctggcctgctctaagcccagggctgagacaagggggagccagccac

SEQ ID NO: 211255 - DNA, 274 bp, Homo sapiens
  chr7:2255763-2256037
  hypo
ggctgccccatcccccgcaacccctcaccgcaggtgcgcgctctcctcccgcagctgcttcagctcccgttccagcctagggagccgtaccagctcagacttcatgttcttcacaatcgctgcatcctgctcttgcagggacagcttctgctccagatcctgatggaggccagggacagagaagaagggaaaaatgagccacgaagagacctggagaaaatcacacgcacacggctaagagaaggaagccggtctgcaacggctatacacactg

SEQ ID NO: 211256 - DNA, 72 bp, Homo sapiens
  chr7:2259945-2260017
  hypo
catggaacccgcacgcgacagaaccgccaggcttcctcctgaccactcccaccaggcgaccttctgaggacc

SEQ ID NO: 211257 - DNA, 92 bp, Homo sapiens
  chr7:2262278-2262370
  hypo
acactgcctgttgcgctccagctgctcctgcatcttctcctccgccccggcctcccgctcctgaagctgccggatgcgcgtcaggagctcct

SEQ ID NO: 211258 - DNA, 509 bp, Homo sapiens
  chr7:2263998-2264507
  hypo
ccacccaggccatgagcaaacgccccacctctcagggaaaacagctctcaaagcagcaacggagccaaccctgaggcagtggcccccaccccagcggtgcctcagtctcactgagcccacacaacgcacaccgcagtcaggatctgcaggccaggggcaagcaatccaaccagcatcacaccccggaagacgtgagctatttttctagggcccaggagagtgtgtgaatacaccgcatgatgtcagggcggggctggacatccacccgccaagagagggcacggaggccagggagactttccgcccaatactctgcctgaaccttggcagcatttccacaactgatcagcactgactgaaaccctggcaaagtgctgttaatcagagcagaggggatccgcgcactcagtggaaacctaattccctccccaaggacagggtgttttccctgctgccctggggagccaggagcaacacagagccgccattgagaccggcaccctttgcta

SEQ ID NO: 211259 - DNA, 49 bp, Homo sapiens
  chr7:2264962-2265011
  hypo
tcttataacctggcaggtaccgtgcacagcccccttgcttcctggggct

SEQ ID NO: 211260 - DNA, 289 bp, Homo sapiens
  chr7:2265241-2265530
  hypo
tgagtgactcagtgcagcagacacactccctgaggacccattcccgcaggtcccgtgctaagtcttgatgtggcccagccactgggctccaggctggggaacaggggaggggcaggaaacgggaaggtgaaaaagcctgggaagaggaagacgtcttttgagatgacattaagcatattagtgaaggcaacggcctcgaatgccacccatttatttaccagccaacggctccgtgggtcggaagtccagacgtaggtggctgcattctctgaccagggtctcccagact

SEQ ID NO: 211261 - DNA, 194 bp, Homo sapiens
  chr7:2293743-2293937
  hypo
agcaggtggctgggccggcaagtgcgtgacgggaggctgggaggagggctctaggtgcctcagagaaggaaatccacttaaaagggggctgtccctcctctaaagcctcagctggaatggaacacgcccccccacgcccccacctgtcctctgccagcccatccagcctcagtgccacacggtgcagaccccaa

SEQ ID NO: 211262 - DNA, 455 bp, Homo sapiens
  chr7:2294483-2294938
  hypo
gccacagggcgaaggacagtgtggcccagctgcccccatggtccacggatgcgcctcccgacccgcaggcgtgagctcctctgctccagctgcagcacggggcgtggcggggaggggagctgccgtccaaagggaattacaccgggacacaccgtttggaaagaggttttagtgcggccgcagggagcaccacctcagcctcaggcgctagtgaggacacaggccgtcctccggcggggagcacggtggggtcagggtgctgtgtggtcccgcaaagaggcagctgagcttgggcctcaggtcgttccacaccttgctcatctgaaagggaagcgaagagaacaagatcagcaggcggggccggggctcctcctcacgctctgatcccagttccttcgcctgccagtgacagggagggaggggccctcaggtgcgccagctcctcaaacctctgg

SEQ ID NO: 211263 - DNA, 273 bp, Homo sapiens
  chr7:2298189-2298462
  hypo
ccaggaggggcacggaggagaacaagggtgttgtctccgcatcagtaacaggagagagaaacgcaggcctaggaagggggcacagggaagggggcgcagggtaggtaggagagacagcagctgcaggaaggacgtgctgctgatccaggaagagaggcggccgccccaggctgcacgcagaagcaccacactcggcggtgggggcagcggtggacacaggctcctcttcggccctcacacaaggctctgtgcgggcagcacagccacagagag

SEQ ID NO: 211264 - DNA, 149 bp, Homo sapiens
  chr7:2300173-2300322
  hypo
cacagaccctactccgagtctcacgtgtcttgctgggatatggctaccttcagctcctaataggtctggggagagtataactggtgtaagtacaagcagacttaggaaaaacggtcctcgctgcccccgactgaacagcaagggtgaga

SEQ ID NO: 211265 - DNA, 327 bp, Homo sapiens
  chr7:2349432-2349759
  hypo
aacagacctgacatgagcgagcagctgcaggtaagggttgatgggagcccagggtgcatggaagtcgcccaggcaagaggggaaggctcggggcaggggtgaaggagccccgagggtcagcaaaggccctggacctgcctcaatgacactcaaggagtcatcgccaggtcaacgcggacaaacagcacggagcttccgaaccgaatggaatgtatggaatgccatgggatgagccgcaagtgaagcgtgactcaccctcgttctaaagagtcaatgtagggccgcaggactgtatacggcagagccaggatacgccgtggtcatctg

SEQ ID NO: 211266 - DNA, 125 bp, Homo sapiens
  chr7:2420188-2420313
  hypo
tttccacggtgcctgtacacagccgagcagcatttccgttgaaggacttgcatccccattgcgggcagtgctggacgtgtcccggagacccaccgggagggcgccgccatgccttgtacccccac

SEQ ID NO: 211267 - DNA, 152 bp, Homo sapiens
  chr7:2420396-2420548
  hypo
ctttgaatgtagatagagaccttgaacttggtgcctgcctccctccccagtggcaagggcctgcttgccaagccagacctctgcagggcgctgtcccgtccggtcgtcacgcacactcggccaccctgtgtccagcgatgcactagtcatgc

SEQ ID NO: 211268 - DNA, 209 bp, Homo sapiens
  chr7:2472800-2473009
  hypo
ccaactggaagcgcgtgatgatcgtgctgagcggaagcctgctgcaccgcggtgcgccctaccgcgacccgctgcgcatcccgcgcgagcacgtgcacaacgccagcgcgcacctgaccttcaacaagttctggcgccgctacgggaagctctcccgccacctcatgaaggtcaagctcaagaagtacaccaagttcctcttcgtgcgc

SEQ ID NO: 211269 - DNA, 150 bp, Homo sapiens
  chr7:2473129-2473279
  hypo
gcctcggcgcgcgaggccttccgcgctggcctcaaggtgtccttcgccaacttcatccagtacctgctggacccgcacacggagaagctggcgcccttcaacgagcactggcggcaggtgtaccgcctctgccacccgtgccagatcgac

SEQ ID NO: 211270 - DNA, 338 bp, Homo sapiens; identical to SEQ ID NO: 21024
  chr7:2473779-2474117
  hypo

SEQ ID NO: 211271 - DNA, 205 bp, Homo sapiens
  chr7:2499992-2500197
  hypo
ccacactctggcggccaaacaatgcccacctctgagtagagctgtgggtggcggtaaccatggtgaggggccctccacgccaactgcccatccggggtcagccgggcccgtggccctggttccggctttgtctcggggctggaactgggcccagggatgggctctgaatggctggcgggtgggagggcactgcccaccacatagc

SEQ ID NO: 211272 - DNA, 175 bp, Homo sapiens
  chr7:2539250-2539425
  hypo
aggacaggggtcaggcgagcctcgggggtgctagcttcttcccatgctgggatccctgctctgtctatccaggtgaccttcccctgccctacgctgtggcccacaagcctgacttgagccagctcatccacttaggaaatgcaacccctggccagagcacgtccacaatgaggac

SEQ ID NO: 211273 - DNA, 36 bp, Homo sapiens
  chr7:2565883-2565919
  hypo
tcacttcatgaatacggctgagcggatccggctgcc

SEQ ID NO: 211274 - DNA, 237 bp, Homo sapiens
  chr7:2566658-2566895
  hypo
tagaggtgtcccccggagtcctgcttgctcggggtggggccgccagtgttgtgggactgcaaatgggagctcagcacctgcctgccacccacgcagaccagcccctgctctgttcccacaggttccgctccatccactgccacctgtacccggacacaccctggtgtccccgcactgccatcttctagtggccatggctgagacccaatccctgggcgcccctggtatccaaagggc

SEQ ID NO: 211275 - DNA, 209 bp, Homo sapiens
  chr7:2566939-2567148
  hypo
ccctagggccgtgcctgtgcgtgtgcgtgtgcgtgtgtgtgtgtgtgtactgcatgcccacccgggtagcaggctgctgggcagttctgctctgtggaggggcgggcaccagcgccacttatgtgcctctgctccgagggccagtgggctgcagggcctgcttggaggaaggatttgtgtgtcggaggccactccgagggcaattctgt

SEQ ID NO: 211276 - DNA, 301 bp, Homo sapiens
  chr7:2611215-2611516
  hypo
gcagggagcatgcctctgggcggccgagcgtccctgaccccgcagaagctgtggctgggaaccgcaaagccaggtatgtggttgtcgcactggagacccttcctgcttgagagaagagttcgagaaatttcagggagtggtttgagatggagtttttaatattccttgtttgaattacattgtctttagttttctcgaagacatcaaatatacacatcgtagttttatgtcatgcataaatgtggtttcgccaagtggcgctttagcctcccttggtcccgtgtggtctctacatgggagt

SEQ ID NO: 211277 - DNA, 152 bp, Homo sapiens
  chr7:2612209-2612361
  hypo
cctaaacatagaggcgtacttaaatttattcattgagtaaatgatattaggaacaaatactaataaataaataatgataaaaagtccaagtcgcaccaaagagaatcagcttgtttctgtgtttatgttcctgcctagtctcttttttttta

SEQ ID NO: 211278 - DNA, 42 bp, Homo sapiens
  chr7:2629286-2629328
  hypo
tgacttctgcctgcgccctggcttggcgggggtctgcgcgtg

SEQ ID NO: 211279 - DNA, 224 bp, Homo sapiens
  chr7:2632111-2632335
  hypo
agagactcacaggccctgagcagtcggggctcgcagacagcatacagtccatctgagactcggacagaagtctccgtcgaaggccagtgtgtggccatcacaccgcatgggacgcaagaaacgcatctgggagcagttcagctggagccccgcacaggcagtgccacggtctaggcggggcaggcccctgccccattcacggaccccgcgcctgcctgcagcac

SEQ ID NO: 211280 - DNA, 173 bp, Homo sapiens
  chr7:2679580-2679753
  hypo
ctctcccaatgcctcgggcagccatcatcctcagctgtggtcacgctgcctggcctgccagctcacccgcccccgctgtgtgactgtggactctggaactccctgtgcctagcagcgtggctccaggacacgggccctatgtcttcgcttccctccctgctcagggcagaccc

SEQ ID NO: 211281 - DNA, 348 bp, Homo sapiens
  chr7:2679783-2680131
  hypo
cgtggctggaatggcagggtggtgggatcgtggccactgcctgtggctggggctggaggctgcatcgggccaaacttctcatcagagtccctgtgagcaccccccagtgggccagggcctcctcagcccagccacgcgccacggtagcccacaggttggtggcacagagcggcgtgtgggtccgtggcgcagggtagcggggtgggcagctgctcccaggcgtgtgcatgtagagcagccgcctgtgtgtgtgtggggggggacgtgtgttccataggccggccgtgacttgctgtgcaccctcccgagtggcatgcttcctcacacgctgccaggcccaggtcctgc

SEQ ID NO: 211282 - DNA, 51 bp, Homo sapiens
  chr7:2686911-2686962
  hypo
aggagcactcttgctgctccggagccccacgtctgcgcgaggacgggcggg

SEQ ID NO: 211283 - DNA, 55 bp, Homo sapiens
  chr7:2695698-2695753
  hypo
tgaccatctgcggtgcgtgccccccaggaccccctcctccgcgtccaggaggtgc

SEQ ID NO: 211284 - DNA, 271 bp, Homo sapiens
  chr7:2697946-2698217
  hypo
ggccgctccagggccgcggcaggcgcacgacagcctctaccgcgtccacatgcccagcctgtacagctgtggcagcagctacggcagtgagaccagcatcccggccgcggcccacaccgtcagcaacgccccggtcactgagtacatgtgagttgacgtgggcctagtggggccagcggacacgtcagctgcggctgagagcgcggatctgggctggggctagctcgaggcaaggggctggagaaggggcggcctccgggctgggcagccc

SEQ ID NO: 211285 - DNA, 182 bp, Homo sapiens
  chr7:2698474-2698656
  hypo
cccatctgggcacagcgggcctacccatgggccccccgacctgcagctgggactgcatggccagcaggcactcacagcctctctcccctcatgcctcaggagccagaacgctaatttccagaacccccgctgtgagaacaccccactcattgggcgcgagtccccgccgccctcagtaagtc

SEQ ID NO: 211286 - DNA, 167 bp, Homo sapiens
  chr7:2731703-2731870
  hypo
gcaggtcatgtcaccggtacccagaaactacaaaaataagctggtgagtctcctgtggcgtcgggtgctccgaggccggctaagtgcctcctcctcctacttgggccagccaggctcctggaggaagacaggtgggaccacacccatctcacagggaggacacagtg

SEQ ID NO: 211287 - DNA, 239 bp, Homo sapiens
  chr7:2742260-2742499
  hypo
tcacccagcaggccggtgtctgcgagtgattcccggggagagggtcccaggcgggcaggggcgtcgcagggctgacggtgctgctctcccaccagacctgagcgaggagccggtgggaagctccctgctgcaccagctgtgcagctgcacagaggccttcttcctgggcctgcgcgtcaagtgcctgccgtcggtggcagccgcgtccatccgctgctcctcgcggcccagccgggact

SEQ ID NO: 211288 - DNA, 379 bp, Homo sapiens
  chr7:2751965-2752344
  hypo
actctacacctggactcaggcggtggtggggacgtggcccagccaggaggcgggggagccgtcagtgtgggaggacaccccgcctgccagcgccgactcgggcatgtgctgtgagagtgactcggagcccggcaccagtgtgtcggagcccctcacccctgatgccgggagtcacaccttcgcctcggggccagaggaagggctgagctacctggcagcctcagaggctccgctgccacctgggggccctgcggaggccatcaaggagcatgaacggtggctggccatgtgcatccaggccctgcagcgggaagtggcagaggaggacctggtgcaggtggacagagccgtggacgccctcgaccgctgggagatgttc

SEQ ID NO: 211289 - DNA, 166 bp, Homo sapiens
  chr7:2804415-2804581
  hypo
ctcccagcgtgagccggcggaccctgaagggaacactgagactgaccacagctggacttgcgccgcctcgtcctcttagtgaatgaggtcctcagaggcttaagcacgcgttagttatccaaaatgcttctgttcaggtgaatgcacaaagcgttgaggtaggtca

SEQ ID NO: 211290 - DNA, 37 bp, Homo sapiens
  chr7:2815344-2815381
  hypo
cagagggccaggctccgaatcacgtcacaagtggaag

SEQ ID NO: 211291 - DNA, 227 bp, Homo sapiens
  chr7:2931116-2931343
  hypo
ctccctcctctttacgtggacaccatcactggatttggggacacaccctaatcccgtatgacatcttaacctgattacattggtaaagaccctatttccggataaggctacagtcacggccactgcagacttgggcacatctttcacggggaggtagtccggtcagtccaagaaaaccatgcagcagctgagaagggagaaaatgcggaggccgaggcgggcctgag

SEQ ID NO: 211292 - DNA, 240 bp, Homo sapiens
  chr7:2935118-2935358
  hypo
ccccacccctctcatttttcagcactgcctcctgagcacctgggaactccagtcttcctgaattttgtctgaccttgacctctgtccttggacctgatgcacacctcagtgaagcttgtaccaagtaagccctgaggcggccgtgagaagccctcgaaagttcccctgttcattattatagttacttttagagacagggtctcactctgtggctcaggctggattgtaccatcacggatt

SEQ ID NO: 211293 - DNA, 49 bp, Homo sapiens
  chr7:2946305-2946354
  hypo
cgctgctcctcgccgatcttgtccttgacaacgcggagcagctcctcta

SEQ ID NO: 211294 - DNA, 185 bp, Homo sapiens
  chr7:2959043-2959228
  hypo
gtctgtgaaagggtcgacccgcgcgcacagccactcgtgcctgtcctggtacatggtgtcacggacgtgcacaacatcgtcacacttcagggacatggtgcaggcgtccagctggctggagatgttcaggttcagccggatgtagaacgagtcccccgatgtgatcaggccgtcctccatgtcct

SEQ ID NO: 211295 - DNA, 201 bp, Homo sapiens
  chr7:2967959-2968160
  hypo
gggctgtggggcccgggaacctgatttctgggcagcatggagccacgggtcataggttttgtccttggacaggcagctgggtgaacccagggaggccgcttccctcctctgagcctcagcctcctcatctgtacaatgagcagtaccctgcctttcagggttgcttcgaggacagctgggtcagcaagcgtggactggccc

SEQ ID NO: 211296 - DNA, 93 bp, Homo sapiens
  chr7:2972305-2972398
  hypo
aatagagagaggccagccatcgtgtccctcgtcatacggccaccaggttcagcccggaacgcacacggaccgatgctcatctcccgcggccgg

SEQ ID NO: 211297 - DNA, 216 bp, Homo sapiens
  chr7:2976623-2976839
  hypo
agggcccacctggcttcaggcgtggggtcctgcccgtcccgccccacctggtccaggttgttgctgtccttggagaggcgccgcagcttgctctccaggttgacgatgcaggcctcccgccgcaccatctcgatcctcatctcgtcgttcttctcctccagctcgcggatctgcttcctgtacttgtccttttcgattaagcactgcgagtactgt

SEQ ID NO: 211298 - DNA, 462 bp, Homo sapiens
  chr7:3012783-3013245
  hypo
tggcacgtacagtgggcaatgctacttagctactcagcccacccccgtcggaagctagcagcaaactcaggacagaaacaagaagtcactacctactcgtcctgtgtaattacctccattccaagcagaatttagagaaaaactttaaacatttaccctcaaaccttctgtctgagcttccgattggaaactcacccagccggtggtgttggcatctttctgtgtcttccacgttcctctgggcagggacacacttcatatttccttgtgtaccctggcttagcaagtgtgttccataaatcggcatttcatatttatcaagtgagtggtgtccagtggctaaacgctggctttctttcgctcattacagcttcttcccttcagccgatcagacctctacctccccatgtgtggggagagctttcactgtgactgctttccggtgcctgctgttcccaccta

SEQ ID NO: 211299 - DNA, 222 bp, Homo sapiens
  chr7:3026339-3026561
  hypo
cacctgccgcattttgagcctcacctcagcccttcggaacggagcctgcggtttaacaggctccccaggtgacgctcacacacactgataaacgccgctccaactcacccctccctgtgcgcagagacgtgggtccccgactcttggttcactccctgcctgacccctccccgtgcgcagagatgtgggtcaccgactgccggttcactccctgcctgagtc

SEQ ID NO: 211300 - DNA, 215 bp, Homo sapiens
  chr7:3049091-3049306
  hypo
gagaggatgcccaatgtgaacgtggtcctctccccaggaaacactagacactggaggaaagccaacgccgtaagagaaacaaccaagcacggtcaaggaaagcgttcacagggccagcagaacaagccattagattgtgcgtgcttcatgtcctcagaaagacgcaagagagcattggctccacaaatagaaattaaaacaaaacatcaccgctg

SEQ ID NO: 211301 - DNA, 98 bp, Homo sapiens; identical to SEQ ID NO: 200794
  chr7:3083602-3083700
  hypo

SEQ ID NO: 211302 - DNA, 44 bp, Homo sapiens
  chr7:3179217-3179261
  hypo
gtgagctatgagcaagacaccgtgctgggcacctgctttttttt

SEQ ID NO: 211303 - DNA, 33 bp, Homo sapiens
  chr7:3727109-3727142
  hypo
cctcagctggtaacagatatcgaaccgcagtcc

SEQ ID NO: 211304 - DNA, 111 bp, Homo sapiens
  chr7:3727180-3727291
  hypo
tgaactgtcgatgcacacggcaacttggatgcatctccaagaaatggcggtgatgaaaaaaattcagtcccaagagatcgcatatggtacggctccatttatatggcattg

SEQ ID NO: 211305 - DNA, 157 bp, Homo sapiens
  chr7:3880279-3880436
  hypo
cccaggtgatgctgatactgcggttcacggacaactctggtcacggactacgctgggtagcagagttctcgagttgtgctactcagaaggtttatggcagagctactcgcagtatgatccgagaatcgcgagcctcgcctgacttggattcacatta

SEQ ID NO: 211306 - DNA, 97 bp, Homo sapiens
  chr7:3991158-3991255
  hypo
agcccttgagcagaatgcatcgtcaatgcgtgctgggagggagtagagttacatctagattgagttttcagtgtccgttgttcaacccaccatgcac

SEQ ID NO: 211307 - DNA, 169 bp, Homo sapiens
  chr7:4116727-4116896
  hypo
tctctcaccacctacaccatcgacgtggccgctgtgactgccgtgggcactggcctggtgacttcatccaccatttcttctggagtgcccccaggtcagtagaatcgtgtgcggtcctcctgctgtcacctttctcttggagattcccgaggctagaagttgattggca

SEQ ID NO: 211308 - DNA, 34 bp, Homo sapiens
  chr7:4141093-4141127
  hypo
tttaaaactcaccgatctgtcaaaatagttcaag

SEQ ID NO: 211309 - DNA, 257 bp, Homo sapiens
  chr7:4152827-4153084
  hypo
ctcccttgagaaacagtcagcgcctttgtggtttcgttcttttccttcttacctttgctttgccgtgactctcatcagtggtttttcctttagatttcgaatgaagcaagtgaacattgttgggccgagcccctacagtccgtcttcccgggtcatccagaccctgcaggccccacccgacgtggctccaaccagcgtcacggtccgtactgccagtgagaccagcctgcggcttcgctgggtggtgagtgggggtg

SEQ ID NO: 211310 - DNA, 408 bp, Homo sapiens
  chr7:4153553-4153961
  hypo
ccccaggaacacctcctccacggagttggcctcacagggcaggcccatcccttacaacccgtgagggtggcagttctgagatgtcagctcatcgcgactcctcgttccttcctagcccctgccggattctcagtacaacgggaaccccgagtccgtgggctacaggattaagtactggcgctcagacctccagtcctcagcagtggcccaagtcgtcagtgaccggctggagagagaattcaccatcgaggagctggaggagtggatggaatacgagctgcagatgcaggccttcaacgccgtcggggctgggccgtggagcgaggtggtgcggggccggacgcgggagtcaggtgaggggaaggcgattcccatcctggagacaccgcattagagatggggctgagt

SEQ ID NO: 211311 - DNA, 54 bp, Homo sapiens
  chr7:4183234-4183288
  hypo
tgtccttcctttgaagggcccgctagcttctattggagaggatgcttctgcgca

SEQ ID NO: 211312 - DNA, 152 bp, Homo sapiens
  chr7:4183448-4183600
  hypo
ttggagcttcacagcctcgtcctcatccttgtcttgtatgcttcctgacaggcctgcggcgagggtctggcatgggaagcgttgcagggatgcagcagggtccctggatgtgcctagcagtgtagccgctgtggtcacgctctcctcaccgt

SEQ ID NO: 211313 - DNA, 238 bp, Homo sapiens
  chr7:4185350-4185588
  hypo
cagggtaccagattgcctaccgcctggccagcagcagcccccacaccttcaccaccgtggaggtcggcgccacagtgaggcagttcacagccaccgacctggccccggagtccgcatacatcttcaggctgtccgccaagacgaggcagggctggggggagccactggaggccaccgtcatcaccaccgagaagagaggtaagaccttgggggacccgggggtactgcagatgttgtg

SEQ ID NO: 211314 - DNA, 43 bp, Homo sapiens
  chr7:4187767-4187810
  hypo
ctgggccacctcccctccggagaccaggtgaaatcacaagggc

SEQ ID NO: 211315 - DNA, 229 bp, Homo sapiens
  chr7:4187866-4188095
  hypo
cacacccgccactgggggccgacaatcaattgcagctttacacacgccacgcattctaatcagaatcaataatcttcatgataaacaattaaacaattattccttccgccgcggaacttctctgctgaaatcgatggggtgcagaggcacagcggcggcagatgatgggcactccaggccgggcctggccccaggcaccccgcgtcccgcatccaagctactgcacaca

SEQ ID NO: 211316 - DNA, 362 bp, Homo sapiens
  chr7:4214559-4214921
  hypo
atttcctggcacccaccaaacggtgtcacaaaaatactctttgccccttgacatcctcgtgccggggacagagtgaagaagcagctccagaacacgccgtgtggacggtgccctcccgctttctgccatccctgtggcaccagggctgcctacctcacgcgccaatgccagccgcggggccttccacgcacccagtgcgcggacggcagcagctcctatgctcctatgctcacacagcttgaccccagtacagcgccaggcatgatgttgatgaatgttgaagacgggaaattgcagcactggtgtctgcactgttggcacaccccaaaggtggcccttgctgaccaccagacagttggcat

SEQ ID NO: 211317 - DNA, 802 bp, Homo sapiens
  chr7:4219129-4219931
  hypo
gcaccaagggtcaagcccagcggattttttccggaatggtcaagcggtatttgcatacaaatgaggatgcgtggagagaggcatcaagagcatacggtatttctgcctctctttgcacgaaaatatgttcaaaggggtcactcagagccaccgaggtacggctcagctttccctcagggatggacctggctgtagaggagcccattgagggccatggtggggccaccaagggtgctgtcagagaggggtgccagggtgccgtcagtaaagggtgggtgccactgcggacggcggccatggcagattctgtgctctccagttgtattcgggtgactgggccccagttggcccccatggctgggggtgggtcagcctgtggcatcgggggagcacaggaaaggagggccgggaactacagtgtctgaactgcaagcagaaggtgtgggtgtcagagctctgcctgagggtctgcctgcgcctgggcataggacaccaggaaccagggggctcagggcacttgggcaggccctgagaccgaggcagacgtccagagaaaagagcttcagcaagcggtagggaagccaggggtggtgcgggaaactggggagtcgcgccagggccagccaagcggcaacaggactggatgcccagcaaacagctccagctctatgcccagcgcccagctccagctctatgcccagcgcccggctccagctctatgcccagcgcccagctccagctctatgcccagtgcccggctccagctctatgcccagtacccggctctagctctatgccctgt

SEQ ID NO: 211318 - DNA, 199 bp, Homo sapiens
  chr7:4247841-4248040
  hypo
gtcagcatatcagccttcaacgccgccggagatggacctaagagtgacccccagcaggggcgcacccaccaggccggtaggaggaaggcgggtttcctttgggcaggcctccttggacacgtgttttgagagcgccagctcaggtcccctcacacagtggttcccggcccgcccaggcggaaggcaacaccttttgagt

SEQ ID NO: 211319 - DNA, 164 bp, Homo sapiens
  chr7:4254667-4254831
  hypo
cacaaatgccagcagagcctcgggaccctggcgctcgcctgcctcccctgatggtattggccagaaccctggctcgccgagacactaaccccaggcctgtccgacaagccacatcccgtacccacatacgtcaaaagaagaacgtggaccaagagaggatggca

SEQ ID NO: 211320 - DNA, 263 bp, Homo sapiens
  chr7:4265023-4265286
  hypo
agcactcttgtgtgggagagcggcctgtgggatggggcggtaccagccagacacgggtgcctgggctcagcctcttaacgctgtgaacacatctcagcattttccaggcagcgataaggcattggttctcaggcttgccgagagagcccttgactttctcctcaggttctcatatgctgctccgccggctgcacgaagggaacaggacgcctgttggttactggtgcggcccagggagcctggcaggccgtgcggattagaag

SEQ ID NO: 211321 - DNA, 316 bp, Homo sapiens
  chr7:4272745-4273061
  hypo
ttcagcactcactccgcatccagtgcccctgatgcctcatccagggctgctgcaagccgacccaccaggcaggtgcatggggctcgcatctgggacttcgcacttctaacctctgctctcgcctccccatccctcttgcagatgaaggcttatgggacatgtttgtgaaggacatcccgcggagcgccacatcctacaccctcagcctggataagctccggcaaggagtgacttacgagttccgggtggtggctgtgaatgaggcgggctacggggagcccagcaacccctccacggctgtgtcaggtaggccctc

SEQ ID NO: 211322 - DNA, 240 bp, Homo sapiens
  chr7:4273570-4273810
  hypo
agaggtgtgagcatgagccacgtggtgtcccctccgcaacaaaatcattcgcaaggaaagcagagccccgatcccctgtgttagctgacgcatccttgccgaggagcatgtgtgattttggaggggcaagaaccaccccggcagctatgggggagcccacgagtgcctgacaagaggtcacgtcttcctgggacctcccagaaagccagcggaggggccggggatagtagctgctctggg

SEQ ID NO: 211323 - DNA, 209 bp, Homo sapiens
  chr7:4277417-4277626
  hypo
tgcaggtccagccccttcctcgcgtgtcccacgatgccactcagccaaaacatagcgttcgttctctcgtggatctgccgggcccgtgtctgcttttccatttcatttgcttgtaggtgctgagagaaatgcaataggttttctttctgggggcagccaggcacagtgcagcaaacgctctatgcctcgggacccagatgctgaccctg

SEQ ID NO: 211324 - DNA, 183 bp, Homo sapiens
  chr7:4285297-4285480
  hypo
ctcatcctaggtccccaccccggcctagccccggcggcctgcactactcagacgaggacatctgcaacaagtacaacggcgccgtgctgaccgagagcgtgagcctcaaggagaagtcggcagatgcatcagaatctgaggtcagtgtcggtgcctacttccgggcagtgaccatcagcccct

SEQ ID NO: 211325 - DNA, 324 bp, Homo sapiens
  chr7:4349445-4349769
  hypo
gccctcacttttgacgccaattgcgagttcagaggccctcgagaccacccttaggttcgacgatttgctggaaagactcggaactcgctggaagctgtgatagtcccagctatggtttatcacagggaaaagacaccgattaaaatcagcatgcaggggcagagcccacgagggttccacacactgagcgtctgctgtcctctcctgtggagctgcggacagcgttacccctctgacaatgtgcgatcatacgcacaaaacacggtcagccaggaaggttcctccacaccagggcttccctgcggctccatcccataggcaggg

SEQ ID NO: 211326 - DNA, 81 bp, Homo sapiens
  chr7:4540651-4540732
  hypo
tagtacctcctccagggctgcgcagagtagaaaggtagtggtgacctggcgcggtggctcaggcctgtaatcctagcactt

SEQ ID NO: 211327 - DNA, 123 bp, Homo sapiens
  chr7:4751303-4751426
  hypo
atcacccataaggggtgggcagtggtgctgccgtgtcttgtcaggaggccagctctgtgtcacccaccaggctgggctcagccacaagtcggcaacgtagtgcctccagggcagatgccacgg

SEQ ID NO: 211328 - DNA, 320 bp, Homo sapiens
  chr7:4751607-4751927
  hypo
acgcggcaggtcacagagcccaccaagtccgaagctggaagttcagattctttgatattcagaggtggatcatctgtgcttttttttttttatcagtctctcactttttatccatcatctaattgtgacagcttatttgcctttataccataagatggggagtagggttgagatgaaatccaagcatcgtttcccttccccgatggtcgcctccctggggtgagacgttcgacgtgtcagacttcaccaagagcatctcccgcctcggtgcagtaatggacttggaaacgatttactccggcacttggttcctgtctcca

SEQ ID NO: 211329 - DNA, 147 bp, Homo sapiens
  chr7:4754252-4754399
  hypo
tgtgtgtcaaagtaggagtgcgtgcttgctttgctttgttttttcaaggctcatcttaaggattttggcttacgtattttctaagtaggcgttacattcccgcggttcaaaactcaaaaggtatgcggttaaaaattttgttttggt

SEQ ID NO: 211330 - DNA, 219 bp, Homo sapiens
  chr7:4767338-4767557
  hypo
tgtcccaccttcccgtcactcctcgatgtcacatcagagtgctctctcctgggtgggaacccgcgcacggaggaaacactttaccagagtaaacgagattataacttgtttgccagagaacctctcctgtggccatgcctgaacctctcctgggactgtccgtggtcttcacattggtgcttggacacccgtccttcgggaggggaggaaaagcggccg

SEQ ID NO: 211331 - DNA, 50 bp, Homo sapiens; identical to SEQ ID NO: 200795
  chr7:4770079-4770129
  hypo

SEQ ID NO: 211332 - DNA, 71 bp, Homo sapiens; identical to SEQ ID NO: 200796
  chr7:4770153-4770224
  hypo

SEQ ID NO: 211333 - DNA, 881 bp, Homo sapiens
  chr7:4801671-4802552
  hypo
gagcaagggtagccgtcctgcctggcaggggtgcactgacctccggttccggcttggtggcttagcccctgtataggggacttgaaaaaagcagctgggtcctaaccagaccccagagtaaccctcttcttcctccactccagccctcaccagccctttgcagctccttgcgacccaagcgagttcatccgcgccggtggtggtcacccgggtgtgcgaggtggggcccaaggagccagcagcagccgtcgcggccacggccaccaccaccccagccactgccaccaccgcctctgcctccgcctcttccactggagagcccgaggtcaaaaggtcccgggtggaggagcccagtggtgctgtaaccacaccggctggagtgatcgcagctgccggcccccaggggccaggcaccggggagtgaggtcacctgcaacgcgggggagtgggactcacccagcggcgaccccgaagctggacccggcagctcaggcggccgcacccacagacggaggagaacagcccgcggcggcctgtgggcatcggcggcacctggacacacccagccctttccatttgatcgcctgccttcccgtggtttaagacaaaaacacataaacaagttcagacaactgattgtatgattctgggaattctttgctttcctttccttctccctcggcaccacctcctctccccaggcctccctgtcgggcatggggaggaggttggagctcagcatcttgaggaatgtgtcaagacagcccctccgctccgcgctgcacggccagccgcctttgtccgggaggacagacagaaacgcagcaaggcacacaccaaggctgccggggaggcccgggcaccggacagatgcctgttgg

SEQ ID NO: 211334 - DNA, 427 bp, Homo sapiens
  chr7:4802589-4803016
  hypo
cctctccgcccggaacgtgacatagagagtgttggcattaactcggggggtgtccgatttcacttcagaccccaagtttttctttgtttgtttaaacatggaattcagacttcattgtacacctgagacagacacaaaagggatcatgtatttttgaggattttacctgttgacgtctgatgaccggccgtaggtccagggttcccgctgggtttaatcccctcgaagagtaaacctgccgctctgtctgataacttcaagtaagagcagcggcttcctgggttggcgttcgcggtggaaggttcctaggatgaaaggtgagcctggatccgccggccgcagacatcgcgctgctggggacgattggggccgctgctctgcagaccagaccttcccgaattatccgtggctccgatgtcccggtgct

SEQ ID NO: 211335 - DNA, 151 bp, Homo sapiens
  chr7:4824492-4824643
  hypo
cccgggagccacacgtcagcctgctgagagttcccacctcccgcagatgacaggtcagagcaggagggctccactctgtcggtgatctccgccacctcctctgccggccgcctgctgccgccccgggagcggcttcgggaggtggccttcg

SEQ ID NO: 211336 - DNA, 202 bp, Homo sapiens
  chr7:4825126-4825328
  hypo
catttgatgtggtccatgtcccgcagtgcctggtggaggccgtgctggtgctggacgtgctgtgccggcaggacccgtccttcctgtaccgaagtctctcctgcctgaaggccctgcacgggcgggtgcgcggggacccggcctctgtgcgggtgctgctgcccctcgcccacttcttcctgagccacggtgagcccagggt

SEQ ID NO: 211337 - DNA, 224 bp, Homo sapiens
  chr7:4855714-4855938
  hypo
cacccctcagggacaccagacgctcagggagcaggaggccaaaaagggcagagccgcctccaggagctggcgagggaggcgccagcagccgtcatgtccaggaatgtgagcccccgacccctcaaccctgcacgaggccctcacccctgtcgaggagctggttgagaagcagtgtcccggagaagaagaagaggtaggcgagcatctgcgaggccacctcgggg

SEQ ID NO: 211338 - DNA, 492 bp, Homo sapiens
  chr7:4856090-4856582
  hypo
cagggactggcgggggcaagaggagaacagcaaccagcatttccaggagcgctggcggccgaacggggggcctgacccagcgagctccccacccacgcactgcttgcagggacccggcctcggtagcttcctgctggacaggccatggctttgcaaatgtccagtgtgggatgtggggacacaggagctgcctcctggggctgctgggagcagaggtggggtgcagggggctcagggggatctgctgtcggaggcacagatgaactcagaaggcgcacagaggtggcgcctggggggatgggctccaacaaaggggctccaacaaaatgacgggagagtcaccactcccccagaaagtggctcaccgcacccccgatgcaccccaagctggccagggccacagggggaccggcggcagcacctctggcacccgtgggtccagggtgacaacagggccatgtcccttgcgccccatgctggggcctcccccac

SEQ ID NO: 211339 - DNA, 231 bp, Homo sapiens
  chr7:4856612-4856843
  hypo
aagggggcgtttcaaggcgagggaaagggagctgggatggttctagggcttctgtgcgacctgaggaggagcgggtgtggggggtgcagctgggcctgtgcagaacctgcagccactgctccctgatgaagtggagcttgtcacggtcccctccctcagccccccagaaggctccttaggagagccacaggcacaagcttgagccccacttgatcccaggagctgcctgag

SEQ ID NO: 211340 - DNA, 114 bp, Homo sapiens
  chr7:4857296-4857410
  hypo
ccaactgcacccaacatagcaggtcctaactgcctccccacaggtcacctctcactcgcgacacgggtcacaggactctggcagcagcccctgagtggccgccactctgtggaa

SEQ ID NO: 211341 - DNA, 34 bp, Homo sapiens
  chr7:4867284-4867318
  hypo
ccatcgcaaaaacgaacaaaaagaaataaataaa

SEQ ID NO: 211342 - DNA, 167 bp, Homo sapiens
  chr7:4874066-4874233
  hypo
cctgtggggctggggggcagcgacaggcagggaaaggccgccctgcgctcagcagcacagcaccgtgggggtcagatagaggcgctcccgcctcccagccggggccagctccgggccccctcttcccccagaccggcacaggacccagaccgcccaccccagcacac

SEQ ID NO: 211343 - DNA, 201 bp, Homo sapiens
  chr7:4874263-4874464
  hypo
ctatcttgagcaggagctgcccgaatgtgcccggctggaagtgggtggccgagtgctggatgcagaggcacaggaggaaggcgggggtcagcttgtggtcgtcgccccccggctcgatcaacgtcatgatcctctgcagcagcgtgtcctccaggtggggctcaaactccaggagcagctgctggcgccggggcagggcgg

SEQ ID NO: 211344 - DNA, 269 bp, Homo sapiens
  chr7:4915141-4915410
  hypo
ccagggctcctcctcgcccggtgacacacaacgcaatggcctgaggacaggccaggctgatccccagccacacagcagcaaccctggcccgtgctctgcagccccaaggtggccctgtcccactcgctttttgcccgctgcttggcagaggcaacgcatggtggaagaatgaccgaaattctgtgtctgacattgaagagcctttgttcccgtgcagaaaacatcccaccatgcgcctcctccctttcgggtttcctggcctcacagga

SEQ ID NO: 211345 - DNA, 453 bp, Homo sapiens
  chr7:4917175-4917628
  hypo
tcggctggccttctcagcgctcagacccacggctcttcctgaacctgtggcccccctcacctgccgtgatggtgtccacctccttggctgccagctcctccacgtccgacctcttcctcagctcaaacctccgggataaaccttctcggggtttccataattcctggatcaagaggggcttctcactgtccccaaacacccgaaagcaccgggcctgccaccgctgcccagcatcgccggcttggcccaccacgtcacacagcacgtactggccggcctgcctggggtccagggcgtaccgctccagcgcctccttcaccagctcacgggcgctggaggtgccggtggccaggacgctcttgtagtgggttcctgtgcagacactgtccccaaacaccttcaggacaccaggggccgacagctgggtggagagctcggcggggtcatcgctgg

SEQ ID NO: 211346 - DNA, 77 bp, Homo sapiens
  chr7:4985613-4985690
  hypo
cagcattcattcctatgtaacgcagctgcctgctcagagaagattcctctggagacgtacacctctctggggcaaaa

SEQ ID NO: 211347 - DNA, 108 bp, Homo sapiens
  chr7:4985899-4986007
  hypo
aggagcttcacagagtcgaaacaccatccccgcatcctaagaatagccatgctccaaacatggacggatcaatttgtttccctctgcggcctttctctgaaagaaatg

SEQ ID NO: 211348 - DNA, 276 bp, Homo sapiens
  chr7:5230916-5231192
  hypo
tgctgggattacaggtgtgagccaccgtgcgcggccctccctgttctttttgggacatcaactttgatgtcttctccagcaagtaacaaacttagcaataaccttggcatctgacctagctagggagaaactgagccaagagaggcgttacggaccagtgccccaggagtctcagagctccagcgggtgggtcatcctcagggcaagagaaggccttaatgccagcccgtgcattcggaacgctgtttgtccccactgatacgggttggatgctgc

SEQ ID NO: 211349 - DNA, 89 bp, Homo sapiens
  chr7:5240136-5240225
  hypo
agtcctccttgtgctcgtttgtgtgtgcgtaggttctgtgcagtcttttttgtttgtttttttttgagacggagttttgctcttactgc

SEQ ID NO: 211350 - DNA, 114 bp, Homo sapiens
  chr7:5253973-5254087
  hypo
cctgaggctccagcgaatcaagaccctcagacccccgggctgtccccaccccatgaccacatgttccgcaggcaccctcagcgctgtgccctgcgtgtcgcccaggcaggtgtt

SEQ ID NO: 211351 - DNA, 47 bp, Homo sapiens
  chr7:5262386-5262433
  hypo
acccccaggagaattccacacgagcatttctagcccggctgggtcac

SEQ ID NO: 211352 - DNA, 34 bp, Homo sapiens
  chr7:5262623-5262657
  hypo
cacaccctcccctttaaaggccacgctctgagaa

SEQ ID NO: 211353 - DNA, 514 bp, Homo sapiens
  chr7:5272774-5273288
  hypo
ctgcagattcttggtcgagaagaatgaagaggatttctgtgtttgctgagcagccattgtggagggttacccgcctccactttcccgttgcccatttcactgccaccagctcctcttcctctgctcgaacctatgagtcccagcctcactggcggcctcagacatgctcaggagtgacggggacagagggaggccgctgagttgcccgttagaactcttactgctgcgccagtgacccaggtggagagggaccctgaaccaaacagaacgtgtgctaattttccgaactccaaactgtacactcatattcatttttaaattgtatttttccaaacttcaaaaaggacgatgagcgtgggggataggaaacaaaacctgtaaacgttgtgaatgggctcagtggactctgggaccaaaccttctgtaatctctaaaacaatgggaccaagagctggatggaacctggagtcaaaaagaactgcttcagtccccgctgtaccgcctgcctagctgt

SEQ ID NO: 211354 - DNA, 98 bp, Homo sapiens
  chr7:5334869-5334967
  hypo
agtctgcgtgtgcgcgtgtgttaggaggtgggccccgtccatggccgtgatgtcatgcacatcacaccatgcctacagcaccgcgctctccttgcagc

SEQ ID NO: 211355 - DNA, 110 bp, Homo sapiens
  chr7:5353278-5353388
  hypo
gctctgcaaatggctcgggtgctgggcagctggtgaaggcgggtggtgcgggactgggctgcggcggtgccgggcgcgccttgggggccttggctcgcttgtccacaggc

SEQ ID NO: 211356 - DNA, 377 bp, Homo sapiens
  chr7:5372406-5372783
  hypo
cggcgccgcgtccacaggtcgtcgtcgctggcctcgggccccgcctcgaagccaggctccttggggccccgcagcttccgggccttgcgccccttctccaccgccagcttggccttgtctgggctgctggggtcgggaccgcgggcgccaggcgtgggtgcggccagggagggtcccggctcccccagccccttcttgggccgcagcagccccgcaggcgaccgcttgcgcaccttgacctcgctctctgagtcggtgtactcgaactctgtgcctgaacgcgggaggagggcgtgctggtcacagcctcgtggggaccccttccctcccacccagccacatggacaccattcctccccggcgggacctccccgcca

SEQ ID NO: 211357 - DNA, 220 bp, Homo sapiens
  chr7:5390477-5390697
  hypo
ccgtcccttgatgcggcaacggagccgctttcgtattgaatgacagagaccaggggtgtcaaaggctctgggccctgcactgcctacgcacccttcaaaacagaaatacacgtgagaagacaagtgtttgtaaataatagtttttaaccactggcaagtaagaatagagctttaagaaaataaaagacaaaacaagcaactaaaaaaacatgatgatgct

SEQ ID NO: 211358 - DNA, 557 bp, Homo sapiens
  chr7:5428494-5429051
  hypo
gcgccgcagcagccgcgcgccctcgtcctgccgggcagcctccttggcacccccgcgccccgcttcggccaccagcgcgggcagccccacgtccccggcgccgccgttgcacatggtcagtaccgacggctgcagcgccgcattcttggtcttggactcagccaggaagggcgacaggcgctcagccaggcgcgggggcccccggtcctggcggccctcggcgcgcgcctcctgggtcaggtccaccacgccccgtggccccgaggcctcctcgccccgggcgcgcgggtccttcttgccgaaaagcggaggcggctccccgccgcggcccgcccgctccttggctggaccgtcccgcgacgacgagcctttggccggggcgcccgaggagtggccgccgccaggggtccgggccgagggcgcgtgagagtgcagggagcccggagcccccgcggtgggcaggtagaaaccgtctgcggagaagggaacagcaggcagtgagcgagcgccacctcccctcccacccctgcctgggcggaggcggacccctgagaggg

SEQ ID NO: 211359 - DNA, 286 bp, Homo sapiens
  chr7:5446686-5446972
  hypo
aagattctgtgccccggcctcgcagggacgtctggggcacccccacactccggtgatagagctcgaggctggggtggtgggacagggggctcaccctgcacgtccttggcactgcggctgggctatcagacctgtggccaccgccgccgttctggaactcccatcggcgcagaaaagaggcaggtgagagtccgaggctgcagtctcctccaagctatgctgggaccagaaccaggaccaagactgcagtagccaccagcccagatcaacccgcttcagccctgcc

SEQ ID NO: 211360 - DNA, 81 bp, Homo sapiens
  chr7:5449226-5449307
  hypo
taataataattaaatcgaaaggttagaagataccattaagaaaatattaagaaaatctcctagaaagaagaaactgcaaga

SEQ ID NO: 211361 - DNA, 160 bp, Homo sapiens
  chr7:5453845-5454005
  hypo
gggattacaggcatgaaccccgtgcccagcctcactgtcttttttgatatgatacttgatgtaccatcgtctcccataaatatatatattatatatgtatatttatagatataaaatagatattttttcttttcctgaaccattccgaggacaagttgta

SEQ ID NO: 211362 - DNA, 221 bp, Homo sapiens; identical to SEQ ID NO: 200801
  chr7:5462090-5462311
  hypo

SEQ ID NO: 211363 - DNA, 190 bp, Homo sapiens
  chr7:5491669-5491859
  hypo
tggctcctcgagtgacgggggctggtcatggacgttgaaccacctggagggaggctgtgtggagaggccgagctcaagagacagagccttggtcctcctgcctgccccagggtggcctgtggtcctgggctggccaccacctctcggggcctcagtctccccatctgcactggagcgggtgggcacactt

SEQ ID NO: 211364 - DNA, 74 bp, Homo sapiens
  chr7:5521784-5521858
  hypo
cgcttctctccaggctcagggggcacccgctccatgccagccacgaggatcagaggccccggaggccaaccctg

SEQ ID NO: 211365 - DNA, 413 bp, Homo sapiens; identical to SEQ ID NO: 200807
  chr7:5594638-5595051
  hypo

SEQ ID NO: 211366 - DNA, 637 bp, Homo sapiens; identical to SEQ ID NO: 200808
  chr7:5632266-5632903
  hypo

SEQ ID NO: 211367 - DNA, 138 bp, Homo sapiens; identical to SEQ ID NO: 200809
  chr7:5633472-5633610
  hypo

SEQ ID NO: 211368 - DNA, 94 bp, Homo sapiens
  chr7:5920562-5920656
  hypo
gcgctccaggaatgccgaggtagaggggacgtgaggcgggggtgggatttcctcacagctttgcacctccagcgagtcaacacaaaatcaaaat

SEQ ID NO: 211369 - DNA, 41 bp, Homo sapiens
  chr7:6059658-6059699
  hypo
aaaaaaaaaagggaaattcatgaaggcgtcactatagctgc

SEQ ID NO: 211370 - DNA, 46 bp, Homo sapiens
  chr7:6060544-6060590
  hypo
gctaacacctgagacttaacgggaaaagataaacacagctgctgat

SEQ ID NO: 211371 - DNA, 104 bp, Homo sapiens
  chr7:6060612-6060716
  hypo
acaagaacgctttttctggattaattccattgatgccttgtccttgaagtcaggatgtaccttgccagtaaggtacacctttttaaagttcttcaatgctgcag

SEQ ID NO: 211372 - DNA, 72 bp, Homo sapiens
  chr7:6060772-6060844
  hypo
aggctcattacacacagtactctatgaaattgtcagtgctatgaaagagaaccctggctgggcatggtggcg

SEQ ID NO: 211373 - DNA, 185 bp, Homo sapiens
  chr7:6076894-6077079
  hypo
tactctggatctatcgaacaatgacttatctgacagtaattataacctcctaagcaaatgaactaggacatgtaatcttatttagtttaatcaaccaacatcaagtcgtccctgatacaaagctcccactgctttcaatgatttcatcgcccccacttaccttcagatctcggtgcacaattccc

SEQ ID NO: 211374 - DNA, 209 bp, Homo sapiens
  chr7:6204760-6204969
  hypo
ggctttggcagcccggccctctggggtttctggagacagaaggtccactcttgcacacggaagcatccatgttccagaccatcccccgccctccaaccggcacgagaagacgggcctggccccgcccccgaggccccactcacttgatggatttcatccactcctccttctcctccgggctcggggctgagatccggtacaccacatgg

SEQ ID NO: 211375 - DNA, 44 bp, Homo sapiens
  chr7:6229682-6229726
  hypo
aaaaacaaacaaaaaaacatattagttaacgaaagagggtctca

SEQ ID NO: 211376 - DNA, 82 bp, Homo sapiens
  chr7:6308101-6308183
  hypo
gctcttgtaacttaagatattttggagatctctccatgtcaactaagaaaagagcttcctcgttcctttctacaactttaca

SEQ ID NO: 211377 - DNA, 160 bp, Homo sapiens
  chr7:6432515-6432675
  hypo
cttgtagggtgagatgagtacgtgtcacgcacgcataacagtcctgggcacatagcacacactgtggggccagccgctgtcagaattctcctgttcctcagtgtgcgggtgggtcggcctaaagagtgctgctttccacgttgtgcccaaatgagtggaa

SEQ ID NO: 211378 - DNA, 107 bp, Homo sapiens
  chr7:6443719-6443826
  hypo
gagggacagggagtgccacctccaggggagaactgggtgagcccaaatacggcaggagtggaggtgacattcatgtttggacctgtcgaacagtggcgaagctctga

SEQ ID NO: 211379 - DNA, 100 bp, Homo sapiens
  chr7:6443856-6443956
  hypo
catcctggcccagagctaggggctgaagatggagatgttgggaccctagactggccctggaagagtagaggttggtgaaccacatgcccttaagatcctt

SEQ ID NO: 211380 - DNA, 60 bp, Homo sapiens
  chr7:6443990-6444050
  hypo
cccgacgctttgggaggctgacacaggaggagcgcttaagcccaggagttctagaccagc

SEQ ID NO: 211381 - DNA, 48 bp, Homo sapiens
  chr7:6444143-6444191
  hypo
cctttttattgctttgaagattgtttttgagtttttgtttttttttta

SEQ ID NO: 211382 - DNA, 191 bp, Homo sapiens
  chr7:6448757-6448948
  hypo
actatggtgacgcgcgctttattgtttcaactcctgaatccactggccgaccccagagccagaagagtagcaagaattcaatcagcaactcctgatgtggacaaacaactgggcagtgggaataggcagttggggggctgtggctcggcggggccgggggctccacttactttcccgatcgggtttcgtct

SEQ ID NO: 211383 - DNA, 88 bp, Homo sapiens
  chr7:6484556-6484644
  hypo
aacaaaacaaaatcatgagctaccacttcacattcactaggatggctataattaacaagtcatataataagagcgttgggcaattaga

SEQ ID NO: 211384 - DNA, 177 bp, Homo sapiens
  chr7:6500829-6501006
  hypo
gtcccacactccctcgcaggcacccttgctaagatgtcctcctgggtgaccaaaacggtggtaacatagccaaggttacttttacttgggtaggatgactgcagaaggaatggctacacagagcttccagacctttccatgcgttgtgctctccagaggatgcgccaggtgtatcag

SEQ ID NO: 211385 - DNA, 41 bp, Homo sapiens
  chr7:6619099-6619140
  hypo
ggattacaggcatgagccaccacgctcggcctcagtatcca

SEQ ID NO: 211386 - DNA, 332 bp, Homo sapiens
  chr7:6644210-6644542
  hypo
ggtcagtgagtggctcggcagccctgggggtgcacacagcctcagcctggcccagtggccgtgtcaggtccagcagcagagcgctgggcagcgctcgcaggctgagacagaaacatgcataactcgagtccagggttcagccggatgctggtccacagcctgcagaggaaccgcatccttgtgtgggggttggggactcccatccgtgccacactcactctgccaggttctgcaagggaggagccggggcagatgtctggatgggtacaaagcctgagggggcggaagggaacagtctctgggataagactgtcctgcgtgaggtgtcatga

SEQ ID NO: 211387 - DNA, 203 bp, Homo sapiens
  chr7:6645603-6645806
  hypo
acaggtgtgagccaccacgcctggcctacctcttagatttgtgacagtctctgtgttcaccgtgtttccaaatagactggaaacttcttgaagtgctttctatctccggcagggtgtgtacaggttcaaatcatcacatgaccgaaatttggcctctgcagtactctgcagtacctcctccttgggttcgttaatctcttgct

SEQ ID NO: 211388 - DNA, 1290 bp, Homo sapiens
  chr7:6647171-6648461
  hypo
ctgaatttcggggtcgtttgcaaggccagcttcctggggcttctgcttggaattcaggtagggcgcggtcattctcggctctgaggagactgtggccagctgttctgtgtgtcccagcgcagcagagagccgcagaggctgacgtggaggccacctgtgtgggctgcgcgcccgggagtgctacggccggagctccgtgggccacaggccccgtgcagagcccactcccacgcatcctcgcctgtggggtcctggctctgccactgcttctccgtgtccaccgcctggacccccgggtggtccgtgcctgtgtcggtgcctctcctgggcggggtgcggggggacggggtcagcctaccgtgcgcacctgcggagtccccggagcccgcccgcgctgacgcttatgcttgtgttcgcagcctcctccagctggtgatctcgggtcccgtgcagcagtcgcctcacgccgcgctccccccggggttctacccccacatccacacgcccccgctgggctacggggctgtcccggcccaccccgccgcccaccccgccctgcccacgcatcccggccacaccttcatctccggcgtgacctttcccttcaggcccatccgctaggctggcccgtgtgtgccttctgcgctctcgctggacgaagcctttcgagatggaaggggtggccggactcccagaagagaacctcggggaaggggtcgggcagcccctccccgccggcagaaccgtcttggtgtcacggagtccaggtgcttcccacccggtcgcattctttgacatgcagattggatggtggagggaagagtccagcctctgccgagagcctgctgcgtgcatttttaaaagatgccgatcctgggagcctctgttctctgcgcatttcagacacagcctgtgtggcgaggagtgtgacggcaggagccacgggtgcaagcccgtgtgtctggcctctttcctcgtgaagacgatgtgtccccgccagaaaaagtgggctccttctgcagccccgtgagctgagcccaggctgcgtagtgaccacaagcttatgtgcagcactgctcagggaggctgtcaggaattcccctcacctcggaaaggaacttctcagttttattgggggtgtctaaatttcctttcatatgttcaaataaatttttctaaacagtcatgtagactttatggaatgtatttttaacagcttcataaatattgcttccaactgcggtattttcttagcaatctctttttttttttttttttttttttttttat

SEQ ID NO: 211389 - DNA, 173 bp, Homo sapiens
  chr7:6682659-6682832
  hypo
gaggaggatgaggacgaggatgatttgctgacggctgggtgtcaggtgagccgccctctccgtttggggcttgggtaacctgggcagggtttcccccggggcctcggcacctgctgtttggaggcgtctgttggcagcggccatggcactggagtccccggaccaggcccagg

SEQ ID NO: 211390 - DNA, 190 bp, Homo sapiens
  chr7:6686203-6686393
  hypo
ctgcggatggtcgtcgtgttggggctggcaggcctgggatgccccccggccctgagtgggtgtgtaaagtcagtctctgaaatgtgatccatagcctgtgtactgagtggctaccctcccctgatgctccccgcctcccccagtgctccctgcctcccctgcattcatttctggtcggctgagctggttg

SEQ ID NO: 211391 - DNA, 186 bp, Homo sapiens
  chr7:6692859-6693045
  hypo
gcggacggagaggcggaggccgcggccgaggagagagaggaggcggcggtggcggcgcccacccccagcggcaaggtggaccccgcgccggaacggcgcttcctggagctgggcaacggcctgggggagggcgaaggcccctcctcccacccgctgggcttccacttccccgtgcaccccaagtcc

SEQ ID NO: 211392 - DNA, 172 bp, Homo sapiens
  chr7:6694964-6695136
  hypo
cttattctcgagccgcctcctcttctctacccacacttgcaccgaggtcaccccggcaccctccgcaccggttcggttttggtctctgcttgtcctctcagtccttggtactttcgtctccctcagccggaggtggcaaactcagacatctacgggcgcccgaggccctcgc

SEQ ID NO: 211393 - DNA, 36 bp, Homo sapiens
  chr7:7249348-7249384
  hypo
attgtagaacctttcactcacgtccgtgtgaagaga

SEQ ID NO: 211394 - DNA, 209 bp, Homo sapiens
  chr7:7605822-7606031
  hypo
cttaatctctccccacttcctctgctcattcatccatacctactgcctcctcactgctatgtcctctctcctgacccggcacttgctctttcccagtcctagaaggctcttctcttccagttcccactgcccttttccctttcctggctaatcccatactcatccttcttgtctcaacctagtggtccttaaggaagctttgctgaccc

SEQ ID NO: 211395 - DNA, 100 bp, Homo sapiens
  chr7:7612731-7612831
  hypo
ctatatttgatcttcggaatacaagccaaaagatgttcgtaaatacaaaagctgttcagggtgtgacggtagacccatatttccacgatcgtgttgcttc

SEQ ID NO: 211396 - DNA, 179 bp, Homo sapiens
  chr7:7613124-7613303
  hypo
ttgtaactcccaaccgaacaatgtcagacttcactgtttttgaaaggatatctcttgcctggagcccaattacatctttaatgtgggcttgtggtcgtcatttatatgaatgtacggaagaagaaaatgataattctttagaaaaagatatagcaacgaagatgcgtcttcgggcttta

SEQ ID NO: 211397 - DNA, 81 bp, Homo sapiens
  chr7:7807037-7807118
  hypo
gagccaccgcgcccagccagaaattaagctcttaaacaaaagtaggattaaacaatgtgcgttgctaagcatgtttatttt

SEQ ID NO: 211398 - DNA, 36 bp, Homo sapiens
  chr7:8954796-8954832
  hypo
taatataaaaagaaagttgccgggcgcggtggctca

SEQ ID NO: 211399 - DNA, 98 bp, Homo sapiens
  chr7:12750832-12750930
  hypo
ttttcttatggcttagaagttcacagagttcataggcaattcatgtaaactcaaaatgtttgaatagccacacgaacgacttcagcttggcagtccct

SEQ ID NO: 211400 - DNA, 32 bp, Homo sapiens
  chr7:12763983-12764015
  hypo
ccaccatgcctagccttcgatggcttttaatg

SEQ ID NO: 211401 - DNA, 44 bp, Homo sapiens
  chr7:12795792-12795836
  hypo
cttttatatagacagcgtctcttaccatacgtggcatatactag

SEQ ID NO: 211402 - DNA, 38 bp, Homo sapiens
  chr7:16370912-16370950
  hypo
tgcacctggccagaaacgtgttttacaaggcataggat

SEQ ID NO: 211403 - DNA, 131 bp, Homo sapiens
  chr7:16436345-16436476
  hypo
gtgatggaatacattcgtatgacatgactgatagaaaacgtgtgacatacatgtgaaggaagacgtgatatgtgtgtaactaaagatgtgtggcatgtgtgatggaatacgctatacgtatgtgacacgta

SEQ ID NO: 211404 - DNA, 135 bp, Homo sapiens
  chr7:16438008-16438143
  hypo
catgtgactgacacgtgaccaacataagtgattcacacatgattgacgtgaccgaggtttgtgacacgtgactcacgtgtgcgattgacatgattggcacatgacctatatcattggcacgtgattggcataggt

SEQ ID NO: 211405 - DNA, 283 bp, Homo sapiens; identical to SEQ ID NO: 200833
  chr7:16793057-16793340
  hypo

SEQ ID NO: 211406 - DNA, 1038 bp, Homo sapiens; identical to SEQ ID NO: 200834
  chr7:17338062-17339100
  hypo

SEQ ID NO: 211407 - DNA, 105 bp, Homo sapiens; identical to SEQ ID NO: 200837
  chr7:18125867-18125972
  hypo

SEQ ID NO: 211408 - DNA, 218 bp, Homo sapiens; identical to SEQ ID NO: 200838
  chr7:18126225-18126443
  hypo

SEQ ID NO: 211409 - DNA, 39 bp, Homo sapiens
  chr7:18927745-18927784
  hypo
gaaatgagctttcactgggccgggtgcggtggctcccgc

SEQ ID NO: 211410 - DNA, 59 bp, Homo sapiens; identical to SEQ ID NO: 200840
  chr7:19156644-19156703
  hypo

SEQ ID NO: 211411 - DNA, 185 bp, Homo sapiens
  chr7:20628397-20628582
  hypo
gagccccagaatcatcgtcctcctccagccgcccaagctcctccgccactcgtcagagtcctccttcagccgttcccagcccggggcctcccaggtgatgagggccaagtaccctccggcaggagccacacagcagtgacttccagaccctctggggcagcggactggctcgcactgcagattct

SEQ ID NO: 211412 - DNA, 55 bp, Homo sapiens; identical to SEQ ID NO: 200843
  chr7:20817325-20817380
  hypo

SEQ ID NO: 211413 - DNA, 127 bp, Homo sapiens; identical to SEQ ID NO: 200844
  chr7:20817410-20817537
  hypo

SEQ ID NO: 211414 - DNA, 169 bp, Homo sapiens; identical to SEQ ID NO: 200846
  chr7:20825944-20826113
  hypo

SEQ ID NO: 211415 - DNA, 297 bp, Homo sapiens; identical to SEQ ID NO: 200847
  chr7:20826202-20826499
  hypo

SEQ ID NO: 211416 - DNA, 70 bp, Homo sapiens; identical to SEQ ID NO: 200851
  chr7:20837557-20837627
  hypo

SEQ ID NO: 211417 - DNA, 182 bp, Homo sapiens; identical to SEQ ID NO: 43954
  chr7:20837650-20837832
  hypo

SEQ ID NO: 211418 - DNA, 120 bp, Homo sapiens
  chr7:20855065-20855185
  hypo
ctccgtctcaaaacaaacaaacaaaaaaaaagtatgagtcaaagatggtgtttggagaattacgtagaggctaagactattcaccttctagaacttacttgtttgtttcctccattggtt

SEQ ID NO: 211419 - DNA, 37 bp, Homo sapiens
  chr7:21409421-21409458
  hypo
ggattacaggcgtgagtcaccacgcctgggcttccaa

SEQ ID NO: 211420 - DNA, 37 bp, Homo sapiens
  chr7:21501380-21501417
  hypo
gagtgagccagggctgccagcacgctgtcacctctca

SEQ ID NO: 211421 - DNA, 360 bp, Homo sapiens; identical to SEQ ID NO: 200856
  chr7:21985096-21985456
  hypo

SEQ ID NO: 211422 - DNA, 154 bp, Homo sapiens; identical to SEQ ID NO: 200858
  chr7:22893423-22893577
  hypo

SEQ ID NO: 211423 - DNA, 1093 bp, Homo sapiens; identical to SEQ ID NO: 200859
  chr7:22893607-22894700
  hypo

SEQ ID NO: 211424 - DNA, 51 bp, Homo sapiens; identical to SEQ ID NO: 200860
  chr7:23053742-23053793
  hypo

SEQ ID NO: 211425 - DNA, 260 bp, Homo sapiens; identical to SEQ ID NO: 114713
  chr7:23053819-23054079
  hypo

SEQ ID NO: 211426 - DNA, 104 bp, Homo sapiens
  chr7:23211637-23211741
  hypo
ttattttaaagaagagatataaacaataattatagagagttactcttatgccaagtttcccttttgttgttgtccttactgttgtttggcgtctcttggtttaa

SEQ ID NO: 211427 - DNA, 85 bp, Homo sapiens; identical to SEQ ID NO: 200865
  chr7:23510756-23510841
  hypo

SEQ ID NO: 211428 - DNA, 248 bp, Homo sapiens; identical to SEQ ID NO: 200866
  chr7:23513226-23513474
  hypo

SEQ ID NO: 211429 - DNA, 40 bp, Homo sapiens
  chr7:23550217-23550257
  hypo
attacaaggtgcgagccactgtgcccggcctgccatttta

SEQ ID NO: 211430 - DNA, 42 bp, Homo sapiens
  chr7:23556807-23556849
  hypo
aaaatcacttggggccgggcacggtggctcatgcctgtaatc

SEQ ID NO: 211431 - DNA, 147 bp, Homo sapiens
  chr7:23749559-23749706
  hypo
aaaatttaaatccacgtgaacagattaggaaagaccacgaaatcctacgtcacctctaaagtcacagcttgaagccttgcgaaaggaactggccctagaccccaccccggcctataaatcaccagggcgcagcctcagtgcctgggg

SEQ ID NO: 211432 - DNA, 231 bp, Homo sapiens
  chr7:23749829-23750060
  hypo
gggcccttgcggtcgaagctcacgcggtaagccgctgcacgtgtgctacggcgggcggagggccgaaagtccagtatgtgggtccagggtcactcttctagagcttccgcaacggaaagtgtgaggtcagtagtagtttttgtggtacgtgcagtggtggccgcttcaaggactattttcgtcgctgcttgcgttttaagtctccaatcctgggacgaggcccatttcagg

SEQ ID NO: 211433 - DNA, 146 bp, Homo sapiens; identical to SEQ ID NO: 200870
  chr7:24323183-24323329
  hypo

SEQ ID NO: 211434 - DNA, 155 bp, Homo sapiens; identical to SEQ ID NO: 200871
  chr7:24323343-24323498
  hypo

SEQ ID NO: 211435 - DNA, 235 bp, Homo sapiens; identical to SEQ ID NO: 200872
  chr7:24323528-24323763
  hypo

SEQ ID NO: 211436 - DNA, 89 bp, Homo sapiens; identical to SEQ ID NO: 200873
  chr7:24323939-24324028
  hypo

SEQ ID NO: 211437 - DNA, 34 bp, Homo sapiens; identical to SEQ ID NO: 200874
  chr7:24324151-24324185
  hypo

SEQ ID NO: 211438 - DNA, 1200 bp, Homo sapiens; identical to SEQ ID NO: 200875
  chr7:25019060-25020260
  hypo

SEQ ID NO: 211439 - DNA, 146 bp, Homo sapiens
  chr7:25158787-25158933
  hypo
gcattacatagctctcgcccccaacttggcaacatcttattggttttcagaatatactgatgacggattgccaaaagagctcatgaatgaatattttccattctaaggaaactttttttctttttgagacggagtttcactattgt

SEQ ID NO: 211440 - DNA, 571 bp, Homo sapiens; identical to SEQ ID NO: 200876
  chr7:25219529-25220100
  hypo

SEQ ID NO: 211441 - DNA, 47 bp, Homo sapiens; identical to SEQ ID NO: 200877
  chr7:25891899-25891946
  hypo

SEQ ID NO: 211442 - DNA, 188 bp, Homo sapiens; identical to SEQ ID NO: 200878
  chr7:25892243-25892431
  hypo

SEQ ID NO: 211443 - DNA, 95 bp, Homo sapiens; identical to SEQ ID NO: 200883
  chr7:25989915-25990010
  hypo

SEQ ID NO: 211444 - DNA, 168 bp, Homo sapiens
  chr7:26283815-26283983
  hypo
ccgaaaatccaacgttggtccaagaaggctctggtgtgtgccaggcactcactgatcatctggtcttacggagacgcctctaagccatttgatcccgttccgggaacgaaaatggcagcggtgacggttgctccttttatggtctccctccggctgtccaggacggtc

SEQ ID NO: 211445 - DNA, 36 bp, Homo sapiens
  chr7:26291675-26291711
  hypo
atgaaaatgtaatatctggccgggcgcagtggctca

SEQ ID NO: 211446 - DNA, 138 bp, Homo sapiens
  chr7:26439682-26439820
  hypo
agaaaagtgaatactgtgtacgcactgtaacaactattccataagtatttttggtgtacactgttcctcagcactcacaggcttcggagtaggggctcccggagtatgcattgacacgatgcgctgcaaatgatccgg

SEQ ID NO: 211447 - DNA, 151 bp, Homo sapiens
  chr7:26439850-26440001
  hypo
tccacacacggccacggctcctacagggcttttatggtgcagctcgccaatgatccgtgtgttaaagactccccaaatacacattgacacgatagactggagttgtttgggtctatcgtggcaatgatccggggataatggcagtgtctta

SEQ ID NO: 211448 - DNA, 87 bp, Homo sapiens
  chr7:27032268-27032355
  hypo
gctgggattataggcgtgagccaccgccccccggccctgtccttaatcaacgattgttacacttgcgttgcctctgaaacaatgata

SEQ ID NO: 211449 - DNA, 145 bp, Homo sapiens; identical to SEQ ID NO: 200889
  chr7:27136790-27136935
  hypo

SEQ ID NO: 211450 - DNA, 130 bp, Homo sapiens; identical to SEQ ID NO: 200890
  chr7:27191584-27191714
  hypo

SEQ ID NO: 211451 - DNA, 35 bp, Homo sapiens; identical to SEQ ID NO: 200906
  chr7:27278959-27278994
  hypo

SEQ ID NO: 211452 - DNA, 498 bp, Homo sapiens; identical to SEQ ID NO: 200907
  chr7:27279659-27280157
  hypo

SEQ ID NO: 211453 - DNA, 445 bp, Homo sapiens
  chr7:27531253-27531698
  hypo
ggtctgacatgattgttggccgtggaaggcctcgggccatcctgagctcagatcttggctgccggccgctagggcggctgcttctgcagcagggctagggtgtcccgcttctcaatggagcgcagctgctgctgctttgcccgcttgagcttggcagggtttcggatcacttggacgatctccaccttccgctcgttctccaggcggcatttcaggttctccgcccgacgctgtttcttctcctggcggcgcctctcctactcctcctccaggtgacgggcaaagtccttggccagcttcctctcctgcttcatcttccgctgccacgatatacgcaggggcttgtcctaaagcatctgagagaatcttttcttggagcggtccttccacacttgccccgacttgggcttccccttcgggattacaggaagctcctcctccttca

SEQ ID NO: 211454 - DNA, 31 bp, Homo sapiens
  chr7:27686737-27686768
  hypo
ctttggaccattatgaaataaaataagggtt

SEQ ID NO: 211455 - DNA, 102 bp, Homo sapiens
  chr7:27686815-27686917
  hypo
ctagtaagtgactaatgggccagggagtgtctgcagcatggagacgctggacaaagggatgattcacatccaggttgggacagagctggacagcacaagatt

SEQ ID NO: 211456 - DNA, 167 bp, Homo sapiens
  chr7:27831634-27831801
  hypo
gttttttaaaggagcaacttcgtaaagcagaggaacaggttcaggcaactcggcaagaagttgtctttctggctaaagaactcagtgatgctgtcaacgtacgagacagaacgatggcagacctgcatactgcacgcttggaaaacgagaaagtgaaaaagcagtta

SEQ ID NO: 211457 - DNA, 203 bp, Homo sapiens
  chr7:27882584-27882787
  hypo
actggatcaaaagcgatcagcccgaggcgttgaagcagcctacactgtctgcgtctcagggggaaggcacgtggtatccagccccaggcagggcaggaaggggacacacagcttaccctgcaagttggaacacttctgagagggaaaggtagtgtaggccgacaggtggtaagttggaactatcccaggcaaggtgggacaca

SEQ ID NO: 211458 - DNA, 203 bp, Homo sapiens
  chr7:27907623-27907826
  hypo
tttcttcatggactcgcttggtgactcaggcaagacattcaattccatttgccattttcttctcttgctacagagcccacttcagaggattcaatgagtgaatacgacaacggtgcttggatcagtgcctgccatactgtcagcactagtcgttactattttcactggttgaacagacacgtgagttcacacatgacaccatc

SEQ ID NO: 211459 - DNA, 91 bp, Homo sapiens
  chr7:27908068-27908159
  hypo
cgcctcacgggggtttctcaccatccactctgaacaaggcgtggagttgcttgctccagcctggctggtcggctccccagctgccctgccc

SEQ ID NO: 211460 - DNA, 148 bp, Homo sapiens
  chr7:27914809-27914957
  hypo
gagtctttctctctcgctttctcttccagcctcatccaactcccatcggctctactccaaaacattccgagttcatccgcacttccctgctctgtgatcctcgtcccagccttacatcactttcctctttcctcggcacagctggaat

SEQ ID NO: 211461 - DNA, 165 bp, Homo sapiens
  chr7:28109347-28109512
  hypo
ttagagtttggggcgcttttttctcctggaggtgccaggtacggctccatgctaggtctgcagcattcaccatgctgagcgttgagccgtgttctcaaaaactcatgcccccaagtttgaacaaactcatacttgtcccctaagaagtccctgtcatcccggtct

SEQ ID NO: 211462 - DNA, 32 bp, Homo sapiens
  chr7:28989195-28989227
  hypo
gggcgagagtgagacaccgtctcaaaaaaaaa

SEQ ID NO: 211463 - DNA, 37 bp, Homo sapiens; identical to SEQ ID NO: 200915
  chr7:29186197-29186234
  hypo

SEQ ID NO: 211464 - DNA, 496 bp, Homo sapiens; identical to SEQ ID NO: 200916
  chr7:29234008-29234504
  hypo

SEQ ID NO: 211465 - DNA, 180 bp, Homo sapiens; identical to SEQ ID NO: 200917
  chr7:29234886-29235066
  hypo

SEQ ID NO: 211466 - DNA, 369 bp, Homo sapiens; identical to SEQ ID NO: 200920
  chr7:29724332-29724701
  hypo

SEQ ID NO: 211467 - DNA, 54 bp, Homo sapiens; identical to SEQ ID NO: 200921
  chr7:29725077-29725131
  hypo

SEQ ID NO: 211468 - DNA, 369 bp, Homo sapiens; identical to SEQ ID NO: 200924
  chr7:30028879-30029248
  hypo

SEQ ID NO: 211469 - DNA, 252 bp, Homo sapiens; identical to SEQ ID NO: 200925
  chr7:30029302-30029554
  hypo

SEQ ID NO: 211470 - DNA, 246 bp, Homo sapiens; identical to SEQ ID NO: 200927
  chr7:30067778-30068024
  hypo

SEQ ID NO: 211471 - DNA, 62 bp, Homo sapiens
  chr7:30341570-30341632
  hypo
gaaccagttctgtccgcttcactccctggtgttcgcaaggcagttttcggaatcagaaactc

SEQ ID NO: 211472 - DNA, 149 bp, Homo sapiens
  chr7:30516406-30516555
  hypo
aagatttcagacttaaagcccgctaaggccctgagcggggcagcagggcaggagaaggaatggagcgttgaagggaacattttatagacattctccctcatagtggctgtactaagtaaacaattaacgggcacaaactgccactccag

SEQ ID NO: 211473 - DNA, 256 bp, Homo sapiens; identical to SEQ ID NO: 200928
  chr7:30517956-30518212
  hypo

SEQ ID NO: 211474 - DNA, 154 bp, Homo sapiens
  chr7:30656754-30656908
  hypo
gctatttcattggccgcatctacctctacctcacgaaggttggaatatctccagataaactccgcttccggcagcacatggagaatgagatggcccattatgcctgtgactgttgggatgcagaatccaaaacatcctacgtaagtggagtgct

SEQ ID NO: 211475 - DNA, 386 bp, Homo sapiens
  chr7:30817952-30818338
  hypo
tcttggtgaacatcaggaatcgtttgcttgtgctttatgagaacagcgggttttgatttaagatggtaaacagcgattcagctttcttccctcagggcttaaagaagacatgtgtgaccatggaccaggaacgcccacgctctgacctcagcataaacaacagaaatgatcttcgaaaggttttgcatcttgaatttctctataaggagaacaaggtatgtgctttctaaggtgtggtgtggagtcttggaactgagtttggcactgccaaagcactcatgggccctgccagtgacaggagaggcttgaggttctcctggcctgtcacacttgcggtcagagagaaacggaccccccaaatgtggacagatccccagcgggagtgg

SEQ ID NO: 211476 - DNA, 117 bp, Homo sapiens
  chr7:30857292-30857409
  hypo
cttatagcccctcaaagacaactccggcaaaagggaggctgagactaggggcaatgcgtctgttgccaggtgatgccagtcttacctagcatgtgcgtgtccatccacttcctatat

SEQ ID NO: 211477 - DNA, 50 bp, Homo sapiens
  chr7:30921727-30921777
  hypo
agacagaaaaatgcccggacccctttccctggggacggcatttcacatca

SEQ ID NO: 211478 - DNA, 139 bp, Homo sapiens
  chr7:30944106-30944245
  hypo
gcatgtatgcacatgcgtgtcctcacatgtgtatgttcaggcacacacatttgtatatgtgtgcacacatgtacgggtgtgaaacgtacatcgtgtgtgtgcagatgtgtgttgtccgcgtgcacgtgtgtgtgcaagt

SEQ ID NO: 211479 - DNA, 216 bp, Homo sapiens
  chr7:30972824-30973040
  hypo
ctgccctaaatcacacctcacgggctccacgcttgctcagcttcactatcagggacacacagagggacgggggtctggggacctttctcagaggctccggcatcccagcgaccagcgttaggtggggccactgtgacggtccacttgtaaaaggggtaggcctgaactcacccgaggggacctgctgcccctgccgctgccttgctgtgtgaccct

SEQ ID NO: 211480 - DNA, 69 bp, Homo sapiens; identical to SEQ ID NO: 200930
  chr7:31091826-31091895
  hypo

SEQ ID NO: 211481 - DNA, 120 bp, Homo sapiens
  chr7:31939010-31939130
  hypo
aaagtgctgggattacaggcgtaagtaagccactgcgcccggccggacagtcccgtttctacaactcagtcttgcctataggtcacaatgcagtgaaaagcggcagctgatagtgtaagc

SEQ ID NO: 211482 - DNA, 196 bp, Homo sapiens
  chr7:32630925-32631121
  hypo
ggaggagagccctgtcagcccgcggacaggggaaagccttcaagggtttcccacaggcaggtggcaggttggctgggtgttgcctgtggaaagttctttcggtcgtgggcaccactgcttctgctttgccctttgctgtaaagttagtgatgttcctcagctgacctctgaactcaaccaccgcccctttcccttc

SEQ ID NO: 211483 - DNA, 338 bp, Homo sapiens; identical to SEQ ID NO: 200938
  chr7:32768220-32768558
  hypo

SEQ ID NO: 211484 - DNA, 701 bp, Homo sapiens; identical to SEQ ID NO: 200939
  chr7:32982270-32982971
  hypo

SEQ ID NO: 211485 - DNA, 227 bp, Homo sapiens; identical to SEQ ID NO: 200940
  chr7:32996717-32996944
  hypo

SEQ ID NO: 211486 - DNA, 157 bp, Homo sapiens; identical to SEQ ID NO: 200941
  chr7:32997454-32997611
  hypo

SEQ ID NO: 211487 - DNA, 32 bp, Homo sapiens
  chr7:33026795-33026827
  hypo
tgctttcctggcgatcggaatcttcatgtcag

SEQ ID NO: 211488 - DNA, 186 bp, Homo sapiens
  chr7:33139663-33139849
  hypo
actctaagtctccctcgtgcacacacaccctggcaccttggccagggagctgcaggagggatgcctgtaccagggagcgggactggatagctgtcagatctcctcagagtttactgctctctgagctgctgagctcaagaaaccagcagaggatggaccgaggggctgagccgggtgaggccgaca

SEQ ID NO: 211489 - DNA, 42 bp, Homo sapiens
  chr7:34034217-34034259
  hypo
agaccggagctgttcctattcggccatcttgtgtttggtatt

SEQ ID NO: 211490 - DNA, 140 bp, Homo sapiens
  chr7:34349352-34349492
  hypo
gctgggattacaggcgtaagccaccgcgcccagccgaatgcgggagttttactgagtgatggaggtggctctcagcgtgataggtggggagccagaagtgggggatggagtgggaaaatgatcttcgcctggagccgtcc

SEQ ID NO: 211491 - DNA, 97 bp, Homo sapiens
  chr7:35042666-35042763
  hypo
ccaccgtgcccggccagcaaccaacaatgttttcaagtctagagttcaacactcggccaaacagtgaaccaaatacgaaagcaaataaacacatttt

SEQ ID NO: 211492 - DNA, 36 bp, Homo sapiens
  chr7:35190412-35190448
  hypo
tgagccaacgcgcccggccacataaaatcattttta

SEQ ID NO: 211493 - DNA, 289 bp, Homo sapiens
  chr7:36124378-36124667
  hypo
ctgagcccatccacactggccgctggcggatggacaccgccatgctagatctgtgcggtcgcccggggagcaccgggccattcctaacaagcgtgcagtcgagatgcagacaggaaggccaagggagggagaagggggcttcagcacacggcagcgcgtggcccctgggcccgaccccttctccggcagcgcagcagtcctccaccttgtcttgctaattcccagccactgccccgcctcaggtcatcctcctggcggtcagagtgacctactcgactggcacttctgg

SEQ ID NO: 211494 - DNA, 1040 bp, Homo sapiens; identical to SEQ ID NO: 200942
  chr7:36192233-36193273
  hypo

SEQ ID NO: 211495 - DNA, 223 bp, Homo sapiens
  chr7:36338990-36339213
  hypo
ggcgtgccaggcgcgtaccccaccaggtgggcaaagcagaaacctgcggggagcggagacgccttttatctctggatgccacagacctgagcagcattgggctggctgtccgctgctgactggatggcagcacaaagacaatatgagcagagggaggagaagaaggggtgctcaggctgcgggccacagtccagcagcgccagaagcactcatttctgaccac

SEQ ID NO: 211496 - DNA, 553 bp, Homo sapiens
  chr7:36894941-36895494
  hypo
gaagcagtggagccgaggaacagaatcagggcggtgagcaagatgccagctaggggctgaaagttgccagggctagaggtgatgctgaagggaatgtggacccacagcttccctttaccaaaggacggttccaaggcgtgggtgtgttttcattcctctctcctgttagctaggtgttccagttttggaaggggcatgtctgggcccggccacttcagttacagtcatagacgaagtcatagttgctgggctccttgggaatcggcggaggtgcgtcagggatctggatgttttccaggtccaggaggcggagcttgatttccatgctgagcagggtgtccaggtcattccgcgtcaggtcgctcatcatgtccttcccgagtagcgcattcagtccatccgtccagatacagtactggcaggaagggaggcaacagcgatcattactggtggcaattacagaagtattaatagtaaaaatagctaacagtgaatactcatccctcagtaggctgtgcgctaagggctctgcctacttcgtcatttcatattt

SEQ ID NO: 211497 - DNA, 104 bp, Homo sapiens
  chr7:37250876-37250980
  hypo
actattccgtaaagcgcaagaggaccacacgctcggaagagacatcagttatgtggctgaggtcaggcccggggaggctggagggagagcgcatactggagata

SEQ ID NO: 211498 - DNA, 72 bp, Homo sapiens
  chr7:37264539-37264611
  hypo
gaggtcatggctattgagcaccatcgactccaaaatggccaaggaccgctgcaggatcgagatgtctatggc

SEQ ID NO: 211499 - DNA, 316 bp, Homo sapiens
  chr7:37458238-37458554
  hypo
gatgcgtcagagtcagctcagataacctcggtcagatgctgacctgcagaagtctcaggcagggccaagcgtggagatggaaaatccagaaacacacagatgcgggcaggcagaatcacagaagtcatctcgcaggtattataaggaggtgtcagtcatcaggttaagcgtgggaggcaaactgcagcttctgcagtgaaggggcagtgaggcgagatggggatggtaagagtcaagtgcccagctctcagggtgctgcagaggctaggagtcgggtactcgcaacaagactaagcagctacggaacatgagtcga

SEQ ID NO: 211500 - DNA, 189 bp, Homo sapiens; identical to SEQ ID NO: 200947
  chr7:37960958-37961147
  hypo

SEQ ID NO: 211501 - DNA, 35 bp, Homo sapiens; identical to SEQ ID NO: 200949
  chr7:39453506-39453541
  hypo

SEQ ID NO: 211502 - DNA, 106 bp, Homo sapiens
  chr7:40766265-40766371
  hypo
gggtgaaaggaaagctgaggcgccgcaaccgaattgccaggtctgttttgggagggcaccgacaatgggttggcttaccgccaccgtgaggacacacactgtacct

SEQ ID NO: 211503 - DNA, 36 bp, Homo sapiens
  chr7:41840523-41840559
  hypo
tctgcttcaaaaatgctacccggggccgggtgcagt

SEQ ID NO: 211504 - DNA, 517 bp, Homo sapiens
  chr7:42004852-42005369
  hypo
ccacaggcaccgtcgagtgcaccaggggccactggctgcctgttgagacagttcccatactgcggggccttacagggctgttcatggaaggcgtttccactggtgccacttccggggctgttgtggagcatcaagtgctctgggccaccgtaggggttgctgttctccccgagggtctgatagcccccagcaggcccgctcctcaaggggttctgcgggtggacgaccatgccgttgcagaacccaaaggcgcgagtctgcggcacagcgggccgcggcccacacttgagcttggaggaggacaggtcggcgcttccggagctgacttcgttccactgaatgggcaggtcggttttgctgccctcggggcagggctgctcgagggcatggaactgctggccagcgtggctgtctggcagcccgggcgcgtcaaagtcaccgggcccgtggggcactttgctgtcgtccgggagggcgctggggaagtgctgctcgtaccctgcttggttctgggaat

SEQ ID NO: 211505 - DNA, 689 bp, Homo sapiens
  chr7:42005528-42006217
  hypo
tctgaagcacgagactgcgcttctccgcggacgtggccatcgccggggggttgcagctgctgaggctgctgaagcgcggcacacgaggcagggccaggccctcggagcctgtccgcaccgggtcgctggccctcctcacgccgtggcccggcgcatcgtgcggctgcaggtggcgccgcccgtagccgtgggctcccccgtcgctgcacctcctcggggcatgaactggaggcagggccacgccaggctcgagggcatccccgagcagcgccaggcgcgtcttcaggctcatcctctccatgttgggcaggggcgtcggcggcggccctcctgtggcagccgcgtacttggccttgaggcggtactgctgggcgggcgtgaggctgagcaggctgggcaggccgtcgctctggctggcttcgctggagcggcgcgaggcgtcggtggagatggggtcgtaggagtcggccacgctcacgttctgcggccggccctcggcctgtgacgcctcgctggagcggcggctggagaagcagggcgagatccctgaggagcggcggctgctcaggtaggccgagctgatggtgctggcgctgctgtcccttctgttgagcatgttcagcatagtgacgtccaccccagagaggtcgcttctgcccgggagaagcgtcatgggcccacccaagctg

SEQ ID NO: 211506 - DNA, 31 bp, Homo sapiens
  chr7:42169114-42169145
  hypo
aagccatgggctgggttgggcgcggtggctc

SEQ ID NO: 211507 - DNA, 31 bp, Homo sapiens
  chr7:42169385-42169416
  hypo
gcgacagaccgagactccatctaaaaaacaa

SEQ ID NO: 211508 - DNA, 408 bp, Homo sapiens; identical to SEQ ID NO: 200954
  chr7:42276904-42277312
  hypo

SEQ ID NO: 211509 - DNA, 60 bp, Homo sapiens; identical to SEQ ID NO: 200955
  chr7:42277588-42277648
  hypo

SEQ ID NO: 211510 - DNA, 291 bp, Homo sapiens
  chr7:44153137-44153428
  hypo
gggtgggggcctgggaggggcgctctggggcagccggatcgttctccctccgcagccagtggtggtgattactggcgaatcttgaacccgggtgagtaccgcgtgacagcccacgcggagggctacaccccgagcgccaagacctgcaatgttgactatgacatcggggccactcagtgcaacttcatcctggctcgctccaactggaagcgcatccgggagatcatggccatgaacgggaaccggcctatcccacacatagacccatcgcgccctatgaccccccaacag

SEQ ID NO: 211511 - DNA, 144 bp, Homo sapiens
  chr7:44582326-44582470
  hypo
gggaactggtggggacgtgcccaagaaggtcccctccaaggaataaggacacagacagctttccaccacattcatctgtcactggtagaggacattcctggaagatttcgccccagcacgtggcgggcaccttcagtgtcaaag

SEQ ID NO: 211512 - DNA, 39 bp, Homo sapiens
  chr7:44583394-44583433
  hypo
aatgtttacgactcttacgtggacagctcatttctttcc

SEQ ID NO: 211513 - DNA, 141 bp, Homo sapiens
  chr7:44611081-44611222
  hypo
gtggcagacctggagcgcagtggaagctctccattgagcacacaggtggggatgctgaactgttccaagaacaggcgtagccggtaactccgttctagagtgttgacaaagagcagagacttgccccgaatcaatgacagc

SEQ ID NO: 211514 - DNA, 66 bp, Homo sapiens
  chr7:44612063-44612129
  hypo
cagctccaagggccgctaattgtagtaactggcttccagccaccccgctctcgtcccaactcctac

SEQ ID NO: 211515 - DNA, 31 bp, Homo sapiens
  chr7:44740322-44740353
  hypo
ggaaggaggccgggcgaggtggctcacgcct

SEQ ID NO: 211516 - DNA, 72 bp, Homo sapiens
  chr7:44740672-44740744
  hypo
ctgccctgggataccgcgggggtgggagtatggggtggaggcttgcagctcggagtgtccccagcagtccaa

SEQ ID NO: 211517 - DNA, 259 bp, Homo sapiens
  chr7:44746656-44746915
  hypo
gcctggtctgagcaaatacagggcatcagaggctggtgaaggggaagcatctctaacccttgaaagctgcgtctcctggcagcagtccctggcacagccctgggcccaggagagctctcagccacatacctgagagaaccagcctagccatgggaactctcttgtaggaacccacttccagcgggtgatcccagaagatggccctgcagctcagaacccagaaaatgtcaaaaggcttctcttctgcaccggcaaagtg

SEQ ID NO: 211518 - DNA, 93 bp, Homo sapiens
  chr7:44746945-44747038
  hypo
cgcgacatggtggggcaggtggccatcacaaggattgagcaggtgagggcaggtggtgccatcagggtgtccccccagcgggggtcagggctc

SEQ ID NO: 211519 - DNA, 154 bp, Homo sapiens; identical to SEQ ID NO: 200960
  chr7:44924099-44924253
  hypo

SEQ ID NO: 211520 - DNA, 309 bp, Homo sapiens; identical to SEQ ID NO: 200961
  chr7:44924469-44924778
  hypo

SEQ ID NO: 211521 - DNA, 163 bp, Homo sapiens
  chr7:45091550-45091713
  hypo
gcctcggcctcccaaagtgctggggttacaggcgtgagggtattttataggacattgaattccgtgatcatgtgcctactgctgtacctcctttagcactaagtgagtcccttgatccaaggtgatgatggtacttgctgtcccacatcggaaaccacatgct

SEQ ID NO: 211522 - DNA, 166 bp, Homo sapiens
  chr7:45125709-45125875
  hypo
atctgtggagatagagaagatcatgaggtgcccctggatgcatctcccaggcaagggccaggcccggggagatgaattccggctgcatagggcccagaggaaggtggatccaggaaggcaggagagaaaagagaagaccctctgcacgctgcgtttgagggagaac

SEQ ID NO: 211523 - DNA, 38 bp, Homo sapiens
  chr7:45222825-45222863
  hypo
ctggcccagggcttcatcaccggcatccacaggcagtt

SEQ ID NO: 211524 - DNA, 68 bp, Homo sapiens
  chr7:45222971-45223039
  hypo
ggtggtgtggcgcagcaaacgcaccgacacgctgctgtgagggtcccggtgagatggagtgggtcaca

SEQ ID NO: 211525 - DNA, 153 bp, Homo sapiens
  chr7:45262245-45262398
  hypo
agaacaactgaatttgccaccgcactgcgactcctgaacagcgaaaaccaaagatctgcggactcatgtactatgctagccgcctgcaccaatgactatcctttcaaaacaacgtgtgtaatcaccctcagcgtacttttaaaaatccctact

SEQ ID NO: 211526 - DNA, 61 bp, Homo sapiens
  chr7:45743036-45743097
  hypo
cctcctgccggcccacgtcgcccagcacttcctcatgtccaaccctcggaacatggtgagc

SEQ ID NO: 211527 - DNA, 147 bp, Homo sapiens
  chr7:47088919-47089066
  hypo
tcccagggcccagaaagccacgctgatggttccagaagttcttctattaggctctcggtcacaggcaaaaacaacagcaccatcttaagtcatgcaaagatgagcagaatgagtacttacgcaaccgcaagagcaggaccccaaaag

SEQ ID NO: 211528 - DNA, 173 bp, Homo sapiens; identical to SEQ ID NO: 200965
  chr7:47294081-47294254
  hypo

SEQ ID NO: 211529 - DNA, 319 bp, Homo sapiens
  chr7:47343228-47343547
  hypo
gacacctgaagaccagcaagcgtcacccacacgggaagacagggatggggaagtgggtgctgaggccctccaggcagcacaggaggtattttccaaaatatgtacactaaggccctctctgagctcacgctgcctgcctttcaagcccccatttcatgcctggatgctgcagcccgcatgagggcacccaggggagccgccccatgaaggcctccacatgcgcagatgctgctccctcggcccctgcgccttccctcctgcatcttcaccgggtcaaggccctttcgtcctttaagacgcagctcagctgtgcacccac

SEQ ID NO: 211530 - DNA, 428 bp, Homo sapiens
  chr7:47440318-47440746
  hypo
atcaaccaaggaggttcaaccgcagctgcccacaagcacagggccgccagctccgcgcctcacctttgctggcattgtccagatcctccttcccaaacaccagcccgtagccctgcacagccccagtgtgaaactgcaggcggaaaatgacgtcacgggtggccgagcggtatttcttgtggtagcatttcacctgggttagagagacaaaacaaaacaaagtagctgcagcgggggacacacgttcccggcaaggaacacactccgcggaggccggcacagcagggcctcccctctggactctggctgggagttcacgctttggagtggaacttcagccctggggcacaggcgcctgcagacagctggggtgcaggcagaggcaccacactgctgctgctgggtgcggggctccactggaggcttca

SEQ ID NO: 211531 - DNA, 92 bp, Homo sapiens
  chr7:47515267-47515359
  hypo
ctggtatgaatcaatcgcttgcagagtgtatgaaggtaaacacaggatggaaaaaaacaaggacactctgcccttgaacttcaatcaaaagc

SEQ ID NO: 211532 - DNA, 168 bp, Homo sapiens
  chr7:47515405-47515573
  hypo
agatcctgcaaacctgcaactaccaaggacagactcgcatgcgcccttgttctgaccgtggtgcctccaagtctgcaaatgcgggatcacaggaatcatctactgtgtctgtcatcggtgccctcaccctcaggaagcaggggacacgctctggaactcatcagactg

SEQ ID NO: 211533 - DNA, 71 bp, Homo sapiens
  chr7:47581607-47581678
  hypo
caggttattaggaagcgtaaaggtctcagcttccatgcgtcgtgggatgggagactcgggagttatgtgca

SEQ ID NO: 211534 - DNA, 451 bp, Homo sapiens
  chr7:47605260-47605711
  hypo
gcttggccagttttttatttcttaaggtaataagccagtaggtgggggacaaagttaaatataaacaaatgctgaaaatacgcacaaatttacactagttaacaccaacctcgctttccaatttcgcactctgctggatttcttaatcttaggcaaaaattcacattgggggttcagggagctaaaaggagttctcctaagtatgagaactgtaaatgcagcttattcctcacacgggcgctgggaggctttggaagagcaaccagccacagtctgatggcatgatatgcgtggattactgcaaagccacatggaactttaaagacatctcaattaacagcttcactggggtttcagattagtatacatattggaaaaaagattaatccagatgagtggttctaaaccctgccgagccgcaacccaaagtgtctgacgcaggaggtctgtc

SEQ ID NO: 211535 - DNA, 38 bp, Homo sapiens
  chr7:47615110-47615148
  hypo
caaattaagaagcaaagatacggccgggcgcggtggct

SEQ ID NO: 211536 - DNA, 221 bp, Homo sapiens; identical to SEQ ID NO: 200967
  chr7:47621699-47621920
  hypo

SEQ ID NO: 211537 - DNA, 151 bp, Homo sapiens
  chr7:47679854-47680005
  hypo
ctgcctcagcacttcgtgcagatgaaagaagctagagtcatggtgaggctgaaaattgcttgggtaacaagtaatatttctgttcaactggacccgaaggacaggttgggaggtcagcggaaccacagcccacagcgccagctgaggtggg

SEQ ID NO: 211538 - DNA, 262 bp, Homo sapiens; identical to SEQ ID NO: 200969
  chr7:48127995-48128257
  hypo

SEQ ID NO: 211539 - DNA, 49 bp, Homo sapiens
  chr7:48964017-48964066
  hypo
gctcctgcaccaccgcctcttttcgggctccgccggctcccgccgtccc

SEQ ID NO: 211540 - DNA, 315 bp, Homo sapiens
  chr7:50341969-50342284
  hypo
tccaagaactagaggtgtcccgtgtcccctttacaacattgttggcctccctctgggccttgtaccttatgtttattgcctcatttaatccaggtaaggagtctttaggattggtggcatgtattctttttatagacaaggaagatgatgctcaggagtttggataacctgcccaaggtcacgcagtggaggagaggactagaaggtaaatcaatggacctttcactaccttccccttctctgggctgtagcagtgagttaactggctcagacttgcccagcggaatgcccttcaggacacactgagtactgtag

SEQ ID NO: 211541 - DNA, 195 bp, Homo sapiens
  chr7:50342314-50342509
  hypo
tggatagacgctgtttgtgattcacgggtaaagggccttctcccagaggcagcagaggcagatcctgtctctggtgtgccctggcccccgacttggaggcctcctgggccaggccaagaccttccccggcagcgatggtctccagccacactcaactgccctgaagggacatttcctgcttattcccttgcccgg

SEQ ID NO: 211542 - DNA, 116 bp, Homo sapiens; identical to SEQ ID NO: 200970
  chr7:50344738-50344854
  hypo

SEQ ID NO: 211543 - DNA, 56 bp, Homo sapiens
  chr7:50447754-50447810
  hypo
atggaccccggccacgcaagaacacacatggcgtgggctgcgttcttgtgccccag

SEQ ID NO: 211544 - DNA, 103 bp, Homo sapiens
  chr7:50514846-50514949
  hypo
ttgcccatgcatactgaatgcgtaatatctgtgcacggtatgcatctgccttcggtccggtacatatgccagatgtaattgcgaagtaattcttctgccattc

SEQ ID NO: 211545 - DNA, 76 bp, Homo sapiens
  chr7:50560481-50560557
  hypo
ctggtggctgaactgaaccccgagcgccggggaagagttgtccgggagagatgagcgcacagccgccaacttgctg

SEQ ID NO: 211546 - DNA, 241 bp, Homo sapiens
  chr7:50560663-50560904
  hypo
ggttttcttcagccttaacatacgcactggttgtctggacctgagggcaggacgccgcattcattacactccttcttatcgtgtgtcaatatttgcctccaagattagggacccaaaatatttctggtccctgaccgcttcagtttcctcatctgtaaagagagcgtggcaatgtctgtgtccctcaacacagggctgtcgtgggggtccagagagctacgagaggttagggacttagaag

SEQ ID NO: 211547 - DNA, 215 bp, Homo sapiens
  chr7:50611684-50611899
  hypo
cacgtcagggtagacctggcgtccctcaatgccttccatgtagttggccatgtaatccaccatctccttccctctccttcggaattcacttgcgttcatggtgtctgggctctgtcagaggtgaaaactgcagaaagaaaatgattcagtgagcaaattttgcaacctctgaactggaaggcggggataccaagcaagccgtgggtagggacacc

SEQ ID NO: 211548 - DNA, 207 bp, Homo sapiens
  chr7:50654847-50655054
  hypo
agtacacagccacggcagagtggatctgcgtccacgtgtgagtatacagctacggcagagtggatccatttgcccacatgtgaatatacagctatggcagagtggatccgtttgcccacgtgtgagtatacagctacagcagagtggatctgtgtacccaggtgtgagtatacagttacggcataatggatccgtgtgcccaggtgt

SEQ ID NO: 211549 - DNA, 112 bp, Homo sapiens
  chr7:50658396-50658508
  hypo
gtggaattcccagccgcccagcgcgaggccagcgagctggggccttaggaagtctgccgccacgtggaggcggtttacattctccaacaattcacttcggcagggaaaatac

SEQ ID NO: 211550 - DNA, 103 bp, Homo sapiens
  chr7:50659743-50659846
  hypo
gtggattatgcagcatccaccgctggccgatgacgggtgccaggtgtgtctcaaggaggctggcccacgtcaatctagaggcgaggccattcagcctgctgtt

SEQ ID NO: 211551 - DNA, 462 bp, Homo sapiens
  chr7:50660382-50660844
  hypo
ccagtttattttcaactttccgctggatcttccatgccctccccaatttggccgatgcagagggaggcgaccctgctgggttcacagcagcaaatcgtcgtttaagtccaacaaactagtcaatcttggtcggctggcaccgaacaaacccatctcgctctgggtccccaggtgcagaatcgatgtgtgttcttcaccaacgcacagaccgcttcttcactccagtgttcacttcctccagtcttcagccgagaggacatctgcggtcataaggccactcggatgcagtggtgcttgagtttgcaaggcaggactcctttgttcagctggtaaaagtcaaccagctggatcaggtcagagaatttggtgttcccgtcatctaggctgaagaacgtctgcccgtcgtcctcgcactggagagacacaagaacacttgccaggttagaggctgccacctcaggg

SEQ ID NO: 211552 - DNA, 190 bp, Homo sapiens
  chr7:50715838-50716028
  hypo
gcagagaggggagacggagcaccaaggcccagtgactgaagagccagcaacgatggctgagaaggaaagtccagcaaagagggtggaaacccagacggagctgtggaaaggagagcagcgagcgacaggagccctcatgctgctgcaggcccggcaagcggaagacagagaaccccgctggctttagcca

SEQ ID NO: 211553 - DNA, 108 bp, Homo sapiens
  chr7:50720336-50720444
  hypo
gattctgagacttccgctgcttgctaacaaccaagccctccgatcaaatacctgaaaatcttaatagcatgagattggtcaaagcagacaccacgcagacttcgctga

SEQ ID NO: 211554 - DNA, 191 bp, Homo sapiens
  chr7:50935531-50935722
  hypo
tttcgaaaagagcacggttgagactgagacgcacaatacctgactggctaagtatggcagtgggctggggtggcagtggtcgcagggctttaggtcttgacacgatggggaaccgcggcagcagatgcagcaaaggcagtgaggccaaccgagtctctgggtctgcagccgggaagctcttgccttcttgg

SEQ ID NO: 211555 - DNA, 159 bp, Homo sapiens
  chr7:51083468-51083627
  hypo
ctaacacccaggcagcgtcctgcccccagggcctttgcactcactcttctcgctgccagtcatgcgtccatccggagtttgctccctcacttccttcagggttttactcaacggtcaccttctcactgggcctttcttcatccccgtctcctttgtccc

SEQ ID NO: 211556 - DNA, 270 bp, Homo sapiens
  chr7:51092748-51093018
  hypo
acgctgcacctccaaccctctggccccattgaaatgcgcacacacagtcgccatcacctttctcagtctcgcagcccctgtgccggagcggatggcgtccatcaaggcttgccttgcgtctgcggtgttgctgagggtgcccgtgctgaacctggaggccgtccttggtgcagagagagcctgggagggtggagggggtggtgggggaatggctggtggggacagaagaccaaggtcttctagcagaggactttccgagccctgagcaga

SEQ ID NO: 211557 - DNA, 184 bp, Homo sapiens
  chr7:51098965-51099149
  hypo
ccaccgcacaaaagacggttcacgtgatccaggatttgcttgcatctgtgccttgcgctacagcagtcccctgcacctggcacctggcaagaaggagtgaagccatctggaggccaagcatgtgcacgtggctggaggctggtccacctcacctcaacactgcacagcccggctgttccttggc

SEQ ID NO: 211558 - DNA, 32 bp, Homo sapiens
  chr7:55145813-55145845
  hypo
cctgtccaccgtgccgtgttcctgtcctgggg

SEQ ID NO: 211559 - DNA, 587 bp, Homo sapiens
  chr7:55145980-55146567
  hypo
gggacaccccccaccccaccccaccgccacagcccagagcggtgccaggaagccgcctcgacgcagccgtatcttgaggctccagccccatccccagggtaccacgccacgtagagacactatttttcacttcgtgtttgtcactcctaaagcatgtgtgctagctgcaccaaccctgggatgcctcggtgcatagggtttatgtgcgtcctcctccttccctctgagctggtcccccgtggggaactgctgcccagactgacctgcgtccttccgcacgtgcaggaaaatgtccacgtgcacttgtcagggtgggggccacacgggcaccaccactgatcatctgtgggatcgagttactgcccatgcagatcccacgtgcagggcccagtcgctttggtgagagagtggacgctgtggtgactccacggtctgtggctgtgctcaggaggacagagaggggacatcctgagatggtttgggcagcccgcggatcctgtgcatgtccccagagcgtccactttctccatggagcagtggagtggcgttgctgagacagaaagttcaggttctccactccccatgca

SEQ ID NO: 211560 - DNA, 50 bp, Homo sapiens
  chr7:55212336-55212386
  hypo
ctgctcagagcagccgcgcacatgcttgtgctgtgcgtgcctcctgtgag

SEQ ID NO: 211561 - DNA, 107 bp, Homo sapiens
  chr7:55506181-55506288
  hypo
ggaggctctttgaaatagaacggtaaccatgacaccaaagtcaacactcggagaaagtgaagaggctggcaggtgaataagtgtggacagggcgcctcacagagcag

SEQ ID NO: 211562 - DNA, 229 bp, Homo sapiens
  chr7:55552439-55552668
  hypo
gaatactgtgaacaagtatgcgttcatactccctcagagtctcccaaagcaacccaccctactgacacaccgacttctggcctctagaactgggggaagacacgttcttgctgttttaagccaccagtctgtgtagtactttgtgagggcagccccgggacatgaatccagtacgcaccttctcctgctgtcaacagcacaagcccacgtcagcccacagcatgcaaga

SEQ ID NO: 211563 - DNA, 614 bp, Homo sapiens
  chr7:55553220-55553834
  hypo
tttgggtggtgcagcacccacgtttttctatgagaggaggtcggaagtcactgtcgccctgtcctcatcccagagctgcaggccggggacagctgcctcataaccccggctgtcctgtggctgcactgtgacgccacacagggcccacacagggcgcccgcacacgggacgtgcacacagtacattcacagagcacttagtgacagacggcaggttggacgtgttaggcacagggacctcacgtggggctgcagacctcattgcaacaagggacctccagtcttgtttggcccacattttccctcatccgcccctcggaagggccggacgcagccatttcaaatattaatacatttagggagaaaagtgcaatggtagactcgggagacaagggatctgaaggaggctctgcttcccacggggagaggaatgcagccagcgaggcgggcgggggacctgtcagacccagagcttgcgtgagcaaatgtgagggagacccttggtacgtgcagtgtgtccctccagatgcaggcacccatgagtggaccacgacgggccagaggctccggctccacctcagccccatcactggcgaagcagaggacagtgggcaa

SEQ ID NO: 211564 - DNA, 223 bp, Homo sapiens
  chr7:55557173-55557396
  hypo
attctcaactttctctccctcgcactcatgatggtcagtcactatagagttgtttgcgtgaaagctcacacgggtgctggagctgtgcatgcagcggtgactgagggcaggtgtccaggctgtgcagtgttttgagctcctgcaggcgcctcagcaggtgtgcagtaaatatgggccaagacagcaattcaggcaggtctgcgctccaggctgtgactgtagt

SEQ ID NO: 211565 - DNA, 42 bp, Homo sapiens
  chr7:55585937-55585979
  hypo
tgctaggcagaggtggggaccgcacatgcagggaaagtgctt

SEQ ID NO: 211566 - DNA, 115 bp, Homo sapiens; identical to SEQ ID NO: 200983
  chr7:55593336-55593451
  hypo

SEQ ID NO: 211567 - DNA, 65 bp, Homo sapiens
  chr7:55619129-55619194
  hypo
gtgctccccaaagcatgcctcgaaagtcaattctcccatcagacgcaaataattaaatgcacaaa

SEQ ID NO: 211568 - DNA, 76 bp, Homo sapiens
  chr7:56031537-56031613
  hypo
tctctttctttctttcgctacaggacgtcgtgtgtttgcccaggctggagtgcagtggcacgatcatagttcacta

SEQ ID NO: 211569 - DNA, 120 bp, Homo sapiens
  chr7:56037283-56037403
  hypo
gtctgccctcaccagcaaactgagctcccgtgaagtcagggccaggttcatctgtgcatcgtcagtggctgacaggtgtagtgcacagtctgtaaataacagtgatcatattgccgggcg

SEQ ID NO: 211570 - DNA, 104 bp, Homo sapiens
  chr7:56636909-56637013
  hypo
aggcatgagccaccgcgcccagccaccagatcctcttgatcacccatagtggcagaggctcccacagggtctgtgcgacggacggaagcagatagtgtctctga

SEQ ID NO: 211571 - DNA, 122 bp, Homo sapiens
  chr7:57247598-57247720
  hypo
acttctccttaaagccctggcgtcggttgtccaaatcggcagggaagctccagaggccacccagctccttgggctcccgcgacggactctccttggggtacagcatcccgccttgcagtgcc

SEQ ID NO: 211572 - DNA, 179 bp, Homo sapiens
  chr7:57247887-57248066
  hypo
gggcgagtgccaggcctagaggggcgggatgggcctggcgctgcccagtggggcctgtggctggaaccccgggctaggcctttggggaagcgggaccctcactctcagccccagccaagaagggcaaggtcggttccccaccccagcacagtctggacgatccagggctgcaggccagg

SEQ ID NO: 211573 - DNA, 218 bp, Homo sapiens
  chr7:57706364-57706582
  hypo
agaaagaaaagaaaaatgaccgtggagcggcggctgcgggagtagggcggcggcgggtgaagtgaagattgggagagaggcctcgtcaactctccccgaatccaggcctgaggctgggatctcgcgctgccgcccaggtgatccgcctgaggtttcttccttgtgaggtttcttcctggtggtcgaccctccgagaatcccaggctccggagaccatc

SEQ ID NO: 211574 - DNA, 277 bp, Homo sapiens
  chr7:57706642-57706919
  hypo
ctcctacttcgcaaagtctcagaaacccatccccgggcaacagtgtcaatcactacgaccaaagcggaggctcaggccttgcgcatgcgcactggcaaggccgactcccagcttgcttcggagagtcaggcctcagatcctttaaaaaatggcggcgatgcgcggccgggggtctggggcagcggtggcggtggcagcgcagtccgaggcggcgggtgggaagaggactacaagagggtactgcgggagacccaacggttggacccatagaggtcct

SEQ ID NO: 211575 - DNA, 68 bp, Homo sapiens
  chr7:57878613-57878681
  hypo
ggtgtcctttgattttccttcgagctcagggaaaggccacttgttccgcctttccactgggcacatgc

SEQ ID NO: 211576 - DNA, 35 bp, Homo sapiens
  chr7:63423514-63423549
  hypo
ttttttttttgagggagtctcgctctgtcgcccag

SEQ ID NO: 211577 - DNA, 34 bp, Homo sapiens
  chr7:63423789-63423823
  hypo
agcccccgcacccggccacattgattattctttt

SEQ ID NO: 211578 - DNA, 159 bp, Homo sapiens
  chr7:63569123-63569282
  hypo
cagatcatgaaaattattagcgttactgctgttagggaaataaatgagcctacgaatgaaatagtatctcatgcggtgtatgcaccgggataattggagtaatggcgaggcatactggataggctgcggaaatgctgcggggaaaaaagttaaattgac

SEQ ID NO: 211579 - DNA, 73 bp, Homo sapiens
  chr7:63652610-63652683
  hypo
agaagctaaggtcccctccccgccttgggcacctcggcctgcgtcattgcgctctgcctggctgcggccgctg

SEQ ID NO: 211580 - DNA, 143 bp, Homo sapiens
  chr7:63652839-63652982
  hypo
cagttttgctgcccccgcttcctgaagatcgcagctggagccacctgggcgcagcgtttgatgtggcacctgcagtggccaaagtgacacccaaccgtgaggacgctgcagggagtcggcacggagacatctgtcccctctgt

SEQ ID NO: 211581 - DNA, 44 bp, Homo sapiens
  chr7:63667110-63667154
  hypo
cagcaaggaaggtcataaaatccgaaattttaaaataattgtca

SEQ ID NO: 211582 - DNA, 103 bp, Homo sapiens
  chr7:63864996-63865099
  hypo
cgcgcccggccgaatttatttttctgtaacaccgccaggattcgatggtgcaagtcttgtagtccagagacatcttcctgacgctgctccccatcttgtgccc

SEQ ID NO: 211583 - DNA, 437 bp, Homo sapiens
  chr7:64146484-64146921
  hypo
gacctcctaaccgtcgaaaaaggtgggctatgcacctttttaggggaagattgtttttccaccaaccagtctggactagtacgagatgctgcctcgcagttaaatgaaaaggcttctaaaatcagacaatgtctttcagacttttaacaccaatctttggagctgggcgttgtggcttctccctatagctgggcccctcatttccatcattctccttctcctatttggaccctgcctcttccgtctagcctctcagttcctacaaaatctcattcaagctattaccaatcaatctatgcgacaaatgctactcctaactgcccctcaatgtcacccccaccccaagatctctctcccaattaggagtccatgccgccccaagtcccgctcgaagaatccctgagaaacatcaccccgtccacttcttttcttattaa

SEQ ID NO: 211584 - DNA, 179 bp, Homo sapiens
  chr7:64330555-64330734
  hypo
gtagacttctgtggacgtgcatcgccgctggactctcacccgtcttctctgagagatccacgggatagtcccctgatcctagaattgggcagggccgacccagggtgaagaaacctcaagcggactcccagggctgcagatcgaaatccctaaggatcccaggggacccgcaggatgtg

SEQ ID NO: 211585 - DNA, 204 bp, Homo sapiens
  chr7:64330833-64331037
  hypo
cccggagggacttcctggtggagcagaaccgggttgcctcagaatgtgctgggttgtgtatttctgtgggagtgttgcaagtgtttgatgtctgtgtgtgtatgtctgtgtgtgtgtttctgtgtgtgcctggaagtggggttggttaaaggatctggcttgcgcactggagcgcttgttctttcgagtcggtcaatcttcttg

SEQ ID NO: 211586 - DNA, 447 bp, Homo sapiens
  chr7:64332758-64333205
  hypo
agggtcgaccaccgagacgccccaaagaggctgtacggtcaagactttaagggtccctcggtgtttgtcataggcagccttttccccgagaccaggccggctctgcttgtaccattttcctctgcttaggcaggctgacagccctgacagccaggtgccccagcctacctcgcgaatgcccatgctccagtcgcaggacacctggcggaagcggggagccctggctcgcatcacagtgaaggccacctttgcctggtgacgagtccctgcggcttggcggagcaggagacctctgtgaacatgcgtcggtgttggactcacacctgtcttcactggggaatccaccggatagtcccgcgttcctagaagtggtcagtgccgacccagcctgaagaaacgtcaagcggagccccggggatgcagcacgaaatcactaaggatttcaaa

SEQ ID NO: 211587 - DNA, 76 bp, Homo sapiens
  chr7:64345085-64345161
  hypo
tattcccttctccctgggaccggattcttgcacacagactctttcgggaatggagtccaaagagaagttcccagcg

SEQ ID NO: 211588 - DNA, 215 bp, Homo sapiens
  chr7:64345211-64345426
  hypo
gagacggcccgaggatgccctatggtagttacttttaggcttccacagtgattgtcgcaggcagcattttccctagactaggccggctctgccttcccattttcctctgctcaggcaggctgacagccctgacagccctgacagcctggccccagcacctgcctcgcggattcgcatgcgccagtcgcgggacacctgtcgcgagcggtgagcct

SEQ ID NO: 211589 - DNA, 412 bp, Homo sapiens; identical to SEQ ID NO: 200989
  chr7:64349470-64349882
  hypo

SEQ ID NO: 211590 - DNA, 42 bp, Homo sapiens
  chr7:64851808-64851850
  hypo
tagtaatttttctctcgattattaagtatctgttttctttct

SEQ ID NO: 211591 - DNA, 120 bp, Homo sapiens; identical to SEQ ID NO: 200991
  chr7:64974034-64974154
  hypo

SEQ ID NO: 211592 - DNA, 60 bp, Homo sapiens; identical to SEQ ID NO: 200992
  chr7:64974448-64974508
  hypo

SEQ ID NO: 211593 - DNA, 50 bp, Homo sapiens; identical to SEQ ID NO: 200993
  chr7:65037711-65037761
  hypo

SEQ ID NO: 211594 - DNA, 38 bp, Homo sapiens; identical to SEQ ID NO: 200996
  chr7:65541037-65541075
  hypo

SEQ ID NO: 211595 - DNA, 259 bp, Homo sapiens
  chr7:65877904-65878163
  hypo
tacaccaagcgtgcaccacgcctggctaatttttgaaacttttctacagacggggttgcgtcacgttgcccagggcagtctcgaactccttagaccaagccatcctccccctcggcctcccaaagtgctgggattatagagtccagccagcctcatgttttctttaagcagtccctccctgttgcacagttggatagtttatttttttatttttttagacatggtttacctcagtctcgcaggacggagtgctgtgatg

SEQ ID NO: 211596 - DNA, 204 bp, Homo sapiens
  chr7:65939523-65939727
  hypo
ccctgagcggactgccggacatctcgcagacttcgggcagcgatcgtggcggccgcctccccggggctccacggccgacctgccgcctgccgcggccatccccggcccactcctgccaggcccccgaccggagccccggaggcacccgctctgagcggccgcgcagcccggctgcatggagcccagcgcggtgctccggctggc

SEQ ID NO: 211597 - DNA, 137 bp, Homo sapiens; identical to SEQ ID NO: 200998
  chr7:66094049-66094186
  hypo

SEQ ID NO: 211598 - DNA, 188 bp, Homo sapiens
  chr7:66265794-66265982
  hypo
gtagggcatggttcactgggcgacagctggtagcgagtgtttgtgtgacccatcagtggtgaaagtagaggtgggtggcccaagggatcaggaaagcatagctgtgttccatgaatagtgggactcgataggagaggctgcccgttaagttacacagtgtgggtcacgttcttctagggcaggaggct

SEQ ID NO: 211599 - DNA, 111 bp, Homo sapiens
  chr7:66293278-66293389
  hypo
gtgttttctaacgccgcagcgaaacccatccgtgtgccacgtcaattccttagccgccatgccatgctgtcatctcagcctgagcttggcgtcaaccaaactctctggata

SEQ ID NO: 211600 - DNA, 129 bp, Homo sapiens
  chr7:66369062-66369191
  hypo
ccagctccttgctcgtggctgcgcccgcgggcccagctcctgcctctgaacatcctcctgtgactcggctcctgcccagctcccagcggcctccgtagacccgaagcctcctccggtccagctctccag

SEQ ID NO: 211601 - DNA, 36 bp, Homo sapiens
  chr7:66626984-66627020
  hypo
gggttaaaaacattctggaccgggcgcagtggctca

SEQ ID NO: 211602 - DNA, 88 bp, Homo sapiens
  chr7:66766508-66766596
  hypo
tataggtgtgagccaccgcgcccggcccacttcagatatttattttcaggagggagcgcatttagatacagaccgaaaatgtatttaa

SEQ ID NO: 211603 - DNA, 241 bp, Homo sapiens
  chr7:67006548-67006789
  hypo
tttgggccttttataaataccgcagatccttaaataacatgaatagtaacatctattcatcgcgtactctgtatcacgcagtgtattaaaagccttctgtctaataactcatttaaacctttaagaatcctacaaggtcggtattattatcgccagtcccagttttacagatgaggaaacggaggcccagaaaaattaagtaatgtacccaaggttacccgggcagtaaatgatggtgtct

SEQ ID NO: 211604 - DNA, 32 bp, Homo sapiens
  chr7:67027848-67027880
  hypo
tgagcccggccggaaataaacagttattgaat

SEQ ID NO: 211605 - DNA, 80 bp, Homo sapiens
  chr7:67103482-67103562
  hypo
gctttaaaagagtgaactgtcgtgaagtttattctgatgccaaaagggggtttgagagagacttaaagagcagttgtgac

SEQ ID NO: 211606 - DNA, 98 bp, Homo sapiens
  chr7:67375596-67375694
  hypo
aaggcagaggtgggaggacacgtgtgctaatctttatgcctcattattttttgggttttttgaaatagagtcttaccctgtcgcccaggctagagtgc

SEQ ID NO: 211607 - DNA, 180 bp, Homo sapiens
  chr7:67405828-67406008
  hypo
gtctgtgcaggcaagatgagctgccgataaacgacaacagtgacagaaactttaaccacaaaaaccatcgctctcacatgtgctggctctgtgctactaagcacgcatgtgcattatatgctttgatcctcaataagacacattaaagctggtttttgtttgtttgtttgttttgagatg

SEQ ID NO: 211608 - DNA, 44 bp, Homo sapiens
  chr7:67812980-67813024
  hypo
tgttattattattattgagacggagtttcattcttgttgcccgg

SEQ ID NO: 211609 - DNA, 55 bp, Homo sapiens
  chr7:68185672-68185727
  hypo
gcccatttgtctttaggtgtcgattatcccaaacgtaagagcttaaaattctagt

SEQ ID NO: 211610 - DNA, 41 bp, Homo sapiens
  chr7:68418436-68418477
  hypo
tggtaccagtaaagaaatatcgccttttttttttttttttt

SEQ ID NO: 211611 - DNA, 100 bp, Homo sapiens
  chr7:68418717-68418817
  hypo
ctgggattacaggcgtgagctgccgtgcccggccaataccgcctaatattttcttgggttattcatgctgcctttatccgacccttgctttttttttttc

SEQ ID NO: 211612 - DNA, 170 bp, Homo sapiens; identical to SEQ ID NO: 200999
  chr7:69062189-69062359
  hypo

SEQ ID NO: 211613 - DNA, 421 bp, Homo sapiens; identical to SEQ ID NO: 201000
  chr7:69063038-69063459
  hypo

SEQ ID NO: 211614 - DNA, 318 bp, Homo sapiens; identical to SEQ ID NO: 201001
  chr7:69063552-69063870
  hypo

SEQ ID NO: 211615 - DNA, 282 bp, Homo sapiens; identical to SEQ ID NO: 201002
  chr7:69063900-69064182
  hypo

SEQ ID NO: 211616 - DNA, 80 bp, Homo sapiens
  chr7:69478666-69478746
  hypo
ctttggagtttcctctctaccgttacttattcagcaggtttttgtttttgttttttgagacggagtctctctctgtcacc

SEQ ID NO: 211617 - DNA, 140 bp, Homo sapiens
  chr7:70255442-70255582
  hypo
gaacttgacattcaccggagagacccgctgggcagggacttcctgctaaggaacgacccgctccaccggctctcgactccccggctgtacgaagccgaccgctccttcagggaccgggagcctcacgactacagccacca

SEQ ID NO: 211618 - DNA, 37 bp, Homo sapiens
  chr7:71119293-71119330
  hypo
gccactgcgcccggccggctggagggttttatgggag

SEQ ID NO: 211619 - DNA, 38 bp, Homo sapiens
  chr7:71287516-71287554
  hypo
gtcaccgtgcctggcccgcttctggttcttatggtttg

SEQ ID NO: 211620 - DNA, 35 bp, Homo sapiens
  chr7:71397499-71397534
  hypo
actataagaagtatatgtgccgggcagggtggctc

SEQ ID NO: 211621 - DNA, 159 bp, Homo sapiens
  chr7:76632095-76632254
  hypo
tggtcctgggccccacggtagcctacacatgaagagccacgcccagaccgacccccagctgctctccctgcatcggccttcaggcgggatgggcagagtttagaggcttagagaaccgagtcgtggcgcatcggagcctggctcggccttccctagtat

SEQ ID NO: 211622 - DNA, 39 bp, Homo sapiens
  chr7:77184920-77184959
  hypo
ttttttaaaaaaatctctagcgtttcttaggccgggcac

SEQ ID NO: 211623 - DNA, 101 bp, Homo sapiens
  chr7:77309610-77309711
  hypo
gatagatggattctttttttttttttttttttttgagcaaattgagctacttgagcctcggcctcccaaagtgctgggattactggcgtcagccactgcac

SEQ ID NO: 211624 - DNA, 120 bp, Homo sapiens
  chr7:77323833-77323953
  hypo
ccacccatcaccgcctcctaaagtcttgggattacatgcgtgagccacccaccactcttggccgaaaaaaaaaaaattcttaaaaatattcttaaaaaaatgagtaaataggcactgtcg

SEQ ID NO: 211625 - DNA, 169 bp, Homo sapiens
  chr7:77324193-77324362
  hypo
agccaccgcgcccggccacattccttatcttttaagctaaaacccatctccccaaattgcttattttcgaagcaaaaatcaaagcacatgcttacaaaacatcgaacacgcagtgtgcttactaaacgctaaaatacagaaacctaaaaaaacaattcttgcttttcaa

SEQ ID NO: 211626 - DNA, 34 bp, Homo sapiens
  chr7:77413233-77413267
  hypo
gaacatgtgagaactcgatccttctgtacatttt

SEQ ID NO: 211627 - DNA, 37 bp, Homo sapiens
  chr7:77413297-77413334
  hypo
agaatgttaaatctacacttttctgtaaagttcattg

SEQ ID NO: 211628 - DNA, 153 bp, Homo sapiens
  chr7:80168619-80168772
  hypo
ctcgggaggtatttaggtcacgagggcggagccttcatgaatggccttagtgtccctacaaaagagcctccaaggtgattctttgcccctattactaggtgaagacacagcaagaaggcttcttttggccgggcgcggtggctcacgcctgta

SEQ ID NO: 211629 - DNA, 34 bp, Homo sapiens
  chr7:80541273-80541307
  hypo
tgttcgtatgaccgattaacaaaacactcaagct

SEQ ID NO: 211630 - DNA, 36 bp, Homo sapiens
  chr7:80917900-80917936
  hypo
ttttttttttttttttgagacggagtctcactctcg

SEQ ID NO: 211631 - DNA, 36 bp, Homo sapiens
  chr7:80918176-80918212
  hypo
tgagccaccgcgcccggactggtgtgcatgtcttat

SEQ ID NO: 211632 - DNA, 281 bp, Homo sapiens; identical to SEQ ID NO: 201020
  chr7:82791563-82791844
  hypo

SEQ ID NO: 211633 - DNA, 512 bp, Homo sapiens
  chr7:86415571-86416083
  hypo
cctaggtggcaaacctgctgcggctcttccagatccctcagatcagctacgcatccaccagcgccaaactcagtgataagtcgcgctatgattactttgccaggaccgtgccccccgacttctaccaggccaaagccatggctgagatcttgcgcttcttcaactggacctacgtgtccacagtagcctccgagggtgattacggggagacagggatcgaggccttcgagcaggaagcccgcctgcgcaacatctgcatcgctacggcggagaaggtgggccgctccaacatccgcaagtcctacgacagcgtgatccgagaactgttgcagaagcccaacgcgcgcgtcgtggtcctcttcatgcgcagcgacgactcgcgggagctcattgcagccgccagccgcgccaatgcctccttcacctgggtggccagcgacggctggggcgcgcaggagagcatcatcaagggcagcgagcatgtggcctacggcgccatcaccctggagctg

SEQ ID NO: 211634 - DNA, 58 bp, Homo sapiens
  chr7:86416125-86416183
  hypo
ctcaacccctacaacaaccaccgcaacccctggttccgggacttctgggagcaaaagt

SEQ ID NO: 211635 - DNA, 109 bp, Homo sapiens; identical to SEQ ID NO: 201027
  chr7:86849527-86849636
  hypo

SEQ ID NO: 211636 - DNA, 60 bp, Homo sapiens; identical to SEQ ID NO: 201029
  chr7:87258398-87258458
  hypo

SEQ ID NO: 211637 - DNA, 481 bp, Homo sapiens; identical to SEQ ID NO: 201030
  chr7:87849420-87849901
  hypo

SEQ ID NO: 211638 - DNA, 211 bp, Homo sapiens; identical to SEQ ID NO: 201040
  chr7:90226057-90226268
  hypo

SEQ ID NO: 211639 - DNA, 184 bp, Homo sapiens
  chr7:90635233-90635417
  hypo
ttaacagatggtgatgtgggcgactgtggtttaagatctgactcggttcataaagacacccagtcttgtcctggtcccaccctataggcagtgatggctccaggctcatccaaacaactctgcaacaagatggtgtcagccatccacgtgggtggacaccgctggaccccgtagacaggcagcg

SEQ ID NO: 211640 - DNA, 104 bp, Homo sapiens; identical to SEQ ID NO: 201042
  chr7:90894834-90894938
  hypo

SEQ ID NO: 211641 - DNA, 40 bp, Homo sapiens
  chr7:92075854-92075894
  hypo
taacagccagctattcgattttctccgcattctctaatcg

SEQ ID NO: 211642 - DNA, 143 bp, Homo sapiens; identical to SEQ ID NO: 201043
  chr7:92219764-92219907
  hypo

SEQ ID NO: 211643 - DNA, 119 bp, Homo sapiens
  chr7:92370087-92370206
  hypo
tgaaggcgggaaaccgaatttgagaagccagaaaggtgcctaacacacacaaggcccatatcatcagaaacctaagctcctcctcacctcgtgcccaggtacacgtggcccctctgcaa

SEQ ID NO: 211644 - DNA, 1229 bp, Homo sapiens; identical to SEQ ID NO: 44386
  chr7:92462187-92463416
  hypo

SEQ ID NO: 211645 - DNA, 247 bp, Homo sapiens; identical to SEQ ID NO: 201045
  chr7:92463701-92463948
  hypo

SEQ ID NO: 211646 - DNA, 47 bp, Homo sapiens; identical to SEQ ID NO: 201046
  chr7:92466481-92466528
  hypo

SEQ ID NO: 211647 - DNA, 129 bp, Homo sapiens
  chr7:92939972-92940101
  hypo
tgtacttttctgagcgcactctgttctctcttatctctgaccctattttatgccggcccttttttctgtgctgaccatatagcttttacttttcttttgaaccttatgctgccccgtaaccccaaatac

SEQ ID NO: 211648 - DNA, 94 bp, Homo sapiens
  chr7:94138372-94138466
  hypo
cactagagcttgggcgacagggtgagactccctctcaaaaaaaacgaatttttttggcacatcgacctagccaaacttgcgtaaatacaagtga

SEQ ID NO: 211649 - DNA, 63 bp, Homo sapiens
  chr7:94293684-94293747
  hypo
ccggtgggaggtgcccgcatgcgcctgacgcaggaagaaaaagaaagacgcagaaagctgaac

SEQ ID NO: 211650 - DNA, 437 bp, Homo sapiens; identical to SEQ ID NO: 201052
  chr7:95064141-95064578
  hypo

SEQ ID NO: 211651 - DNA, 217 bp, Homo sapiens; identical to SEQ ID NO: 201058
  chr7:97501706-97501923
  hypo

SEQ ID NO: 211652 - DNA, 151 bp, Homo sapiens
  chr7:97806161-97806312
  hypo
aataataatgatttactgaatgcttcccacatgccagctactttacaccaactcttaagtggtagtgctggttttcccgtctgtgttacaggtcaggagacgcaggcacagacaggtatactgacttgttcagggtcgtgcaactggaagc

SEQ ID NO: 211653 - DNA, 122 bp, Homo sapiens
  chr7:97832525-97832647
  hypo
gcccactttggattccgggctgacctgagtccaggcgggggattgtggaggagaagccgacacacttgttgctggtgggtggcaccttgagcactgccgctcgtgcccgcctgcctgctgct

SEQ ID NO: 211654 - DNA, 301 bp, Homo sapiens
  chr7:97833194-97833495
  hypo
gctccccctctccctcatcacgcagtgataaaaagggtggggttttattttttatttctaggtggtggctttgagtgggatgatgacttctccccagatccttttatgtcaaagacaacaagtaacctgctcagctccaagccttctctccaaacatccaagtacttttctccgccgccaccggcccggagcacggagcagagctggccgcactcggcgccttactcccggttctccatctctcccgccaacattgccagcttttccctcacacacctgaccgactcggacatcgagcagg

SEQ ID NO: 211655 - DNA, 360 bp, Homo sapiens
  chr7:97841677-97842037
  hypo
cacccccggggaggggacgcccgacgggtccctgccgaacccggggccagagccggccaagggtctgcggagccggccggcccgggccgcagcaagggctccgggcgagggcaggcgcaggcggccaggaccctccgggcccggtggccgtcgtgacagcagcatccagcggcggctggagagcaacgagagggagcggcagcggatgcacaagctaaataacgccttccaggccctgcgtgaagtcatcccccacgtgcgcgcggacaagaagctctccaagatcgagacgctcacgctggccaagaactacatcaaatcgctgacggccaccatcctgaccatgtccagcagccgcct

SEQ ID NO: 211656 - DNA, 94 bp, Homo sapiens
  chr7:97847038-97847132
  hypo
cgtgaggctgcacgccggtgcgatgacacactgtcccccggctcaggctgtggctgccctgcactttgttggcgatcacccagacctggagcac

SEQ ID NO: 211657 - DNA, 165 bp, Homo sapiens
  chr7:97857342-97857507
  hypo
gacggggttccagcgctggttctcatagatgtgaacacacttcacgtctgactgcgtgtagatgttactggtgctgctggccaggcctgtggggagaggtggctgctgggaccgaggccacatacgctccgcttgggactctggctttccgtctgaagcacagat

SEQ ID NO: 211658 - DNA, 42 bp, Homo sapiens
  chr7:97989649-97989691
  hypo
cagcctgccttgtgttctaacgtaactgtggactgcacacct

SEQ ID NO: 211659 - DNA, 35 bp, Homo sapiens
  chr7:98012255-98012290
  hypo
ctgaggtcaggagttcgagaccagcctgaccaaca

SEQ ID NO: 211660 - DNA, 236 bp, Homo sapiens; identical to SEQ ID NO: 201059
  chr7:98030420-98030656
  hypo

SEQ ID NO: 211661 - DNA, 343 bp, Homo sapiens
  chr7:98115911-98116254
  hypo
ggcccaggatgggcaagggccgatgaggagaagagacagagggaagatgcagggaagtagcgtttcagagcacaggctgccgtgtgtgtgagtgtgtgtgttggtgtgcatgcacgtctctgtgcacatgtgcgtgtgtcgtatgggggcgcacacgtgtatctgtgtgtgcatgcgtaggtacatgtatgtgtgcatgagcgtgtgtgtgcacatgtgtatctgtgggtgcgtgtgtatgtacatgtatgtgtgcataagcgtgtgtgtgcacacgtgtatctgtgggtgcatgcgtaggtacacatatgtgtgcatgagcgtgtgtgtgcacacatgtatc

SEQ ID NO: 211662 - DNA, 198 bp, Homo sapiens
  chr7:98602731-98602929
  hypo
tcatggcttctcgctctggcaggttcatgccccgggtagagattgtgcagaagcacaacaccgcagcccggcggctgtacatccggggacacaatggcaagatctacccatacctcgtcatgaacgacgcctgcctcacagagtcacggcgagaggagcgtgtgttgcagctgctgcgtctgctgaacccctgtttgg

SEQ ID NO: 211663 - DNA, 216 bp, Homo sapiens
  chr7:98639724-98639940
  hypo
gttcattcatacttacggggttgattgaagaatccggatttatttgcaacatgtaaatattgtccgtagaatactggaagagcccgtaataaggattcagcatttcatggcacagcaagtaaagccactccctgggagcaaacaacaaaaatgcatttgagacgcgctaaaatttctacattttttttttttccctgagatggagtctcactctgt

SEQ ID NO: 211664 - DNA, 43 bp, Homo sapiens
  chr7:98704238-98704281
  hypo
tttaacaattccattgttgccgggagcagtggtgtatgcctgt

SEQ ID NO: 211665 - DNA, 162 bp, Homo sapiens
  chr7:98704341-98704503
  hypo
ctgggcaatatagcgagaccttgtctcttgaaaaaacagaaaagagaattccagtgccttctccgacctctttttttcccccttcagttggtttttcccaagtgatttaaggattgaatcaaagctaagcagctctttgcttgtttcgttagcagctcatga

SEQ ID NO: 211666 - DNA, 208 bp, Homo sapiens
  chr7:98845139-98845347
  hypo
gcctgaagggaactccgctgggggaagagggtaccaggaggaaaaatcagctgaccatcttccctccctcccaccagacctactcgggcttgttctgcgtgacggtcaacccctacaagtggctgcccatctacggggcccgtgtggctaacatgtacaagggcaagaagcgcacagagatgccgcctcacctcttctccatctctga

SEQ ID NO: 211667 - DNA, 72 bp, Homo sapiens
  chr7:98870778-98870850
  hypo
gctctgaccccaacgtgagtctccctgccgcagaccacatgggcaatgctgggtctcgagaaggcactttgg

SEQ ID NO: 211668 - DNA, 195 bp, Homo sapiens
  chr7:98879380-98879575
  hypo
ccaggcccactgtcacggctaaggttccagaatgcagagccggctctgaccggccaccagtgctgacctccagagaaacaggggcaaagagccagacagtggacccctcgtccctgtgtttgctgataccgtgaatccacatgtcccctgagtgcctctccctgctgcctcgggaactaccgcccttgccctgtg

SEQ ID NO: 211669 - DNA, 244 bp, Homo sapiens
  chr7:98955430-98955674
  hypo
ctcctggctaagaccgtttggttcatcttggtagctctagctcctaacacagtgcctggccgtcagcacagatctgtgtggtcacagccctctcggagctccggtgagcacaggcaaggagaaggtcctagcacaggtgtctgctgccaagtcatagtaacaggaagagctctaggagctaagagcagggagaagccactttaggcggaagtggcccgggaaagtggaccgtgggatcatgggg

SEQ ID NO: 211670 - DNA, 48 bp, Homo sapiens
  chr7:98966332-98966380
  hypo
ttattttgccattttttaacacaggccatttctcatgtggggaggaag

SEQ ID NO: 211671 - DNA, 68 bp, Homo sapiens
  chr7:98966410-98966478
  hypo
tcagtgctttatttcaacgctggggccttttgagtttgtgacgctccgtccttctctcactctacctt

SEQ ID NO: 211672 - DNA, 47 bp, Homo sapiens
  chr7:98966739-98966786
  hypo
agcatgtgctccccactgggcgagggaaataccttagtggcagcccc

SEQ ID NO: 211673 - DNA, 77 bp, Homo sapiens; identical to SEQ ID NO: 201060
  chr7:98971600-98971677
  hypo

SEQ ID NO: 211674 - DNA, 402 bp, Homo sapiens; identical to SEQ ID NO: 115310
  chr7:98971810-98972212
  hypo

SEQ ID NO: 211675 - DNA, 86 bp, Homo sapiens
  chr7:98985728-98985814
  hypo
gacgctgaagggccgcacatggaagcccacgctggtcatcctgcggatcaaccgggctgcccgctgcgtgcgctgggcccccaacg

SEQ ID NO: 211676 - DNA, 201 bp, Homo sapiens
  chr7:98994224-98994425
  hypo
agggcacagggtgggcgagacacagcagaggtcctggcagcgcggcccaggtccccggcatctcctcccacgggtcgcagttacttattcagggagagtgactgcattcgttttcctgacaatgtggcatcgtcttttgctgaggggtgggagaagggcaggggttaaaacaaagcaaccccccaccccctcccaacacac

SEQ ID NO: 211677 - DNA, 76 bp, Homo sapiens
  chr7:99020629-99020705
  hypo
tttttttttcaccaccacaccgggcgagagctcttctttctttcgcctattaaacttcagctcttaacctcttttt

SEQ ID NO: 211678 - DNA, 215 bp, Homo sapiens; identical to SEQ ID NO: 201064
  chr7:99156600-99156815
  hypo

SEQ ID NO: 211679 - DNA, 74 bp, Homo sapiens; identical to SEQ ID NO: 201065
  chr7:99156982-99157056
  hypo

SEQ ID NO: 211680 - DNA, 238 bp, Homo sapiens
  chr7:99227292-99227530
  hypo
aagccctacaagtgcggggactgctggaagagcttcagccgcaggcagcacctgcaggtgcaccggaggacgcacaccggggagaagccctacacctgcgagtgtggcaagagcttcagcaggaatgccaatctggcggtgcaccggcgtgcccacactggcgagaagccatatgggtgccaggtgtgcgggaagcggttcagcaaaggggagcggctggtccgacaccagagaatcc

SEQ ID NO: 211681 - DNA, 269 bp, Homo sapiens
  chr7:99691590-99691859
  hypo
ttccctccacggacgctgtgcgtgccctgctggagcagcaagtacccacagtgcggtagcacggagaggaccactatctgcactgtcagcactttagccccggcagggctggagcgggaggtggggaggcggcaatgagagcacggtaaggagctacccctttaagggtcaaaacagatggccctccagcaatttgggcacttaccagagcagtggaaaggcgcaggatagccagcagggtccgggcagaagtataggtggcatcctta

SEQ ID NO: 211682 - DNA, 94 bp, Homo sapiens
  chr7:99723240-99723334
  hypo
caacatagtgaaaccccaattctacacacacacacacacacaaagaagactgcagggctggtggtgcagcgcctgtagtcccagttactgcaga

SEQ ID NO: 211683 - DNA, 186 bp, Homo sapiens
  chr7:99839732-99839918
  hypo
tcccagaggaaaatcggggggagggtgaatgcccggctttgttctgctaaccagctgcagctttttcatctgtttctcctgggttttcaatgggtctctcgtgttatttacatttcatttctcctgtctttagcaactagaagctgccctttcaagttttacttagaaaaaagcccttaattggtt

SEQ ID NO: 211684 - DNA, 38 bp, Homo sapiens
  chr7:99839959-99839997
  hypo
ttaagatagaaaataaggccgggtgcggtggctcatgc

SEQ ID NO: 211685 - DNA, 76 bp, Homo sapiens
  chr7:100024904-100024980
  hypo
gtgcacaagctcagcaagcccgatttaaaacttttaacaagaaagaagaggcgggtggatcaccttaagtcaggag

SEQ ID NO: 211686 - DNA, 115 bp, Homo sapiens
  chr7:100025340-100025455
  hypo
cccaattccaaatccacctgcaatccaaagggaagaagttttgcagagaagttcttcccatttgtggggcgctcccatttttcctctcttccctcaccccttattctctctcagg

SEQ ID NO: 211687 - DNA, 128 bp, Homo sapiens
  chr7:100030628-100030756
  hypo
gtgcatctgaactggggagacgagggcctgaagcgcatgtttcgccggatctaccggcacctacgccctgggggcatcctggtcctagagccccaaccctggtcgtcgtatggcaagagaaagactct

SEQ ID NO: 211688 - DNA, 277 bp, Homo sapiens
  chr7:100064566-100064843
  hypo
taagggaagggaggctcagacggagggcccattgggcgcagggggcccaagccgtgggacccccgaggagggcagctgagccagctgctccgggctggccagggcgcgcagcagcccattctcctgctccagcgcagcgttccgctccgccaattcccggatctgctccttcagcacctccacctcctcccggaccgcaaacatgaggtgggacttcaccaagtcctgggggccccgggacaggcacagcgtcaacggggtgggtgcctcatcccct

SEQ ID NO: 211689 - DNA, 33 bp, Homo sapiens
  chr7:100170149-100170182
  hypo
agacatgatggggggcggcggcagcagtttcag

SEQ ID NO: 211690 - DNA, 86 bp, Homo sapiens
  chr7:100198415-100198501
  hypo
tgcccctgatggccgcacagaaggacttcttctgggaggccctggacatgctgcagagggctgaaggaggcgggggtggtgtaggg

SEQ ID NO: 211691 - DNA, 265 bp, Homo sapiens
  chr7:100218467-100218732
  hypo
atccccagggcctcagaagttgttatcaatgttccagacatccccgctaagcgcattggctgccccttgcagcgtccaggtgagcagggctagctgacgccggaaacggctctcctggaagccagtggaggaggtggccccgggggtcccggagctgttggagcgcagcagccgcaggtggtccagcagggcgcccagcgtgtggtctccacggcccatgaagatgtggcggaacggggagtcggctggcgacacgtactgggaa

SEQ ID NO: 211692 - DNA, 217 bp, Homo sapiens
  chr7:100275849-100276066
  hypo
gctgtgggacgtgcgggattccatgtgccgacagaccttcatcggccatgaatccgacatcaatgcagtggctgtgagttttggggcgagctaggccaggccctccccaccaggctcccggccctgctcctcaccctcaccctcaccccatctgggtcccgtgtcctgcagttcttccccaacggctacgccttcaccaccggctctgacgacgcca

SEQ ID NO: 211693 - DNA, 119 bp, Homo sapiens
  chr7:100279781-100279900
  hypo
ccccaggcaggaacggatataatcgtggacatcatagggggattccacctccttgaggatcgctacagccatgggcactgcaggatgagcgaaggctgtcagggccccctggccgggtc

SEQ ID NO: 211694 - DNA, 49 bp, Homo sapiens
  chr7:100388725-100388774
  hypo
gcttccccaggtgcacggcctggaagggatgaggcgggggaggtgaaca

SEQ ID NO: 211695 - DNA, 269 bp, Homo sapiens
  chr7:100405018-100405287
  hypo
tctcctccaggaatcgggaaaggccaaagtcagacactttgcagacgaggttgctgttgactaggatgttgcgagcagccaggtctcggtggacgtagctcatctcggcaaggtaccgcatgcccgaggcgatgccccgcagcatgcccacgagctggatgactgtgaactgtccgtcgtttagctggagagcagatagggtgggggcttggtgaggacagcccacccaccgttccccctcccatccacatcttttttttttagagaca

SEQ ID NO: 211696 - DNA, 80 bp, Homo sapiens
  chr7:100407982-100408062
  hypo
atcaagacattcaggcggacaagggacctaacccttcagtgtgtcagtgtcatcatgaggaactgctcaagatttagaga

SEQ ID NO: 211697 - DNA, 180 bp, Homo sapiens
  chr7:100410741-100410921
  hypo
gacgtaggagacatcgatctcttttgcaaattccctcacagcctcattagggtcttcataagtgaaggggtcgatgtagaccttagtacctgagaaatcaggcagggccccgtcagctgggaattaactcccactggactcggaggctcggctcatagcttttagccccaaacccctgtc

SEQ ID NO: 211698 - DNA, 44 bp, Homo sapiens
  chr7:100417052-100417096
  hypo
gcccccaaagccttagcccctcacacttccggggtacccaactt

SEQ ID NO: 211699 - DNA, 413 bp, Homo sapiens
  chr7:100421146-100421559
  hypo
tccagcccccagcgcgcgggccagaggcctcgcaactacatcggctgccctccaggccacgggcctgctggctggaatcccaccttggctgtggctgagccctgggggcacccaggtaccttgatgtaggggttctccatccaggctggcgtgagggccgtggccgtgtccgcatcgctctcatagtagaagacggtgaaggtctccttgcaggagcgcccagcccgaggcagggacaggcactcgagcatggtgaagcgcagcgtggcgtacacgtggacggcgccccgccgtgggacccaacctgtgcgaagccagtgggcctggcccggggcacgctgcacgtcacacacttcgtaggtgcgcacgctgtgctgttcctcatccaggccgctcagttcctcccactgtgc

SEQ ID NO: 211700 - DNA, 1351 bp, Homo sapiens; identical to SEQ ID NO: 201075
  chr7:100424341-100425692
  hypo

SEQ ID NO: 211701 - DNA, 122 bp, Homo sapiens
  chr7:100480482-100480604
  hypo
agctgcgcggccccggccaggcagacaggccagggcactgctgtgcacaatgcagcggtttagctgaatgtgattgctcaggcagctagccagtcaggccccactgcggagtcccgcgtggg

SEQ ID NO: 211702 - DNA, 152 bp, Homo sapiens; identical to SEQ ID NO: 201076
  chr7:100608956-100609108
  hypo

SEQ ID NO: 211703 - DNA, 95 bp, Homo sapiens
  chr7:100838061-100838156
  hypo
gtgagccaccgcgcccagcctcagctgtgttcttaactctatttttccttcactggggatggtaccatttccccgtcctgttaagtgcccttgac

SEQ ID NO: 211704 - DNA, 234 bp, Homo sapiens
  chr7:100849418-100849652
  hypo
aggtgacatattcagttcaggcacgcggaacatgaactcaggaagtggggagacagagagacccatcccccaactcccaggacgggggccaggccccctaaaaaggcacaatggcagggcaggtttggcagagtggttgagtgtcaggggtcgacaaaggacaccatgatgtagcgtgtgccccaggtcgttggcagcccctcgtggtagtgggtgaggcggccggggtgcagg

SEQ ID NO: 211705 - DNA, 94 bp, Homo sapiens
  chr7:100865918-100866012
  hypo
ggaccgggctgcccggcagcgtcgcatcaaccggcagctggaggccctggagaatgacaacttccaggatgacccccacgcgggactccctcag

SEQ ID NO: 211706 - DNA, 105 bp, Homo sapiens
  chr7:101132023-101132128
  hypo
actgtccatcttcagaactttttcattgtcccaattaaattgcagacttttaaaggaggaaaaaaagtttattgtgtgtgtcctgtctagcgcactcttccaggt

SEQ ID NO: 211707 - DNA, 77 bp, Homo sapiens
  chr7:101195310-101195387
  hypo
aggcagtggtggagcctggatttgaaccagggagtgtcaagctcccaagccatgcctcctcccgtgcttgtctagtg

SEQ ID NO: 211708 - DNA, 165 bp, Homo sapiens
  chr7:101241666-101241831
  hypo
tctgagctgcctcccaccctcgcctagcctctggcagggcctctggccaggcaggaacggccaacagagtcacctcctgctgacaagcctggcgctgacagccaggatctgggagaacaagaagtccattcaaggcgcagggccgggcgggcccactttcaggtg

SEQ ID NO: 211709 - DNA, 336 bp, Homo sapiens; identical to SEQ ID NO: 201086
  chr7:101457433-101457769
  hypo

SEQ ID NO: 211710 - DNA, 467 bp, Homo sapiens; identical to SEQ ID NO: 201087
  chr7:101458246-101458713
  hypo

SEQ ID NO: 211711 - DNA, 190 bp, Homo sapiens; identical to SEQ ID NO: 201088
  chr7:101459183-101459373
  hypo

SEQ ID NO: 211712 - DNA, 338 bp, Homo sapiens; identical to SEQ ID NO: 201089
  chr7:101460703-101461041
  hypo

SEQ ID NO: 211713 - DNA, 136 bp, Homo sapiens
  chr7:101475654-101475790
  hypo
tggtcatcagtgtcccccaccgacatggcacatccagcgagcccactgtgtccccagcacctgcggtgcagggggctggcaccttcaggggcgggcttcgtgcagacgtccacccagtcagtccccacaggtttat

SEQ ID NO: 211714 - DNA, 173 bp, Homo sapiens
  chr7:101475858-101476031
  hypo
gagttcctttattcatccctatttgctttctgtctgtaatcctttgtaattccctggtttcatgatgtaattctaatggaaataaacccgaacctttcaaaattatgtaattaattgcattcagcttcaatgacaatgactaattatagtgatacctggtggcaaggcaggta

SEQ ID NO: 211715 - DNA, 37 bp, Homo sapiens
  chr7:101476346-101476383
  hypo
gaggagggtgcgttcgactgaacgtgaagcgttcaag

SEQ ID NO: 211716 - DNA, 152 bp, Homo sapiens
  chr7:101504316-101504468
  hypo
gcccccaaagtgccgggtttataggctgagccactgcacccggcctgcactagttttttttgtctctagaaatctgcatctctgaatgtgttaggtcctgacctgctttagaacggatctcagccaccctgctccttcgaacccacatttct

SEQ ID NO: 211717 - DNA, 173 bp, Homo sapiens
  chr7:101536663-101536836
  hypo
atctaggaaacaaaactgcacgtgaaagatttgccttgtagacggaaagttctggaaacatcagctccaggctgtggtgtgaagctgtcgggctgatttgcctggtaagaagcgcgtttggggcacggagggtcaccttgccccctgcgagcgttctttcatcatttgagcag

SEQ ID NO: 211718 - DNA, 111 bp, Homo sapiens; identical to SEQ ID NO: 201091
  chr7:101559394-101559505
  hypo

SEQ ID NO: 211719 - DNA, 350 bp, Homo sapiens
  chr7:101566716-101567066
  hypo
cccagccctcatcctggtgacgtcagtcggcccagtcctactccagaacgcttcttgggtgtctgtctgcaggactttgctcagttaatttttgtctcctctaaaacagaccccgttgctctgggaggagagccgagctgcggctcaggggccgtcactggtcatttttgccctgatgtatttttgcctctacatttcttgatctctggaacgttaatcccaacgatgcctggtctgcggtgctcacagtctgtgtctgtgctttctacacctgtcctgctcagatgcacatgatgtcacacccaggtctccatcctggctcttgttggctgcggcggcagccctgactg

SEQ ID NO: 211720 - DNA, 283 bp, Homo sapiens
  chr7:101583547-101583830
  hypo
aatgttcgcaaagctggtcagtttccaatctggtgtcaccagtggaaaaaagatgtaagtgttgttggcaagagaagctcacccagagacacgctccatgaagtccctgacccccgctgggggtgcctgtgatggagggtaggctgtggtgcctgcgggcgcgcacaggtgagatggaaggaataaggggttattccttctgggtgcagctctgcctggaggccagagctgtcctcctcccttcgatctctgaattaaagacgctcttctagtattttcttat

SEQ ID NO: 211721 - DNA, 200 bp, Homo sapiens
  chr7:101595976-101596176
  hypo
tggctcactcccttttctgccgccaccttctcccccactgcgccatgctggtctcagctcggggcttacctggtcccagaggtgtgttgggaggtccccaccccttgcctctgcccgttgccttttccacccctgcactgggtgtgcataggtgcgcagggcacgtgtgtgtcctctgcggtcactgacttgattgtctg

SEQ ID NO: 211722 - DNA, 197 bp, Homo sapiens
  chr7:101603072-101603269
  hypo
gcggaggatttcaccgcgtacatattctctgtttggacatggtacaacctgtggacccttttaaacatagttacatgtttgactctttatagggtaataactcgattaattttgcaaggctttttagaataccattgttctcttgaaaagaacaggtttgctgttttaacaagactttaatgccatcgagatgcctc

SEQ ID NO: 211723 - DNA, 263 bp, Homo sapiens
  chr7:101603308-101603571
  hypo
aatgaaattgagagagctttttccggcgcctggttggttggggcggcctccgttcggtgcttttttcatcctcgacccagtgaccaactgtgtttgccctgatgtttctttcaattccaccattccgaaatgtctccggaatctgtcgttttagcttttgcagcaaggttcgttgtgtttgtcttgcccgcttcaggtttctctaatgagattcacgtgtaaaggaggattggcaattaatcggatgactgattaattgtgag

SEQ ID NO: 211724 - DNA, 323 bp, Homo sapiens
  chr7:101616396-101616719
  hypo
ccttgcccaggtaccggtatccatcagagcgtgattggggtttcagcagagccaggcctgcttttcctggcagaggctgggcccctttagatttttcttgtagattttgcttgagcctcccagcccttccttgctcagcacctgtgacccactgggtcacagtgacccacatcccatggctctgaccgcagctggactcatctcacactcacgttcatcacggctcccagaaggcacgtgtttttaatgagaggctcatttccaccactgccccccagccctccgcagcaagccagtgcaacgccaggacagtctgctgacag

SEQ ID NO: 211725 - DNA, 45 bp, Homo sapiens
  chr7:101624113-101624158
  hypo
cgtgggactttctcccgaacacagcacctgcgcttcctgactcct

SEQ ID NO: 211726 - DNA, 101 bp, Homo sapiens
  chr7:101627640-101627741
  hypo
tacccaccctgtaagattgtcgtgggacaatgtagataaaaacctcgatatacagcctagtacacaaaggacggtgtaaatattctcttccgtgcttcgta

SEQ ID NO: 211727 - DNA, 135 bp, Homo sapiens
  chr7:101627846-101627981
  hypo
aagtcctgcaggactgagctctgaaggccacccacaccctgggttgtgcttggatgatggcatccctcctggcacaagcgcagatgggcagtcgggagggaacatcagcctgggaaaactagatgtcagtgaaaa

SEQ ID NO: 211728 - DNA, 102 bp, Homo sapiens
  chr7:101630576-101630678
  hypo
aatgtggaactccccaagctacgggaaaggggtgcatatggaccgctgctcactcacggctcagatacttccacggtaatgggttggcgacagtgactcagc

SEQ ID NO: 211729 - DNA, 455 bp, Homo sapiens
  chr7:101649203-101649658
  hypo
gggtctaaagagaaaggtcacgaggagcgagcggccgcgtggatgaggttggccagagaaactggtttgttttggaagccgatggaagatgcgcttggaaggctaaggctgccgaggttgaagtccgtcattctcagtgcagaccctagggaggaagtagcaggaccccagtggggctgcaggcattcagaaagagagctgcctggggtttcccttcagaacctccctccttttaacccgggagtaaagagaaaaagacccgcggggtccactggctcggaagtcggtctctttcagtttggagcctccagttggaaacctgccttttaatggccaggctgatggtctagttactctttgaacagggaagcctcgtcaggctctctgctgaccacgcctcagtgctccctcgaaggacaactctggaatgccagtttttatctcatctcggtaga

SEQ ID NO: 211730 - DNA, 218 bp, Homo sapiens
  chr7:101652372-101652590
  hypo
cagcttagaaggcagcatggtgtagtagctttggcgccagccgcacccagagtttggattgtagccagatggcctcaggtgcaatgtataacctctgggaattccagatttcctatttacacgacagggatgattccatacctgaagggctgtttggaagcatctagaagcaagcacagtggagtggctgtcatgacgctgaccgcacaaatgatggt

SEQ ID NO: 211731 - DNA, 48 bp, Homo sapiens; identical to SEQ ID NO: 201092
  chr7:101671377-101671425
  hypo

SEQ ID NO: 211732 - DNA, 31 bp, Homo sapiens
  chr7:101694628-101694659
  hypo
gaaaaaaaaaaaaatagggccgggcgcagtg

SEQ ID NO: 211733 - DNA, 79 bp, Homo sapiens; identical to SEQ ID NO: 201093
  chr7:101713618-101713697
  hypo

SEQ ID NO: 211734 - DNA, 138 bp, Homo sapiens; identical to SEQ ID NO: 201094
  chr7:101740643-101740781
  hypo

SEQ ID NO: 211735 - DNA, 124 bp, Homo sapiens; identical to SEQ ID NO: 201095
  chr7:101747615-101747739
  hypo

SEQ ID NO: 211736 - DNA, 77 bp, Homo sapiens; identical to SEQ ID NO: 201096
  chr7:101754977-101755054
  hypo

SEQ ID NO: 211737 - DNA, 67 bp, Homo sapiens; identical to SEQ ID NO: 201097
  chr7:101758486-101758553
  hypo

SEQ ID NO: 211738 - DNA, 49 bp, Homo sapiens; identical to SEQ ID NO: 201098
  chr7:101801839-101801888
  hypo

SEQ ID NO: 211739 - DNA, 105 bp, Homo sapiens; identical to SEQ ID NO: 201099
  chr7:101813725-101813830
  hypo

SEQ ID NO: 211740 - DNA, 189 bp, Homo sapiens; identical to SEQ ID NO: 201100
  chr7:101821748-101821937
  hypo

SEQ ID NO: 211741 - DNA, 59 bp, Homo sapiens; identical to SEQ ID NO: 201101
  chr7:101833092-101833151
  hypo

SEQ ID NO: 211742 - DNA, 49 bp, Homo sapiens; identical to SEQ ID NO: 201102
  chr7:101837121-101837170
  hypo

SEQ ID NO: 211743 - DNA, 97 bp, Homo sapiens; identical to SEQ ID NO: 201103
  chr7:101838786-101838883
  hypo

SEQ ID NO: 211744 - DNA, 672 bp, Homo sapiens; identical to SEQ ID NO: 201104
  chr7:101839913-101840585
  hypo

SEQ ID NO: 211745 - DNA, 66 bp, Homo sapiens; identical to SEQ ID NO: 201105
  chr7:101842081-101842147
  hypo

SEQ ID NO: 211746 - DNA, 102 bp, Homo sapiens; identical to SEQ ID NO: 201106
  chr7:101843350-101843452
  hypo

SEQ ID NO: 211747 - DNA, 845 bp, Homo sapiens; identical to SEQ ID NO: 201107
  chr7:101844639-101845484
  hypo

SEQ ID NO: 211748 - DNA, 166 bp, Homo sapiens; identical to SEQ ID NO: 201108
  chr7:101847670-101847836
  hypo

SEQ ID NO: 211749 - DNA, 57 bp, Homo sapiens; identical to SEQ ID NO: 201109
  chr7:101848393-101848450
  hypo

SEQ ID NO: 211750 - DNA, 303 bp, Homo sapiens; identical to SEQ ID NO: 201110
  chr7:101870646-101870949
  hypo

SEQ ID NO: 211751 - DNA, 189 bp, Homo sapiens; identical to SEQ ID NO: 201111
  chr7:101877331-101877520
  hypo

SEQ ID NO: 211752 - DNA, 265 bp, Homo sapiens; identical to SEQ ID NO: 201112
  chr7:101882599-101882864
  hypo

SEQ ID NO: 211753 - DNA, 9822 bp, Homo sapiens; identical to SEQ ID NO: 201113
  chr7:101891691-101901513
  hypo

SEQ ID NO: 211754 - DNA, 128 bp, Homo sapiens; identical to SEQ ID NO: 201114
  chr7:101916636-101916764
  hypo

SEQ ID NO: 211755 - DNA, 67 bp, Homo sapiens; identical to SEQ ID NO: 201115
  chr7:101917514-101917581
  hypo

SEQ ID NO: 211756 - DNA, 113 bp, Homo sapiens; identical to SEQ ID NO: 201116
  chr7:101918517-101918630
  hypo

SEQ ID NO: 211757 - DNA, 117 bp, Homo sapiens; identical to SEQ ID NO: 201117
  chr7:101921219-101921336
  hypo

SEQ ID NO: 211758 - DNA, 84 bp, Homo sapiens; identical to SEQ ID NO: 201118
  chr7:101923328-101923412
  hypo

SEQ ID NO: 211759 - DNA, 57 bp, Homo sapiens; identical to SEQ ID NO: 201119
  chr7:101924095-101924152
  hypo

SEQ ID NO: 211760 - DNA, 81 bp, Homo sapiens; identical to SEQ ID NO: 201120
  chr7:101925131-101925212
  hypo

SEQ ID NO: 211761 - DNA, 65 bp, Homo sapiens; identical to SEQ ID NO: 201121
  chr7:101926003-101926068
  hypo

SEQ ID NO: 211762 - DNA, 938 bp, Homo sapiens; identical to SEQ ID NO: 201122
  chr7:101926312-101927250
  hypo

SEQ ID NO: 211763 - DNA, 203 bp, Homo sapiens
  chr7:102087558-102087761
  hypo
ttgtcagatgcagacattttgcaaggctgccgggtagttcaagaccaaagttttcctcttgtcttaataccataaggactggatgacttctcctgagatagaaccgtttggttcaatgagggactgtgttgctaagagcgttgggggcaaagccaggctggttccttggcctcggggtttcctgggtcggggacacggtgaag

SEQ ID NO: 211764 - DNA, 66 bp, Homo sapiens
  chr7:102088066-102088132
  hypo
aggagccaggacacacgtcagcccagcaggtgtggggggtgctgcagccctcggcagtggggtcag

SEQ ID NO: 211765 - DNA, 136 bp, Homo sapiens
  chr7:102782159-102782295
  hypo
atatgcctgcccttccggcaggccaaggtgtttttccggcatcaagcgggggaatggaccatcacaggcttgcggatgatcagcccatctttgatcagcttccggatctgctgacgggagttggcattggtgattt

SEQ ID NO: 211766 - DNA, 139 bp, Homo sapiens; identical to SEQ ID NO: 201124
  chr7:102921243-102921382
  hypo

SEQ ID NO: 211767 - DNA, 44 bp, Homo sapiens
  chr7:104629827-104629871
  hypo
acctcctgcaggtgcggccgatcaggggccgggattggggacct

SEQ ID NO: 211768 - DNA, 84 bp, Homo sapiens
  chr7:104917805-104917889
  hypo
agccactgcgcccggcccaacttggtatttttaagagacttctcgctgaaatgcaaaaggcccgcaaaggcttttctggctcag

SEQ ID NO: 211769 - DNA, 37 bp, Homo sapiens
  chr7:105016768-105016805
  hypo
cacacacaaacacacacccctacggcattcttcatct

SEQ ID NO: 211770 - DNA, 130 bp, Homo sapiens
  chr7:105278333-105278463
  hypo
catggtgcagtgagcgtctaagaggtgctaacgacctattcacctgggtttccctactccgctccaggaatcgtcaactaatataaaagcccaggcagccaggaagtcacctggcggctgatgtgtcaca

SEQ ID NO: 211771 - DNA, 45 bp, Homo sapiens
  chr7:105279330-105279375
  hypo
atgaaaggcaactgcgagggaatgctagagttaatccaggtgcag

SEQ ID NO: 211772 - DNA, 31 bp, Homo sapiens
  chr7:105432491-105432522
  hypo
acgccccattcttctgtattcctccagagac

SEQ ID NO: 211773 - DNA, 299 bp, Homo sapiens
  chr7:105432552-105432851
  hypo
cacagtcacacacatctgttatgtcagtgagcggaaggtaaaggttcggctccttagagactgtggccacctggaggtgtgttcccctccaggcctttcccgttgagacttttcctagtttccctagagggaagtgtcaaccttgtacgtgtctgatctgagcatgtctcctgtggaaagtgagaggacctgggaatctgcttgattattcctcagtgagtcaaccttaggatctcctctacaggctgcccaggtcctgagggccctgccgatggcgagcaaagacaggcagctggctc

SEQ ID NO: 211774 - DNA, 38 bp, Homo sapiens
  chr7:105722825-105722863
  hypo
tgcttactcattaattttttcgaaggggtgaagcattt

SEQ ID NO: 211775 - DNA, 411 bp, Homo sapiens; identical to SEQ ID NO: 201129
  chr7:106508245-106508656
  hypo

SEQ ID NO: 211776 - DNA, 144 bp, Homo sapiens
  chr7:106622690-106622834
  hypo
accggaacaatgtgcggcacatattagacactcaatacatgtttgccaaatgaatacgtgaatgattgtagtcttggacaagtcaaatggcccttagggactatttgttcattgattattttcccacctgcgtcacagcatggc

SEQ ID NO: 211777 - DNA, 37 bp, Homo sapiens
  chr7:106675696-106675733
  hypo
tgcccagccctcaatcgcctagttttctctgaactat

SEQ ID NO: 211778 - DNA, 86 bp, Homo sapiens
  chr7:106683489-106683575
  hypo
taaaaataataatgcttacacggtagagagtagtactaacattgtgctccaaccggtgacatgtgaggctcaccatattttataaa

SEQ ID NO: 211779 - DNA, 32 bp, Homo sapiens; identical to SEQ ID NO: 201130
  chr7:106684800-106684832
  hypo

SEQ ID NO: 211780 - DNA, 251 bp, Homo sapiens; identical to SEQ ID NO: 201131
  chr7:106684920-106685171
  hypo

SEQ ID NO: 211781 - DNA, 37 bp, Homo sapiens
  chr7:106836715-106836752
  hypo
ttttttgtttgtttttgagacggagtctcgctgtgtc

SEQ ID NO: 211782 - DNA, 37 bp, Homo sapiens
  chr7:106836992-106837029
  hypo
gtgagccactgtgcccggccaggttgactttaaagta

SEQ ID NO: 211783 - DNA, 41 bp, Homo sapiens
  chr7:106837817-106837858
  hypo
ctttttttgtttgtttgaggcggagtctcactgtcatccag

SEQ ID NO: 211784 - DNA, 138 bp, Homo sapiens
  chr7:107483556-107483694
  hypo
caggtctatcaatgaacacacgagaaaaagctgaagaccgtgatcagtgaagcacacaaacggggcatggtgatagagaaaaacagtgggcacgcaatctagcttgggaaaatgaggtagcacccctttcaggaggtg

SEQ ID NO: 211785 - DNA, 38 bp, Homo sapiens
  chr7:107483918-107483956
  hypo
agtcatgtggatcacgcggatccaaaatggtttttaca

SEQ ID NO: 211786 - DNA, 322 bp, Homo sapiens; identical to SEQ ID NO: 201135
  chr7:107531675-107531997
  hypo

SEQ ID NO: 211787 - DNA, 44 bp, Homo sapiens
  chr7:107633907-107633951
  hypo
ttcaatcatcacccccgttttaccttctgcgcctacacaagtaa

SEQ ID NO: 211788 - DNA, 43 bp, Homo sapiens; identical to SEQ ID NO: 201139
  chr7:108095229-108095272
  hypo

SEQ ID NO: 211789 - DNA, 235 bp, Homo sapiens; identical to SEQ ID NO: 201148
  chr7:113727134-113727369
  hypo

SEQ ID NO: 211790 - DNA, 681 bp, Homo sapiens; identical to SEQ ID NO: 201157
  chr7:120496812-120497493
  hypo

SEQ ID NO: 211791 - DNA, 130 bp, Homo sapiens; identical to SEQ ID NO: 201163
  chr7:121863466-121863596
  hypo

SEQ ID NO: 211792 - DNA, 157 bp, Homo sapiens; identical to SEQ ID NO: 201170
  chr7:123174506-123174663
  hypo

SEQ ID NO: 211793 - DNA, 71 bp, Homo sapiens; identical to SEQ ID NO: 201175
  chr7:126891135-126891206
  hypo

SEQ ID NO: 211794 - DNA, 101 bp, Homo sapiens
  chr7:127371028-127371129
  hypo
gccacattcatattcgtatggagctgcctttagcagcatctgcttctccagctggagaggcttgttttagaacgactggcatgcggaagcggtaggtggag

SEQ ID NO: 211795 - DNA, 233 bp, Homo sapiens
  chr7:127371249-127371482
  hypo
cccctttcctctacttcataccgcagctgctgtgagcgagtgcactgtgctctgcacaggagaattggcagacagttccatatgctggttttggccattgggacattcaggattattaggccagtttgtactttaagaggagggagacttgacatcgctcaaagcagcttattttatttatttctatttcttataaaggggaaagaagctagcccagcccttagctgttcctt

SEQ ID NO: 211796 - DNA, 125 bp, Homo sapiens
  chr7:127544866-127544991
  hypo
tctggggtgagtcgagtccctgaatcaagctgtgtggctcagaggctcaagagcgtgtctgcatatttgctgaaggacttcagcttatgtattttctctagctcgctccttttcaggcactgact

SEQ ID NO: 211797 - DNA, 215 bp, Homo sapiens
  chr7:127670440-127670655
  hypo
tctccatgaggttgaggtaccgggtgttcgagggaataccctgcgggacctcggagaggccccggcgcgtgcacaccaccttgctgaactggttactgcacgagcagacggaggggcagttctggggcccggctgaggcggcagcagcgatggctgcacacagaatccacacttgcgccgtgaggtagacgaacgggagcaggatggcattccag

SEQ ID NO: 211798 - DNA, 108 bp, Homo sapiens
  chr7:127673455-127673563
  hypo
cctcaacccacccctctccccgtgtgatttctggcaggctcgcttgataaaccctcatcacctgcgcgtgggctgttgcttaagaacgaggaggtcccagatttctca

SEQ ID NO: 211799 - DNA, 287 bp, Homo sapiens
  chr7:127693923-127694210
  hypo
ctgagcttttccccgaccccaggcctgtggagtgcagcagtcaaagctttattgcccacacactggagccgctctgcaataaaagaaaataaaacaaggtaatgggaatggccggtacagggggcaggcccctggagaaatgggcctgctgctgcccatcttcccagcaccactgatcgccgctaaggccactgtcagtaagtcatcggcagtaccctgggtctcctttctggggctgagtgaatgacctgcatggtggtcagatggagtggcggtggcatgtacac

SEQ ID NO: 211800 - DNA, 105 bp, Homo sapiens
  chr7:128097963-128098068
  hypo
aaaaaaaaaagaaaagaaaaagcctgtttaatgcacaggtgtgagtggattgcttatggctatgagataggttgatctcgcccttaccccggggtctggtgtatg

SEQ ID NO: 211801 - DNA, 257 bp, Homo sapiens
  chr7:128484037-128484294
  hypo
gtcacttgccctccacgcagaggtggctgtgggacaggaacaagcattctctgtgaacacacgaggggctggcggtcagggccaactggatgtgcggatgacttcgccctctcgccggcccatcccctgcaagctggagccaggcggtggagcggaagcccaggctgtgcgctacatgcccccggaggaggggccctacaaggtggatatcacctacgatggtcacccggtgcctggcagcccgtttgctgtggagg

SEQ ID NO: 211802 - DNA, 201 bp, Homo sapiens
  chr7:128489439-128489640
  hypo
tgccaaggcagccggtgaggggaaggtgacatgcacggtgtccacgccggatggggcagagctcgatgtggatgtggttgagaaccatgacggtacctttgacatctactacacagcgcccgagccgggcaagtacgtcatcaccatccgcttcgggggtgagcacatccccaacagccccttccacgtgctggtaagttc

SEQ ID NO: 211803 - DNA, 74 bp, Homo sapiens
  chr7:128587332-128587406
  hypo
ggatgtcaagtggccgcccactctgcagccgcccactctgcggccgcctactctgcagccgcccactctgcagc

SEQ ID NO: 211804 - DNA, 93 bp, Homo sapiens
  chr7:128602076-128602169
  hypo
tattttagactgaaacgtcccagctttcttcaagttgaccaactaaaaaagctagggaattggccaggcgcggtggctcacacctgtaatccc

SEQ ID NO: 211805 - DNA, 32 bp, Homo sapiens; identical to SEQ ID NO: 97204
  chr7:128602409-128602441
  hypo

SEQ ID NO: 211806 - DNA, 94 bp, Homo sapiens
  chr7:129096502-129096596
  hypo
atggtattgggacaccgactggccaaaaatcaagattctaagttactctgggtgtggtaggaaaaagcagtaaatgacccggctcatcctgccc

SEQ ID NO: 211807 - DNA, 66 bp, Homo sapiens
  chr7:129330228-129330294
  hypo
cccttaattccctgcaggtgcgtaagtacaagagcatgatcctggaagacctggagtctgctctgg

SEQ ID NO: 211808 - DNA, 110 bp, Homo sapiens
  chr7:129330351-129330461
  hypo
acggaattccagtctctgtggacaaaatgacccaggtgaggggtgggaggtgaggaggagactcaaagacaagtggcacaggtgtgggcgggcctctgatcacttttctg

SEQ ID NO: 211809 - DNA, 285 bp, Homo sapiens
  chr7:129414553-129414838
  hypo
tgattgctcagagcggagagacacaagcaaaaatgtgctagtgccaaaatcggccaagcagatggcactggtgcgggctctctggggacacactggacgaggggccttgcatccctgcacccttggaagcagcctgtttccgacgtctaggagcactcaaggcagaagtgggtaaggtgctccggaggccctcgtggatctgtctctgctctgtttatggcccttcggtaattcactgactgagactgttcacagtgaattctaccagtgccatacacagaacag

SEQ ID NO: 211810 - DNA, 112 bp, Homo sapiens
  chr7:129435134-129435246
  hypo
gtccctcagcccacccgagctccttgacacgtttccaggaccataggacagtgcggtgcaggtcgtgcagagtggcttctaggtctgagccggcactcgagggcggggtcct

SEQ ID NO: 211811 - DNA, 235 bp, Homo sapiens
  chr7:129470903-129471138
  hypo
tcagatgagtggaaaacctgcgcatgacagggccggctcccccttctcaaagggcttcctcccactcatcccatccctaacagaatcgccgaggtgttcacgggccagagaaagcacaaacatggattcagaagtccaaagaaatgcagttcgttgcgcccaatcagagatagatgatttcattcaacaaggctggaagcccagttgggaagtcgataaaaaatcttgctaactt

SEQ ID NO: 211812 - DNA, 198 bp, Homo sapiens
  chr7:129483449-129483647
  hypo
taaatccatggatcagagatgatcaccctcctccccaaagaatccctcacaagtgcaaagaagcatgctaagcaaaggacgttcagatgtttctgtggctattcacagagacggtgtgcttgttttcatgcagctccaccgcaggaggtaacccgcagacacctgcacacagcgaacggaaggctcctcctgccatat

SEQ ID NO: 211813 - DNA, 45 bp, Homo sapiens
  chr7:129689365-129689410
  hypo
tttgaatctcttcagaaattcgactttttttttttttgagatgga

SEQ ID NO: 211814 - DNA, 240 bp, Homo sapiens
  chr7:129689710-129689950
  hypo
gaaaaaacaattttgatatttctacctggagggacctttcatacccactccttccaaaaaaaaaagaaccaattagaaaattcgaatcaaagatcttcgggagatttcatgaaaaaaaaatcagggagaaaaaaactcagcaaagcaattctctcattttcagtggaaggcatttcaacagtgcctggggaattgctgaaagacaagcatttatttatttatttagagacggagtctcac

SEQ ID NO: 211815 - DNA, 147 bp, Homo sapiens
  chr7:129778855-129779002
  hypo
tgttttttttttactttttccgccttcctaaagcagaaccttctgtagctctttcagtctagctcttcttcagaatatggcgagtctgagtctcttctgaccacataagacggggcgattcaaagcgtgcagctggagtatttgtat

SEQ ID NO: 211816 - DNA, 272 bp, Homo sapiens
  chr7:129782252-129782524
  hypo
ggtcccagaggggtggcctccgcccctcctgggggccgaggactgtcaccatgtcactacggcactctccagctgctgaccaaagccctcgctaaccgcagccctgccatactctgggtctttcctctggagcaaggtgaagagactgcagcgaggcgtggaattgggaagctcttctggttttattaaaaactcgttccaccacaggagtcagcctggccactcaggtgtggggcgggtctctcctcatttagctttcacctgcgtgccca

SEQ ID NO: 211817 - DNA, 393 bp, Homo sapiens
  chr7:129782554-129782947
  hypo
ttgtagggagtaagcatcctgccctggcaaagctgagtgaacgtgggtagcttcagcccagtgaagcagcagcagggacgcctgtggaaacctgggtggaggtgccttctgaccttggtttgtctgggccagggggcgaatgcttctggcagtggagcttccaggcccggaaaacccaggcctcttctcctcacgtgggccctcaggtgcttgtggactgcccggagacagaacagaactgagggtgggagggcctgcttttgcctgcagaacaccctgaaatgtcccatttacccagctctctccagggcccgcacagtccaaacttctctggcctcaactcctaccactgtgcctttgctcactctcgaccagccacggtggcttccttgc

SEQ ID NO: 211818 - DNA, 45 bp, Homo sapiens
  chr7:129800434-129800479
  hypo
tccccactaggaacacaaggggcctttcttcggaggtggagctca

SEQ ID NO: 211819 - DNA, 274 bp, Homo sapiens
  chr7:129948129-129948403
  hypo
cttggtggctttttcagaaccgattatggaggaagacgcggtcccgaaatcctggaagctcctgcattggtgctgacccaaatagaaactggaacgctagttttgcaggtaggcggtggggagacagttctcaaatcctgctgtccctgggctcgcctggtctaccagtgctctgagctggccgggacggagcgcgtttccactttggttccgttgctgcgtcactgagagactgaggagcactccttaggctctgacttagtgttttgtttgt

SEQ ID NO: 211820 - DNA, 45 bp, Homo sapiens
  chr7:131041470-131041515
  hypo
acagtattcttcatcgaggattacctggagcttaatggccactag

SEQ ID NO: 211821 - DNA, 249 bp, Homo sapiens
  chr7:131864448-131864697
  hypo
ccttgcactccagggccacacgggactccaggttgtccatctgcatctgcagccgcttcagcgtgaggtcactttcgcgggacttgcgtttataggcaatgagcacggccacgatgaaaatgatgaggaggccgccagccactgcgatgctgacgatggcgggcaggctgagcgggctgtccggggcaatgtacaccatccccggggagtactccatgccaccgacacgggcctgggggcacacagggc

SEQ ID NO: 211822 - DNA, 105 bp, Homo sapiens
  chr7:132527723-132527828
  hypo
tttggtatccactggcgagtcctgcctgcagcaatgattactgtagtgttctgatggtacatagatttctttcgtttttgtttatttgttttaagatggaatctc

SEQ ID NO: 211823 - DNA, 45 bp, Homo sapiens
  chr7:132527948-132527993
  hypo
ccaccacacccagctaatttttgttgtgagcgcttggttcaaggt

SEQ ID NO: 211824 - DNA, 203 bp, Homo sapiens
  chr7:132637910-132638113
  hypo
gagtccttcactccacgtaactttccgcggccttactaagtgattataaccttctccaatgctgtgaatttaatatattggcaggaggtattgagatgtaatgaagactctgaaggtgccagccacagcatggagaaacagagcctgtcacctgtctaccttcggggaggctctatttctccccacaacgaggctcctatgtc

SEQ ID NO: 211825 - DNA, 92 bp, Homo sapiens
  chr7:133234086-133234178
  hypo
ttgaacacttagaggccattgtagggttattaattggtatattttcaaaattgttatgtctctgtgaattgggaagccggaggagagagaga

SEQ ID NO: 211826 - DNA, 59 bp, Homo sapiens
  chr7:134377919-134377978
  hypo
atcgttatttgagacgtatgtgtataatgagacacttggcagcacgagcgaatgaagtg

SEQ ID NO: 211827 - DNA, 50 bp, Homo sapiens
  chr7:134378383-134378433
  hypo
tgagccttattccgcgcttgggttgcacatggcagcgagggagctgatgg

SEQ ID NO: 211828 - DNA, 177 bp, Homo sapiens
  chr7:134613459-134613636
  hypo
cgtggcaagtggcacgctcaagaggttgtctttgtaatgttgcagaatcgcctaccagaggaatgacgatgatgaagaggaggcagcccgggaacggcgccgccgagcccgacaggaacggctgcggcagaagcaggaggaagaatccttgggacaggtgaccgaccaggtggaggt

SEQ ID NO: 211829 - DNA, 144 bp, Homo sapiens
  chr7:134673287-134673431
  hypo
atgtatgtaaactaatgtcccgaaataagctcttaaagcttactttagctatttaaaggatttatggctttctgtgtttttctttttgttaatttaatttttttttttttcttgagccagagtttgagatcgctcttgttgctc

SEQ ID NO: 211830 - DNA, 184 bp, Homo sapiens
  chr7:134853337-134853521
  hypo
gtgggtgcctgtcctcgagggttaacccgctttgcctcccgcccacagcccctccaccttctaaaagctcaagagatgatcagactgaaacacccgcccatcttgctgttctgcctaggctggaagacctggcccaggtcatggaggcccctgctccacttgccagattcgcaggagtcttctg

SEQ ID NO: 211831 - DNA, 189 bp, Homo sapiens
  chr7:134880722-134880911
  hypo
gacaggctgaccagtccactggcagctccaaccgactcccatgactctactgccatgactgtggccctcgtccaagcccccattctccgccatctcctgctggccacacctccacgtgtactgcctgaaaatctgagcttcccagggtttccttggccccaggcccaacccacctgcagtgcatgatgg

SEQ ID NO: 211832 - DNA, 225 bp, Homo sapiens
  chr7:134880941-134881166
  hypo
ccagcacaataaagggctgctcggggcggactcctccaccctcagggcctgccgaggatgcccgagtcagtggctccactggctccgtgtggagctctgggcagggctcagcctctgggccactggcttctggtttcttctctgcacactgtcacaagcagggtggggacaagtcagccaggaaagggtcccccacaccagggtgtacaccgcagggggtctagg

SEQ ID NO: 211833 - DNA, 238 bp, Homo sapiens
  chr7:134890670-134890908
  hypo
cacactcacagttccgagtcccccaggcggtccatgttggagacataaggaggcaatttgtgttggaccaaggcctcttcctcttctggctgttgctcctctttcttcagtcggtggatttcagcttgcaatgcaaaaagctatacaggggtgggactgagttagccaatgatctcacctaaccttccctctgcggaggaagatttctagacacatcgcatccaagcccactggtctg

SEQ ID NO: 211834 - DNA, 180 bp, Homo sapiens
  chr7:134898276-134898456
  hypo
agcctggtcgacagagcgagactccgtctcaaaaaaaaaaaaatggtgacaataacacccaccttgcacagtagtaatgaagatttaataagacagtgtatgtaaaacgcttagcacagtgaatggcctattggtaaaatgcatggagtgttcccttctccttccctcgaatggtatgac

SEQ ID NO: 211835 - DNA, 105 bp, Homo sapiens
  chr7:134918299-134918404
  hypo
tgaaggctgtgtggagcccccgagctgattactgacgcgagggtcccctccctgacccctcgcgaccctgcgaggtgagtcagccccgcccctccctcttctctc

SEQ ID NO: 211836 - DNA, 215 bp, Homo sapiens
  chr7:134918661-134918876
  hypo
atcctttgaacgctcctctccagaaaggtgcccttgggcatatgagtgtttgtgtagacttgaaagaattcagtgcagcggagcctaacaggtgaacttttagcgcggggttcacaggagccttttgtatccgtcactgtggctacctacatttttgagagtgattctggatgatgatgatgatgatgatgatgattattattattatcattttg

SEQ ID NO: 211837 - DNA, 97 bp, Homo sapiens
  chr7:135360968-135361065
  hypo
acttttagattcatttaataggtaaattgcatgtcacgggtttgtagcttattctttcagaaactcttgcattatctgtagacgtggacgtaaatat

SEQ ID NO: 211838 - DNA, 194 bp, Homo sapiens
  chr7:135611088-135611282
  hypo
ctctaaaaaagtgctcgtagttgagtttgggaaatgcagatctccaagaaatgtggagcaacttagatgagcaatgaaaggatcagaggtttaaccacgactccattttcttcaagccccctgaagatcctgacgatctgggatgtgctggctacaccctgctccccgtcaaccaggagcgttactgaagttac

SEQ ID NO: 211839 - DNA, 96 bp, Homo sapiens
  chr7:136437909-136438005
  hypo
tacacatttgtgtacagttacgtgaatataacttttttatttatcaaatgtgaatacgtaagagtgagagtgagattgttgggtcgcatggtaagt

SEQ ID NO: 211840 - DNA, 192 bp, Homo sapiens
  chr7:137564612-137564804
  hypo
cccctcaggcattgcacttgcggcctgagaatatgaacgagagccctcgcctgccagtgctgctgcaggagacgagacgatccagcgagggctcccagggggcagagtgggcggagggctgctgtcgggggtgttcacaccagagaccccagtgcgagcaacggaggacacgggtcagtgctttgccaaata

SEQ ID NO: 211841 - DNA, 37 bp, Homo sapiens
  chr7:137637556-137637593
  hypo
ttgtttttgttttttttagacggggtctctctctctc

SEQ ID NO: 211842 - DNA, 37 bp, Homo sapiens
  chr7:137637833-137637870
  hypo
atgaaaggcatgagccgctgtgcccagccagtttaag

SEQ ID NO: 211843 - DNA, 204 bp, Homo sapiens
  chr7:137670025-137670229
  hypo
aggactcagagaggttctctcgctcaacaatatgtacatcaactgcttgggaacagccaaggctagacgcagttcaggccaggggtcggaggaagaacgtggcttaaatgcctttgctgcagtgtatggacagcattccaaaggtgctctgccaggaagccccaggcctcgtggatggagagcgcttcagcttgtccctgacac

SEQ ID NO: 211844 - DNA, 194 bp, Homo sapiens
  chr7:137706784-137706978
  hypo
tgccaccacagctaccgcagcctctgggagcctagaaaaggggaatgagaacagtgaatgactcagtcccctgatggcagtggtggtggttgtggccagggagacatgatgatgaggtgggggcgctgctgctgcgaggagcaggcaatgatgtggtgggggtgggggtggggccggggcggggtgttgggggg

SEQ ID NO: 211845 - DNA, 176 bp, Homo sapiens
  chr7:138042028-138042204
  hypo
gggtgcccggccaggtttttttttttaacaaaagaatcaaccgatgcctcacaagaaacaaacgcagcgcctgcttcagtaccagtccaaggagtggtcctgtttacctttttgcccctccctgcctccctgcctgtgtctgctttttttgcaaggaaaaaaaaaatcaagacaaa

SEQ ID NO: 211846 - DNA, 39 bp, Homo sapiens
  chr7:138042568-138042607
  hypo
acaagcatgagccatggcgcccagccattcatgatgtgg

SEQ ID NO: 211847 - DNA, 34 bp, Homo sapiens
  chr7:138247007-138247041
  hypo
gtccaggtgaactgcgactcgccccatttgcgac

SEQ ID NO: 211848 - DNA, 169 bp, Homo sapiens; identical to SEQ ID NO: 201200
  chr7:138720616-138720785
  hypo

SEQ ID NO: 211849 - DNA, 43 bp, Homo sapiens; identical to SEQ ID NO: 201201
  chr7:138720909-138720952
  hypo

SEQ ID NO: 211850 - DNA, 84 bp, Homo sapiens
  chr7:138721475-138721559
  hypo
tggaattacaggcgtgagccaccccgcggggcctgctgagctttattggaaagtggctagtccgaattgagatgtgatataagt

SEQ ID NO: 211851 - DNA, 33 bp, Homo sapiens
  chr7:138778536-138778569
  hypo
gtggtctcttcacacggacgcgagtgaaaatta

SEQ ID NO: 211852 - DNA, 120 bp, Homo sapiens
  chr7:138974788-138974908
  hypo
gccaccacacctggctaatttttgtattgtattaatggattaattattgtaattttgtatttttagtagagaccggggttagtagagaccaccatgttggtcaggctggtttcgaattcc

SEQ ID NO: 211853 - DNA, 270 bp, Homo sapiens
  chr7:139257804-139258074
  hypo
cgagggcaggacccgggggcccatgctcacggggacctggtggacgatgctggctgggtaggcagtgtgctgcacggtgtggcgcgcagagccttgcgaggccaccaggtgggccacggtgccggtggagcccagggccgccggcgcagtgtaggtgtagaggtggggctgggtggggaggtgggcagcggcagcggctgcagccagatgcgggtgcacagtgccgtggctggggctgttgtgcgggaaggagtacggagcctgggccat

SEQ ID NO: 211854 - DNA, 180 bp, Homo sapiens
  chr7:139298887-139299067
  hypo
gttcagtgataccagcgctctcactggaagaaatgaggagggcctttctccatgaaaatgagcgtgacagaaaactgcaggtgccggagccccagaggccgttctgtaagaagcaggtgagaggctgtggctgctcaatcttaccttggaagccggggggacacacgatgagagcttgct

SEQ ID NO: 211855 - DNA, 256 bp, Homo sapiens
  chr7:139690719-139690975
  hypo
ccgacggtgcaggcacgggggcacagaggcagcaggacattgcaggagcagagacacgaagacaaaagaaacaaatgattccttaagatccatggccaaaacaaattgccgcaattaacacgtgccactgccacgatctatgggctgaaacgtggctggaacgacgcagaagcagaaaccacagagagcgtgcgctccaataaaacggcactaaatggcacggctgtgatggaactcgtttcgattttgttccaaa

SEQ ID NO: 211856 - DNA, 346 bp, Homo sapiens
  chr7:139733611-139733957
  hypo
gagttttggtattccgtgatattcaaatactaaaatacatgagtttttattggtgtaattccatcattatttcattatttcaacatttaaaaaattcaagtctatgactcaatgattccacagaaaagacaaacggatgggttggcttcaagtctagactcgccttcagagtctgtcttctccagagaatcatcgcagatcacaacaggcagccttctaattatgcatcacgaagcttctacccacagggtaattcccactctggtccaactagtagaagacaaacgataacagagtgtgggagcacttcgttgtacaagccaacggtgcccgggtgctgtctgag

SEQ ID NO: 211857 - DNA, 160 bp, Homo sapiens
  chr7:139992308-139992468
  hypo
gtaaagtgctggccgcgaagggcgcgcgaggagccgccacccgctcagcgtgggctttggtgtcggggtcgttgtgtgttgacaatcactccagtagccgtttccgatacagcatgtgcggcctctttagccttgagcgggctccgcggctgcctggcgg

SEQ ID NO: 211858 - DNA, 64 bp, Homo sapiens
  chr7:140026944-140027008
  hypo
aaaaaaaaaaaaatctgttaaggaggattatgaggctctacactctctccaagagcttgttcac

SEQ ID NO: 211859 - DNA, 123 bp, Homo sapiens
  chr7:140027079-140027202
  hypo
cgctctctgccaccagtactttggtcacgactgttgcccctcgcagccccgccttcctggctccagaatggttgctctttattttataaccctattaacatcttcattcgtcattctaggaca

SEQ ID NO: 211860 - DNA, 160 bp, Homo sapiens
  chr7:140027767-140027927
  hypo
cagacctgggtcagccgggcacgtgaaacagtcacacctccgctgactgtgcagacacagaattgggggagaaacaccaaggcagcagtttatcaagtggatggtgcaactcttagactcaaacagaagatgagggaaaaagagtaaagaggtgctgttt

SEQ ID NO: 211861 - DNA, 92 bp, Homo sapiens
  chr7:140063543-140063635
  hypo
aaaaaaaaaaaaaaaaaaaaaagaaaggagcgggatgttagcggcctggaaagcagtccagcttggctggagcaaagcgatgaagcagagtg

SEQ ID NO: 211862 - DNA, 104 bp, Homo sapiens; identical to SEQ ID NO: 201204
  chr7:140098150-140098254
  hypo

SEQ ID NO: 211863 - DNA, 179 bp, Homo sapiens; identical to SEQ ID NO: 115791
  chr7:140098296-140098475
  hypo

SEQ ID NO: 211864 - DNA, 51 bp, Homo sapiens
  chr7:140156473-140156524
  hypo
gcttagcactcctccacttgcgaatgcacttgagacagtaggtgtggttgc

SEQ ID NO: 211865 - DNA, 116 bp, Homo sapiens
  chr7:140156954-140157070
  hypo
aactacattaaagacggttttccatactgtttgttatttctggtttctacatgaggttaagaccctagttaaaacctgtcggaaaataagggtgacaggcacgtaaactctcttat

SEQ ID NO: 211866 - DNA, 280 bp, Homo sapiens
  chr7:140221611-140221891
  hypo
gagctctagctgactcggccccaacagagaagatgcccctcacctttggcatcctgccggcgcagctcccgctcctggatgaagccccgaaacatctgagtctccatgaagacctccaggaagtggcggaggctcttggaggagacagctttgcggaaggcctcccgctgcagggttctctcctcacgctcgcccgacgtcaggaacaaagagtagtgtcccacaatctccacgaagaagcggacaaaggcttcagacaccacctcgttcaaggggctgg

SEQ ID NO: 211867 - DNA, 32 bp, Homo sapiens
  chr7:140427687-140427719
  hypo
tgggattacacgcatgagccaccatgcccggc

SEQ ID NO: 211868 - DNA, 175 bp, Homo sapiens
  chr7:140710244-140710419
  hypo
ctgcatgagttcagcgtaagtgtggtgatttggataccaatcataagtctccttcttcttggccaagggcagttcactaaacagtttcaccactttcatagacttggaattagtaggcctggtgacttcaccaaatagccgggcactgagacgagacatgcggaaggcatattct

SEQ ID NO: 211869 - DNA, 140 bp, Homo sapiens; identical to SEQ ID NO: 201208
  chr7:140774419-140774559
  hypo

SEQ ID NO: 211870 - DNA, 1015 bp, Homo sapiens; identical to SEQ ID NO: 201211
  chr7:142985429-142986444
  hypo

SEQ ID NO: 211871 - DNA, 161 bp, Homo sapiens
  chr7:143000867-143001028
  hypo
ttgttacagatgagactgatcgtggggttgaccaacaagatggaaagaaccacgcaggatcccctgggtgcgaggagagtgatgccggtaaagaaaagttgccgaagatgagactgcccacgcgctcagacatgatatgcggctatgcctgcctcaaaggt

SEQ ID NO: 211872 - DNA, 57 bp, Homo sapiens
  chr7:143096713-143096770
  hypo
tcctcaggttctcaccgcctccgttcttaccaacacatgcttcgccactgccacctt

SEQ ID NO: 211873 - DNA, 79 bp, Homo sapiens
  chr7:143097073-143097152
  hypo
ccacattcagcttcacggagccagacacaaggtctcgaatggtgaagctctggtctgcagccaccgtggttacctgggt

SEQ ID NO: 211874 - DNA, 152 bp, Homo sapiens; identical to SEQ ID NO: 201215
  chr7:145981901-145982053
  hypo

SEQ ID NO: 211875 - DNA, 132 bp, Homo sapiens
  chr7:146425093-146425225
  hypo
aaggggtccaatggctaaaccgacgatttcaactcacggtggcaaagagcatcacgagcatgctcaggaagcacgctgaggaggcgggcacccaaccgaacctgcagagacggaggacatctttctggggag

SEQ ID NO: 211876 - DNA, 704 bp, Homo sapiens; identical to SEQ ID NO: 44845
  chr7:148036378-148037082
  hypo

SEQ ID NO: 211877 - DNA, 153 bp, Homo sapiens
  chr7:148079572-148079725
  hypo
gagcgggagtcacaagttttctacccagctctaaaagaggagacaaaactaacactggttcacaatagataacagaacggcttcagcaaagggcaagcaagcgtagagagatgctggagaagaacaaggcactttatccatgtcccccacagc

SEQ ID NO: 211878 - DNA, 157 bp, Homo sapiens
  chr7:148079755-148079912
  hypo
tttgtgtgagcccagggagtcggcagggacatgaggggttgatgcggcacttgctcagagcaatcgcagtgctgccgctggaattatctttctcacacagttcccagtagtggttaaaaggctctgaggtcagtccgcctggcccactagctaaggg

SEQ ID NO: 211879 - DNA, 240 bp, Homo sapiens
  chr7:148162167-148162407
  hypo
ctcgtaatcccttccccatggtgttgtctgtcactcatggctctttgtgtgggtgtgcgcattgccgtgtgatgcaattccctcatcttctcatgaaaacacacgcacagccaagttgactctatcatccatgcttgtcagaagcagggaggcctttgcgtgactctcctctgggttacaggaaagacataaacatgaaaaatgtgcttttaattgtatttgcttgcactcctactcaag

SEQ ID NO: 211880 - DNA, 151 bp, Homo sapiens
  chr7:148448804-148448955
  hypo
agtattgtaaatgtgcgttacacagtatattacagctgcggctatgtcagataccatcaaaaacaaatggcagagcaaatgtacatattacagtttgtataatttaaaaatgtagaacatggccagacgcggtggctcacgcctgtaatcc

SEQ ID NO: 211881 - DNA, 531 bp, Homo sapiens
  chr7:148480934-148481465
  hypo
atgtctgcattcaacaatgacgctggctttgtggctgctcttgataaggtaggtgcgtgagggttgtgacttgcctgtagtatgtatggatggggcgtttgtctctaactatattccgtgtaacgcaggcttgtggtcgcttcataaacaacaacgcggttaccaagatggcccaatcatccagtaaatcccctgagttgctggctcgatactgtgactccttgttgaagaaaaggtattaaatgaccctatgttttcttagtatgcctgtttaaaatctcagcttttatatgaggaattaaaacctacattacattttacatacattaaattggaatttttgtaccttatgagaaaaatgcttaaacataatcgtccttgccgttgaaaatctgcattccctcccactggctgtttttcaaacagaaatgtctcaatgtattgtgggactttggttattctccatccaagcactaaccaggccccaccctgttcgcttctgagatcagacaagatcgggcacgttcagtt

SEQ ID NO: 211882 - DNA, 79 bp, Homo sapiens; identical to SEQ ID NO: 201217
  chr7:148506412-148506491
  hypo

SEQ ID NO: 211883 - DNA, 89 bp, Homo sapiens; identical to SEQ ID NO: 201218
  chr7:148507424-148507513
  hypo

SEQ ID NO: 211884 - DNA, 71 bp, Homo sapiens; identical to SEQ ID NO: 201219
  chr7:148508741-148508812
  hypo

SEQ ID NO: 211885 - DNA, 184 bp, Homo sapiens; identical to SEQ ID NO: 201220
  chr7:148511050-148511234
  hypo

SEQ ID NO: 211886 - DNA, 107 bp, Homo sapiens; identical to SEQ ID NO: 201221
  chr7:148512014-148512121
  hypo

SEQ ID NO: 211887 - DNA, 34 bp, Homo sapiens; identical to SEQ ID NO: 201222
  chr7:148513818-148513852
  hypo

SEQ ID NO: 211888 - DNA, 121 bp, Homo sapiens; identical to SEQ ID NO: 201223
  chr7:148514301-148514422
  hypo

SEQ ID NO: 211889 - DNA, 76 bp, Homo sapiens; identical to SEQ ID NO: 201224
  chr7:148515086-148515162
  hypo

SEQ ID NO: 211890 - DNA, 200 bp, Homo sapiens; identical to SEQ ID NO: 201225
  chr7:148523536-148523736
  hypo

SEQ ID NO: 211891 - DNA, 119 bp, Homo sapiens; identical to SEQ ID NO: 201226
  chr7:148526816-148526935
  hypo

SEQ ID NO: 211892 - DNA, 225 bp, Homo sapiens
  chr7:148703454-148703679
  hypo
caggaagggttatcacgggctgggctgtgtggaactttccaccttcagcttgtgcggtcttcacgcaggaggtcctgagggctcacacttcacaacgactggagtccctcacagacatcgccctccaggggtgggcagagcaaggtcagccacctgcccaaggctgcgcagccagcaagtggtgggtgggcctgtgagcccaagggtttccgtggggatgggata

SEQ ID NO: 211893 - DNA, 127 bp, Homo sapiens
  chr7:148846224-148846351
  hypo
aaaaatttttgagaagttaaaaaataaatagatgaaattaattttaattatatatctaactcaatatatgcaaaatattatttcaacatgtcatcaatttatttatttatttattttttgaggtgga

SEQ ID NO: 211894 - DNA, 184 bp, Homo sapiens
  chr7:148851234-148851418
  hypo
gagaagaaactagccagctgtgaaaagacagttaccgagcttgggaaccagctggagggcaagtgggccgtgctgggaaccctgctgcaggagtacgggctgctgcagaggcggctggagaacttggagaacctgctgcgcaacaggaacttctggatcctgcggctccctccaggtattaagg

SEQ ID NO: 211895 - DNA, 84 bp, Homo sapiens
  chr7:148901648-148901732
  hypo
aagaggtgaagggcacataccgtcggccttggatttgcaaggagaggggcaagaaaggagcttgccggcgcctacctgagatca

SEQ ID NO: 211896 - DNA, 213 bp, Homo sapiens
  chr7:148921396-148921609
  hypo
ctcgggcctcatccgccaccagatgacgcaccgcggcgagcggccctacaagtgctcggagtgcgagaagacctacagccgtaaggagcacctgcagaaccaccagcggctgcacacgggcgagcggcctttccaatgtgcactgtgcggcaagagcttcatccgcaagcagaacctgctcaagcaccagcgcatccacacgggcgagcgccc

SEQ ID NO: 211897 - DNA, 45 bp, Homo sapiens
  chr7:148930559-148930604
  hypo
taaaaaaaatggaggatggtcgggcatggtggctcatgcctgtaa

SEQ ID NO: 211898 - DNA, 158 bp, Homo sapiens; identical to SEQ ID NO: 201228
  chr7:148936558-148936716
  hypo

SEQ ID NO: 211899 - DNA, 317 bp, Homo sapiens
  chr7:148984552-148984869
  hypo
acgtctcccccattccggagaatcctgaccttcctgtatttgggaatggctctgggctgctctccttctggtggctgacttgcgaacttgtgtctggttgcaggactggcattgcggactgacctccagggagaggcccagatctgatctgcagagatctcccttccggctatcgtggctgctgttcaggtggtggagaagaagatggaaccccaggctgcctggctacagagcctggagggatgcatgtggacagccaagaagaagctggctgactgcgagaaggtggctgtggagttcgggaaccagctggaggc

SEQ ID NO: 211900 - DNA, 32 bp, Homo sapiens
  chr7:149114320-149114352
  hypo
taagcaaatagatggcagggcgcagtggctca

SEQ ID NO: 211901 - DNA, 360 bp, Homo sapiens
  chr7:149171622-149171982
  hypo
gccggggtcttggcgcccgctgcatggttgcgctggtgcttgcggaggtggtccttgcggatgaagcttttgccgcagacggtgcaggtgaagggccgcacgcccgtgtgcgttcggtagtggtcgatgagcttggagcgttcggtgaagcgcttctcacactcggtgcaggggaagggccgctcgccggtgtgcagcatgcgatggcggatgaggtgcgcggggcgcgtgaagcaacggccgcactccccacaccgaagggcgctgccatcccgtgcgctgcccccaccgctgccgccaccgccgccgccactgccgctgccgccaccgcctgtgcccgggcccgacccgtcgggcgcc

SEQ ID NO: 211902 - DNA, 432 bp, Homo sapiens
  chr7:149420320-149420752
  hypo
gttgctttgcattgacgccaggcatgatgcatggggtgggcttgggctctggacagcatggtggaggggccggggcacaggtcttggagtcagacccggagaggctcctgatgccttgagcctaggctgttcccactcacagggccgcagtgagcttagctgcagtaatgtacttactgtacaactccattttcctcaaatgtaagttctgttcaggaccccagagctgtctcaaacagtgaccctgacagcccacttccttcaatttgtcctcagagtgatgccacttgtctgcctgcagggcgaattccatggcttccctctttgccctgtccggttctggcaggtgtgtggacccaggcactgggaagactcagcgagccactggaagagcctcatcttcagagttggccccacgcccttctaacttgt

SEQ ID NO: 211903 - DNA, 360 bp, Homo sapiens
  chr7:149462643-149463003
  hypo
accaagtgctgcttgtgcgtgaagctgcgtgcgcactgtgcgcactggtagggcctctcgcccgtatggatgcgctggtgccgaatcaagtgcgtcttcttgcgaaagcgcttctcgcattccgtgcaggggaagggccgctcgccggtgtgggtcttttggtgcgagcccaggtggatcttctggctgaagcgcttgccgcactccgcgcacgggtagggccgctcgcccgtgtgcgtgcgcaggtggcgggtcagatgggccttcttgctgaagcgcttgtcgcactcggagcacgggaaaggccgctcgccgcggtggctgcgctgatgcagtagcatgtgggcgcgctgcgtgaag

SEQ ID NO: 211904 - DNA, 136 bp, Homo sapiens
  chr7:150006590-150006726
  hypo
gctgcaactgcttgcgcctgctgtaagacaaaccccagccatgccttcagcacacaaaaacttcagaacaaccaaaccacagcctccagctactcctttaaatcctcctcatggaccttgattcaagtgccgcaaa

SEQ ID NO: 211905 - DNA, 120 bp, Homo sapiens
  chr7:150006786-150006906
  hypo
tgtgcgggaccccactggaaatcggactgtccaactaatatcacagccacttctagggcccctggagctctggatcaaagctctctggctgactgcttctcagatctcggctttgcggct

SEQ ID NO: 211906 - DNA, 43 bp, Homo sapiens
  chr7:150039378-150039421
  hypo
gtgggggagccttcgggtgtggcagaacggcatgatggaattc

SEQ ID NO: 211907 - DNA, 99 bp, Homo sapiens
  chr7:150069580-150069679
  hypo
cctggtggcgcactcgcgcgtgcactccggcgagcggcccttcgcctgcgaggagtgcggccgccgcttctcccagggcagccatctggcggcgcatcg

SEQ ID NO: 211908 - DNA, 114 bp, Homo sapiens
  chr7:150069820-150069934
  hypo
ccagaagtccaacctggtgtcgcaccggcgcatccacacgggcgagcggccctacgcctgtcccgactgcgaccgcagcttcagccagaagtccaacctcatcacccaccgcaa

SEQ ID NO: 211909 - DNA, 232 bp, Homo sapiens
  chr7:150098291-150098523
  hypo
agaaagatggtgtaggttctcggaaaatggttgttttttggcaagggacacgagcttcaagtcgtccggtaaggcagtcggcctcattgagagggtttggtgtcccactgcccagtcccggggagctgcctgacggagggtagactgcagtgaccagaggcagccgctcagccatgcaatagcacaggccgagggagagggcaggcccctcgtggacttggcagagagaaat

SEQ ID NO: 211910 - DNA, 181 bp, Homo sapiens
  chr7:150100654-150100835
  hypo
agtgttgatgtgctccgagtggaggcacgggtggggttggtcatcagcacctggggtgctggtgtcactgcatgagaactcaacatctgtcctatggactagtttctttgtcttcctagtattcccttcccgttgtctctgtttaaaatgccaatttccgtgggacgtggaactcctaaag

SEQ ID NO: 211911 - DNA, 154 bp, Homo sapiens
  chr7:150104947-150105101
  hypo
cgaggtgcaccagcgcacgcacaccggggagcggcccttcccctgccccgagtgcggccgctgcttcagcctcaagcagaacctgctcacgcaccagcgcatccacagcggcgagaagccgcaccagtgcgcgcagtgcggccgctgcttccgc

SEQ ID NO: 211912 - DNA, 53 bp, Homo sapiens
  chr7:150105548-150105601
  hypo
cttctctggcccatccggcctagagcaggtgagacctgcggggctggccagag

SEQ ID NO: 211913 - DNA, 552 bp, Homo sapiens; identical to SEQ ID NO: 201234
  chr7:150497095-150497647
  hypo

SEQ ID NO: 211914 - DNA, 34 bp, Homo sapiens; identical to SEQ ID NO: 201235
  chr7:150497885-150497919
  hypo

SEQ ID NO: 211915 - DNA, 874 bp, Homo sapiens; identical to SEQ ID NO: 201236
  chr7:150671457-150672331
  hypo

SEQ ID NO: 211916 - DNA, 93 bp, Homo sapiens; identical to SEQ ID NO: 201237
  chr7:150715525-150715618
  hypo

SEQ ID NO: 211917 - DNA, 246 bp, Homo sapiens
  chr7:150758720-150758966
  hypo
ggccttgactcctttctccctcatttttcttgcggcctttcccacctcctctctcctcctccctctactcagcctctcggcccttttcggcccccctcgcctcagtcctctcctgtctccttgttcttctcttttcttcctataaataactctcctctgtgctgtggctgccgctaagggccactctgaggcccttcatactccaggaggatccccagcagcgcagcctgcgcgtggtggctcctg

SEQ ID NO: 211918 - DNA, 54 bp, Homo sapiens
  chr7:150773442-150773496
  hypo
atgcctgtgtagccgccaccgagggacagccgagggaccgatggacgaggggac

SEQ ID NO: 211919 - DNA, 129 bp, Homo sapiens
  chr7:150774575-150774704
  hypo
ctctgctgcttcagggcccagttttatggtggccgagagctccttagctttggcgcttcatggtccctctggcttttccactctgctggtcccaggctggcccctccccttgccccaggctgccccatc

SEQ ID NO: 211920 - DNA, 43 bp, Homo sapiens
  chr7:150774857-150774900
  hypo
tgaggggtgcctgtggggaggcggggactggggctctgggctg

SEQ ID NO: 211921 - DNA, 61 bp, Homo sapiens
  chr7:150776689-150776750
  hypo
cacaggagggggccgtggccgagaccccaagagctggcccagacgacgaagcgccaccgag

SEQ ID NO: 211922 - DNA, 261 bp, Homo sapiens; identical to SEQ ID NO: 201240
  chr7:150784073-150784334
  hypo

SEQ ID NO: 211923 - DNA, 529 bp, Homo sapiens; identical to SEQ ID NO: 201241
  chr7:150784514-150785043
  hypo

SEQ ID NO: 211924 - DNA, 257 bp, Homo sapiens
  chr7:150811359-150811616
  hypo
tgacgtctcactcaggcttgtcatacttctgggcctcatgttcttggctcttctggctcttcctttgaagaatgagaaatggcccgcttttctccaaaatggggcccagtgtgtggtggactgaggactgttatttagttggcctgctcgtaatgacagctcctcacctacctgccggatcctaggaggcgccctgggctggaatttcctgttttcgagggctcccaggggctgccccagcaggccggctcccccgc

SEQ ID NO: 211925 - DNA, 314 bp, Homo sapiens
  chr7:150812866-150813180
  hypo
ggcgtctggggtcttcggcagtggccgaggaggacaggccggagggggagctctcgggtgcggcccaggaaaggaagaggagactcaccagagtcagagggctctgggctaggccagacacctttcctagttccctgtcggggcagcgcgctcgcctccggttgcccctgtgcatgaggttagggactgctgtggacctggtcgtcataactgctctttgacacaaacttgggacagtgcctctgggagccagggagggaagcagtgctgcccagctagagaggggttcccagagctagcccgagcacccatgt

SEQ ID NO: 211926 - DNA, 623 bp, Homo sapiens
  chr7:150813836-150814459
  hypo
gtgtgccaccctggccctgacggggcggctctgtcttccgcagactcgtttgtgaacagccaggagtggacgctgagccgctccgtaccggagcttaaagtggtgagtgtggcccatgggcagcaccggcggcctggagctgggggggcgaggctgggtgccgcgggcctgggccttgcttctccggcttctgtccccttctctgctcagcttggccctctctgccctctctcctccccttcagccctggcctttctccctcctgctgcttctttgcttttcctgctgggtcttctccctcgtgccctctgccctctgacccactcaccccttcctctcccgcagggcatagtggggaacctgtctagcgggaagtcagccctggtgcaccgctatctgacggggacctatgtccaggaggagtcccctgaaggtgagcgtcacaggcccagcctgggccctgaggccggccactcctccagctcctgcccacagggtctgggtggggggtctccagcccccttccagtcctcttccctcccgcatgggaagctgtagatttcttcttggcccctggattctttctccacactttggacctgactgcgcgctctgtcctaggg

SEQ ID NO: 211927 - DNA, 540 bp, Homo sapiens
  chr7:150816846-150817386
  hypo
cgagggtttgctgccctagtggggcagccctggcaaggtgacagtagatcctgctggcctccaggccaggtgaatgttccccccatatcatctgtaggggctagtggcccctctgctgcccatgagccccggccaggcccccattagcacagggattcccggcacccgcctggtgcccgtcccgcccctgacccggagctgccctcagcagccctctttgtccttaggccacgaatggcggcggcagcgccttcagcgactactcgtcctcagtcccctccacccccagcatcagccagcgggagctgcgcatcgagaccatcgctgcctcctccacccccacacccatccgaaagcagtccaagcggcgctccaacatcttcacggtacgtgactgccctcctcccccgcccagctgcctttgctgcacaggcagggctgagcgccgagctcccagccaggaggggcgtgggcagccccaagtcaggaagacggtacctgcagtctctccctcagatacacacggctcccgagggtcct

SEQ ID NO: 211928 - DNA, 35 bp, Homo sapiens
  chr7:150828563-150828598
  hypo
tctcctgagcagccgccaccgccaccatgctcccc

SEQ ID NO: 211929 - DNA, 33 bp, Homo sapiens; identical to SEQ ID NO: 201242
  chr7:150869804-150869837
  hypo

SEQ ID NO: 211930 - DNA, 389 bp, Homo sapiens; identical to SEQ ID NO: 201243
  chr7:151038574-151038963
  hypo

SEQ ID NO: 211931 - DNA, 34 bp, Homo sapiens
  chr7:151074643-151074677
  hypo
ctgggaagggtgtcccgaccgcttcctctccagc

SEQ ID NO: 211932 - DNA, 33 bp, Homo sapiens
  chr7:151134320-151134353
  hypo
accacccagcccaggcgtcgggggagggtcctc

SEQ ID NO: 211933 - DNA, 312 bp, Homo sapiens
  chr7:151165388-151165700
  hypo
cttgctgctcctttccctctcggtcagctcagactcagcaggccaccatggcgccactgtacttcaactcccttccctaccaactgtcgctggcacggtgcccgcggccacaccgtaaacgctgcccagggaaaacacacaccgctcactgctgacctcacacccatgaccaggaacctggcgcagacacttggtgctgcctagccacccgcctgcatccctggatctgggcactccccagagaaagcatccacgccttgtcccttctcctcaaatgttccccgtgcttacgctcagctgaaaaccttgttt

SEQ ID NO: 211934 - DNA, 36 bp, Homo sapiens
  chr7:151214439-151214475
  hypo
gcgaaactccgtctcggaaaaaaaaaaaaaaaaaaa

SEQ ID NO: 211935 - DNA, 304 bp, Homo sapiens
  chr7:151358568-151358872
  hypo
agagctgtagaaatcgtattagaatttcatctgtgtagttccttagaaagcttttcattgaaccacctgtttcaatttccattttttaaaaaaataaaatatacctctgtctgtaatcacgctacgatgagcagctgacattcttactcaggacttagaataataatgctttagagtcctgcacgaagcctccaaaagagtggaaaaaatacacaacccttcgaaacaggtttactcaagcacggtgagagaggctgggcggtcattgattaacagggtatgcgttccttctcaaagagatggc

SEQ ID NO: 211936 - DNA, 230 bp, Homo sapiens
  chr7:151411311-151411541
  hypo
atgcagttactcaccggcctaacttacgtttgacttctaagccttgaggaaaatgtgtgccaaggtatgggggaggcggcagggcttccgagagagccgtcctcccatcccagccctgccatcctcccacacgcacgctgccgtcctcccatccgcgccccgccgtgcctaggtggagaggcggcagggcttcccggagagccgtcctcccatccgcgacccgccgtcct

SEQ ID NO: 211937 - DNA, 156 bp, Homo sapiens
  chr7:151506370-151506526
  hypo
cccctaccccgagacgggtgcagaatcagcagcggggatcatccagagactctcgcagtccacggcaggtgtcggagtgggcctcattccagagttgtggtggccgctccacctggcgagcttcgaggggactccggcaggcgctcgctgtggggt

SEQ ID NO: 211938 - DNA, 480 bp, Homo sapiens; identical to SEQ ID NO: 201246
  chr7:151572849-151573329
  hypo

SEQ ID NO: 211939 - DNA, 214 bp, Homo sapiens
  chr7:151624665-151624879
  hypo
atcacctgaggtctgcgtaaggagaaggtggagctgggactgcagtctggcttggccagggctactccagaagtagtgacaagcacagaggctcacccaggaaggtgctggggtgctgctgtccatccggtgacactggataacatttgattctgagcccgtgtcacctccctggaactgtcccgacatgcaggagtcacgataaaccatactg

SEQ ID NO: 211940 - DNA, 86 bp, Homo sapiens
  chr7:151712356-151712442
  hypo
tggatctattccctccgttcccacctccagggaattgtcccacacctgaagcaaatagcttctccttgccccgtccccatgtgcaa

SEQ ID NO: 211941 - DNA, 107 bp, Homo sapiens
  chr7:151720362-151720469
  hypo
tggattaggtaccttgagagcgggttgttaataagtaacattgcccctttagccagtgcgcgcttcctcttccgattctctgccacgttatgatgtagcacaaagcc

SEQ ID NO: 211942 - DNA, 693 bp, Homo sapiens; identical to SEQ ID NO: 201247
  chr7:151722451-151723144
  hypo

SEQ ID NO: 211943 - DNA, 38 bp, Homo sapiens; identical to SEQ ID NO: 201248
  chr7:151723206-151723244
  hypo

SEQ ID NO: 211944 - DNA, 236 bp, Homo sapiens
  chr7:151791344-151791580
  hypo
tgggtgcctttttacatctgcgacctggacagttttgctttttgtttatttcaacttcagtgaagtgactcagccacttaagaatgtgcccgtcaaggggtctgggccccacggaccatctccaaaaaaattctatccccgtttcactcgaggcccaagtcgagtgctcgagccacagttcaaagcaaacaaaattgacgatgtgatagacagtcgtgttgaagatccagaagaag

SEQ ID NO: 211945 - DNA, 183 bp, Homo sapiens
  chr7:151802391-151802574
  hypo
ataagaaatacaaagcgtgaggggttgattcgagggagaatgattggcgcggcccacgcgacaggtatcacttctcgttagctttgctctacaggtgttggatgacaagggctcgagcctcagcgcctgtcctgattctgcaaagtctatgaagagtagtgtttcaaacggacattgccagca

SEQ ID NO: 211946 - DNA, 280 bp, Homo sapiens
  chr7:151812521-151812801
  hypo
tagtatcctgtgtgagtatgcgtgctcatacaaaaagcacttctgctgtgtactgaagtacggtgcttggttcaaggaaaaacacttgtgcagttgtttgagttatgggcggagctagcggctgctctccagaacactctttttatatgttaagactgactcacaaaccatagttactcgtatttgggtaaaacgaactaaataatgaaaatgaaaacaactgacagtatttgttgcaaatgacaaaattcaagccctcaagtgaaaattagaattttga

SEQ ID NO: 211947 - DNA, 114 bp, Homo sapiens
  chr7:151874697-151874811
  hypo
cctggggaggtcgtcgcatggggtctgtgtgtctagggcccggaaagtctggccggggaatgaagtttccatgtctcagattagaagatgcctctacaacgctgccaggtggag

SEQ ID NO: 211948 - DNA, 360 bp, Homo sapiens
  chr7:152273143-152273503
  hypo
aaaaaaggagaagaatcgtacttatgttcagctgcaatttactcagcagagtgattaatccattaattattccattcagtgaactattcgaaagcatttgcgagtgtttaccatatgctctcttattgttggagggtcggactattcgaaagcatttgcgagtgtttaccatacgccctcgtatcgttggagggtcggagcagccgggagttgggaggcctgtgatgaaagagatctgaacagctgcagagacacgtttgcaagtgggcctggggcccacctcaggactgggggccggtcgggcaccctgcctctcacccccaaacaacgcaattctttttttgtttttttgtttttttg

SEQ ID NO: 211949 - DNA, 75 bp, Homo sapiens
  chr7:152374303-152374378
  hypo
ggcctcttctctacgtagggctgcgggcccgtatctgaaacattaacaaccatcaggaatgaggttggtctggtt

SEQ ID NO: 211950 - DNA, 47 bp, Homo sapiens
  chr7:152374397-152374444
  hypo
tgccccacttacttttctttttttctttttttttttttttttggaga

SEQ ID NO: 211951 - DNA, 42 bp, Homo sapiens
  chr7:152455925-152455967
  hypo
tagaaaaatttaggccgtgttaggtataataattccaactaa

SEQ ID NO: 211952 - DNA, 78 bp, Homo sapiens
  chr7:152543573-152543651
  hypo
cccgggctgtagtctgtagtgagctctagtgccgggctgtagtgtgtagtgagccccagcgcccgggctgcagtctgt

SEQ ID NO: 211953 - DNA, 180 bp, Homo sapiens
  chr7:152551646-152551826
  hypo
tgaacgcgtcgttcgatggtgtcacgttggggaacaagtgtccttcagaacccagagaaggccgccgttctgtaaatagcgacgtcggtgttgctgcccagcagcgtgcttgcattgccggtgcatgaggcgcggcgcgggcccttcagtaaaagccatttatccgtgtgccgaccgctg

SEQ ID NO: 211954 - DNA, 173 bp, Homo sapiens
  chr7:152555646-152555819
  hypo
gcaggcaggtgtagacggggtttctctgctgctaacatgagggaccacggactccaggtagggtgggagcagagggagatgagagattgggaggaatggaggcgtctgaggactggcggccctgggcttcaaggttaggaggttgtggtcctgaagaacgatactgattaaga

SEQ ID NO: 211955 - DNA, 39 bp, Homo sapiens
  chr7:152647711-152647750
  hypo
aaaacctccaagggggtgggcgtggtggctcatgcctgt

SEQ ID NO: 211956 - DNA, 48 bp, Homo sapiens
  chr7:154542023-154542071
  hypo
agccaccctgtgtcctgcaagagcccaggctcagagcgtgtgcaccgt

SEQ ID NO: 211957 - DNA, 132 bp, Homo sapiens
  chr7:154542290-154542422
  hypo
agagctgaagggtggcgggggtcggcttcctcctctctgcctcttcccttccgccacgcttcctacccacaccagccagtctccagtaacagatatagaatgccttcatttggaacacggagagacaagcgt

SEQ ID NO: 211958 - DNA, 152 bp, Homo sapiens
  chr7:155017976-155018128
  hypo
cccttctcccatcacgggccatctccactgagccatgtgctaagcatcagctcctgggagccacggtgtcccctcacacctgcagtgaggactgagaaagctgcagatgggaggcgaggcagcgacacagccggctggcactaggcatgggg

SEQ ID NO: 211959 - DNA, 359 bp, Homo sapiens
  chr7:155130273-155130632
  hypo
cagagctgcaaaccaaggaacgccaagcaatgtggcaaggccagcagccgggagagaggcgcgtgcagggaggccagcggccgggacagaggcacatgtaggagggccggtggccaggacagagactcatttacggaggccagaggcgggcacagaggagcgtgcagggaggccagcggctgggacagaggcacatttacggaggccagaggcaggcacagaggcacgtgcagggaggccagcggccaagacagaggcgcatgcaggaaggccagcggccgggacagaggcacatttacggaggccagaggcaggcactaaggcgcgtacagggaggccagcggccgggacagaggcac

SEQ ID NO: 211960 - DNA, 51 bp, Homo sapiens
  chr7:155130794-155130845
  hypo
cacatttacggaggccagaggcaggcacagaggcgtgtgcagggaggccaa

SEQ ID NO: 211961 - DNA, 35 bp, Homo sapiens; identical to SEQ ID NO: 201251
  chr7:155170943-155170978
  hypo

SEQ ID NO: 211962 - DNA, 79 bp, Homo sapiens
  chr7:155352613-155352692
  hypo
tggtcagagcagcctgggtccgtcagagcagcagcgggcaacccacagccccacagccggcaggtgcagggcctcccac

SEQ ID NO: 211963 - DNA, 209 bp, Homo sapiens
  chr7:155385399-155385608
  hypo
ggagtgcttttctcccgctcaattggaattccatcccacccatgacactggcctccctctctgcgggccctggttttccaaactgatagctcccttcctgccacccctacaacccacactacaagagaagctaccaggaacacgcttgcgctcaggtttgttaagaacgacttcactggttctccagtgaggcccgggggatggggtat

SEQ ID NO: 211964 - DNA, 168 bp, Homo sapiens
  chr7:155502689-155502857
  hypo
tagatggtctccttccgtcttctttaccctcgttcatctcacactgctgtgaatgatcattttcctaccaaagagatcattcgtgatcccttattatacgtgttgtctctgtggcatagtaatggatcatttacttggaatttagaagccctccgtaatttggcatca

SEQ ID NO: 211965 - DNA, 177 bp, Homo sapiens
  chr7:155530782-155530959
  hypo
ctttttctggaacagcgaagtccccctccaccaccaccgcctcctacccttcttaacagtagccatcctgttcctactcagagtcctctaccattcactcagccaggaccagcatttaatcagcaaggacagcagccagtgttcccaagagagcggcccgtacgaccagccttgcag

SEQ ID NO: 211966 - DNA, 195 bp, Homo sapiens
  chr7:155532479-155532674
  hypo
acagcaccagcctccgcaccagcccccgcaccagcccccgccccagcaccagcccccaccccagcacccaccacagcacccgccgcagcaccagcaccaccaccaccaccaccacctgtccgtcccgccccctcctttgatgccgatgtctcagccacagttccggcctcacgtacagaccgctcagcctcaggc

SEQ ID NO: 211967 - DNA, 126 bp, Homo sapiens
  chr7:155559943-155560069
  hypo
tgtaggctgacccagcgaagaagctacctgcttgttcagtccgatttctggcctccccgtcaggtgccacctgtggtgcccattgttgccattgccacgcaccgtgcgtcccgtggtgggatctgg

SEQ ID NO: 211968 - DNA, 196 bp, Homo sapiens
  chr7:155573687-155573883
  hypo
ggagctcttgtgcttgagttcagtgttagtggtagcgtggctcactccacttggaggtggcggccgtctgaccgtgtgttactgctttgccgacggggcctcccggccctgatgcgtgtacactctgcgggctgcaccgggtggctctggttgggggcgaagctgtgttgactgggagagcgttggaaattgagac

SEQ ID NO: 211969 - DNA, 31 bp, Homo sapiens
  chr7:155581211-155581242
  hypo
aaaaaaaaaatccaaccaaaaccacacccag

SEQ ID NO: 211970 - DNA, 238 bp, Homo sapiens
  chr7:155581980-155582218
  hypo
tccaacaggcctttctggggcctgtcctgcttgccttgcggcagccaagggatataatgggtgccggccagcctcccctcccatgaccccgaggaagtccctccagcccctccctgagtctgctcctggcagaatccctctgtaagtggatgcggggtccagagatgccaccggctgggccagaccccatgaggagaagctgtgccggagcctgcaggactgggtccaggtcagggct

SEQ ID NO: 211971 - DNA, 623 bp, Homo sapiens
  chr7:155623862-155624485
  hypo
atgcacccgaggaggtgaggctctgcggaccgggtgccctgtgagtgacaggggagaggcccctgaggtttgcacagtgcctgtcacttctcaaagcacctccttcgttctggcaatttagtgagggaggctgggcagccggggctgtccattttatagaggaggacaccaagcctcagggagggagagggaagccggtggagccgggcagaagcctgtggagctgggtagaggccggcgggtttcccagcagcggtcttctgcatcttctggctgagtcctccgctgtcaggagaccccggcctgggccaggaggtccgattctgggatgcgaacgtggtggggctgttgccatagataccgatgtggtcaccagcctgaaacccttgagccacggagagatcagacggtggtccccactcctcagcctggagcctggcagagacgctcaaggaagagggtgggctgaccgcgcacgcctctcctttcttcatatcctgcgcggctcgggcgctgtgcaggaggcctgtgctcagcgaggagagagacagagagtgcagtgggaggagcgcggggtcggggggctctgcttcccacggtgcgcctgggagcctctttgcctc

SEQ ID NO: 211972 - DNA, 627 bp, Homo sapiens
  chr7:155679095-155679722
  hypo
gggtgagaaacatgggtaagcgtgtgcagacgtggagagggcgtggggtgagggacgcccacccctgtgggtgagaaaatgggcaagcatgcgcagacgtggagagggtgtgggggagcagaatgtggttttacgggtgcgatcacagggaggacagactggaatggaaggcttagcccggaggtggtcctgttcacctgagcgagagggcgtctgctggctcctttccctgacaaggccaactcggagggcaagctgggagcctggggtggggctggcggggtgaaggggctcagagggacgcctgcgttcttcatgatcttcccatccaagacttgctgcacgtcggcttcttccaggctccacatcacgggcagacccatgcagctccgctgagggcgtgcgcctggtatgggtgccctgccgccacgtacagctgagggaggccgtgggagcctccctggactcatctctgcctctgtttcttccccgtgagacatgggagctgagacctgccgactggctgtgctcctgcagggattggaaagggcttaacccagattggcagagagcgctgagtgtgactccagcaccccgggcgtcctgattttgcgaagcactttggag

SEQ ID NO: 211973 - DNA, 278 bp, Homo sapiens
  chr7:155828028-155828306
  hypo
gatgtgtgcctccacggtgcaccagcctgcatcacacagtgatgtgtggcttcatggtacgccagcatgcatcacacactgatgtgtgcctccaaggtgcacctgcctgcattacacactgatgtgtgcctccacggttcacccgcctgcatcacacactgatgtgtgcctccacggtgcacccgcctgcatcacgcactgatgtgtgcctccacggtgcaccgcctgcattacacactgatgtgtgcctccacggtgcacccgcctgcatcacgcac

SEQ ID NO: 211974 - DNA, 97 bp, Homo sapiens
  chr7:155828366-155828463
  hypo
cacccgcctgcatcacacactgatgtgtgcctccacggtgcacccgcctgcattacacactgatgtgtgcctccacggtgcacccgcctgcattaca

SEQ ID NO: 211975 - DNA, 99 bp, Homo sapiens
  chr7:155898307-155898406
  hypo
cctgtgagggctccggactttgtgccgttctccgcacccctcaggcccggtggagtgcgtgacccctacgccgggcccgcatcattttggctccacagc

SEQ ID NO: 211976 - DNA, 206 bp, Homo sapiens
  chr7:155900805-155901011
  hypo
ctgtcatcaacttcaacctgcggcgagacctcagccaacaccacatggagcggaggaacggcgagcaagtgcagcctgaaatcctgagcatgaaacaggatgcgtgtgtacaccggttgcagagcggcacctgaagctgtgctgacctgccctagcatagatgcccgtgaggcacagctgcaaccggggctgagtttgcagtcatc

SEQ ID NO: 211977 - DNA, 288 bp, Homo sapiens
  chr7:155913343-155913631
  hypo
ggagggagatacagagatggcgaggcgcttcttcacgtgtcccacctgctctgatctgctccccgggagatacagagatggcgaggcgcttcttcacgtgtcccacctgctctgatctgctccccgggagatgcagagatggcgaggcgcttcttcacgtgtcccacttgcactgttctgctccccggctgctcactctccccctgatgtgacgcgttgtcagacatgaccaaatgccacggttacttgggagacaacagcagaaacggggctggattcagaataaaa

SEQ ID NO: 211978 - DNA, 329 bp, Homo sapiens
  chr7:155916055-155916384
  hypo
gaagccaccccagaaggacccgccatctccctccgcctcccaggagtggtactgtggaaactgacggcctcaggagccatggcaaccaacctccgggtcacatccatccagatgtctcccacagggaaacgggtgtcacacggagcaccaggagagcatcaggtccctgtccgccgagctcacacgcagctgttgcgtggagaggggtccgcgtgttgcccgccgagctcacacgcagccgttgcgtggagaggggtccgcgtgttgtcctccgagctcacacgcagccgttgctcgtcagcgctgccgcctggctgcacacaccctct

SEQ ID NO: 211979 - DNA, 109 bp, Homo sapiens
  chr7:155920258-155920367
  hypo
cgaattcctggcaccgggaacttggcctcgccccttattcatcaagtccaggcacgagtcactttctgctcaggtttggcctttaagattacgcactccgtgcaccctg

SEQ ID NO: 211980 - DNA, 286 bp, Homo sapiens
  chr7:155935866-155936152
  hypo
gagctgcatgattttcagagcgcaccttctagaattttatcattcaatggaccgacttgctcgcgaccacagacccggttagtggaagagcggatataaaatcccgagcatgctgggcctggccggcctccgtctgcgcttccgtgctcctctcctcattgcgtcgtcccgaggtgaccaccccgtgccctggctgccctgcggggatgtgagcggcaggccccggcagccctgcttgggtaccttgccttgcagtgaggacctcggaggctcaggaagggggctg

SEQ ID NO: 211981 - DNA, 148 bp, Homo sapiens
  chr7:155948645-155948793
  hypo
gtgtagacgtagaacaagtggggatgtcacaggtgtggacacggtgcaggtgtaggcgtaggacaagtgagaacctcacaggtgtgggtatagacatagtccaggtgtggacacagtgcagatgtagacatggcgcaggtgtagaccc

SEQ ID NO: 211982 - DNA, 40 bp, Homo sapiens
  chr7:156012928-156012968
  hypo
agtgtgtgaacatggtgagccgcaggctgtgtgctgtctc

SEQ ID NO: 211983 - DNA, 72 bp, Homo sapiens
  chr7:156013006-156013078
  hypo
gtgtgtgtctccagagcgtgtgaacacagtgagcaggcattcggggtgagcgctctggggtgttgtgaagcc

SEQ ID NO: 211984 - DNA, 213 bp, Homo sapiens
  chr7:156371415-156371628
  hypo
ggctgacccacggccacccgagtgaccttggagtcactcgccctctctgtgcctcaggctctccacctgcaagctgggtacacatctcatccatggtgactacacggtatgacacacacaaagtgcctaaaacagcgctggacccttcgcttctgtgctgaaggggcacggagcgctgagggggccgaggacatacccgcgctggccgccacg

SEQ ID NO: 211985 - DNA, 132 bp, Homo sapiens
  chr7:156435906-156436038
  hypo
tgtccagtatcttgcgcagcaaagcggtagagttcaattggaactcaagttggtctgtccccatattctgtacttctgtgttctggacagactgaagttagccagtgttcctcttgcgttccagtttcttca

SEQ ID NO: 211986 - DNA, 120 bp, Homo sapiens
  chr7:156733810-156733930
  hypo
gcgactgggtgacgaggcgcgattgggtgacgaggagcacgctgggtgaagaggtgtgcgctgggtgacgaggtgtcattgggtgacgaggcgcgaatgggtgacgaggcgcgattgggt

SEQ ID NO: 211987 - DNA, 37 bp, Homo sapiens
  chr7:156733990-156734027
  hypo
aggcgcaaatgggtgacgaggcgcgattgggtgacga

SEQ ID NO: 211988 - DNA, 32 bp, Homo sapiens
  chr7:156734692-156734724
  hypo
gcgaatgggtgacgaggcgcgattgggtgacg

SEQ ID NO: 211989 - DNA, 123 bp, Homo sapiens
  chr7:156760916-156761039
  hypo
cgcccaggcattgcgctcatcctggaacagcacagatgctaccaccgatgagcgggagaggcgtggcaggagcacaccctcaggcgtagagctttagagatgccccccgccctgcccctccgg

SEQ ID NO: 211990 - DNA, 249 bp, Homo sapiens; identical to SEQ ID NO: 201268
  chr7:156802164-156802413
  hypo

SEQ ID NO: 211991 - DNA, 780 bp, Homo sapiens; identical to SEQ ID NO: 201269
  chr7:156802736-156803516
  hypo

SEQ ID NO: 211992 - DNA, 86 bp, Homo sapiens
  chr7:156937634-156937720
  hypo
tatctacccttacagcgttatacagaagagtgtcattgccctagaaatcctcattgctggccaggtgtggtggctaatgcctgtaa

SEQ ID NO: 211993 - DNA, 156 bp, Homo sapiens
  chr7:156974867-156975023
  hypo
tttcatcattccggcgcttgcagatgcgcagaccgttttcccttacgagccctttctgaatgcactgttgttaatagagagtagatgttcaagaaagagtggtggagcaccctggcttttctatttcgttttaactgttggcgaaaattatttggg

SEQ ID NO: 211994 - DNA, 481 bp, Homo sapiens
  chr7:157052686-157053167
  hypo
tcaatcatcgacgccgttatgttctggaagtaatgaataataaagacgtataaacttaaacgtgttagtgaataccatcactcaatgatatcagtagaaatgataatcttccaaattgttggagagaaaaaataaccatgcaaataaaacaggacaaacagaaccaactctgtttaccagatatggggggtgggggtgggaagtaacattcagaatcgtaaaatagaaaacatagaatgagagaagcctgaatgttacaacagtgagtgcggagaaactgacgtaatgaaagaaaaagactttgagacagggccaggaaaacgctgccgcctacaagcaacacacctaaacggagtgacccagaagggtttagtggcacgtccaggttcgtgtgtgaagaaatagatgggtccccttcagagtttgaagcatgacccatgtgaccagataggagaatctctcgagcgcagggaaagctggg

SEQ ID NO: 211995 - DNA, 120 bp, Homo sapiens
  chr7:157084099-157084219
  hypo
gggggtgaggccagtggagggcaggggaggaggagggcaatttcgctttggaaatccactccggggggccttggccggaagctggactgccgcggaggacactgcgcccctgctctgcag

SEQ ID NO: 211996 - DNA, 377 bp, Homo sapiens
  chr7:157084622-157084999
  hypo
ctggcgtcacatagcacagcaatgccagcagcagcgcagtctcaggctctccccgccccgatgattctccactcccaacataagggtcatgtggtctggagggacctttggcccagctacaggggaccaactcagggagacccctccttggctccgtgtgggtcaagaaggaaaggatggattcctcgtgtccatgtagaggcagagagcgcttccaaaaagacagatgagtgaccattgcctcggctgcctgggccctgaagggctcccctgtcctgctgactgttctgttctcaaggacctcggagaaatcgtgtcgcagtttaaggtcccttccttgctgccacccagacttctccttcccaaacctttagtga

SEQ ID NO: 211997 - DNA, 171 bp, Homo sapiens
  chr7:157086147-157086318
  hypo
ggagcagcgctgtgcacgttccactcacctgaacggcatcgtctgagtcgcgtttgataaaattcgtaggaggccactggtctggcctgagctcctgcaggaggcctggcagaacagaccaaaacgcagccactcgtgctagagctccacgtcatcaagccaaaactaact

SEQ ID NO: 211998 - DNA, 136 bp, Homo sapiens
  chr7:157106437-157106573
  hypo
tctcgtgaactgccccgagttgtacgtgccctaaagtgaggaaagcatctcgccgagccggtccggagaggcaggctatgtgcctgtgtccactgcctcctgcctccagtaagcacacatcgtgtgtccatccagc

SEQ ID NO: 211999 - DNA, 108 bp, Homo sapiens
  chr7:157110670-157110778
  hypo
tgattattttttcaaattttctgtaggtttgaaaaatgaaatcagaaacggggacagtgttttgtgttttgtgttaaagggacggtcagctggcgcatgggacctctg

SEQ ID NO: 212000 - DNA, 229 bp, Homo sapiens
  chr7:157263471-157263700
  hypo
gggcatgttgctgaggtgctgggagctgggcctgacacttctgtgttttattgaatctcccaacatccaacatcccatttccatttaacagatgaggaaatgaaaacacagagaggagaaggcactcgcctgaggtaccctgccagacgctggggacgggctcacacgcagcggcccaaagcctgctgcctctcggagcagcgggggtctgggacggatattgaggcac

SEQ ID NO: 212001 - DNA, 237 bp, Homo sapiens
  chr7:157334627-157334864
  hypo
tgcctttggtagtgtggccacgcggcctcttagtgtacgtgttagaacctattattaaaggagtcaactgagcctggcggccacctcagggtgggacccggggagatgtgtctgcctgcgccccgtctctctcccctctgcactgccagagggcacctttctgctcctcgaaattacgtgggagctgcccctgtgggggcaggggctcaggtcgggctgtgccgggaaggtccgcaa

SEQ ID NO: 212002 - DNA, 350 bp, Homo sapiens
  chr7:157336680-157337030
  hypo
aggtggagagagatggagagcggtggagagagacagagagaggtggagagagacggagagaggtggagagagacggagagaggtggagagagacggagagaggtgaagagaggcggagagaggtggagagagatggagagaggcggagagaggcggagagagacggagagaggtggagagagacggagagaggtggagagagatggagagctacggaaatgaacagtttcaatggcacgggaggccttgggagaagtgggctgcgggcctggagctgatgtgtgagcgtggactgcgctacgcgtgacagaatccgtgtctgtcactccggtgctgtgctgggttgggaa

SEQ ID NO: 212003 - DNA, 149 bp, Homo sapiens
  chr7:157340247-157340396
  hypo
gtcacctcctctctcgacagcctcgcaacacatgccgaatgctgttgtgaacaagcagaaggaaagacagacatgtgcacagtcccagcttctccccgcgggacactgagtaaccacacagggaaaaatcatcacgcagccacgcagaa

SEQ ID NO: 212004 - DNA, 310 bp, Homo sapiens
  chr7:157340426-157340736
  hypo
agatgtgccgctccctcgtgagggacagtcctgccccctgccctgaccatgggggacgtgggacacgcctagacaagagacgttccacaaagagcaaggccgctggcgctctagaagacctcacagccgtgaagcgtcccggacagcagaggaaccatgatgcccctcgcgtggccgccctgggcgtgtcctgctccaggggaagctccctgggggggcgcgtagggcatcgctgggcctgttggtcagtggtttgcatcggtgctgacttcctgggtttggtcactgcgctgtggttatgtgaggtgtt

SEQ ID NO: 212005 - DNA, 161 bp, Homo sapiens
  chr7:157346267-157346428
  hypo
agggaaggagaaagacttgccgggccatccccagacaacatggggagaaccgggcggaaatacaaaatgacacgggagcgtgcctccgagtcgcgctgagcccgagaccaaaactgaagagcggaggaaacggagttaacgcttaaaaagtgtgcagcacc

SEQ ID NO: 212006 - DNA, 419 bp, Homo sapiens
  chr7:157347378-157347797
  hypo
aagcctgcaaacagtcgaggagtcagcgcacacacaaagaaaatccagatggaaggaaagaaaggaaccttaacgatgtctaccggggacagagcgtggggtccacggagaagtcccaggcgttttccacctaagaagcatcatggtgattcaaacaccagggaaatgaatggactcagtggagccactttctgctacttgaccaggtttaattcgagttgtccatgtcgggaatctacagggaagtgacgcaggctgccatcttgctcagcaccccagtgtggcgggcgccccagtgtggcgggcgtcccagtgtggtgagcaccggccaagtcagtttgggttgggctgcaccctcgtgcctgggacacccaggaagacccacctctctcgtgttagtggaccagggaggcagccac

SEQ ID NO: 212007 - DNA, 171 bp, Homo sapiens
  chr7:157370299-157370470
  hypo
ggttttcttaaaaacggaccccacttaaaggcttgttatatgggaccgggaccacgctgtgaggcgaatgttttttctactctgttatcatttggatttagaaaaatctaaaagataaaaaccacaccacactcccagggtctggttcatgagcacacagccgtgtgaacc

SEQ ID NO: 212008 - DNA, 137 bp, Homo sapiens
  chr7:157370789-157370926
  hypo
gtgtcagcatgacgatcaccacgcagccgctctcccacaccatctgcggacaaagaaggcccgtggccgcggtgtgactgtctcatcaccgcgtgacatgtgtaattactgcactcggaagcacagtccaaatttat

SEQ ID NO: 212009 - DNA, 239 bp, Homo sapiens
  chr7:157387164-157387403
  hypo
cctccctgcctggattctgccgcatgggtgacgcgtcgcttcccaccttcgtccccagctcgactctccttaggagctcctctctgccaggctcggggttggctggtgtgcccgacacgcggccggtgcctgtgctcctgcggtaactcacggccacgttccaggttccagaacccattcctattcagctttgtcacgtggctggtgaggggagacccgggggcagctggagaaggaag

SEQ ID NO: 212010 - DNA, 280 bp, Homo sapiens
  chr7:157402339-157402619
  hypo
gggtaaactgttcagtgttcggagaatgcaggatgataacatacaactcacagcactgttgtggtaaatggcacgcagcaagcaatgaggagcaaggctgagatgacggtggacacgcacccaactgcgcaggtcagccaagctggcaaagcgtgttcttgctgccccgtggtggcagaacatatggagcgatttttcatagatgccaacagaagagacacatcccacaatttcttgttgattattactatggcaaagagccttgggagatggcccagct

SEQ ID NO: 212011 - DNA, 45 bp, Homo sapiens
  chr7:157402654-157402699
  hypo
tcatgatctagaacctcccgtgcccaccccactgcatctgaggaa

SEQ ID NO: 212012 - DNA, 204 bp, Homo sapiens
  chr7:157403100-157403304
  hypo
ggagaggtggagccggtgtcttgctcctagagggagtcctgactccagcagagaacatgttccgggatgtgctccacagttggcaccagcacccacaagctcctgctccgagtttatggtgtccatcgaggtctgagggctgcaaaggcacatcccggggctgctggccgtcagcaagggccgtcagtgctgcttagggatccc

SEQ ID NO: 212013 - DNA, 113 bp, Homo sapiens
  chr7:157408472-157408585
  hypo
aaggctcgattctcctgttaaacttgactgtcaccaacggggggtggggggtgcgcgaggccctgggctccaccgaagaccttaaggaaaagactctggatgttagtgggttc

SEQ ID NO: 212014 - DNA, 115 bp, Homo sapiens
  chr7:157408760-157408875
  hypo
ctgccaccccgaaggccaggctcgccccacactgtgagaccctccccacacgaagattctgtaagcggaatcggaaggaggatgtgagaaggacgggtagccatgccacaccagg

SEQ ID NO: 212015 - DNA, 193 bp, Homo sapiens
  chr7:157414207-157414400
  hypo
gggaaacacagggtcaggagcgcacctaggtggtgagcccagaccggcagatgcacaaaaggcagcggaggcctttgcactcgccgcgtgggccatgcccaccttgctcacgagcctgggccatggtgcgacgttgtgctacggtgcacaatgcatatcataccatgcaaccgttaagtgaaatatgtgcatt

SEQ ID NO: 212016 - DNA, 40 bp, Homo sapiens
  chr7:157448363-157448403
  hypo
gtcacccaccaggacgacgcctacggcctggagatccagg

SEQ ID NO: 212017 - DNA, 54 bp, Homo sapiens
  chr7:157448526-157448580
  hypo
aggccgctgaagccgcgtcgccgtgagcctctggccggcgccaccaggaaggct

SEQ ID NO: 212018 - DNA, 216 bp, Homo sapiens
  chr7:157448958-157449174
  hypo
ggtcagcgggcgcagatgctgggtgttgcaggggccgaggaaggagggccctggtgtttgtgtggcagggagtgcaaagactgggcttaccaggatcatgtggccggtggagatgtccatgttggactgcacaggctcctcggaccaggatgaggcgctgctgcgtgcggaggggctggggatcggcccgtcgctgaactgggatgagacgctgct

SEQ ID NO: 212019 - DNA, 50 bp, Homo sapiens
  chr7:157449405-157449455
  hypo
aacgcaccccaaagcacgcgcccagcacggtgacccgagaagacttcagg

SEQ ID NO: 212020 - DNA, 50 bp, Homo sapiens
  chr7:157464610-157464660
  hypo
tttctaaaagtctacgctgtaccccaagaaggggacgggtggggcagcag

SEQ ID NO: 212021 - DNA, 436 bp, Homo sapiens
  chr7:157467118-157467554
  hypo
tgcaattgcttttcccgaagctttctcctcttgtaacacccagctcctgcatgccgtggcggctccagccatcattcctcatcccaccaccccgcgcagcgtcttgcctccttttatgccggtgtacgtgttgtgttaagagctgggctttgccatttttgacaggctaatgcatttcaccacagataatgccattcaccacagaggcgcattctctctcgtgcccatcaaggcagaggctgagaagaaggtctgctttacagcaacggcctgaggaccctcggccccaaggtgaggccccgcgcaggtacctctgtacacgcctgtggagtcccaccctgtcgtgtgcacgaggctgtcacctggagattccggccctgccgggcgtctcctcccacgccgagctcctcctgccgggggggtctgcacagttctg

SEQ ID NO: 212022 - DNA, 325 bp, Homo sapiens
  chr7:157510158-157510483
  hypo
ctaagcctgcagtgagtgtccgagcctgcaattgaccgcggaagccagtgccctccctagttggcaacgttgttcagctgagctacagagaaagagctcggaggtctatggactccttcatggaaatcgctcccttgcgtctcctcatgtggacacagctccacgcctcacctctcaggccaggcagcggccaacccagcctcttcaccaggtatgggcaccggctgctccttgctgcaggaccgctggctggggtggccggggcacgcagcaggcacatcccgacctgcgggccagcacctgcgccccatccctgttacacctg

SEQ ID NO: 212023 - DNA, 136 bp, Homo sapiens
  chr7:157511495-157511631
  hypo
cactcttggtttctcagctgccgcaatcggtccttccagtgtccgacctctggggccctcagacccccaaacccaccttgtcgctgtggcctctccgcctcctgcaggtggcagcgctactgtagcctgccatgcc

SEQ ID NO: 212024 - DNA, 436 bp, Homo sapiens
  chr7:157513000-157513436
  hypo
ggtttctcggctgccgcaatcggtcattccaatgtccgacctctggggccctcagacccccaaacccaccttgtcactctggcttctccgcctcctgcagctcctgctctgtgtttgggaacgcgtgcggcccacaggacaaagccttgttgcacacccgggtcaagggcaaatcccagctgcacagccgggtgatccagcggccgaccctgcttccctgcgtaggaggcctgagccaaggacactgcggccccggctgcaccgatgcatgggtgtgcacgcggggaccgagggagtcacgtgaatcatgtggcttccacgagctacctcttcccacaccaggagcaggtgccctcgtctccatcaagcgctttctggggagaaactccttcaaggataacggcaaatggtgagcgtgcctcactctttataatag

SEQ ID NO: 212025 - DNA, 165 bp, Homo sapiens
  chr7:157544399-157544564
  hypo
acttaatcaaggctgatggagccgcgcgcacagaatcccaactgcccgcaccctttgtttcatgttcaccaagaccgaggggaccattcctacgggatgaggaaacacatctaacacaggccttctaaagagagaggagggagggagggagggatggaaaggggg

SEQ ID NO: 212026 - DNA, 342 bp, Homo sapiens
  chr7:157549923-157550265
  hypo
ggtgaaggctgagtctgcaccgtgcaggcagagaccgtcgaggaacccacagcagaagtggcccacggaggaggagcactgagccgcctcctatggcagcgacacagaagccaggcctggaaggcagagcgggagagcagagagacatgctccacgccgcaggcccagctcaccctccgactgaggcaggagtgctggagctctcggcggccggtggggacaaggaggaccccggcaggcgcgggcagggccggggcaactgggcaggaccccagggaactttggatacgggcagaggaaggtcttccagtcggggaaggcgggaggtgttaagatgcaagc

SEQ ID NO: 212027 - DNA, 155 bp, Homo sapiens
  chr7:157567209-157567364
  hypo
gtaagccccccatctctgcacgcagttcataatctaggttgtgagaccacacaccggctcatgtgcacaagacagtgtgcgtggagggtgacagtgtcggcaaaagtgggctcagggctcagagctgtaactgcggttaaggggttaggaagctg

SEQ ID NO: 212028 - DNA, 47 bp, Homo sapiens
  chr7:157568321-157568368
  hypo
gcctgggtgtggggctgaggcgggcgcagcctcggggcagtccccac

SEQ ID NO: 212029 - DNA, 291 bp, Homo sapiens
  chr7:157589660-157589951
  hypo
cagcaaagagtgatctgcctcgagttccgactcgccgctcagacgaactcacggctcagctgggagaatcacacgggaggggcccatgaacgggcactggggccacagccggggattcaactgcaccgaaatcccagccctcaacacggcccacggctgtgtcatcccggatttatcactataaagcaaaaccaaaaacggacctcaggtttctctgcaatatgtaggatccgtgaaacctccaacgtgaaatgagaagtaggtagcctcgaatctgcacccaggcagccc

SEQ ID NO: 212030 - DNA, 406 bp, Homo sapiens
  chr7:157606033-157606439
  hypo
aagaccaaggacagcggggaacggtggggagggaagagggtgggagaccagagtcagaggcggacaggggttcgatacgccattcaggtccccaaaacagcatgtgcagctctcgttaaatggaaaaggccctaatgtcatgggaaagtctaacaatttgttaaactttgttagtgtacaaaatgtggtgatcctactcgtataaaaaagaaagttcaaatgcgcagaagaaagatcagaggacaagatgcccacgaatgataagcgcctttgctgcctctgggcgggtccgggggagtcgcatttcttcctcactgcatcgctgtattttccagatgtccactgaggaatgagcattgctttttaattagcagctgccccgagtgctccagctgccctgcgtgtg

SEQ ID NO: 212031 - DNA, 248 bp, Homo sapiens
  chr7:157607748-157607996
  hypo
agtctttattctgggagcagcgcgggaggcagtggagacgtggaagcaggctccggctgctgggcctgcatgaccggtttccctgcagaagattctgcgcccttcagcctcaccgtcctcacctggcctgggtgctgctgtgggcaggcgctgggcacgctgggaagagcagggccagccgtttgcaggacgggaggctgaggctgtgtgcacctcctgagggctgggccacaggtgggctcaggcct

SEQ ID NO: 212032 - DNA, 37 bp, Homo sapiens
  chr7:157608040-157608077
  hypo
cagggtgccaggcctaggcctccgcgcatcagtgtgg

SEQ ID NO: 212033 - DNA, 366 bp, Homo sapiens
  chr7:157621929-157622295
  hypo
aaacaaaaaggcaagggtcccgtcttgctgcgagtgttggggcaggtgctatctgaacacggtggcgcaaaagagatgaggcctcgccactgatcaaacactcggctggtaagtagaagtccttaaaaaagacgaacatcaaacaggtcctcatctggggcgctctttttgtggggtcaccctgaccgtgaggccacagatgcgggcccgtgtgcaccgcaggccatacgtggggttaggtaagtttgaaagtctggacaaggctgtcattaaagcgtaggtgatgctaaacggcgtgaaagcctctgctttctagaggctccagcaagactgacacggaaaagctgaggacgaggatgttggtga

SEQ ID NO: 212034 - DNA, 458 bp, Homo sapiens
  chr7:157625872-157626330
  hypo
cagcgcccatccatcctgtatgatggtgaacttatccaggagcgagatgtggccggtgcccatctatcccatatgattgtaaactcgtccaggaagtgtgtgatgtggccggtgcccatccatcctgtatgacggtgaactcgtccaggagcgagatgtggctggtgcccatccatcccatatgatggtaaactcgtccaggaagtgtgtgacgtggggggcgcccatccatcctgtatgatggtgaacttgtccaggagcgagatgtggccggtgcccatccatcccatatgatggtaaactcgtccaggaagtatgcgacgtggccggcgcccatccatcctgtatgacggtgaatttgtccaggagcgagatgtggccggtgcccatctatcccatatgattgtaaactcgttcaggaagtgtgtgacgtggccggagcccatccatcctgtatg

SEQ ID NO: 212035 - DNA, 244 bp, Homo sapiens
  chr7:157642943-157643187
  hypo
atcccaggtctccaaatttccgacatggggtgcctcaggctcgcgtaagggatcccaggtctccgaatttccgacgtgggtgcctcaggctcgcgtaagggatcccaggtctccgaatttccatttccgacgtggggtgcctcaggctcgtgtaagggatcccaggtatccgaatttccgacgtggggtgcctcacgctcgcataagggatcccaggtctcccggggcctggtgtgtgcaccac

SEQ ID NO: 212036 - DNA, 413 bp, Homo sapiens
  chr7:157645533-157645946
  hypo
tcggcaacacagcaagtctctcaaaaaaaaaaaaaaaaaaaatactagcacagtggaccctgaagcgccagcagcaaaccctctgagatgtgcgtccggagtggccatgccaccagctttttctgcccactgttttggaaaagtgttgattttggaatgtggtttcccatcactgtgtggaccatgggtgaatggggagggtggatggtctctggggccgtcctctctccgcctccagatcagcaggcagtggatgggtatttgggtctttcttgtactcacacggatgcgatgtgtgattcctggtaggaaacaagaagcagctcactggcaacaccacactgccccttgcattccgaggagtcatgtagtcatgaggggcatgagcaagatggagacccagaggctcacgc

SEQ ID NO: 212037 - DNA, 94 bp, Homo sapiens
  chr7:157646590-157646684
  hypo
gtccttatcaaaggcggagatgcggacacggggcagccacagggaacaccgcgtgaagacggagacggcacccacaagccgaggagagagatct

SEQ ID NO: 212038 - DNA, 36 bp, Homo sapiens
  chr7:157659473-157659509
  hypo
acacggccactaccccgcccccgacgccctggatac

SEQ ID NO: 212039 - DNA, 164 bp, Homo sapiens
  chr7:157666019-157666183
  hypo
ctctggatgggatacgcttcccagtttgctcgcttccctggagaaacccccggagggccgcgccccgaggctttgctccgacgtgtgccaaggacatgtgctgggagcgtctgcaaggtccgtctcgccgtgggggccgggaggagaacgtaccgtcctcaagg

SEQ ID NO: 212040 - DNA, 280 bp, Homo sapiens
  chr7:157730033-157730313
  hypo
gaaggtggatacagaatttccgtctaactgagcacgtggggactggagcaattcactgaagaaatgaaaggtgcgggaataggcaagcccttgatgtctggagcagatcgcatcagctactactaagccgctgttgtcaggcacagagaagacactcagcatcggatgagagaataaagccgtgtgcggtgtggcttcatgtctctcacaatagcgctcccgagtgcggccgctccacctttcccacccaggagaagccgcttaaaaagccaggcagggg

SEQ ID NO: 212041 - DNA, 169 bp, Homo sapiens; identical to SEQ ID NO: 201274
  chr7:157731890-157732059
  hypo

SEQ ID NO: 212042 - DNA, 268 bp, Homo sapiens
  chr7:157736786-157737054
  hypo
cacttcaattacagacactccgagcccaggacaggctccagatgcccggccttcatgcagcaaacaccttcacagggaaggaaggcggaactctctttccttgccacagaaaaggattctaacggcatttgacaaagattgagcatggttcgtcgcgaacgccagcctgcccccacggtcatgtccagcttaaccaacacacggcccagcagtctcggtcagtggagcccaccacccaagcgggggcggtaccactcccaccactgac

SEQ ID NO: 212043 - DNA, 314 bp, Homo sapiens
  chr7:157738093-157738407
  hypo
ctactgctcctccatcctggcgtctgacaaatcaatgtatctttccccgtggatgtttctccaacccattcactcttctcccgctcagtgacctggcccctgaacctgccgttcccaactcagacaaagccgtctccaactcggacaatggcgcctccaactcgaacaatgccacctccaacttggacaatgtcgcctccacctcagacaatggcgcctccagcttggacgatgccgcctccaagtcagacgatgccgcctccagcttggacgatgccgcctccagcttggacgatgtcacctccaacttggat

SEQ ID NO: 212044 - DNA, 186 bp, Homo sapiens
  chr7:157744267-157744453
  hypo
ctgcatcaacatctcaacaccgggtgaaaagggaaacgccttactaaacgatgttcccgtgatcagaatcacgggctaacgtccctccgcttccgcagtcttcaggcctcaggcactgccagtgacattagctgctgtgcgtccctcctgccggactgcaacaccgtctcaggatccacctcccac

SEQ ID NO: 212045 - DNA, 239 bp, Homo sapiens
  chr7:157794264-157794503
  hypo
gcacttcagcctcacgggcgctcccaccatgcagacagacgcaggcagtgtagtagatggtaaaacggccgaaaaccatcagcagcctcaggaccgccctgtcatgatgccaactcccaatccgtgctgagagcccggcactgcctcagggagattagcaaacacttttcatctgtttatacacaaacagcaggcatgggcccgctggccttccaggaacatgagtctgcgtgactggc

SEQ ID NO: 212046 - DNA, 186 bp, Homo sapiens
  chr7:157794648-157794834
  hypo
ctgtctccaggtcctgggatcacgttgtttcagtggagacgatggccgccagcttcagattcagaaatggcacttagtgcctcttcccttggagtcacctcgggtgacatggggtggcccccatggccagcactgaccagctctgccccccaccgaggcgggagccacatctcaccaccaaatgcc

SEQ ID NO: 212047 - DNA, 60 bp, Homo sapiens
  chr7:157795358-157795418
  hypo
atgtccaggaatcctggggccggggcctgctccctggaagcagatctgaggacgtttcgg

SEQ ID NO: 212048 - DNA, 143 bp, Homo sapiens
  chr7:157795448-157795591
  hypo
tgccggggaggaactcccggctgcctcaaagctcagcaggtccacggagcaggagccacacaaggctcttcaacaagccccgtgaggtggggagctggcctggaccaccctggcgtggacacggctgggctggatctcatctg

SEQ ID NO: 212049 - DNA, 182 bp, Homo sapiens
  chr7:157847115-157847297
  hypo
cagagcaagagaggaagacacgaaggaaaaacacacatttaccggctgtttttgtctgtgagtcgagtctatgaaacatgccgtgagattattttctgcggttgattattcatgcaacgaacacgtcagaacaccttcaggtggcccatgggtgaggtctcgcaggtgcagcctcctctcca

SEQ ID NO: 212050 - DNA, 110 bp, Homo sapiens
  chr7:157849576-157849686
  hypo
tgcagctgtgccacccacatcgggacgcgtgctccactcgtggcattccaggctcacaatgtcgcccttatccgatgatcagccacctcggatgtgtccatcaagctttt

SEQ ID NO: 212051 - DNA, 360 bp, Homo sapiens
  chr7:157860323-157860683
  hypo
gtcgggcagtccaccgtgaccacgcagctctgcctgtggcgaaagctgccagagacaaggcgtgaaggagtgagcgagtgacagagtgagtgagtgagcactgttcccaccaggcttccttcccagagcagcacaccgggtcaggccgggccgcgggcagcacaccgggtcgggtcaggctgggccgtgggcagcacactgggtcacgctgggccatgggcagcacactgggtcacgccgggccatgggcagcacaccagggcaggccgggtcatggtgtgcttagaatttggtgaggcggcagggtcggggcagacagggtggggtctgaggacagccgctgaggctcttcctgtgggg

SEQ ID NO: 212052 - DNA, 315 bp, Homo sapiens
  chr7:157890859-157891174
  hypo
tcaagacccagcgtggggcagcctctgcctggccaggactggggacctcggagaagcgctggacgcagcaagaatcaggcttcagctccgcaatgtgggcaggggacccgcaaaggatcctgcgggtgaggccaccgggggggctccctggggaggaggtggagaggtccagattcccgaaggctccgagggacgggcggcgggactcaggtttgactctgtaggaaagagggggccgccagtgtcctaaggcgggagatgcccgagggtgacgcttacccaggactgagcctggcaaagcccagccctgctccc

SEQ ID NO: 212053 - DNA, 50 bp, Homo sapiens
  chr7:157891234-157891284
  hypo
ggagggccaggggcagggagcaggcacgggcgaggcccagctgctctgtg

SEQ ID NO: 212054 - DNA, 119 bp, Homo sapiens
  chr7:157891519-157891638
  hypo
gcagtgggggacggggaacggggccgcggggagggccggagaagatggtagaaggtgacagtgcggggtgcagcgttcctgggtccttgaggggagccgggcttctcagccttgaagac

SEQ ID NO: 212055 - DNA, 210 bp, Homo sapiens
  chr7:157916055-157916265
  hypo
tcctacagacaccacggtgaccgacgccatggtgaccgacgccgcagtgaccgacaccatgtctgtctccaccctggatcccctgcacgcccactctcttcctgcaggagtctaatgtcagggtctgggagaaggaggttttgatgctttgtgcacccaaactgaaccttcctcctgcggaccgccatgcagccccggagctcgtgtgcc

SEQ ID NO: 212056 - DNA, 245 bp, Homo sapiens
  chr7:157916514-157916759
  hypo
aggagccgtgaacccgtgctgacccaggcagagctggttctctaatctgattggatctcagatcccgtgccgacccaggcggaacaggctctctaacctgatttgacctcagatcccgtgccgacccaggcggagctggttctctaatctgattcagcctcagatcccgtgccgacccaggcggagctggttctctaatctgattcgacctcagatcccgtgccgacatggaccaccaagttacc

SEQ ID NO: 212057 - DNA, 282 bp, Homo sapiens
  chr7:157919944-157920226
  hypo
gctgacagaggctgctcatccgtgcacctgtgccctgcgtcctcctctgcgtgcaccctgcgtcctcctctgcttgcgccctgcatcctctgcacgtggcccgggctctgctccacctgagccccgttcatctctccacagtccaggagccacacactgcggctgccactccagagaccaggaaacccaagcacaggggcgtttgccacattctaggtctcggggctgccgtgggaccctgaccctggatgccggacttccgtgggtcaagggcccaggcca

SEQ ID NO: 212058 - DNA, 58 bp, Homo sapiens
  chr7:157934535-157934593
  hypo
tagtttagcatgggatgaagcggacagagtcctttaaagtcaatctgtacacgaaatg

SEQ ID NO: 212059 - DNA, 113 bp, Homo sapiens
  chr7:157934659-157934772
  hypo
gggtggccgagtgccccgctctggccgacgttgaggcctctgaattgttcggcagacagtggcggcttctttaccttcgggttgaagtgtccgtattaaccccacatttctga

SEQ ID NO: 212060 - DNA, 296 bp, Homo sapiens
  chr7:157949122-157949418
  hypo
aggtaagaccagaagagaaaatgttttacagatgtcagagggttgggacttcggagctgcccacattcgctaaatgagctaagccgacatctgcagaaacgccctcgtaatgggaacagttacctcgaaaagttctagaaatgccggtggagagggcaggtgaacacacagctgcagtcagacgctcggcatgatcagacccaaagcaaaccaactgctgcatagaacgccctggggcttcgagcccccagttccagcctgtgacgcactcacccgtgggaaggggaaaggctccc

SEQ ID NO: 212061 - DNA, 146 bp, Homo sapiens
  chr7:157959848-157959994
  hypo
ctcatctggctggagctggccgagggtccgcggcaggaggtcctcgcggagctgggtccgggacccgggagggtaggtcagcgcagacgtgtgggccacataggtcaggatgctctcggagaagcggtcatcaccctgaaggaaag

SEQ ID NO: 212062 - DNA, 151 bp, Homo sapiens
  chr7:157981292-157981443
  hypo
gaagcccgccacgctcgccccctgatggggaaggccgccacgctcgccccctgatggggaaggccgccacgctcgccccctgtactggaaaggccgccacgcccgccccctgtagggggaaggccgccacgctcgccgccttgtatgggga

SEQ ID NO: 212063 - DNA, 122 bp, Homo sapiens
  chr7:157987148-157987270
  hypo
tcccaaatccccttcccgctgagagccatgctcagcgatgaccaatcacttcaggtccgacttgtgctgcagtggacggtccagacgccacaggccccggcgtcatgccccactgccagcac

SEQ ID NO: 212064 - DNA, 404 bp, Homo sapiens
  chr7:158037726-158038130
  hypo
ctcgtgaggcggcggtgggcatgaaatgagatgaggcgtccagccctgcatctgcagcgtggtcagcacagaggctgacatccatggtcatgccggaatccgtggtcatgccagaatccgtggccatgccggaatccatggccatgccggaatccgtggtcatgctggaatccacggtcatgccggaacccatggccatgccggaatccgtggtcatgctggaatccacggtcatgccggaacccatggccatgccagaatccgtggtcatgccagaatccgtggtcatgccggaatccactgatggtgcacgtgacccacgatgggaaaagtcacaagacagcttcagagctggtcaaacgggactgagaggggctgcaccaggaatgcgcggcctgttgagt

SEQ ID NO: 212065 - DNA, 36 bp, Homo sapiens
  chr7:158039728-158039764
  hypo
tgtgtgaggacgcacgatggggttaggcagcctgag

SEQ ID NO: 212066 - DNA, 58 bp, Homo sapiens
  chr7:158039794-158039852
  hypo
aatgaggaggtgtgggcttcccggctgcccatccccatatctgcacatagcccctgca

SEQ ID NO: 212067 - DNA, 168 bp, Homo sapiens
  chr7:158039882-158040050
  hypo
gcaccccccagcatggccaggagcaccgaggcgcacgctgggctctgagacgccccctggccaagaggggtggaggaagggggcaggcgccaggatctggaaggagatttccaacccacgtggggtctcacaggagaaggccgtgatgggaggtggggaagtggggag

SEQ ID NO: 212068 - DNA, 34 bp, Homo sapiens
  chr7:158040316-158040350
  hypo
tttgtttttaagatggagtttcattcttgtggcc

SEQ ID NO: 212069 - DNA, 305 bp, Homo sapiens
  chr7:158072900-158073205
  hypo
tcaagcacatctggttttcccgggcccaatcggaaagcaggtcctctccggcctgaagctgcgaagagaggcagcagccatgagaaggtggctaaccccgtcgggggccatggctgcctaggggaggccggcagagcctgcctgggggtcggtaaggacgctggctttggtctgacaccggcagggagggacagcgacgagggcaggagccgcggctctacctgggaacgcaggatcatctctactctgacggctcagcctctgcacacaaaccatccttctgcgtttaattggtcctctccagg

SEQ ID NO: 212070 - DNA, 196 bp, Homo sapiens
  chr7:158103401-158103597
  hypo
gagccggacagagcgcaagtcccacggagggcaagccctgagccggacagagcgcaagtcccacggagggcgagccctgagccggacagagcgcaagtcccacggagggcgagccctgagccggacagagcgcaaatcccacggagggcgagccctgagcctgacagagcgcgagtcacacggagggtgagcacca

SEQ ID NO: 212071 - DNA, 96 bp, Homo sapiens
  chr7:158109478-158109574
  hypo
agccgccgagcctcggcccacgcccgccctacctgtgccggaaagcttctgcaacgccacgcgcaggcgctgcagggccacgggcgacacctcgta

SEQ ID NO: 212072 - DNA, 89 bp, Homo sapiens
  chr7:158113046-158113135
  hypo
acaatcagactaacagtggccgtgccatttttcactcccagcagctgcgatggcacccccatcgcccatgtcctcaccacagtgacaat

SEQ ID NO: 212073 - DNA, 94 bp, Homo sapiens
  chr7:158113271-158113365
  hypo
gtcctcggcagcgctgggtgacacttggaggcgtccatgttccagcgtttggctgctgtcataggtgtgtatcggtatctcatgattttttatc

SEQ ID NO: 212074 - DNA, 331 bp, Homo sapiens
  chr7:158216892-158217223
  hypo
ggaggcacctggcaccatcccgttctgttttcggtgcggcccgttcttcgggctttattaagcaactgcccacgtggaagaaaagcaataatgaagcaaggcgtcgtatcgattcccccagctgtaatggaattccgtcaaggagcaaagcgaggcgttttcagaaactctgcctgttaacgtttattgctcccaaagtctgattataacacactagctccgggggccgagtgaacatcacttcacacaaaaacagggacaacgtctgtgaccaccggagatgaatattagtgaaagaactgactctcccgattcctctattaacctgtct

SEQ ID NO: 212075 - DNA, 167 bp, Homo sapiens
  chr7:158235876-158236043
  hypo
ggcagaggcaggagcggaggctgcggaggacgctccaagcccatcttccgtggctcagcccagcggctcccgcggctccagggcagcgccaggcatggcttctccccgaaggcacagaaggctccgaagttgccacctcttgcctgagttgccggaaatccaagggt

SEQ ID NO: 212076 - DNA, 331 bp, Homo sapiens
  chr7:158240394-158240725
  hypo
tgggctgcgtcaagctgttagccaagcgggcagtgaagacgaaggctgccccgtagccagggagctgacctctctgcgcaggtgccggggtacgagcaccagcagagccgagagcgggggcagtgctgaagcccctgctgccatccacaaaggggcctcagagggttggaaatgacaagccacggtcttgccccaccccggctcctggccatgctacccagccacacggcacagggcaaatgccagcaggacacaggccctcagcccggcatcatcgtcagcccgaggatgctgggccaggccaggtgccgactcagcagggcagcaagag

SEQ ID NO: 212077 - DNA, 399 bp, Homo sapiens
  chr7:158270896-158271295
  hypo
atgactgctacgtctggtccccaggacccaaactgtccagaaatcagccagcactcctgcaggtgcactgcagtggacggctagaggagggaaagcagcgccgtacagacactcggaaaactgcagactggaaggggcgtgaaagcacaaggtcttgatcattctcctggcattcggtgctgtgcgtagggtgagcaatggacgccactggggaagagtgggaaaggaaggctcagcacgtcggtaacgaatgaggaggcagaggcccgctctgcgtctcaaagaacgggtgggatgcggagccgtgacaagggcatgggaaagaaagtggagtgggaataacgccaaaattaacctgataaggaagctgctttcaacgcatccctgagctggacccac

SEQ ID NO: 212078 - DNA, 260 bp, Homo sapiens
  chr7:158277420-158277680
  hypo
cacggcgattcccaggttcctccgcgtcagtgtgccggtgcttcctgcctccctttccacggccggacagcactccaccatcacagacgtcctcggttcctggtggttttctgccctcttcagtggagaaagggcttggaatagaagaagctgcagttggagacgtgaaggctgtggctgtgacgccgccacggggagtcggctgcaggaggagcctccccaccatcagcgtggccggcggagtgagccacgagcgcaag

SEQ ID NO: 212079 - DNA, 275 bp, Homo sapiens
  chr7:158277727-158278002
  hypo
cgggagggcacctgcggagggaaggcagacaccctgcaacggcccgcaggcccgtgtcacctgggccaccgagcgcagggcttgtgggtcgtcacagcataattcagccttgagccacgagacacggagccgacaggtgtgtagctgagccatcctcccccacctgtcagtcaccattcttccacctccctccaaacggagagcgcgacttgctcctcttgccctcctggacgtccgggatttccgcccctgggctccagcgctatggtgtggtc

SEQ ID NO: 212080 - DNA, 720 bp, Homo sapiens
  chr7:158281144-158281864
  hypo
agaagctgcctaggcacagacacagaggtgcccccagccccaaaattccatccggaacccagggctggtcccacctcagggcgcacgagctcctcggtttcgcttctcagaccctcagaggcattcacctcggctccccctggatgcaccagtgcaggggaggcctgtcctgaaaggccccaggagggcggcaccccaggccagcgccctgccctgcacctcagtcccccgccggcacccacgtctgtgcagagattagtgggtgcgaggggcctctgggcaggccccgccatcctcgctaggattaaatccgctcctgcccacagtctgaggacagatgcgcagggagctggggaaagagaaggcctcgctcagtgcgccccgggcccacacgcagcccctgacttggagaaaggcggctccgcccagcgcttttctgaggatactggagtttaaccctcccctgcgcgttcagagcgcacagcgcccagttcaccagcatgacaggcccgggtggcgtctgccctgggagatgccctctgcctgaccgcgctggagggaaggggctctgcaggacccgctgctcgccgtatttcataataactgccgtcctcatgggctttcagcccaacctgaaaacacagcgtttgcactgttttcttatccgcctgataagagaggaaaatcagtggcttaaaggacgaaaaacctggccgggcg

SEQ ID NO: 212081 - DNA, 257 bp, Homo sapiens
  chr7:158282584-158282841
  hypo
gcaggctcctccgacccggcttttccgagatggggccgattattctgaagccagaacgctgcgcccctgacccggccacgtgcgaggcctcctggcctagtcccggagcccagctctcacctggaccaggcccacagctctgggctgagggtcaagccggcgtcatcacaggagactctctggccgcgggagcagcagcggggccggggcctccccttgaggcctcccctgggcccggcgcctcccctggaccgggt

SEQ ID NO: 212082 - DNA, 315 bp, Homo sapiens
  chr7:158282873-158283188
  hypo
ggctgccgggcgccggggagcggaggcttccagggaggtaacgagctccgcggggagcccggctgcgtgggaagcaaaccgtggcgtccgtggccacagacaagagacgcaggagagggtcgggagaggaaaggaggcagcggaggcagcagagacgaagacgggcaggaaaggccagcgcggctgggccaggccctggaggagacgcggggcagaggcagcgcctcagtccccacccaggaaggggctccagaagctccgcggtgcctgggtggccaggcgaccccaagccacgcatcccccgcggccgagcag

SEQ ID NO: 212083 - DNA, 224 bp, Homo sapiens
  chr7:158283236-158283460
  hypo
cagagagatgggtccagaaagcaccaccccgctagggagcggctcccgcgagggcgtgagcaccctggacaccagaaccgggagggccccagggccactaggcgggagtcgcaccgccagcaaaggccaggtgtggtgtgaacgcgcagtgtctttcactcattcctgcaaagcacagtgccttcaatgctgcttcaccagccgacaaacgcctgttcatccgc

SEQ ID NO: 212084 - DNA, 231 bp, Homo sapiens
  chr7:158331366-158331597
  hypo
ctttcccatgcactgcactacggacaccccagccactacctcatcccaaaagcaggcggcaccacggggcgggaagaggaactcaggtccgtgaacacctgcctcgtgcagggccctgactccagtgattctcgcagcctcgtaaccccaacaacaggccccggagctcagctttttattcccacttcacagatgagggaacgaagacacgacccacccaaactcacaggt

SEQ ID NO: 212085 - DNA, 89 bp, Homo sapiens
  chr7:158349367-158349456
  hypo
tcagagaacactgcagctcccgcgcaggtcagacggctcccgggcaggtcaggcggctcccgggcaggtcaggcggctcccgagcaggt

SEQ ID NO: 212086 - DNA, 382 bp, Homo sapiens
  chr7:158349747-158350129
  hypo
caggcaggtggctcccgcgcaggtcaggcggctcctgtgcaggtcgctcctgggcaggtcgctcccgcgcagggcaggcggctcccgggcagggcaggcggctcccacgcaggtcaggcggctcccgcgcaggtcaggcggctcccacgcaggtcgctcccacgcaggtcagagggctcccgtgcaggtcactcccaggcaggtggctcccgcgcaggtcaggcggctcctgtgcaggtcgctcctgggcaggtcgctcccgcgcagggcaggcggctcccgcgcaggtcagacggctcccacgcaggtcaggcggctcccacgcagtttaggcagctcccgcgcaggtcaggcagctcccgtgcaggttagacatcttttc

SEQ ID NO: 212087 - DNA, 205 bp, Homo sapiens
  chr7:158451038-158451243
  hypo
gggacagcagaggccggcataaaggacattagcatgaataaagggatcttgcagcgatcatcctaaaagcgaaaaaagaaaaacaaaacaaagcatatgtaagcactataaattctgaaagtctctctacgtaaattcctgataacttactaccaaagttgctcaagaagaaccatggcagtcctttccacgttcaaaaggaaaa

SEQ ID NO: 212088 - DNA, 40 bp, Homo sapiens
  chr7:158550059-158550099
  hypo
aacactagtcccgacgctcgcctctcttttaagtagccac

SEQ ID NO: 212089 - DNA, 36 bp, Homo sapiens
  chr7:158550339-158550375
  hypo
cgccaggcaccccgcggctctgcaaagatcctttgc

SEQ ID NO: 212090 - DNA, 163 bp, Homo sapiens
  chr7:158556265-158556428
  hypo
gtgagccaccgcacccagccagtaaattcttttaggacacttatttttttattgtcaagtcacacacacctcttgaggacgggaggtcactgaaacacctgccacacagtaacagtctaccgtgcttgtttctagggatcctggattgcgtctcaatagatca

SEQ ID NO: 212091 - DNA, 236 bp, Homo sapiens
  chr7:158564138-158564374
  hypo
tgagattgaaacctgatcatcggagtcgcaggaatctgtccaagggtggcccttgcacacacaagttgggcggggacctagcgggaaaggcgactaagtccgcagactaaatgcttgtagctgcaggcacagcaagagactgcctgaaaacaagcccacgagggacacgcccaccctgcatgggtggggagctggcgagagagcccttatggtgcccaacaccggctccatctgaa

SEQ ID NO: 212092 - DNA, 113 bp, Homo sapiens
  chr7:158564404-158564517
  hypo
tgccgagcaggaaacaagcacagctgtgtcccatgcacgagcggctgcagctagctcagagcaggcagtgggcgcccattgttggaagagtgaataaactgctttttgaaaat

SEQ ID NO: 212093 - DNA, 218 bp, Homo sapiens
  chr7:158570554-158570772
  hypo
agtgtgaaattctgcgagaattgccgaaacatgacacagagccatgaagtgagcacatgctgttcgcttcacagcacggacaggcttatttttcacagggctgccataaactttcaactagtaaaaacacagtatctacgaagcgcaataaagcaaagcacaataaagcgaggtgtgcctatgaacactttcatcttaaatgtcgcattcatatttta

SEQ ID NO: 212094 - DNA, 34 bp, Homo sapiens
  chr7:158623834-158623868
  hypo
acttgcataaacataagccacgtaaaaaattctg

SEQ ID NO: 212095 - DNA, 33 bp, Homo sapiens
  chr7:158624108-158624141
  hypo
gagcaagactacgtctcaagaaaaaaaaaaaaa

SEQ ID NO: 212096 - DNA, 52 bp, Homo sapiens
  chr7:158766776-158766828
  hypo
accccgcgctgtccccggcggtctggcctggcgtctggagctccgggagcgc

SEQ ID NO: 212097 - DNA, 199 bp, Homo sapiens
  chr7:158767105-158767304
  hypo
acattccagagcaaggtaacatccataaacggaggctgaaacggcctgagacgtcccgggagtaacgaagaccccaaggcggccccaacttgaggggggcgaggtagccaggaatgggggggtggtgggagggacgggaaggcaaacgcgctgcctgctggggacggacgcgccttggggcagccggggaggccccgaa

SEQ ID NO: 212098 - DNA, 196 bp, Homo sapiens
  chr7:158792183-158792379
  hypo
ggtggtttatctgcgtggcctctgcagctctgtgtgctatgcgcgtctcgaggtggagagacttggtgtctgcattcctgggttcgtgctctatttccacgcacaggtggaagaaaaagaagggcgaggccgcacagtgctaagacgcaggctctgggatcacactacccggacccaatgcgcgaggctgcccctg

SEQ ID NO: 212099 - DNA, 68 bp, Homo sapiens; identical to SEQ ID NO: 201278
  chr8:495635-495703
  hypo

SEQ ID NO: 212100 - DNA, 274 bp, Homo sapiens
  chr8:591683-591957
  hypo
ggtacgctggcagcggagctcctcccggaggacccctccccctccccgccgattcctctcctgtctgcgttttccaggctcatctcagatgccgccttgtctatgaagctctctttggttcctgcccagacctcatcagaatcaacgccccggctctgtgctggccaaaaccccacggtgcctctggccgtatgcagtcctttcttctgaccccatctcgtcctccagtctccactggtctcaggtcaatagctttttccgaggaggcatctat

SEQ ID NO: 212101 - DNA, 38 bp, Homo sapiens
  chr8:593299-593337
  hypo
cagggacgggaagctggccaggcgcaggctgcggtgtg

SEQ ID NO: 212102 - DNA, 284 bp, Homo sapiens
  chr8:636732-637016
  hypo
cagctgagcaacaggtctctcgcaggacactcagagagagagagagagagcgcgcacagcagggcgcccctcccctcctctaggaccaggcgagcttggacacagctgaatgtgtgaactctcatatcaataaatcagcgtgacaagaatgaaacactgctagctctgactctgtcaggcccttgagagggtgagatgcgaggaatgcggagcggggggcagccccatcacccacccacgagccactctggaaaggctaagagaagtcacgctaggactccttc

SEQ ID NO: 212103 - DNA, 252 bp, Homo sapiens
  chr8:644802-645054
  hypo
tcaggtgcaaggaagagaccggttacactttatggggtgggcggcagcgagagttccccgtcccatcatctcctccgccggacgcacagagaatgcagcgtctgtgagcacagctgccctggacctggcatctaagagtcagggtcagagaggggcagtcagaaacccacctccctgctggacaagtcacaagcaccagcatccctcgggaaaggcagaggggcgtggtggctcggagccctagggtgatag

SEQ ID NO: 212104 - DNA, 85 bp, Homo sapiens
  chr8:833589-833674
  hypo
tcgttacataggaacgcgtgtgccgcggcggttcgttacgtaggagcgcgggtgccgcggcggttcgttacgtaggtgcgcgtgt

SEQ ID NO: 212105 - DNA, 324 bp, Homo sapiens
  chr8:893356-893680
  hypo
cagtgtgtatttttatgcaccggacactttggttttgactggccacgtttcatatgtgcggcacccgcgtgtctggtggctgctctgtgggaaagtagagctccggtgtgtggacgtcatgacgcggccatcccgccacaagcacagcaagaaccgctgtgtacaagatcatgtggaggaggtggcgtgtggacgtcgtgatgtggccatcccgccacaagcacagcgagaaccgctctgtacacgatcatgtggaggagctggcatgtggacgtcgtgatgtggccatcccgccacaagcacggcaagaaccactgtgtacaa

SEQ ID NO: 212106 - DNA, 53 bp, Homo sapiens
  chr8:923935-923988
  hypo
tgggcgcaagctgcgcgcgcagaccgggccactcggtcgccagaaaagatttt

SEQ ID NO: 212107 - DNA, 268 bp, Homo sapiens
  chr8:1047978-1048246
  hypo
aggtttgtatgaaccccagccgcatggccttcgacatttctgcctcttctcttactacgttgactggttttgatctgaagagaaaactgccgtgagttatatttccttgcaacgcaattctgctctcagcaaacgttggcggcgccactggacacacgtccctccccaagagcacagccgggcatcccggccttggagctggactgagtcccggcgtcctctgcgtatgcgtcacagaaactcctccgcacaccagtttgtttccaaa

SEQ ID NO: 212108 - DNA, 74 bp, Homo sapiens
  chr8:1048772-1048846
  hypo
acgccaggctcccggccgcccacggacgccgccacccactccaggctcccggccgcgcacggacgctgcgacgc

SEQ ID NO: 212109 - DNA, 458 bp, Homo sapiens
  chr8:1132631-1133089
  hypo
ctgtccttctgtgacctctgcgtggtgagttgggcattgagctgccgtaggtcactgagtctgccctgccatcacgtctgcgctgccctgagacacggagctccagcacattctgcagagctcacactatcgagtccagcgcgcatgtgagaggcaggaagggagagtccacgggtcggcaactctgggcagtggcgcgtgggggacggactccgcagcctgtgggatcggcagcatccagtgaggtggagcggggctcaggggcactcaggatgcagtgagcgcacagccctgcggtggcatgggtgggagacgcgcaccatggagccggtggaaggtagacattcgagcgagctggggccagttcctggaagtgtgtcactgccagtgcggggaacgtgagatttactcacccagcagcgggacctactggagtgctttcggtaagagctgggatg

SEQ ID NO: 212110 - DNA, 289 bp, Homo sapiens
  chr8:1150805-1151094
  hypo
gaatggagagtggcagctttcgctttgttttccgttcccacatatcggtttggcatcgaacgatgcgtccgctgctggctcccgtgctcggtttctccacgccgcctccgggcggtgcgcgattcagctccaggagcgtgttgtgcacggcggggcgctgcgctcggccttagggaaagaaggcgcggctgtctccccggaccccaccgttagggacccacacctagaggtgagtgtggcgtgagcggccaggcgggtgccgagatgcccagagaccagcactggggag

SEQ ID NO: 212111 - DNA, 224 bp, Homo sapiens
  chr8:1151189-1151413
  hypo
gtccatcagggttctcgagagacgcagaaccaggggtgcatgcacgcgtgtgattgtggaggctggcaggtcccaaccacagagccgaagtccccagcatccccgcgcaggtgtgaggccctcagcgaccctggaaccagcaggagctctgctcccgctcaggggccgtggggcagggggctcccccttcctcgggaagggacggccttctgttccctgcaggg

SEQ ID NO: 212112 - DNA, 135 bp, Homo sapiens
  chr8:1308186-1308321
  hypo
aagaacaggaccatcgcgagccactttccgcctcttcatccccgtccactgaggaaatccaccgaagccctttgtgtggggttcggaggagagcgggttgcagggacttgccttctgggtgtgaccttggtgcag

SEQ ID NO: 212113 - DNA, 33 bp, Homo sapiens
  chr8:1308368-1308401
  hypo
gcggggcttttccggggcggggcttctccgggg

SEQ ID NO: 212114 - DNA, 118 bp, Homo sapiens
  chr8:1443790-1443908
  hypo
cttcctggaggaccctggctttgatctgtggttgtgctgacgtggacatctttgcctcgcaggatgcagattgcagacgctcatcgtctcgcaggcagctccagctcgagtggtggcc

SEQ ID NO: 212115 - DNA, 66 bp, Homo sapiens
  chr8:1471415-1471481
  hypo
ttggatttgcttgtctggcttctgctggggcgcaggatgtggggatggaaggaccaagacacacga

SEQ ID NO: 212116 - DNA, 51 bp, Homo sapiens
  chr8:1471664-1471715
  hypo
agctgtgccttagacgggggggaaggactccctgccccaggccggcaccgc

SEQ ID NO: 212117 - DNA, 143 bp, Homo sapiens
  chr8:1579000-1579143
  hypo
tagctgcactctgcttgggtttcctgcagctcatgtcccgagggtctcggcgggaggtccgggtgtcccgagggtctgggcgggaggtccgggtgtcccgagggtctcggcgggaggtcccagtgtcccgagggtctcggcgg

SEQ ID NO: 212118 - DNA, 79 bp, Homo sapiens
  chr8:1579182-1579261
  hypo
gtgtcccgagggtctgggcgggaggtccgggtgccccaagggtctgggcgggaggtccgggtgaacagatcattttaat

SEQ ID NO: 212119 - DNA, 235 bp, Homo sapiens
  chr8:1777141-1777376
  hypo
aagagcattacataagctagcgtggtattcagtgcgtatctgagcggacacggacggggagtcctcgagctttggagaggaagcaggcggcagggcctccagcacacctggggggcggccaaccagcccggccaggccgagcgctccccgcctgcacagttgcactcatgtcgggcctgagctgagtcgtcccgacaggatacctgcgtgggccgtgtagacacaacccagggag

SEQ ID NO: 212120 - DNA, 307 bp, Homo sapiens
  chr8:1796262-1796569
  hypo
agcttgtagaataaatatttcgctaaagaaaacagaaaattgaagtgttctatgcgtcttcttttgcatcgtgcatattgtatttgtcgtcctctcttcagtatctctgtaaaaagaggtacgcggggtcctccgtcttagtcctcaggttaagtggctttgtacgcgccacacggcgtttcctacttgttgcaacatgccccagggagggattctttccattctgtgattcctttctatagacgagggatggggtctcgtggccagcaagcaaagtttgaactcagctctccgactccagaagccg

SEQ ID NO: 212121 - DNA, 162 bp, Homo sapiens
  chr8:1797380-1797542
  hypo
atgctgagaagggtgtggggcggctgcggggacacagacggcaaatgctgagaagggcgtagggcggccgtgtggacacagcaaatgccgaggagggcatggggcagccacgtggacacagacagcaaatgccgaggagggcatggggcggccacgtggaca

SEQ ID NO: 212122 - DNA, 420 bp, Homo sapiens
  chr8:1797602-1798022
  hypo
aggagggcgtggggcggccacatggacacagacagcaaatgctgaggggggcgtggggcagccacgtggacacagggcaaatgctgaggagggcgtggggcggccacgtgggcatggacagcaaatgctgaggagggcgtggggccagctgcgtggacacagacggcaaatgctgaggagggcgtggggcagtcgtgtggacacagacggcaaatgctgaggagggcgtggggtggccacgtgggcatggatggcaaatgctgaggagggcatggggtggccacgtggtcacagacagcaaatgctgaggagggcgtggggcggccacgtggacatagagggcaaatgctgaggagggcgtgggccggctgcgtggacacagggcaaatgctgaggagggcttgggcggccacgtggaca

SEQ ID NO: 212123 - DNA, 54 bp, Homo sapiens
  chr8:1826001-1826055
  hypo
gaggctggcgagtcccgtgttactgatagagatggtgaacggatgcccgccata

SEQ ID NO: 212124 - DNA, 300 bp, Homo sapiens
  chr8:1830728-1831028
  hypo
taaaacaggcaaatgaaagtcgcaggtgggttctgccgccgtcccgttctcacatctccctctccgtcgcagatgcagaagctcgtgaaggccgcgaaggacggcaccaaggacgggctggagaggaccagggcagccgtgaagaggggccgctccttcatcaggaccaagtctctcatcgcacagggtccgtgcctgcaggtcttcttgcggggaggacacggggttggggggggcggccacatcttgtggggaggactcggggtggggggcggccgcgcaggctcccacagccttagg

SEQ ID NO: 212125 - DNA, 420 bp, Homo sapiens
  chr8:1877876-1878296
  hypo
gatgggggcaccgggccatgcagagcctccttcagcatgtcctgcgctgaccagctgagcagcctgcccgcccggcggggcctcctgtacctgggccagccctctttgccccggtgctgtgccctcggtcccgtgccctcggtccctgctgttctcttggccacagggctaaggactccattgtgttctgctgggtgccttagacgaggccctccctggcccatcccgcctggtccccgcagccgctgggggtgggcagctgctgtgtgtctgttctctctccagcccctgccgcgttggtggcagctgtgctttgcaggctcttcctgtggatctggccgccgctgcttgtgggagctctgggtacggggctttccttccagcttccttggtgctggctgaggctgctctcctggcccc

SEQ ID NO: 212126 - DNA, 33 bp, Homo sapiens
  chr8:1926963-1926996
  hypo
acataaaaaaggctacggcgatccccaagtctc

SEQ ID NO: 212127 - DNA, 38 bp, Homo sapiens
  chr8:6361545-6361583
  hypo
tctataagcaggggccgggcgcagtggctcacgcctgt

SEQ ID NO: 212128 - DNA, 341 bp, Homo sapiens
  chr8:6414547-6414888
  hypo
ctaggaggggtgggcggggtcatatggtgttcactcacttacgctaatgaactgagaaataacgcacttctgcccaaattcatgttcattcacactcctctcagcagttttctgcagtcttcccagccccacggaaaattctgcttttgtcagaggaggggatatgcgtgctttcccgtgtttgctttaccgctgggcaatccatacaaggctactaaactgcagagggtactggtgttagcatgccccgtgtttataagggacttaaaaaaatatacaggcttgcatccaccatacctaccatacttgtgtactagagatattctcggggcaaaatgagg

SEQ ID NO: 212129 - DNA, 102 bp, Homo sapiens
  chr8:6456168-6456270
  hypo
aagcaaaacctctcgtgtgagccggcgggcggcttcacgacaggcgtgagaaggccatggccctgtgtgggtgaggaagcgcagtgcggctcccccctgcgt

SEQ ID NO: 212130 - DNA, 159 bp, Homo sapiens
  chr8:6465692-6465851
  hypo
tcgcacggcctgcccggaccctgatgagctgagcacagtgaaaacaatgccaggcctcacctgcccgtgcttaccggctggtggcaggggggctgagcaggtgttgaggtgttcacaggtgagtaggagaggaaaggcagacgtcggcctaaaggcaat

SEQ ID NO: 212131 - DNA, 473 bp, Homo sapiens
  chr8:6630575-6631048
  hypo
cctgtctggacagccgcagatgaggagcagcgcctgcgttcatccacgctgggtgaaaggtaagaattcagggttacatgcgtgaaggggaaagcaagcgggaagcccttagcattcaagcccctgagctctggtgttgtccacccctgggggctgcctggtggcaggacggcacttcacgaggggagatggaccccagtgggaaccacactcaatccctctacgcccaggccgctgtcagacactggagtcctccgcacagtcctgcagccggaagcacacgctgccagtatcccctccctcccactcccagcctacagacaagcgcatctctgctgcattcatcgccgcacacgccctaaaaatgtcctcacgtgagtctgtgccagcctgcgcgcaaaccgtgagcccaccgcgctgtgtgcacgctcagcttcccccaggctgcgtccctcccccgtggggtcgcattc

SEQ ID NO: 212132 - DNA, 110 bp, Homo sapiens
  chr8:6633001-6633111
  hypo
tcgagaaacaccaccggctggaaatgtggctctgctcccgatctttgtctgcgttggcgagacaccggccgctctgggccggaatctctcatctacgaaaaagtgggtag

SEQ ID NO: 212133 - DNA, 229 bp, Homo sapiens
  chr8:6636292-6636521
  hypo
tgtggactcactgctcgcaggccgccagcctgctagcccagtgtcccaagtcaaaagtcacagcgacatgccggaaagacagtttccacaggacgagtggaaaagggggcgtctcttctgcccatcgaagggtgcatccacctgtggtattaaaggatttacaactggcctcagaaacgctgccggagctgctccttggggtctgtccgatgggaagaggcccctcctg

SEQ ID NO: 212134 - DNA, 93 bp, Homo sapiens
  chr8:6707719-6707812
  hypo
ccagagctgttcctattcggccatcttggctccacccgagaatgaatcttatctgcacagggagtgctttccgattgagcagctccattccta

SEQ ID NO: 212135 - DNA, 209 bp, Homo sapiens
  chr8:6756662-6756871
  hypo
tgttctccaggagacgctctcccgaggatattttggcgcttgttctcccggtgggggggagctctctcgaggatatctgggctgcttgttctccagggggagctctctcgaggatatctgggtgcttgttcttcggggggcgctgtctcgaggatatttgggctgcctccggagtcgcagtgttatcggaaagtgggtgacgtgcggat

SEQ ID NO: 212136 - DNA, 513 bp, Homo sapiens
  chr8:8176245-8176758
  hypo
aaagttgctgatgatgagccggggcagctgcttctcccggggcccttccggggaggcggggccggctgcggggctgagagtgccaccagcaggcggggcggcagaggagcagggaggcgcggcggcggcgggggcgggagccggggcgggggcgggcccggggccggcctggagggtgcagtgcaccagcagcaggttctccaggcacaggtcccggtggatgatcccgtgctccttcaggtgctccagcccgttgcagagttgcagaagcaggaagcacacgcgccgctcgtacgcctcgggctccgcctggtggctggccgccgagtcccgcacgaagtcggaggcggtctgatgtggcacctctcgggtgatgaccaccacgcagtcctgctcctgggcaggggggtgtgtgggcagggcaggcacagggtccttgggcgcgtcgggggagctgagcatgctggacggcaccgaggcgacgaagtggccgcagtcctgctggatgttaaa

SEQ ID NO: 212137 - DNA, 123 bp, Homo sapiens
  chr8:8560673-8560796
  hypo
gcctacaccaactcggtggacgtcctcgacggggaggggtgggagtcccaggacgctccctcgtgcagcacccacccctgcgacagctcgctgccctgcgactccgacctctagacgcttgta

SEQ ID NO: 212138 - DNA, 39 bp, Homo sapiens
  chr8:8634037-8634076
  hypo
tctgtataaagagagctatgcggccaggtgcagcggctc

SEQ ID NO: 212139 - DNA, 39 bp, Homo sapiens
  chr8:8634316-8634355
  hypo
gagacagagcgagactccgtctcaaaaaaaaaaaaagag

SEQ ID NO: 212140 - DNA, 120 bp, Homo sapiens; identical to SEQ ID NO: 201290
  chr8:8639980-8640100
  hypo

SEQ ID NO: 212141 - DNA, 195 bp, Homo sapiens
  chr8:8651864-8652059
  hypo
gccagctatcctaaccgatccccccaaatctcccgcttccaatccactgtcaaccacccatgaatgggaccttccccggagcctggcccggcctccacatgagtttgtttttgtccatgtgttcatggatgtaaactgtgggtgcttaaggcggtgaaggtgggggaacactgggcagctcgagcacaggcttca

SEQ ID NO: 212142 - DNA, 129 bp, Homo sapiens
  chr8:8673405-8673534
  hypo
aggaatacaagtgtccgttaaaaggtcggcacataaacaaattgtggcatattcgtacaatagactactatctaggaaggaaaaggaatgagccatggatatatacgccaacatcgatgacctgggaat

SEQ ID NO: 212143 - DNA, 139 bp, Homo sapiens
  chr8:8680437-8680576
  hypo
caggacaggaggtaccgacaggctggtggcgggaagggagggtaacagagccaggcatgggatcccgcacagaggacacagacagaagaccgggaaggagagacagagggacacaggacagtctcgaattctagtccat

SEQ ID NO: 212144 - DNA, 77 bp, Homo sapiens
  chr8:8680890-8680967
  hypo
gacacggggccccgcgctccgatcctggtgctgcgctaactccctgcaagttcccgaaacaccgtgagtcctctggg

SEQ ID NO: 212145 - DNA, 76 bp, Homo sapiens
  chr8:8681182-8681258
  hypo
cttccctaattctcccgtcttcagtctttgacacaggtaatgaacccacaggtcaccgagaagagcatcacctgcg

SEQ ID NO: 212146 - DNA, 159 bp, Homo sapiens
  chr8:8690237-8690396
  hypo
aagcgttcctcccacttcagcctcctgactcgccgagactacaggcacatgccattactacatgctaagttttcacttttaattttttgtcgaggcgaggtctcttttagttgcccaggctaagaatttttacaaactattggtcgaattgtgtagtag

SEQ ID NO: 212147 - DNA, 174 bp, Homo sapiens
  chr8:8692863-8693037
  hypo
cactatcctgtcccacgggtcttgagcatctttctagatggtgggcatcccggagcagagttacgagatacccatcatgcagccgccatctcagtgactacaaggtatcacagctcacactcaggaaacaaatgttcattaattccctcattttcctcacgatgaagatgtttc

SEQ ID NO: 212148 - DNA, 105 bp, Homo sapiens
  chr8:8698610-8698715
  hypo
tacctatgtaacatctccttcgcatattccttaagatattcttcatgtgctaaaaataccgatggcgggctgtacttcaagacttctttttgggtcgggcgtggt

SEQ ID NO: 212149 - DNA, 209 bp, Homo sapiens
  chr8:8709524-8709733
  hypo
cagttttggatacatagggagtgggtggtggaatgccggcttccattcgaaggagacccctctccagcaccatgggagtcgcacccttagcagatattctgtcctccagagagctgaggtttcaggagtgccaagcaaggtataaatgtcattagcgtgagtacttaaaacataccacaatgtccaggtgcggtgactcacacctgtaa

SEQ ID NO: 212150 - DNA, 120 bp, Homo sapiens
  chr8:8712566-8712686
  hypo
ggtcctccctcagtatatatggggggtttggttctagggcccccacccccagcataccaaaattattttttatttcttgttgagagaggtctcgccatgtcgcccaggctggtctcgaac

SEQ ID NO: 212151 - DNA, 78 bp, Homo sapiens
  chr8:8712746-8712824
  hypo
gccaccacactcagccgacatcctgtattttatctggcaatcttaacattgtattaggacaagcggaaaacagatgaa

SEQ ID NO: 212152 - DNA, 159 bp, Homo sapiens
  chr8:8725341-8725500
  hypo
caggcgtgagccaccgtgcctggccataaattgctatacttttttagtaacaggttaaaaaccctgggatctgagggaaagaccaattgtttaactccattcttcattctcaacatgtgtttcctaccgctaataaatggaactcgagtttttccatgg

SEQ ID NO: 212153 - DNA, 144 bp, Homo sapiens
  chr8:8748206-8748350
  hypo
actgatggagctgggtggcccggagcagttcctggctgggggtggaccgcgccatgggcggggagctttccccctccgccttgccctctccactggtccctaggagcagcttatgcagcagcaaagagggatccctctggaaga

SEQ ID NO: 212154 - DNA, 397 bp, Homo sapiens
  chr8:8749088-8749485
  hypo
gggacaggaagaagggctggatcacctcataactttcatccccagctaagtcatacacgatgaaccgcaggccccgggaggcatcggccgtccagctggtcacctcgatgcccttgctcacagggggaggtgacggtgggtagcacttctccttgtcccctcctcctgggcatccctccactctctcctcggtgaggcagtggcgcagcaaagtctttcctgcagccttatgccccatcaggagcagcttgagccggggctgcaccgccggctgggaatgagccagttccttctggtaggctgcgatgtaggggatccccttcatgcagacctcgtaggggggctggatcagtgggttgtctttgatcttccacaaacccacccgggagagctggcc

SEQ ID NO: 212155 - DNA, 218 bp, Homo sapiens; identical to SEQ ID NO: 201291
  chr8:8750284-8750502
  hypo

SEQ ID NO: 212156 - DNA, 157 bp, Homo sapiens
  chr8:8780059-8780216
  hypo
cgcacccagccgggtgtttctttacagcaatcagaaaatagactaatacagggacaggtgcctgacatggaaggaacatccatcttggactacatggagtgaaaagcaagggctgaatacgatggaacaagaagacggaagacgcctgtcttctcag

SEQ ID NO: 212157 - DNA, 201 bp, Homo sapiens; identical to SEQ ID NO: 201292
  chr8:8820810-8821011
  hypo

SEQ ID NO: 212158 - DNA, 116 bp, Homo sapiens
  chr8:8898498-8898614
  hypo
catacaaggtatagcgtaatgagaccgttttcagtgcagacagctgagcccccaggcacttgctccgctgagtgtttcagcgattacgctgcacttctgctcgcctgcctaaaacg

SEQ ID NO: 212159 - DNA, 36 bp, Homo sapiens
  chr8:8922915-8922951
  hypo
tgactgccagctgggcgcagtggctcacacctgtaa

SEQ ID NO: 212160 - DNA, 221 bp, Homo sapiens; identical to SEQ ID NO: 201293
  chr8:9761155-9761376
  hypo

SEQ ID NO: 212161 - DNA, 176 bp, Homo sapiens
  chr8:10261662-10261838
  hypo
cggcccctggtccacgtggagaggtcacctcatttccccacaatgccgggaaagtgagacggtgctgctcctcctccacaaatagcaaggcagggaccttccccaggggcatctgggctcccacctccagagaagcgtccccctggaatctttcttttcctgacaacactagatgc

SEQ ID NO: 212162 - DNA, 188 bp, Homo sapiens
  chr8:10261986-10262174
  hypo
agtgaacagttggcattcctgcggggtggccctcgctcctgcaataggccatcccgggcggccgctccctccctcacctacgatctgccgtcagcagctgcttctgacaggtgcgcgggctctccatggcagatggtgaccaaaatgggcttgctggcaggctgtgctgccgcgccgccctccctcgc

SEQ ID NO: 212163 - DNA, 210 bp, Homo sapiens; identical to SEQ ID NO: 201294
  chr8:10587212-10587422
  hypo

SEQ ID NO: 212164 - DNA, 202 bp, Homo sapiens
  chr8:10683500-10683702
  hypo
acaccacagtcaatgcgaagactccagcgctgtttcacagcaatgcagtcggagctgtccataaagcatgaagtcgctattggcccagagctaaaatgcttcaagcaactcaggacaaacacgtagatttcaataacaagtaaagaaatgcttaatcttaccttttgtgaatttcatatagtgaacacggtttttggagatt

SEQ ID NO: 212165 - DNA, 240 bp, Homo sapiens; identical to SEQ ID NO: 201296
  chr8:10873649-10873889
  hypo

SEQ ID NO: 212166 - DNA, 74 bp, Homo sapiens; identical to SEQ ID NO: 201299
  chr8:11058799-11058873
  hypo

SEQ ID NO: 212167 - DNA, 66 bp, Homo sapiens
  chr8:11612347-11612413
  hypo
catcacacaggtgctcgataagttttttaaaaatggaattgatttctttctcgctgagttccaggg

SEQ ID NO: 212168 - DNA, 72 bp, Homo sapiens
  chr8:11706508-11706580
  hypo
gggtctctcagcactaaacccgctgtggaagcacagcctgactcacccgtccccacacatgctgccacagca

SEQ ID NO: 212169 - DNA, 120 bp, Homo sapiens
  chr8:11706613-11706733
  hypo
gacgtgcgcattggtgtggatgcagatccggtcagagatggcttccacagccccgaaggcctgcaggaacgagccccaccgggtgaggctgccatgtccgggctgggccctctgcagcag

SEQ ID NO: 212170 - DNA, 155 bp, Homo sapiens; identical to SEQ ID NO: 201310
  chr8:11726004-11726159
  hypo

SEQ ID NO: 212171 - DNA, 225 bp, Homo sapiens
  chr8:12623675-12623900
  hypo
gggtgtcagcctgggaggcccggtccagtgcgcccccacatctgcccgctctcgatgggatgcgcacagtctcgatcctggcaccagtatcgacctcagctggcaccaaaggcctgaacagagggtaatcggtgtccccattccagcccaagccccgccttcctgggtgttctggagcaaaatgggggcctgcgcaggagccccgggttccagggagacctggct

SEQ ID NO: 212172 - DNA, 91 bp, Homo sapiens
  chr8:12869539-12869630
  hypo
cttagaggctacacgtggtctctcggatactagaactatctttcttgccttggaccagctaacgtgccttggttgcgccagtgtactgagc

SEQ ID NO: 212173 - DNA, 84 bp, Homo sapiens; identical to SEQ ID NO: 201316
  chr8:16884239-16884323
  hypo

SEQ ID NO: 212174 - DNA, 200 bp, Homo sapiens; identical to SEQ ID NO: 201318
  chr8:17434527-17434727
  hypo

SEQ ID NO: 212175 - DNA, 99 bp, Homo sapiens
  chr8:17910135-17910234
  hypo
tcacagagcccggccattttcttaacgtgtttttataacctattttctatttgaaattgttatacacaattcttggccgagactttatgatctcctcaa

SEQ ID NO: 212176 - DNA, 36 bp, Homo sapiens
  chr8:18381897-18381933
  hypo
gcacatgctctgtttcgtgtacgtgccaagtctcaa

SEQ ID NO: 212177 - DNA, 180 bp, Homo sapiens; identical to SEQ ID NO: 201321
  chr8:18870741-18870921
  hypo

SEQ ID NO: 212178 - DNA, 77 bp, Homo sapiens
  chr8:19068613-19068690
  hypo
tgttagggggaggagcggctccaggacagaccatggacaccaaaatccaggaatgctcaagtccctcataagaaata

SEQ ID NO: 212179 - DNA, 300 bp, Homo sapiens
  chr8:19095012-19095312
  hypo
cccggctgctgaggtggcggtgactgtggggcagccgggccgtgcacgtctggagaccgcccgggcgctggccgcggctggaccccgggagccgaaccgcgggagggcgctgtgcggagccggtggtggcctgctcgacggaggtggccgccgtcaccctactggtcctgtgatacgtgcccaaggactgcccgggagccagacctgccagcgggtgcaggacaccaaggtcaagactggagcagggagaaatagtgctgcggcctggagaagcgcatcagccaggaccagaggacatct

SEQ ID NO: 212180 - DNA, 291 bp, Homo sapiens
  chr8:19690583-19690874
  hypo
cttgctcgttgcttcgtgaaccctggaacggtattttttaaatttctttttttaacagcgatgcttttcccctccttgctattctatctttcttagggtcaatataaaaaggcgatagccagcctgcatcacttagcagctctccagggatccatttctcagccacagatcacagggcaggggaccctggagcatcagagggcgctcatccagctggcgacgtgccactttgcgctaggggagtacagagtgagtactgcacacatacatgcctgccgcaggtgcacgggg

SEQ ID NO: 212181 - DNA, 62 bp, Homo sapiens
  chr8:19706754-19706816
  hypo
caagtggaatcaacgcccgctcatagtgtgctgtttgtcaacatgttcgctgcccatggttc

SEQ ID NO: 212182 - DNA, 610 bp, Homo sapiens; identical to SEQ ID NO: 201323
  chr8:19796823-19797433
  hypo

SEQ ID NO: 212183 - DNA, 70 bp, Homo sapiens; identical to SEQ ID NO: 201324
  chr8:19798019-19798089
  hypo

SEQ ID NO: 212184 - DNA, 54 bp, Homo sapiens
  chr8:20110391-20110445
  hypo
ctcgagctcctgccggagctgccgcttctcctgctgaagctgcagtacctgcag

SEQ ID NO: 212185 - DNA, 158 bp, Homo sapiens
  chr8:20110479-20110637
  hypo
gaggcctgcttgagcttgttgccgcctttgggctccgggccctccagctcgtccctgcagcgccgcggccgctcctcgtaggccaggctggaggcaagctccttctcctcaaagctgcgctgcagcttctggagggcgccctccctctccaacagctt

SEQ ID NO: 212186 - DNA, 82 bp, Homo sapiens
  chr8:21608213-21608295
  hypo
tggtcttggcaggagcagaagagcatgcggtaggtgtactcgctgggcacccggtcgaagaactggcgcagggccttgtggc

SEQ ID NO: 212187 - DNA, 124 bp, Homo sapiens; identical to SEQ ID NO: 201326
  chr8:21906319-21906443
  hypo

SEQ ID NO: 212188 - DNA, 202 bp, Homo sapiens
  chr8:21910414-21910616
  hypo
actctagattctgcccggcttccacactttgcctgcaaagtgtgcccaggcatcgtgagttctggggcaggagagagcacaggccagggtgcttgcgggggctttgtggaaggtctggggtttgcatgatttcagatgatttcagtggagaaaatatgcacagagcggaaaatgacgagaggaaaaacgggcacgagaatca

SEQ ID NO: 212189 - DNA, 166 bp, Homo sapiens
  chr8:21960397-21960563
  hypo
gatcctcgccagaacgtctccccagccccggaagggcaggtctgagccagcaccagggcggtgggagactcctgtccacacctctgccccagagctgcctcctgcctggcactgccgccacactcccctcctgggatggggcttctgctcccgggctcactcaagg

SEQ ID NO: 212190 - DNA, 894 bp, Homo sapiens
  chr8:21961297-21962191
  hypo
ggggacagataagggaaggacgccccctgactccaggcccctgagcctggcgggaagtggctgcggcccaggcagccagtcctggtggtgttctccctgcatgccctccgtggctgggctgccaccccacccggcccgaatctgtcttgacctgcaggaatacacgggcggcgccaggcattacctcacagcgggactacacagttgctggctttgctcctgggcaaggaggagcaggccagagcctcttttgcttccttttcttgcccatgccgcttctagaagccaggcacaggttgccaagaggtgacacgaaacaggaggaaactcagtgacctctgcctctcccacattcctccccgcgggggaggacctcgccgctctgaagagcaccgtgcacatgtgggtgcacaaacgtgggtgttggtgtggacggggcgcagatctccgtggatgaactgcgtctggactcttagattcataaaatattcgagggtttgggagtcacagaccctcccctctcctcagtgcactttggcatttgcacggtgtcttccccggacagcacagcaataaatggtgtgattgcgtggacaccgtggctctgttcttggccaagtttccccaccttctgcccaggactccactgctaattcgggcccatcttcctccccaaggaagacaaattctttttctagcgctgcagcagggaggtggggtgggcggtaaacagacaggctctggcagtgcagatctgctgatcctcagcgcctgccaggagccagactcttggcggagcagtgccacttctgctgggctgacctgcagcggagagtctgcccaccccggagacaccatgagggaatggaccacgtgggagcatctgtgtgcaag

SEQ ID NO: 212191 - DNA, 202 bp, Homo sapiens
  chr8:21978276-21978478
  hypo
gcaaggctggggctcctgcagccacagcaaagcccctgggggaggcagccggggccgcactggagagaggggcaggcccaggcccttgcgcagacccgggccagctcgaagccccggccccagggctttctcctggatcttccgttccaccacctgtgcgataatgctgtccaggatgttggtgatgcggtcatcctgcaga

SEQ ID NO: 212192 - DNA, 70 bp, Homo sapiens
  chr8:21981256-21981326
  hypo
agtccatggtggcaacggctgcagcagcgtggaatgcctgggctgtcctctgtcacggctggcccttggc

SEQ ID NO: 212193 - DNA, 40 bp, Homo sapiens
  chr8:22052966-22053006
  hypo
caccacagaggtggacgagtgctctcggcccaaccgcggg

SEQ ID NO: 212194 - DNA, 405 bp, Homo sapiens
  chr8:22078961-22079366
  hypo
cagggtgcccagggacaggtcgacgggctcagtgtagatgatctccaggatgaggtcctgggcgtggcggaagaccagctccccatcctccacgctgcaggtcaggaacttgttgcaagcaatgtccaggaggggcaggcggtcgcggcagaagcggtcccccagggagcctttgggcgccagcaccaggatggcgtagtggtaggccgtgtacatgcagtagaagtccgcaaagtagaggttggtgctgggattgaagaggcgctgagctgggatctggaagcgccagcggccgtagggggagtcctgcgggggctggcccgtgttgaactccgtgttgcagctgaagaagaccccgtggagcataccgctggtgggggagccgtggctgccactgttgtcctt

SEQ ID NO: 212195 - DNA, 360 bp, Homo sapiens; identical to SEQ ID NO: 201332
  chr8:22437003-22437363
  hypo

SEQ ID NO: 212196 - DNA, 145 bp, Homo sapiens
  chr8:22485267-22485412
  hypo
acatgtgaggaaacagcctccgaggccaggtgggggcaggtcagacagcccaccgagcatgccccgctccatggtcctgcaccacgctggcagctgccacacctggccgctgacctgagaacacgctgtggctttccactagact

SEQ ID NO: 212197 - DNA, 458 bp, Homo sapiens
  chr8:22874765-22875223
  hypo
aaaccaggagtatttcgagaagcatcggtggccacctgtgtggtacctgaaggaggaagatcattaccagcgggcacggaaggagcgtgagaaggaggactacctccacctcaagcggcagcccaaacggcgttggctcttctggaacagtccatcctccccgtcttcctcggcagcctcctcctcatccccatcttcctcctcggctgtggtctgagatgctgccaccctcttctgaccctgctgctgttgtccccatccgccttcacccctctgctcttccgcatcaccccatccaccttacagggaccagggggcccacgtaaccaggacccagagggtggagctcttcttaccagccaccgtggctcagccagagaggagctgagccctgtggagcagaacgggaaccacctgcagaggtccccagacccaaagcaggacgggagacaactgct

SEQ ID NO: 212198 - DNA, 274 bp, Homo sapiens; identical to SEQ ID NO: 201334
  chr8:22925507-22925781
  hypo

SEQ ID NO: 212199 - DNA, 135 bp, Homo sapiens; identical to SEQ ID NO: 201335
  chr8:23021590-23021725
  hypo

SEQ ID NO: 212200 - DNA, 194 bp, Homo sapiens; identical to SEQ ID NO: 201338
  chr8:23386092-23386286
  hypo

SEQ ID NO: 212201 - DNA, 243 bp, Homo sapiens
  chr8:23399632-23399875
  hypo
tccatatgtgatgagacagtgatcccatagattatagtggagctgaaaaattcctattacctaggggcatcacaacgcattgcatttcgcccgtgtttgggatgatgctggtgtaaacctactatgctgccagtcatgtaaaagtatagcacacacaattagtaggtaatgcttgcaaataataatgaaagactctgctactggtttatgtatttactatgctatactttttgtcattacttt

SEQ ID NO: 212202 - DNA, 350 bp, Homo sapiens
  chr8:23409903-23410253
  hypo
tgaaaaatagaataggatttcgaccttgtggtaggtggaaaccggggttgtctttgtgctctcaggcatgtggctggcgtggggtagaagctctctatataatggttgagtgactggatgagcttcaaagctggtccctctggcttttcctgctaccccaggccacgtgcccagaaggaacgctgtcttacctgggaggtctttattgactgtttgacgcccttcccatcctatcccaaccccttccccatggcacctagtttccccaaccagaacgtacgttacttatgggcagagacggtctttgagcattgggtgggtggttgaacgcagtttctttgagattctgt

SEQ ID NO: 212203 - DNA, 205 bp, Homo sapiens
  chr8:23423713-23423918
  hypo
aggcccttgcgaggcgtcaacgtcatgatcatgggtgcagggccggcccatgccatgtattttgcctgctatgaaaacatgaaaaggactttaaatgacgttttccaccaccaaggaaacagccacctagccaacggtattttgaaagcgtttgtctggagttagaaagttctcttcttcaacacgtccctccccagggtgttcc

SEQ ID NO: 212204 - DNA, 36 bp, Homo sapiens
  chr8:23424342-23424378
  hypo
gctgacaaaggactcgcgcaacgcagaaggcctttc

SEQ ID NO: 212205 - DNA, 125 bp, Homo sapiens
  chr8:23429103-23429228
  hypo
cacgacccccctggacgtctgtaagacccttctgaacactcaggagaacgtggccctctcgctggccaacatcagcggccggctgtcgggtatggccaatgccttccggacggtgtaccagctca

SEQ ID NO: 212206 - DNA, 216 bp, Homo sapiens
  chr8:25105393-25105609
  hypo
cttcttcagttatggtgatccggatgctgtagtcctgcccgcaagaaaccgctcttcttaactgctaccataacatttttgctgcgtcagccgtagaactttttcatctcaaaggacgtcagtgcctgttctttaaaagtaagcgcatgtcaaggcgtgaaggggagggaggttgagaacacttgagcctgcaccgtgagcttactgagttcatta

SEQ ID NO: 212207 - DNA, 84 bp, Homo sapiens
  chr8:25249436-25249520
  hypo
cagttcagatactcccggccgttccggaaaggagaaaaggatccagacaatgaatttgctgtgagttcaccccttttgtccttt

SEQ ID NO: 212208 - DNA, 38 bp, Homo sapiens
  chr8:25338912-25338950
  hypo
acatttacaactggccgggcgtggtggcttatgcctgt

SEQ ID NO: 212209 - DNA, 52 bp, Homo sapiens
  chr8:26053988-26054040
  hypo
gccccagcatgatcccgcttcctgcccaccctcctcccgccccatctccagc

SEQ ID NO: 212210 - DNA, 41 bp, Homo sapiens
  chr8:26230451-26230492
  hypo
tgcatccagtcgggcgcggtggctcactcttgtaatcccaa

SEQ ID NO: 212211 - DNA, 40 bp, Homo sapiens
  chr8:26230732-26230772
  hypo
ccgactcaaacaaaaatgcgtccatgcactcttttccttt

SEQ ID NO: 212212 - DNA, 135 bp, Homo sapiens
  chr8:26267634-26267769
  hypo
ctacccctttgctgtcgagccccgatatttaatgagtaaacaaactcatataaaaccagtttggccgggctggtgactggttttaagaaagtcagtgatgatttcacggtgtttggggagcggtacccacaaacc

SEQ ID NO: 212213 - DNA, 270 bp, Homo sapiens; identical to SEQ ID NO: 201360
  chr8:26372150-26372420
  hypo

SEQ ID NO: 212214 - DNA, 272 bp, Homo sapiens; identical to SEQ ID NO: 201362
  chr8:26436526-26436798
  hypo

SEQ ID NO: 212215 - DNA, 78 bp, Homo sapiens; identical to SEQ ID NO: 201364
  chr8:27168528-27168606
  hypo

SEQ ID NO: 212216 - DNA, 226 bp, Homo sapiens
  chr8:27337092-27337318
  hypo
tctaagtcagtaaatagcatcggaaaaattggagtaaggacagagctgccagccagcccacggttctctccttgccctcctcccctgtgagacccctccccccaccaccctagaggaccaccggtcacttgcgcggccacccggtgtggctgcttctctgtcaccccgtcagcctccttgcaggtgaccttgcctttgattttccggtgaagcctccttttctcta

SEQ ID NO: 212217 - DNA, 127 bp, Homo sapiens
  chr8:27516398-27516525
  hypo
cagcggaagacagacgaggagaccctgaccctccagaagattgtcaccgactggcagaactacacacggctcttcagcggcctgcgcaccacctccaccaagactggagaggcggtcaagaacatcc

SEQ ID NO: 212218 - DNA, 168 bp, Homo sapiens
  chr8:27516773-27516941
  hypo
aacatcaatgccaccgacaaccacgtgcacagcatgctcaagtacctggatgacgtgcggctctcctgcacgctgggcttccacacccatgccgaggagctctactacctgaacaagtctgtctccatcatgctgggcaccacagacctgctccgggagcgcttcagc

SEQ ID NO: 212219 - DNA, 315 bp, Homo sapiens
  chr8:27779464-27779779
  hypo
gtgtcgctctgctggcccgtgcggtcccgcagcagggccaccgcctgctcggtctgcaccgcctgcgcctgcagcccccacagcgcgccctccagccgctgcactgcgcccgccagcgccagcaacgagtctgactggttctgcagcgcgtcctgcaccttccacacctgctccgtcaggtccgcttgcagcggagcctgcagcagccgcagctgcaagtcccggaagctctcattcagccggttcacattgcgagtcagggccttcaggtcgtcaggggagctgcgcggcctggacactgcggaggaggaagag

SEQ ID NO: 212220 - DNA, 124 bp, Homo sapiens
  chr8:27845168-27845292
  hypo
aggagagggaggacgaaggccgggagagagacagagaatcaactgtaggtggaaacagaagcaaatggatagaacaaggtgcccacccctgaccctaagcctgaacaccgggaccctctgctca

SEQ ID NO: 212221 - DNA, 159 bp, Homo sapiens
  chr8:27931114-27931273
  hypo
cctcccttattggctccaggggcgcaataccagccttctgagggagggaagccacccgcactgactccaatgtgagtcacccttccaggagccgctccaaggcacctacatctctccttctacggaaagccgcctaacgtcattccaggggtcttgtaa

SEQ ID NO: 212222 - DNA, 326 bp, Homo sapiens
  chr8:28206832-28207158
  hypo
agctcctggtgcagaaggcctcgcaccttctcagggagaacactccagccgaggggagctcttggcaggagagtgaggaaggagcaggccttcatgccacactcaggacccagccaaggacaaggacaggggagccactggacctggccccctctgaggctctcctgcaggggacttagacggagccgctatgcctggaagcctcacactgcctcagtggcatcactggcaatctgatttacagtgtgacaccgccctgcaggagataactcaagaccagcgcctgctaggtagagttcaaaatgacttcccgcttacttgagttg

SEQ ID NO: 212223 - DNA, 156 bp, Homo sapiens
  chr8:28207459-28207615
  hypo
caagatggccacaccgacctgtggccacgtgccccgtgcccaagggatggcctccagccctgggatgtgtgggagagccctcggccatacgaggccccagccgtgctgcccgcacactcaccggagagagagagcaggcggcggagggggcagcag

SEQ ID NO: 212224 - DNA, 203 bp, Homo sapiens; identical to SEQ ID NO: 201367
  chr8:28242682-28242885
  hypo

SEQ ID NO: 212225 - DNA, 78 bp, Homo sapiens; identical to SEQ ID NO: 201368
  chr8:28258795-28258873
  hypo

SEQ ID NO: 212226 - DNA, 164 bp, Homo sapiens
  chr8:28610787-28610951
  hypo
gcgccacagaccccgggtctccttggctgtctgtgggccgcccctggccaccttgtcctggctcgcagggtgcaggagcgcctcgttctctgggtggccggcttgctgctccggtttgggctgtcttaccataacaccgtcccagggctctgcaggccactgtg

SEQ ID NO: 212227 - DNA, 333 bp, Homo sapiens; identical to SEQ ID NO: 201370
  chr8:28748909-28749242
  hypo

SEQ ID NO: 212228 - DNA, 139 bp, Homo sapiens
  chr8:28938418-28938557
  hypo
ccgcactcgaatagcgtcttctaactccattctcttcaaatccactttccaaactacagctggagggagctttccgaaaaacaaaagtgaccatgtcccatgtcgctcgccaccttgcagctgccagggtttcccactg

SEQ ID NO: 212229 - DNA, 136 bp, Homo sapiens
  chr8:28938587-28938723
  hypo
catggtgtatttctgcggctcgatccgtccctcctgcaaacgctctactgattgattcattccacaaatacaatgacttggttactcttaatcactgtcagtgaaatctcttacagtcacacgtgagcatttaacc

SEQ ID NO: 212230 - DNA, 213 bp, Homo sapiens
  chr8:28950156-28950369
  hypo
tttagccccaacccagaggccgcacctccacctccagctttggcgcaacacagagcaccgctttattagaaaaacgttcacagctgttttctcggtgctttttacctggtgtgcgaggggagacggccgcttgcccctcttctcatcgcggacgggaaagagagacttgaggagctttggcatttgcggcacgaaggatttgacaggattcaa

SEQ ID NO: 212231 - DNA, 2254 bp, Homo sapiens; identical to SEQ ID NO: 201372
  chr8:29206007-29208261
  hypo

SEQ ID NO: 212232 - DNA, 210 bp, Homo sapiens
  chr8:29949204-29949414
  hypo
aacgtgcacaaacacgcaaacacatgcaggcacacacaaacacgcccacaacacagacacgcacgcacacaaacacacatgcacgcacaaacgcatacacagacacgcacacaaacgcacgcacagacaaacgcacacacacaacacccaaacacgcacaaggacgcacacacacgcacacacaaatacccatgcacacgcaaacacgta

SEQ ID NO: 212233 - DNA, 41 bp, Homo sapiens
  chr8:29951802-29951843
  hypo
ttgtcgtaaccgagcgagttatagagaaacaccacactttg

SEQ ID NO: 212234 - DNA, 99 bp, Homo sapiens
  chr8:29958255-29958354
  hypo
cactcggctatcatttatttctttgctttagtctaggtcattggttaactatgcctattcaagaaagttgtttctattcactaacgtgagagcacctta

SEQ ID NO: 212235 - DNA, 43 bp, Homo sapiens
  chr8:29962165-29962208
  hypo
agtgatattggagaacgtggcttggatctgcagcagctgttgg

SEQ ID NO: 212236 - DNA, 1018 bp, Homo sapiens; identical to SEQ ID NO: 201376
  chr8:30241612-30242630
  hypo

SEQ ID NO: 212237 - DNA, 361 bp, Homo sapiens; identical to SEQ ID NO: 201377
  chr8:30242697-30243058
  hypo

SEQ ID NO: 212238 - DNA, 213 bp, Homo sapiens; identical to SEQ ID NO: 201378
  chr8:30243175-30243388
  hypo

SEQ ID NO: 212239 - DNA, 400 bp, Homo sapiens
  chr8:30561836-30562236
  hypo
tctctcaaaaagactggtgtgtctggaggagaggcagaaggctaagaaagacaacaggataatggtgaaatgaacagaggcaagagcaagagaggaatactctggccaagggagggaaacgcaatgcttgtgctttcgtaaaatgggaagaataccacaaaagtacatgacactgaagttctacgctggagacggtgagaactcagactcttacttttggatttgctcttactggaatcctctgtacccaggccttcacttaggggctgctggcacgctttcgccagccatgatacatgcaggggcatgcaaatgtggtcaacttacaagaataatggaaccatgtaagcatgattacaaagtggaatgctttaacatattggaacgtgcttgattctga

SEQ ID NO: 212240 - DNA, 215 bp, Homo sapiens; identical to SEQ ID NO: 201384
  chr8:33372206-33372421
  hypo

SEQ ID NO: 212241 - DNA, 995 bp, Homo sapiens; identical to SEQ ID NO: 201385
  chr8:37553189-37554184
  hypo

SEQ ID NO: 212242 - DNA, 401 bp, Homo sapiens
  chr8:37702308-37702709
  hypo
tccacttctgctgtcccatcccgaaaggcagagcggaccagtgactggcggtgctggagaaggtcaccgatgtgcttcaccacagaccgtttgtcaagtctcagaactcgtaaccaggccagctgctcagccatccgcagcagcacagccagcagctcctgcaggcgggaggacgccgggtagggcaggtccacatttgccaatttacaaaatcgggcaagggaacatgaaagccgatctgcaggctgcagcgactgccaagccaggaaagtcgcagcagtgatgacgggcaagggatgcctcccggtcaccagccacgtctcatttgccagctccaccaactgcattgttcgagacagcatcttctctttgtcttccacgtatttggctggcacagaagg

SEQ ID NO: 212243 - DNA, 32 bp, Homo sapiens
  chr8:38032247-38032279
  hypo
aatgatctgtcggccggaggcggtggctcacg

SEQ ID NO: 212244 - DNA, 258 bp, Homo sapiens
  chr8:38146029-38146287
  hypo
aggccccagcctctccgctccgttttgatgatctctgcatcagggtatagtctctttgtaaagcactggttctgacaacgatctccagctgggcacacctgcgggtggcattcatactgcaacattctgttcaggcactccgattccaagccacaagggttttcatcagctggcttgcagttacagcggggaatctctgacaggtcagcaacctggatctgcacctttcctattactttgttagcctagaaaacaaaa

SEQ ID NO: 212245 - DNA, 240 bp, Homo sapiens
  chr8:38223278-38223518
  hypo
aaactaatgaaaccaaaaccaggaatcagtcatatagagaggctggaaaaagacaaggaaaaagatgatcatcaggtacttttatttcctttgacgttcactctgtttcagaggcttctgagttatggctatagtaaaaagatttaaattacggtttactcaagtattccatgtagtataaagtttaaatcttaaatgttatgtaaacataactgatccaaaatatactgaaatggaact

SEQ ID NO: 212246 - DNA, 226 bp, Homo sapiens; identical to SEQ ID NO: 201396
  chr8:38326050-38326276
  hypo

SEQ ID NO: 212247 - DNA, 143 bp, Homo sapiens
  chr8:38643832-38643975
  hypo
aacctaaagatgtcgccaggcctcttggcttgttactgaagcagcgaaataagtcagaaatcaaagacttagaagttacgaaaagaaaatctcaaaaaggagaatggggtcaggcgcggtgtcaggcctggaatcctagcatt

SEQ ID NO: 212248 - DNA, 113 bp, Homo sapiens
  chr8:38644035-38644148
  hypo
atatcgagacgcctgtctgtattttaaataaataaatatggagaatgggaaacccatcaggctgtaatctcacagggaatttagtaccctttacctaagacaagacctgggca

SEQ ID NO: 212249 - DNA, 44 bp, Homo sapiens
  chr8:38692767-38692811
  hypo
tctcaaaaaaaaaaaaaaaagtttacttccgtaggtaggaggaa

SEQ ID NO: 212250 - DNA, 105 bp, Homo sapiens
  chr8:38697062-38697167
  hypo
tgctcttagagagcggtagccatccataataaccaacttggatatgacgtcaaaagtgatgggggcaccaccattgagggcaggggaggacgtgatgcgactcac

SEQ ID NO: 212251 - DNA, 288 bp, Homo sapiens
  chr8:38786180-38786468
  hypo
ggtgtctgtcaacaagaaatcgacatccaagtaatagaataaaaacattaagcccacgcagcagaggatgatatagaatcgacttctcctgaagggaaagattaaatacacactttgaactggagaatggggagagtagctatcagcgtgtcgtgtgtccccgcgttagcatcagcaagtggacctacagggcagaggggaggagaggtgtttggccctagagcagcaggtagagccacggcccaggtcacctggtgcctgggattcgcttggctcccctgctttggt

SEQ ID NO: 212252 - DNA, 86 bp, Homo sapiens
  chr8:41290578-41290664
  hypo
cttctccctctctctgtctctctctctttccttgtgctgaaaaacatcgatctcaatctgcccttggacatcggtgctcctagttc

SEQ ID NO: 212253 - DNA, 63 bp, Homo sapiens
  chr8:41325383-41325446
  hypo
ctcacagtcaagatccgaattagatataagggcacagcaacaagagatcgcaggtccacagta

SEQ ID NO: 212254 - DNA, 34 bp, Homo sapiens
  chr8:41602335-41602369
  hypo
agcctccgcgcccgatgggagcatgatttctatg

SEQ ID NO: 212255 - DNA, 68 bp, Homo sapiens
  chr8:41643317-41643385
  hypo
cgtccattgctcctcggtgctttccagaccctttaaacaccctggcggagccttgctcggcccttctg

SEQ ID NO: 212256 - DNA, 53 bp, Homo sapiens
  chr8:41668308-41668361
  hypo
aacaggagaaacttcccacacctgtctccccgggaattcggaggccagggtgt

SEQ ID NO: 212257 - DNA, 34 bp, Homo sapiens; identical to SEQ ID NO: 201399
  chr8:42040329-42040363
  hypo

SEQ ID NO: 212258 - DNA, 85 bp, Homo sapiens
  chr8:42134201-42134286
  hypo
ccctgaagcacttcccgtatgttttcttgtttttttttttttgagacagtctcactctcagctgagacaggtgcgatctcgggtc

SEQ ID NO: 212259 - DNA, 39 bp, Homo sapiens
  chr8:42147521-42147560
  hypo
cattgcggttggccacccgtcctgggctctgtcttcctc

SEQ ID NO: 212260 - DNA, 85 bp, Homo sapiens
  chr8:42148195-42148280
  hypo
agatgggacagcaccacacacgggggcagggagcatagcagagagggagcaggattcatgatcagagagccgggccagggctgca

SEQ ID NO: 212261 - DNA, 43 bp, Homo sapiens
  chr8:42255793-42255836
  hypo
tgagctgtctcactccgttgcccaggctagggtgaagtggcat

SEQ ID NO: 212262 - DNA, 42 bp, Homo sapiens
  chr8:42256016-42256058
  hypo
attacaggcatgagccactgcgcctggcagaactggttaaaa

SEQ ID NO: 212263 - DNA, 268 bp, Homo sapiens
  chr8:42293888-42294156
  hypo
gacagcagctccactcttgcctttgccaaggccacggctccgatcttggcagctgcctctttccttcttctctcacatccgcatccaggccgtcgtccaaagccagtgcccctgtcaaacgtgccctgtgtggcccctgtcaaatgtgccctgtgtggcccctgctcacagctccacggctcccctctcgaggcgaggccttccttcctgtgtccatcggccacgtgctctgcatccacgacctgcagaccggcgacctcctagcttg

SEQ ID NO: 212264 - DNA, 120 bp, Homo sapiens
  chr8:42316750-42316870
  hypo
ctcaaaaaaaaaaaaaaaaaaaaaaaacataaaaaataacaacaaaatccatgagaatgacaaggaaaggagtaattcagcaaagaaaatcatcattggcttcggtatctaaaaaaacaa

SEQ ID NO: 212265 - DNA, 313 bp, Homo sapiens
  chr8:42333236-42333549
  hypo
tccttctggctgcagtgtggcgaccacattggatacaaggcaagcagaaacatggaggatgagtcaggagcccgctgcatggcttaggcatgagatgaggcatccgggaccaggctgtggacggtggtgggtgggagggaatacgatgatttaagagaactgcagcggcaaaatccaacaggaccagatggtggattaaacatgggggtggagagaggatacatggtttatggaaccgaagtgaaaaataaccgagtgggtttttcttctcttttgcattgtttttagttttgctttttggggctaggatggg

SEQ ID NO: 212266 - DNA, 196 bp, Homo sapiens
  chr8:42750012-42750208
  hypo
taaaggtttctctgcccttggtgtagggaagaatgtttgaaaaaaagaccattgagaatacttcaggtaagtttttttttttttacacttacaaaatgctaaatgatcaggggtcaactatcaagtggtactctgtaaggcaaccttaaaaactcactgctgacccaggctcggtggctcacacttttgatcccag

SEQ ID NO: 212267 - DNA, 233 bp, Homo sapiens
  chr8:43059742-43059975
  hypo
gctcccagaccagcgcgaggagctgcgcccaggcctagcaggcggtttggccgcggctgcagcttagcgtctaggccacgccaggcaggctcccggagccgtccactgccccaccaggaacgttccgggctcttctgctgcgcgcggaagcaagtgaaatccagcctcaaagactctgatggaagaacacctgtgaataccgcgccctctaggcgtccgccacaccccacggc

SEQ ID NO: 212268 - DNA, 209 bp, Homo sapiens
  chr8:48172269-48172478
  hypo
agacagcaaggcccggcggaggtggcaatggcagacctggtttctcggcggagtcccagtgggaggcccggtgtccaaaatcctcaactagattgggcatgccgtttatcttgttccaactgttgacagtaatggcactagcaataatgtccttcccaggcaaagatggtttttcttccgtgttttcagccactgcagagtggacatct

SEQ ID NO: 212269 - DNA, 203 bp, Homo sapiens
  chr8:48348567-48348770
  hypo
gttccttacctatttcgtagggttgttgtgaatcgagtatgagaatggccttgaaaatgccttgaagagctgatggcagtgacagtggctgccatccttgcatggccaggcacttcgtggtacatttgctgtgtttgcacctgtgattgtagtgctcttggggtagccgctactgtgtccatttaaaacggaggacactctta

SEQ ID NO: 212270 - DNA, 239 bp, Homo sapiens
  chr8:48396519-48396758
  hypo
aaaattaccaagtacagcttcgtgttaaaaaaaaaaaaatgtcgatgcatctttatcaagttagcaaacgatttctatgattgtctatttccagagtaatttgattgaacgggttctcaggtttccatagctggggttgtaggagtattctccacaagcgaagatagaccaagtgcttgacacgtgacctcaccgaaagaagtcacttaataaagtgcggaatgagtgaagggaagttg

SEQ ID NO: 212271 - DNA, 230 bp, Homo sapiens
  chr8:48585773-48586003
  hypo
tggggggaatcccatcatgtcgctggctgtccatcatggctgtgttgctgcaagctgggacaccaggttttatcctgctgggatatgcgtgtctaaacgtgtactgtcgcagagaatgcctcttattgttgttcttatcgtaatgttatcctgcagcttttctcagtatcgagcatccacacaaagcaaatatttctttcatgggaaacggtaaaaatgggaaaaggaca

SEQ ID NO: 212272 - DNA, 40 bp, Homo sapiens
  chr8:48593635-48593675
  hypo
agagagagagagagaatgcgaatcttgagaccaggactgc

SEQ ID NO: 212273 - DNA, 442 bp, Homo sapiens; identical to SEQ ID NO: 201401
  chr8:48649725-48650167
  hypo

SEQ ID NO: 212274 - DNA, 1221 bp, Homo sapiens; identical to SEQ ID NO: 201402
  chr8:48650227-48651448
  hypo

SEQ ID NO: 212275 - DNA, 58 bp, Homo sapiens
  chr8:48675290-48675348
  hypo
ctgggtgcatcttagattcaggcacatctcaagtgagctgaaacgcagtactcaattg

SEQ ID NO: 212276 - DNA, 120 bp, Homo sapiens
  chr8:48683807-48683927
  hypo
cagtgaatctcaaaaaaaaaaagttactggtcattagttaataaacggtgctttaaaaattctcgtcagtgaaataatttttatgtacttatttttttgagacagagtctcgctttgtcg

SEQ ID NO: 212277 - DNA, 180 bp, Homo sapiens
  chr8:48711778-48711958
  hypo
ttctcttcctccttgcgcagctgttggtcacagaaatctgccagcgtcatgtaagcatcaatcaccccagctgcaggcccacagctccaggagggaggctgggcctcctcctcagccgcctgcacagcctcagagaggtgctggaatgctctctggtacagacccgcgatcacctggaat

SEQ ID NO: 212278 - DNA, 566 bp, Homo sapiens
  chr8:48744129-48744695
  hypo
ggctgatcccaggccggccacacttccacccgcggagagaactgggcgcactcctggacccccaccagagcgccatgagggctgcatccctgtgggggagccccaggaggctggtttggagcagtcccgcaacctggtttgcaggtgacattggaggcagtgtctggcaggaagcctgttcacttcgtctgtatcctgtgacagaaactgcatcgttctgatcaaattcttgacaagatacaaaccttctctcgtttttgctcagcaacgccttttctggcatacatcaaactgagcttctcctggtccctcataaaccgtctgcgcagtcgtagtaggtccgtccggccggccgcacctggagagggaaagcaggcccagttactccccgccgcccagacacttggctctgctggttcattttcacctcgggtttcctcaaagacaaaacctacaggtgccgcagaggcagcgaccgggagcaggagtgcaggggccacagctgcaactggaactgctcagcagtggattcagcaggcatgagcgctgaacgggccaggcccctc

SEQ ID NO: 212279 - DNA, 75 bp, Homo sapiens
  chr8:48854908-48854983
  hypo
ggagactaaggaggcgagagggacaggcggcagaggcagaggccaaagatgaggcccatcggctcagttttttgg

SEQ ID NO: 212280 - DNA, 169 bp, Homo sapiens
  chr8:49055453-49055622
  hypo
cgtgggagaaggaagcgcaacctcatgatgcttttggatgcgggtaaaataaaccccaactcaggttgacttaaactgtagggaaactggtgatctattgccgacattctagaaataggtgagcagggtttgtttgtctgagacaccaccatgtcgccaaggccccagg

SEQ ID NO: 212281 - DNA, 248 bp, Homo sapiens
  chr8:49241526-49241774
  hypo
aagggggcctctctctatcccggccgggtgcagattaccagttcctgggccccacccagccgggaaagcctgaggtccttgctcagtgactggactcacgggcttctccggtggtggagggcctggcccgggcgtaaatgtctgaggggcttactggacggcctgggagtgcagccactcagccccctcgggacaccgaggctggggattcgcagccctgcagggacgggctccttccctgagctctt

SEQ ID NO: 212282 - DNA, 88 bp, Homo sapiens
  chr8:49334894-49334982
  hypo
gagggacctgccctgctggtcggagtctgctctgagacccagggaccgtgcgttctgcagggaagctggcgcatgcccttaggttctg

SEQ ID NO: 212283 - DNA, 208 bp, Homo sapiens
  chr8:49339746-49339954
  hypo
tgtgcgggtggcacctgccctatttgtgctcttcgttgtttgctactgggatcagtggcttacgacgaacagcccatggccctggggcctcctgcactgccgtctcctgggagaaaggccgctctcacagccagccatgtgcacatcatcccattggtacccacagatggcactggccccttccttcaaacccgggccaagctccaaa

SEQ ID NO: 212284 - DNA, 51 bp, Homo sapiens
  chr8:49382242-49382293
  hypo
tttatctcagctgaaatgtacgggaaaagtagacgtcaatcaggtggaaaa

SEQ ID NO: 212285 - DNA, 460 bp, Homo sapiens
  chr8:49382383-49382843
  hypo
ggacagtgctgggcacggcggctgtgggcagtgtgggccgacagaatccccaggccaggtcaggtgtcccggccatccatggagaacaaggagtcattacagaggctcggtggcacacggtgaaaatgaggttcttctgggaaattttaggctgcaggatgtgagtggcccacagcagggaaggtctggcaggcagcgagagcttccggactggaccccaagaaggaggtcaggctgggaacacagactcggaggttcccatccacagatggtaccgaggctactgtgtcgggtcagatcttccaggagaccggaggagggacgtggctgcgggaagcaagcccagagccgccagcccgggaccagcgggaggccagggagcaaggccacagcagaggcagccaggaccccaaatatcagaggctcaaatgaagttgacgttagctgttttatctgttaa

SEQ ID NO: 212286 - DNA, 116 bp, Homo sapiens
  chr8:49390183-49390299
  hypo
agcccagcatcccacaaggacggacactcactacagcccggtgcctgcggagtattccgaacgcgagatccaaggaaaccacgaaggctcctctgcgggctcccttgcccctctgc

SEQ ID NO: 212287 - DNA, 58 bp, Homo sapiens
  chr8:49390625-49390683
  hypo
gccctggagaccaggccaagggaagccttggagtgaacctggtcgcaggtgcgcaggt

SEQ ID NO: 212288 - DNA, 164 bp, Homo sapiens
  chr8:49496420-49496584
  hypo
agtcctcgcctgactggcctcttccctacatgctgttctccacgttgccttcccgtgagctttcctttttgcctaaacacatttttcagctccatgtttctgacagactggttactaaaatccaacccaacaacgtgtaggacggccaagtgtataatatgcat

SEQ ID NO: 212289 - DNA, 172 bp, Homo sapiens
  chr8:49571743-49571915
  hypo
gttaagaaagaattatttcgtgagttttacctagcagtttacataaatcagtttacagcagatttggagaaaaagaacattaaaagcagaccaggtgaacgagtttgaaacggcacacggaattggaagggagaaaaggttgtgatcactgctcaaacaagttcttccttcc

SEQ ID NO: 212290 - DNA, 43 bp, Homo sapiens
  chr8:49572364-49572407
  hypo
tttttgcaggatgacggatttgaacgagcgtgttgcctcttgt

SEQ ID NO: 212291 - DNA, 42 bp, Homo sapiens
  chr8:49609208-49609250
  hypo
tgcacatggctctcaggctccgtgaaaagcttgcagtgagct

SEQ ID NO: 212292 - DNA, 323 bp, Homo sapiens
  chr8:49747318-49747641
  hypo
ttctagaagcaggcttgactggcatgcatgtgcatagatgcgggtggcccctcatcaggagggatgaggagaggagccgtgggctcgcggaagagcagcgagggacactggcgcacagagcagagaggagcagtgagcaggcggcacccccgggcagggtaaaagggcacgaagaaaagcgaaggtgcgaggggaggaccgactggcagcaagcgtccgggaggggcaggcaaaggctctcctcgaagtgcctttacgcttaggtagaatttccatgcctccctcgcgctccaccctgctgcgtgaacattttcctggcctgc

SEQ ID NO: 212293 - DNA, 35 bp, Homo sapiens
  chr8:49797125-49797160
  hypo
atacataagaaacagggggccgggtgcggagtctc

SEQ ID NO: 212294 - DNA, 162 bp, Homo sapiens
  chr8:49808519-49808681
  hypo
gaaaaggagtccccgaattaattactgctgtaagattgagcttgagaatttgtcttacaaaatcttttaataatgtattattctactcacaaaacagatattggttttgtgcctagtatgttccctgaggtgtacagggaacctcaaggagctcccagacta

SEQ ID NO: 212295 - DNA, 37 bp, Homo sapiens
  chr8:50014663-50014700
  hypo
aatcaggcacttccaagagccgacccatcagtctgca

SEQ ID NO: 212296 - DNA, 40 bp, Homo sapiens
  chr8:50071091-50071131
  hypo
acagtactgctctatgtggccgagcgcagtggctcacgcc

SEQ ID NO: 212297 - DNA, 34 bp, Homo sapiens
  chr8:53657305-53657339
  hypo
accgcgcctggccgactaagaacaattctaaagg

SEQ ID NO: 212298 - DNA, 103 bp, Homo sapiens; identical to SEQ ID NO: 201408
  chr8:53853411-53853514
  hypo

SEQ ID NO: 212299 - DNA, 265 bp, Homo sapiens
  chr8:54154411-54154676
  hypo
agggtaacggggagcgatgattccgcgggaacagccagtgcccctgggagctgctaagctcctcctctcagttgtcccggctgtggaatcatgcgcctctggacccctagaaggaacgttctagtgcattcagggttatgtgcagggtgagcgcttctcacgcccaacagcacctataagaaaatggcacctcgctaatgactggcgtgcactttcctagggcacaactacccggatgcctagcggtatatggatacttaaaatt

SEQ ID NO: 212300 - DNA, 215 bp, Homo sapiens
  chr8:54507139-54507354
  hypo
cagctcagcatcccaagggcggcatggctcagacgccccggtccgatgggctaggctcatcttagagaagttgcccagcgagccccaccccatgcggccgggaaatcaggcactgcggggggcgccgtgtggctggtggatgccgtggacgtgaaggcgacgaggcatgggtgacgggttccctggtgtcgggaagccacgccccgtggctgtgc

SEQ ID NO: 212301 - DNA, 121 bp, Homo sapiens
  chr8:54640632-54640753
  hypo
ccttgcctttgaacttgccacgcagcaggcagggtgacgtcaaacacaagccttctcacggtagccgcctgttcagtcctctaattgcttccattattccgggaaaatgtcctcactcctt

SEQ ID NO: 212302 - DNA, 32 bp, Homo sapiens
  chr8:54647893-54647925
  hypo
aacgggctggcgtctgtagctgacttggtaca

SEQ ID NO: 212303 - DNA, 191 bp, Homo sapiens
  chr8:54750268-54750459
  hypo
tttgaaatcactctcgcagttctgtgaagaattgctcctactgaggcagcaaggatagcagagacagacagcaggcaacaggcaataacaacagagcacatgcaaggggaacacaacatgcacgaggcaggaaccgcagacacaggatcgcactcagattcgaggcatcttttggacgtagagctggaaga

SEQ ID NO: 212304 - DNA, 38 bp, Homo sapiens
  chr8:54956722-54956760
  hypo
tattacaggtgtgagggagccaccgtgcccagccttcc

SEQ ID NO: 212305 - DNA, 116 bp, Homo sapiens; identical to SEQ ID NO: 201413
  chr8:56014011-56014127
  hypo

SEQ ID NO: 212306 - DNA, 68 bp, Homo sapiens
  chr8:56361773-56361841
  hypo
ctctggttctagaaacaattcgcctgcagccagctggctggactatttacaggcccattgcgggctgt

SEQ ID NO: 212307 - DNA, 310 bp, Homo sapiens
  chr8:56362505-56362815
  hypo
gaggctcaaggtggagcccacgggttcctcctgcaggtacatacccagcgagcagcggtggtgaggtgcggtggacactaggagggagctaggggtgccacgtccatctggccgggcttcaaggcgccatgcagccttcacgcggtcccaggtgtccttccagcgcttagcgggtcggctcagctctgtctccaacctctgcaggcgtgagatggcgtcaggctgggctcgggggcagctgtggtagcagggccacaccacacagcacctgctctggggagcgcctccgtcaaaccgttcttcctcaggg

SEQ ID NO: 212308 - DNA, 225 bp, Homo sapiens
  chr8:56364012-56364237
  hypo
ttctcctgctccaggctactcgagtctgcctggaactggcctggagaaggtgcgttctgggccttaaagagtccgactacacctatgccgtacaggcccccagaatgcagcagtactgccttggaccgccggatgcgccagcagacaacggtgaagcggttctggcggtagcagtaggacacgcgctgcagggcgttgtcctggacactctggggcacgatcagc

SEQ ID NO: 212309 - DNA, 180 bp, Homo sapiens
  chr8:56364333-56364513
  hypo
cccaggccaaggcactgatagtcgcggcagcaagccctttccaccaggaggctgctcatggtcatgccgtccgagggcttcaaggctgaggacggggtcagtgtgctgggctccagctcttccgacactgagatctcctcctcctggtcctcagagggcggctggctccagtgctcctag

SEQ ID NO: 212310 - DNA, 1174 bp, Homo sapiens; identical to SEQ ID NO: 201415
  chr8:56792065-56793239
  hypo

SEQ ID NO: 212311 - DNA, 65 bp, Homo sapiens
  chr8:57390711-57390776
  hypo
gaaagagcaggtgccgcgccacctcggagccatggtcgcgggcgggggcacggtgaagcggctgt

SEQ ID NO: 212312 - DNA, 80 bp, Homo sapiens
  chr8:58044529-58044609
  hypo
gattacaggcgtgagccactgcgcccggcctgtttttttttacaaatctcaaagagctcgctttctgggataactgagaa

SEQ ID NO: 212313 - DNA, 222 bp, Homo sapiens
  chr8:58122848-58123070
  hypo
tcgggtggggctgtcgactggcaccacggcctgtcagaccgtgggcggggggcgttgcaggcacagtgcggttcctagtcttaggcatgctcacttgaggcgttcttcccctacctgtcgactgatctcagaggaaggagactgagctgctcagccctgccggtgtggctggcagggtgtcccgcattagcccatgtgcccgaggtggagtacaggactgga

SEQ ID NO: 212314 - DNA, 87 bp, Homo sapiens
  chr8:58991411-58991498
  hypo
tttttgcctttttaatatggtgcgtgctagatacttgagaaattgctcagaacaacaacaaccctcgtgcatttattttgcatgtta

SEQ ID NO: 212315 - DNA, 238 bp, Homo sapiens; identical to SEQ ID NO: 201421
  chr8:60030908-60031146
  hypo

SEQ ID NO: 212316 - DNA, 349 bp, Homo sapiens; identical to SEQ ID NO: 201422
  chr8:60031791-60032140
  hypo

SEQ ID NO: 212317 - DNA, 152 bp, Homo sapiens
  chr8:60506003-60506155
  hypo
acatcagtgtggtacggtagtcaccctttatccacagtttcagtttccatggtttgttacctgccatcaaccctgtgccgaaaatactaaacggaaaattccagaaataaacaatgcgtaagttttaacttgcctgcagttctgagtagtgt

SEQ ID NO: 212318 - DNA, 54 bp, Homo sapiens
  chr8:60506185-60506239
  hypo
ctctcaggacatgaatcttccctttgtccagcagatccacgctgtaacagcttt

SEQ ID NO: 212319 - DNA, 93 bp, Homo sapiens
  chr8:61034762-61034855
  hypo
ccaccacgccgggctgagggaattaatttctaactatagttagcagtaaatccattcaccactttgcaatacgtcaataatataattatcttt

SEQ ID NO: 212320 - DNA, 292 bp, Homo sapiens; identical to SEQ ID NO: 201424
  chr8:61193765-61194057
  hypo

SEQ ID NO: 212321 - DNA, 144 bp, Homo sapiens; identical to SEQ ID NO: 201426
  chr8:61822883-61823027
  hypo

SEQ ID NO: 212322 - DNA, 624 bp, Homo sapiens; identical to SEQ ID NO: 201428
  chr8:62626290-62626914
  hypo

SEQ ID NO: 212323 - DNA, 399 bp, Homo sapiens; identical to SEQ ID NO: 201429
  chr8:62627034-62627433
  hypo

SEQ ID NO: 212324 - DNA, 288 bp, Homo sapiens; identical to SEQ ID NO: 201436
  chr8:65494311-65494599
  hypo

SEQ ID NO: 212325 - DNA, 38 bp, Homo sapiens
  chr8:65757970-65758008
  hypo
ttttttttttttttttgagacggagtctcgcgctgtcg

SEQ ID NO: 212326 - DNA, 38 bp, Homo sapiens
  chr8:65758248-65758286
  hypo
cgtgagccaccacacccggcccctattcttttttattc

SEQ ID NO: 212327 - DNA, 213 bp, Homo sapiens
  chr8:66548504-66548717
  hypo
aaataaataaataaatactaaatataatcatgcttctgccattattgagaaaagtaattcttcctgcacactgccattacagaatagatgactgctattaagaagcagggggtgtgttcacaaaaaaataattaccagtttcctaagcacctatggattataagccttagggaggtatttaaagattttaataatctgtattcccatattaaa

SEQ ID NO: 212328 - DNA, 449 bp, Homo sapiens; identical to SEQ ID NO: 201440
  chr8:67417575-67418024
  hypo

SEQ ID NO: 212329 - DNA, 45 bp, Homo sapiens; identical to SEQ ID NO: 201443
  chr8:68863998-68864043
  hypo

SEQ ID NO: 212330 - DNA, 60 bp, Homo sapiens; identical to SEQ ID NO: 201444
  chr8:68864119-68864179
  hypo

SEQ ID NO: 212331 - DNA, 276 bp, Homo sapiens; identical to SEQ ID NO: 201445
  chr8:68864195-68864471
  hypo

SEQ ID NO: 212332 - DNA, 227 bp, Homo sapiens; identical to SEQ ID NO: 201446
  chr8:68864942-68865169
  hypo

SEQ ID NO: 212333 - DNA, 56 bp, Homo sapiens; identical to SEQ ID NO: 201447
  chr8:69242747-69242803
  hypo

SEQ ID NO: 212334 - DNA, 56 bp, Homo sapiens; identical to SEQ ID NO: 201448
  chr8:69243011-69243067
  hypo

SEQ ID NO: 212335 - DNA, 33 bp, Homo sapiens
  chr8:71017206-71017239
  hypo
ggcgtgagccaccgcgcccagatgatttggctt

SEQ ID NO: 212336 - DNA, 269 bp, Homo sapiens
  chr8:71447612-71447881
  hypo
tgctggtcccagatgaaacccgcgacacaggctgagtatttctgttcctttttgcccccgctctttcctgattaattatttctaaataatgcgttttaaccgatcaagcgttgccttttccaatactacctatgacctgcccctcccctattctaagcctataaaaagctcgtgacccagccacgaggggaggaaaaaaccatccgactaagggggtgggcgaccaccccccagagtcccttctccgctaattgctgttcccttgctca

SEQ ID NO: 212337 - DNA, 146 bp, Homo sapiens
  chr8:71447941-71448087
  hypo
gcgtggtacaagagcttgggaactgccgaacgcgggtacaagagcttgggaaccgccgaacgtgggtacaagagcttgggaaccgccgaacgcggatagaagctataacacaggcgagctggggcatgccagcgtggctgagcagg

SEQ ID NO: 212338 - DNA, 57 bp, Homo sapiens
  chr8:71448124-71448181
  hypo
gcaaagtgaccgagaagaaaaatcctgcatcaaaagttacagttgctgccgggagct

SEQ ID NO: 212339 - DNA, 70 bp, Homo sapiens; identical to SEQ ID NO: 201457
  chr8:72756949-72757019
  hypo

SEQ ID NO: 212340 - DNA, 199 bp, Homo sapiens; identical to SEQ ID NO: 201462
  chr8:73449440-73449639
  hypo

SEQ ID NO: 212341 - DNA, 40 bp, Homo sapiens; identical to SEQ ID NO: 201463
  chr8:73450162-73450202
  hypo

SEQ ID NO: 212342 - DNA, 235 bp, Homo sapiens
  chr8:73999532-73999767
  hypo
tgccttgcttacctcgtatgtaaaacgagaccaaaatgaggactaacatcagcgggttgagggatccaagtaagttaataactgtgaagtgcttgggagagcgcctggtatggaggaaatgtgaagtgttaacaacttgaccctccttcactgctcacccagggccgcagccaaattctgctaagtcaagtccatttgaatactggctccagtcaggccccgctcgttttttttc

SEQ ID NO: 212343 - DNA, 235 bp, Homo sapiens
  chr8:74004014-74004249
  hypo
caactgtgttctttcagcatcgggcctggccacgggttgaagccctcttcaaacagcacagaggcaggagggtgctccccgccactgggtatccggttgcccagggaatggcatagccccagaaaatgctgaggctcccacatgtcgggatccttcagctcgaaccctaatatctgtgtggctttggggatgatgtgattaacaggagcagggcgacttccacttccatggctgg

SEQ ID NO: 212344 - DNA, 493 bp, Homo sapiens
  chr8:74360978-74361471
  hypo
agagttggtggacagagcaacgacaatccagctggagcgatggttcagggtatgtgttcacccagccctttcgggacgtcgcgtgcctgcactgtgggaacgcaagtggacagccggtccctgccgtgggcgctaggggccagtgctcagcgcgggaatattcccaccgccacgtgcgcgcggacagcgggtactctgaggaggggcctgcagcccggctggggctgggaagacttcctggacgaggggcagcccgggttttcctcaaggatgagctggagtcggcccccggcgcaggagcaaggtgccgggagagggccgagctgggtgagaggcctgggccagccaacagcggccttcgagcagggaccgcgcagctccgtgtccccgcagtgggagggcggcgggcaggggccgggcgagttaggccgcaagcatctgctggggccgtcgcagcaccatcccacagaccgccactgaatcaacagcagcc

SEQ ID NO: 212345 - DNA, 258 bp, Homo sapiens
  chr8:74371938-74372196
  hypo
acatgctgctgtcatcacacccacgctgttgtcacaacacccaacgggctgttactaagggccctggtatgctgctgaatatatgcattcaataggaattttcaaaacatatttcaggaatacttgtccttggttccgcatcatctgctcaatgcagccactgtctctggaaggagcaactcctatcgggcacggctcctttgactcttggggcctcctgcgtccccagccccagccgtgaatacacaatggagatca

SEQ ID NO: 212346 - DNA, 141 bp, Homo sapiens
  chr8:75737615-75737756
  hypo
gaaagcacaattagattcagcggatatccccaaagccaggcggaagcgctacatttcgcagaatgacatgatcgccattcttgattatcataatcaagttcggggcaaagtgttcccaccggcagcaaatatggaatatat

SEQ ID NO: 212347 - DNA, 46 bp, Homo sapiens; identical to SEQ ID NO: 201471
  chr8:75896508-75896554
  hypo

SEQ ID NO: 212348 - DNA, 204 bp, Homo sapiens; identical to SEQ ID NO: 201478
  chr8:77589894-77590098
  hypo

SEQ ID NO: 212349 - DNA, 208 bp, Homo sapiens; identical to SEQ ID NO: 201482
  chr8:80803900-80804108
  hypo

SEQ ID NO: 212350 - DNA, 37 bp, Homo sapiens
  chr8:80998635-80998672
  hypo
gccaccgagcctgaccggaaggttctagtttttaaaa

SEQ ID NO: 212351 - DNA, 161 bp, Homo sapiens
  chr8:81213157-81213318
  hypo
ctctttgggaagtggagctccgatgatgtgcagatctggcacttgcttgcaggattacactgcagtgaaggagaagtatgccaagtacctgcctcacagtgcagagcggtatgccgccaaacgcttccgcaaagctcagtgccccatcgtggagtgcctca

SEQ ID NO: 212352 - DNA, 311 bp, Homo sapiens
  chr8:81213356-81213667
  hypo
aagctcatgatcatgcgcatcgtcaagcacgccttcgagatcatccagctgctcacaggcgacaaccctctgcaggtcctggtgaacgccatcatcaacagtggtccccgggaggactccacactcactgggcgagccaggatcgtgagacgacaggctgtggccgtgtccccattaagccgtgtgaatcaggccatctggccgcagtgcacaggagctcttgaggctgccttccggaacatcaagaccattgctgagttcctggcagatgagctcatcagtgctgtcaagggctcctccaactcctatgc

SEQ ID NO: 212353 - DNA, 273 bp, Homo sapiens; identical to SEQ ID NO: 201484
  chr8:81398155-81398428
  hypo

SEQ ID NO: 212354 - DNA, 332 bp, Homo sapiens; identical to SEQ ID NO: 201485
  chr8:81490259-81490591
  hypo

SEQ ID NO: 212355 - DNA, 300 bp, Homo sapiens; identical to SEQ ID NO: 201486
  chr8:81785141-81785441
  hypo

SEQ ID NO: 212356 - DNA, 660 bp, Homo sapiens; identical to SEQ ID NO: 201487
  chr8:81785467-81786127
  hypo

SEQ ID NO: 212357 - DNA, 360 bp, Homo sapiens; identical to SEQ ID NO: 201488
  chr8:81786427-81786787
  hypo

SEQ ID NO: 212358 - DNA, 110 bp, Homo sapiens; identical to SEQ ID NO: 201489
  chr8:82192514-82192624
  hypo

SEQ ID NO: 212359 - DNA, 113 bp, Homo sapiens; identical to SEQ ID NO: 201490
  chr8:82193698-82193811
  hypo

SEQ ID NO: 212360 - DNA, 34 bp, Homo sapiens
  chr8:82680449-82680483
  hypo
ctgggaggagccaagatggccgaataggaagagc

SEQ ID NO: 212361 - DNA, 40 bp, Homo sapiens
  chr8:83135626-83135666
  hypo
ataatttaaaaaattaggcccggcgcggtggctcacgcct

SEQ ID NO: 212362 - DNA, 40 bp, Homo sapiens
  chr8:83135906-83135946
  hypo
ggcgaaagagctagactccgtctcaaaaagaaaaaaaaaa

SEQ ID NO: 212363 - DNA, 215 bp, Homo sapiens; identical to SEQ ID NO: 201496
  chr8:86132759-86132974
  hypo

SEQ ID NO: 212364 - DNA, 89 bp, Homo sapiens; identical to SEQ ID NO: 201499
  chr8:87527032-87527121
  hypo

SEQ ID NO: 212365 - DNA, 32 bp, Homo sapiens
  chr8:92433536-92433568
  hypo
tgagccaccgcgcccagcctaaaagttaagag

SEQ ID NO: 212366 - DNA, 120 bp, Homo sapiens
  chr8:94684092-94684212
  hypo
atcagaacgatatatcaccaatatcacagtgtgtaaacactgtgcttaattacaaatatcagagcgatatatcaacagtgtgaaaacactgtgcataattaaaaatatcagagcgatatg

SEQ ID NO: 212367 - DNA, 157 bp, Homo sapiens
  chr8:94685462-94685619
  hypo
gtcaatatcacagtgtgtaaacactgtgcataattacaaatttcagagcgagggagcgatgtatcaccaatatcaccgtgtgtaaacactacatgtaattacaaatatcagagcgatatgtcatcaatatcacaacgtgtaaacactgagtattata

SEQ ID NO: 212368 - DNA, 219 bp, Homo sapiens; identical to SEQ ID NO: 201505
  chr8:94712910-94713129
  hypo

SEQ ID NO: 212369 - DNA, 89 bp, Homo sapiens
  chr8:94747734-94747823
  hypo
ttcttaaatctctttcgtcaatactgagggacagattttttaagtgaacataaaatccaagaggggaacgagaacgtgttcttctggga

SEQ ID NO: 212370 - DNA, 209 bp, Homo sapiens; identical to SEQ ID NO: 201506
  chr8:94929137-94929346
  hypo

SEQ ID NO: 212371 - DNA, 77 bp, Homo sapiens
  chr8:95556567-95556644
  hypo
attaatattctgcagccacacgtatcaacattcacactaaataaagattatggccgggcgcagtggctcacacctgt

SEQ ID NO: 212372 - DNA, 163 bp, Homo sapiens; identical to SEQ ID NO: 201513
  chr8:95653853-95654016
  hypo

SEQ ID NO: 212373 - DNA, 326 bp, Homo sapiens; identical to SEQ ID NO: 201514
  chr8:95654337-95654663
  hypo

SEQ ID NO: 212374 - DNA, 157 bp, Homo sapiens
  chr8:95865517-95865674
  hypo
tgacggagcgagactctatctcaaaaatcaagaacaaaccaaaaatttttaagatgaacaagtatagcatgatagttatgataggggattctgggactaaccgcgtgcttaagcttgaatgccagcttcatacttaaatagccgtataatcttgaac

SEQ ID NO: 212375 - DNA, 120 bp, Homo sapiens
  chr8:95942702-95942822
  hypo
actattagtaattgtactgacgcgggcagggctgatgaacaacccagccattgtgcttgacttgccgagggtggcaatccctggtaagattttggcgacgaaggctatttctgttaagag

SEQ ID NO: 212376 - DNA, 40 bp, Homo sapiens
  chr8:96099108-96099148
  hypo
gcgtgagccaccgcgccccggcccctcttgtctcttgagt

SEQ ID NO: 212377 - DNA, 187 bp, Homo sapiens
  chr8:96145224-96145411
  hypo
ctgttctccctacttcgcccccatccctagtctaccctaagcaacttcgttacctctctacgaacccatcagagcgcttagctatcagatcaattagggcacatttaaccttatatactatgcaataattacagtttctaggtatgtgaagtaggctgatggggttttgtgtcgtcaaagttttggg

SEQ ID NO: 212378 - DNA, 482 bp, Homo sapiens; identical to SEQ ID NO: 201515
  chr8:96145988-96146470
  hypo

SEQ ID NO: 212379 - DNA, 38 bp, Homo sapiens
  chr8:96229505-96229543
  hypo
ctcatatgagcctgtcgcccaggctggagtgcaatggc

SEQ ID NO: 212380 - DNA, 45 bp, Homo sapiens
  chr8:96465482-96465527
  hypo
ttacaggcgtgagccaccgcgaccggccattttcctgcattttgc

SEQ ID NO: 212381 - DNA, 41 bp, Homo sapiens
  chr8:98307803-98307844
  hypo
gcaagaaatcagggagatggggtcggaggaggagccaagat

SEQ ID NO: 212382 - DNA, 36 bp, Homo sapiens
  chr8:98798632-98798668
  hypo
acttaaaaaaaaaacaaggccgggtgtggtggctca

SEQ ID NO: 212383 - DNA, 35 bp, Homo sapiens
  chr8:98798908-98798943
  hypo
agagcgagactcccgtctcagaaaaaaaaaaaaaa

SEQ ID NO: 212384 - DNA, 507 bp, Homo sapiens; identical to SEQ ID NO: 201524
  chr8:98881052-98881559
  hypo

SEQ ID NO: 212385 - DNA, 39 bp, Homo sapiens; identical to SEQ ID NO: 201526
  chr8:99438774-99438813
  hypo

SEQ ID NO: 212386 - DNA, 418 bp, Homo sapiens; identical to SEQ ID NO: 201528
  chr8:99954762-99955180
  hypo

SEQ ID NO: 212387 - DNA, 746 bp, Homo sapiens; identical to SEQ ID NO: 201530
  chr8:99956540-99957286
  hypo

SEQ ID NO: 212388 - DNA, 155 bp, Homo sapiens
  chr8:100245163-100245318
  hypo
cctcagatggtctttggtttgcttccgatctggctggctgtgtttggtctcattttgtcaggtgttggaagggctccattcatctgttgttttgctgatgcctgtgggaggcctcacttgctgcgctgtgaggcgactccctgagggtatttcta

SEQ ID NO: 212389 - DNA, 174 bp, Homo sapiens
  chr8:100353992-100354166
  hypo
ggtcaaacccccaggcgtcccaccagagcccacgtggcactgggctgcacaggaggaaagaagatttaacgcaaaatagagaccatagtcaagaggcctcctccactagctgcaaggccaaaccgcagcctggcctggacagcgcagacacaaggctcccgactggggctggga

SEQ ID NO: 212390 - DNA, 466 bp, Homo sapiens
  chr8:100796509-100796975
  hypo
tccatgttggctttcgtatcctttttctttcagaacaaatgccctgaggtagaggagttggtcttcagccattttgtgatctgtaatgacacacaggagacactgcggtttggccaggtggatactgatgaaaatattctgctggcgagtctccacagtcaccagtacagctggcgctctcacaaatccccacaggtatttgagaaacacccttacaaacagccattgttaaggttggggattcatttcttctgcacttgtgtgcctgtccagttatttccctttttaagtctccgaaggaaccacacagcgtagctacatctgacggaaacccaagagtgtttagagatgggagcacacgcttctcttggaatggagcattttcctgtttagcactggtgcttggggcgggggcagcagggtgtggtgatgaagaggctgactcgagagccaggtttggatccta

SEQ ID NO: 212391 - DNA, 104 bp, Homo sapiens
  chr8:100851150-100851254
  hypo
actaaatgccagtgcggctgtagcgccaaatgacagagggtcggagagagggctggtgaggcgatgagagaccaaacctggcaaggccccgtaggtcctatcaa

SEQ ID NO: 212392 - DNA, 230 bp, Homo sapiens
  chr8:100882016-100882246
  hypo
aaaacttttattaccgaactgaaggttttaaaaccactaactcttagtctaatgactatgcgtcgtttgtaaacatttacaagccctcagaaagcacacatgctgtaccatctttggtgctggagagtctatgtaaaggcctatgtggctgctgctgggtgccctcatttggtgctggcaccagggagagcatgtcataaaccaggggccccaagcgtgctcataaatgt

SEQ ID NO: 212393 - DNA, 79 bp, Homo sapiens
  chr8:100900796-100900875
  hypo
gtcttgaaaaaattaaaataaaaagaggcagaagcacaagtgctgggggccatcattacatgtacggttaatttggact

SEQ ID NO: 212394 - DNA, 107 bp, Homo sapiens
  chr8:101300173-101300280
  hypo
tatcttttttcctccgaaacagggagcctattgaaattcttctttttttgggtgcctttttgactgaaggcaagctcacagatgaagcagaggactgaagatctcga

SEQ ID NO: 212395 - DNA, 39 bp, Homo sapiens
  chr8:101735883-101735922
  hypo
aaaagaggataaaatgtgaccgggcgcggtggctcactc

SEQ ID NO: 212396 - DNA, 109 bp, Homo sapiens
  chr8:101744186-101744295
  hypo
ggtgtcagttgtttgcctgccgacgctctcatgtgaactaagagaatggaaccggacattcgtgaagtgctcagtaagcaaacaaaacgaagacttcttgtgagggaca

SEQ ID NO: 212397 - DNA, 33 bp, Homo sapiens
  chr8:101891231-101891264
  hypo
tatcctcccacgcattcacgagccattcacagc

SEQ ID NO: 212398 - DNA, 177 bp, Homo sapiens
  chr8:102039315-102039492
  hypo
tcttcatgtcaccaacgcttgctacatgcacagatctccttgaccctgcagccaatgcctcggtcagccagtgcacctgtactgtctctcctcttgggatagggtccctctccatcaggtacaatatatgggaaatcgaggggtggcctttgtcccagctgtcttagtcaccgcatt

SEQ ID NO: 212399 - DNA, 201 bp, Homo sapiens
  chr8:102190370-102190571
  hypo
tccaattgctctgtgtcatacgttttcttacgaataacagggcttatagtttcacttgagtaatttttccaccctcttaaactgcagtttaaggtcttgatgaggttaccaaatctctgacaagcatatattctttccagtcttcacagggcacgcttcggcccttgctaggagtccatcgttctgccataacatttgctc

SEQ ID NO: 212400 - DNA, 40 bp, Homo sapiens; identical to SEQ ID NO: 201544
  chr8:102506365-102506405
  hypo

SEQ ID NO: 212401 - DNA, 94 bp, Homo sapiens
  chr8:102690214-102690308
  hypo
catttttttctctgtttcttcggccacctcaaaaaccagaaaatttcagtaaagtgttcagcacacttccggcgaagacaagcgagggaagaga

SEQ ID NO: 212402 - DNA, 138 bp, Homo sapiens
  chr8:103572768-103572906
  hypo
atcaagtcaaagttcgagtgaaggatggaaaggtatgtgtgtcggctgagcgggagaacaggtacgactgccttggatcgaaaaagtacagctacatgaacatctgcaaagagttcagcttgccgccctgtgtggatg

SEQ ID NO: 212403 - DNA, 33 bp, Homo sapiens
  chr8:103629516-103629549
  hypo
aacccctctctcttccgggtgcggtggctcacg

SEQ ID NO: 212404 - DNA, 33 bp, Homo sapiens
  chr8:103878119-103878152
  hypo
ggttgcaaatgagattgaaacggtagattaggg

SEQ ID NO: 212405 - DNA, 37 bp, Homo sapiens
  chr8:103916556-103916593
  hypo
accactggatgggcccggtggctcacacctgtaatcc

SEQ ID NO: 212406 - DNA, 45 bp, Homo sapiens
  chr8:103932060-103932105
  hypo
gtgataggaggggtacggtttcagcaagagcgaaggcttagaggt

SEQ ID NO: 212407 - DNA, 142 bp, Homo sapiens
  chr8:103943076-103943218
  hypo
ccggcctgagatgaacatttgaattggtagatggagtaaagcagactcccccttaccaatacgaatggatgttatccgatcagctaaggtctgaatagaacaaaaaggctgaccctcccacgagcaagagagaactcctcct

SEQ ID NO: 212408 - DNA, 120 bp, Homo sapiens
  chr8:104055449-104055569
  hypo
gaagattctcatttctctacatccttgccagcacttgttattatttttattatttgtctttttgattatagccatcccagggggtatgagataatatctttgttttttttgttttttttg

SEQ ID NO: 212409 - DNA, 199 bp, Homo sapiens
  chr8:104086527-104086726
  hypo
atgtgtgtgcatgtgcgtgtgcatatataatcactgactcagttgctgagcatgcgctatgaaccaggcgtgttaggcgctggggatttaatgcaagcagtcagatgggcacagtgcctacctaccttgatggggcgtgcagcctggtgatctggtggcaatcttactggacaaaacacaaacccggcagccctaagtt

SEQ ID NO: 212410 - DNA, 429 bp, Homo sapiens; identical to SEQ ID NO: 201548
  chr8:104511554-104511983
  hypo

SEQ ID NO: 212411 - DNA, 90 bp, Homo sapiens
  chr8:106453048-106453138
  hypo
tgctatgctatcagtgcctccggtggctgaactcaaatcagaggccaagggacgggagcggtggctcacgcctgtaatcccagcaccatg

SEQ ID NO: 212412 - DNA, 637 bp, Homo sapiens; identical to SEQ ID NO: 201556
  chr8:107669366-107670003
  hypo

SEQ ID NO: 212413 - DNA, 42 bp, Homo sapiens
  chr8:108454321-108454363
  hypo
ctgggggagtcccatcacctcgtagatccagaggtcatgttt

SEQ ID NO: 212414 - DNA, 239 bp, Homo sapiens; identical to SEQ ID NO: 201560
  chr8:109799175-109799414
  hypo

SEQ ID NO: 212415 - DNA, 63 bp, Homo sapiens; identical to SEQ ID NO: 201561
  chr8:109799903-109799966
  hypo

SEQ ID NO: 212416 - DNA, 70 bp, Homo sapiens
  chr8:109800324-109800394
  hypo
gtaagagattgtccgatgtaccaacacatcccctgtatttagcacagtggtattcgttgaatgtatgaat

SEQ ID NO: 212417 - DNA, 68 bp, Homo sapiens; identical to SEQ ID NO: 201563
  chr8:110703933-110704001
  hypo

SEQ ID NO: 212418 - DNA, 45 bp, Homo sapiens; identical to SEQ ID NO: 201564
  chr8:110704144-110704189
  hypo

SEQ ID NO: 212419 - DNA, 42 bp, Homo sapiens
  chr8:110767246-110767288
  hypo
attacaggcgtgagccaccgcgcctggccttttatttctatt

SEQ ID NO: 212420 - DNA, 79 bp, Homo sapiens
  chr8:114691130-114691209
  hypo
aggcgtgagccactgcgcccggcctatttcattgtttttacttttttctaagtgttacgtattgaaccaatattacttg

SEQ ID NO: 212421 - DNA, 34 bp, Homo sapiens
  chr8:114888155-114888189
  hypo
tttttaaaaagtgtctgttccgggcctggcgcgg

SEQ ID NO: 212422 - DNA, 34 bp, Homo sapiens
  chr8:116345686-116345720
  hypo
agagcgagactccgtcccccaccaccccccccaa

SEQ ID NO: 212423 - DNA, 176 bp, Homo sapiens
  chr8:117336911-117337087
  hypo
aataacatgtgattttagtgcggcagtattgaagccaacgtctcatgtaaagatttagggctttttcatcaagacactgtattggaaaatcgcctgctaagaatgtggtcattaccgtacattttgtgtgcaaagcaaaggcggttgatactgtaccttggcgaagctgccttaac

SEQ ID NO: 212424 - DNA, 119 bp, Homo sapiens
  chr8:117667019-117667138
  hypo
gcaatggaaggcggcgcttcaaccacagtcctacccgtgccagagcatagagaagaacattgatgtctctggcccttctgggttcatcccacttgccttatatcgaggaagtacaaagt

SEQ ID NO: 212425 - DNA, 1758 bp, Homo sapiens; identical to SEQ ID NO: 201571
  chr8:117858172-117859930
  hypo

SEQ ID NO: 212426 - DNA, 84 bp, Homo sapiens; identical to SEQ ID NO: 201572
  chr8:117861184-117861268
  hypo

SEQ ID NO: 212427 - DNA, 161 bp, Homo sapiens; identical to SEQ ID NO: 201573
  chr8:117862856-117863017
  hypo

SEQ ID NO: 212428 - DNA, 149 bp, Homo sapiens; identical to SEQ ID NO: 201574
  chr8:117864186-117864335
  hypo

SEQ ID NO: 212429 - DNA, 174 bp, Homo sapiens; identical to SEQ ID NO: 201575
  chr8:117864773-117864947
  hypo

SEQ ID NO: 212430 - DNA, 224 bp, Homo sapiens; identical to SEQ ID NO: 201576
  chr8:117866483-117866707
  hypo

SEQ ID NO: 212431 - DNA, 123 bp, Homo sapiens; identical to SEQ ID NO: 201577
  chr8:117868404-117868527
  hypo

SEQ ID NO: 212432 - DNA, 133 bp, Homo sapiens; identical to SEQ ID NO: 201578
  chr8:117868877-117869010
  hypo

SEQ ID NO: 212433 - DNA, 221 bp, Homo sapiens; identical to SEQ ID NO: 201579
  chr8:117869491-117869712
  hypo

SEQ ID NO: 212434 - DNA, 107 bp, Homo sapiens; identical to SEQ ID NO: 201580
  chr8:117870590-117870697
  hypo

SEQ ID NO: 212435 - DNA, 112 bp, Homo sapiens; identical to SEQ ID NO: 201581
  chr8:117874067-117874179
  hypo

SEQ ID NO: 212436 - DNA, 130 bp, Homo sapiens; identical to SEQ ID NO: 201582
  chr8:117875368-117875498
  hypo

SEQ ID NO: 212437 - DNA, 176 bp, Homo sapiens; identical to SEQ ID NO: 201583
  chr8:117878824-117879000
  hypo

SEQ ID NO: 212438 - DNA, 114 bp, Homo sapiens; identical to SEQ ID NO: 201584
  chr8:117886849-117886963
  hypo

SEQ ID NO: 212439 - DNA, 220 bp, Homo sapiens; identical to SEQ ID NO: 201585
  chr8:117887066-117887286
  hypo

SEQ ID NO: 212440 - DNA, 250 bp, Homo sapiens
  chr8:118531587-118531837
  hypo
acttttgcttcaagacgctcatcacaatagtgttctgtttgtccccatgacaaacatgctgcagggcttttgcctggtttgttcagtacgctatcttcactcctagcacccagcacataataggtgctcagccaatatttgtcgaatggtaattaccgaagacctgcgaattactatgtttaaaatctctaccagggttcctatgacatatttagtaactatttcctggaaagtccgtacaatggagcat

SEQ ID NO: 212441 - DNA, 120 bp, Homo sapiens
  chr8:119057047-119057167
  hypo
gactacaggcgccccaccgcatgcttttgtaaacaaagttttattggaacatagctcatttgtttacatattgtctacagctgctatcctcttacaagcgttgactagctgtgacagaga

SEQ ID NO: 212442 - DNA, 207 bp, Homo sapiens; identical to SEQ ID NO: 201586
  chr8:119123498-119123705
  hypo

SEQ ID NO: 212443 - DNA, 208 bp, Homo sapiens
  chr8:120846159-120846367
  hypo
aataaatagactacatagagatatatagactgtgtatatatatcatataatccatataaatgcagaaacatttattgaaagacatttcgaagccatcgtgtttgtatttcatgttcatgacaataaaacttgtaaacttcagtaacagttaaaccttctttaattatggattagccattaacatttttgaaacgtggaccatttaacc

SEQ ID NO: 212444 - DNA, 220 bp, Homo sapiens; identical to SEQ ID NO: 201591
  chr8:121823346-121823566
  hypo

SEQ ID NO: 212445 - DNA, 220 bp, Homo sapiens; identical to SEQ ID NO: 201592
  chr8:121824481-121824701
  hypo

SEQ ID NO: 212446 - DNA, 76 bp, Homo sapiens
  chr8:123508181-123508257
  hypo
aataaaaataaaaaataaaaataaaagcaaacctgagacttgacggacaaaggccgtaatttctgtttgcacctgc

SEQ ID NO: 212447 - DNA, 55 bp, Homo sapiens
  chr8:123695434-123695489
  hypo
gcagcatgttccctggatcacgggagactccatcgattgatgtctggctcaccct

SEQ ID NO: 212448 - DNA, 261 bp, Homo sapiens
  chr8:123830692-123830953
  hypo
atttgagagctgatcgatgctggacccgctccctcctccctctctgcctagtttctcgcccctcagattaggctctgtctgtggctagcttgaggggtggccatgaggcctaaatgagggcgtatctatatggagacagcacttggcctggggctctcccacattccctgttagtctctcacacaggcacaaaaccttgctttaaaaatgtgtcttacgatgaaacttggcatccaggacgcgccccgtgaggaatttgtt

SEQ ID NO: 212449 - DNA, 256 bp, Homo sapiens
  chr8:123874762-123875018
  hypo
gtgtgcagcaagctcccagccggtacgattgcacccttgaatagtaataccccaggtcaggtgtgcgaggggcctggcgcgtggtaagtactcagtcaacagatctgccacctgaaagttttctttcccccagccaaaaggttctcctttgaaaacaggaatggatgaaaagagaaagctctgcccacctcagaattctcagggaaacaagaaaaaacaagtttggctttcaaggcgggctgggcgtggggagtga

SEQ ID NO: 212450 - DNA, 258 bp, Homo sapiens
  chr8:124014199-124014457
  hypo
ttccctcccaactccccaccacctgctatcaagaaagccattgtcaaatactcgaaatgctaaaagactgcgtttttatttttcaagggcccattcctaatcacaagaggccacttagtctgagtggggcccagtaatgttgattaatgattatgtatttctcatgagagttgggaactcaacttgtctctcgcctcagcaccctcccagggtgcaccattaatcaggatcggccacgggtggagttagagcagtgac

SEQ ID NO: 212451 - DNA, 204 bp, Homo sapiens
  chr8:124186903-124187107
  hypo
tattcacctaagtgctcattcggtgccttcgacgtgccagccccaaactgggataggcacttggagttccaagaagctaagtcatgcctgaccccacccccaccccaaattgctcacagcctaaaggaggagattcccgcttaaaccagcagttacagacaaacgcaatccaggctctgtcatggggcccttaaggaatttact

SEQ ID NO: 212452 - DNA, 202 bp, Homo sapiens
  chr8:124195506-124195708
  hypo
gtacttccagaccgtcaagcacaacaacatcagagacctcgtccgccgctgcatcacccggactagccaggtaccgatggcaaagcccctgtctccgtggccaagtagcagggaggatcgggggctgatagagcagggaggggggtgcattttgctcccagggcgagagtccagataattggggcttcggatggaggggctt

SEQ ID NO: 212453 - DNA, 82 bp, Homo sapiens
  chr8:124254706-124254788
  hypo
gaatgcgtactctccgtgcttccggacaagagacactaccaccaataacaaagaccggagtcattcacgcatttatgaaaga

SEQ ID NO: 212454 - DNA, 49 bp, Homo sapiens
  chr8:124255229-124255278
  hypo
ccacacactgctacttttttgtattttcagtagagaggggttctttcat

SEQ ID NO: 212455 - DNA, 42 bp, Homo sapiens
  chr8:124412835-124412877
  hypo
ccagggcaccggctgcgtgcccgaggacgggctcaccacgca

SEQ ID NO: 212456 - DNA, 41 bp, Homo sapiens
  chr8:124533004-124533045
  hypo
taaaatcctcaaatggcttctccttgcgcttaggaaaaaac

SEQ ID NO: 212457 - DNA, 41 bp, Homo sapiens
  chr8:124804120-124804161
  hypo
aaagaaattctctgccgggtgtggtggctcatgcctgtatt

SEQ ID NO: 212458 - DNA, 89 bp, Homo sapiens
  chr8:125498208-125498297
  hypo
ggtgcctacaacacgtcagcttttggaattgagctgcttcctcgaaaaggtccctcgctgtggatggcacttatcgttctacagctaac

SEQ ID NO: 212459 - DNA, 69 bp, Homo sapiens
  chr8:125498532-125498601
  hypo
atgtatcgaatttacggattacagttattgatggaggacacatggaagaggattcgtttcccagacata

SEQ ID NO: 212460 - DNA, 87 bp, Homo sapiens
  chr8:125553022-125553109
  hypo
actgtgttgttgtatgtactcgggcagcctcatttagtgctgtcaccacctgcgctcatttgtctctagagctgtagttcgaattgc

SEQ ID NO: 212461 - DNA, 55 bp, Homo sapiens
  chr8:125573951-125574006
  hypo
tccagccctcctcccgaccctttgccctctctgcttgtgagcagcacatatggtt

SEQ ID NO: 212462 - DNA, 179 bp, Homo sapiens
  chr8:125574036-125574215
  hypo
ccttacagaccaagccaagcaccccaggtgggacacgcactctcaagcactctcaaactatagccgtggctcttggctctgagtgcgtttaaaattgagtgtgtatccaaggaaggcagacagaggccacagtccccaggatggctgaaaaatgctaatgggagcgctgagctgtgagg

SEQ ID NO: 212463 - DNA, 118 bp, Homo sapiens
  chr8:125580698-125580816
  hypo
tctgtttcttccaataagagatacttatcattgacatcttggagagcactgtccaactgaggctggatatcacctctccctgcaaaaaacagagacccaagcacggcttgctgaaata

SEQ ID NO: 212464 - DNA, 119 bp, Homo sapiens
  chr8:125673727-125673846
  hypo
ggtgaacacaaaaggagccccgcagctgggaagatacgtgtgaccatcagcttgaaaactggacaggccacagggtcaggtagtggagtcctagccacgccaaaggtgcagacactgct

SEQ ID NO: 212465 - DNA, 101 bp, Homo sapiens
  chr8:125680350-125680451
  hypo
gctttcacctccaccgctgggctctaaaaccaagatgccaacaggcccggccagcaactgaggaggacacagcgcaagcggccacacgtgtgggctgtagg

SEQ ID NO: 212466 - DNA, 58 bp, Homo sapiens
  chr8:126044384-126044442
  hypo
ccatctctattagggcgataagaggaatttggtaatgtgaggtttaagttaggttttg

SEQ ID NO: 212467 - DNA, 204 bp, Homo sapiens
  chr8:126238678-126238882
  hypo
ggagggacagaaagcggagaggtgtacagctgctcttcttgcactgtacccctcatatctgcagccgggatcagtcaagatctcattcgtgatgcttgggtgccttgggggcttgggaagccagctcaggccttgtgatccactcggattagtgttgtctggggttctcactttctgactcctggaggacgaaacgccacttgt

SEQ ID NO: 212468 - DNA, 104 bp, Homo sapiens
  chr8:127464658-127464762
  hypo
cacaatcacatcaaattaagcgtcagatgaaaagagctcgcaggaatcttaactccaaagacccatttcttttttttgtttgtttgagactcgagtctcgctct

SEQ ID NO: 212469 - DNA, 44 bp, Homo sapiens
  chr8:127465002-127465046
  hypo
tacaggcgtgagccaccgcacccggcctccaaagacccttttct

SEQ ID NO: 212470 - DNA, 971 bp, Homo sapiens; identical to SEQ ID NO: 201598
  chr8:127569952-127570923
  hypo

SEQ ID NO: 212471 - DNA, 258 bp, Homo sapiens
  chr8:128831886-128832144
  hypo
ataagtcggctaatgacaccctcaggctacccagccctcgggagctcacagcagagcagttggggatgccttgcaaggttacctgtgccagagttcctggggtacatattaaataggtaggacccaatactactttgcattttcctggaatcctagactcttaacattggaaaggatttctttgccaagtaattcgccctcatcattaacctctaagaaatgcagaggtggaattagaaggtgcgtgtctctttcttt

SEQ ID NO: 212472 - DNA, 494 bp, Homo sapiens
  chr8:128871789-128872283
  hypo
aggttaggacagaaatatccactgctggcctgcgaactattcacacaggtctgactccccgccagagtcctggctgccctggtcctgtggaatcccgtcatggcttctgtctaaacggagcaggctcagggccatgctgaacttggagaaatctgtgcaggagtcagatttgggctttagagtcacctggggttgaatctcgggcctgctatttattgaacctgtcctagcctcaatcgccttatctgtaccatggggatgataccatctaggtcgaaggtagttgcaggagattctcatgcacggaggcccttggccgtcatttgtttctttgtctctacaagcagagaggctgagtcatacagatcctgaggggagatcactttctcttccctcctttcgtgtgtcatctccacctgggtgtggtgagccccaggaataatgctgtgacatcaagccccgtgaacacctcctttcacacggaccccgtgact

SEQ ID NO: 212473 - DNA, 290 bp, Homo sapiens
  chr8:128872459-128872749
  hypo
aggaggccggctcctggcagaatcggcttccagctctgggcactggggtgcggtgtgggaccagcaacaggctgctcctctgccaggaaccgccagaaccaaagtcttctcgaaggcatcttcagaaggcaagcacagggctgagcactccggagaggagcctttgggggaaaactttttctcggagcttcggagctcagggagtactatgggggagattcactaggttgatgctttgctgataggcagccctgtagagaagacaaggcagctgggcatggtggctcagg

SEQ ID NO: 212474 - DNA, 75 bp, Homo sapiens
  chr8:128888834-128888909
  hypo
atattagcattacccgtacactcttcccatctcctggcccctccagttctgaagggatggggactaagtgggatc

SEQ ID NO: 212475 - DNA, 64 bp, Homo sapiens
  chr8:128889422-128889486
  hypo
cagattctaaagtgaagcaggctgtggtgtgatgatggcccccgaggggacttgcagtcttatg

SEQ ID NO: 212476 - DNA, 456 bp, Homo sapiens
  chr8:128893133-128893589
  hypo
tgcgctcagctttccagtcatttcttaagcgatgttgagttcccaagcactgtgccggacacgcatgggttgctggaggctggcagaacccgaatgtcagtattcctgaagaatggctctaagcaatgtaccttgcagagctcaagcagggctctgctgcatcatgcccatgaaggtgcctgctggtagaaggctggttctatactggctgcttgcctcctccttgtggagacccacattgtgtctggcaaagtgcagaaggaaatcaagcccttaataacattagggaactggactgggttcggtttgcatctcccgagtctgactcgtgggagtaaccaccataatagcagcgctgtgctgttgagggtgactttgactatctgcttgtgttgtgagcccactgtgtgccggagcactctctatacattcagtcttgtccgcagatgaactcca

SEQ ID NO: 212477 - DNA, 41 bp, Homo sapiens
  chr8:128896287-128896328
  hypo
atgtcatatgtgtatcgatagcttgacgaatgttctcaaac

SEQ ID NO: 212478 - DNA, 105 bp, Homo sapiens
  chr8:128931028-128931133
  hypo
caaatgcacaagccttgagtcgctgcattcttttctaaccacccaagagataagttgaacccccactcgtagcaacctggccacttgtctgtttagtcagccctg

SEQ ID NO: 212479 - DNA, 163 bp, Homo sapiens
  chr8:128931261-128931424
  hypo
gacacccttcttcagatgaccgctgtcaggttggtgaaggcagtgcgcgttgggccttccctccctagagatgtgattgcacgtcgggtaccaggagcctggccagccctcagcttctgctaaccagggagcagtgaagcccggtttacttttgttggcttgt

SEQ ID NO: 212480 - DNA, 148 bp, Homo sapiens
  chr8:128957472-128957620
  hypo
acactgctgggaggaacatccgcacatgctttcttggtcacttatgtgagagctcatccaggatttataccctgaggcgacttcactgccgtggaggctaaggaacattttctgtttcataagacgcgatcacattgccctccagaac

SEQ ID NO: 212481 - DNA, 75 bp, Homo sapiens
  chr8:128958209-128958284
  hypo
taccagcctcgctgcgggttggaaaaaagaaagagttagtgtaacacatgtgaatgtgtacgaaggggtttagag

SEQ ID NO: 212482 - DNA, 35 bp, Homo sapiens
  chr8:129070012-129070047
  hypo
cccacggtgtgtgcggggccttgccatttgcagaa

SEQ ID NO: 212483 - DNA, 187 bp, Homo sapiens
  chr8:131064016-131064203
  hypo
agttgtgacagctacgtgacagaagtgctgtccacacgacaacatgtaagcctcgtgcccctccaccctcttcttgccctgttcacatcaacgggcgcacaagtggacgtggtggaggtggaatgcggaaggtggaggacagaaaggggccgaaggcccacagtttgtaagccggggcaagtgccac

SEQ ID NO: 212484 - DNA, 338 bp, Homo sapiens
  chr8:131085738-131086076
  hypo
agcagtccatgaccacggcctgtggtgctcaacatgctgaggtggaggagacgagaaagcagttaagggggtcgggaaggaactgacagtgcagcgagagtggacaggtagtgtccagaacacaagtacatagcgttccaggcaggggagaagcagtgactgtgccaagagctgcagacggccaaggaagacagggctgaagcttaaccgctggcccatcggcttgcagagggatggaaagagaggatggatggatcaatcttggctctgagcattaacagctgtgaacttcacacacagagacaatgcgatggtgtacacctcgtgatagaacacac

SEQ ID NO: 212485 - DNA, 65 bp, Homo sapiens; identical to SEQ ID NO: 201599
  chr8:131455119-131455184
  hypo

SEQ ID NO: 212486 - DNA, 161 bp, Homo sapiens; identical to SEQ ID NO: 201601
  chr8:133491950-133492111
  hypo

SEQ ID NO: 212487 - DNA, 63 bp, Homo sapiens; identical to SEQ ID NO: 201602
  chr8:133492127-133492190
  hypo

SEQ ID NO: 212488 - DNA, 145 bp, Homo sapiens; identical to SEQ ID NO: 201603
  chr8:133493185-133493330
  hypo

SEQ ID NO: 212489 - DNA, 214 bp, Homo sapiens
  chr8:134224691-134224905
  hypo
acagaagagccatgggatccgagccccgcgcagccacatgactcacagccagcttccacctgctcagggcctcggctttctccctgtaaagtgaggccacctcccttacctcggggctgcagcgacaatcactcaagaaaggaaaggagcagggtctgaggtggaatttgggccccaccgctgaccagcggaaggattcgggcaattggtttaa

SEQ ID NO: 212490 - DNA, 364 bp, Homo sapiens; identical to SEQ ID NO: 201605
  chr8:134232709-134233073
  hypo

SEQ ID NO: 212491 - DNA, 175 bp, Homo sapiens
  chr8:134251104-134251279
  hypo
cagctgggcaggccgcctagcaggagacctccatggacttgggcccggcgctgttcccagcagcacccgagttgggggtgatgtccaggtgggccccctcgctggtgtgcgagcggctgcgggtgccctcgctggtgtgggagcggcttcgggtgccctcgctggtgtgggagcg

SEQ ID NO: 212492 - DNA, 142 bp, Homo sapiens
  chr8:134254200-134254342
  hypo
ggacagagcacttccaattccgacacatgccccgacccactgcacacggggaatgccatactcactgtatcccatgccctgcacgaagtacttgaaggcctcagcgagcttggccggctgcgagagacaaggagagaaaatg

SEQ ID NO: 212493 - DNA, 272 bp, Homo sapiens
  chr8:134278414-134278686
  hypo
tcccccagacaatcagcctccgcggggccccaggcttctcagcacttgacccgcccgcaagcggcgcacactcaggcctcacgaggccacctcagctcagcacgctgcattgattttccaaagattaaatgaggcagtgaagtggaacacagaacactctaaatgctgttgaacctgcttctagaagctggcagaaatgcgacccatacagatcactgccgtgtggcagcagagaggaaggtcagcgttcacaaactcacgcttgagaagaa

SEQ ID NO: 212494 - DNA, 584 bp, Homo sapiens; identical to SEQ ID NO: 201606
  chr8:134308718-134309302
  hypo

SEQ ID NO: 212495 - DNA, 205 bp, Homo sapiens
  chr8:134335639-134335844
  hypo
tgcaggatgctggtgcagagcgctgttctgccaggtggcccagcccgacgggtgtctccctagcttctccgacagctttgccaccttgcacccacttgcccgcgtgctcagtcacgtcctcctcgtcggccgcgttccccaggcagctgtgtcagcctcccaaaatacaggcaagcctctggcctggggccggtgtctctggcct

SEQ ID NO: 212496 - DNA, 255 bp, Homo sapiens
  chr8:134466989-134467244
  hypo
ccattcggtagtggcgacgccaacccaggaggccctctgagttggagtgttgaaggaggcgcaaatgcatgacccttgtagaaaagcaacaaacacacccaaacaataaaatagctctttgtttattcactttgatttggatcattggaaatattaaacaataaataaaacagagcgggggctgaggaaagcaggatcttgctgaagtcattcgaatgcatcccaaccagtgctcagctgcgtaacgacatggag

SEQ ID NO: 212497 - DNA, 46 bp, Homo sapiens
  chr8:134470075-134470121
  hypo
ctcccccgagcctgggagcacaggccccatgcctccgtcacactcc

SEQ ID NO: 212498 - DNA, 162 bp, Homo sapiens
  chr8:134478325-134478487
  hypo
tggagcctctgtgggcggaggacagaaggtggtcaacctggctttgtggctccagcctcctggcagcagagcccctgagctacctgctgtcgtttactggggccctcctgttcacccttctctctgctgggcccccggagatggaggcggctcacacacaga

SEQ ID NO: 212499 - DNA, 43 bp, Homo sapiens
  chr8:134482029-134482072
  hypo
gcagaaatgacctccgggctctgtgatgcgactttctctagtg

SEQ ID NO: 212500 - DNA, 31 bp, Homo sapiens
  chr8:134482375-134482406
  hypo
gtgctggccaggtgcggtggctcacgcctgt

SEQ ID NO: 212501 - DNA, 56 bp, Homo sapiens; identical to SEQ ID NO: 201608
  chr8:134581293-134581349
  hypo

SEQ ID NO: 212502 - DNA, 116 bp, Homo sapiens
  chr8:135871437-135871553
  hypo
ggtgatggtcagtagcaccccggtgatgccgctggggggtccgatgttgggatccactggtgaggacgagagtcagtagaactgggttccggtccgtgtcacccacttgttatgtg

SEQ ID NO: 212503 - DNA, 360 bp, Homo sapiens; identical to SEQ ID NO: 201609
  chr8:136469597-136469957
  hypo

SEQ ID NO: 212504 - DNA, 141 bp, Homo sapiens
  chr8:139889990-139890131
  hypo
actttcacaaagacggcgccgcagcttgccccggatcttgtcgatggcattgaagtcggacacgtggaagacgtgggcggacttgggctctgaggcgatctcctccagctcctccttgagtgcctcgcccacgcccacggc

SEQ ID NO: 212505 - DNA, 319 bp, Homo sapiens
  chr8:140630637-140630956
  hypo
tggagtggaagtagtggggggcaagcttggcgctgaaggagttctgcggtgccaccgagcggccgccatagtcctgcgagcggtagcaggtgcaggagcacacagactgcaggtccgggacgtccgccttgtacctgggccggctgggccgcggctcctcagggatgtgaatgaccatgctgttgcggtttccggcgagggatgccctctcttcagcatcccgccgctcatcctcactgttcatggtcaagaacctgaggacgaccaggttgaggaaggccccgatgaccgtcagccccaccaggatatacataaagct

SEQ ID NO: 212506 - DNA, 298 bp, Homo sapiens
  chr8:140630986-140631284
  hypo
ggcacccttggtctgcagggccacgtagtccccgaacccaatggtagtcaacgtgatgaagcagtagtagtaggcgtggaagaagctccactcctcacactgggagaaggcggccgccccgatgcacagcgtccccatgcaggagaagaagcccacagtcaccatgttctccatagacacgtcagtgttgcgcatgccacagcacttcttaatgcgcttcagcaggtagcgcacgaaggtgttcatgcgctcgcccaggctctggaacatgaccagtgtcagcgggatgcccagcacg

SEQ ID NO: 212507 - DNA, 203 bp, Homo sapiens; identical to SEQ ID NO: 201610
  chr8:140716452-140716655
  hypo

SEQ ID NO: 212508 - DNA, 315 bp, Homo sapiens
  chr8:140758126-140758441
  hypo
ccacgtgcccatggcgagcacgctggcactgcttcactgaacattctcagtgacattccgagaggcatcgtcctgctcacttgatggacaagcctgttttggtttaaagagacagagtcagcacttcaacccaggtctccctggcaccaaggccagtgtgcaccttcactccacggctctgtgatcagggtggcatctgctgccatccacagtgccccttgccctctgtgctgggctcctgcaatcgccgccggtggcacctcagctctgtgtctcaaggccctgcacatctgccccctccgtgaggcagttccc

SEQ ID NO: 212509 - DNA, 122 bp, Homo sapiens
  chr8:140802163-140802285
  hypo
cccacagccttctcgggctcccgtcccggtgcgtccctcccgacccaggggaaggacatttggtgtggatcatccttctcagtaatggggttatttggggcctggccgggctggggaacatg

SEQ ID NO: 212510 - DNA, 92 bp, Homo sapiens
  chr8:140834749-140834841
  hypo
gacaccctattgtgcggttgaaaagagcacacccaggggccagacctcaagcaggtgctagagatggcctccctcaaggagaggagtctgac

SEQ ID NO: 212511 - DNA, 140 bp, Homo sapiens
  chr8:140847596-140847736
  hypo
ctggcaggtcctccggggctccgctgctctgcgactctgcagcaagcatcctcgccgccgtccagccttccctcctgcgccccattgtgtcactgtgatggcgcgcacgttcgcccgtgctgtgcgtggatgcacggatg

SEQ ID NO: 212512 - DNA, 360 bp, Homo sapiens
  chr8:140937323-140937683
  hypo
acacaaaaacagctccctgaggaatccgggagtaaaacaaaagcagcagaatgtggaggagtcgacacatggaatgagctcgcccacggggtggcggcgcctcccacttttccctcgacctttcctccacagtgtggaaaaaaatgccctgttacagagcatcaggcaacagcactggaggccgaaactctaacagaaatatcgcctttctgcccaggaaaaggggtggagtctttgtaggctgcagagttgcatatggaggtgggggaatcttagaggcgagagagctagagaagtggaccctttcattctgcatagaaacctgcagaaatctcggattgatccctgagcaaaacagac

SEQ ID NO: 212513 - DNA, 58 bp, Homo sapiens
  chr8:140962580-140962638
  hypo
tacttggcaaaccgcggagctcaggctttttatcgcttgcctacgaaatggaaggtga

SEQ ID NO: 212514 - DNA, 128 bp, Homo sapiens
  chr8:140963396-140963524
  hypo
ctccatttcttcctcctaagaagttggagaatcaccctgacacctcacagaattggtatgggaaggaacaaagcctctgccaacgctcctcacacaaagccctactcctataggggcttgatgcctgc

SEQ ID NO: 212515 - DNA, 186 bp, Homo sapiens
  chr8:141071378-141071564
  hypo
attcccaaggctgcccggcagcctgttgtgtcctctcttgcagctcttgaggccatattttaattttgattcttctaatcaagagcatttcgtgaatacctaatatgtgccagatgctgtctcggagctggggatggatacacaagtccggttctctgtcctcaaggagcccgcagtcaagcagga

SEQ ID NO: 212516 - DNA, 167 bp, Homo sapiens
  chr8:141107863-141108030
  hypo
cctgcctgggtcctccatacgcagtcgcagctgtgccgctgctcccagggtcatgacgcctacccaggtccttagtgcgtggctacagacgtgccgcagtcctaccgggaaagatgccagctcatgtcctcaatgagcagctgcagaattgccgccgtctgaaggat

SEQ ID NO: 212517 - DNA, 427 bp, Homo sapiens
  chr8:141147340-141147767
  hypo
gtcttcctgggagtcggtgctcctcactgggctgccagcgactccaaagcagagaccacatgctccagtgaccaccttggccccacacctggcactcaaggaggtctgcgtaattagtaagtgctggatctcatcatagagatgactgtccaagatcactcatcatagagatgagtgtccaaagtgctgtccaaagtccagatcactctggagcgggtagtgagctttccacggcagataacatggtggcgagcacgtcctgggtgcctaccgcagaccggccctgggcggcctcaccccacgctgcccactcactgtgacggtcggggtcaagccactgcggcaggatctcccacaccagccccaccccgcacctgctgaatcaggttttacattttaactagacgttccaccaatggtttacatt

SEQ ID NO: 212518 - DNA, 72 bp, Homo sapiens
  chr8:141159287-141159359
  hypo
gtctacctgcagacaaggactaatgagtcccaacagcagcatggtcagcacgggcctagaagacaagccact

SEQ ID NO: 212519 - DNA, 67 bp, Homo sapiens
  chr8:141159949-141160016
  hypo
acatgaggtggctctctgtatatcatgcatacatacatgcatgtacgtatgtctaggtgttatgtaa

SEQ ID NO: 212520 - DNA, 119 bp, Homo sapiens
  chr8:141231524-141231643
  hypo
acgtggcagatgccgtctgccataccaactcaccttcacgtggctgtagtcgcctgctttgttgctctcgggtgggttcacaggtttgccctccactcggggccgaacgacctgccgaa

SEQ ID NO: 212521 - DNA, 145 bp, Homo sapiens
  chr8:141249621-141249766
  hypo
ggagtgagaaggaccaaagtgcaggtgtgcttccctttgctcgggactcactggcacggaggccgcatccacctcctcacggccgtggaggggatgcgtgggaggcgcctggacacctacaccaacacaccgtgcactccgccag

SEQ ID NO: 212522 - DNA, 347 bp, Homo sapiens
  chr8:141268122-141268469
  hypo
aaacaggccagtgaccgctctcccagggctcatggtctgacagaggaggcagaaattaggcagaaaactagacacaagacaacaaagtatgtcatgaccaggtcagtctgtcttgggtacacgacagcacacgacagacaagtctggagggccagagaaactccccggagagaccgccattcagacacggcctgagggagcaggagggcttgggcaggttcaaaagagggagggtgaccctgtgcgactaattctggacttgttctccgcgttcacacgctccctggcacaagtaatggatttgacatttcactcaaaactcctcacacacacggctgttgccatct

SEQ ID NO: 212523 - DNA, 36 bp, Homo sapiens
  chr8:141343757-141343793
  hypo
gggattacaggcgtaagccaccgcgcctggccataa

SEQ ID NO: 212524 - DNA, 295 bp, Homo sapiens
  chr8:141458751-141459046
  hypo
aggggcaggccactccctgccgacctggcaggtggccgccaagctgtgcacaccatacagcaacaccttatcagggatgactcccacagtgcctgctggctggacagcagtgtgcgctattcacgaggcacaggaggcgcagcagaaggcaacaaggtgaggtagaaaggccccgggcctcagagacagacctggtgcttatatcagctctgctgcttggtggctgcccgggtctctaaaccttgctgcctcagccccacatcagccagcacagcaaccccgtgtagatcacagg

SEQ ID NO: 212525 - DNA, 201 bp, Homo sapiens
  chr8:141544187-141544388
  hypo
gtgggcagcggaacgttcgtccctgatgctccaccgcacatgctccggcacccctttcctggcgtgtgactggtggctgtcacaggggcccaggggagtgagggcatctgtctccatgggactgctaaggacacagcagcagtggcagccttgggccataaatagctcaccagagaagcatcccccgttagaaagattttg

SEQ ID NO: 212526 - DNA, 385 bp, Homo sapiens
  chr8:141565921-141566306
  hypo
ctcagaacctgagaggggtcgcagggcagagacatgccccgcagccacacgttccccgccgccccacacgtaccctgcccccgtagaggatggagggcggctgcagcacccgcccagtcacgtctgtcatctcatctttgaccatgattccaaattcacggacgtatggatctgtgttgaaacttgcacttcgcatctggcaaagggaaacaagaaaacgcacggagtgggtggaggcctcccatctctctagcagctgcgtccgttccaagcatcagaggtttctgtgccagggcaaccggactggattccacagggcagccctgcccgggactgacactcaccaatttgctaatctcttcttgccgatcgggcgccgacctag

SEQ ID NO: 212527 - DNA, 45 bp, Homo sapiens
  chr8:141566686-141566731
  hypo
gtcttcggtggctgcgggcgtgaaagcagctgcaggtgcgaaaga

SEQ ID NO: 212528 - DNA, 149 bp, Homo sapiens
  chr8:141568114-141568263
  hypo
tatcacctcctcccgcaaagaaacaccagtacaacccaggacagcggtgcactctcaccccccactccggcctgcgtaccaaaccgtgctcttgccgtaatgatgggacacgcggactggcccagggaagggggcgtgggtcagggcca

SEQ ID NO: 212529 - DNA, 66 bp, Homo sapiens
  chr8:141587942-141588008
  hypo
cggcatgatcactccgctcactgacggtcctgcaggcccctggaggcggggtcaggtccagctcat

SEQ ID NO: 212530 - DNA, 384 bp, Homo sapiens
  chr8:141588239-141588623
  hypo
gccgatcttgtgtaaagcagagaaactggacctcgtggctgtggcagcaggatggcaccttgctgcctaattctaacacggggggtcccttccctcctcaaacacacatgaccacgtatttggcagttaattttctttctttgtaaaactgtgataaaatacagataacataaaattgaccatttcaactaagtgttcagttcagcggcattgagtgtgtccatgctgttgtgcgaccatcaccaccctctgtccacaaatgattttcacttccccaaagtgaaactgtacctgtgaggcactaacttcccagccagcccacggagccacctggggaccctgctcgcggagtccctgaatctggtccttcgtttcgagccggcg

SEQ ID NO: 212531 - DNA, 161 bp, Homo sapiens
  chr8:141589815-141589976
  hypo
gactgagaaggagaacgggtgggtcagagggtacacgatgtttctgctttaatacctgcaatacccgcaccagactgtcttgtaaacaggcagggtccacctgcattcccgtgagtggctcatgcccagagtcacagagctctaggcgcaaggctgagtgt

SEQ ID NO: 212532 - DNA, 102 bp, Homo sapiens
  chr8:141594755-141594857
  hypo
aatacacacaacggcgcaggtgggtctcataaattctgctgagtaaaagcagtcgggattgagggtgtgtcactatacagacctggaaactaatctatgtga

SEQ ID NO: 212533 - DNA, 50 bp, Homo sapiens
  chr8:141594912-141594962
  hypo
ggcaactttctagggtgatcagtatatacatttgtcgaaattcttccagt

SEQ ID NO: 212534 - DNA, 31 bp, Homo sapiens
  chr8:141596788-141596819
  hypo
acagccactcccctgaggaccgactgagctt

SEQ ID NO: 212535 - DNA, 43 bp, Homo sapiens
  chr8:141597187-141597230
  hypo
agtccaggcacagacgcagctcgagcccagggctcaggctgac

SEQ ID NO: 212536 - DNA, 316 bp, Homo sapiens
  chr8:141599859-141600175
  hypo
ggcaatggcacagcagccaccgagatccgtgccatcagcacgagccgcagaacaggacggagtgatggctcagtgagtacagaccagagagtagatgctatcaagctgtactctcctgctaaaatcaggacacgagggtgacaactcacctgttgtctacacaagcaagcctcccttatggccacccaagttgacgctaaacacagtcatggcagcttttttggtgaaatggacagagacggtctcagaatgtgtgctgggaatgcagtcggaacatctgctcctgtcagccggagtgcagacaactgtatgctgt

SEQ ID NO: 212537 - DNA, 47 bp, Homo sapiens
  chr8:141600284-141600331
  hypo
gggatggctggagctgggtccccagctgatgcgttctaccccctccc

SEQ ID NO: 212538 - DNA, 177 bp, Homo sapiens
  chr8:141613218-141613395
  hypo
gagcctcggatggtgcgggttgactcaggcccccacggcggcgtggcggagattaaagatggggtctaatctggccctgtggacccggctcagcagacgatggaatcccagatctcatcgggaagtctgtcagccaaaaacacacacctcaaagcggagtgcgtggtgcctccacac

SEQ ID NO: 212539 - DNA, 152 bp, Homo sapiens
  chr8:141636160-141636312
  hypo
gccatgggcagcacgtggccttctagttccaccggcttcagctgggttcatggcccgggggggcacagctggcgccctttcggcgtcgctcctgtctacgagcgggcaaggaaggtccccaagagctgtcggggtccggcgcacctgggtct

SEQ ID NO: 212540 - DNA, 81 bp, Homo sapiens; identical to SEQ ID NO: 201611
  chr8:141644414-141644495
  hypo

SEQ ID NO: 212541 - DNA, 200 bp, Homo sapiens
  chr8:141704910-141705110
  hypo
aaggaccataaagcacgtgtgctcataaccagagacctagctgccaccatcaccacttgacagtgtcacgagagcttctacaaccgacacacactaccttccaactgacagagggtcagggtggccctcacactacaccgcaccaggcgttattcccagtgcaccaagctttccatgcggctgtctaaaaatctgcatct

SEQ ID NO: 212542 - DNA, 42 bp, Homo sapiens
  chr8:141738005-141738047
  hypo
gaaagacggccgggcgcggtggctcacacctgtaatcccagc

SEQ ID NO: 212543 - DNA, 91 bp, Homo sapiens
  chr8:141741358-141741449
  hypo
aaatgatttttcactcaaaaaatatttggtgcgctcttataacctgacagtcataaagcacaaaaatgctagagtacgcattataagaaaa

SEQ ID NO: 212544 - DNA, 761 bp, Homo sapiens; identical to SEQ ID NO: 201612
  chr8:142010302-142011063
  hypo

SEQ ID NO: 212545 - DNA, 1210 bp, Homo sapiens; identical to SEQ ID NO: 45893
  chr8:142011091-142012301
  hypo

SEQ ID NO: 212546 - DNA, 980 bp, Homo sapiens; identical to SEQ ID NO: 201614
  chr8:142138200-142139180
  hypo

SEQ ID NO: 212547 - DNA, 380 bp, Homo sapiens; identical to SEQ ID NO: 201615
  chr8:142139480-142139860
  hypo

SEQ ID NO: 212548 - DNA, 210 bp, Homo sapiens
  chr8:142157057-142157267
  hypo
cagcagtaatgagctgcactcggcctttgaacataaggaatgcgtgcgtagcactcccagcgctgctccgggtctcctggcccgatgactctcggctccttcatctcgacgcacccgtgaggaaggtgactgagggttgccgctggcctgctcttccctcacccattccgtccatcactcagcctcgccggactaccttcagtgttcctt

SEQ ID NO: 212549 - DNA, 53 bp, Homo sapiens
  chr8:142178200-142178253
  hypo
gtctccatgctgagcgaggccatgtgctttctggcccccgataactctctgct

SEQ ID NO: 212550 - DNA, 207 bp, Homo sapiens
  chr8:142187008-142187215
  hypo
acagaagcattgaagatgtggtctgtgtgacccagcgagaggcctcacggtgctacggaagagcatgatgagaaaacgcagggcggtctgggcaggtgtgggtgccccactgcccgctccagactggcgacatcccagagagtggggcctcccgggggcggacggtgctggtgctgtccacacccgcaggccggagttgggtgtttt

SEQ ID NO: 212551 - DNA, 208 bp, Homo sapiens
  chr8:142190007-142190215
  hypo
cgcaggaggtcgaggcgcccgcaggggctggcaggagggaccgcagaacaggctggtcccaggggcctccgggcagcaatgaggagccgtgtcagagcaggctgtgcccgggggcctccaggcaggaggccgctttaggttttgcctggaaacatgggttggattggatagcaagaggagcattaggatatcctgaggagcagtggtt

SEQ ID NO: 212552 - DNA, 241 bp, Homo sapiens
  chr8:142203890-142204131
  hypo
agcacttttccagcacgcagtgcagtcttcttccccagaggcccctcggccattaggttctaagcccgagaagggtcctgtgcacctgccaggcggccctgaccctcaggcggcagaggccctgtccaggaaggacatagatttggaggcacacgcgtcaattctgggtagccgggcaaagccctggtgctcttgggaggggcttctttccctgctgacccctcccgtttctccctggcag

SEQ ID NO: 212553 - DNA, 279 bp, Homo sapiens
  chr8:142221150-142221429
  hypo
aggcatggagttccgacaggttccagcacgcatgtccccttcgcaagcgggggaggccctcgcacatccacacacccgaggtagccttgcggcgggacttgggaggcagggcccgctgggagctctgctctcaggaatccccagcaaatggtttagagacgaatcaaagtgcagtgaaagtcaacgtttccttccccctgacgttgggagcggtctggaggggcaacctggcctcctaggagagtccttcagacgggacgagcggggtcacatggctgg

SEQ ID NO: 212554 - DNA, 86 bp, Homo sapiens
  chr8:142226699-142226785
  hypo
aggcaggccagcccgattcacactcggctcagagacccctgacccaattacccctggttcctggtgagcctcgctgcaggacggaa

SEQ ID NO: 212555 - DNA, 511 bp, Homo sapiens
  chr8:142228300-142228811
  hypo
tggaggtggtggccccgctctggttccggtgccggtgctgccgctgccgcttctgcatgtcgtacaggtcgctcatgctgcgcgacggcttgatcagcaccacggcgttggcgcgccggtagcggtagcagtgggacccaagcttgccgtagtaggagaaggtgctggaggcctgcctgcggaacgcgtgccgccgccgccgcatggagctcgacgtggccgagggcttcgtgtccaccctggtgtagccgccgagggcgtcttttgtgggggagccacttccgtttgggactttagcttcattcaagtgattatccagcaaggtctcgtcctccttggcggcttccttgaggaaggtggccaggcggggcagcttggtcttggcgagctcctggctggtgctgcggggggtggcggggtaggaggcgtcgtggaagatggagggctcgatgtcgtgcaggaacagcagctcgggctccaggtccagcgcggtgtccggcacgtgcaatgc

SEQ ID NO: 212556 - DNA, 969 bp, Homo sapiens
  chr8:142235170-142236139
  hypo
tctgtccttgggtgtagttacgcacacccatctgaccagtgcgacacgcgacatcatcgtgggtcagcctccactgctgccgtcctccagcaacggtcgccttttcttttttaaaaaaaacatgtctaataacattgagttgtatcctagacactgtgaatgatgtgtcatagactacactgctatattcctctgagagtgttcatggttttatttaacacgagggtttgaaattcccgccccatctcctaactccacccgaactctgcctgtgggttcttcaagaaaggcagagtggagttaactatccaagtttcagccaccctgtgttgcgtcaacgaaggccaacagtcgggttaaaagcggtgccaagagagaaacccaggcattccctcttccagccatcaccttcctacttggtttctgccccaagcgctggctgggtgtcaggagggtggggaggacctgcaggtgcgacccagcccacctaatctagaggaggcgctgcgtgcacaggcctgtcccgcctttgtgctgccaaccctgggagccgggaagacgctgggtccggagcagccctggaccaggcagccgtccccagcccagaagggaggcttctcaccccgggagacaagaaggcacagggcactggggggaaccgctaggcccgggccaggccctcggctcccagtcctcctgtggaggctgcttctccacccttgtcccacaggcccctccagagcctggtgggacccggccccaggcctccctgggcacctccacccgccagcctcctcccctttgccctcagctctgactcctatagtccccacagctgccccagcctccgtgcggccccggccctggtctctcctgtgttgccagcccccagccctaggtcaggcctccccacgcctctctctgactcccactaactcacccctacatctggccggcctgccttgggac

SEQ ID NO: 212557 - DNA, 127 bp, Homo sapiens
  chr8:142236375-142236502
  hypo
acacagagcccaccgtggcaccaccgcccgtgcctcccacccacgatgctcagtgcggcgagcagcacacgggcctcctgctggggtgctctcaatgctggtgcgcaaggtgccctgccccacgtgc

SEQ ID NO: 212558 - DNA, 47 bp, Homo sapiens
  chr8:142236532-142236579
  hypo
ccaagcatctacacccaacgacagctgtcgctgctgaacctctcggt

SEQ ID NO: 212559 - DNA, 720 bp, Homo sapiens
  chr8:142240244-142240964
  hypo
agtagactcttggaagtaggtttcccagaagctgaagaagcacaggcctctgtttctgcatcaccgactcaaataagacccactgtggctgtcagggctgggccctggaggtctttaaagttaaaggtgctgtcagagcaccccatctcaacaagggagggccgctcctgaagtccccgcccttccatcagaaagcctctcaggacagaaggcagagagggaagcggccgcaaagacccatgggtgccgagggttcccagcacggccaacagggccctgcacactcacaggacagtccttgtattggagacaaacagctgtgccggagaggggtcctgagacagcagctccggtggccacgtgaaggtctgaagccccaagcgtgcccagctccaggatggggtaagcagcgggggaggtagggccctggtggctggggggccgccaggagcagcgcccaggccagtgctgcctctgccgcccggccttgctgcccgagcgcacgctgtgtctggggacagtccggccgctgccccggcacctatacctgacactatcttcctgtggaattagccacctgaaaagtctcctgcccagggaagtgcaatgctgacactgtccattttctgaagaaatgaaaagaagagaaatgctgccagagagcatgtggcacaggcgtggtgagtgcattctgccagccaaattgggaacgtggcactg

SEQ ID NO: 212560 - DNA, 108 bp, Homo sapiens
  chr8:142243840-142243948
  hypo
tatgacacttctgcccaagacggcaggcccctgggaaacggctatggagcgtggcacccgttttgctgtgcttttcccgttttgctggtgcagggccttggctaggca

SEQ ID NO: 212561 - DNA, 142 bp, Homo sapiens
  chr8:142262365-142262507
  hypo
gggactccctacagggtccccgctctgctgcccggtaatctggaagagacaccacatcttgcccatgcgagcctggtcatgccaacctgtgcgtctctgttaatttccgtgttttcacgcccacctgcgcgtctgtgaattt

SEQ ID NO: 212562 - DNA, 600 bp, Homo sapiens
  chr8:142262687-142263287
  hypo
ttccgtgttttcatgcccacctgtgcatctgtgaatttccgtgttttcatgcccacctgcgtctgtgaatttccgttttcacgcccacctgtgcgtctgtgaatttccgtgttttcacgcccacctgcgtgtctgtgaatttccgtgttttcatgcccacctgcgtctgtgaatttccgttttcacgcccacctgtgcgtctgtgaatttccgtgttttcacgcccacctgcgtgtctgtgaatttccgtgttttcatgcccacctgcccgtgtctgtgaatttctgttttcatatccacctgtgtgtctgtgaattttcgtgttttcatgcccacctgcgtgtctgtgaatttccgtgttttcacgcccacctgtgcgtgtccgcgaatttccgtgttttcacacccacctgtgcgtctgtgaatttccgtgttttcacacccacctgtgtctgtgaatttccgtgttttcacgcccacctgcgagtgtctgtgaatttccgtgttttcacgcccacctgcgagtgtctgtgaatttccgtgttttcacgcccacctgcaagtctatgaatttccgtgttttcatgcccacctgcgggt

SEQ ID NO: 212563 - DNA, 141 bp, Homo sapiens
  chr8:142263347-142263488
  hypo
ccacctgtgtgtctgtgaatttccgtgttttcatgcccacctgcgtgtgtctgtgaatttctgtgttttcatgcccacctgtgcgtctgtgattttccgtgttttcatgcccacctgtgcgtgcctgtgaatttccatgct

SEQ ID NO: 212564 - DNA, 367 bp, Homo sapiens
  chr8:142264058-142264425
  hypo
cactgcgcacagacggggaggagacttaccaatctgcaacagtattggtgtgaccagagcggtttccatggcgtaacagaactccctgccaaacatcaccgccccgtgcatcacccacaggcgcatggggattcggtctatggacccctcgctgatggtctcgcagttctcggcctctgcgcctccggctttctgcgggtccggcaggggcacggataactcttgaacttgcatagattccgggtcggcattctgcggagccattttcattaccaccaaaaatatatgtatttatctatatattctatctatataaataatgctttcatatatctgtaatgataaattaagacgtcttctctttctg

SEQ ID NO: 212565 - DNA, 309 bp, Homo sapiens
  chr8:142277203-142277512
  hypo
gccaaatctgtgtgcgcatatagcaagtgctgcattcaccacaagccaggagacttccgtgacacttccactgccttccttggactctggccttcccttggcctcagcagcttcactgctgtccttcaggaatgataccggggcagcagctctgggaagccggcagaccacctgctgccgtgtcccgtggggcctgcgtggctacacagtgcaatagtccaggctcctgcactggagtggagacgctgagggatggaggcaggctcaccagcgagcgtacggctgtgcacatgcgtgcctgcagagttc

SEQ ID NO: 212566 - DNA, 220 bp, Homo sapiens
  chr8:142277817-142278037
  hypo
aagatactccacactcgaggtcctcaaggggttgtagctgtggtgccaccacacacctatgagaatggccaaagcttagggcacggacaacaccaaaagcaggtgaggatgtggggcagcaggaacgctcgttcacggttggcagaaatgtaaaatgcagcaaccacttcgaaagacggtttgcccattttcacaaaaccagacatactttcaaccatgc

SEQ ID NO: 212567 - DNA, 155 bp, Homo sapiens
  chr8:142280196-142280351
  hypo
accctgagggcacagcgcagttggactacctctgggtccagcacacacgcagcgcaggcacccagatggtctttaaaagaaacgaatccctaagtgctaaaggcagaggggccagtccaacccataattactccatcaataaagaaaaccagggg

SEQ ID NO: 212568 - DNA, 241 bp, Homo sapiens
  chr8:142290886-142291127
  hypo
aatcctccccaacaggtgggtgtgcagagagcaggtccctgtccgggcacctcccgaaggactgtcttagcacgaccttgcttctcccaggggagggaaaggaaaagggcctcgtgaggtctccgcaagaccgggctgtgcgtcctacaccaggctgccttctcctgcacattttcctactcaaagacaacggagtccaggcatcctctcagcatcgcacgagttcccctggtgcagaaaa

SEQ ID NO: 212569 - DNA, 111 bp, Homo sapiens
  chr8:142295926-142296037
  hypo
ctaaagatgtgagatcgtgagttctagccatggtcccagtagggcaccctcaagacctctggaacctgtgtggtgcttctcacaacagaacagggccgggcacctccttga

SEQ ID NO: 212570 - DNA, 31 bp, Homo sapiens
  chr8:142304055-142304086
  hypo
aaaaaaaaaatcatccgcggtaaagatctac

SEQ ID NO: 212571 - DNA, 144 bp, Homo sapiens
  chr8:142305925-142306069
  hypo
ccagcagccctgcaccgcccaggatggtgcggagctcatctcgtaaggtcagaggctccctggctttggtgctggagcccttgcccctctggcacaaagggacaaggtgtccacagcccggggtcagcccgacaagaccaccat

SEQ ID NO: 212572 - DNA, 222 bp, Homo sapiens
  chr8:142312689-142312911
  hypo
caaagagctaggattacaggcatgagccaccgcggcaggcgtaaagttattttacagaacacataagcaaaaatgttttcaggcctttgcttgacagcaatgtaactctaaaacattcctaattcattcatcactgacagtgaaaaagctgcctctacgatactcaggcagtccccctcgcctcgtgtctaacatgctcttaatatgcgatttcatctccag

SEQ ID NO: 212573 - DNA, 448 bp, Homo sapiens; identical to SEQ ID NO: 201616
  chr8:142317707-142318155
  hypo

SEQ ID NO: 212574 - DNA, 413 bp, Homo sapiens; identical to SEQ ID NO: 201617
  chr8:142318184-142318597
  hypo

SEQ ID NO: 212575 - DNA, 389 bp, Homo sapiens
  chr8:142349759-142350148
  hypo
caggtggtggtggccgcccagccctcacccagccccgagtcctgtgtggaaggcgattcctcccactttaccggggaggacacagaggctgagcgtggtcacggccggagccccagcgcagcatctgagctgcaggctggccgccccccaccccgctgcacccccatattccactcacagaccttcttcctgctgaacacagctgggccctgacgcctctgtgccttggccacaaggcaccttctgctcactcagctgtccctccagtccccgtagggctgcagacccaggcccacccagtcacaggcctggcagcgagggggaacaaaagggtcaaggggccgcccagggctgggaagggccttgctccacctcgctctcctccattc

SEQ ID NO: 212576 - DNA, 189 bp, Homo sapiens
  chr8:142367179-142367368
  hypo
ccacgtggtagaccacgaggctcgtgtggtgtggcatgtcgggccacagcgccacggccacttggcgggcgtggaagggcgtgaagcagacgagaaagatgatgagcaccgtgagcaggagctgcatggcccgcacgcggcgctggcgaccctggtggagcagacccggccgcgacagtgcacacatga

SEQ ID NO: 212577 - DNA, 287 bp, Homo sapiens
  chr8:142367824-142368111
  hypo
ctgccaggaagatggctccgtgcaccgccatcagcgccagccacaggcctgggaaggtgccatgcagctcctcgtccagccgggcaaacaggtggaacaggggcacctccagcccgctggcattggtccgcactgttgtcactgcggtggcattggggactgccccggccgagggccccgctggagacacagagggcatgacggcagccagcacaccccaggcctggaagcaaggagaccaggtcaccccaggcgccagcctggccttaagccctgccctgaggccc

SEQ ID NO: 212578 - DNA, 188 bp, Homo sapiens
  chr8:142374615-142374803
  hypo
tctccctgtcccccacgcccacaggccagggctccctccaccccagtgcagagagagacgtcactggtgggcacagactgagctctgtggggaaggacacctgggccccatctgacccgactctgcctcagttccaccagctaagagccctcttgctgagactgcggctctaacggaaacaccagtgt

SEQ ID NO: 212579 - DNA, 206 bp, Homo sapiens; identical to SEQ ID NO: 201618
  chr8:142425594-142425800
  hypo

SEQ ID NO: 212580 - DNA, 88 bp, Homo sapiens; identical to SEQ ID NO: 201619
  chr8:142427939-142428027
  hypo

SEQ ID NO: 212581 - DNA, 38 bp, Homo sapiens
  chr8:142437114-142437152
  hypo
tctgtgaggcccccggcagctgcgtggctgtgcactgc

SEQ ID NO: 212582 - DNA, 70 bp, Homo sapiens
  chr8:142439130-142439200
  hypo
acctgaggctgcgctggtcaggacaggttgggccatgctgcggaaacagccaggcctgaaccccaacgac

SEQ ID NO: 212583 - DNA, 37 bp, Homo sapiens
  chr8:142439349-142439386
  hypo
tttgctgggcagagactcctcgcgctactgctgctcc

SEQ ID NO: 212584 - DNA, 239 bp, Homo sapiens
  chr8:142537302-142537541
  hypo
tttcttataatcaaacaccacgtctgtctgtgtctgttgatactgactgcggccacacacgaggcatgggaacaatggctgtgcggagctctgggccctctgtgcttgtgcacatgtttgctggtatccggtgcacgtgcatgcatgcttcgcacatgtgtagatgtgtgcacctgtgcatgcatgcaggtgtgcacatcgtttgctagtgtgtgtagatgtgtcgatggcagtacaca

SEQ ID NO: 212585 - DNA, 38 bp, Homo sapiens
  chr8:142541546-142541584
  hypo
gcccggccggcttggccgtctttatggttgtacagtgc

SEQ ID NO: 212586 - DNA, 161 bp, Homo sapiens
  chr8:142881005-142881166
  hypo
gccatcctccttgccatgtcacccctcaacgccaacccgtgcatgtgggggtgcatgaccagctgacatgggagtgtgggtcagccccagggccaagggggaagtgggtgagccaagatcccggagcatgacaagggccctggcagctgattggcagggga

SEQ ID NO: 212587 - DNA, 143 bp, Homo sapiens
  chr8:142881196-142881339
  hypo
tcactgcggctggagggtctgggtgggaaggtgggtacagggagcaggcatgtcggactatgaatgcggagtgggaaacacagaacgactcgttgtggggagactagggatggacggggtccgctggtggagggctggaccag

SEQ ID NO: 212588 - DNA, 67 bp, Homo sapiens
  chr8:142984445-142984512
  hypo
caggtccgctctatcgcaggccgggcacgctttgctcagaggcccacactgcagaagtccagtctca

SEQ ID NO: 212589 - DNA, 120 bp, Homo sapiens
  chr8:143054871-143054991
  hypo
gccctcacggtgcctgcgctcacgggtgcctgcgctcacggtgcctgggctcacggtgcctgcgctcacgggtgcctgcgctcacggtgcctgcgctcacgggtgcctgcgctcacggtg

SEQ ID NO: 212590 - DNA, 233 bp, Homo sapiens
  chr8:143089100-143089333
  hypo
cctcagtgaaggagctgggctcagacaggatgcccaagagaagaatgacctgaaatgacatctccgctgatgcccagctcagtgtgcagaggctattgtctccccgtccacccacccctgaggaagccagcctgtagctatcccctcaggcccttccctgacctgctgggctctgctgttagcccctgagcagccaccactcgcacctggacacaccgcgcccactgcacaga

SEQ ID NO: 212591 - DNA, 563 bp, Homo sapiens
  chr8:143152592-143153155
  hypo
gaagcacagagaagctcacccggctgacggagggcgaatcggggcggccaggctggaaagccgttaggtgacggggaatgcgttgaagaggtgcatctccccccccgaccccgggttaattctacctcggccagatgcctagagaaggtcaccgcagagtccacaatgacacacaacggcatcgatggaagcttaggtagcaaaactacgtatcagcaaaaaatggaaacccccagcatagccggcagtaggagagcgtggactagtcgaggtggggtggccacgtgttcgcgcagcggcccggggtccagcggctctgctgagggaagagcctcagattcaacagggaaaaaccggaacgcttcatgttgaaggggtaggctgaacacggcatgatgctgctcatctgaaacttaagataattgggaagctgcaaaacaatattacatggaaatatgattgggagctctatgcaatgtgcattataggaagctgagacgtacccggaggcgacaccacattctctgcgcagagaggggccacgggagcggaagggtgccggg

SEQ ID NO: 212592 - DNA, 261 bp, Homo sapiens
  chr8:143171282-143171543
  hypo
gcccaggaaccaaggagtgaggcaggagcagcccccggcatcatcactcccagtgacccaggaagggatttgtgcttttttccctgcggctctgggcactgcagagttagaggtcctggtccccggggatggagggagggggtatatcagcgggcacagagcatgtccagtgacgcacaaaccacggctgccctctggtgcgtcgggttccttgtggggggatcaccaggcaggagagagcaccaccgtcctggcaggtac

SEQ ID NO: 212593 - DNA, 282 bp, Homo sapiens
  chr8:143234555-143234837
  hypo
gcagcatggagagaagctggcgaggcatgcagaacccagccctggggcatggcgggacccgtgtctcaggagaaaccaggcgaaggcgaagggccggtggcaccagagcaagggctgagcagctgccgggctgtgagaaggcggatacgaatcccagcagggcaagcgggcgtctccttggccctcgctccaagaggcgcacaagaaatgaagccgctggcagcagaaggtgcaggaaagtggacagaccggagccttgtcgctcataatgccttgtgcctc

SEQ ID NO: 212594 - DNA, 124 bp, Homo sapiens
  chr8:143269916-143270040
  hypo
gcacactcctatatggcacacgcctgcacatgggacacacctgcacagcacgtgcctgcacagcacatgcctatatggcacacacctgcacagcacacgcctatatgccacacgcctgcacatg

SEQ ID NO: 212595 - DNA, 59 bp, Homo sapiens
  chr8:143270070-143270129
  hypo
tgccacacgcctgcacatgggacacacctgcacagcacgtgcctatatggcacatacct

SEQ ID NO: 212596 - DNA, 64 bp, Homo sapiens
  chr8:143333258-143333322
  hypo
tgtacctgccgcccgcgttctctgtctgcagggcccgggcaccatgtacccgccgcccatgttc

SEQ ID NO: 212597 - DNA, 268 bp, Homo sapiens
  chr8:143386530-143386798
  hypo
cacaggacgttctgtgcgatgttccctggacttgggggtttcagtgacagctccccaggagctgtgggcagagggtgccaggcacccatggagacctgcctcggatctgtgccttgggattgatgccacctcctgcatgtggagaaggggaagctcaggaggataggggagggcgcaggggtgggaggggggtgcaaacggggttccgtgtggacgcccaggaaagcggccaggctggggtgcgggctgtgtggacacccaggaaggc

SEQ ID NO: 212598 - DNA, 250 bp, Homo sapiens
  chr8:143386940-143387190
  hypo
tgcaggacaaaagccaggggaggaagagatggcttagacgcccgggtccctccgcggcctcctcctgaaaggctcacaaagcgctcctttattctccccacaaaggcccaatttgggtcttgagctccgaggctgggattagggatttgctggcaaggtgctggggcaagcgcagaggggacggccctgtgatagttttccagctcaagaggcagacagacaaaggcggctttctcctccccacagggct

SEQ ID NO: 212599 - DNA, 162 bp, Homo sapiens
  chr8:143397307-143397469
  hypo
tgcacccaccaagccgcgtgaaggagccattcgcttcacgaggaaactgcctgcacggaccacccaactctgctctcaccccacagaaacgcctctcagaatcgcaaccctccaccatgtggggccttgctcagcacctcacgtaagcgcagcgcctcccgt

SEQ ID NO: 212600 - DNA, 42 bp, Homo sapiens
  chr8:143398749-143398791
  hypo
tgtacgcgtgaagcgggtatggccagcggctcacactgtaca

SEQ ID NO: 212601 - DNA, 322 bp, Homo sapiens
  chr8:143413397-143413719
  hypo
gaaggaaggagagacgaaggcagggggtggtccctcagaaaggcagcaccctgagtttccatacaccgcagcagctggcgtgtgtgcccggaagctacgagcacctgcacgtggaggctcagagcagcatcactaagagtcaaagcacagccccgctgatgaagcaacagaaacaaggtccagctctgcaccggcagctcagcattggaaacagaaacactggtttccgcacaatgcaggtgagccctgagcacagcacgcacagagatgaaagccagcaggaaaaggccacacgccgcacggttccacacatctaccatgt

SEQ ID NO: 212602 - DNA, 35 bp, Homo sapiens
  chr8:143415311-143415346
  hypo
gcattagtagaacaacgagaatgaggatgagttaa

SEQ ID NO: 212603 - DNA, 221 bp, Homo sapiens
  chr8:143424645-143424866
  hypo
gtttcaaaccacggcgctgaaacccaggtcagaaaaccagtttagtaagttgcaatcagctttttctttcatgagtagcacaagacgcagcaggaggaacatgagcacgcgtggccatggggagcgtcggcacggctagaaatgcctgattctcggtgtgtgtgtctaccccaggcagcaacggcaaatgcccttctcgccacggccgtggtcccagtgtg

SEQ ID NO: 212604 - DNA, 41 bp, Homo sapiens; identical to SEQ ID NO: 201620
  chr8:143429133-143429174
  hypo

SEQ ID NO: 212605 - DNA, 627 bp, Homo sapiens
  chr8:143463002-143463629
  hypo
aggggagccacacacctaaacgaggaggagccacgtggggcaaaccacagagtcttccagtttccttcagtgggagtgtcagccccaggctgtaagcaagtccccaaccccagatgacctgggcaagcatcgtcacctccccgcagctcggcgtcctgggccagcccctaatggagcagaagacaagccctgcctgccttggcattgggaacaggcagcgcccgcgggtgccgcagctcatcctgcgtgtgggagacactgagtcacagccacggctcatgcccgcacccactctcagacgctgcccagtcctcccctcggtgagcaggccgccacctcctcctctgacgggtacctgacaccccccctacacacaggccagatgctcggtggaggaggcctggccgttcccaggcccacgcgcccctgccagcatcagccctgtgcagcctccgtgtggaatggggcccctgcgcatgggcatccgagtggcatgtgtgagcgtgtgtgctcatgtgtgcgacagagagccagaggaggaggagggcccagctggggagctgcagttacatgaatcagtgttgttatagcaacttcaactccacgtcaagcagaatgccagccggg

SEQ ID NO: 212606 - DNA, 234 bp, Homo sapiens
  chr8:143463681-143463915
  hypo
gatcgctaacggcacaaatgggcggtcagaacaccagcaacacacatcctctttctccctcccaacctccatcattccccgggaggccggcctctgcccactgaccagctgccggcactgcccgccagtcccttctgctcgggatggcagcaacaaacagcaagatgccagcgcctgagtcatgcgggcagggggcagggagcacccctgcacgcagctgcacacagcccaaga

SEQ ID NO: 212607 - DNA, 180 bp, Homo sapiens
  chr8:143505868-143506048
  hypo
ggacaccagcctgtggacaccgggcaggcgctggccccaggaccctgggctttcctgcccgctttgttctccctcctgtgtccacggcaggccagccactctgtcatctggacagcccgcattgggctgctgtcacagcgacgccgtcggatggtatgcggagcacagaccccatgccca

SEQ ID NO: 212608 - DNA, 109 bp, Homo sapiens
  chr8:143509042-143509151
  hypo
ctcggttcttcccacgtgggatattctggctgtacgcgcgtgaccgtgactgtggggactggcccagggcttgactgtggggactggcccagggcttttcagggttgga

SEQ ID NO: 212609 - DNA, 207 bp, Homo sapiens; identical to SEQ ID NO: 201621
  chr8:143531771-143531978
  hypo

SEQ ID NO: 212610 - DNA, 295 bp, Homo sapiens; identical to SEQ ID NO: 201622
  chr8:143556723-143557018
  hypo

SEQ ID NO: 212611 - DNA, 82 bp, Homo sapiens
  chr8:143558643-143558725
  hypo
gtgggaccttgggctggggcagcggacagccagggcagcggggggccagggcagcgggggcggtggccgcagtgggcagcag

SEQ ID NO: 212612 - DNA, 255 bp, Homo sapiens
  chr8:143582343-143582598
  hypo
ttctgcttgcactgcgccttggacatggtgagcacgggataaacacttgttgtcgaatgctggtgactgttaccaggctagtgtcagttccagggacagtgacggagctggttctgatgaggcgatggcagtgttggagacgagaatgatgatgtgcttatagtggaggtgacgctggtgaccatgggtgaccggtggtcattgtgatgactgtgaagggacagtaaaggtgacggttgtggtgacagtggtggt

SEQ ID NO: 212613 - DNA, 277 bp, Homo sapiens
  chr8:143614682-143614959
  hypo
gctgccgctgctggcgctgacctggatgtcggctgtgctcgccgtcaccgaccgccgctccgccctcttccagatcctcttcgctgtcttcgactcgctggagggcttcgtcatcgtcatggtgcactgtatcctccgtagagaggtgggtgaggcagcctctgtcgggccgggctcctgcggggtcctggggctgccgagtggcctcctccttccccgaggacctcggcagggagattgtgggtaggcgcagcatccatgaccctgacacatctgc

SEQ ID NO: 212614 - DNA, 256 bp, Homo sapiens
  chr8:143660376-143660632
  hypo
tggaaatagggatgacgtcagagagagcctcaaaccgtcagcgttggccaccgccttgcactgcgcccatgcttggagccccgagccccaggccaggccctgcccgcccgctcagccctgctcgccatgctcccgcccttgctgctggggcggccggcagggagcccacctgaggcgcagagggaggccattgccgggcgctgccaccatgaggagtcccgagtcctggggagacaggtcctgtgcagggaacaga

SEQ ID NO: 212615 - DNA, 279 bp, Homo sapiens
  chr8:143662796-143663075
  hypo
tctgcccgtccacccgcaaacagcagaagctttgctagggagactgatcagccccagccgtgggtgaccgccccgtctgcccgtccgtgagtgaccgccccgtctgcccgtccgtgggtgaccgccccgtctgcccgtccgtgggtgaccgccccgtctgcccatccaccccaaaacagaaattgcttgctaggctcctagacgtcatccgaccaaggagaagggaccaggcggcaggcaggggagcgcctcgaccgcgttactctcccttgatggcag

SEQ ID NO: 212616 - DNA, 163 bp, Homo sapiens
  chr8:143843423-143843586
  hypo
gggggttgtgggaaccctgattcatggcaggttggtcagaagcacgggccacacctggggcttgcgactggcattggaagtggggctcactgcgtggcactgagccctccacctgcgggatctgacgtgaccgccacaggaatggtgtcggaattgaattgag

SEQ ID NO: 212617 - DNA, 425 bp, Homo sapiens
  chr8:144070963-144071388
  hypo
gacagagacaggagcgccctccttccaaaccataaacctagcatcgctcgacagcaccgaagccacttccagacactctgctgaaaggagtttgggaaacgtgtttggctttctagtctctgcgggagagcaaggtgtgcccacagagggcagaatggatgtagtggggccgcctctggacatcccagcctctgagtctcaaccaagccagcacgccgtcgcgggcgaacccatgcagggctccttgccgtctctgagctgggacgtccacagcgctaagtgactgaacgcgacatgacatgtgcacaggagggctctggaatggccacctgtgtgtctaattcaaaaagctttcattttacacacccctgacacagtgcaccaagagcctggctcccaggctcacagcacgtccatgcatgggg

SEQ ID NO: 212618 - DNA, 196 bp, Homo sapiens
  chr8:144093516-144093712
  hypo
ttccatcccagctgtcgcaaaatacaaggaaacagacacaggtcacctcgctcagcagccaacattgaccgcacaaggctcagacttgccccctgtggtccctggtgtctttgatgcactcaaggtggggagggatgacctctcactgggaattcaatgggtggtatttgggccagatggacgagcggacggacac

SEQ ID NO: 212619 - DNA, 362 bp, Homo sapiens
  chr8:144178363-144178725
  hypo
gcatcagctctcaccactagcgttcaacacaacacagtgctggaagctctggccggtgcacacagcaagacaaggaaaccctcgcgttcaacacaacacagtgctggaagctctggccggtgcacacagagagacaaagaaaccctcgcgttcaacacaacacagtgctggaagctctggccggtgcacaaagagagacaaagaaaccctcgcgttcaacacaacacagtgctggaagctctggccggtgcacacagagagacaaggaaaccctcgcgttcaacacaacacagtgctggaagctctggccggtgcacagagcaagacgaagaaaccctcgcgttcaacacaacacagtgctg

SEQ ID NO: 212620 - DNA, 185 bp, Homo sapiens
  chr8:144203468-144203653
  hypo
cctggctgtgtcatcgcacagctgaaaggagtctggaccagacagctctgtccgcagtcagaactgagggtaagcgcggtcctgtgcacaagtcagcaaaccggagagccagggtgccaggcactgaccccattctatagccatagaatcaaggctcacggagcccaatcaacaaacgctccaag

SEQ ID NO: 212621 - DNA, 35 bp, Homo sapiens
  chr8:144203942-144203977
  hypo
cagtgaaaggagctccatggcgttttctcacacga

SEQ ID NO: 212622 - DNA, 418 bp, Homo sapiens
  chr8:144204021-144204439
  hypo
tgatgaccggggttcagccagacgtaactctgggaaaacagactgagctcagccctttcagccagcggccattcagcttttctgaccatggcccatatcaacaaacacaatatggtatgtgagcgtatacatgtgcacaaacacgcaaatgcaccctcacacaggtacacatgcacgccctcacacgtgtacacacaccctcacacgtgtatacacccatacacgtatacaccccacacacccacatatatgtatacacaccttcacacatgtaacacaccttcacacaccccacacgtgcacacacccacacatacacaccctcacacgtaacacaccctcacacacgtaacacaccctcacacacgtaacacacaccctcacacatgaacacccccacacacgtgcacacccccac

SEQ ID NO: 212623 - DNA, 89 bp, Homo sapiens
  chr8:144208604-144208693
  hypo
ttctgcttttaaagggctggcgtgattcgaccaggcccacctgcatccacggaccctaaggtcggctgacctgggacacacggcacatc

SEQ ID NO: 212624 - DNA, 200 bp, Homo sapiens
  chr8:144293910-144294110
  hypo
agcctcaggcgctgtcctaagcccagcaggtactgacccttgatggtcacctcaccctatgagggagctgaggcctggggaacccaaggggctagtccagaacccacagccgggggaaggaggaaccgggtcttaaacccaggtagctcactccagaaccaactcaacctctgttacaggtggccggccagaaaatgccc

SEQ ID NO: 212625 - DNA, 227 bp, Homo sapiens
  chr8:144343992-144344219
  hypo
gccacgcctgtctccggcagcccctgcccgcacccgcacccctgcacctgccacgcccgtctccggcagcacctgccacgcccgtctccggcagcacctgccacgcccgtctccggcagcacctgccacgcccgtctccggcagcccctgcccgcacccgcacccctgcacctgccacgcccgtctccggcagcccctgcctgcacccgcacccctcacggctgtct

SEQ ID NO: 212626 - DNA, 86 bp, Homo sapiens
  chr8:144344738-144344824
  hypo
gctctgcgtgagtcctcggtccacgtgggccgttgcgctggttcccagcctgcccgacacactcactgcgacgcctcccttgccta

SEQ ID NO: 212627 - DNA, 105 bp, Homo sapiens
  chr8:144347176-144347281
  hypo
atgcagctgcagcctgtcatcgagtcaattgcattgtcgtccgccgctctcctgatgtagttctgtgtttgtccattttgcactgctataaaggaatacctgaga

SEQ ID NO: 212628 - DNA, 105 bp, Homo sapiens
  chr8:144360545-144360650
  hypo
actaggggattcatctggtgccgtcactgatcgtgtgacctcgagcaagccacgagtcacctcggagcctccgggttcttctctggaaaacgggcttgctggggg

SEQ ID NO: 212629 - DNA, 83 bp, Homo sapiens
  chr8:144361861-144361944
  hypo
tctttgcacagtgccaggtacatagcaaatccccacaaaaagagctcctggaagggctctgtcaacagcgtgagtggacagtc

SEQ ID NO: 212630 - DNA, 266 bp, Homo sapiens
  chr8:144380349-144380615
  hypo
gaccacctcctgcagttctctgcccaggtaaggactaattgggaagaattctgggtcctgagctggctgccgcttccaagacagtcgctttgagggctcttggcaccgattttgttaaaatgcatgagcttagggttgtgcagcctgtaggggcaggggtggtctcagaatggatttggtggccccaccgttaattaagctcctgacccctgggccggtggtgaggtgggaagatgagcctgtgtctcccatgctgagccaagatc

SEQ ID NO: 212631 - DNA, 226 bp, Homo sapiens
  chr8:144380645-144380871
  hypo
ctccctgaaggaagcttacctggcttagcctcattcctgctcgtaagtcaggcattcagcttgcaaagatccccaagcacacaaggagagtcagctgactgagggccaacagaaacagcaggcagccgctgtcagccacaaagaaacgcagatcctgaaactgtcatcatacaggtgagaggatagttatgtgtgaggtgttcaaagaagtcgcgcagtcagtgat

SEQ ID NO: 212632 - DNA, 95 bp, Homo sapiens
  chr8:144413657-144413752
  hypo
ggaggcaaccctacctgacctcagaccccatgcccgtgtacccgcccatgccccccacctgcagaggcccgtgtgctgctgagtcacggatccca

SEQ ID NO: 212633 - DNA, 235 bp, Homo sapiens
  chr8:144413782-144414017
  hypo
ccagctaagtgggaaaggcaacgtgcctctcccaggctctagggcctctccccagatgggtcccttcagagccggtctagaatcttcgggaacctctccatgggaccatttcatttgctaaataaaggacctggctgcttatgagagagccctgcctccgaggagctgggtggaagggggtccagcagtgcagccagtggagaggcaccacagcagggcgcaggaccgccgccca

SEQ ID NO: 212634 - DNA, 206 bp, Homo sapiens
  chr8:144414283-144414489
  hypo
ctaactctccaggccagtcatcatctatccattgaggcaagcccaagcctgccctgaaccagcactgcgctgggtcctgcggatgcagatcaccaaaacccatacgaagggctcaactgaacctagattctgagatgggcctgggagaagaggagcgagatggggcgtggctggcaggcagtgggcaggctcggtcagcagggctg

SEQ ID NO: 212635 - DNA, 47 bp, Homo sapiens
  chr8:144457689-144457736
  hypo
gtcgggctgtgatcgcctgtggcctccctgcagggctgtgactccct

SEQ ID NO: 212636 - DNA, 85 bp, Homo sapiens
  chr8:144457835-144457920
  hypo
caggtcagtgcttgagactgcccggccccgggagcagggcccacctgggtgaggggggcaggacagccacgcaggcagatgtctg

SEQ ID NO: 212637 - DNA, 398 bp, Homo sapiens
  chr8:144460987-144461385
  hypo
ctggtaggggctctgcgggcggaggcaccctggggaggggaggcccagctgcgggaaccgtgggaactccacccagcctgacccaacactgcaggtacgactcgcttactggggtcccggcccagcagcgtgccctggccttcgagaagggcagcgttctcttcaacatcggtgccctccacacgcagattggggcgcgccaggaccgctcctgcaccgagggtgcccgccgcgctatggaggccttccagagggccgctggtgagggcggcccgggccgcggtggggcacggcgcggtgccagggtgttgcagagccccttttgcagggcaggagctggggagtggttaggacatcagtccctcaggtagggggagtgagcacatcaggtccatatg

SEQ ID NO: 212638 - DNA, 378 bp, Homo sapiens
  chr8:144462488-144462866
  hypo
gcctgatgggtgacggcccagcgcaggggccccaggagtgctgggcagcctctgagcaggtgggagaccactgggagcagctcatccctggcccctgctttgcacgtggcagagccctcctgcacagccagctcctcacccccgtggcgcgcacccccaacgaaagtggctgtgatgagccccacagccctggcgttgcccactccttctgccacgtcccagggcccacgggcccacatggtgtgtgacatcccagtgccccgcgtgcaggcaaggcacacctgaagcgtgccatcctggggcaggaggaggcgctgcggctgcacgccctgtgccgcgtcctgcgcgaggtggacctgcttcgggctgtgatctccc

SEQ ID NO: 212639 - DNA, 88 bp, Homo sapiens
  chr8:144519630-144519718
  hypo
ctagcctgttgcatccgggtccccagagtgccccctaggccttccccaccccagatggtgctgctcaggtccagggagaagcgccttc

SEQ ID NO: 212640 - DNA, 99 bp, Homo sapiens
  chr8:144519748-144519847
  hypo
aggggccccatactcctgcccagaggggcggtgctttccgcctggcggtggcatggcaacagtcaggacaagccaaccagttacggatagaacctttat

SEQ ID NO: 212641 - DNA, 232 bp, Homo sapiens
  chr8:144521390-144521622
  hypo
ggccacggctccacgcccctgacgtggaggctgtgaacaggaggcggcccctccgaggcaggcatttgagtgtgctcagcggagctgttgcagaaggctgcagcaagcatcttccattaacgttacgaccgtgaaatatgacaataaaatgatagccgtatggtcgcaaatttgcagcccgccgagctgcgtggggtttatcgtcactcaaacgcgcggagagctgtaaaat

SEQ ID NO: 212642 - DNA, 160 bp, Homo sapiens
  chr8:144521831-144521991
  hypo
gccaccgctacactcgcaccttggctggccctgccccagggctggcaggtgcacccctggcgcccgtgggactcacccaggccccacctggagattctgacgtggtggtctgagggggcatttaaagctcccctgtgcccgagcccggccatgctgccta

SEQ ID NO: 212643 - DNA, 99 bp, Homo sapiens
  chr8:144546273-144546372
  hypo
aggcccgggctgccgcctgtccccgctggatctggccggctcagcgctttcccatatataattacaagctgctatccatcatgcgggcgccgcggcgcg

SEQ ID NO: 212644 - DNA, 91 bp, Homo sapiens
  chr8:144550587-144550678
  hypo
taggggcagcgctcgccacggttgcacctgccgaagcggttgtagtacatgcagtactccttcctcttctccctgcgctgccgcgcctgcc

SEQ ID NO: 212645 - DNA, 198 bp, Homo sapiens
  chr8:144559235-144559433
  hypo
ctgtcgggttccaccgccatccccaccactcagccctgcaacccctccgggccttggtccctctgcctgcaagctggggtaattctcagcagccgggggcctccaagggcccattagagagagaatgggagcagagagagcccggtgccggggatgggagctgcagtgtaagtacaagcacggcggctggagcactta

SEQ ID NO: 212646 - DNA, 33 bp, Homo sapiens
  chr8:144589672-144589705
  hypo
tgtgcatgtgtgtccgtccgtcttcacgtgtat

SEQ ID NO: 212647 - DNA, 58 bp, Homo sapiens
  chr8:144589919-144589977
  hypo
atagtgagagccgccgggcccgccaggagggcagagacagggggaagggcggggcgct

SEQ ID NO: 212648 - DNA, 234 bp, Homo sapiens
  chr8:144590082-144590316
  hypo
ccagggcacagacatgggtcagggaaggccggcaagggtagggtcagagaggccacccacagtgccagctctgcccaccgcctccgccggagcttgaagaccctccatcgccccgtggataaaaccctcaacccatgtggcacacacatccccagggcgcctggcagccgacgcttcaggagctagccagtgcagcctctgagaggcgggcaccagccccgcacaccctccagc

SEQ ID NO: 212649 - DNA, 449 bp, Homo sapiens; identical to SEQ ID NO: 201631
  chr8:144640321-144640770
  hypo

SEQ ID NO: 212650 - DNA, 235 bp, Homo sapiens
  chr8:144658291-144658526
  hypo
tgactacgatgaggactgactccagccagggcacctggaacctgccgcgtgggtggagaaagggtgggggccacccctcgggtcttcctgattcaccctggtgtccccctgctccccgccccgcctcagtcaaggacacctgtgctcaccttctgcttgggagctcctagggagccccaccacttacttccctgccacggcctgcagtatcaccgctgaaacttcagcagagtac

SEQ ID NO: 212651 - DNA, 31 bp, Homo sapiens
  chr8:144675968-144675999
  hypo
agccagcacagccccccacacgtccgagccc

SEQ ID NO: 212652 - DNA, 109 bp, Homo sapiens
  chr8:144676118-144676227
  hypo
cgtgcaagcctctcctctccagcaggagagcccggagcaggacacagcgactctttcaactgcgtcccgacaaacggtcagccccttcgctcctgcagtttatccaagc

SEQ ID NO: 212653 - DNA, 88 bp, Homo sapiens
  chr8:144676812-144676900
  hypo
aggtgggcaggggacggggtcagccaccggctcagcctgtgcacgcccacccctcccagcagcacccctctccggcccacctggctgg

SEQ ID NO: 212654 - DNA, 53 bp, Homo sapiens; identical to SEQ ID NO: 201633
  chr8:144691796-144691849
  hypo

SEQ ID NO: 212655 - DNA, 231 bp, Homo sapiens
  chr8:145161408-145161639
  hypo
ttgtggggcacttggcgcctcacaccacctgtcaccctatactccccagctataacccagacttggactcagatcccttcggggaggatggtagcctctggtccttcaactacttcttctacaacaagcggctcaagcgaatcgtcttctttagctgccgttccatcaggtgggcaccccccgcctcctcccccacctccctgttgggccgatacaacttccccagctgtg

SEQ ID NO: 212656 - DNA, 67 bp, Homo sapiens
  chr8:145223205-145223272
  hypo
tccaccctgctggacgccatcaccgataaggaccccctggtgcaggagcaggtctgcagtgccctgt

SEQ ID NO: 212657 - DNA, 236 bp, Homo sapiens
  chr8:145235189-145235425
  hypo
ccctgccacactgcgccgtgctgcacaccctcgccagcctctcggtggccaacggtaggtgacgcgcggcctgccccaggaggagcacggggcgctggaagccttggcggaggcctttgacggtgtcctctctcacagcgttcggcgtagtccccttcctgccatccgtcctgagctccctgctgcccgtgctgggcgtggccaagcaggacacggtgcgcgtggccttctgctcc

SEQ ID NO: 212658 - DNA, 175 bp, Homo sapiens
  chr8:145661367-145661542
  hypo
tttgctgtggccccgcggtgggccaggccccagccggctctgagcactgcccacaccccggatggctgcctggtaggctgcccggctggtgctggctgtggctgcttccctgttgctggcggggccaggcgtccaggctgccacccgttgtgctgtggccgagcaccgaggcctc

SEQ ID NO: 212659 - DNA, 148 bp, Homo sapiens
  chr8:145679540-145679688
  hypo
agcagggcacctcccgctgggctccctgcctgtgtgggctcccagcacgcccagtggcctatcctggctctcactccctcaacataagcctcgagcgtccacttggtgccactgagagacacatggcaagctgcggtcccagcccgtg

SEQ ID NO: 212660 - DNA, 64 bp, Homo sapiens
  chr8:145680955-145681019
  hypo
ggtatgccactccacgtggccagctctaaacacctcctggtgagactgccgggggccttggacg

SEQ ID NO: 212661 - DNA, 129 bp, Homo sapiens
  chr8:145721882-145722011
  hypo
actgcggccggcccgcctgtgcccttggtgccctggctgcctagagagcctcacccctgggccctggggccaggactccaggactctgactacctgccctcccccagcctcagcggctgcacctcctcg

SEQ ID NO: 212662 - DNA, 433 bp, Homo sapiens; identical to SEQ ID NO: 201637
  chr8:145733644-145734077
  hypo

SEQ ID NO: 212663 - DNA, 196 bp, Homo sapiens
  chr8:145736700-145736896
  hypo
attttggagcctcctcgttcccacaccctgtggcaggttttgcccaggtcctcagtcactgccctagcctctgacaaccccagctctacccgacatcccccaatgcagtgcagtcagcgggccacctgcaggagctcttccgtggccaggcccaccagggcatggaagctcaggtgcaggtattttctccagaagc

SEQ ID NO: 212664 - DNA, 818 bp, Homo sapiens
  chr8:145738000-145738818
  hypo
tccaactgggcagggcgtgcttacctgtgggccagggcctggagctgggcagggcccccagggcagttcagacggcaatgggtataggtggtcgccagcagctccagccagtggtgtgggtgcagctccaggtagcacagcaaagtctcgatggctgggggcagagcagggctcagcggacgcggggacagcccctccacacccctgtggcttaccccaggttcctcaccctcctccggcatgtccaaagcctgtacggtaagctgtattgggagtgcccgctcatggcccatgcagacccttctgggtcctggggctgcttggtggctaagctgctcagcctcttgaggggggtacttgggcacaggcctctccccacccacggccccttcctgctccgagggcggcctggtgcaggtgcaggtgcaggctgggaacacgcgctgtaccagcctcttcacagccaggaagtccgtgctgtcggcgtgcacatgtctgcgcagctctcgcaggtcttcgccctgcagggcaactttcatgagggtggggtggaccactgggggctcgagcactggcagtgtggggggggggggtgccaacctggggctgcaggaagaggtggcagtgggcaggctgcccgtcacgcccggcccggcccacggcctgcacgtagctctcgaagcttgggggcagccccagatgcagcacagcccgcacatctggccggtccagccccatcccaaaggccaccgtggccaccaccacccggcaactggccctgcatgaaggctcgctgtacccgccgccgttcccggctg

SEQ ID NO: 212665 - DNA, 240 bp, Homo sapiens
  chr8:145740331-145740571
  hypo
gagtgacagcaggggagagacgaccaacgtgaggcaggggctgcgccggctgtagagcagcgctgggagctggtagcacagggacttgccggcacctgtaggcagcaccagcagcgtggagatgcctggatggggcgggagtcagcagcagggttctgcagcctggcctcagcccagcctcagccctggcagccacgctcaccagacaggatccgcatgactgcacgctcctgcccaggg

SEQ ID NO: 212666 - DNA, 207 bp, Homo sapiens
  chr8:145745958-145746165
  hypo
cgccgcgtggacctgcgcttcaacaatctgggcctgcgcggcctgtctgtgatcatcccacacgtggcccgcttccagcacctggccagcctgcggctccactatgtgcatggggattcaaggcagccctccgtggatggcgaggacaacttccgctacttccttgcccagatgggccgcttcacctgtctgcgtgagctcagcatg

SEQ ID NO: 212667 - DNA, 48 bp, Homo sapiens
  chr8:145758478-145758526
  hypo
ccacacccggcgcccggggttgccgtggcacctgaagatgccctctgt

SEQ ID NO: 212668 - DNA, 50 bp, Homo sapiens
  chr8:145758692-145758742
  hypo
ttgggcttcttcagcccctgtgaagacagaggctccgtcctggtctggcc

SEQ ID NO: 212669 - DNA, 57 bp, Homo sapiens
  chr8:145763001-145763058
  hypo
ccccccgcccagaagcggttagagaagagaaggccaggcggccgaggctggagagca

SEQ ID NO: 212670 - DNA, 170 bp, Homo sapiens
  chr8:145811091-145811261
  hypo
gcctcccgaggatgtcgctggttgtggcagtcggctgtacacaccatgctcttaaatctcaaccctcatgggcccctgcagggcccataatttaaatgagaaagagaatccaaggatcacacaaataaaaatggcaactgttgaaaggggctggacgggtgccctgcctt

SEQ ID NO: 212671 - DNA, 205 bp, Homo sapiens
  chr8:145823411-145823616
  hypo
gaagccacgcagacccacccgccagcagggaaggagagtccggccagagtaggagctccgtggtggggaaggagcagcccggggaagtccagagggcgcccggcatggcctcgaaggctggacacctgcggggccctttccgcattgcgtgtaaaggggaaattcggaacccagccgtgggcctttccgcgttgagtgtaaaggg

SEQ ID NO: 212672 - DNA, 96 bp, Homo sapiens
  chr8:145826423-145826519
  hypo
gtgtgcacatggaggcgtgcgtgcgagctcgtgtacctgtgtgcatgtgcgtggaggtgtgtgtgacctcatgtacctgtgtgtgcatggaggcgt

SEQ ID NO: 212673 - DNA, 36 bp, Homo sapiens
  chr8:145826579-145826615
  hypo
gtgtgcatgtgcgtggaggtgcgtgtgcaagctcat

SEQ ID NO: 212674 - DNA, 306 bp, Homo sapiens
  chr8:145828364-145828670
  hypo
acctgtgtgcatgtgcgtggaggtgtgtgtgcgagctcatgtatctgtgtgcgtgcgtggaggcgtgtgtgtgagctcgtgtacctgtgtgcgtgcgtggaggtgtgtgcgcgagctcatgtatctgtgtgcgtggaggcgtgtgtgtgctggtgtacctgtgtgcatgtgcgtggaggtgtgtgtgcgagctcatgtacctgtgtgtgtgcgtggaggcgtgtgtgtgctcatgtacctgtgtgtgtgcctggaggcgtgcgtgtgtgctcgtgtacctgtgtgcatgtgcgtggaggtgtgtgt

SEQ ID NO: 212675 - DNA, 64 bp, Homo sapiens
  chr8:145844223-145844287
  hypo
ggcgtgagcaggaccgcgggcgcacagccaccgtggcgggcacagttgcgcactggtgacagcg

SEQ ID NO: 212676 - DNA, 446 bp, Homo sapiens
  chr8:145844522-145844968
  hypo
agtcatgagtgggcaacaggcgcttgcttccaacgtcccacgccgaatctggaacagaggatgctctgtgccagctccagacagggtctgctgggaaagcaagcgcggaaacagcatctgcctgggctggcgacgcccgccatagaccagggtgccagaggcccctcgctccgagaagcgcgggtccccatccccgctccagggccggcacgcagcatgcatgtgggcctgtgtgtcccagagggagagtgtgtgcccatgtgcgtgtgcgcccgtgtgcgtgagcccgtgtgtccctgagacagcaggtatgctcgtgtgcgcgtgagctcgtgtgtccctgagagaccgtttgtgtgagcctctgtgtccctgagaaagcgtgtgtgcctgtgtgcacgtgagcctgtgtccgagacagcgtgagtacccgtgtgtgtgtgaga

SEQ ID NO: 212677 - DNA, 213 bp, Homo sapiens
  chr8:145845662-145845875
  hypo
tgtctgttagcctgtgtgtccaagggagcgtgtgtgcccgtgtctgttagcctgtgtgtccaagggagcgtgtgtgcccgtgtctgttagcctgtgtgtccaagggagcgtgtgtgcccgtgtctgttagcctgtgtgtccaagggagcgtgtgtgcccgtgtctgttagcctgtgtgtccaagggagcgtgtgtgcccgtgtctgttagcct

SEQ ID NO: 212678 - DNA, 167 bp, Homo sapiens
  chr8:145849042-145849209
  hypo
tgcaggtgtgcagaacgccgacccaagaaacggaaaacacagattcaccatccagggagtgtctctgaaactgaccacagagcagggcatgaagcaacgtctgggcaaatgtcagaggccgcagcacccaggcaggcctctgtcaaatgcaccgcccagaatcagga

SEQ ID NO: 212679 - DNA, 113 bp, Homo sapiens
  chr8:145854689-145854802
  hypo
acccgcaggctctagcgggccgaaggcagagcacggccgtgagacctccagggctccaagagcagacccgcaggctccagcggggctgaggcggagcacggctgtgagacctc

SEQ ID NO: 212680 - DNA, 391 bp, Homo sapiens; identical to SEQ ID NO: 201640
  chr8:145911145-145911536
  hypo

SEQ ID NO: 212681 - DNA, 99 bp, Homo sapiens
  chr8:145978673-145978772
  hypo
aaaaaaaaaaagactactactgactaaacttggcaaatgaaggagagaatggagtgaagaataaaaaggacatggtagggtaccgatatctattgtcaa

SEQ ID NO: 212682 - DNA, 217 bp, Homo sapiens
  chr8:146033024-146033241
  hypo
ttccggcagagcacgcagctggctgcccaccaccgcgtccacacccgcgagcggccctacgcatgcggcgagtgcggcaaggccttcagccgcagctcccggctgctgcagcaccagaagttccacaccggggagaagcccttcgcgtgcacagagtgcggcaaggcgttctgccgcaggttcaccctcaacgagcacggccgcatccacagcgggg

SEQ ID NO: 212683 - DNA, 203 bp, Homo sapiens
  chr8:146046147-146046350
  hypo
atggtctgaaaccctcgtatgaaggaggagcttctcacagcctgctgctgccccagccacaagaaacacaggagcacaggtagggcccacggagtccttgaggcctgctacgaggggccagtaactacgtttacgccagcagccataagcacagggacacaggcagataccaccagcccgggaaggacgggtgcggtggctca

SEQ ID NO: 212684 - DNA, 36 bp, Homo sapiens; identical to SEQ ID NO: 201641
  chr8:146078071-146078107
  hypo

SEQ ID NO: 212685 - DNA, 84 bp, Homo sapiens
  chr8:146105089-146105173
  hypo
tgaacctcatacatttgtttcgtttgcagctggctgctactagaaatggttctgattcggtttcaagaactgtatccttggccg

SEQ ID NO: 212686 - DNA, 160 bp, Homo sapiens
  chr8:146176579-146176739
  hypo
ctgaatcattcaatcagtaagtgattagatagataaatggaagaattcagattccttcagtagataacatgttttcgtgagattgtgcatggatcgtttctaatacggaaatgaattgtacacttggacataaagaatacaaataaggctgggtgcggtg

SEQ ID NO: 212687 - DNA, 82 bp, Homo sapiens
  chr9:173863-173945
  hypo
ttggccagtgtaccacgtgctcatttaaaaattaaacttatagggaggccaaggcgggcggatcacgaggtcaggagaccga

SEQ ID NO: 212688 - DNA, 1303 bp, Homo sapiens; identical to SEQ ID NO: 201644
  chr9:503916-505219
  hypo

SEQ ID NO: 212689 - DNA, 438 bp, Homo sapiens
  chr9:2047359-2047797
  hypo
ccgcagccggccccggggcagccctcgcccgtcctccagctgcagcagaagcagagccgcatcagccccatccagaaaccgcaaggcctggaccccgtggaaattctgcaagagcgggaatacaggtaacgcaccccgccagcaaggggccccctgcggtgtgctagcacctgccgcccaagccgaggggggtgaggcgcctgcctccttggttggccaaactgtgattttcacccgtgcggtcggaaaactttcatccactcctggggccttcccggtgctgaggggaggcaccggggttttgaagatcaaaagccgacggggacttcctgtggacccgagagagtgatcatctcacactgcgactgtggaatacactgtccgtgtttgtgcttgtgcggttcggtgatgacggaggggctgggacgctgagtgtgt

SEQ ID NO: 212690 - DNA, 45 bp, Homo sapiens
  chr9:2177970-2178015
  hypo
tcatagtatagatgtggaattatacttttggtttgtggaggtaat

SEQ ID NO: 212691 - DNA, 92 bp, Homo sapiens
  chr9:2178158-2178250
  hypo
catggccacgtcgcggtgtctgttcacttccatgaagaggagaggttcttgtccaccaacacctgtgaaccgtaagaccagtgagtgccttt

SEQ ID NO: 212692 - DNA, 276 bp, Homo sapiens
  chr9:2717360-2717636
  hypo
agcaataatctctgccttcttctgattacctagagatttaagaccacataatcatcctctacctcacagggtcaagggagtgggggaggaaatgggctaagaggttctaaatccctcctaacacttgcttcttccaaatcagcaagattagagcagtcaacagctgactgcgttcagaccctgcaggctgggctggcctgcccaggacctgagaaggggcagctccggtggcaatgtctgagcccctagctgtgctggtccgggctggcctctcta

SEQ ID NO: 212693 - DNA, 133 bp, Homo sapiens
  chr9:2718724-2718857
  hypo
gcttcgcgcgcagcgccctcaacctggtggacctggtggccatcctgccgctctaccttcagctgctgctcgagtgcttcacgggcgagggccaccaacgcggccagacggtgggcagcgtgggtaaggtggg

SEQ ID NO: 212694 - DNA, 254 bp, Homo sapiens
  chr9:2933589-2933843
  hypo
gccccacattaaggtgaccgctaagccagacaatcctgatggtgaggccccgtgcctgccatctgctcctggagacgccccccaaccccaggcatggccgtcagccggcgaggcggtactgaggcagggggcgcgtcctggtcattggagagtttcagcccagtgggtgaaccagacacactgttcaagggggcagcggttagtaagcaggacgagggggagccccaggccgcagggagaactcgtgacaacgt

SEQ ID NO: 212695 - DNA, 119 bp, Homo sapiens
  chr9:2933873-2933992
  hypo
agtgaggacatgaagcccccgcctcaggctgcaaggaggcgccaccagggctgcaagctccacggagctggtgggacctggagacaggcgagaaccccgccccttccaatttggagcaa

SEQ ID NO: 212696 - DNA, 78 bp, Homo sapiens
  chr9:4714888-4714966
  hypo
tctcgctgagttctacgtgtgggagctgagaatgaaaagactgaattcggccgggtgtggtggctcaagtctgtaatc

SEQ ID NO: 212697 - DNA, 43 bp, Homo sapiens
  chr9:4987437-4987480
  hypo
gagttgcattatttacggctggtcatggtggctcacgcctgta

SEQ ID NO: 212698 - DNA, 99 bp, Homo sapiens; identical to SEQ ID NO: 201655
  chr9:5022028-5022127
  hypo

SEQ ID NO: 212699 - DNA, 248 bp, Homo sapiens; identical to SEQ ID NO: 201656
  chr9:5054640-5054888
  hypo

SEQ ID NO: 212700 - DNA, 82 bp, Homo sapiens; identical to SEQ ID NO: 201657
  chr9:5069924-5070006
  hypo

SEQ ID NO: 212701 - DNA, 152 bp, Homo sapiens; identical to SEQ ID NO: 201658
  chr9:5080228-5080380
  hypo

SEQ ID NO: 212702 - DNA, 99 bp, Homo sapiens; identical to SEQ ID NO: 201659
  chr9:5081712-5081811
  hypo

SEQ ID NO: 212703 - DNA, 58 bp, Homo sapiens; identical to SEQ ID NO: 201660
  chr9:6412900-6412958
  hypo

SEQ ID NO: 212704 - DNA, 219 bp, Homo sapiens
  chr9:6868325-6868544
  hypo
gtgaagagagtttccgtaggtaacatagcattcatcccaggaaaccctgggaactttgaggtgtgccataaaaagcagtttgaaaatcggttaactggatcaccgatttgagccacccctcagtatccatgaactgttggttccaggttccattcacaataccaaaacctgtggctgctcacgtccctgatataaagtgcgtggtagttacccatgcac

SEQ ID NO: 212705 - DNA, 98 bp, Homo sapiens
  chr9:6868604-6868702
  hypo
gctatgtaaatagttgttatcccgaattgtttagggaatactgaccagagaaacagtttgtacatgttcagtacagacacgaccgtttcccctccacg

SEQ ID NO: 212706 - DNA, 100 bp, Homo sapiens
  chr9:7028538-7028638
  hypo
gcctgaaattgaggtcggaggtggcacaagtacttcctcagctgcctcgactggtgtctcagtaagttgaatgtccagtggctctgagcccagtccagca

SEQ ID NO: 212707 - DNA, 240 bp, Homo sapiens
  chr9:7028698-7028938
  hypo
caccccagagtactctagcccgtggtggcaaggcttgctggaactgggatgtgtgatctccctctgacgtggactggttaaatattccctctgtgggcaggcgccaggtcagctcagccaggtttgctttctcttgtaactgggcagcacggaattcagtgcattctcttacaatttctgtgctctcctgtgccatgtgaccgttgccaggggataagggaggggcggcgttggtgattc

SEQ ID NO: 212708 - DNA, 37 bp, Homo sapiens
  chr9:7164555-7164592
  hypo
tgtctttagaagggccgtgctaaacaggacacaccca

SEQ ID NO: 212709 - DNA, 66 bp, Homo sapiens
  chr9:7164622-7164688
  hypo
cctgttttcccttctctgctttattggcaagtcctaccggcttcaatcgcacgccatttgtcccct

SEQ ID NO: 212710 - DNA, 232 bp, Homo sapiens
  chr9:7172202-7172434
  hypo
gtattttaatgacttcggctcacccagacacacgctgactgggggagaaactgttcaaaagagccagcagtccacctcagtgattgtgtggggttcttttccactcacttcagaagcagccccgttaccttttattgtctcacagaataaccatagcaacggtgcataattagctagagctcctggtaaatcggttttattattgtatttgagaggccgacttttgctgttt

SEQ ID NO: 212711 - DNA, 138 bp, Homo sapiens
  chr9:7785325-7785463
  hypo
ccccacacacacacacgcacaccatcccaccaccaccaatcccaacctttcctttgacttcccatatttcttttgaatgtctgggcagttatgcaggccaggagaggggccgtttcatgactacgccaaatatcctat

SEQ ID NO: 212712 - DNA, 152 bp, Homo sapiens; identical to SEQ ID NO: 201667
  chr9:12776433-12776585
  hypo

SEQ ID NO: 212713 - DNA, 165 bp, Homo sapiens; identical to SEQ ID NO: 201669
  chr9:13279138-13279303
  hypo

SEQ ID NO: 212714 - DNA, 227 bp, Homo sapiens; identical to SEQ ID NO: 201670
  chr9:13279406-13279633
  hypo

SEQ ID NO: 212715 - DNA, 223 bp, Homo sapiens; identical to SEQ ID NO: 201671
  chr9:14313096-14313319
  hypo

SEQ ID NO: 212716 - DNA, 739 bp, Homo sapiens; identical to SEQ ID NO: 201672
  chr9:14313785-14314524
  hypo

SEQ ID NO: 212717 - DNA, 707 bp, Homo sapiens; identical to SEQ ID NO: 201673
  chr9:14315103-14315810
  hypo

SEQ ID NO: 212718 - DNA, 845 bp, Homo sapiens; identical to SEQ ID NO: 201674
  chr9:14322293-14323138
  hypo

SEQ ID NO: 212719 - DNA, 206 bp, Homo sapiens
  chr9:14607839-14608045
  hypo
aggttcctaccacagcgattacccaaattattggagactttcaaacgtaaaaaatgtacatgaaaaatcaatgacaaaaattagagcacttcacagcacagtatcgtgcactgactggatcagtattttccacattgtgggtacttttccgtgatgagaatatctgaaatgcttttgaacactgaaaaactcgctaaaagccagac

SEQ ID NO: 212720 - DNA, 419 bp, Homo sapiens; identical to SEQ ID NO: 201676
  chr9:15306527-15306946
  hypo

SEQ ID NO: 212721 - DNA, 291 bp, Homo sapiens; identical to SEQ ID NO: 201677
  chr9:15306998-15307289
  hypo

SEQ ID NO: 212722 - DNA, 63 bp, Homo sapiens
  chr9:15527748-15527811
  hypo
gggcagtcccagggcgcggtgaagaggtgacggagggctggctatgggcggctggccggggta

SEQ ID NO: 212723 - DNA, 206 bp, Homo sapiens
  chr9:16268704-16268910
  hypo
gagcctggggcgggtcgtggccctggagttgtgacactgcaaaatggcagtgtcaggagccttccatgggctgcatcaggcagcgccagcctgcaaatcgctcagagtgcttaaaatctggggcacacctggaaggctcgggcctgcacactgactcatataaataactctttattgtgtagctattaagacgagagattgctttt

SEQ ID NO: 212724 - DNA, 36 bp, Homo sapiens
  chr9:16886662-16886698
  hypo
ccaccgcgcctggccgatgatgtcttgtttaaaact

SEQ ID NO: 212725 - DNA, 863 bp, Homo sapiens
  chr9:18776738-18777601
  hypo
cacctctttctctgtcccttcgggttcgctctccttccagggcccgggcggccatccacgaagcacagcccgcacatcgcggccgccaggaaggtctacatacagactcgcaggcagaggaagctgcacttcgtggtggggggcttcgcctacctgctccccaagacggcggtggtgctgcgctgcccggcgcgcagggtccgcaagcccctcatcacctgggagaaggacggccagcacctcatcagctcgacgcacgtcacggtggcccccttcggctatctcaagatccaccgcctcaagccctcggatgcaggcgtctacacctgctcagcgggcccggcccgggagcactttgtgattaagctcatcggaggcaaccgcaagctcgtggcccggcccttgagcccgagaagtgaggaagaggtgcttgcggggaggaagggcggcccgaaggaggccctgcagacccacaaacaccagaacgggatcttctccaacggcagcaaggcggagaagcggggcctggccgccaacccggggagccgctacgacgacctcgtctcccggctgctggagcagggcggctggcccggagagctgctggcctcgtgggaggcgcaggactctgcggaaaggaacacgacctcggaggaggacccgggtgcagagcaagtgctcctgcacctgcccttcaccatggtgaccgagcagcggcgcctggacgacatcctggggaacctctcccagcagcccgaggagctgcgcgacctctacagcaagcacctggtggcccagctggcccaggagatcttccgcagccacctggagcaccaggacacgctcctgaagccctcggagcg

SEQ ID NO: 212726 - DNA, 44 bp, Homo sapiens
  chr9:19431391-19431435
  hypo
cctctctgacctgtgcgtaattcttaaaccgctgggtacagaga

SEQ ID NO: 212727 - DNA, 1618 bp, Homo sapiens; identical to SEQ ID NO: 201681
  chr9:20620754-20622372
  hypo

SEQ ID NO: 212728 - DNA, 225 bp, Homo sapiens
  chr9:27212709-27212934
  hypo
ttgtacctggccattgagtacgcgccccatggaaaccttctggacttccttcgcaagagccgtgtgctggagacggacccagcatttgccattgccaatagcaccgcgtccacactgtcctcccagcagctccttcacttcgctgccgacgtggcccggggcatggactacttgagccaaaaacaggtttgtccggaggacttcgctttggatatctttcctgtg

SEQ ID NO: 212729 - DNA, 167 bp, Homo sapiens
  chr9:27340153-27340320
  hypo
cccacattactgacacggagggcgtttccacgatggaggggtgcgtgtgtgtgaatgtgtgcacatatgtgcaggctcccaagtgcacatatacatatgtatggctagataaacacacacactcgccacccacggagaatatttattcataccgatacaaaaatcaa

SEQ ID NO: 212730 - DNA, 567 bp, Homo sapiens; identical to SEQ ID NO: 201691
  chr9:27528537-27529104
  hypo

SEQ ID NO: 212731 - DNA, 182 bp, Homo sapiens; identical to SEQ ID NO: 201692
  chr9:27529157-27529339
  hypo

SEQ ID NO: 212732 - DNA, 581 bp, Homo sapiens; identical to SEQ ID NO: 201693
  chr9:27529340-27529921
  hypo

SEQ ID NO: 212733 - DNA, 56 bp, Homo sapiens
  chr9:27610812-27610868
  hypo
tcagtctggaacccgaatccgcacgtggcaaacggagcggaccattgtggagccgg

SEQ ID NO: 212734 - DNA, 138 bp, Homo sapiens; identical to SEQ ID NO: 201694
  chr9:29212989-29213127
  hypo

SEQ ID NO: 212735 - DNA, 44 bp, Homo sapiens
  chr9:32481580-32481624
  hypo
tttttctttttttttttcctcgaggcagagtctcgctctgatgc

SEQ ID NO: 212736 - DNA, 43 bp, Homo sapiens
  chr9:32999674-32999717
  hypo
ataaaaggtaacaaacaggccgggtgcggtggctcacgcctgt

SEQ ID NO: 212737 - DNA, 45 bp, Homo sapiens
  chr9:33077216-33077261
  hypo
aatgtactgaaaaagaaaagcgctggggcggagcgcggtggctcg

SEQ ID NO: 212738 - DNA, 123 bp, Homo sapiens
  chr9:33136435-33136558
  hypo
atactctctgcagaccagaccgcctcaaaatgggttccagaaaacatcagacccagcaagatgcttaatggaaaaacatgtctcgtggtcaaataagaacgggaatgctgcgtattaaatcct

SEQ ID NO: 212739 - DNA, 56 bp, Homo sapiens
  chr9:33136588-33136644
  hypo
gctctgagaagttgtgcagtcgaaaaacccccttcgttatatttaacccaccattt

SEQ ID NO: 212740 - DNA, 420 bp, Homo sapiens
  chr9:33442388-33442808
  hypo
cccatggaggtgccaatgaccaggaccaccaggcccacggtgaaggcctccaggcctcgggggacggggttgttgtaggggtcaacaatggccagcacacacacgataagggaggctgtgcctatgaactggggagtggggagaacagggtgagctgcagctccctccctttctctgacccctccttccatcccccgtcttccctctagctcttaaactcttgtcagcgcccgcccatgctcttctcctgaaagcaatggtgctagaatgtctgcgtgacaagaacccgctggagagccgcatgttttgtaagtacttgccaccatgttctgatgcgggttaccccacagattggagaaaccctgctacagtcgaggagtcctgtcccccaaccagcccatgagctaccaaggcaactcg

SEQ ID NO: 212741 - DNA, 420 bp, Homo sapiens
  chr9:33464121-33464541
  hypo
tgccaggaagccactgcggatctccacctgctcctccactagagacaagaatgggtcctgggtcagcctgctcctccctgtaagacaccctctactcccccaggtcctcctacggtgcccccaacggctgctcatcacaggtatttttcaacactcccccccaccaagtggcaaaggtgacgaaagggacatcgcatttgcctcaactgggtggggcattaatcgcccaacctcagcccagaggcaaaattttccactgcttggcacccccagtctggtttccgggcctgcacaagctgagtcttgcccctggccccctcccaccatgggcttccacacacctggggaattaggaacctgacaccctgctctctgcagagaccgagtgcctcacgttacaaccagaaatcaccactccca

SEQ ID NO: 212742 - DNA, 32 bp, Homo sapiens
  chr9:33834158-33834190
  hypo
gtttaggtgtagtgacggattcttggagcttc

SEQ ID NO: 212743 - DNA, 39 bp, Homo sapiens
  chr9:34050561-34050600
  hypo
tctgaattaaagaatgctgccgggcgtggtggctcacac

SEQ ID NO: 212744 - DNA, 120 bp, Homo sapiens
  chr9:34062783-34062903
  hypo
cctaggcaacaagagcgaaactgggtctcaaaaaaaaaaaaaatagtaacatgggctgtgtttagaaaatggcaatttagataacattttcacttctctgtaatttcaaattgcttttaa

SEQ ID NO: 212745 - DNA, 40 bp, Homo sapiens
  chr9:34224474-34224514
  hypo
cctcctcaaacatggactgtgtggacgtggcaggggccaa

SEQ ID NO: 212746 - DNA, 35 bp, Homo sapiens
  chr9:34276112-34276147
  hypo
taatgaggctgggcacggtggctcacgcctataat

SEQ ID NO: 212747 - DNA, 81 bp, Homo sapiens
  chr9:34316317-34316398
  hypo
atagagcgagactctattaaaaaaaaaaaaaagttccattatgtctactgttttgcccaaggcaacgaagtgattaaaaga

SEQ ID NO: 212748 - DNA, 443 bp, Homo sapiens
  chr9:34318262-34318705
  hypo
aggctatagaagagtagaatcgtgtcgcggctcgagagcgagactcccgtcttggagccagcccagcccaacccagcccaacccagcttgacctagccctgacaggtccatcgtggtgcacgcaaaccacctcccagccacgcgctccctcctgctcctcagcgccttctgcctcctggcggtggccttggcgaccgaggtgaagaaacctgcagccacagcagctcctggcaccgcagagaagctgagccccaaggcagccacgctggccgaacacagcgccggcctggccttcagcctgtaccaggccatggccaaggaccaggcggtggagaacatcctggtgtcgcccgtggtggtggcctcgtcgttggggctcgtgtcgctgggcggcaaggcgaccacggcgtcggaggccaaggcagtgctgagtgccaagcagc

SEQ ID NO: 212749 - DNA, 730 bp, Homo sapiens
  chr9:34372075-34372805
  hypo
acgtctgagcccacgcacactcggtagctcagctctggcgctgcggcgcggccggcgggtggcttgtagggcgtgtcgtggtagcgcgcctgaagccgcagcgagcgctccgtgctgttccagcccaggtggaagggcactgagtcattgactttgatggcggccgcgcgcgaagatagccagtagcgctcgaggatgcccccaaacgcggcgtcggaggagtagacatcgctggtgacgaacggctggggctcctgctggccatccaggcggatgggccagtgttgcgtcctcatctcggcgccaccataccagtgggccgccgcgtcgcccaagaacatggcgtgctccacggcccggcccggcgctgcctcctcccagcgcacgcggtagcacatgaccgtgtccttgggccgcacagtctggatgaagaagtgcagcggcagcccgtcggccgtgagcgagcagcccagcagggcgccatcgcggctgcaggagtcaaggtccagcgcgccggagcggaaggccaggcggaagacctgctctcccttctgattgcggatggagaagccgccagctttcaggtccagcagctccgcgcgaagtcgctccgccttgcgtagggagacgctgtagtagcaccaggccaccaccgcggccagcacaagcagcagccccagaaccgcggagcccagcagcggcttcaggtctttggaaggcttgggcttgg

SEQ ID NO: 212750 - DNA, 77 bp, Homo sapiens; identical to SEQ ID NO: 201697
  chr9:34646925-34647002
  hypo

SEQ ID NO: 212751 - DNA, 85 bp, Homo sapiens
  chr9:34971556-34971641
  hypo
gtggagcctgaggagtttgacaggacaagtcgattcacaccccctgcgttcatccgccccacccggaagctggatgatgacaaac

SEQ ID NO: 212752 - DNA, 33 bp, Homo sapiens; identical to SEQ ID NO: 201699
  chr9:35072284-35072317
  hypo

SEQ ID NO: 212753 - DNA, 296 bp, Homo sapiens; identical to SEQ ID NO: 201701
  chr9:35161757-35162053
  hypo

SEQ ID NO: 212754 - DNA, 73 bp, Homo sapiens
  chr9:35608230-35608303
  hypo
catccactgctgcaacgtaagagcctcacactccttcctgccccaccctgcccccatccgtaagctgccatgg

SEQ ID NO: 212755 - DNA, 262 bp, Homo sapiens
  chr9:35609216-35609478
  hypo
aggtcctggccctcccgctgtgggcccctcggctgaagagaagatggagtgcgagggcagcagccctgagccggaacctccagggccagcgccccagctgcctctggctgtggccacagacaacttcatcagcacctgttcctcggcctcccaaccctggtcccctagatcaggacccgtcctcaataacaatcccccagctgtggtggtgaactccccacaaggctgggctggggagccctggaaccgggcccagcatagc

SEQ ID NO: 212756 - DNA, 314 bp, Homo sapiens
  chr9:35711911-35712225
  hypo
agtcagggtcaaaggacaaccgagagggaggaaggagaggcctggcattctttgactcctacgttcccccaccccctaccgtcctcctaccgagtcactcaggagtcgcttgctggcatctccaactgccctcagggcattatccacatcgcgctggccaggtaggcagctgacacagcggttcagagcctgggtcactgctttagccacctggggtgagaaaggagacagggttgcccaagtgaaaagaatttgagagatcgcctccattcacgcgacatgggagatgactagctctactgcctctgaaagtg

SEQ ID NO: 212757 - DNA, 145 bp, Homo sapiens; identical to SEQ ID NO: 201705
  chr9:35814690-35814835
  hypo

SEQ ID NO: 212758 - DNA, 70 bp, Homo sapiens; identical to SEQ ID NO: 201708
  chr9:36257445-36257515
  hypo

SEQ ID NO: 212759 - DNA, 201 bp, Homo sapiens; identical to SEQ ID NO: 201711
  chr9:37035886-37036087
  hypo

SEQ ID NO: 212760 - DNA, 120 bp, Homo sapiens
  chr9:37118379-37118499
  hypo
ctgcagcctagacctccgcagttcaaacctcagccaggaacagctgggactccaggtgtgggccaccacgccctgttattattattatttttttgacacggagtttctctcttgctgccc

SEQ ID NO: 212761 - DNA, 81 bp, Homo sapiens
  chr9:37118799-37118880
  hypo
gtcttgctatattaccccggctggtttcgaattctcggccttaagctatcctcccacttcgggctcccaaacaggtgagag

SEQ ID NO: 212762 - DNA, 36 bp, Homo sapiens
  chr9:37119169-37119205
  hypo
ttttcctttaaaaattcactcgtggccgggcgcggt

SEQ ID NO: 212763 - DNA, 120 bp, Homo sapiens
  chr9:37119445-37119565
  hypo
aaactccgtctcaggaaaaaaaaaaaaaaaaaaaaaaaaaaaaccataaagaaagaaaaaaattcactcgtagctgctacaagaagtgtaatggctcatgcctgtgatcccagtgctttg

SEQ ID NO: 212764 - DNA, 490 bp, Homo sapiens
  chr9:37414524-37415014
  hypo
ctgggctggccaaggggtcccgactgggctctctgctaccctctgtggccagctgctcatgtctcttgtacgagagcatcagcttccagcagtcagacaaaagcccaggcagggccggggtgaaagccacactgcgccttgcctgctgcgcgtcatcggaaaatgttcgccccatctgggcttcagtttccatatctgtataatgggcttccagcatgtgccctgccccacccctcaccaagcacagaccagaggcagggccccctcagagaggagacagtcagtcagatgatctctattcaaacccagttctgctccttaccagctgtgtgaccgtgggcaagtccctccactgacctgagcctcagtttcttcgtctgtaacttggggttcctaaaatcaacttcactggcctttgtggggattaaacaaactcttgtgtgtggagtgcctggcacggatcactcactctcagcgcaagttcccttcc

SEQ ID NO: 212765 - DNA, 99 bp, Homo sapiens
  chr9:37432303-37432402
  hypo
ggagcagtcctcttgcgcatgctctgctgggtctctgtccctaaaggaacagaatgtaggtgtgagtggatttgtttaaaaaaaaagagtgggccaggc

SEQ ID NO: 212766 - DNA, 84 bp, Homo sapiens
  chr9:37468277-37468361
  hypo
agccactctcttttcacccacgcctttttctgcgtggcagttgctccgtggcagttgcaagccctcctttttctgtctggcagt

SEQ ID NO: 212767 - DNA, 98 bp, Homo sapiens
  chr9:37778484-37778582
  hypo
cagactcttgtctcgaggggaaaaaaaaaaaaaattatgtaacaaggaattagcctcaaaaccacatggctttggacgtgctaattcaacttttgtac

SEQ ID NO: 212768 - DNA, 82 bp, Homo sapiens
  chr9:37871179-37871261
  hypo
cagctattggggaaggtggggggaggggcaggcagtgaggtgggcgggtcacctgagcccaggaggtcgaggcagccttgat

SEQ ID NO: 212769 - DNA, 339 bp, Homo sapiens
  chr9:37935344-37935683
  hypo
tgcgaggttgtgttcggcctcggtggggcatacgcctttagtgccaggaggaaatgacgggcacacggcttgctctctggcagactgggaagtggtggggagttgttgaagggatggagggctgggatgtagagcactgctatggccacaggtgagcccctcatctctctgagcccgtctccttcagcgtaaagtgagttgctgtggggagtcagagagagctgactagggcttcagagtgtacaaaatcgtggtcctggaccacgattgcatttatgcctcacaacgatcctgagatgtaggaactattactctccccattgtacagatgcagaaatg

SEQ ID NO: 212770 - DNA, 88 bp, Homo sapiens
  chr9:37948878-37948966
  hypo
tgggtacccactgcccgcctgctgctgccgggtcctggggagagcacagtgaacaaaacccagtctcttttcacgggaagcttatgct

SEQ ID NO: 212771 - DNA, 34 bp, Homo sapiens
  chr9:37985465-37985499
  hypo
cagtgactgcctttgcgtgcggaggcctctaagc

SEQ ID NO: 212772 - DNA, 413 bp, Homo sapiens; identical to SEQ ID NO: 201713
  chr9:38067708-38068121
  hypo

SEQ ID NO: 212773 - DNA, 749 bp, Homo sapiens; identical to SEQ ID NO: 201714
  chr9:38068158-38068907
  hypo

SEQ ID NO: 212774 - DNA, 33 bp, Homo sapiens
  chr9:38131932-38131965
  hypo
gatgctcccaatagctcttcagagggagcctcg

SEQ ID NO: 212775 - DNA, 42 bp, Homo sapiens
  chr9:71455000-71455042
  hypo
agtatttcacggcccggcacagtggcacatgcctgtaatccc

SEQ ID NO: 212776 - DNA, 35 bp, Homo sapiens
  chr9:71620576-71620611
  hypo
gagccaccacacccggactttacagacaattttta

SEQ ID NO: 212777 - DNA, 103 bp, Homo sapiens
  chr9:71760275-71760378
  hypo
attagttcttgaaggattagcggcctcaaagatttatgtgcggattaattggagtgtacattagatcgccgtgtttaaaaccgcagtcattcctgcaaatcat

SEQ ID NO: 212778 - DNA, 400 bp, Homo sapiens; identical to SEQ ID NO: 201720
  chr9:71788550-71788950
  hypo

SEQ ID NO: 212779 - DNA, 385 bp, Homo sapiens; identical to SEQ ID NO: 201725
  chr9:73027584-73027969
  hypo

SEQ ID NO: 212780 - DNA, 733 bp, Homo sapiens; identical to SEQ ID NO: 201726
  chr9:73028305-73029038
  hypo

SEQ ID NO: 212781 - DNA, 169 bp, Homo sapiens; identical to SEQ ID NO: 201727
  chr9:74061493-74061662
  hypo

SEQ ID NO: 212782 - DNA, 213 bp, Homo sapiens
  chr9:74853849-74854062
  hypo
aactgatcaaaggtccgcaaagcaaaaagttccatgcgcacagtttaaaaccaggtctgtaaaatgtagatattcgtgatttctctttctatcctaccacagtgcctctagccatatgacaaagtagggattccacctacattaaatgtgttgtagatggaaggggaaaactacaaagctaatccagtcgggaagaatcggcaagttactgtc

SEQ ID NO: 212783 - DNA, 76 bp, Homo sapiens
  chr9:75715152-75715228
  hypo
tgtcttgtgcatctactgtgcgtctgactctaacctagaggctgctgagtaaaaagtgtggttgtaggaaactgaa

SEQ ID NO: 212784 - DNA, 274 bp, Homo sapiens
  chr9:76089532-76089806
  hypo
gtgagaaagccctcagggggcgcatcagcgactgctgcatacctctcgtacagggtccaccctccggccacatcccctgtggaccagcacctccgcaggaagcgctctagggcagggttgcccacagactggatcttgctgcggtcgagacggacctgggcttccgggcgcccatcggagcctgcggtgggagtgatggtaccgagtccctcgccagcctctggtaagactctcaggatcacaatccgggcccgtatatgggcctgctgccagt

SEQ ID NO: 212785 - DNA, 135 bp, Homo sapiens
  chr9:78686691-78686826
  hypo
gttagcttcaacccccagcacgtgcacatttacagcgccagctggggcccggatgatgatggcaagactgtggacggaccagcccccctcacccggcaagcctttgaaaacggcgttagaatggtaggttttaaa

SEQ ID NO: 212786 - DNA, 41 bp, Homo sapiens
  chr9:78775008-78775049
  hypo
ttacaggcatgagccaccgcgcccagctgactcttcagtct

SEQ ID NO: 212787 - DNA, 39 bp, Homo sapiens
  chr9:78866884-78866923
  hypo
tataaaaagataaaagaggccgggcgtggtggctcacac

SEQ ID NO: 212788 - DNA, 41 bp, Homo sapiens
  chr9:79230962-79231003
  hypo
catgagccagcatgcccggcccctcagtgtttttttgaaat

SEQ ID NO: 212789 - DNA, 36 bp, Homo sapiens
  chr9:79448382-79448418
  hypo
tataaaaaccaaatacaggccgggcgtggtggctca

SEQ ID NO: 212790 - DNA, 429 bp, Homo sapiens; identical to SEQ ID NO: 201738
  chr9:79520874-79521303
  hypo

SEQ ID NO: 212791 - DNA, 231 bp, Homo sapiens; identical to SEQ ID NO: 201739
  chr9:79521333-79521564
  hypo

SEQ ID NO: 212792 - DNA, 472 bp, Homo sapiens; identical to SEQ ID NO: 201742
  chr9:79630544-79631016
  hypo

SEQ ID NO: 212793 - DNA, 90 bp, Homo sapiens
  chr9:80116554-80116644
  hypo
tgtagcttgtctttccgtccttttgatataatcttaaagttgactttttctttgttgttcagattggataatttcttttttttttttttt

SEQ ID NO: 212794 - DNA, 180 bp, Homo sapiens
  chr9:80137040-80137220
  hypo
tatgctatttttattataaacaaagcctacgctttcaacctgttattaatacaatctgcatctctgattgtcttatccatcagaaggaaattacgctttctatgtagcaacagtaggagaaggcaggcaagaaggcgccattgatgagaccttgagagaatgcgctgcagcttcttcctc

SEQ ID NO: 212795 - DNA, 89 bp, Homo sapiens
  chr9:80272830-80272919
  hypo
caggcgtgagccgccgcgcccggcccaaaaacttcattttcaacacaaggaatacattcatgattccactgtaccgtgggagaagaagg

SEQ ID NO: 212796 - DNA, 37 bp, Homo sapiens
  chr9:80304150-80304187
  hypo
tgggattacaggtgtgagctaccgtgccagccctata

SEQ ID NO: 212797 - DNA, 34 bp, Homo sapiens
  chr9:80315386-80315420
  hypo
gtgagccaccatgcccggccgattttctgtctag

SEQ ID NO: 212798 - DNA, 41 bp, Homo sapiens
  chr9:80343172-80343213
  hypo
tgctgggattacaggcgctcgccactgtgcccagccatgag

SEQ ID NO: 212799 - DNA, 180 bp, Homo sapiens
  chr9:80390584-80390764
  hypo
attacaggcatgagccaccacgcccagcctcctcatctctctttttatctttgccattctagcaagtaaaaaggcactttcactcatcaattgtgtttccgtaattatggcatgctgagatttacttttaaaattcagtttagatacttggggcgctgaggcacaagaatcacttgaacc

SEQ ID NO: 212800 - DNA, 149 bp, Homo sapiens
  chr9:80475567-80475716
  hypo
aatactcaggcagtgagtgctagttcgcccgcagctcactggtccatggcgcgggatgttcgggaccccttccataacacactgaacagtccccacaggactggaaggcagagcatttatttccctggctcttccgtggaggttgcctc

SEQ ID NO: 212801 - DNA, 89 bp, Homo sapiens
  chr9:80533774-80533863
  hypo
tttgaataatcatttcgacaagtttagggcagacgaggagactctcaattgttaagctcacaaataattttttttgtttgagatggagt

SEQ ID NO: 212802 - DNA, 158 bp, Homo sapiens
  chr9:80546076-80546234
  hypo
tgcttgtaggacagcggtccctgtcctacaagcatctcaatgacattcattctgttccctctttttctcttccttacacaaccagcaggtccgcatttccatccctaagcattagacttttgctcactgccaatttatttaaagaactctcactgggt

SEQ ID NO: 212803 - DNA, 88 bp, Homo sapiens
  chr9:80570363-80570451
  hypo
tttactccttagtgaaatcatgaaagaaaataggaaagttatataactgcatttaagcactttttgtacataacgctatactttgtgt

SEQ ID NO: 212804 - DNA, 421 bp, Homo sapiens; identical to SEQ ID NO: 201747
  chr9:80645902-80646323
  hypo

SEQ ID NO: 212805 - DNA, 662 bp, Homo sapiens; identical to SEQ ID NO: 201748
  chr9:80646509-80647171
  hypo

SEQ ID NO: 212806 - DNA, 55 bp, Homo sapiens
  chr9:80833878-80833933
  hypo
tgattgcttcatctgctatgcgtctgtggggatccgcaaagatatgggatccagt

SEQ ID NO: 212807 - DNA, 203 bp, Homo sapiens
  chr9:80834011-80834214
  hypo
catttcctgcagtgtgccagcaggatggcccacaagccatctactactcggacaagtacttcgacgagcactacaagtaccggcatgttatgttacccagagaactttccaaacaagcacctgaaactcatctgatgtctgaagaggagtggaggagacttatgtccaatggcgtctaggccgggttcattacatgattcatg

SEQ ID NO: 212808 - DNA, 365 bp, Homo sapiens
  chr9:81892877-81893242
  hypo
ttgtaattgttcttcgaaggccgcgggcgagaaagctgttctaattgtacaaatcactgcacagctgaatcacaggcgcagtcccaagtaatctgtgcaaccatttgactgaactttcgcactagctgggggcgctccccggagtctcctgaggccagcgtctgacaatggacataaagcagccgccaaatgagatgcgggaacagttgtatgtcaagcggcagtgattcaattccgggccgtcagaacgcaggcagcccccggccgcggcgtgattggcagtgtgctgatgcaggctcccaaacctcgacctacccatcttgttaaaatggggccccggatgcggtttggcataatgaaaatgg

SEQ ID NO: 212809 - DNA, 255 bp, Homo sapiens; identical to SEQ ID NO: 201752
  chr9:82185388-82185643
  hypo

SEQ ID NO: 212810 - DNA, 165 bp, Homo sapiens; identical to SEQ ID NO: 201753
  chr9:82185703-82185868
  hypo

SEQ ID NO: 212811 - DNA, 812 bp, Homo sapiens; identical to SEQ ID NO: 201754
  chr9:84302354-84303166
  hypo

SEQ ID NO: 212812 - DNA, 673 bp, Homo sapiens; identical to SEQ ID NO: 201755
  chr9:84303267-84303940
  hypo

SEQ ID NO: 212813 - DNA, 169 bp, Homo sapiens
  chr9:84530343-84530512
  hypo
catcatgataccacccgctttcatcgactgttatgcccagaccccgtctgtcaggtgtgtaacagagcaactgctgatatccagcgactgctgtcttgggagtccctgaaagatgctgttccctttgtgtcccctttggcttcttcagcttctgcgactgagtcatcat

SEQ ID NO: 212814 - DNA, 149 bp, Homo sapiens
  chr9:85843823-85843972
  hypo
ctgggagctgtagaccggagctgttcctattcggccatcttcatttcctcgctatttctaacgcatctgcagtgcttgtccccgctgaagtcttgaactcaaagtcattcaggatgattggaatccacgtcttccaaatttatgttaat

SEQ ID NO: 212815 - DNA, 164 bp, Homo sapiens; identical to SEQ ID NO: 201756
  chr9:86152964-86153128
  hypo

SEQ ID NO: 212816 - DNA, 339 bp, Homo sapiens; identical to SEQ ID NO: 201757
  chr9:86238306-86238645
  hypo

SEQ ID NO: 212817 - DNA, 33 bp, Homo sapiens
  chr9:86600601-86600634
  hypo
gaaaggagttttgccacttgcggtgttcagtag

SEQ ID NO: 212818 - DNA, 248 bp, Homo sapiens
  chr9:88694097-88694345
  hypo
acaaaacacctggaggtccacgctccgggagctcgcaatccagtagttgaagcccaagacgatgatgcaggccaccagggcggccagcacgaggggcggcgacttcatgctgcgacgcccgtttcccaagcccatcatctcaaaatcagcgctgagaatctgccaagtaaaagcaaataaataaacatcaatactagttttatcatctccgaagcagaccgtatcatccttacaaccaagaggaaagg

SEQ ID NO: 212819 - DNA, 108 bp, Homo sapiens
  chr9:88694438-88694546
  hypo
gtgctgtgaacccagggcagtgtggccagttcccaggacaggctcggaggagcaggcaccgccccgaaacctgccacagattagctcgagacctggggcaagacatga

SEQ ID NO: 212820 - DNA, 33 bp, Homo sapiens
  chr9:89301326-89301359
  hypo
aaacaagactgggggctgggcgcggtggctcat

SEQ ID NO: 212821 - DNA, 219 bp, Homo sapiens; identical to SEQ ID NO: 201762
  chr9:89560475-89560694
  hypo

SEQ ID NO: 212822 - DNA, 431 bp, Homo sapiens; identical to SEQ ID NO: 201763
  chr9:89561318-89561749
  hypo

SEQ ID NO: 212823 - DNA, 162 bp, Homo sapiens; identical to SEQ ID NO: 201764
  chr9:89561779-89561941
  hypo

SEQ ID NO: 212824 - DNA, 405 bp, Homo sapiens
  chr9:89699972-89700377
  hypo
tccagatttcttccatgacccgaagccagaaggactttaggctttgctgggcatcactgcggctagtaccaccaaatcctccttctgtggacatttcgacaaacgcctcttcagggagtccaggaagagcaggagccgccctggcgctcctgcggagtcgggcactgcataggctcaggcaccgcggaggtgaggggggaagcgggagtctcggagaacgcagcacgcgcgaagctggcgcataaacgagatggcggccacgccgtttgcacggtctccccttttcccctccccctcccctggcgccccgactcctataattaatttcatgtaagaggtattctgagagcgtagttatatcaaaaacttacctgcgttatttgcgtgtgtgtgtgaaaaatgaag

SEQ ID NO: 212825 - DNA, 38 bp, Homo sapiens; identical to SEQ ID NO: 201765
  chr9:90112392-90112430
  hypo

SEQ ID NO: 212826 - DNA, 296 bp, Homo sapiens; identical to SEQ ID NO: 201766
  chr9:90112494-90112790
  hypo

SEQ ID NO: 212827 - DNA, 149 bp, Homo sapiens
  chr9:90346011-90346160
  hypo
ccactgtgtgagctggtggacggtgatgaggaaggacttgactggggatggcgcatgcatgggaggaattcatcttcagtctaccagcccccgctgtgtcggatacacactcgaatcattgaagatccgagtgtgatttgaattctgtg

SEQ ID NO: 212828 - DNA, 34 bp, Homo sapiens
  chr9:90482724-90482758
  hypo
aaacttaaaacactgaatttcggccaggcgtggt

SEQ ID NO: 212829 - DNA, 34 bp, Homo sapiens
  chr9:90482818-90482852
  hypo
caagctttggtccgtagagcaattatcccaggca

SEQ ID NO: 212830 - DNA, 291 bp, Homo sapiens
  chr9:91119034-91119325
  hypo
acccattctcttgttcggaaagtcaccaccccagctgacaaagtcattgcagtgggagactcgaaagctggaccctgtgagcaacagggcagctgaagaacccacactctgtgcaagcaaagcactagcgagatagcgcagccacggggatgccaggacaggccctgggccctgctcctggtgtgtggtgtgtgtgtgtttgggtggtgtgtggtgtgtgctgtgtgtttacgctatgtatagtatatgtggtgtgagtccagtgtgtgcagtgtgcgaggggtgtgtgtg

SEQ ID NO: 212831 - DNA, 86 bp, Homo sapiens
  chr9:91614962-91615048
  hypo
tgagtccactgaaagcggtttctaccttgatagttgggtgtgtggcgtcatcaacatcacagaaggctgatcgatattaccaggtg

SEQ ID NO: 212832 - DNA, 214 bp, Homo sapiens
  chr9:91616951-91617165
  hypo
ggctcagtggttcatcgtgttggctgtgctcaactccgccatgaacccggtcatctacacgctggccagcaaggagatgcggcgggccttcttccgtctggtctgcaactgcctggtcaggggacggggggcccgcgcctcacccatccagcctgcgctcgacccaagcagaagtaaatcaagcagcagcaacaatagcagccactctccgaag

SEQ ID NO: 212833 - DNA, 180 bp, Homo sapiens
  chr9:91663734-91663914
  hypo
agggcaagctcaggagatccccgtcaccccgctctcggatagtaccctgcgggacaccaggagcctctgcaggataaggtgaggggggtgtcaggtcaccgacagtatgaagctacaggcagggccccttgtcactgctctgctttagaaatgatatgccggccgggcacggtgatttac

SEQ ID NO: 212834 - DNA, 83 bp, Homo sapiens
  chr9:91996203-91996286
  hypo
aggccagcggggcctggaccacgcccgagttagagccagcatagacaaacctgttgccctgcgtgtatgagacagagaagaac

SEQ ID NO: 212835 - DNA, 134 bp, Homo sapiens
  chr9:91997068-91997202
  hypo
ggctgctgactgcttttgaacggaactcagctggaaggagggtgccccacatgcagtgcacccacctgaagctcgggggcgtgcaacagacctggaggtggcccgtggagcgcgctctctagcctctgcccagg

SEQ ID NO: 212836 - DNA, 249 bp, Homo sapiens
  chr9:91997531-91997780
  hypo
gccatgtgtgagccacgtttgtgggaaggattgaggatgacatcccagatcacagttcgggcatcgcgcggcttgtggaggtggcggaaacattctctggcagcaaagccaagctgggtaacttccaagggacagctggtcctgttgggtcccgcggggggcacctgcgaggtggcgtgaacaccatgcagtgcagagcagggtgccctgggtggccaagtggggcccgcctgactcctcaccccaaag

SEQ ID NO: 212837 - DNA, 213 bp, Homo sapiens
  chr9:92049211-92049424
  hypo
ccctagaaacctctagaagggaagacagaacaatggcgttgggcgccttctcaatctccactgagacctttgtcaaaacggtatgcaggccctcaaatctattgcttctttgggttttcactttctttcatgaagcttcatgtatgtaaaaatgttagtctgtcttttctcctgttactgtctttcgtcagtttaattcgcaggccctagaaa

SEQ ID NO: 212838 - DNA, 300 bp, Homo sapiens
  chr9:92053291-92053591
  hypo
gtgatggctgcatcacagaatgcaacaagaaggtgagcaggacgacattcaccgcgggagcctggtgactgcaactcctgctcacgacagagctggggtcatgcaattagataaaatattaatccagtacatcacgggctgaaagctatgccagtcaaacccacattatgaagcactttattctgtcgttcctgagacaaacaacatttctagtgttagggatatttgaggcaaaaaatcgaagtattctttatgttctttgactagaatcaaatacaatgtatgttttttcttttcttt

SEQ ID NO: 212839 - DNA, 51 bp, Homo sapiens
  chr9:92140641-92140692
  hypo
tggtggacaaacaggcgccttcccatttgtccaggtggagaggtgacttca

SEQ ID NO: 212840 - DNA, 180 bp, Homo sapiens
  chr9:92178210-92178390
  hypo
tccacacaagcttgaatgggccattcttatgacattgtcccacggcctgagagctgggaagagaatggcttttccaccatgaacaaaatgacttcacatcagtccactgcccatgcccctggggctgaagaacctgcacgaggtcagggacctgggttcgctgctttgtgttgtcaattg

SEQ ID NO: 212841 - DNA, 171 bp, Homo sapiens
  chr9:92227880-92228051
  hypo
tatcatgccctttcataccccggggccttggacgtgctggtccagctgcgtgaactgcatgttttcttgaacggcgactctgcttgcaggtggaatgcatggagtgcacgggcgtctgcctagagaggagatgtgggggctgggcatggaggtagccgaggagtcagcctg

SEQ ID NO: 212842 - DNA, 167 bp, Homo sapiens
  chr9:92237959-92238126
  hypo
cccaggctcagcatcgcccaagggcagctgacctagcctttgcaatggcactggcattagccggggaggtccgcaccaggacacactccctggctggggtgggatgttctgaaccgtgcagatggggattaggccgagccccacaccctgagcgcctctgtaaacaa

SEQ ID NO: 212843 - DNA, 519 bp, Homo sapiens; identical to SEQ ID NO: 201779
  chr9:93955410-93955929
  hypo

SEQ ID NO: 212844 - DNA, 267 bp, Homo sapiens; identical to SEQ ID NO: 201780
  chr9:93956177-93956444
  hypo

SEQ ID NO: 212845 - DNA, 223 bp, Homo sapiens
  chr9:94124707-94124930
  hypo
ccacccactcgtaccgatgtcccatggcccttcctggacggaaagagtcttacaggggttcaaacaagccatacgctgagatgggatttagagtatgtagctcttccagaaactcgggatatcaatttagtgtgtaggtactcatcaaagcacgttgcagtataattaatgctacctagcttttatcagatctctaatgggaaagcttgcatttaagaatact

SEQ ID NO: 212846 - DNA, 35 bp, Homo sapiens; identical to SEQ ID NO: 201781
  chr9:94183954-94183989
  hypo

SEQ ID NO: 212847 - DNA, 39 bp, Homo sapiens
  chr9:94834642-94834681
  hypo
gtttccaaaatccaacgttggtcacggactcttcttggg

SEQ ID NO: 212848 - DNA, 100 bp, Homo sapiens
  chr9:95003570-95003670
  hypo
ctcatagaatgagaccggagcaaatgattaagcaagtgactgaggtatattttaaatgatcaactttttttttttgagacagggtcttgctctgtcgccc

SEQ ID NO: 212849 - DNA, 38 bp, Homo sapiens
  chr9:95010672-95010710
  hypo
agctgggtgtggtggcgcaaacttgtaatcttagcact

SEQ ID NO: 212850 - DNA, 104 bp, Homo sapiens
  chr9:95039646-95039750
  hypo
cagtcagccaagatcgcgctattgcacgatatttgcactccatctcaaaaacaacaacaacaaaaaatcccagccaggtgcagtggctcatgcttgcaattcca

SEQ ID NO: 212851 - DNA, 65 bp, Homo sapiens
  chr9:95417140-95417205
  hypo
gaactgtcagcatgcgaggttccaacggagctgaggctggcgccagagagcgtccaacctcacca

SEQ ID NO: 212852 - DNA, 153 bp, Homo sapiens
  chr9:95417651-95417804
  hypo
caagcaagctctgcttcactttgtcggtatcttaaggcagaggaaatgcgctcacaggcggccttgtgggttgagccctgtttgctgtgggttcattactgtgacccttcccactgaggacaaacctggagccagactgctcattgctggaaa

SEQ ID NO: 212853 - DNA, 605 bp, Homo sapiens
  chr9:95477240-95477845
  hypo
gggctttgaggagtgagaagcgacacaaagctctcacaagtgtcctgctgatgcaacgccccatggcgcctcggctagactcctaccctctgtgcattagtcacgttaagattgacctagcaccgccgtcccgctgctgctgggttagttgaggtgaagcagatgttagctgcagcgtgcggcgccccacagcccctaatcacagtaaatgctgtgcttctcgctgcagaacacctggttggccagcccggtgccctcggccctgtcgctggcacaggcacaggtgtgacttacgctcggtgtggctggcttggtcttcggggcggctttggcacggccacgccgggtctgctcatggtccagctcgagcagctccagccgctgggtcagcgccagcttctgctggatggccatgcgcagcagcgagttcagcgtcttcttctcgtcctcagcagccgccagctgccgctgcatctcatccagctgtgtaatgtactcgtcacacctgtgggtaccaaaaacatgactgaggggcgggcagagccgagcagaggagggcagggcagggcagggctaagctgcacggccctctgacagccctatac

SEQ ID NO: 212854 - DNA, 66 bp, Homo sapiens
  chr9:95484977-95485043
  hypo
atgttctcctcctccagttccgagtagtcctgcagcagacgagcttcccggaatttgtactccttg

SEQ ID NO: 212855 - DNA, 339 bp, Homo sapiens
  chr9:95492113-95492452
  hypo
gaggggtgaggaacaaggggcgcgggggctgcacgtggcaaagaagtgcagggccttggggctcagggaggagaccttatgggtgagatcaaccagaaaggggtgctcacctagcccaggacgcccacctgcccacgcacctgagagtcgacagctgtgtcatgtccatgccccaaaatccaggccagccagcctcccatcgtgtacaccccaggcgagtggcccagcctccaagcaggtgccatccctctccttccctcccactgcccactacccccacatagctggcgtggcaggacagggcttccatgggtagagggcagacgggccgcagtgtgt

SEQ ID NO: 212856 - DNA, 60 bp, Homo sapiens; identical to SEQ ID NO: 201782
  chr9:95570721-95570781
  hypo

SEQ ID NO: 212857 - DNA, 369 bp, Homo sapiens; identical to SEQ ID NO: 201783
  chr9:95570986-95571355
  hypo

SEQ ID NO: 212858 - DNA, 360 bp, Homo sapiens
  chr9:96069044-96069404
  hypo
tttttcccttgcagggtctgccctgaagcgtctctgcctaggcaaagaacacagcagtagtaattatccgggttttttcccctttgtcctctctcatcgcatgggctttctcgtggctagcgcacatcagggttcccgcggccgggcgggcgtgggcctgccctgtgcctgccccgcgcctgctccatgcctctcggccgggcactgcttcgcttctgcctggcgggatcgctgtcctcggctcccccgtgtgtctcgtggcgcctagagtttgtgcggtctcgccagttcacatctaacgggcttatccttccccggaacacccgcaaattgccgatcattaattggctccttttccaa

SEQ ID NO: 212859 - DNA, 36 bp, Homo sapiens
  chr9:96230446-96230482
  hypo
tgagccactgcgcccggctaccacctttgttttatg

SEQ ID NO: 212860 - DNA, 178 bp, Homo sapiens
  chr9:96256151-96256329
  hypo
ctggagctcctggagcgctctctcagtgggcctggcagccatccagccttcctgggcccttttcttatggaagagtatctgcttctgaaaactggaagtgtcttccttcaattcctagcggttgcaggtctgacacatgcggtttaaatactagtgcaccttgcgaagtctctgatcg

SEQ ID NO: 212861 - DNA, 410 bp, Homo sapiens
  chr9:96275710-96276120
  hypo
acttgtggacttatcggtcagttaggaatgtgttgtgtgcacgtgtgtctatgtgcgtgttgcatgcaagtgtgaggtgtctgtgactacacacatgccagtctcattattcccagcttctcatactgcagttgtttttgtttggtacaaaggtggaagctctgccaaggttttttcttgatgcgagccaggatcgaagggctatggtgtttaaagcttgcgagctgaaggcccttggaaggcaggaacctcagataaattgtagtctgtaagattcctggtcgttctctggggggagtcaacaatgatctgtgcttcactcccagcgtctgttgaccatgcttggctctcaggaggccggaccaaggacagcgtttgcactcctggtctcaccacgcccagtgttggct

SEQ ID NO: 212862 - DNA, 187 bp, Homo sapiens
  chr9:96294481-96294668
  hypo
gacctgcctccggccgctctgctctataggccagttcgtcagtatgtttacggagtcctgtttagtttggcagaaagcagaaagaaaactgagagacttgcttttagaaagaacagacttccaccagaatgtatgtactgtaacaatccattgtttgttttcctcggtacctcgtaatctcttgtgc

SEQ ID NO: 212863 - DNA, 178 bp, Homo sapiens
  chr9:96357852-96358030
  hypo
gcacatatgtctgagcgttgtgcatggctcctctctgcatgtgcagacacactttatacacagaccgagatttgcatcttctgtgaacaaggatgagtgcggctgtgcatgcgcccactgggcatatgtgtgtatacatacctggtttgcaggtaaatatgtgcgtaaccagagatgc

SEQ ID NO: 212864 - DNA, 300 bp, Homo sapiens
  chr9:96573410-96573710
  hypo
aaggcaatgcctatgggagacgtggtacagtcactccctgctttgtaaagcgctgctgggtctcctgggaaacagcagcgtgcctggcactacgcaaggcccgcacagctgcgccgttgttgtcaccagccgcagttcccaggttgcacatgcctagagaaggtgttggcgggacgcggttgcgcctctgacttcctttaattccgacttctacttgcgtcgttgtgtaggcgtctgagggccacctgacgtcgtctagtgtctccacgccttgacacttgtctattgaaatgcatcttt

SEQ ID NO: 212865 - DNA, 174 bp, Homo sapiens; identical to SEQ ID NO: 201793
  chr9:96717633-96717807
  hypo

SEQ ID NO: 212866 - DNA, 37 bp, Homo sapiens
  chr9:96945351-96945388
  hypo
ttcttttcttctccctcccccgacccaccccagagtc

SEQ ID NO: 212867 - DNA, 120 bp, Homo sapiens
  chr9:96945448-96945568
  hypo
tccccaactcaagcggtcctcctacctcagcttcccacataacttggactttacgcgcacaccgccatgcctggctaatttttttctgttttacagacggagtcttgctatgttgcccag

SEQ ID NO: 212868 - DNA, 103 bp, Homo sapiens
  chr9:97162000-97162103
  hypo
ttacagaaatgccaggtggtcgatctaggtcttgtttctcgccacacagaaagccaatcactgaggtgagtattgccggggaaaaagcctttttttttttttt

SEQ ID NO: 212869 - DNA, 37 bp, Homo sapiens
  chr9:97591478-97591515
  hypo
cacacacacacacacacgcacacgcacacacacacat

SEQ ID NO: 212870 - DNA, 337 bp, Homo sapiens
  chr9:97719171-97719508
  hypo
aagaatcacatgagcgtaacaagaccggatggctgttcctctatgttctttttatttttgtactgggtgtggggaaaatcctccctaagcatatatttggaaaagcaattcgaaaactggttcagaagtcttacatgcttggttgactgattagtacaaattcctactgcttgaagccacttctcaccaagagactgcagtgttaaataagtgcattgtatttaccatgacttcggaggttttgattttcacttcccatggaactcttactgctctcttaaccaaactgttcagttcttcgtttgcttctctcttttttgttgtttttttgttgttg

SEQ ID NO: 212871 - DNA, 172 bp, Homo sapiens
  chr9:97727389-97727561
  hypo
taactaagaacctcacgcacaaataattctttgcattctaaatactgctcgtttcctttggtatttttctctgtatatccactgcaggtgcaaggaacgacttcagttgtgaggcatcagtcagtttggggttgtccccccgctcccattttctttgcgtggtccatttttt

SEQ ID NO: 212872 - DNA, 443 bp, Homo sapiens; identical to SEQ ID NO: 201796
  chr9:97767419-97767862
  hypo

SEQ ID NO: 212873 - DNA, 205 bp, Homo sapiens; identical to SEQ ID NO: 201797
  chr9:97811198-97811403
  hypo

SEQ ID NO: 212874 - DNA, 720 bp, Homo sapiens
  chr9:97847925-97848645
  hypo
tgagagaccacttgaccccaaggatgcactgtctcctgctgggaatgctagccatgtactgagtccttaagtctgtccacagaaacatgcactaatcggacatctgtctgaaaggtcaaatgtattgaaagttgcaaaaattcttcttacaaaaaactaaaaccaaatgcatcacctaagtcgtgtgaaatcatgtggtagctcatggctgtgagcggggcggggcggggctttcggaggagctcctgttgttctgggcgcggtgaactctctcttgtatttgcagtccaggccttcgcgtctcctgcgccagcagacggtgcccacggagctcccagctgaggcgctgcttctccgggctgtcgattggacccgccctccggtgcctactgagctgatatcagttctcattttacacactggctcagttcagcaggaacaggagtcgagcccttgagcaaaaagccttcgtgtctgtaagtgcccgaggctcaggagagctggggctcccactcgcggcagacaggcccgcgtccaccctgcgtccaccccggcccggcggcagcacggtgccagtcatctgcatgtgctcctgcggcgtgggggtttgtagacttggaaaaccctgttggcagaaagttaagagctcccaggcctgaaggcaggacacagtgccagcagggggccgtttgcccccatgtgtaagggaggcagggccca

SEQ ID NO: 212875 - DNA, 223 bp, Homo sapiens
  chr9:97855923-97856146
  hypo
actataatgaagttgattaccgtctccaccctggcgccggcaagcacgtgtgcaggccctgctttatacacggagggtggcacagtgttcacacgggtctagattggcacgtacataacgctcgcttctctgtgtcgatggctgcattgcatggacgcgctgtaactcgagaggcagtgacaccccaccttctgggggcttcgttcaagtcccagccctgcta

SEQ ID NO: 212876 - DNA, 203 bp, Homo sapiens
  chr9:97865087-97865290
  hypo
gcagcgtggggacgcagagctaagagtaaacgacgtggtgtggaccatgacgttcgctctcctcggccccccctggcagcacacagggcctgcagccggcctgcaacgagcccgccagggtcagtgcagccagcacgggggctccggctgtagcccaggcacgtgccagtgtgtccctgggcgtctgtattgctatcacttgg

SEQ ID NO: 212877 - DNA, 313 bp, Homo sapiens
  chr9:97867213-97867526
  hypo
gagagcatgcatttgtctctcgcgtctggcttatttcgctcagtgtaaagccctctaggttgggccgcattgttgcaggtgtgcattttataagagtacacaatagattctcgaaagcattctcgctgtgctggggccgggcccaaagaggtggcacctggcatgtggcagccagtcgtctttagccctgggccaccctcatgactcggattcgtcttagctgagacaccagcacctgggaggcacagcctgggcccactccacaggactgtcctaccaggatggagacaatctcctggccctggttcttggc

SEQ ID NO: 212878 - DNA, 42 bp, Homo sapiens
  chr9:97867556-97867598
  hypo
catggacattcacgtttcagtcaggcccggcctggacgggag

SEQ ID NO: 212879 - DNA, 206 bp, Homo sapiens
  chr9:97913297-97913503
  hypo
caacagctataggtggctggcggctacagtaccgaacagtgcacatttacaggatgtgcctgggactgcagaaagcgccactggacactcgagcttcaagtgccctcttacccgtgctttacttctcttcctggtacctttcaccacctgacctacacagtattcccttatagtactcatggttcgcttcctcctctgagggcaga

SEQ ID NO: 212880 - DNA, 46 bp, Homo sapiens; identical to SEQ ID NO: 201798
  chr9:98268140-98268186
  hypo

SEQ ID NO: 212881 - DNA, 960 bp, Homo sapiens; identical to SEQ ID NO: 201799
  chr9:98272920-98273880
  hypo

SEQ ID NO: 212882 - DNA, 45 bp, Homo sapiens
  chr9:98459835-98459880
  hypo
taaatagattgttacaataacgtttggttgagggagccaagatgg

SEQ ID NO: 212883 - DNA, 329 bp, Homo sapiens
  chr9:99139192-99139521
  hypo
tggggtcaacaatttgaaagtaaaccagccagccagatgtggttttcggctcacaacactcaagagctgctcaagtgctgaaagaagcaagcagaagacaagtgcatgccaaagtgagaagaaaagagtctcacgtgtccctcctagagtggctctcagcggaccaagcagagaaacaatgccaggaggcacagtcacagcagcgagaagggactgaggaggaggcctggggaagccaagtgtggacagcctgcaggggagatctcggagaggtgcagttactcgtgttaccgctgatcatccgaaacgggccactcttgtcataccaa

SEQ ID NO: 212884 - DNA, 240 bp, Homo sapiens
  chr9:99259122-99259362
  hypo
tactgcccaggacaagcggcattggaagcgagtgagccgttcccagctgggggcagcaacagcccggggccagggaaacgcatgggggcctggaccgtccggtggcaccgagtaggcgggtgccaggacgccagacacgctgcattccccggagtcccacgccagggagaacggccccgcctgaaaagacgtcgtttaacacagagaaacacacccagggccaggagaaaccattgtcct

SEQ ID NO: 212885 - DNA, 77 bp, Homo sapiens
  chr9:99259405-99259482
  hypo
gcggagtcgtctacccctttagaaacagacttggcccattagagcctccgcggccaggccggggcctccttacctgg

SEQ ID NO: 212886 - DNA, 240 bp, Homo sapiens; identical to SEQ ID NO: 201803
  chr9:99416950-99417190
  hypo

SEQ ID NO: 212887 - DNA, 409 bp, Homo sapiens; identical to SEQ ID NO: 201804
  chr9:99417397-99417806
  hypo

SEQ ID NO: 212888 - DNA, 45 bp, Homo sapiens; identical to SEQ ID NO: 6930
  chr9:99984107-99984152
  hypo

SEQ ID NO: 212889 - DNA, 303 bp, Homo sapiens; identical to SEQ ID NO: 201811
  chr9:100565762-100566065
  hypo

SEQ ID NO: 212890 - DNA, 132 bp, Homo sapiens
  chr9:100843157-100843289
  hypo
gcgatatctgtggccgcagtggctctgggggccaaggtgttggaacgtcacataactttggacaagacctggaaggggagtgaccactcggcctcgctggagcctggagaactggccgagctggtgcggtca

SEQ ID NO: 212891 - DNA, 128 bp, Homo sapiens
  chr9:100890703-100890831
  hypo
agaacagaggtggaccgagacccaggactcctgacgcccactgatgtcacactggctgtgagaaaggccgctctgtggctgccccatgaacgtgggctccaggctctggtgcccgacagccctgggtc

SEQ ID NO: 212892 - DNA, 118 bp, Homo sapiens
  chr9:101052972-101053090
  hypo
tggatgggaggtaggcgtggtggaggatggggagctggagggacagccgacgctggatgctgaagagaaggagagggaggagtgttagtgaagggtagctgggcgcttaccagaaagt

SEQ ID NO: 212893 - DNA, 196 bp, Homo sapiens
  chr9:101216242-101216438
  hypo
cccagaggcatgggactgaccgtgaccccgaagaagttggtctcgttcatggcattgaggatgatcctgcccagcgtgtggtccgtgtagttgaagtcctggatccgctggtgccggctgctggcatgcagtgtctccatggccctctgcagtgtcttggcgatgacccagatgccatcgtaggcgtacccgtgga

SEQ ID NO: 212894 - DNA, 110 bp, Homo sapiens
  chr9:101216476-101216586
  hypo
tctctctcatactgctgtggagtctggaaaaacaggggattgggggaatcccaagttatactcggcagggacatcaggtgcctgatgccgagaagagctgctattcttca

SEQ ID NO: 212895 - DNA, 156 bp, Homo sapiens
  chr9:101280572-101280728
  hypo
tgtttcttgccaggacgctaatactgtagatataagtttttcaggtagaaattatcaaagtataattttttatatccatatgttttcacctaagattataagatacactttgtaattcatttcaccactgaccatgcatgcgcgaatccccttaag

SEQ ID NO: 212896 - DNA, 118 bp, Homo sapiens
  chr9:101553997-101554115
  hypo
cttcccgggagccagttttgcacctcatctaaacccaagacctccctcctcctggcggctggcggccaggccagggctgaactctgtctgaggctccggctgaataccttctgggatg

SEQ ID NO: 212897 - DNA, 213 bp, Homo sapiens; identical to SEQ ID NO: 201815
  chr9:101569829-101570042
  hypo

SEQ ID NO: 212898 - DNA, 144 bp, Homo sapiens
  chr9:103174497-103174641
  hypo
agattaaatgacgtcgtatgtatcaagggcttagcgcactgcctggtacgcagaaaaagcccagtaaatggcaagtgctattataaccattatcatgaggttggaggatcgcttgagcctgggaggttgaggctgcagcgagca

SEQ ID NO: 212899 - DNA, 31 bp, Homo sapiens
  chr9:103174754-103174785
  hypo
caaaatgtggtatatacggaaccttattcag

SEQ ID NO: 212900 - DNA, 74 bp, Homo sapiens; identical to SEQ ID NO: 201819
  chr9:103190036-103190110
  hypo

SEQ ID NO: 212901 - DNA, 148 bp, Homo sapiens; identical to SEQ ID NO: 201823
  chr9:104248697-104248845
  hypo

SEQ ID NO: 212902 - DNA, 499 bp, Homo sapiens; identical to SEQ ID NO: 201824
  chr9:104248975-104249474
  hypo

SEQ ID NO: 212903 - DNA, 39 bp, Homo sapiens
  chr9:107144258-107144297
  hypo
attacaggcatgagccaccgcgcccggctctggtggttt

SEQ ID NO: 212904 - DNA, 48 bp, Homo sapiens
  chr9:107396338-107396386
  hypo
ttgcaggatcccttcagtgccgtttcgccaaccagaaatctctgtggc

SEQ ID NO: 212905 - DNA, 110 bp, Homo sapiens
  chr9:107396494-107396604
  hypo
ccgtggctccacgctcagcctgcggctggactcagcgtgccacagcagcttccgtgttgggcactggcgtctagacgaggtggtggcacccgaaaacttggagatgccag

SEQ ID NO: 212906 - DNA, 153 bp, Homo sapiens
  chr9:107729489-107729642
  hypo
gaggatgttcattagcggctgtaagaaatcacggtctaaactacaccgttcaagaaacccactacagtcgtgcagaccaatagcactattctagaaggtagctatccctcgtgccctctaagaaccatcgttttgcatcgttagcaagaagca

SEQ ID NO: 212907 - DNA, 222 bp, Homo sapiens
  chr9:109689779-109690001
  hypo
agcactgtgattatgggaaccggacggtcaaaggggtactcattcattatcagaagaagcaccgagacttcaaggccaatgcagatgtgatccggcagcatacggccaccattcgaagcctctgcgaccgaaatcagaagaagcctgccagctgcgtgcttgtctccccctctaatctggagcgggacaaaacgaaactccgagcactcaaatgtaggcagt

SEQ ID NO: 212908 - DNA, 291 bp, Homo sapiens
  chr9:109690711-109691002
  hypo
attgacatcaacccaggtgccgtctacaaatgcaggcattgcccatacatcaacacccgcatccacggcgtactgacccactaccagaagcgacacccgtccatcaaggtgaccgctgaggactttgtgcacgacgtagagcagtctgctgacatatcccagaatgacgtggaggagacgagcaggatcttcaagcaagggtatggcgcctaccggtgcaaactgtgtccgtacacacacggcactttggagaaactaaaaatccactacgagaagtatcacaatcagcct

SEQ ID NO: 212909 - DNA, 37 bp, Homo sapiens
  chr9:109865317-109865354
  hypo
tcacaatgtgccccgcgcggtggctcaagcctgtaat

SEQ ID NO: 212910 - DNA, 41 bp, Homo sapiens
  chr9:109894935-109894976
  hypo
ggatgctctgtagggcgggggtccctgacccccaggccacg

SEQ ID NO: 212911 - DNA, 265 bp, Homo sapiens
  chr9:110096156-110096421
  hypo
cagagcttcctaactcggcttgcgataggtgtagatgtttagagatggtgattttcctcagcccatgaggtcgtcttcaaggcagctggggaacctgggctctagccccaggcaacctcatctgttttcccagcgtgttatacaagtgccgtgtttatcgtgttgaaaagatccggaagctctctcctacatatctgttagctttctagatgagctttgcgtaagtcatggttctccagaaaaaaacaaacggagatttattatg

SEQ ID NO: 212912 - DNA, 34 bp, Homo sapiens
  chr9:110160588-110160622
  hypo
gggcatggtggcccacgcctgtaatcccagcact

SEQ ID NO: 212913 - DNA, 328 bp, Homo sapiens
  chr9:110390660-110390988
  hypo
gtacaaatacagatgagggacggcttcccggggtggtcctttgattccagtaagagttatcacggataaagggagggtgcgtatcaggcaaagaatgcatggagtgtttggaggcgcggtgtgcagagcttgcaggaggcagtgtgcggtgagttgtggggactcctacgttgtctgatccctccttttctgctggatcctccccatcaacgtttacccgcactcaggtctctcatcttacagcaaaccctcactccacctcacatcttactccagctcctgactcatcaatttccctcccagccaaatttttcaaataaatgttctg

SEQ ID NO: 212914 - DNA, 76 bp, Homo sapiens
  chr9:110478888-110478964
  hypo
acgtgaagggcccagcgctggagatgtgaagggcccagcgctggagttgtgaagggcccagcgctggagatataaa

SEQ ID NO: 212915 - DNA, 214 bp, Homo sapiens
  chr9:110779880-110780094
  hypo
gagctcaagcctcaacattacggctgcctcagtgacttgaaagaaaaccgggcagggcttcttcaaggacataagctagcagctcacaatggggcctgatgggacatgttgcatcgaaactagaagttggcattgagatccagcctcactgtggcactacaaagctgccgccacgtcagctggatgacactgaaatggacgagaacaaaaggct

SEQ ID NO: 212916 - DNA, 185 bp, Homo sapiens
  chr9:110842928-110843113
  hypo
tttgggaatctacagcgtctgccgcatgccagatatgacctcacagtgataaaagtaagatcatcgcttgatccaatcactatatctccccacccttcccaccatccacaaacacatgcacctatgtgcgcattttacagactaatcagttgaagctcgcaaaagagaagcgatggccccaaagc

SEQ ID NO: 212917 - DNA, 192 bp, Homo sapiens
  chr9:111835846-111836038
  hypo
tttagaaacatgcagcgcaaagttactatacattatatctaatgatacgcactacgggaaataaaaagtacatgctagctccctgttcaacacattacttaagaaaaaaatacataaatagatatgttcaaatacttgacacgtatatgtacatacatttcatttgcatgaatatatcgtataaatgtgttt

SEQ ID NO: 212918 - DNA, 187 bp, Homo sapiens
  chr9:111951147-111951334
  hypo
gccccaaagagaaagcgtaaagaacacagaaagcacaggtattcatggtctgtgttacctggggagggaagctagcacggtagacttggagtagcgtgcaggactccgcattctagggtgaacatcactaatgcatcaatgtaccctcccccaactcccctcgctcagtcaacgccaatgcccccaa

SEQ ID NO: 212919 - DNA, 237 bp, Homo sapiens
  chr9:112040328-112040565
  hypo
agacaccaaaggcctcgagggatgcgaaggacagtcatgaggtcagagggtaggacactggtcggcccaacctcaaaggaagcggaattggactcagaggtggaaagaggaaaagttgttctgcccttctcccgggtccggtggacggagtgagagtctctggctgagaaatgagaaggaacccgggagggttcgaggaggacagtttgaggaggacacagtttgggggtggggtgg

SEQ ID NO: 212920 - DNA, 130 bp, Homo sapiens; identical to SEQ ID NO: 201836
  chr9:112081563-112081693
  hypo

SEQ ID NO: 212921 - DNA, 485 bp, Homo sapiens; identical to SEQ ID NO: 201837
  chr9:112081773-112082258
  hypo

SEQ ID NO: 212922 - DNA, 1018 bp, Homo sapiens; identical to SEQ ID NO: 201838
  chr9:112082484-112083502
  hypo

SEQ ID NO: 212923 - DNA, 203 bp, Homo sapiens
  chr9:113592870-113593073
  hypo
tctcctggagttgaggggctcgggggccgctctcctccgactgcccaccgaactccactggtcccaccggtggatgcccggccggcgggccggtgcctgtgtctgttctatatgctcttctgccgacgtgctcctctcaacgtcctctcaacgaccagccgcttgcgtcttcttcctccaatgtgctcctcaggacgtcctgc

SEQ ID NO: 212924 - DNA, 240 bp, Homo sapiens
  chr9:114619240-114619480
  hypo
ctcctctttgcccttattttttaaagcccagtgtttattttttttctcttaagcatcaggcttgtgaagttgaaaaccatgactttcaagattattgtctcttacaaaagtctacctgaaggctcaaaatgcaaaaattcaactcatgtgtatgtgtgtgtgtatacaaaaatcttttcctgttcttggatagtggggagaatgatctgagcaaaacaaagaaaaaaaaaccggccaggc

SEQ ID NO: 212925 - DNA, 37 bp, Homo sapiens
  chr9:114701511-114701548
  hypo
tgggattacaggcgtgaaccaccgcacctggtcaaca

SEQ ID NO: 212926 - DNA, 157 bp, Homo sapiens
  chr9:114750309-114750466
  hypo
ggccaatgatgaatcgtttagctatagagactcaaggcccttcacaacggaaggcatggcagaagctctcacccacattgcacgtgaaagaggccctgctcagaatggcctctccctgctccttcacaaacctagcgtcacccttctagcttctgaa

SEQ ID NO: 212927 - DNA, 202 bp, Homo sapiens
  chr9:114830992-114831194
  hypo
aaaaatatttttagccgttctgcacttcaaaaatacaacttagagagctgatcaaaggatgaatagaaaaagggcaaaaatacaggttgtccaataatccaggtcggaagtgctcgaggtctgctgcaagtgagagcactgagaatggagaagagggaacaaacggaaaccttgctcaggggagagacggcaggaatctggc

SEQ ID NO: 212928 - DNA, 137 bp, Homo sapiens
  chr9:114832553-114832690
  hypo
tggcattacaggcatgagccaccacgcccagccgctgccttatattttaaacagtctactttttctctccaatgtacaagcctaagcctcgtcaggctggttctcagccacatttcgaggtggaacaaacttgactt

SEQ ID NO: 212929 - DNA, 94 bp, Homo sapiens
  chr9:115479262-115479356
  hypo
gaaagaaagatacatttgaaatgtacacagactgaaacaaatgtaaactctgctagtgcctcaagcatttaattaaatacggcattgtttattc

SEQ ID NO: 212930 - DNA, 256 bp, Homo sapiens
  chr9:115630969-115631225
  hypo
gatcgacaacgaaagggtaggtcagagcagaattgaagctgacccgaaatcggaaactcaaagctgatactgtgtgtgtatgttgtcgttccagtgcctcatggcgtgggagtcgattattccactactgcaggagaaacaagaggccaagtaaagttctttcttgggacggagactcttctacctacacagggcctggcaccctataccggaatgtccctgcagtgccagagacgcagtgctgggaaaacaacca

SEQ ID NO: 212931 - DNA, 101 bp, Homo sapiens
  chr9:116043449-116043550
  hypo
ttttttattaacctggatccctgtcaaacttcttattctttcgtttcagcatagatgccacctattcaaagaagcctttcgtcacacctaacccctctgtt

SEQ ID NO: 212932 - DNA, 233 bp, Homo sapiens
  chr9:116061763-116061996
  hypo
aagcttaagagctccgactatcagattcagtccagtcacccgctgatcttttaatgtgcctaagtaactgcaatcagcgtgtacaaacctcgctgccttctgctttgttcttagcacacagctggtcagccttctgagatcttagagctggccatcccaccaaccttagggagttaaagcggggagttggagggaggcgcactccagcccagcttctccgtttcaaccagaaa

SEQ ID NO: 212933 - DNA, 201 bp, Homo sapiens; identical to SEQ ID NO: 201851
  chr9:116111661-116111862
  hypo

SEQ ID NO: 212934 - DNA, 53 bp, Homo sapiens
  chr9:116269883-116269936
  hypo
acatcatcctggccccgctgaatcctgggagccaggtacggacagctggtgtg

SEQ ID NO: 212935 - DNA, 182 bp, Homo sapiens
  chr9:116344624-116344806
  hypo
tgaagttttctgccagtgtgcgcgtgtgcccgcaggtgcacacattcccaagcatctgttcagttcccgagtatgggtgaggtctttccctttcattagttctcagcagctatggcttcttgaagacagaacctgggctctaaataaatagttccagctccggcattcctggtccttgactg

SEQ ID NO: 212936 - DNA, 81 bp, Homo sapiens
  chr9:116671457-116671538
  hypo
agggaatggtcctgtcgcctgttgcagttgtatgcagtgatgctaatggaagatcgaggcatgtcccggcctgatacctgc

SEQ ID NO: 212937 - DNA, 137 bp, Homo sapiens
  chr9:116671888-116672025
  hypo
gcttgaaggtgccaccgtctcagggcctgggcttgcttggggatgggtggtggctccacagggtggaaatgttcattcctttctcccgagtccagcgcctcctggcctctggtgcttgcatgcggatgctcccatgc

SEQ ID NO: 212938 - DNA, 163 bp, Homo sapiens
  chr9:116708859-116709022
  hypo
cggccctgacccagcgtgtaattaccagtgcgaggtagggggcaagctgcgatgttaatcagcatcaccgctgaagagtgagtgtctgtgtgcgtcttttgcctcctctctgagaggggctgtgaaagtacccctcgcaggatgtagacgggagtgtgtgtgt

SEQ ID NO: 212939 - DNA, 155 bp, Homo sapiens
  chr9:116728166-116728321
  hypo
cattctggctgcaccgttggagaaggccttcgggctgtgtggtctggtggccactcatgagatgccgacttgcagcttgggattcggggaaggccttgaggcagaagacccatggtccaccccaggctggctctgcgactcgttcatcttataca

SEQ ID NO: 212940 - DNA, 314 bp, Homo sapiens
  chr9:116750640-116750954
  hypo
ggcccagagccagtgccagccgaggcctcgctgagtgccgagcaaggaacgatgacggaggtgaaggtgaagacagagctgcccgatgactacatccaggaggtgatctggcagggcgaggccaaggaggagaagaaggcggtcagcaaggatgggaccagcgacgtgcctgccgagatctgcgtggtgatcggcggcgtccgcaaccagcagacccttggtgagtgcccagcgtctgtggtcagggtggagaccagggtgggaacatggagtcagagtcctggggaaaagcggcctggcgcctctgccccctt

SEQ ID NO: 212941 - DNA, 163 bp, Homo sapiens
  chr9:116761525-116761688
  hypo
gggttttaggctgatcgaggggcaggcggggccctgggttttaggctgagctaggggcaggcggggccctgggttttaggctgagcgaggggcaggtggggccctgggctttaggctgagcgaggcgcaggcggggccctgggttttacgctgcatgaggggc

SEQ ID NO: 212942 - DNA, 217 bp, Homo sapiens
  chr9:116770637-116770854
  hypo
ggggcccctgagaaccgggcaggtaagtccttggtgtctgcttgtcacctcccctgtccccggctgggctcctgagacctgggggaccagggtgctaagggccgtgtgttctcccacagaccccttcgaccaaggtgtcgtggccacggacgaggtgaaggaggagcccccggagccattccagaaaatcgggccaagtatgcgggattccctctgg

SEQ ID NO: 212943 - DNA, 340 bp, Homo sapiens
  chr9:116790929-116791269
  hypo
ggaatgtggggctggtggcccgagaggccactcactctgccggctgggagggccctcggggactgagagcgtgaccctctcaggtactgcccccgggtgggagccaccggatgatccagacacgggctctgagtgttcacatccagaggtctccccatctccacgcttcgtggcagcgaagacccagacgaaccagtcggggaaaaaagctccggcctccgtggtccgatgtgccaccctcttacaccgcacccctccagccacccaaacccagacgttccgcactccaaattcgggatctccggcgagcaaggcaaccgcaggtaccaatggcctatgt

SEQ ID NO: 212944 - DNA, 323 bp, Homo sapiens
  chr9:116798287-116798610
  hypo
cccccatctcaagtgcgccgaacagtggctggcacgcagtaagcactcaataaatagctgctcaattgagctaatggtctctctctgcatggcttcctctctccatcattccttcacccagcttctccctcatgggtctagtgacgggggaggcaggcaggctgggcccggagccctgagcacagagacccggtgtgtgtttgggttcccacttgcaaagctgcctgcagcccagcagaaggtgtctgcgtcggttccacccctcacgtggctgccgcatttctccctccagaaccctacacctgcggcgcctgtgggatcca

SEQ ID NO: 212945 - DNA, 62 bp, Homo sapiens
  chr9:116800627-116800689
  hypo
caagcatcttgacttgttttcggagtggagccgtgggctgctttgttctggttcagcgcagc

SEQ ID NO: 212946 - DNA, 475 bp, Homo sapiens
  chr9:116800730-116801205
  hypo
aatcccagccacactgaatcgggattaaaggcttggctccatagagagaaattaagcatcatgagctgcgcagttcacagcgccgacgataaggaggatcagccttgaataacaccaatctcattatggagctgctgaatggcacagggtaattcccgctaataaacttcctttctgtgctgtaggaaaacctggcgtgccttggtgacgttggagaagcatgctttggcagtaataataccaaagatagctacaattttgtgagtgctttctatgcgtcacttgtggcactgagagctttacgcaggttatttcatcagatcttcctgattaggtagttgacgttttcatccccattatgcagatgatgaaaccgaggctcagagaacataatcactggcccaaagttgcacagctcctaaaaaaagtatccaatagcatttgagcttttacgtggcgccaggccttgttctaa

SEQ ID NO: 212947 - DNA, 1451 bp, Homo sapiens
  chr9:116810952-116812403
  hypo
caacagcatgatccccgaaaaggagcggcagaacatcgcagagcggctgttgagggtcatgtgtgccgacctgggtgcactgagcgtggtcagcgggaaggagttcctgaagttggcccagaccttagtagacagtggtgcccgctatggggccttctcggtcactgaaatcctgggcaacttcaacacgctggcgctgaagcacctgccacgcatgtacaaccaggtgaaggtgaaagtgacctgtgccttgggcagcaatgcctgcctaggcatcggtgtcacctgccactcccagagtgttggccctgactcctgctacatcctcacagcctaccaggccgagggcaaccacatcaagagctatgtgcttggtgtgaagggtgcggacattcgcgacagcggtgaccttgtgcaccactgggtgcagaacgtgctgtcggagttcgtgatgtcggagatcaggacagtgtacgtgacggattgccgggtgagcacgtccgccttctccaaggccggcatgtgccttcgctgctcagcctgtgccttgaactcggtggtgcagagcgtgctgagcaagcggacactgcaggcccgcagcatgcacgaggtcatcgagctgctcaacgtgtgcgaggacctggcgggctccacgggcctggccaaggagaccttcgggtcgctggaggagacgtctccaccaccctgctggaactcggtgacggactcactgttgctggtgcatgagcgctatgagcagatctgcgagttctacagccgggccaagaagatgaacctcatccagagcctcaacaagcacctgctcagcaacctggcggccatcctgacgccggtgaagcaggcagtcatcgagctgagcaacgagagccagcccaccctgcagctggtgctgcccacctacgtcaggctggagaagctgttcacggccaaggccaacgacgcaggcactgtcagcaagctctgccacctcttcctggaggcgctcaaggagaacttcaaggtgcacccggcccacaaggtggccatgatcctggacccgcagcagaagctgcggcctgtgccaccctaccagcacgaggagatcatcggcaaggtctgtgagctcatcaacgaggtgaaggagtcctgggccgaggaggccgacttcgagcccgctgccaagaagccccgctctgctgccgtcgagaaccccgcagctcaggaagatgatcggctaggcaaaaatgaagtgtacgattacctgcaggagcccctcttccaggctacccctgatctcttccagtactggtcgtgcgttacccaaaagcacacaaaactcgccaagctcgccttctggctcctggcggttccggccgtgggcgccagaagcgggtgtgtaaatatgtgtgaacaagcgcttctaatcaaacggaggcggctgctcagtccag

SEQ ID NO: 212948 - DNA, 98 bp, Homo sapiens
  chr9:116812706-116812804
  hypo
aaactttgcacacacgcacacacacacacacacacacacacacacacacgaccctggtgcgtgtacatacgcctgtgcttggacgggtgtgcattgaa

SEQ ID NO: 212949 - DNA, 390 bp, Homo sapiens
  chr9:116813598-116813988
  hypo
tgtgctatttggagaccaggcgttggggaggattcacgggttccacagctgcggggtttggtggccgtaggggaagcagtggtttgggagttctgaatgtaagcgccagagctgccctcctggtccgctgtgcgtggtacccagtgtgcatcacactactcaccccctcccggaccctggcagtccacagcgactccgaagtcagcccatagtcacatccaccacacctcagacctgccacagcctctcctcacttcccaggaccctgaggcttccaggagctctgctgcccacagccctcggggtcctcactcacacctccgacttccaggacggcagtgagcatggtgccttgtggccccaacagttgatgttccgagggtgggatgg

SEQ ID NO: 212950 - DNA, 200 bp, Homo sapiens
  chr9:116856485-116856685
  hypo
actcctgtagcatcccgtacaggttccgctgggcccaggccacccgggctccactgagccctgaggctgcagggaagcaggaggtggtggatccacaggagccccagaccctatccccatcctactctgcctccaggaagcccatacccttgcagtccatttggtccagctggaactgcaggcgacggttctcctcctgg

SEQ ID NO: 212951 - DNA, 245 bp, Homo sapiens
  chr9:116857252-116857497
  hypo
cccccagcatctccacgcctgtccctcagcttgtgcctgcctatactcaccttgggggcctgtggtcgggtggtgacccgctgagctcggcttgcatatcgcagggtgctgagagtctcaggaaggcactgggctgagggggacacgcaggccacctggggagtgcactccccctgagcgctcctctctgagggccccttcctcaagacccaaccttccctgccaggccccgcttaagtaccatg

SEQ ID NO: 212952 - DNA, 336 bp, Homo sapiens
  chr9:116971563-116971899
  hypo
catggcaggagccacgggcacctaccagcatccctgggggtgggcagggcttggtgccgtgctagcatctaacccagccgcgagcttccttctgcaggtcctggagccctggcgtggggcgggcctcctgccggcgagcgcctgcgcccttccctggcgtgagggtatgtgcctttggactacatcgtggaagccagcaccatgcagtccatgggcatatacacttgcctcaaggcctatgtcatcgaggagccaccggagctgccactgccaccagggaggaagaggaggagccgggatgtgggatggcagtggtgggtgggctgcggcaggttg

SEQ ID NO: 212953 - DNA, 175 bp, Homo sapiens
  chr9:116973314-116973489
  hypo
tttccgtgtctattacgcagactctagcggggaaccccacctcccacggccacgctgccctggccacctgctgcctggcatcttctgcttctccccctgctttgagtgtgggggccgcatgtggggttgtctggccacaggacctgctgctggcacacggcgtgactggggcctg

SEQ ID NO: 212954 - DNA, 484 bp, Homo sapiens
  chr9:123150759-123151243
  hypo
ccttgttaggggctcgggcttggatcagagggtagtgggaagccgctaaagtgttttggctgggggcatcttggtcagaggcagcgatgtggatggctgatgacacacccctgtcatcacgggaacaatgcaaatgccacattccagctctgggcctcactctgctctttgctaaatcgggaatggcaccactgcaagggctgctgtccagcagactgtgagatgctgagcacacaccagtgcccatggccacgctgcacggaggtgctcttctctggacacttgaacgagctcagcagtgagccatgcgactcgtggaaccctggcctgtcccacttgggattttgggacctgggctttgaggcgccacacaaaacaacagaatcgtcaaggtgaaatgaaatgaatcatttaatgagaatcttcaaactgtggcactggctgagtactaagcaaatccaggggaagacgtgaagcccaccaa

SEQ ID NO: 212955 - DNA, 155 bp, Homo sapiens
  chr9:123176127-123176282
  hypo
gagggagggagagggcgagatggagccattcggtttcccttgcaagctgcagcatgcacggtacttgggaaagatgtccctcccggctggtagctatgatggctagagaagaatgagacctggacaagggtccaaggactcgggtgctgctgcca

SEQ ID NO: 212956 - DNA, 390 bp, Homo sapiens
  chr9:123210146-123210536
  hypo
gggaatacatttttcttggtgcttaccattcagcaacgttttgtcgggcgttggcctcccctccatcactgcttcagccagaattaacttttggtgaagttgcttattacaagttttaaactccttcagctccccctgcagctccaagatctggctctgcagctgcgtcaccacctcctgggtggcagggagacgatacatatttcctaatgaccgggatggttttattaggattggcaagcgggacttcttagcctcctgaaaacacacatatgcaacaatgaatacactttgaacacacttcctttggttgcacagtcaacattctcatgccagccttataaaacggaattcgaactggctgcccagacttctcgttcccataatggc

SEQ ID NO: 212957 - DNA, 104 bp, Homo sapiens
  chr9:123965022-123965126
  hypo
ctgcattgatataaacatgacgtatcaatattatataacaaaatattttctctgacctgaaagttcatttttttcttctgactttaaaagaatgtaagccggcc

SEQ ID NO: 212958 - DNA, 996 bp, Homo sapiens; identical to SEQ ID NO: 201858
  chr9:124131788-124132784
  hypo

SEQ ID NO: 212959 - DNA, 205 bp, Homo sapiens
  chr9:124422091-124422296
  hypo
gaaaaagaaagaaaacgtgatgccagtggggactggacccacctaggtggtttctcggcatccctaccctgagaggctgccacaggtctcactggtacttgttcagagcagcagagctttagcgagccacctagtatgtgtgacctgggtgccaggggctgccacagcagatatagccagcccccgccctcgggagctcagaggc

SEQ ID NO: 212960 - DNA, 198 bp, Homo sapiens
  chr9:124443387-124443585
  hypo
tgaggaaacaggttccgagaggtaaagtcacttgctgcccaagctccaactgctactaagtggcggaaccaagattcgaccccaggtctctgtgactccagggcatgaggcacacccatcctcaggctaggaggcggatccattgccccacacccccccagaaccccatcagcatcgcttttccggctatttcccttt

SEQ ID NO: 212961 - DNA, 167 bp, Homo sapiens
  chr9:124499833-124500000
  hypo
ggacttcttagtgacaacttcggcaagatcctgggccgggccggaggggctgctcactggagacctggccatcttcggaagccagatctggctccagagcctcgggggttgcaagtgcccagaaccaggtcagcagagaggcctgcgctcccaccacaaaggtctgt

SEQ ID NO: 212962 - DNA, 169 bp, Homo sapiens
  chr9:124545862-124546031
  hypo
gccttttaagttgagcgtgcgcactgcatgggaaatagcggccctggaggatgttagacttgctccctctccaagacagcagcagcctgcacctgccccgtgtgtgtggccggcctcctcctcacccttcccggcccccggccaaggacccaggcgctgcatacagggg

SEQ ID NO: 212963 - DNA, 184 bp, Homo sapiens
  chr9:124548590-124548774
  hypo
agccagatggagctccgggtctgtcacctagacaggtgcctctggctccagctagggattgggccccagagagaagcctcgggcctgtccctgttcttgcccctgcagccagctggaagcaagtacggcagagccacacaccggagcagggctgcaccgtcaccctcaccggtggcccttgtgt

SEQ ID NO: 212964 - DNA, 102 bp, Homo sapiens; identical to SEQ ID NO: 201862
  chr9:124990418-124990520
  hypo

SEQ ID NO: 212965 - DNA, 150 bp, Homo sapiens; identical to SEQ ID NO: 201863
  chr9:124991012-124991162
  hypo

SEQ ID NO: 212966 - DNA, 42 bp, Homo sapiens
  chr9:125574218-125574260
  hypo
catgagccaccgcgcccggccggaattgggatcttaaagccc

SEQ ID NO: 212967 - DNA, 57 bp, Homo sapiens
  chr9:125870568-125870625
  hypo
gtctggtgcctggctcgtcagggctgctgggttctcctgtgacgcccttggctcttt

SEQ ID NO: 212968 - DNA, 101 bp, Homo sapiens
  chr9:125986776-125986877
  hypo
cccacccacagacatactcacgattcatcttttcacgcaactttcacggagcatttactacgtgttctaggcctgtactcgatactaagaggagaaagaca

SEQ ID NO: 212969 - DNA, 195 bp, Homo sapiens
  chr9:126100875-126101070
  hypo
tgcagggagagcactcgagcaggttaatggcagcgtccggccagtggaggaggtggcatttgagtggaggcccccagggtaaggagaagcaactagaggggaacagcatgctggaccaagggaacagcagggatggagatcggccctgttgaggccctgagagaagcaggtcagcttggccgaggctcagagatc

SEQ ID NO: 212970 - DNA, 124 bp, Homo sapiens
  chr9:126153103-126153227
  hypo
gaggctctccagtcgccctcacgtccaccttggttgcctttccgacacctatccaagcacgggcccccacctctggctctgacaagagagcacagatcacagcttgacacgttggtgcaacgcc

SEQ ID NO: 212971 - DNA, 64 bp, Homo sapiens
  chr9:126154147-126154211
  hypo
gtctgtgaaaaggcaggttgcggcaaacttggctgcccagcgagggctgccagagtcttggtgc

SEQ ID NO: 212972 - DNA, 180 bp, Homo sapiens
  chr9:126158115-126158295
  hypo
tgactgcaagccgcactctgccttcagattcctttgttcattcacccaggaaacatctcagagcagaggtctgggctcggatgtggtccaggagttggagagtcaaagctgaggaagagctcacagactactggtgtgcctggtgtgtgtgtgtgtgtgtgcacgcgtgtgagacaaaga

SEQ ID NO: 212973 - DNA, 104 bp, Homo sapiens
  chr9:126169268-126169372
  hypo
acgtggtgaaacatggggaaaaagaacaacagagctaattagacgagctgagctgtcagagtgccgctgaatggctcagcgccaacaaacaaaaggaatgggtt

SEQ ID NO: 212974 - DNA, 42 bp, Homo sapiens
  chr9:126169491-126169533
  hypo
gagagaaagacacgccagacccagaggcggttggtcaccagc

SEQ ID NO: 212975 - DNA, 167 bp, Homo sapiens
  chr9:126323416-126323583
  hypo
tgggccacctgtgccgcagattattcctcacttaaccttccctggcctttctctttcattcgggaggtgtttaattaccttggattcacaacgctgcacttcaggtgagcctctcctaatggcctcattaccattttacacaaagaaggagtcgttgattgtaactg

SEQ ID NO: 212976 - DNA, 151 bp, Homo sapiens
  chr9:126348887-126349038
  hypo
tccaaaagggctggcgtggactcaagggccttcctgaagctcactgttcccaaggaaagaattggagcccagctcgctggacagtgcccggtcccccaaaggatcaaggcaactaggggaatgaagaaaggcaagaaaaactcaaactggg

SEQ ID NO: 212977 - DNA, 40 bp, Homo sapiens
  chr9:126349104-126349144
  hypo
taaccatgccatcagtcagggacactagcatctctgcatg

SEQ ID NO: 212978 - DNA, 51 bp, Homo sapiens
  chr9:126349174-126349225
  hypo
caagctgcccaaagtcagagctaggaagcagcagtcaacttttgaacacag

SEQ ID NO: 212979 - DNA, 87 bp, Homo sapiens
  chr9:126442151-126442238
  hypo
ggggtgcgaccatccgtggtccgcctctgcctgctgcctttgtgtgacggcttgagtccccactgcggagtaccacagttgggacta

SEQ ID NO: 212980 - DNA, 571 bp, Homo sapiens
  chr9:127262376-127262947
  hypo
ccttgaagaccatgcacctgcgtgcccagtccacgatggagatgaaggtctggtcggccattctgcacaggaggccgaaggccgccggctggtcggggcggcttttggtgggctcctgcaggcagcccaagatgcgggcccgcacctggtcctcatccggctccagctgcagcagctgcaggatgagctcaggcacgttgggccctccagagaagggctctgggtagccgtacggcagcccaggctgtggggggctggcataaggctccgggtactcagacttgatggcacggccaggaaaggcagggtagaggtagccagccagtggcccgtgggcaccgggcacggccatgggcagtgctggggccccaaagtcgcccagtggcccagcaggtggaccggcggccaggcccttgggctcaggcccatgcaggctgggaggcagcacgtagtccggtgcgggagggggcggcgggggcacccccatcgggggccctgtctccagcttgaagccattggcccgaatctgtgccttcttctgctgtttcagggcccggtcccgcttgtacat

SEQ ID NO: 212981 - DNA, 93 bp, Homo sapiens
  chr9:127308364-127308457
  hypo
gcctgggcaacaagagcaaaactccatctcaaaaaaatgttcatcttcttcctcgaccccacccagagtaacaaaatacgtatatgatagaaa

SEQ ID NO: 212982 - DNA, 39 bp, Homo sapiens
  chr9:127420645-127420684
  hypo
tgcacatgactaaatgtgcttctgtccatcatctgggtc

SEQ ID NO: 212983 - DNA, 31 bp, Homo sapiens
  chr9:127500846-127500877
  hypo
actgaaaaaaggacacgggggccgggcacaa

SEQ ID NO: 212984 - DNA, 127 bp, Homo sapiens; identical to SEQ ID NO: 201874
  chr9:127534416-127534543
  hypo

SEQ ID NO: 212985 - DNA, 336 bp, Homo sapiens
  chr9:127572288-127572624
  hypo
ggacattgactttgccgtggacgagagcggcctgtgggtcatctaccccgccgtggacgaccgcgatgaggcccagcccgaggtgatcgtcctgagtcgcttggaccccggcgatctctccgtgcaccgggagaccacgtggaagacacggctgcggcggaactcctacgggaactgcttcctggtgtgcggcatcctgtatgccgtggacacgtacaaccagcaggaaggccaggtcgcctacgctttcgacacgcacacgggcaccgacgcacgcccccagctgccgttcctcaacgagcacgcctacaccacccagatcgactacaaccccaa

SEQ ID NO: 212986 - DNA, 77 bp, Homo sapiens
  chr9:127657866-127657943
  hypo
acagagaccctccacgacagagagcctccacgacagggagcctccacgacagagagcctccacgacagagaaccatc

SEQ ID NO: 212987 - DNA, 33 bp, Homo sapiens
  chr9:127955075-127955108
  hypo
gacaacagagcgagactccgtctcaaaaaaaag

SEQ ID NO: 212988 - DNA, 156 bp, Homo sapiens
  chr9:128103377-128103533
  hypo
acaaacaaaaagaaatccttttcttagtaatttatcctgctatccaactccaaataaagcctccaactttttctacagactgaagaacgcaaagatagcgatgatgagaaatcagacaggaacagaccttggtggagaaaacgttttgtttcagcc

SEQ ID NO: 212989 - DNA, 138 bp, Homo sapiens
  chr9:128135749-128135887
  hypo
ttaaacctgtcccccgctgccacagccagtttttccacctccacaatcacgactgactcctagtctccctgcctccctctcaccccttctcctaggtgcccttagaattcatcaagtctggccaggcacggtagctca

SEQ ID NO: 212990 - DNA, 480 bp, Homo sapiens
  chr9:128200052-128200532
  hypo
agtaaggacatcaccgcaggagggacactgaagaggctgtcgaggactgcagaggcatctggtgtggccagaggcgtggtgtcaggggcatctgatcccttgcctgttcccacccagggagccggacggcacggacacaggtctccctccgctcacccctctccctgaaacgtgagaaacagcagctttccgcctgcttgaaaaaggaggcaggcgctgtaaggagaagaggaatggggaatgtggccccttccaaggcagcgaagcagagaacatgcaggtggaactgccagctgaaacctacacttgctacttaagaaacggaaagaccatgtctggctgggagtgcagcgtgcctgaggaccagccaccgcccctcctcctggcaccccacactgtccacgcagctcctgggctctgaggtcagaagctggggtgtgctgaaggggaaagtgacacggccttggacacaccactagg

SEQ ID NO: 212991 - DNA, 93 bp, Homo sapiens
  chr9:128399989-128400082
  hypo
ggattaaatgagaaacgatgtattaaagtagcatacccacaataggaaggtaggtaggtaatgggtacttattttttgttctgagacggaatc

SEQ ID NO: 212992 - DNA, 159 bp, Homo sapiens
  chr9:128407606-128407765
  hypo
ccaacacctgagaaacgaagctcagtgagaacgcagatgacaatggagttttaaagacaactcaggttcaatgacaaacatagatttttctttctcaagctaattttacttaaaaagataccaaattggccaggtacggtggctcacgcctatgatccc

SEQ ID NO: 212993 - DNA, 264 bp, Homo sapiens
  chr9:128409706-128409970
  hypo
gtaggaatacaactgaaattcggacaaccacaccaaggataagaaactggctcagatccgagccgtagacagtattcatctactattcatctatagtgcccatcacatttgctctctggtttgttgttcgtggttctgttcctctgctcggtcaggtgcacctaatgtcatggaccactgtcacagtcctcagcactgggcacgatcattcatgtaaagtatagtttctccacttgatggccatatggccgctcttgtctttta

SEQ ID NO: 212994 - DNA, 81 bp, Homo sapiens
  chr9:128479564-128479645
  hypo
cttttctccatgatacgttattagtaaccccaattccttttgccttttctcacagggacttttttttttttttttttttga

SEQ ID NO: 212995 - DNA, 145 bp, Homo sapiens
  chr9:128759707-128759852
  hypo
cattgttgctgccactagctcgggctcagctgccttccctgccatgtgtcgtgtagttgttttcagcacataagctgtcaacgagcgttctttggagatacttgaactggagtggcccaggggcttttcgcctttccgtaagcct

SEQ ID NO: 212996 - DNA, 111 bp, Homo sapiens
  chr9:128925326-128925437
  hypo
tgctggggagaccctcgcctcccatggttgttagcatgaactgaggcgatgcatgtgggtgctgagcacgaagcctggtgcatggtcaaccctcagcgaatgcatctagct

SEQ ID NO: 212997 - DNA, 421 bp, Homo sapiens
  chr9:129455241-129455662
  hypo
gaggtagggcctgtgggccacgggagggaaggagatcttatcctgggccactggggagccacggcaggtgtcaacagaggggacaggctcccatcgggcagcaggttgccgaaggggacaaggctgaggcctgggctgcccccgccccttcatcacaggccgggttgtgtcccccacagtgaagagcgaggatgaagatggggacatgaagccggccaaggggcagggcagtcagagcaagggcagcggggatgacgggaaggacccgcggaggcccaagcgaccccggaccatcctcaccacgcagcagcgaagagccttcaaggcctccttcgaggtctcgtcgaagccttgccgaaaggtgaggggcggccggggggcggggctcaggctgatgcccgcacacccactgcctttctgg

SEQ ID NO: 212998 - DNA, 37 bp, Homo sapiens
  chr9:129627966-129628003
  hypo
gatactagccaatggggccgggcgcagtagctcattc

SEQ ID NO: 212999 - DNA, 237 bp, Homo sapiens
  chr9:129628399-129628636
  hypo
ctcttttttttttccctccccgagtaacctcattttaccaaaacgatcctcagtcagtacacagtcactcccaaatcagtatcttcgggtctaatatttctctctagctccagccccatatttcccacgaccccgtgaaaaacctgagcccagcttgtcctggctgagctacgtggcctccgagtagacaccatgcctcagtctccaggtgctgccgccagaattctgtttgagttc

SEQ ID NO: 213000 - DNA, 76 bp, Homo sapiens
  chr9:129633597-129633673
  hypo
aaaaaaataggtcagcgtgtatgtgctgctatggaaagattttttttctttttttttttttttgagatggagtctc

SEQ ID NO: 213001 - DNA, 389 bp, Homo sapiens; identical to SEQ ID NO: 201884
  chr9:130159087-130159476
  hypo

SEQ ID NO: 213002 - DNA, 167 bp, Homo sapiens
  chr9:130266739-130266906
  hypo
ttgcagatctccttacgctctcactagggcccagggaggcctcatggaggatctcgaggctcagtgacctgccaaggacaacagcaagggacagccgcatccctggtctccggccacacagccccgtgttctgcacctcagcccttgttgaccgagggaggcccagg

SEQ ID NO: 213003 - DNA, 256 bp, Homo sapiens
  chr9:130269334-130269590
  hypo
ggggccccgttgagcagggggccggctggtggggggctctcaggccgcagaccttgggccagcaggcctcggatctcagtgacaccgtccggggacgcaggtggtggtgactcagggctagcctcaaagggcagccccacctcctcatcctggaccacagagaccacctgcttggcgcgccgtcgcttttccgagagggtggctgactccggggtgctggggctggggctgccgcccccgccgctgttgctgtact

SEQ ID NO: 213004 - DNA, 198 bp, Homo sapiens
  chr9:130271243-130271441
  hypo
ctcgggtctacctcccgcatgtggatctgggctcgctgcttgaacacggacgtgctggacacatcaaatcgctgctgcagcccgtccagtcgcagcgactccatcttctcatagcagctctgcatcttcagggggtggtacgccagccgggacagcttctccatgtactgcaggggccggggccgcgggggctgagca

SEQ ID NO: 213005 - DNA, 163 bp, Homo sapiens
  chr9:130272563-130272726
  hypo
ggctggacatggttccgcacgcacacctctgccttggggaggatgaaggctgtgccccgagggagccgggtcagcaggggctccccaaggagcacctcccagccatcccagagcccaggtgctggaggctactgtattactattattatcattattattatat

SEQ ID NO: 213006 - DNA, 69 bp, Homo sapiens
  chr9:130279231-130279300
  hypo
tggacagcacctcctcgaagcgcgccttggcctgctcgtacaccatgtggtacacggcgtccgagatct

SEQ ID NO: 213007 - DNA, 240 bp, Homo sapiens
  chr9:130327583-130327823
  hypo
tgcctagatttaggagggactaggaggaaacaggagcgactactaaggagtagaggatttctttccgggctgatgaaaatgctccaacattgatggtggcaatggttgcgcaattctgtgaatatactaaaaaccgctgaagtgtacactttaggtggctgaattgtatggtaggtgaattacgcctcaataaagctattatttttggctgggcgtggtggctcacgcctataatcttgg

SEQ ID NO: 213008 - DNA, 473 bp, Homo sapiens; identical to SEQ ID NO: 201885
  chr9:130330786-130331259
  hypo

SEQ ID NO: 213009 - DNA, 162 bp, Homo sapiens
  chr9:130444669-130444831
  hypo
ctctctctttctcagcgcccgctatgggcactggcataagaacaaggccccaggcgagtaccgcagtggcccccgcctcatcattttcatccttgggggtgtgagcctgaatgagatgcgctgcgcctacgaggtgacccaggccaacggaaagtgggaggt

SEQ ID NO: 213010 - DNA, 191 bp, Homo sapiens
  chr9:130446345-130446536
  hypo
tgaggttccatatatcgggaggtgggaacctgggggtatgcagttgcccatgaagattcatggaggggcctcgcgcagacagctgacgtccgctgtgtggcctcccctgctttgtgcatgccagcctccttgctaccatgtgtgttcatgcgcgcttgtgtgtgtgtgtatgcatgcgcacacatgtgtgt

SEQ ID NO: 213011 - DNA, 33 bp, Homo sapiens
  chr9:130448210-130448243
  hypo
tgagccaccgcgcccagccgactatccaaattt

SEQ ID NO: 213012 - DNA, 345 bp, Homo sapiens
  chr9:130550821-130551166
  hypo
ggggagcgggactacggcccccccattgacctgtggggtgctgggtgcatcatggcagagatgtggacccgcagccccatcatgcagggcaacacggagcagcaccaactcgccctcatcagtcagctctgcggctccatcacccctgaggtacggggccccggtccccacggggtgcagagatcgaggtcccccggcagaggaggagtggggagtagaatggaaggagcgctcctctctggaagggaggctggtttggtgacagggcctgtcttggggtggggagtgtgtgggagaaaaaaacacctgacacaggctgtgcgccagtctcggttccatcagctg

SEQ ID NO: 213013 - DNA, 40 bp, Homo sapiens
  chr9:130589225-130589265
  hypo
ttcaacccacatctacgccatcctgcggctgtctctccct

SEQ ID NO: 213014 - DNA, 93 bp, Homo sapiens
  chr9:130630679-130630772
  hypo
tggtctcctcattgtcgtccacacgcccgctggtctctccacgtttcaagagccgctgggtcatggtctcagggcctgcgtccacatacagca

SEQ ID NO: 213015 - DNA, 185 bp, Homo sapiens
  chr9:130635124-130635309
  hypo
aggcccacctgcaaacgcccacccattcataaaccccgagacacagggtcccaggaggaacaggggctgccagggtctcccagagagggaggggcagagcccagggtgcagccccaggcccgggctccctccagtgccagtgaagacccttgctgcaccacccgcctgcccgcaactcacccacc

SEQ ID NO: 213016 - DNA, 221 bp, Homo sapiens
  chr9:130637258-130637479
  hypo
ctgcagagctgctcccctcgaaactcccagaaaacagggcgcagggccagcgtctgcccagacaccttgacaacgctccccagggccagagggaagctgccaggaggtgggaggtggccaggaactatgtgtgtctgggatgaggtttggatggggatcctctaagggacagaggcctggggtgaaggaatctacaggagccgctcgcatgaacacagccc

SEQ ID NO: 213017 - DNA, 210 bp, Homo sapiens; identical to SEQ ID NO: 201886
  chr9:130639768-130639978
  hypo

SEQ ID NO: 213018 - DNA, 124 bp, Homo sapiens; identical to SEQ ID NO: 201887
  chr9:130640012-130640136
  hypo

SEQ ID NO: 213019 - DNA, 497 bp, Homo sapiens; identical to SEQ ID NO: 201889
  chr9:130674526-130675023
  hypo

SEQ ID NO: 213020 - DNA, 104 bp, Homo sapiens
  chr9:130737468-130737572
  hypo
cgtggggcccccagcgcggcactgacctggccaaggccttcttcatactaaaagaaccccacctgtgcctccggggccaccatcccagccgtgccatggaaggc

SEQ ID NO: 213021 - DNA, 124 bp, Homo sapiens
  chr9:130868765-130868889
  hypo
cccctatgccggcatcgaccttgcagtctacgaggtgaggcccaagctggacagatttagaaacctcctcccagcacacctccacctgctgtctccctccttgacggacgcgtggttagtgcag

SEQ ID NO: 213022 - DNA, 262 bp, Homo sapiens
  chr9:130907016-130907278
  hypo
ctcatttgacccttccggaacctattaccctgccccctgggctgggcacgctcctggactgtcctgggctctcgggagaaccagctttcaggagagccagaccggtcctctcacccagccacctctgatggtgccagcggaggcccagccaaggacctggagagcagggagcacgggagcatgtggggtaacgcaggggtggccgcagtggagatgcccctttcctggggtgctgggggctgcagtccgggcaggaggggtg

SEQ ID NO: 213023 - DNA, 219 bp, Homo sapiens
  chr9:130914350-130914569
  hypo
agtgggaggggaggccggtcccccatgaggaagggatctgaggcctcatctactcattcaacgatatttatgtggtgtctgccagccactcactggccatcttggtcacagggagaaccaaggagctgacttcggaactaaaggagaacttcatccgcttctccaaatctctgggcctccctgaaaaccacatcgtcttccctgtcccaatcggtaatg

SEQ ID NO: 213024 - DNA, 40 bp, Homo sapiens
  chr9:131060967-131061007
  hypo
gtgttcttgctacattgctctgtgcgcgtaccttgatggt

SEQ ID NO: 213025 - DNA, 200 bp, Homo sapiens; identical to SEQ ID NO: 201892
  chr9:131183034-131183234
  hypo

SEQ ID NO: 213026 - DNA, 147 bp, Homo sapiens
  chr9:131411426-131411573
  hypo
taaaatggttaaaacgggccagagatggtggttcacagctttcatttcagcactttgggaggctgagtgggaggctcacgtgaggccagttgttcaataccagctgggcaacaaagcaagacctctgactctacagaattttccaaa

SEQ ID NO: 213027 - DNA, 204 bp, Homo sapiens
  chr9:131483897-131484101
  hypo
ccctccctctacacccgggcagcagcacccaccatgccaggtacaggccccacagaagcaccaccagctgcagcgccaggtagaccacaaagagtgggtggttgcgctctcccacacagttctccatccaggggcagtggtggtcgtagcggcggacgcaacggcggcactcacggcagtgccgagccctcaggggctgctgtg

SEQ ID NO: 213028 - DNA, 36 bp, Homo sapiens
  chr9:131574473-131574509
  hypo
ttgagatagcgtctcgctctgttgcccaggcttgct

SEQ ID NO: 213029 - DNA, 37 bp, Homo sapiens
  chr9:131579962-131579999
  hypo
cctttttaaggcttcgcttgtactgtactgtcaagct

SEQ ID NO: 213030 - DNA, 180 bp, Homo sapiens
  chr9:131652961-131653141
  hypo
ctagggcttggccagtgcccactcccctgggatctcagcagaagatgtgtctgctgcctctctagggtactggtggccacatttcataacctgtctaagaaggcagcgctggtattcataacaggttaagacctgtaaaccgtgtgtggccgtgactccatgtgcaaatatgagccaaca

SEQ ID NO: 213031 - DNA, 108 bp, Homo sapiens
  chr9:131675067-131675175
  hypo
gccacggggcctggcgtggccaaggcaggtagggatggagagacatggacggatctgggagacgctggagggggaattcaaagggacgggagttgatggtgggggtgg

SEQ ID NO: 213032 - DNA, 360 bp, Homo sapiens; identical to SEQ ID NO: 201894
  chr9:131709430-131709790
  hypo

SEQ ID NO: 213033 - DNA, 112 bp, Homo sapiens
  chr9:131776674-131776786
  hypo
agcggggacacctaccgtggctttggcttctgcagccttggccttcttcagcctcgctttgcaggcatccaagtccagacgccggttttggaggagccgcctctccttctac

SEQ ID NO: 213034 - DNA, 200 bp, Homo sapiens
  chr9:131822190-131822390
  hypo
cttctccccacgtgctctgggtgtggtttctctgttggaggaatctgcctcctctggcctccctacatggcagaaagggctgggggacctttagggtggcccgccgcaggtctgtggcctttgcttatttgctcgacaatcctttcctgagcacccttggaggtccacacccctcagcccttgggcgagcacggagggga

SEQ ID NO: 213035 - DNA, 600 bp, Homo sapiens; identical to SEQ ID NO: 201895
  chr9:131843032-131843632
  hypo

SEQ ID NO: 213036 - DNA, 175 bp, Homo sapiens
  chr9:131870113-131870288
  hypo
ccgacgctccagccccttctgcaggcgctcccctacacctcctgaggcctgaaactcatccaccagctgcttggtgtgggcccactcctcctcactcacgatgggctgcagcgccttcaggtagtggtccagggactgctggagagggggcacgggcagccgtggcagtgcatcc

SEQ ID NO: 213037 - DNA, 203 bp, Homo sapiens
  chr9:132004504-132004707
  hypo
aggtggggctgggggctggttattttacagatgaggagacccgagaccagagagggaccgtgactgcccaaggtcacatagatctttggcctaacttgacacagcattcattcacagcctgagcaccgctctacggagctcctggacagatctgcgtgtcccctcctgggagtcccatccactggagccgcagagtgggggca

SEQ ID NO: 213038 - DNA, 196 bp, Homo sapiens
  chr9:132112539-132112735
  hypo
ggttgctaagccaggcggcccacctttcccccttcccataagacatgaagacgcccctccgtgtggcacagggcagagctggccagagccctgctcagtgtgtctggccacttgacctgggacaagccctccttctgagcctctgctgtatggggcaaccgtagggccctggttcggagcccggtgtggggaggat

SEQ ID NO: 213039 - DNA, 266 bp, Homo sapiens; identical to SEQ ID NO: 201896
  chr9:132145495-132145761
  hypo

SEQ ID NO: 213040 - DNA, 218 bp, Homo sapiens
  chr9:132163279-132163497
  hypo
tgggctccaaccctgcgggccactcccggcctggccaccccaccgcatctccaagccccatctccctcttggggaccgtgtctctgggttttgtgaggctgaattcttctcagctctcaggtgttaagaccatctcctccaagaggcctccctgagccccggcccccacgatgatcctgctggcattctctctcctcctcaggcggctctgggtttct

SEQ ID NO: 213041 - DNA, 47 bp, Homo sapiens
  chr9:132211772-132211819
  hypo
tctaatggagagaaccggagcaaggaaacgggcgctggtgagagctg

SEQ ID NO: 213042 - DNA, 272 bp, Homo sapiens; identical to SEQ ID NO: 201900
  chr9:132245345-132245617
  hypo

SEQ ID NO: 213043 - DNA, 707 bp, Homo sapiens; identical to SEQ ID NO: 201901
  chr9:132258223-132258930
  hypo

SEQ ID NO: 213044 - DNA, 371 bp, Homo sapiens; identical to SEQ ID NO: 201902
  chr9:132330860-132331231
  hypo

SEQ ID NO: 213045 - DNA, 322 bp, Homo sapiens
  chr9:132501746-132502068
  hypo
cccagagacccacacgcgcagcaggctgccaggaaaccaggactcagggcccaccacaatctggaaggaacatcaagtccccaggtatagccacggcggctcttggcccatggtctggtggccaaggaggcatcagctgctggtcacaggtggcgggccgcttcccagaggatctgcagagccatggaggcgcaggggagctgggccagggtgtaggtcacggagcggatgggtgcccgcagcttccccaggtaggccacggtgtgtgccacacggcccacgaggaagaccaggaagtgcatccaggcgacaaaagggttag

SEQ ID NO: 213046 - DNA, 96 bp, Homo sapiens
  chr9:132509434-132509530
  hypo
aatgttgggattataggcatgagccaccacatctggtcaagaataatttttttagtaacatttaccaacatggaaagtgttcgcaaaataatgtta

SEQ ID NO: 213047 - DNA, 94 bp, Homo sapiens
  chr9:132604072-132604166
  hypo
ttagatctcaggaagcgcaccaagaatccgtgcatgagtcccctgcggtgtgtctgactccatcaccatggcgcctgttcgttgctgggctggt

SEQ ID NO: 213048 - DNA, 305 bp, Homo sapiens
  chr9:132633590-132633895
  hypo
ttagggttcatccacgttgcagcgtgtgtgtcggaatgccctgccttttgtatgctggttatttattgttccattgtgtggatggctggggcctttctgcttattcgttcatccgtcagtggacactcaggccgcttccctgttagctattgtgaggaatgctgctctgaccatgggtgtgcacacctctcttctttcatccctttgggtctatgcctatttttaatttctcgaggagccaccgtactgggttccacagtggccaccccatttcacattcccaccagtgacgcacaagagttcca

SEQ ID NO: 213049 - DNA, 202 bp, Homo sapiens
  chr9:132636600-132636802
  hypo
tcaaaggtagtgccgacagaactggtaaacttgatggctcattgcagctcttggggtccagttctcagcagtggagctgggagtgatctgtgtgacttagagcgagcccagtctggcccccacgtggaactcttggatttgttccaatggagtcagcttgcatgatcccatcagctgtcctgggcccgtgggcaaggctgcg

SEQ ID NO: 213050 - DNA, 53 bp, Homo sapiens
  chr9:132638505-132638558
  hypo
accttcatcaaggtgcgtgcggcgaggcggcgcgggggcggctctgccagcct

SEQ ID NO: 213051 - DNA, 121 bp, Homo sapiens; identical to SEQ ID NO: 201904
  chr9:132804284-132804405
  hypo

SEQ ID NO: 213052 - DNA, 207 bp, Homo sapiens; identical to SEQ ID NO: 201905
  chr9:132804455-132804662
  hypo

SEQ ID NO: 213053 - DNA, 292 bp, Homo sapiens; identical to SEQ ID NO: 201908
  chr9:132805445-132805737
  hypo

SEQ ID NO: 213054 - DNA, 130 bp, Homo sapiens
  chr9:132821045-132821175
  hypo
taggtaggcttttgtgcccatctttctttctttcttttttgagcttcgttcattttgtgccatgtgtcagtaattcattcctttttactgttgaatggtcttccagcgtgtggatatatcttcttttgct

SEQ ID NO: 213055 - DNA, 492 bp, Homo sapiens
  chr9:132874115-132874607
  hypo
ctgtcctttagccgcgtctttgtctctcctgtcacgcgcagtggcttctctcaggtcctcggtcactgagactcacagctgcactgcatcctccgagagggagcttaattgagtctcgcacagacacacctagcgctggctccactctgtctcgcctgctaagatttactggctctgactgcccttgagcccgcatccgcgttcccttctctttctccagtgtcattaccttataggactggcgtcgagatacacaccgtaaatttaattaacagtctctgctgctcaccatcctttttttgggccttgtgtttctgaggaaaagtcagaagatgtattctgaagagccttagctttcatgtgagcttcagaagtatttaaacaatcccggttggctggctgcagagttgatggaggaacggcttcattccgaggtgccgccgtgctctgaaaggagccgcgaccatgcgaggcatttgttagggcagcggt

SEQ ID NO: 213056 - DNA, 93 bp, Homo sapiens
  chr9:132874637-132874730
  hypo
tttcataatcatacggtgtgagtctcttgtgctgttgacatttgcctgatggtgaaaagcaatgatgggtgaaattgccggcaccgtcacgtg

SEQ ID NO: 213057 - DNA, 357 bp, Homo sapiens
  chr9:132881038-132881395
  hypo
acttaaagctcttccgatgattctgttgctcacccccattaagaaccattgctataaaggaattctcctccacatgaggaggtcgatgcctggagacagaggcagcaggccaagggcaggcacacccagctgagatggggcagggctggaaggcaggcctcctggatcctgcctggggccttgtctctctccccacactcattctttcaccgtatttgctgctcctcatggtgaggtcagaaatagcccgcccagccttggtgagccttcgctcccacaggagcccaacacccagcccgccacagtccggtgagcagcaggctgtcggtgttcctaagtcagggaaatctttggaag

SEQ ID NO: 213058 - DNA, 49 bp, Homo sapiens
  chr9:132881495-132881544
  hypo
ctcggcatcctgactcatcctatgcatatggcagcgctgcttgcaggag

SEQ ID NO: 213059 - DNA, 58 bp, Homo sapiens
  chr9:132881756-132881814
  hypo
ctaagggcgggcatcgttacttctgccttaacaggtgaagaaaccgaggctcagagag

SEQ ID NO: 213060 - DNA, 63 bp, Homo sapiens
  chr9:133223968-133224031
  hypo
cgtgtcgggtatggccgggcagtccctgacgctggagtgtgacgcgaacggctttccagtccc

SEQ ID NO: 213061 - DNA, 214 bp, Homo sapiens
  chr9:133266473-133266687
  hypo
gaggcccgcaaggacttcgtggtagcagtgctgggtaggtctgcgcctgcaccctcctgtcccactcccatggcagcccctgccatcacccagggcctcactgcacccctgcctcagtggccccccggatccggagctcgggcgtggcgcgggagcaccatgtcttggaagggcaggaggtgcggctggactgtgaggccgatgggcagccgcc

SEQ ID NO: 213062 - DNA, 104 bp, Homo sapiens
  chr9:133304439-133304543
  hypo
aggggatcagccatcgcacctctgtggcccccagggcccttggagtgcccgacaactcaccgggctctcctgcctgccgcccttcctgccgcctttcctccttt

SEQ ID NO: 213063 - DNA, 159 bp, Homo sapiens
  chr9:133304981-133305140
  hypo
tacaaccagctctgcgagaacaccccaggcggtcaccgctgcagctgccccaggggttaccggatgcagggccccagcctgccctgcctaggtacggggacacccaccctctggccacaccgctgcagctgccccaggggttaccggatgcagggcccc

SEQ ID NO: 213064 - DNA, 281 bp, Homo sapiens
  chr9:133366650-133366931
  hypo
gattttagttacaaagtgagagagtcattaagacgtggcggaggagagagcacctggccgggctgctccggggcctccacggaggctgatcccaccgtggccgcggccacggctgccacttatcctgccatcttgctgctaggctctgagctgggcacctgatggggtattatctaatattagctgcgcagaggtgaggaaacggaggcccccaggtgaagacactcacccaggctctcctggctggtgatgggcagctttgagccggggacaggccagct

SEQ ID NO: 213065 - DNA, 120 bp, Homo sapiens
  chr9:133585240-133585360
  hypo
cacccggccatgaattgttagtttaaaaaaatgtgtattaggggttctgatttgactgctcaattttaagctaaactagagaataaagcatgtgcgcggtggctcacacctgtaatgcca

SEQ ID NO: 213066 - DNA, 240 bp, Homo sapiens
  chr9:133592860-133593100
  hypo
caggtggatcacctgaggtcaggagttcgaacccagctgtgcaatctagtgagatcttacctctacagaaatttaaaaaattagccaagctcccactggagccaaagagtcgaggctgcggtgagccatgaacacagcactgcattccaatttgggcaatagagggagaccgtgtctctggggggtaaaaaaaaaaaaaaatacagttcattggtagagtttcttaaaggcagccagcct

SEQ ID NO: 213067 - DNA, 40 bp, Homo sapiens
  chr9:133606663-133606703
  hypo
ggttacagacgtgagccactgcgtccggctgctttttcac

SEQ ID NO: 213068 - DNA, 82 bp, Homo sapiens
  chr9:133609268-133609350
  hypo
gcctggcctgtaaagcactttcatatacttttttgtgaggtctatggtataggcaggatacgcattattcctttctttcagt

SEQ ID NO: 213069 - DNA, 174 bp, Homo sapiens
  chr9:133641498-133641672
  hypo
gcttgtgactgtgagggccccgggccgtggcatgcgttggtgcgctctcaagaatgcggccatggcactcacagacacataccaagaagcctcggcccccagtgcccccgccagcctgctcaggggcatgcggatgactggagcctggaaggcgggtcttgctgggcaggacag

SEQ ID NO: 213070 - DNA, 1392 bp, Homo sapiens; identical to SEQ ID NO: 201911
  chr9:133710035-133711427
  hypo

SEQ ID NO: 213071 - DNA, 272 bp, Homo sapiens
  chr9:133759768-133760040
  hypo
ctagccaccggcgaggaggagggcggtggcagctccagcaagcgcttcctgcgctcttgctccgcctcctgcgttccccatggggccaaggacacggagtggaggtcagtcacgctgcctcgggacttgcagtccacgggaagacagtttgactcgtccacatttggagggcacaaaagtgagaagccggctctgcctcggaagagggcaggggagaacaggtctgaccaggtgacccgaggcacagtaacgcctccccccaggctggtgaa

SEQ ID NO: 213072 - DNA, 110 bp, Homo sapiens
  chr9:133767699-133767809
  hypo
gtaagttctcatctcagcagcggaagccagcccgggagtgagcagcatccgaccgccgcctctgacacgggatgggatgcaggagacaccaaaggcgcgtttgaaacaga

SEQ ID NO: 213073 - DNA, 123 bp, Homo sapiens
  chr9:133767878-133768001
  hypo
gttttccgaatgttccttgctcttaggaaacctgggaaggagcagccgagtggaagtgaaaagcacatgtgctgtgttcctccgcccctttgaccgactgccggttacagggatctagaggag

SEQ ID NO: 213074 - DNA, 34 bp, Homo sapiens
  chr9:133773658-133773692
  hypo
cctcactgagcttcagatcctccgcctggctggg

SEQ ID NO: 213075 - DNA, 35 bp, Homo sapiens
  chr9:133779947-133779982
  hypo
ccctgggtctaggcggtctctatccctccccccag

SEQ ID NO: 213076 - DNA, 107 bp, Homo sapiens
  chr9:133911551-133911658
  hypo
ggtgcaagtgcaacgggcatgccagcgagtgcggccccgacgtggcaggccagttggcctgccggtgccagcacaacaccaccggcacagactgtgagcgctgcctg

SEQ ID NO: 213077 - DNA, 47 bp, Homo sapiens
  chr9:133911723-133911770
  hypo
gtgtctgagtgtcacagggcatcagggacccgaggctggtgttgcag

SEQ ID NO: 213078 - DNA, 244 bp, Homo sapiens
  chr9:133967063-133967307
  hypo
gagctgcagatccagggcttcgagagtgacctcgccgagatccgcgccgacaaacagaacctggaggccattctgcacagcctgcccgagaactgtgccagctggcagtgagggctgcccagatccccggcacacactcccccacctgctgtttacatgacccagggggtgcacactaccccacaggtgtgcccatacagacattccccggagccggctgctgtgaactcgcccccgtgtggat

SEQ ID NO: 213079 - DNA, 67 bp, Homo sapiens
  chr9:134126741-134126808
  hypo
caggaaggaggcagcccaccctccaagggacacgtggtccacatgagcagctcggccaggggccttt

SEQ ID NO: 213080 - DNA, 31 bp, Homo sapiens
  chr9:134132752-134132783
  hypo
gctgagattacaggtgcgagctaccacacct

SEQ ID NO: 213081 - DNA, 203 bp, Homo sapiens
  chr9:134188222-134188425
  hypo
acgggcctggccatacgtcttccatatgtgtcattgtgatgaccttatccctattttacagatgaggaaactgaggctcagagagggaaacccatttccctaaggttgcccagcttggatgtggtggagccaggatcagaaaccaggcctgagtggccccagcgcagagaagccctccggaagacagaaacgcagggcacccg

SEQ ID NO: 213082 - DNA, 184 bp, Homo sapiens
  chr9:134400291-134400475
  hypo
agtgaggaaggcctcgctgctaacactcccctggggtgcgccgagaggaagcagtgggtgtgggtgggcgtccccaggctcagtccctgaacacacatgccgggcgggagacctgccctgaggctcggcagcccctcagtggggtctgctgctggactccaaatgtgaccgtttgccagaggtc

SEQ ID NO: 213083 - DNA, 38 bp, Homo sapiens
  chr9:134688853-134688891
  hypo
tgccgttgtttgagacggagtctcactctgtcacccag

SEQ ID NO: 213084 - DNA, 186 bp, Homo sapiens
  chr9:134746467-134746653
  hypo
tgtgcatcccactgtgtgcccgggattcagtgtgcatcctactgtgagccctggatccaggtgtgcgtcctgctgtacgccccggattcggtgctcaccctaccatacaccccacattcggtatgcagcacccacacgctttttcctactcaggccctctcctgcggtgggggcaaagataacagg

SEQ ID NO: 213085 - DNA, 259 bp, Homo sapiens
  chr9:134775011-134775270
  hypo
tcaatggctgttagcgtcctttctcttcggagtgtggtgcagcaggaagggtaacgtaacaggagccctcctggctctgccatcgagatggagcctggtgtgcgctctctagcagaccttccagccctcacatcgctctacaatgattccgattctcatgtgtctggcatgtgccagtttctaacgtatctgcatgcaccaggttgtagtgaccttgaactttttgatagactgataaagagatgcagcacatagaggc

SEQ ID NO: 213086 - DNA, 138 bp, Homo sapiens
  chr9:134902645-134902783
  hypo
gagaaagaagagaacgcaggagccgtgtccacaaccaggcctcttagagaccagaatgcagcccaccgcagcccaactgctccagcagcttccggccatttgccctactcagcttctgggattcggattcttctgggc

SEQ ID NO: 213087 - DNA, 196 bp, Homo sapiens
  chr9:134903267-134903463
  hypo
gctgtgaacctgtgccaggccgtggagggtgagtgtactgggcacagcacccatgctggctgggacctcatcaactgctggcagtcaccggcctaggtgcccatctctgatctgagcaaccacagccatagtagagtcacagggcacacacacagccggacaacctacgtgctccggccccagctcctccttccac

SEQ ID NO: 213088 - DNA, 120 bp, Homo sapiens; identical to SEQ ID NO: 201915
  chr9:135037440-135037560
  hypo

SEQ ID NO: 213089 - DNA, 879 bp, Homo sapiens
  chr9:135048988-135049867
  hypo
gctgcctccaatcccacctgcgatggggcaggcagtggatggatggacagacgaacggacagacaggcaggccgcaccatgctgcggatgagacggatggatggacagacggacagacaggcaggagcaccatgctgcggatgagatggatggacggacgaacggagaggcaggcaggtcgaaccatactgcggatgagacggacggacggacagacaggcaggccacaccatgctgcggatgagatggatggatggacagacggacagacaggcaggccgcaccatgctgcggatgagatggacggacggacggacagatggacagacaggcaggagcaccatgctgcggatgagatggatggacagacgaacagacaggcaggcaggtcgaaccatgctacggatgagacggacggatggacggacaggcaggcaggccacaccatgctgcggatgagatggacagacggacagacggacagataggcaggccgcaccatgctgcggatgagatggacagacggacagataggcaggccgcaccatgctgcggatgagacggacggacggacaggcaggtcgaaccatgctgcagattagacggacagatggacggacggacagacaggcaggccgcaccatgctgtggatgagatggatggatggacagacggacagacaggcaggccgcaccatgctgcggatgagacggacggacggacggacagacagacaggtcgaaccatgctgcagattagacggacagatggacggacggacagacaggcaggccgcaccatgctgcggatgagaacttgggcttctggagggaggagatggggcccgggggcatcccgcacttctgggatgtgggact

SEQ ID NO: 213090 - DNA, 100 bp, Homo sapiens
  chr9:135195997-135196097
  hypo
aaaaaaaactaaacaaggcaccttaataccaccaataattattggcctgtataaaccagaaatgcttaaataagacggttgaaatcgtatggttaaaaag

SEQ ID NO: 213091 - DNA, 144 bp, Homo sapiens
  chr9:135196474-135196618
  hypo
ccaacacctctcctccgtcccccactcctacccagccctcttcccacactcagctccctgccacgcctacatttcccaggtaaaatatgtgacgattcttttttgggaactgagacctgacaggaaaaataaagactaaagaca

SEQ ID NO: 213092 - DNA, 344 bp, Homo sapiens
  chr9:135267104-135267448
  hypo
acgggcacgaactgcgtgcctgcctccctcccaacgtgtcccgtgccactgcggggaagtgaccctccgcccaggctctcccaccaccagtttattggggtcctggtccacttggcagttatatttgcacggacagttactgaagtgtggtaaaaaccagcctagtgggtaaaggtcacatggcttcactaaacacacgaggaaaccaaacaaattagtatagagaacagcttaagaaacaaagctcttgcggaagacaggtctacggtgatttccgggcattggatcggttatggctgaaccaggcctgtcagggcttatttcttcagcgaggtgggcactgg

SEQ ID NO: 213093 - DNA, 246 bp, Homo sapiens
  chr9:135275314-135275560
  hypo
aagaatgcttcttgtcgatctataaatctgaatcatccataaaagaaagttaggtgctagctctgcatacaggaagttcaacaaacactaaggccccacaagctcaccttgtgctttaaattccttaaaccgttccaagtcgtcccggtacatccgcttgattgtgctggtggccctgtccttgatgttaggaatgaactcctgaagctgtttcacggcagaacccaaatccgcatctgaatcatc

SEQ ID NO: 213094 - DNA, 644 bp, Homo sapiens; identical to SEQ ID NO: 201918
  chr9:135286324-135286968
  hypo

SEQ ID NO: 213095 - DNA, 234 bp, Homo sapiens
  chr9:135384263-135384497
  hypo
ggcagcaccaggatttgagccgagtctccctccagggcggctgttcatatccacaggccgcatgcttccaggaggcagagcaaggccctgggcgaggaagtcatttctcatcctgagctccgttcacgttggtgccagtggcctggtgcggaggtgagtcctcagcagcgagatggcggctacgaacaacagttacagcaatgaacggccaacgctgatgagcacctactgggg

SEQ ID NO: 213096 - DNA, 44 bp, Homo sapiens
  chr9:135548276-135548320
  hypo
atataatgagttgggccgggcgcggtggctcacgcctgtaatcc

SEQ ID NO: 213097 - DNA, 300 bp, Homo sapiens
  chr9:135600616-135600916
  hypo
ctgcacccggccaaggtgggtgttttaaaagctgtgtttgttgagtgcttccagagcccggcactgcgctgagatcttcatcggcatcaccactctttatcccacagccaccctgcgaggcggctacggtttttagcctcaagttggttgtgagaagagaggctctgtgggttgggactccaaggacacaccatgcgttggtgctggagccaccatttgtcccaggtccgactccagagacccggcctgcactccactttatcatcactgtggtcttcacctgtcctgtgtccccagacc

SEQ ID NO: 213098 - DNA, 153 bp, Homo sapiens
  chr9:135624734-135624887
  hypo
ggttcaggtgctggacgctctggcctgccataaccactgggcactaccgcctccctggatgctcttgtgcgaggcccctcgtaaggtgtgctggctcttcaggtgccccgtgcccggcactctgtgaggatgcacaggatacctctcactgcg

SEQ ID NO: 213099 - DNA, 262 bp, Homo sapiens
  chr9:135624917-135625179
  hypo
actgtcacccccatcttatggatgaggcagcttgccccgatatcggctggtgagtgacccagaagaactcgcgactcacagctgctggactctaacatccagggtgggagccactgggctgtgttgctgtttcccaaatgcaggaagtctcttaagtgcttcatttactctgttttttttttttcttgagacagatttgttcatcgataatttttattttttaaatcgatatgaaaatcctcttgcaggggtggactggagc

SEQ ID NO: 213100 - DNA, 203 bp, Homo sapiens
  chr9:135626043-135626246
  hypo
tcaaaggactccatccggtgaatcccaccagggcgcgagctcccccatgagagcaacttcagagagaagctcccttaggctccctcccctcccaaatctgcacctaacgtcaggctgcatccagagataccaatggaaattaggtacaaattgtaccctggacttgactttgcaatcggaagaaacctcgatttgtgggggta

SEQ ID NO: 213101 - DNA, 65 bp, Homo sapiens
  chr9:135735333-135735398
  hypo
ccctttcacggtgttcggcgagaggactggggccattttgacattcatttcgatggctctgacca

SEQ ID NO: 213102 - DNA, 141 bp, Homo sapiens
  chr9:135745917-135746058
  hypo
attatatacaccatcgcctgctttaatattgcccagggctactgtaaatgctcactttgtactaaatctgcctttctggcggcgaaggggctgccagcccaagtgccggggctccctctgctccctcgtgtgctcgctcac

SEQ ID NO: 213103 - DNA, 115 bp, Homo sapiens
  chr9:135767903-135768018
  hypo
aacaactctccaagagtatccgcaggaggtgggcggcaccccatctcaccaaggtcctggccgggtcttcgctctgcccaaaccctcctccagcctgtgcaggcctcctcccacc

SEQ ID NO: 213104 - DNA, 48 bp, Homo sapiens
  chr9:135865230-135865278
  hypo
cagttctgcggcaagcgtttccaccagaagtccgacatgaagaagcac

SEQ ID NO: 213105 - DNA, 180 bp, Homo sapiens; identical to SEQ ID NO: 201921
  chr9:135906376-135906556
  hypo

SEQ ID NO: 213106 - DNA, 109 bp, Homo sapiens
  chr9:135908034-135908143
  hypo
ggggaaattggaggttagtgagagctgtctccgtaagtctttgtattaaccctcaggcacagggtatgatacaacatcctacgagaataaacacgtttattacaatggc

SEQ ID NO: 213107 - DNA, 237 bp, Homo sapiens
  chr9:135945847-135946084
  hypo
gagtgccaagacctacgcctacctgttttcccatccctctcggatgcccgtctaccccaaatgggtgggggccgaccatgcagatgacattcagtacgttttcgggaagcccttcgccacccccacgggctaccggccccaagacaggacagtctctaaggccatgatcgcctactggaccaactttgccaaaacagggtaagacgtgggttgagtgcagggcggagggccacagcc

SEQ ID NO: 213108 - DNA, 45 bp, Homo sapiens
  chr9:135962412-135962457
  hypo
gcaactccgagtctgcccccgtccctgcaacgggtgactctcagg

SEQ ID NO: 213109 - DNA, 422 bp, Homo sapiens
  chr9:136372633-136373055
  hypo
gccactggccccttctccttcgggtctcccagcagcgcccgcactgggcagcctttctgacccagcgcctcactcccccaatcccccgcgatggctcagttctgggtctgcctcccccatcagtctgtgcaccatcggaaggcagagcccaggtctgctggacttgtgtgactccttggggttgggaaagctgtgcggcacatggagacactcaggaaggggcgacgtttaaactgggccctgggaccgagccccctgtttcctgctgtttcaggtcaagcgttggggcggcacagcaagaccagggcagagctggtgatatgacacagggcacgattcacccgagatggttggaggggaagggtcacccgtcagtactttcacacgcaaggccacgccacgaggccagcctgtgtctgcct

SEQ ID NO: 213110 - DNA, 300 bp, Homo sapiens
  chr9:136376811-136377111
  hypo
atgtgtggtgtgtatgtgtagtttatggagggtgtatgtgtgtgcacatgcgtgtgtgtatgtgtggtgtatggagtgtgtatatatgtgcacgtgtgtatgtgtggtgtatggcatgtgtacatgtgtgcacgtgtatgtgtggtgtgtgtgtggtgtatggagtgtgcatatgtgtgcacatatgtgtgtgtatgtgtggtgtatggagtgtgtacatttgtgcacgtgtgtgtggtgtgtgtggtgtatggagtgtgtatatgtgtgcacatgtgtatgtgtggtctatggagcgtg

SEQ ID NO: 213111 - DNA, 349 bp, Homo sapiens
  chr9:136380583-136380932
  hypo
acaggacacctccccgctgggcttggtacctcaaagaagaagcgtagcatcagggccagcgccccgaagcagaggccggggcctatctgctgggtgtagacgctcttgtctgggtacaggcccttcttctccttcatcttctgtagctgtgaggacaggaggccacagcaaagcttttaggtcacagcactggggaacgcccctccccaaaccagcccgagagctggccctgcacaggctcaccccagccctctcccggcaggagaggaggctcaggagcctcctgccgcacccagcctcagatggcttctgctggacagggcccttcacggtgcgacccagcagagac

SEQ ID NO: 213112 - DNA, 119 bp, Homo sapiens
  chr9:136381250-136381369
  hypo
tcccagtgcttaggaaggctcgcgtgggcgtttccacttacagaggggtttgcattccgaggaagatgcgggaagtgtggggccacatccctggagccggccttgtgttttctaggcca

SEQ ID NO: 213113 - DNA, 188 bp, Homo sapiens
  chr9:136382129-136382317
  hypo
gggcagcccatcctcggctcctgtggctggatctgcagcctgagggccttggcagtctcgtggctcttggtgggaaacacagcagtgaattctcttctgggcaattacagttcagcccagttcagacctggccaagaccagcgggaggagcaaccttcaggggcagaaggaggcgagaggcgggtggc

SEQ ID NO: 213114 - DNA, 176 bp, Homo sapiens
  chr9:136382777-136382953
  hypo
aactccgtctcaaaaaaaaaaaaaaaaaagtcaggttctggccccgccactgccctgccatgacgtcctgttaagttgctgaggcctccatgctttggttccttcataggccaaatggcaaatcagtcccatgctccttggctgtggggaggattgggacgggctttgcaagctgc

SEQ ID NO: 213115 - DNA, 38 bp, Homo sapiens
  chr9:136383897-136383935
  hypo
gcaggaggtaaatgaagatccgaggcaggaggagtcag

SEQ ID NO: 213116 - DNA, 136 bp, Homo sapiens
  chr9:136384021-136384157
  hypo
ctgtgccgatggggcccgagtacaccccgtagccccatcggtcatggtagatccgcacagcaatggtcaggacgccgaacatcacaaatgttgacctcttgggttcgtcgaagtcggccagtgctggaggggccag

SEQ ID NO: 213117 - DNA, 598 bp, Homo sapiens
  chr9:136385191-136385789
  hypo
gtggggatagagggctgcagcgggactggtttgaggctgggtgtgcggacactggggagccggtccttgtccgcaaggcttgtctgcaggggttgaccactcacccatcagcgagacccacatgctcagggctgtcccgtagacactgaaatactccaggatgtcgtgacgcatgaagcacagcacagacaagccgggtccattgcaggcatggtggagctgccagaaaacccacaggtggtcacagcacaaagaggccagagctggtccccgagccacggcccccagagtgccaggtcacttgctggctgtgagaagtcactttggcgagtcacttaatgactgtgtgcctcagtctccccgtctgaaaaatgggggtactgccgagcactcccgcagagggtcctgtggggattaagtggcacatgccagcgaggtgtttaggggctggggtgtgccaagggttcactcaatgtcacctcagcagaattcgctcatctgcactggcaggactgggcggagactgagtggtcactcaggtgaagcccgcttaggtggggcggtctccgggagggaccctacacggctctccccggac

SEQ ID NO: 213118 - DNA, 334 bp, Homo sapiens
  chr9:136397022-136397356
  hypo
ccacctcgacagctcgggccacgtccttaaactcccgagcctgctgtggccactttgctgtgaggacaggccctgctcccactgcggcagcctaacatcctccccagggaacctccaaagtggtcagccacggcccaccagcccctctgcctcaagcctgcttctctatccccgccgtgttttccctggaaccccaccctcccgggcatcccccacacatattcctgctgtcctatttctaagctcctcagatatctggaaaacactggcggagaaaatccccttcttttttttctctctctttttttctttttgagacggaatctcactcttt

SEQ ID NO: 213119 - DNA, 454 bp, Homo sapiens
  chr9:136402387-136402841
  hypo
gtgaccctgcaagggggcccagccagggggctgtgtcttctggtcccgctgacggtgataccctcgggcatggggtgggggcaggctggtcctcctgggcacttgagccctctaccatctgggggtccctctcacccaggacaacagcccaacatccaatagcctggaggggggcaccgacgccacggccttctggtggggggagtggaccaagtggacggcgtgttcccgcagttgcgggggtggggtgacatcccaggagcggcactgcctgcagcagaggtgcgaggttgggcacgtggccctgaggggatggcatgagggcagggtagcgggcaggagagggcggttggctcttcagcctggtggcttctccccctgggagggctctcgggttgggggcagcacaggctgagtccccccatcagcctctgctggacgcggctatggatgg

SEQ ID NO: 213120 - DNA, 41 bp, Homo sapiens
  chr9:136501758-136501799
  hypo
tgtccgaccgtggcgagcttgagaacgcagatctcgtggtg

SEQ ID NO: 213121 - DNA, 74 bp, Homo sapiens
  chr9:136641169-136641243
  hypo
gatctcccgggatggcggccggctgatgggcggctggtggcagagcacaagagtgttaacggccccccagggcc

SEQ ID NO: 213122 - DNA, 172 bp, Homo sapiens
  chr9:136648156-136648328
  hypo
tgccatgtgtgtatgcgtgcatgtgtgtgtgtgtctgaaccatttactaacatggctatagctactgatggccaggcctcacccgccgggagaacccagggtgaccggtgtttctgtgatgagaaacctccatgcacctgttgagaatgttctgtgccgtgtttgggggtgg

SEQ ID NO: 213123 - DNA, 208 bp, Homo sapiens
  chr9:136651136-136651344
  hypo
tgtgtgaacacatgttctcacgtgtgtacctgctctcttgcccatgctgtacgtgcacacgtgcctctgtatgcatgcatgtatagctgtgtgcccataccctcacgtgagaatacatatgcgcttgtgccttcacctctgcatgcatactagtgtgctcctgcgtgcatgggtgtgcatctgtgcctgcacgcgtgtctatgcgtgt

SEQ ID NO: 213124 - DNA, 288 bp, Homo sapiens
  chr9:136655639-136655927
  hypo
acttaaaaaacaaaacaaaacgaacttttctcctcacgtcctgctcactgtacgcatttgtgaccgcctcgcgcaggagctcacggcagcacggacccgccaggtgctgatggtgcagggtgcggccgtccttggcctcctctgcacccacacattttaatttctttctaaaatgaaagatgaagggggcagtatcataatgcccttcagaagcttattttttttttctttcatcgccgacgtatcgcaggtgcttttccgtgccccacgttcgcggagggcattctc

SEQ ID NO: 213125 - DNA, 163 bp, Homo sapiens
  chr9:136664524-136664687
  hypo
gacacctctggcatgcgaggctgacagtccacgactctgataaaggacctgaatctgctcgaagctcacctgacccagccacagtcaagcaaagcacccatggccggtcccacatggcctgcaggggtgtgtccccatggggggatcccgtgtccacagacct

SEQ ID NO: 213126 - DNA, 446 bp, Homo sapiens
  chr9:136671901-136672347
  hypo
gagcagcatgtccccggaggaagcccacccatgcacggctgccggagcctggtgccagcgccctgctctgctaaccacgtctaggtgactctttgcatggggaactgcctttctatgactgagttcagacacccgcagggcaggcgagggggtccgctcaaaggggtggagggacacgtttctctctggccgctgacaaaaacttcatttacattctcagcgtcatccgtgcctccagccacgcacgtcagtgctgccctcacccgcagacaagcggagcccagaaacctgctaccctggctcctaaatccaaagaccctggagagagcggtgggggctcctccttccggccagcacgagccaccacggagccacaggggtgcagctctccaaggccctgaggacagcaggacatgtgtggccagtgccgagttagggccccgagc

SEQ ID NO: 213127 - DNA, 300 bp, Homo sapiens
  chr9:136677205-136677505
  hypo
gaagggagggaggagcggggcagggctcaccatgggctgctgcacctccaccttgatgatgtcctcgtagatgtcgtcccctccatcctcacacgggacgcagtcgtagatgtcctcccccaggtcatgctcgctgcacaggaggaggcgggttagaggggaggggaggctcccgccaccctgaccggggagccgcagagcacgagggtccacgagggacgcaggcggctggggccacagcgaggtcacctgcccgggcctcagtctacaaagtggggtgggccccgcctgcagggcgtc

SEQ ID NO: 213128 - DNA, 931 bp, Homo sapiens
  chr9:136680324-136681255
  hypo
ccctggccccatcttgaagacagaactgtcacgcccggatctaggtacaagtccacgtctgtgtagcacccgctgcgtctgaagcttggtgagaaatgccaagcatagggttctcataatatttttgctaagctttttaaggatcaaaatacgcccttagtggtacctttctgacaagtggctacacctgtgtcactcatgccctcccacaccatagagtattttcatctcaccggagctcctgcccttccccatcagtctccttcccgccccgagcaaccacccttctgactgttcttcaccacagacgagccttgtctgtagaatgtcaacggtgttgtgcgttagatttgtttttgtgcctggcttcttcccctcaacattggatcttgtttgagacacatccattctgacttgcccacatttgcagctcattcctgtttactgctgagtactaatccacggcatgaacaacaacgtgctacccatcttccttctttatggacatttgggttgcctccaagttgttgcttattgtgaataaaagctgctatatgagcattcaagttgtgtgtgtgcgtgtgtatgcacgcacgcctgtgtggtgggtggggggttacacaggctttcttttcctttggaaacaaaattccactaggactggaactcctggtcaaaggggaggtctagactcaacctcataagcagctgacaaatgcttttctaaagtgggtgcattctacacccccagccagcagcgctcaccagccccagctgcgccacatcctcatcagcttctgctgttgccggtctttttccattcagcccccagagtgcgtgtggagtgaaacagaactgtggttctatttggcactttcctgatggctaacgctgctgaggggtctcctgcgtccttactgtataccttcct

SEQ ID NO: 213129 - DNA, 342 bp, Homo sapiens
  chr9:136686239-136686581
  hypo
ctctgtggcaggctgctgtgtcacacactgatccttttcacatcagtgtctcggctagaaagaagcgtgtggaggctccgtgtcatcagaggctatacttcgtggaaaaactccacacccatgccacaccagtgtctggtccacagagcaggccagtcctcatcacttcggaacaggcgggccgcagtgggtctcttgttggcaggaacttgactgtcgctcctgagcccctggaggggaggcagcgagggaaactagggttgtctttgtagcccttcctgtttctagctctgtaactgcaaccaggataacctaagcttcggtttcccatctgcaacagga

SEQ ID NO: 213130 - DNA, 115 bp, Homo sapiens
  chr9:136691771-136691886
  hypo
ccacctaggatgaagcggtggctaaataaagcttggtctcatgtccatgtccttcctttggcctctcttctgccctgagtgggagctttcaaatttctcccgtgtcccttcaatt

SEQ ID NO: 213131 - DNA, 75 bp, Homo sapiens
  chr9:136694904-136694979
  hypo
tgcccagcctataaaatacattcttatgattaatttcgtttgtcccttcttattttttgacgtggctccgctgta

SEQ ID NO: 213132 - DNA, 119 bp, Homo sapiens
  chr9:136698781-136698900
  hypo
ggtcacagattcccacggtcccgatggggccctggtgctgtggccaggcttgggcagcgcctgggtggagcagaggcctctcagagagaggaatgaggtggacacggagaagagcagag

SEQ ID NO: 213133 - DNA, 174 bp, Homo sapiens
  chr9:136699684-136699858
  hypo
gcaaggaatgtgtcacgcccactccgggctccgggtgtccagtgggaagacgagaggcccaggtcagggctgcagaaagcgttcatctgctgggcgacctgccttcccctttacccaccctcccacttccagggggttcacagtggagatgaggctcctcgcacacctcctggt

SEQ ID NO: 213134 - DNA, 214 bp, Homo sapiens
  chr9:136714185-136714399
  hypo
cagttgctgaagaggcggccttggtttgttttgcttgttacagagtaaaaccatcttcgctccctaaagggaaggacaggagttggaaagggcttcacctcatgccaatgagcaggcacgggacattcctcccgccccgaacgcaccatgctattatacttgggacagggcactgggaaggaggaggccactgaccccgaaggctcacccctca

SEQ ID NO: 213135 - DNA, 209 bp, Homo sapiens
  chr9:136718576-136718785
  hypo
tgacgcttgcttgtcccctctctgcaccatgagtcccacccaccagtggcaactcccacaggtgtggcaggttccatctgacaagcacccaaaaggctagagcggggcagggaacggccaagcggagtctgcatcaccctgcactacagccaacccacacatgccgcccccctttgctgcaccaaagcgcttccccacccagggccagc

SEQ ID NO: 213136 - DNA, 337 bp, Homo sapiens
  chr9:136722069-136722406
  hypo
aaggaccaggtgctgcgctgcacgatgcacagacacagagcaaccccgcgaggcagagtcatgctcccagcctacagaagagacaaaggttccaagagcatccctgcccaaggtcatttggctgacagaagcttccttcatgggacctgacctcccagcctgaggacacctttcggtttccttctcaggaagtcctacccttcaccatctcctccctcccagccgttcagagctgtgatgaccccaaattagggcacccccaatctggagggctagctctggccacagcaagacccacatccccacacgcctcgctgggtgccttccacaaacccct

SEQ ID NO: 213137 - DNA, 179 bp, Homo sapiens
  chr9:136723290-136723469
  hypo
tttgtatacctgaggcgttgggccacgcagcgtatgctcacaatgtggtttatggtggggctgtgggcatgcaggatcagtgtggcctctgcaggcgctggggatggagtaactaaggtcagcctcacaggcatgcccaaccccaccggccaccagtgaggacccgcactccagggctt

SEQ ID NO: 213138 - DNA, 80 bp, Homo sapiens
  chr9:136725455-136725535
  hypo
attttttaaaaacctcaattcaaaggaatttctgtgtcctctgagaatccaacaacggaagtccccgtgggtttaggaac

SEQ ID NO: 213139 - DNA, 35 bp, Homo sapiens
  chr9:136731601-136731636
  hypo
gtgtgggggcaactgcgctgcgatgattttaaaga

SEQ ID NO: 213140 - DNA, 377 bp, Homo sapiens
  chr9:136733412-136733789
  hypo
aggtggggcgcggtggggagaaggaagagaaatgagtcttctggttctggccaggagatgctctgcgaatggggaagagcccagactgccctgggttcaaatccgcccttcccgggcaccgtgctgaggctccctgaggctcggttggctcatctgtgagatggggataacagtgtctacccgtgtggctgtaggtgaatgagacggagcctggcccaaagcagggactcgcgcacagcttgcggaaaggggactgtgcccgatcagaaggtccacggagggactcatggctgcactccatcctccacttgctcgaatgaagaaacaaaaacagagcaaagtactaggctcagggccagaagcgtgcatgtttgtta

SEQ ID NO: 213141 - DNA, 198 bp, Homo sapiens
  chr9:136737403-136737601
  hypo
tcctccctgcatgctcggctcccagcacccacgtcctccatgtttccatggctgtgctgggtgggtgactgcgagtctaacttccccctcttctctgccatggtgtggccaggctagaggaaaagggctgatggcgtcctcactccgcgcaccgtcttttccccactgcagtcagctacactggcccagctgccccaa

SEQ ID NO: 213142 - DNA, 100 bp, Homo sapiens
  chr9:136743438-136743538
  hypo
actgcgacccaagcacgatcgaggctgtgtgtttctgaaaggatctgaccgaactgagcactaagattgttcagaatctggccaacgcagctccccatcc

SEQ ID NO: 213143 - DNA, 47 bp, Homo sapiens
  chr9:136743950-136743997
  hypo
cagcagctgagcactcggagtggaagcgccctcggcccgggcagcct

SEQ ID NO: 213144 - DNA, 171 bp, Homo sapiens
  chr9:136751547-136751718
  hypo
tcaaacccatgtccatctgacgccacagtctgagctctggccagggtccagctctaacctcgtcccagacaagaggaagccccagacttgacagcaccacacacctgagcctgggccccgtgtcggagtcagtgaggcccacgtgtttgcgcctgtgtctggggggtgcaa

SEQ ID NO: 213145 - DNA, 331 bp, Homo sapiens
  chr9:136758783-136759114
  hypo
aggccaggaggagcccaagccttcctccgtcgccacacggcagctttcattgcctgaacctcggagggtggcgggacggtgattccacccacagccgcgatgaccgaggcccagcatcgcagcaagtggcagagaagccagagtccaactaccgcccctgaaacccaccgcacctgacccacacagcagcggcgagagtcgggcgcccacgtgtaccacacacacagttgaatgctttactggacctcacggatcctcacagacctctggaaagttctgtcgtaatctccaccttacatctgcagaaactgaggctcggggagaaggaaga

SEQ ID NO: 213146 - DNA, 77 bp, Homo sapiens
  chr9:136762226-136762303
  hypo
ccaaccgaaacagatgttgggcttgtgagaacgcagcactaggaagcgactcgggagcctatcggcacatgctggtt

SEQ ID NO: 213147 - DNA, 303 bp, Homo sapiens
  chr9:136766707-136767010
  hypo
aggctggccctgagccgcaggggcctctcctgccctccagcaagggcccggagctgccctgaggggctcctgccggcccggcctggtgactctacctaggtctgtaggcactgggctgggcccatccctcctggggtatttatttcccccactgttctgacaccaggccctcccgtaagcacagacagccctgctgtccctgactctggaaccccagcgcccactgccacattctaccttttcccaggagacgggccgatggggtcagtggcaatgtgccaccaccatcggagggggctgggg

SEQ ID NO: 213148 - DNA, 214 bp, Homo sapiens
  chr9:136771809-136772023
  hypo
cccatgacctcacgccgcagaacctggcacagctcacaagtcagaaccacagacacaaaacccagtggcgcctggagagctgggggcagcggggtccctgcggagccaggctctgggtcctcagccctcccttctgacgtgcggagacccatggctctacaccgggggccactcaagtcactgcagctgagacactttggggaccctcgccccg

SEQ ID NO: 213149 - DNA, 57 bp, Homo sapiens
  chr9:136785103-136785160
  hypo
ctctgcgctgagccacgtgccaggaggccagacaggcctgggcgtgggccccagtgt

SEQ ID NO: 213150 - DNA, 303 bp, Homo sapiens
  chr9:136835362-136835665
  hypo
gcctggggaagggccccacccgatgaccccacacagcaagcgatgtgaggaaaacccccgcccgccatgtcttgaaaatacaagtctcgtaaaaaggcagtttcccaagcggaggctgggggatggcaccacgttcggtgcttgctgggagccagggaccttggcccacacgaggccaccgaggctcacgggacctcaccagacctcacctgaccacccccacagcccgttctacagaggagcccacagaggcgtggcagtggcgatcacgaggctgtccacggcacccacagccctgtggtt

SEQ ID NO: 213151 - DNA, 191 bp, Homo sapiens
  chr9:136905412-136905603
  hypo
agcaggtgctgggcacggcccacaccactggggctgcgtggcgccctgggattggagggggcttggggcgatgtcggagctgcctcagctgggtgaggaggtgaaccaggagcacctgggccctgctctgcccctcactcccgtgacccccagtgagtcatgagccctctccgcctcggcttcttcgcctg

SEQ ID NO: 213152 - DNA, 34 bp, Homo sapiens
  chr9:137330715-137330749
  hypo
agcactgaagccccccggccgccaacccctgaaa

SEQ ID NO: 213153 - DNA, 320 bp, Homo sapiens
  chr9:137645514-137645834
  hypo
ctggaaagtcatcgttcttccccccggttctgttcgaggcagacaggtcgcgctttgtgtgctgagcaccgtggccgaagccctgtcccctccccctgcccctcccctgccacccccagcccttcctgtgttctcgagtccccacctcgagcagacattaacacacaccatgtctccctagggtccccctgggagcggaggtttgaagggcgagccgggagacgtggggcctcaggtatgtgggatccttgccttcgctgtctggtgggcgcctcccgttctccggcggcagcgacggcgagcatggagggaccccaact

SEQ ID NO: 213154 - DNA, 204 bp, Homo sapiens
  chr9:137646059-137646263
  hypo
gctctttctcctgagaaaggcggactcgccactgaccctttgtctcttacccctggcagggtcctcgaggtgtgcaaggcccgcctggtccggccgggaagcccggaagacgggtgagtggtgcgagtgtgtgtggtttagtgacagcagcttgggcgctggaggagcccaaatctggggtgcgggcacccccaacagccagct

SEQ ID NO: 213155 - DNA, 40 bp, Homo sapiens
  chr9:137709404-137709444
  hypo
tcatgctgaggacccgtgtcactgcgggtggcccgggagc

SEQ ID NO: 213156 - DNA, 50 bp, Homo sapiens
  chr9:137718800-137718850
  hypo
gccttggcccaggcgaggactgagtctccctgttgctcctggaaggtgac

SEQ ID NO: 213157 - DNA, 1026 bp, Homo sapiens
  chr9:138011453-138012479
  hypo
cccctggtcgggcacggggcaggtggtctacaacggttctatctacttcaacaagttccagagccacatcatcatcaggtttgacctgaagacagagaccatcctcaagacccgcagcctggactatgccggttacaacaacatgtaccactacgcctggggtggccactcggacatcgacctcatggtggacgagagcgggctgtgggccgtgtacgccaccaaccagaacgctggcaacatcgtggtcagtaggctggaccccgtgtccctgcagaccctgcagacctggaacacgagctaccccaagcgcagcgccggggaggccttcatcatctgcggcacgctgtacgtcaccaacggctactcagggggtaccaaggtccactatgcataccagaccaatgcctccacctatgaatacatcgacatcccattccagaacaaatactcccacatctccatgctggactacaaccccaaggaccgggccctgtatgcctggaacaacggccaccagatcctctacaacgtgaccctcttccacgtcatccgctccgacgagttgtagctccctcctcctggaagccaagggcccacgtcctcaccacaaagggactcctgtgaaactgctgccaaaaagataccaataacactaacaataccgatcttgaaaaatcatcagcagtgcggattctgacatcgagggatggcattacctccgtgtttctccctttcgagccggcgggccacagacgtcggaagaaactcccgtatttgcagctggaactgcagcccacggcgccccggttttcctccccgccctgtccctctctggtcaaacaacatactaaagaggcgaggcaatgactgttggccagttctcaccggggaaaaacccactgttaggatggcatgaacatttccttagatcgtggtcagctccgaggaatgtggcgtccaggctctttgagagccatgggctgcacccggccgtaggctagtgtaactcgcatcccattgcag

SEQ ID NO: 213158 - DNA, 37 bp, Homo sapiens
  chr9:138106859-138106896
  hypo
ttaaacactgacctactggccgtgtgcggtggctcat

SEQ ID NO: 213159 - DNA, 376 bp, Homo sapiens
  chr9:138143894-138144270
  hypo
ttcctgtggagtttcattcacggctgttcacatacccacagcccaggtgcacacacgtgcacacacggaaaatagctcatgcatggacacgcaaatgcgcacccagaacaacacacttcacacgcgttcctagacaccctcacatgcctgcgcacctgcccatgtgcccgtgacatgcatgtgcccgtcttacacacgcacacatacacatttgaacacgcacgctttcacacgtgcagtcacacacctgcctacgcacacctatgtgcccgtgacacagatgcacacgtacgcaacataggcacacgctcacctacgcctccacatggccaaccctggcctcagctccttcaccgtcagtgctggtctgaataga

SEQ ID NO: 213160 - DNA, 141 bp, Homo sapiens
  chr9:138289211-138289352
  hypo
gtgccctgagccagagccctgctcccagcccctcccagagaggatcgtcctcactcggtccgctgcaatgatgcccctgcatgaaagaagctccctgctccctcagagtgcctcacctgggagcctcctctgggcctggtg

SEQ ID NO: 213161 - DNA, 177 bp, Homo sapiens
  chr9:138289790-138289967
  hypo
gccaggcgctgggtcacactcttcacacggattatctcgtgtgacacctggcccacacccgtccgtggaatgctgcaggccaggcgctgggttacactcttcacgcggattatctcgtgtgacacctggcccacacccatctgtggaatgctgcaggccaggcgctggattacactc

SEQ ID NO: 213162 - DNA, 42 bp, Homo sapiens
  chr9:138296701-138296743
  hypo
ccatctcaaactcaggccagcgagggctgagatgtgacctct

SEQ ID NO: 213163 - DNA, 89 bp, Homo sapiens
  chr9:138297097-138297186
  hypo
gtgctcaggaaggcacagtgcgtgggaagcctctctccgagaaggatgataaacgtcatctgaaatcggagttccgggccgggcacagt

SEQ ID NO: 213164 - DNA, 84 bp, Homo sapiens
  chr9:138456651-138456735
  hypo
gctgagtttttctccagcggttcatcgagtcctctgacaaagcaaggagctgatatagggccagtgggacggtcgccagtcaag

SEQ ID NO: 213165 - DNA, 73 bp, Homo sapiens
  chr9:138563280-138563353
  hypo
ctcctggcactgcagagcggatggcggatgcagatcccactttggggatggcgggcactgctggtaaattcta

SEQ ID NO: 213166 - DNA, 198 bp, Homo sapiens
  chr9:138649885-138650083
  hypo
ctacccaggtgcaggctgcccgtgggcctcagcggagacgcaggtgtggccaggcgtgggctgccccttgggcctcagccgagacacaggtgtggccgtgggctgccccgtgggcctcagccgagacacaggtgtggccaggtgcaggctgccccgtgggcctcagccgagacgcaggtgtggccaggtgcaggctgc

SEQ ID NO: 213167 - DNA, 112 bp, Homo sapiens
  chr9:138650227-138650339
  hypo
ctgcccgctgacagccaccactccttccacagaatgacttccaccgtgccatcctgcggacacagtcagccatgttcaaccaggtcctcatcctcttctgcaccctgctgtg

SEQ ID NO: 213168 - DNA, 37 bp, Homo sapiens
  chr9:138654778-138654815
  hypo
ggtgtcactgtagctcgagctccgtgtccacagtggg

SEQ ID NO: 213169 - DNA, 294 bp, Homo sapiens
  chr9:138660477-138660771
  hypo
ttcatcctcagcagcaggaacgaggtggaccgcacggctgcagtgagtgaggctgaggccctgcccaggcgggaggggcaccgtggggccggggagcgggggtccctgagggaagagacctgccccaggctgccggtgccgcccagcagcccacagaggccagcccgtctgcactgaccaaccacccaccccgccaggaccaccagaccatcctgcgcgcctgggccgtgaaggacttcgcccccaactgccccctctacgtccagatcctcaaacctgaaaacaagtttcacg

SEQ ID NO: 213170 - DNA, 72 bp, Homo sapiens
  chr9:138661962-138662034
  hypo
cagggcctgcttgggggcggggatgggcttcccagaggaggggcacatggcgggcaaaagtcctgcataggg

SEQ ID NO: 213171 - DNA, 203 bp, Homo sapiens
  chr9:138718007-138718210
  hypo
caggtcacagagcagcgtgtacacgggcaccagcacacacacacacacacacacggctcaacaacagacacgcaaagaccgaagggaggacgccaagtgtccacgctggccccatgtgagggacggctcagcctcgagccattctcctcactcagtgaccccgcctgtgcccgcgggcatggagttaccgccccacctctgct

SEQ ID NO: 213172 - DNA, 214 bp, Homo sapiens
  chr9:138719254-138719468
  hypo
gtattcaggttcttccgggtgcaggtagtgcctgtgacagccttccgccggcagctgcacggggggctgcagctcagccagggtccctgcagcagggctgcctaggaaactgcgtttggtcgcgttggagatcggtacaggaggccggctgctcttctggtgtaacactgttttcgctgcagaaatagcgtttttgcatcgttacttacaacac

SEQ ID NO: 213173 - DNA, 118 bp, Homo sapiens
  chr9:138743579-138743697
  hypo
caaacagatctatgttgatacggagagatttccgtcactcatcttgaccgctatatggtcctccacgatttctcacaattatgacaaatgctgccatcacaaagcttgcgtgtgctgt

SEQ ID NO: 213174 - DNA, 117 bp, Homo sapiens
  chr9:138774512-138774629
  hypo
gtttcctaaggaacgccagtgtgcaaaagcacgggtctccaccacctcgccgcacaccgtgttcacaccatccatgcaccaggtgcgccacacgagagcccacggctccagaggatg

SEQ ID NO: 213175 - DNA, 77 bp, Homo sapiens
  chr9:138796808-138796885
  hypo
tcaaaaaaaaaaaaaaaagtggaaaccagacctcctaaaatcggagtctgatgtgcgaaggcactgtcacccaccag

SEQ ID NO: 213176 - DNA, 40 bp, Homo sapiens
  chr9:138824557-138824597
  hypo
gaggccagaggtaggcggaggcagccgtgcttgggctcag

SEQ ID NO: 213177 - DNA, 308 bp, Homo sapiens
  chr9:138836303-138836611
  hypo
ggaggaagtaaaacccgaatcaaagaacaggagagagaaggaagaatggggagatgaggcgcgggcgaggaaggtccacacacacaggcgcagggacccttcagccctgcagactgtgccatggaggcggctggcagcctgagcggcccctcgctcatggacacccccgacggcaaatgaccctcccggtctctgggcagggcccccaccccgcagagaggctgccgaacagggggggcttgtggatgagtggtcagaaggaactgtaaaatatcaagtttttcaaaaggtgacgaatgtggcaacac

SEQ ID NO: 213178 - DNA, 199 bp, Homo sapiens
  chr9:138873215-138873414
  hypo
tgaccctcccccaccctgctcgcaggttgtcgcaggacacgtgttcgtgtccaggtgcgctgggaagggtcctggcggtgctcctctcagcgcaggtcccgaggagctacaggcatgacgctgccttcagaactcccccgagcctgctccttcccagccttggctcgtgaggctcctccgaggaccacgggccttccac

SEQ ID NO: 213179 - DNA, 269 bp, Homo sapiens
  chr9:138878431-138878700
  hypo
gcctggggggcacgcggtgggcggttggtgcacacacaggcccttggctctgacaggcctggagcagtgcaggggtgccgtgccgggtcctcagcaccggctcccaggcagccagggacttcccggagctccctggtcaccaacccaggcttgatggaggccccggctgcatctctgacccctgacccctgaccccagcctgcaccaagccccacacgtgactggaatttcgcctgcacgttcggcctggtactcacaggaggctccga

SEQ ID NO: 213180 - DNA, 100 bp, Homo sapiens
  chr9:138901527-138901627
  hypo
cccagtgggaatgcgtctaacccacaccctgtaggtccccaggccagggtgcagcacatggtcctcccctagcggaggcggcctccgcttgatgggttgt

SEQ ID NO: 213181 - DNA, 161 bp, Homo sapiens
  chr9:138902149-138902310
  hypo
acccctcaaggcagacggggagcccagcaccgggaggaccgactctcgccctggcccagccctggccgctgcctcctgcccgagcggagtcccccgctccccaggtccggccctgagctcagcttcacacgtactagtcgcccacccgggacccccttttt

SEQ ID NO: 213182 - DNA, 48 bp, Homo sapiens
  chr9:138906092-138906140
  hypo
aactccaagctctcccggccatgctgcggtccccggcctcagctccct

SEQ ID NO: 213183 - DNA, 55 bp, Homo sapiens
  chr9:138907131-138907186
  hypo
aggggcccacccagccgccccggcagcccagcactgcgctcgccatccagaagca

SEQ ID NO: 213184 - DNA, 184 bp, Homo sapiens
  chr9:138910983-138911167
  hypo
cagcctccacctccccggcccccagctcaccctctgcaggagctgagcttcaaggtccaggctacaactgggctttaacggagaacccgcagagagacttgttcatggcagagacaggacggctcatccctcgtggcccccggaagggccattcagaggccccgtgagtcggggccagagctgg

SEQ ID NO: 213185 - DNA, 225 bp, Homo sapiens
  chr9:138911434-138911659
  hypo
tggaggtgaacaaccgcgcccccacacagggaaggtgcaccagggtcacgacgagagggcccggagcagcagcctcccgggcagcagggcccagctactgagggtaggcaggtgggcagcctccctggaccacacggggcgaagcaaacacaaggacaaatgctgcccggggcgcggggttggggccttcagggacccagaaggagcccccgccgtaccttccag

SEQ ID NO: 213186 - DNA, 276 bp, Homo sapiens
  chr9:138950648-138950924
  hypo
cgggcaatgcctcacgctggggcatgggattggacaaaagtccttggcagagctcaagccatggaggggacgcaggggccggggcaggatggtctcctgaccgccaccccaccccagtggatagcgctgcccctggatgggtagcagaggcccaggtgtgggaggcgtgactctggcccctgggccccgccctcctgtctgcagggagaggcagtgtgggggctgtagagggaaggtgctgggtcaggggcaggggagaagcgtgatctggaaccc

SEQ ID NO: 213187 - DNA, 36 bp, Homo sapiens
  chr9:138970475-138970511
  hypo
gggccagcccagccccgacatcgggacagaaagggg

SEQ ID NO: 213188 - DNA, 113 bp, Homo sapiens; identical to SEQ ID NO: 201926
  chr9:138986159-138986272
  hypo

SEQ ID NO: 213189 - DNA, 824 bp, Homo sapiens; identical to SEQ ID NO: 201927
  chr9:138986333-138987157
  hypo

SEQ ID NO: 213190 - DNA, 166 bp, Homo sapiens; identical to SEQ ID NO: 201928
  chr9:138987167-138987333
  hypo

SEQ ID NO: 213191 - DNA, 66 bp, Homo sapiens
  chr9:139044756-139044822
  hypo
tcgaccacagcagaacgtgggctgaggagggggaactgccaggccaggtcacgggtgagcctcgtc

SEQ ID NO: 213192 - DNA, 814 bp, Homo sapiens
  chr9:139051193-139052007
  hypo
gctggcagggacatggccaccgtgaggagatctatttcccttgccttgcagacgatggaccgggcccgtctgtagagccgtggtggagctggccacacgcacacgcaggcctatttttcaaacaattgattaattccgcagcgatgtttgctgccgtacatcacctatggccgcactgtggggctttccggttctcctcccacctgtaatattccacagctgatggctggaaatggggaaagctttctcgaaaacactcattcggggcttactgaggtcatcaatcagctattttcaaatgtcaactttgaaggcgaaagggggatgctcagaaaacaggaccctcattgggaaagtggggggcaggctggggcagcgggggtctgtcaccctaggaagctggagcctaggtgacctcaagtcttcgaacctggtctgaggggcgactgaaccctgaaagcttgctgttggctctccagatccgcagagacgggttcagggttgccagggtccctcagcggaacctgctgcaggtgtcagaggcctggatatgaccaggcggtcagggcctggtgcacccgagaatgtcaaatccacttcacagagacgtgagcacctgccgggggtgctatttgccccattcctgctgcccctctccgcaaaacaggagcctgaactggctgccccagggtcttcgccagtgtgggaccacggcctggaaacagcggggtcagaatgtgcacgaggcctgggctgcgtgaagcctgtgtcggtgattccaccgcaggcagccgatggagatcccagccctgga

SEQ ID NO: 213193 - DNA, 170 bp, Homo sapiens
  chr9:139069742-139069912
  hypo
gaactgggatcagcgtggccgtcgcgggcggggacagcactgggggaactgggatcagcgtggccgtcgcgggcggggacagcactgggggaactgggatcagcgtggccgtggagagcggggacagcactgggggaactgggatcagcgtggccgtggagagcgggggg

SEQ ID NO: 213194 - DNA, 112 bp, Homo sapiens
  chr9:139079354-139079466
  hypo
aagcacgcaggatgcgctgagaacgatggccccttcgctgcagcgtgagaaactcaacgtcacccaaccaggacagggagggaggaagaccgggggccggggagagccacag

SEQ ID NO: 213195 - DNA, 207 bp, Homo sapiens
  chr9:139079780-139079987
  hypo
agctgcccctactccgtccagcttggacgtggaccatgactgcccagtagaaacaatgagagaggcctaaagggccagcccgacctcagaaagctctgccaccccaactctggagggtcaccaatggcccgggaaatggtcatagtgtgacaatcaagccaagaagtaggtttcaaggacgtacatctcggccgggcgcaatggctc

SEQ ID NO: 213196 - DNA, 105 bp, Homo sapiens
  chr9:139101084-139101189
  hypo
tgaagctttggaaaccggggatcctcactcagatggcctaggaagaaaaggaagcgggagagccagagggaaggaggctttgtgcagccacgtgcagcgtgcggc

SEQ ID NO: 213197 - DNA, 34 bp, Homo sapiens
  chr9:139103914-139103948
  hypo
cagagtttgtgccaccgaacgtattaacagacat

SEQ ID NO: 213198 - DNA, 236 bp, Homo sapiens
  chr9:139106806-139107042
  hypo
ggaactcgtgcccccgcagccacagccctgggtgagctgaccgtgtgagaggagtctgaagtgccattcccctgcctcagtggcctggcgacatgctgcctcccatacagcagtacatgcctttgcacacaccggctgggttaacttgttaggcagaccatcggcccctctggcctgtatgggcacagcttacctgtgccaaccagtgcatctgggtgggtcgaggcttcaacagt

SEQ ID NO: 213199 - DNA, 278 bp, Homo sapiens
  chr9:139110883-139111161
  hypo
ttctctccaaaccacgatttctgaattttcttctttgtgtggcttttcaggcaagggaagcgattttttcctcacatccggcaatgacttcaaataagacgaaaagaaggcccgcagaggcttcacgctgtgagagaggggagggcaaaggtgagaagagcctcctttataaaatcctaaagtaggagccgtggcattcaggacagctctgggccacccctttcatcctttgggcatttattggggcatgggagtcagtgggaacagctgacaccccg

SEQ ID NO: 213200 - DNA, 102 bp, Homo sapiens
  chr9:139111384-139111486
  hypo
agccctgagtgaggcatctggaagtcggggcctggggtggacgtcagcccctccctgatgtcaggcccctgagctccctgcgtgcccaccctgtgtggacag

SEQ ID NO: 213201 - DNA, 360 bp, Homo sapiens
  chr9:139114624-139114984
  hypo
cctcttctcaggggaacacctgcctctggtctgcgtgtgtggaggccccgcccgagacagcaagggcacgaggggccttgggacaggggtgaggggtctgggagagccacacactgctagcggttcctcagccctccacagagaatcctggccaaccatctggaggcagcctggcgtcaccatcaaacctggagggggcggtgctggggtgccaggagggcagccagggcacaaagcgagacggtcacagtgcaggtgtctgcagctgccttcccaagtgcgtctccaaaagccctcgcaggggcaaagctgtttcctacattcaccgcaaggcccctcacagtggacagaaaaacagtc

SEQ ID NO: 213202 - DNA, 165 bp, Homo sapiens
  chr9:139115164-139115329
  hypo
ctgtacgtgtgaaatcaaagtatgacgatagaaacgacgttttacagaatcttggatttggcaaaaatgttgagagttcagaatacggcaacgaaaaaaatcttagtaataatgcatacaaaatacagaatgacctcaaggtgagctgggcgtgtcataaaaatg

SEQ ID NO: 213203 - DNA, 235 bp, Homo sapiens
  chr9:139118753-139118988
  hypo
agcactggactcccgggaagcccaggacccagcagtccccactccaggctgcggccacctgcgagaccagcccacctgccccctctaggtcatcagttaggccctcatcacacagagcgtctatgtggagctaggagagagaactccaccaacagcacgatgcctctcctaccacagatagtcacagaacaagcggatttgtgctgaacctgcacatcacggagcagggacaagg

SEQ ID NO: 213204 - DNA, 244 bp, Homo sapiens
  chr9:139128188-139128432
  hypo
tgattctccttcagccggactagacggatattcacaggtatctgaaacaggacgccctctgaaacaggccgcagctgccagcttaaataaaggagacagaaaaaacccaccttgctttccctccagttttggccaatctgaggctttcctcacgacagcagaagagccagcgctgcagcatcacccaaaccacaggccccctggccaaacgggtgctccaaaacccagcgtgcgccccgagact

SEQ ID NO: 213205 - DNA, 89 bp, Homo sapiens
  chr9:139130639-139130728
  hypo
gcatctgcctgctgccgggccctcagggacctcgtggttgcccccttgagcgaccaagaccctatcaaagtccttttagccgggcgtgg

SEQ ID NO: 213206 - DNA, 225 bp, Homo sapiens
  chr9:139132903-139133128
  hypo
gtggcctgggtctctcggtgtagtctcagacgcaccaaccacagccactggggaggccagcggggagcccggctgctccgatgcaccatcctttctgtaaaatactcatgtggtcgccacagcggggctacattaagccatttctgggcccgtaaggagacaggaggcctccactgcccaactcttcctccttccaccctctccatcctcccgagtccagtgagc

SEQ ID NO: 213207 - DNA, 620 bp, Homo sapiens
  chr9:139133183-139133803
  hypo
gtccccctccctctggcccttattgtttctttttccagtaaacggacaatgagcctgtggggaacaccaagttctaattcatctccaagaagcctgcagcctagtcgagtagacaagaaaccagaccaagtgggacagaggagctggcagcaatcacagaatgccctacccttccttcaagagatgtcggatgtgtccagctcccaacccccacctgtcctctacaaagacacaggaatgaactgccatggctccaggtcacccacacctggacacccatcccggcctgtcactcagctgcgtgaccgtgactatcccacgcaacctcacgtgctatcacctgcaacatgagcgcccccgcactcctgaggacaggtgtgggaggactcggcctgttccacgcaacctcatgtgctatcatctacaacataagcgttcccgccctcctgagggcaggtctaggaggactcagcctgttgtgggtggtggcctgccctgttttctcaggctgaccaagtgaaggagatgggagggaacaggcaccagggccacagagggcgcacggggacacaggccctgcctttagggtgcaccctcttgtccactcaagactgcagagg

SEQ ID NO: 213208 - DNA, 80 bp, Homo sapiens
  chr9:139264125-139264205
  hypo
actgccctcaagggccgtggccctggtgcacccacccgcgagtggggtgctttgtcctgcccctgcgagtgcccacctgg

SEQ ID NO: 213209 - DNA, 446 bp, Homo sapiens
  chr9:139269131-139269577
  hypo
tcaacatgagcgagtgtgcaggccggggccatcctgggccctgccagggagcgaaccggagctggcaccaggccctcatgacccagtgtttccccagcgtttaaaacgcggaccttagtgacttccctgtggtgtgtgtccttaggagtgaacacacataccatgttctctaaccatatcggaagctaaaaatcggtaacagatatcggcaaaatctctaaatatttggaaattaaataatataccgctaaataacccacagatcagagtggcccccagactaggcaccagactagagaaccaggcacagcaacacatactcaggagtgaggtcggccatgggaccgtcccgtctgccaggtgcccagggctgaggccccacagtggctccagtgaaggatcgaagcccagatagccaagggcctgggggcgctgctgccacagag

SEQ ID NO: 213210 - DNA, 34 bp, Homo sapiens
  chr9:139272165-139272199
  hypo
ggctgccaggaaccgcgcccgcaacaggaggtag

SEQ ID NO: 213211 - DNA, 56 bp, Homo sapiens; identical to SEQ ID NO: 201930
  chr9:139294771-139294827
  hypo

SEQ ID NO: 213212 - DNA, 148 bp, Homo sapiens
  chr9:139300480-139300628
  hypo
gggcgtgtgcttctgcggtgtggctccagagcctcctgataagcagagatgctgggtcagtgcagcatccacctgcagccactacagagggagaccacagacggaggcaggcacttttcaaagacctgtggtcacagatgccagttaa

SEQ ID NO: 213213 - DNA, 264 bp, Homo sapiens
  chr9:139302076-139302340
  hypo
ttctgtgttctgcctcgcaacaagaagaaaggcccaatctctctaccggaaggagcccagcagcttctgagcccagagctgctccccagcactgacgcctgcctgctctgccacactcatgcacgattcctccaaaggaggctgcagaggccggaacagaaacgtcccacagagccatcgcccacagtgccgtggatttacctttgcataaattctgctggccggatcctctttcgagaggccgaggttcttggtcttcagaaa

SEQ ID NO: 213214 - DNA, 144 bp, Homo sapiens
  chr9:139317510-139317654
  hypo
cgcgctcgtgtgacacgcgtttgccctctgcactaggcaacgtgaagccggaagatgtgaagagagtcgcttctaagatgctccgagggaagccggcagtggccgccctgggtgacctgactgacctgcccacgtatgagcaca

SEQ ID NO: 213215 - DNA, 394 bp, Homo sapiens
  chr9:139317866-139318260
  hypo
tttggaactcaatgtgccgatcagtggagtcagtatcgagcctgaccaccgcaagccaggaagcaggtgaagtgcccagcgctggagtgcagcgtgccacgaggagggcggtcggtgcttccctcctcgggctgtgggcacatggggccccgcaggttccttggaggagccctgagctgggaggcagcaaaggctgacctatcaaagcctcccggaggccaccgtgctgggtaccaggactcacctctgacaagcaggagaaggtaagggcccggtcagctccaaggagcgcgctccacgcgcgtgcacacagcttccctggtaataaagagctggcatctttcttagcacggtgttttccttctcgcctggggaggggcggttcttaagggct

SEQ ID NO: 213216 - DNA, 214 bp, Homo sapiens; identical to SEQ ID NO: 201931
  chr9:139334259-139334473
  hypo

SEQ ID NO: 213217 - DNA, 365 bp, Homo sapiens
  chr9:139345460-139345825
  hypo
tagtggccagaggcgacctctgggggccgggctgtgtccccatgctgacctgggtgggctattatcctattatctgaaggcacaaatacacagacacccatcatgccgtgtgcactgtagacactcggctgtttgtatcaggaggctatttgcatgtgtggtgaattaagaggatggcgctctgggaagcgtgcctcctgcccaaaccctcccggccgccaggcgcaccgtgggcaggctgtactaccttcttaggttccttcgtttctttcttggctgcctgtccgggtctctttgtttcgggagcgggtgagagagacagaggtggctgcgtgggacccgagtcggcacgatcccaccctggg

SEQ ID NO: 213218 - DNA, 275 bp, Homo sapiens
  chr9:139347810-139348085
  hypo
aaggagtctgggtgcccactcgatgaactttatggaaaacaaacagtttaagaaaatgtgacaaagtaccagattagcaaattttccatcaaaattttcttcgcttagctcggaaagtgagtttccaacaggcgcctcctgcggcactatccctgtcaacgggaaagagagcaactatgatctcagtcacgagaaggcgggacgtgtgtgtggcgcacagatcaacaggcacaccaccttcccacccagctaccgccacaccagcatgatctgca

SEQ ID NO: 213219 - DNA, 141 bp, Homo sapiens
  chr9:139349659-139349800
  hypo
ctggcccttccaccgacggggccgactgggagaagcaggttacagaggggcacagccgagggcgccgcccagacacggtgcggctgaggctcccggagaaacaagcagggaggctgagcaggcagcgggcgctcagggcag

SEQ ID NO: 213220 - DNA, 96 bp, Homo sapiens
  chr9:139351904-139352000
  hypo
ctggctgatcaacaccggggaatacaggtgcggctgcgtcaggatgctcttcgcgatggcctcacagtagtggaaggcttgcgtggccagccccat

SEQ ID NO: 213221 - DNA, 214 bp, Homo sapiens
  chr9:139360077-139360291
  hypo
cagctccctcctgcacgcctgctgagccacggggtctgcgatggggatgtgatcaggggctgcccagagcctggatatgagctgtcctcagagtcacactttaaaacgcatgtcggggcaggcagggcagctctcaggccttaaaccaaactgcaatcgaagagacagcatcggcccgtcctgacacaccctgcttctcggaaggacggattgg

SEQ ID NO: 213222 - DNA, 67 bp, Homo sapiens
  chr9:139361592-139361659
  hypo
atatcactaaagaagcgacaccaccccaggactttatgctccaaggactcctcgagaaacccagctt

SEQ ID NO: 213223 - DNA, 89 bp, Homo sapiens
  chr9:139384888-139384977
  hypo
gctgggattacaggcgtgagccaccacgcctggccaacgccagcactttcaacgcaccgggaccaagctggacccggttttgttttgaa

SEQ ID NO: 213224 - DNA, 424 bp, Homo sapiens
  chr9:139421470-139421894
  hypo
aggttccgtgagacgcgctagctggggggaaccgggccgagcctggagaaagttttgagccaggtgtgggggtctgtgtgtggggggcagctttgggcccagtctcccgctgctgctgtgggcagcctccagcctgtgcccgccccagtctgtacctctctcccacatggccacagagctggagcaccctacagacggcgaacacctgccctccgcacagcacccagacgtccctgagaaggtgggagggacctcaggcctgcagcatggccatggccaggaccaccagcctgtgagcaaatccttcacagctttggcgctggccacacccccggtacccgggccactctgtcttcaatgctgtcccggcggccaggtgggtgtgggccgcgaggtgggcgccagggcttggccgagtgaggtg

SEQ ID NO: 213225 - DNA, 34 bp, Homo sapiens
  chr9:139422123-139422157
  hypo
ccacgccaggtgtgcccccgtggactccccttcc

SEQ ID NO: 213226 - DNA, 197 bp, Homo sapiens; identical to SEQ ID NO: 201933
  chr9:139440708-139440905
  hypo

SEQ ID NO: 213227 - DNA, 34 bp, Homo sapiens
  chr9:139456527-139456561
  hypo
ggcttctcctggccgcctcgagtcccacagccga

SEQ ID NO: 213228 - DNA, 328 bp, Homo sapiens
  chr9:139484035-139484363
  hypo
cagcggctcaaagagcggaggaaatctgtggatgcccccaccgtgcgatgtcccccccgccatgtgacacacccaccatgcgatgccctctcatccactgtgatccccccacactgttcagtgctcccgccaccacgcgatgccctctcatccagtgtgatccccccacactgttcagtgctccccccaccacgcgatgcccccctccacagtgcggtgcccccctccacagtgcgatgccccctactgtgtccccttggacctctgccatctccatcaaggtgtcatctgctggtgatacctgtgccctcacccacttggttctcgg

SEQ ID NO: 213229 - DNA, 89 bp, Homo sapiens
  chr9:139501902-139501991
  hypo
aggtgtttggggaggcggagcagagggttcccaggccagggacccaagggggtgggcccagtggctaattccagatggagccaacatgc

SEQ ID NO: 213230 - DNA, 173 bp, Homo sapiens
  chr9:139509481-139509654
  hypo
aaacccaggcaggaccgtaaaacccaggcctcgacccgtcagcctccagccgctctccgaggcaccttgcagggggtgggatggcagtggggagcctctcacaacaggaactggggtcccagatgctgcccggagcctggaactgcgagtggccgtggcggtggctgtgctgc

SEQ ID NO: 213231 - DNA, 109 bp, Homo sapiens; identical to SEQ ID NO: 201935
  chr9:139580674-139580783
  hypo

SEQ ID NO: 213232 - DNA, 277 bp, Homo sapiens; identical to SEQ ID NO: 201936
  chr9:139580993-139581270
  hypo

SEQ ID NO: 213233 - DNA, 321 bp, Homo sapiens
  chr9:139585994-139586315
  hypo
ctcacacaggaccacggaggcccagagggtgcctgggtcccagtccgagaggggtgtggtgtggggctgaagagcccagggtcagggtcaggcagcccgacccagcgaggagaccctgggtgaccttggatcagccctgcctctctaggcctcagtttccctttcgtgcagggtgcgtgtgatgattcagtgggaccgaggcttgggacggcccaggccagcccaagcaaggcagggatgaaggcccagcccccagcctcggcctcaccccatggctttttactcactgctgagggcggcgtccaatcaggcctagggcct

SEQ ID NO: 213234 - DNA, 581 bp, Homo sapiens
  chr9:139586617-139587198
  hypo
caccggcagtggtgtccaggggcttggctcttgcagggtggccctggctctggccctgcgccctgcccatgatgtggtcggaagggcctttggcagcaccggtccaagccttagcaaacccaactgggggctcagagccgccccccaatttcgggagcgacttcacctttccacaggatcatcctcttggcaagatgaggctgaggccgggggttcggggctcagcatcgaaagccggggcctgggtgccacaggccgtgacctcttccaccaaatgagagaaacggcaagacctccaggaagggccgtcggagcccagacgaggctgcagcttcctttggtgaagcgtccgagggccggctctggcgcctacaggggcttccgacgctgggtccttctcaggctgagcgccgcactcccacggccacccgggtggtgcacacagtttccagggtgtccaggcagcccccagtggacctggtgtccacgtcctcctctgaaccatgccaggcctgggccgtgggcatccgtgctgccgtgtggggcaggggcctgtgtcctggggccgtgtcaggcctggg

SEQ ID NO: 213235 - DNA, 159 bp, Homo sapiens
  chr9:139598243-139598402
  hypo
cagaaagtccaatatcgaggtgcaggcagattccgtgtctggtgagcgcccgcctcctgatagacgtcacgtggtgaatgcagtcaggggtctcctggcagccggggtgggggtctcttcttttttttttttgagatggagtttcgctcttgttgccca

SEQ ID NO: 213236 - DNA, 220 bp, Homo sapiens
  chr9:139698438-139698658
  hypo
tcacctgggtatacccggggtggagaaggggtggccaggagcaacggagctgagaactcctcaagaggcaaccccactaagcgctggcaacgagagtggcgagggtgagagcagtgtctggggtgcgtgagcaggggttagcagatgacggttttagctgcccaagggcacgctggaagaggccaggttttggggaagaggatgaatctgtcttcaggca

SEQ ID NO: 213237 - DNA, 42 bp, Homo sapiens
  chr9:139699253-139699295
  hypo
cggagaccctgaaatgtaagcgctcagctccccacctgcccc

SEQ ID NO: 213238 - DNA, 357 bp, Homo sapiens
  chr9:139735175-139735532
  hypo
aagaagggaggggacagctggcttcagccaggctcggtggacaccctggccctctcggggcagagccgccagtgtttctcagggatgtgactgaggcccaggagggacctgtgagggtctgtttacagaggctgggcaggggccgcttggctgtggggtgtgcgctgccccggcacctgcttgccctccgcgctcatctggggccgcagcatgcctatggttccgcttccggccgggagccctgaacacgggtgtgcagactcaccctaaagggcggcccaggccccacgctagaaggctggcgagaccgaaggcagcatgtgaggcctctcctgggagtgggggttgtgtttccca

SEQ ID NO: 213239 - DNA, 277 bp, Homo sapiens
  chr9:139787443-139787720
  hypo
ttctgtgaaccttttagtgacgtacatgtatgtagcacgtctccacatgtcatgatgaatgtgcgctgagggtgcagtcctggtgagcaggctaccacctcagtttgccacggctggtatgcatctgtgagctccggaacatccacatagctctgccgcccacaggagcaggtgcacccaccttcgagaaagtgggagaaacaggtgtggcgtccccaccgagggaccttgagcactgggcaggcagagccccagcgtcccttctgttgggtggttg

SEQ ID NO: 213240 - DNA, 267 bp, Homo sapiens
  chr9:139794983-139795250
  hypo
tgcgtgtggcatggtgacagaagctccagcagtcgggagtcgtccacgctccccaagcagttatgaccttgtcctgcacgttcctctcactggggctgaagcctgtctgatgtctgtggaggaagagacggagctgctccttagagtatgtccatttagaaactcaagtagtgcagagcacagacctgcaccatggagcttgggctgtgtgacctcgggcgaggtatttaccctctctgtgcctcaggtttcttgtctgtcgatggg

SEQ ID NO: 213241 - DNA, 211 bp, Homo sapiens
  chr9:139803920-139804131
  hypo
aaactgtcagatggacgggcctgaccatagcacatctggggtgccaagccctccgcagcagcatgtcagggtctgtcttggagacgtcccgcatgccgccagccctgcccatccgccaggccctcccaccggcctcgcctcccagcgggagcagcgtttccccatcttcaccggggccgttgtttcacgtggcttccaaatctcctctggt

SEQ ID NO: 213242 - DNA, 66 bp, Homo sapiens
  chr9:139804191-139804257
  hypo
gaggctcctgggtggtgctggcaggatcctgcccgggaggagcactgtccttcgaggctggagggt

SEQ ID NO: 213243 - DNA, 354 bp, Homo sapiens
  chr9:139804287-139804641
  hypo
gcccagcctgagcactgtgtgccgccctccacccgcgcctggcattggcgtccaccctcacactcctgatcccttcttttgaaggcgcaccacgaggtctgccccaagttccccttaacttgtgacggctgcggcaagaagaagatcccccgggagaaggtgagtgtccttcacctccttggaggaccgcagggcggggcccatgtgttggacgtgagggtcccgtgggtgggggtggggcaggttatgacccttgtgcccaaaggaacagcagtgcaaagcccctgtaacgttgggtcatggatgcgttcagggtggcggccgctctcctgagtgggccgggggccaggtggc

SEQ ID NO: 213244 - DNA, 349 bp, Homo sapiens
  chr9:139805157-139805506
  hypo
tggccaggcctgcccgcgggctcagcctgacaggtgtgtgcctgtctttctgatttgcttctgtttaaatataggtcacagcccaagtcctgaaatgggtagggctgggggacgggacagggctgtctcctcacctctttccacttgtctgttaaatgtcccgcactgtgagcttggccgagtgctgtctgaaagcatcctttcccttcacctggagactggagcgccatagaggctatggctgctgccatgcccccttcagaggccaggacgcctgcctggggcccgtgtctgtgaggctgtgtcccctgctggtggggcctggaggtgcccccgagaggtgccctct

SEQ ID NO: 213245 - DNA, 142 bp, Homo sapiens
  chr9:139814740-139814882
  hypo
ccatgctactgagctcggtgctggaggcaaagcccctcttgggagaccagagccacgcggggtcagagctcctgcagaggtgcgagagcctggagaagaagacggccacttttgagaacattgtctgcgtcctgaaccggga

SEQ ID NO: 213246 - DNA, 58 bp, Homo sapiens
  chr9:139818622-139818680
  hypo
gcagtttgttgtttccatgatttctgagcactggtccgtgacacaagcacctggcttc

SEQ ID NO: 213247 - DNA, 360 bp, Homo sapiens
  chr9:139834975-139835335
  hypo
cccaagccccgggcgcacaaccacagccaggagcagcccctgccaccactgggccaccgtccagggccccacaggaccagccgaaggtgccccgggccgaggccagctgggtcaggtgtacccctagcctggggttgagtgaggagcggcacccccagtatcctgtgtaccccaagttgcccaggaggccgagggggccttgggctccatctgcactggccaccccgtgccaagcatcacagctgcgtgagcaggtttgtgtgtgagcgtgtggcggggcctggttgtccccttcctaaggcgtaactgctataagcatctccacctctcccgctcgggaaaaagccacagagcctggcg

SEQ ID NO: 213248 - DNA, 887 bp, Homo sapiens
  chr9:139835875-139836762
  hypo
cgcaccgttgggccaggcgcggctgttcacgtacaggtacctgggcgaggggcactgtgctaggtgtgggccgcctgcgggcaccccgcctgggacactggcaagaggcccacctgttgtcgggcgacaggcccatgccgatgatgtgtccgtgtatgtctatgacgtggtccagcgcgtcgaagaaggcatcggagccccggccctcacccagcacgggccctgccgtggtcatctggtgtggcaggatctgcttgatgcctgcagggagggctacggtgagggtccctgtccaatgccccaaggacatcactccagggcagcttcctacctcagtggtgtctctggggctgtgagcaccacagaggtccgtgggcactgcctgctccgggggccccagacctgaatcaggcccgtcggttgcttgctggccagcggccctgcctgcgtttgttttcactgctcatcccacaggccccaggtctgggcttgtgaccccaggggcgagtgaacgatcccagctttgcctgtggacttgcttgctgtctgcccctcaggacccctgcccggcctcccccaagctcctaggaccgaggcgggcagcatggcggcaggggtgtaccgatctggtgtggggagtaggtgaggcagccagtggtgaagatgaggtacttgctcttggcgcctgtggcactgcgctcgggtggcttggtgtggccctgggccagcagctcggccaccttggtctctagcatgcgctccgacagctgtggctgcgcccgcccctccagcacgcggtccagaaagtgccgcaagccctccttggcgtgggcgggggccgggccagccaccacctcctcgttgtcgctgcccaggtcaaagatgcg

SEQ ID NO: 213249 - DNA, 167 bp, Homo sapiens
  chr9:139836968-139837135
  hypo
gggcagccccgcccctagccccgcacgcacctggaaggcattgttgagccacagcaccgagcaggaggtgatatctccgatgcggtgcaggttccccgagatgaggctggtctcggtgagccaacagccaaacacgtcatagggcttgttccgcacgcgggacagca

SEQ ID NO: 213250 - DNA, 540 bp, Homo sapiens
  chr9:139847110-139847650
  hypo
tgcgtgaggggaaacaggctcgggaaggccgcacagccactggccagggtcaccatgtccctgccagacccagagtaggctctggttcttgccagtgtccctggcgccggcccagccaggagcactgctctgtgaggggtccagaagctgccagggagggcgggagggggctcctgaccctgcccactgccacccctgcccaccgccgcccctgcccaccaccgcctctgtagttccagggggaatggttcgtcctgggcctggcgggcaacagcttcaggccggagcacagggcgctgctgaacgctttcaccgcaacttttgagctaagtgatgatggccgctttgaggtgtggaatgcgatgactcggtgagtggctgtccctgccgttccaagcgggtgaggaggatcccgggcctgggtcccagccgccagtggctcaggtgcgccatgggccctgtcccagcacaggcagcttcatgactctgcctgccaatgaccaaacccagctggggagtatacaaaaaagtgtgggcagc

SEQ ID NO: 213251 - DNA, 437 bp, Homo sapiens
  chr9:139902479-139902916
  hypo
acttgtgctggcccgccccggccctcctgcaggctgggcctggacgcagggtctccccacgagctccctctgtgtctgggctctcccgggcctccgtctgccgagtctgggggccactgagtctacatcggtcccctgttccccggctctggtcccctctgccccacccttgctctgtgcccctcaaagactctagcaagtctggaccatgcagttacgtctctccaggcctatctgcaagtgtccctcgcccactctgcccccttgacctctggacagcaagcatcctggggccagttctcccccgaccccacccgcggctggagccaccaggcagcctgggtccagtgggcagagccctggacagccatgagagcagcctgctcacccgctcctcctcgaagctgatgaggccctcgtcctccgtgtccaggtcc

SEQ ID NO: 213252 - DNA, 54 bp, Homo sapiens
  chr9:139903847-139903901
  hypo
caggcaccgcaggcgaccgttcaccatgatggccagccgcgtgcacagcgcctc

SEQ ID NO: 213253 - DNA, 197 bp, Homo sapiens
  chr9:139913401-139913598
  hypo
ccagctgctgcaggagggccatgccactgggcagcgagaagttgtcctgtctcagggccggcggcagctcatccagtgacaggttcagtgcctcggggtgcagccgcagctctgctacatacttggggtggaggggcggctcagagggggacctgcgcctgccgagccgggcagagaggggctccccacaccaccca

SEQ ID NO: 213254 - DNA, 712 bp, Homo sapiens
  chr9:139934675-139935387
  hypo
ggaggtgaaggttagcgtgcaggtgagggtggcagggcctggggtaaagttggccaggggaggtggaaatggaggtggaggtggggatggggggtgggtgggtgggggtggcagtgccggggcggccactcaccgctccaggcacagcatctgttgccgttggtgctggtagtggtacatctccgcgctctgtgccagccgctggtccccaggctgtgggaaggaggaggcgagggtcagttggcggccagagttgggcgggagcctcagggctgaagggggccacacaccgagatccggggagctgcaggtgagccaggggccttcgcagtggcgtagtcggccttctgagtcaggcggatctcacgctgcagcctgtggggagtggggcctgagacctctgagcgtgtggcaccctccctgccctgcccgcggccactggctcacctgcaccagcagagggaggctacggagagggcggctgcaccggccacacagaacgccaggatcagcactgcaggagggggcgtgtgagggcggccttctgcagggcgccctgctgcccctgcccacccccgaccaagacctaccaagggcgaggccgtcgccttgccctccccggggctccaggggcgacatgtgcaccgggtcggatgacacaggggagcccagggaggtgtggggcgtgggcgtgggggttcctggagtggag

SEQ ID NO: 213255 - DNA, 266 bp, Homo sapiens; identical to SEQ ID NO: 201939
  chr9:139948373-139948639
  hypo

SEQ ID NO: 213256 - DNA, 284 bp, Homo sapiens
  chr9:140110919-140111203
  hypo
gaaggcatccacgagggagctcctggccagcagccgtcatcctctcggaccagccagctggtcctctgggaacagccagctcccgagcacagccgcactcctgttgaccctggatcccaccctttgagcctgaccccactgcagcctctgcccagccagccctgcgctcccccaccctgacagtgagctgtgtcctcgtccccccacccccttcccagtcaaggtggtggcctgggccgctccacctcaccggtgcagtgacccaggacggcatcagcagccca

SEQ ID NO: 213257 - DNA, 240 bp, Homo sapiens
  chr9:140133544-140133784
  hypo
tgcaggccctcgccccagaaggacaatgctgatccccgcgcatgctccggtgctgcgtgtcccgagttctggtatcgcgcattatgtggtgaagacagaggtgcagtccctccaggaagagagaaataaataagcagatgttgtttccaacagcctccaattgggagacagatgcccagtggccagagcacaggagactgtcagggccgacctgatggtgtaatttatttaaaatgctac

SEQ ID NO: 213258 - DNA, 46 bp, Homo sapiens
  chr9:140137588-140137634
  hypo
catggccgctacctgacggttgccgccgtgttcaggggccgcatgt

SEQ ID NO: 213259 - DNA, 168 bp, Homo sapiens
  chr9:140157484-140157652
  hypo
gcaggtggtgcagcggctgacgcggatggtggggaagaacgtgaagctgtacgacatggtgctgcagtttctgcgcacgctcttcctgcgcacgcggaatgtgcactactgcacgctgcgggctgagctgctcatgtccctgcacgacctggacgtgggtgaaatctg

SEQ ID NO: 213260 - DNA, 80 bp, Homo sapiens
  chr9:140166925-140167005
  hypo
cctcctgccccagccctgcacggccttttccaggaaggagaacgtgcaccggcacgcgctgcggctcctcattcacctgc

SEQ ID NO: 213261 - DNA, 216 bp, Homo sapiens
  chr9:140167091-140167307
  hypo
tgaaggcacctggtccctaccagcccgtgtgtgcttgccaagctgcccttgtggtgcttgtgtgtggtcggtgggcacccacccctgtgccccctgggcctgcccatgcgcctcgcctgccccatggtgtggttccccgcagagcggagaggcagtgaaggagctttactcccagctcggcgagaagctggaacagctggatcaccggaagcccag

SEQ ID NO: 213262 - DNA, 349 bp, Homo sapiens; identical to SEQ ID NO: 201944
  chr9:140196196-140196545
  hypo

SEQ ID NO: 213263 - DNA, 157 bp, Homo sapiens; identical to SEQ ID NO: 201945
  chr9:140196965-140197122
  hypo

SEQ ID NO: 213264 - DNA, 154 bp, Homo sapiens; identical to SEQ ID NO: 201946
  chr9:140197263-140197417
  hypo

SEQ ID NO: 213265 - DNA, 155 bp, Homo sapiens
  chr9:140198185-140198340
  hypo
gtgaggacacagtggagtcccggagtaggcccccagcagaacagagatgggcgctgtggagcccaggcccggggcagggatggcatggcctggcctgccgtgctctgctgggcacctttggcctcttaaggagggggagccgctgggctgcctgc

SEQ ID NO: 213266 - DNA, 68 bp, Homo sapiens
  chr9:140216162-140216230
  hypo
tgggcttgttggagcagccccgacctgctgctccaggcggaatattgatgtggccctaactgcggaac

SEQ ID NO: 213267 - DNA, 102 bp, Homo sapiens
  chr9:140216260-140216362
  hypo
gaactgccgagagccagcacagcccacagtcccccttgctcccgtgtcgcccacggagaccctggcgccttgagtggaggcgcaaaaggcagcatcaactcc

SEQ ID NO: 213268 - DNA, 384 bp, Homo sapiens
  chr9:140265350-140265734
  hypo
ccagggccagccgctgccctcgacatgaaatatcgcagcacattgagtcgtgagtcccagctaatccgagcggacaggcctgaatgcggcctctttcggccgggcgcggcggtgagcagtggagcatgcatcgcctgccgggcggccccgctcggggacaatggctttcttcgcagaaggggcctgtgcgggacaagaccccctttgtgtggggattcctgcctcggagcgcgagggaggcgcattcagccggccccagacagtctttgaaaggctctgtaacagaagacggcccgaaacactagcctgccttctgcctccctgcactctccgcaggcacggccgccattcagcgtcgcgccacatgagggggaccctccatcc

SEQ ID NO: 213269 - DNA, 186 bp, Homo sapiens
  chr9:140265902-140266088
  hypo
ggttccaatgcacctcctcacggtgaggggtcttgctgggaagaggaacccagggtgccatcgggacggcgtctcagcagcagggtcccacgtgggcaggcagcggggtggtggccttcacgctcggccctgaagtaagggggccctaatggggcggggagtggaccagtgcccctgagtgccggc

SEQ ID NO: 213270 - DNA, 425 bp, Homo sapiens
  chr9:140267957-140268382
  hypo
ctccccgctggccccggcagctctccagcatgtccagaagcccggccagggggtcgtccaaggcagcaaacccccgccaggcttcctcccggagctgtggagacacaaaaccacactggcactttgtcttgcactcaaagcctcctggcaaggcctccccaccgcagagaggttttttaaaatttaatccattcagaaggtagctgtggccattcagccgccatctgcgcctccgtgacttttcatgccgccgttctggtccgctgcaccccaggcccccaggggcggtggtcattgtctgcactaattatcccataaagacagagggcctgttctccaggcagacagagggccgctggcctgggaggcaaccgtagcccgagccacaggttcacaagtcactttacctgcggcactcgcgggac

SEQ ID NO: 213271 - DNA, 214 bp, Homo sapiens
  chr9:140328573-140328787
  hypo
ggggtgtggggggcttagagctcggcctgtgctgtgagcagacgtggcacccagaggccacgcctgggtaacgccctgcagagcccgatgtcccccttgcagtggaccaggcatggctggagggccactgtgacggccgcatcggcatcttccccaagtgcttcgtggtccccgccggccctcggatgtcaggagcccccggccgcctgccccg

SEQ ID NO: 213272 - DNA, 154 bp, Homo sapiens
  chr9:140333146-140333300
  hypo
aggaccactccccaggagccacgcctgccaggggtgccatgggcatcagagggccctgtgggaggggggcggggggcagcagaggcctcgtctggggacacagccccagcaggatccaagtagccccctcggaccccctcggatgggactcgcg

SEQ ID NO: 213273 - DNA, 105 bp, Homo sapiens
  chr9:140352000-140352105
  hypo
ctggcggctgcccgcccagctctggcagggcctgctgacgtcctcccggctgccaccagggctggcgcgcaggggctggctgtgatggtgagggtgccgctgccg

SEQ ID NO: 213274 - DNA, 180 bp, Homo sapiens
  chr9:140352153-140352333
  hypo
cagcagggcaggctccccagagatggtgtacactcgaggctgagggccctcgcctgcgggcttcctaatgctgggctcctctgagaggctgccctcgtagcagccgttggagacgagggacaggcggcgcttgttctggggggccggctgcatctcgggggacccgtcgtggccagagta

SEQ ID NO: 213275 - DNA, 222 bp, Homo sapiens
  chr9:140359270-140359492
  hypo
aggagagctcggggcgggctgctgggcacatgaggttcctgggccagggggacacagtggattgctttcgggaaggtcagagccacccagccctggctcacatgccactgcggtactccatcaggggtcccggggaagccgggctctcttgggttccttctgggtgggcctggggcccatccttcctcagtgaggcaggcaggactcgagactgacctcaaa

SEQ ID NO: 213276 - DNA, 260 bp, Homo sapiens
  chr9:140379673-140379933
  hypo
ccaccaaagacagtgattcacggagcgactgaaaggaatgtgaggctcagagtaaaccagacaaacgctgcaggtgaggcctcatcggagtaaaccagacaaacgctgcaggtaaggcctcactggagtaaaccagacaaacgctgcaggtgaggcctcatcggagtaaaccagacaaacgctgcaggtgaggcctcatcggagtaaaccagacaaacgctgcaggtgaggcctcattggagtaaaccagacacactctc

SEQ ID NO: 213277 - DNA, 119 bp, Homo sapiens
  chr9:140379963-140380082
  hypo
atactctccaggtgaggccttatcctctgaaccaatcgtcgcagggctttccaccactcactccaggaacagtaaacaacacacgggctagacatcaataggcccgtttctcttgtctg

SEQ ID NO: 213278 - DNA, 303 bp, Homo sapiens
  chr9:140389001-140389304
  hypo
cgcgccctcacctgctctgcgccctcacctgctccgcaccctcacctgcgccctgccctcacctgctccgtgacctcatccactccgcaccctcacctgctccgcgccctcacctgtgccctgccctcacctgctccatgacctcatccactctgtgccttcacctgctctgcgccctcaccagctccgcaccctcacctgcgccctgccctcacctgctccgtgacctcatccactccgcaccctcacctgcgccctgccctcacctgctccgtgacctcatccactctgcaccctcacctg

SEQ ID NO: 213279 - DNA, 240 bp, Homo sapiens
  chr9:140396742-140396982
  hypo
tcaggtgtgtaaacccccagtccacagtgatgatgaaataaaaataagaagccccacccagcatctttggaaaatgatcgaaaaacaaaccattaaacttcccaaaccctgacggtgaagggggtgaaggcagctcccccccaaaagagaaatgacatcacatgtcgccaaaagtttgtcaaacaggagggagaaagagatggaggaggatgagaagaatctgagcagccacatatccag

SEQ ID NO: 213280 - DNA, 75 bp, Homo sapiens
  chr9:140397203-140397278
  hypo
agccggccacggtgacatggacgaggccgctggacaggggggcactgaacgcacggctgaagtcatttggccatt

SEQ ID NO: 213281 - DNA, 233 bp, Homo sapiens
  chr9:140401188-140401421
  hypo
atcactacacacacagcgtatctgacctctggaccagctgctgtggattctgaggaagggtgcacgctttgcacgacggggtcacgcacttccaggcacagatccagcccttcgtgtgcagctgcgcatgcgagcgagtcatctgcactgcggtttcccatccatactggaattcgcaacacccatttctcagcggaatacagaggaaccgcgcagacactaaccgcagacac

SEQ ID NO: 213282 - DNA, 702 bp, Homo sapiens; identical to SEQ ID NO: 201947
  chr9:140445773-140446475
  hypo

SEQ ID NO: 213283 - DNA, 122 bp, Homo sapiens; identical to SEQ ID NO: 201948
  chr9:140473437-140473559
  hypo

SEQ ID NO: 213284 - DNA, 81 bp, Homo sapiens
  chr9:140487908-140487989
  hypo
tgttctcagcttctagaggtcgctcacatcttcaaaaccagcaagactttcttttctttttagacagagtctggcttcgtc

SEQ ID NO: 213285 - DNA, 146 bp, Homo sapiens
  chr9:140538082-140538228
  hypo
agccaccgcgcccggccgtataaaggttttttagtactctgagggtattgtctggctgcactccatggtttctgatgaggaaccattgctcatctctcaggaccctcgttcatgacacgttgctcctctgtcgctgcttttgagag

SEQ ID NO: 213286 - DNA, 42 bp, Homo sapiens
  chr9:140576167-140576209
  hypo
tctcccctgcacctctggatcgcacacactcattctgctttt

SEQ ID NO: 213287 - DNA, 174 bp, Homo sapiens
  chr9:140577314-140577488
  hypo
gggtcactccagcccagctgcgaacaggtgcgctgcctgcaggggctgccctgcacgtgcgagtgagtgcccacacgctgcaccagttggaactgagagtcaggcggaagggcctgtgtgccctggccttaactctgggtttgcaggattttcgcacaccacttttatttcagt

SEQ ID NO: 213288 - DNA, 700 bp, Homo sapiens
  chr9:140587006-140587706
  hypo
cgagcccggcctcagatggtgtttttccatcaactttttctttttacttagaaaggagtttttaaaaccataaaaagtgagaaaactctcttttagacgttgatatcttccatgtgtgggaggagctagatgatctgcgcgctggtcagaagcacgttgcatggtgtgtgtgtgtcggacggcagtgaacaatgctcaggcgcctgctccagccctggtgaagccatcatgctccagtgcgcagtgtctgttgctgctgggtgtgggagcaccaaggaagagacctgggcaggagctgacttcagagccggctgaggaggggtgaacacgtgcgggcagtggtagggtgtcttttggaaaaaagggacaatcagaagcctgagagtccggggtggatgtggccacaagggttgtccttggaatcggctggacggcacctctgcctgcctcacctgggggctttggaccctttggcgaatgggcacagcagaggttttcagcatggcaataataagactttttagaaaggaaaagtgtagtgggtggatggaaagagcaggttaattgttaaactcgtaggggagatgggctgagggccggagccacagcgtggagttggagacgcacagtgaggccgggctaaggggactggacttgtttttgaacagttcaagttagcgggtatctaacaagcagtgac

SEQ ID NO: 213289 - DNA, 79 bp, Homo sapiens
  chr9:140588766-140588845
  hypo
accccccacacagtggcgcaggacgctggccgatacccaccaggcgatggtgctggactctggccgataccccccacac

SEQ ID NO: 213290 - DNA, 317 bp, Homo sapiens
  chr9:140592377-140592694
  hypo
tgttgtgagggcagcgtgtgagggcggcgtggctcgcggaggcctcactccccactgttgtgagggcagcgtgtgagggcggtgtggctcgcggaggcctcaatccccactgtcgtgagggcagcgtgtgagggcggcgtggctcgcggaggcctcactccctggctttcactccagcctcctggtagcatgcagagacacagtgtggaaacggaggccactgtcacaagcgctgaggaggatcattattactggtttgttgacaaaacgtggacgcattttgtcttatccagcatgttgtagaaaagcagggattg

SEQ ID NO: 213291 - DNA, 544 bp, Homo sapiens
  chr9:140606073-140606617
  hypo
cagggtgaggggagttggggcgaggggagtcggcggggctgcacccctctgtaaggcgtggcgcacacatagggttcggatgttcttggagagcctgcaccaccaagagcgcccccaggaaatgagggcaggtggcgccagacgagctgtgctgtgctccacagtgaagggagagtggtgttctggctggacccataagggtggcggccgtgggagcagctcagacactggacttgcctaaggctctcccagctggagcctgctcctctccagacagcgcgcaaggcctggctcctcatggactgtgggctgtggcccctgccgtgttctcctttcaccctagatggcctcgctgtgcctgtgggttctcgtccacccactggctgtgcactgtggtgaccgctgcccgcctctgccgctacccctagccggccctccagggttgcccccacctcctgcgccatccacctcctgcagcctgactgggtgttttcttcctgtactttggccccttcctgttgccgtcctttctgtgtctttgaac

SEQ ID NO: 213292 - DNA, 283 bp, Homo sapiens
  chr9:140611160-140611443
  hypo
tcttgtgaaaacagcgatgccagcagtcatgcaaatgctgcaaagcacactcaggacagcgcaagggtcaacccccaggatggcaccaacacactaactcggatagcggaaaatggggtttcagaaagagactcagaagcggcgaagcaaaaccacgtcactgccgacgactttgtgcagacttctgtcatcggcagcaacggatacatcttaaataagccggccctacaggcacagcccttgaggactaccagcactctggcctcttcgctgcctggccatg

SEQ ID NO: 213293 - DNA, 381 bp, Homo sapiens
  chr9:140615063-140615444
  hypo
ttttatataaatggaattataatgtatgtaaccttttgagagtagcttttgtcactcagcatagttctcttaagatcatccaagttacgtcattagcccgtcccgttctctgctgaggccttggtgttctgtggggtgtggacagccttgtacgtcggcactcacccgctgaaggacactgggcatttttactttagagctgctcggggcatttacgtacacgttttggatgtaagatttacttctgtgggtcaaacacacaggagcataatcactgggttctatggccttcgggtgtttcattgaacgaggaaattgctgaaccacactccagagtggctgcagcctttcacacgcccaccggcgatgttgcagtggccg

SEQ ID NO: 213294 - DNA, 79 bp, Homo sapiens
  chr9:140615492-140615571
  hypo
actttttatttagcgcttctgttgggtgcgctggtgtttcctcgaggcttcagcgtgcgtatccctgtgactgctgatg

SEQ ID NO: 213295 - DNA, 221 bp, Homo sapiens
  chr9:140620043-140620264
  hypo
gtagggagcccaggtcgttctatgtctgttctggacatcagtggggtgtctggcagtttagtgtgggctcactgagaagctttgcaaggaccacatggcagcaagatgcgctcgagagacagagaggcaaggagggagggaaacagacacagacagagtgcgcctgtgagacagagagaggtggagaccgtgaggccgtgagagccagccccaagagtact

SEQ ID NO: 213296 - DNA, 280 bp, Homo sapiens
  chr9:140620624-140620904
  hypo
attaagcacattcacgctgccgtgcagccatcgccaccctccgtctctggaacctcttcatcttcccacactgaagctctgtctcctttaaacactgacttcccattcctctctcccagtccctggcaataccattctactttctgtgtccatcagttggacgactctagggacctcctgtaagtggaatggtacaacgtttgttcttttgtggctgacttacttcattcggcacagtgtccccgaggctcatccacgctgcagcgcgggccccagcttc

SEQ ID NO: 213297 - DNA, 164 bp, Homo sapiens
  chr9:140622844-140623008
  hypo
tcataaggaaccaaaagaggagatcaacaaaaacatttctgactttggacgacagcagcttttaccccccttcccatcccttcatcagtcgctacctcagaaccagtgctacatggccaccacaaaatcacagacaggtaaagaggacccggcaactgtctctg

SEQ ID NO: 213298 - DNA, 257 bp, Homo sapiens
  chr9:140623353-140623610
  hypo
tgaggaccaccgcccgctccagctgctctgccaccagccacctcgctccaggcgtgctcctcactctcctgggctggctgcttctatggccagttccgggagtggatgaacgtttgattccttaccggggaccttttgtgggaggtgctgggagggcaccgggacctcagagtgagcgctgcgtcagggctccctgggctttcaaacctcctcagcttctgggatgggatgtgtgcgtttggcgctgtcctgaagag

SEQ ID NO: 213299 - DNA, 40 bp, Homo sapiens
  chr9:140633524-140633564
  hypo
taaaaaaaaaaaaaacaggccgggcgcggtggctcatgcc

SEQ ID NO: 213300 - DNA, 248 bp, Homo sapiens
  chr9:140645187-140645435
  hypo
accggagctcaggacgtggctgccggagggggcgcggctgccggaggggacgcttactcaggagcgctgaggcggttaatgagtgggacagggagcctgtgacatgtataaaggtcgattgtaagactggggtattaaatcagtggtcaaggggtcatgaactttttaataactatggttgggccagttgactaatattttgggaaaaggcagcctgcacttgtgtcagggcacgtaacaaatgtgag

SEQ ID NO: 213301 - DNA, 180 bp, Homo sapiens
  chr9:140647980-140648160
  hypo
ggacatgttcagttggtcagcgaggcccacgtgctgctgctgtgcctaccttaaatgtcccccgcccactgtggcctgcacgtggcctcctgtggaggggtgggggcgcctgctgtgcatccgtgtgtgacatgtggcatggatgcccttgctgcatccggattttagaagcagatgctt

SEQ ID NO: 213302 - DNA, 674 bp, Homo sapiens
  chr9:140653937-140654611
  hypo
tgtctctggtgaggtcgggggaaggtagctctaaaggaaggatggtgccgagcatcagggccaaagggcgagagccaacacaaagccggaggagaaatggcagggagtagaggctcctcagcttgtgtgacattttgtaaactgcctcccagaattgatttccctgtgtttgatcagcgccgattggtcagtcagcgattggcctgttcagtcatgctcttgatgtagatcatcagtgtgtagaagagacaggcggtgcgcccactgtgctggtgctggccgtgtggcccgggaccccagagggaggcagtggtcaagtggcgctggatggcgtctggggctctgggagacctgggtggtgtgtgtttcagatgggacaggcgccatcggcctgtggagtgtgctgagcgggtcagtgggggcaggtgatgccgctggttgtgggtcagggggtccaggcttgagccttgggccaaggagaatatgaagatgagaagtcctctccgtatgcattcgtctctttccccgttgccttgctcttgggcctgccttattgaggctgaatggcgatgtcacccagcagcaacaggaggcagagggtctgagcctgggaggggccaggagtcggtaaccatggcaacgtgggctagggcgggagaggcagagcttggcgg

SEQ ID NO: 213303 - DNA, 254 bp, Homo sapiens
  chr9:140658284-140658538
  hypo
tgctgtgaggaaggcaggaatgggagccttgttccaaaggtcaggcccgaccgctgtgtcggggagcatgggcaacacccgggaggagcgggcagagccctggaacaggccagtcagtttcgcccatggccctcaccctggtgcctgttggcgtggccggggtttctgattcagcaggtctggcctggctgggattttgcttttctaaagtgttccccgtttctcctgatgcttctggtccagggaccacactt

SEQ ID NO: 213304 - DNA, 76 bp, Homo sapiens
  chr9:140658568-140658644
  hypo
ttctccgtaggtgttaaacaggatccagtggagtcagatccccgtgtgacacgtgcttccctgtgacttttctctc

SEQ ID NO: 213305 - DNA, 88 bp, Homo sapiens
  chr9:140680232-140680320
  hypo
cccgtgagacacagcgttgctggctccctggacacctggtggacgcctgggtgccctccccgggaacagcagccgttttggtctcacc

SEQ ID NO: 213306 - DNA, 142 bp, Homo sapiens
  chr9:140680365-140680507
  hypo
aacctttatgctaactgagttgtccagcgtgagttcctttgtgtctgcttccgtcagtcaggaaaacaagggagtgtagaaaagggacatggctgtggggctgagtggcctggccctgccagggctccctgctgactgcctg

SEQ ID NO: 213307 - DNA, 88 bp, Homo sapiens
  chr9:140682707-140682795
  hypo
atgctgaagccattgctgggcggtggcagatgaccgagcggctggtaggactggcatgcagcactcagggggcccaggacgttggcga

SEQ ID NO: 213308 - DNA, 107 bp, Homo sapiens
  chr9:140682922-140683029
  hypo
tagggagattgcaggtgtagggaagttgcaggtgtaggggtccttgcaggtgcagggatcttgtaggtgaagggaggttgcaggtgtagggggccttgcgggcttag

SEQ ID NO: 213309 - DNA, 208 bp, Homo sapiens; identical to SEQ ID NO: 201949
  chr9:140703838-140704046
  hypo

SEQ ID NO: 213310 - DNA, 328 bp, Homo sapiens; identical to SEQ ID NO: 201950
  chr9:140704131-140704459
  hypo

SEQ ID NO: 213311 - DNA, 101 bp, Homo sapiens
  chr9:140704676-140704777
  hypo
ttccgatgccgccccgcgtggaccgtcggtgatgggtccggaggcggttccgatgccgccctgcgtgaaaggcgctcctcgcacggcgccaactggaggag

SEQ ID NO: 213312 - DNA, 146 bp, Homo sapiens
  chr9:140707364-140707510
  hypo
ttgttagtgatgacggacattttataaatctcatctgtatcacattttcaagtcagctttaaatgttttgtggccttacattttcccttttagcctctttctttctcgggattcagatgtcaccttaaagaacaaggaaggagaga

SEQ ID NO: 213313 - DNA, 72 bp, Homo sapiens
  chr9:140707900-140707972
  hypo
atgccccagcaactacaagtacgtctctcagaactgcgtgacgtcccccatgaacatcgacagaaatatcac

SEQ ID NO: 213314 - DNA, 492 bp, Homo sapiens
  chr9:140708200-140708692
  hypo
caaggcttcttaccgacccaaagcagtggcaggcatctttgtgccttttttgtaacctcacactcaggggccccggtgtggcttcgtgctgggggcacaggcgagaggagcccttgcgaggcctgcaggacgacctggatccctgcacctcccagcccccggagagatgggtccagcacatgccagctttcccagcctccgagtgcatgcagcctggtgccctcactgcttgcgccttctcgagcactttccttgtggctctgcttgtgggcagctccctcctcttcccaggccgggcactgcccaggcccccccccccccccgccccccgccccacaaggtgtgtcaggctctgtgttcttgcctttcccatcgagcatctggccacaaatgcagccgccgcccagcccttcacccaccccacgtcacccactgccgcgtcgctgccctgcctgccccctgtccctctgtcagggtcctcagccagagctc

SEQ ID NO: 213315 - DNA, 215 bp, Homo sapiens
  chr9:140708771-140708986
  hypo
aagcacttaccagaatcagggttaacagaactggaagacgtagttgtgactgggaggggaaatggaaggcctgtgcctgcacgtctgaccccccggcgcctctcttctcagtactgcgtgtgcatcgacgactgctcctccagcaactgcatgtgcggccagctcagcatgcgctgctggtacgacaaggtgagggcggcctcgtgtgcgtgggc

SEQ ID NO: 213316 - DNA, 323 bp, Homo sapiens
  chr9:140709436-140709759
  hypo
tgctgaggaggagacgggagtggggagtagccctggctagcaggggtgcaattcaggggagggatgtctaagcagaggcggagagttcctggtctcccgagttcagaggtcacggtgggggcggaagccagcatggcctgggtaaagagacgcgagcagggagaggcaacaggcgtcccctctggaagcagactttggaggagagtggacatggagggtcaagtgtttacccatctgaattagaggctccaatgggaaaaggattcgtgccagtgagggctatggagatggtacgctcagaaagccaccaagctcatgtccga

SEQ ID NO: 213317 - DNA, 45 bp, Homo sapiens
  chr9:140727426-140727471
  hypo
taaaccaggaggcagcttcccgcgcctttggctttgggggctgtg

SEQ ID NO: 213318 - DNA, 136 bp, Homo sapiens
  chr9:140731431-140731567
  hypo
tgggctgggttcccgccaagcccgggctcaggagggtgtaggggtcgcaggtcacctcatcccagaggcagtggcaggaggtgactgagggcccactggagcttgaacctcaggctctgccggctccaccagccct

SEQ ID NO: 213319 - DNA, 206 bp, Homo sapiens
  chr9:141069527-141069733
  hypo
gtgcgggaaccagatcggggccaaggttggcagccagggctctgagggcccagcccgggcctgccgggtggccggggaagatgttagcagtggcggggcggtgcccctgcattgcggcccctgggctccctgccggggacggtggaactgggtggctggcgaggcggccggggtggaccccagggacagggcggcctagggatggg

SEQ ID NO: 213320 - DNA, 194 bp, Homo sapiens
  chr10:373930-374124
  hypo
atgtgaaggcgagccgtgaatgtctgcgtcttggagtggaacccagagctgctaagggggcggccaccaaaaccccaaccgtcaggccctgcgaaccctttcaaggcagcctcggcacacggacaaccgacaagggtcctgagcaaggaggacgcacagctcgagctggctttgacattcgtgctcagtgtaca

SEQ ID NO: 213321 - DNA, 172 bp, Homo sapiens
  chr10:422173-422345
  hypo
cccaggccgacctcggcccccgacagagccggcagggagaaggacccaggcccacctcggcccccgacggagccggcagggagaaggacccaggcccacctcggcccccgacggagccggcacagagcaagaatgaggtggtgctcatcccacacacgacgttccctgtgct

SEQ ID NO: 213322 - DNA, 320 bp, Homo sapiens
  chr10:426073-426393
  hypo
aggctgtccctggatgatggttaacgcacagaagaggctgtccctggaaaatggttaacgtgcagaagaggctctccctggatgatggttaagacgaagaagaggctgtccctggaagatggttaacgtgcagaagaggctgtccctggatgatggttaacacgcagaagaggctgtccctggaagatggttaacgtgcagaagaggctgtccctggaagatggttaacgcgcagaagaggctgtccctggatgatggttaatgcgcagaagaggctgtccctggatgatgtttaacacgcagaagaggctgtccctgga

SEQ ID NO: 213323 - DNA, 269 bp, Homo sapiens
  chr10:482019-482288
  hypo
aactggtgtctttcacacagcgaattcagttcagaccgggcgcacttcatgtactcagccaccacgtgtggtgagtgacagagatcatcttgcatgtgtgtccacattttactgcctttttcttgaccacagattctacctccggtttctctgtgtatgcagtgattgtttgcttaatattgcacattgtgggtaacgtgttgagcacgctcaggatcccataagcttcttcggaagctttccagctcttgttttagcaggcagcgcag

SEQ ID NO: 213324 - DNA, 158 bp, Homo sapiens
  chr10:482318-482476
  hypo
gcttggattgatttgctgctggtgtggatgggtggagagctccagtcctgcacccactccgatctccgcctcctggacttggcagggtggcatgctccgcccacaccagagctctctccgagctccgcctcctggacgtagtagggtggccatgctcc

SEQ ID NO: 213325 - DNA, 141 bp, Homo sapiens
  chr10:482840-482981
  hypo
ctctctctgagctccgcctcctggacgtggtagggtgatatgctccacccacacctgagctctctccgagctccgcctcctggatgtggtagggtggccatgctccacccacacctgagctctctccgagctccgcctcct

SEQ ID NO: 213326 - DNA, 121 bp, Homo sapiens
  chr10:524387-524508
  hypo
tttctcactcatctcatgtccgggcatgccgggggtgcagatgcacccaaattcccatcttattctcactcatccagtgtccaggcatgctgggggtgtagacacatccaaattcctgtct

SEQ ID NO: 213327 - DNA, 83 bp, Homo sapiens
  chr10:524671-524754
  hypo
gacacatccaaattcccgtcttattctcactcatcgcgtgtccaggcgtgcagatacatccaaattcccatcttattctcact

SEQ ID NO: 213328 - DNA, 158 bp, Homo sapiens
  chr10:545443-545601
  hypo
tacatggcggcaggtgagagggaggtgtgcgagggggaggacaggacctactgaaatagtaccatataatatctgacagagcagccaagggctggtggctgcaggtcgcaggaagggaacacagttaccaaaaaaacagatctcgtgagatctcccaa

SEQ ID NO: 213329 - DNA, 213 bp, Homo sapiens
  chr10:583550-583763
  hypo
tatcacccatgtttcagccaggcttgtgtttcccccattaacatgacaacaggagagggatgagggaagacacgagacacaggctggtaagtcaactctaggtggtgcaaacccattgctctggcaataagcaaagctcttggggtctccctaaatatcgagcagttatctttcgtctgcgaatttttttttttcccccgagaccgagtctcg

SEQ ID NO: 213330 - DNA, 352 bp, Homo sapiens
  chr10:669050-669402
  hypo
gagccagtgaggtggctgcacggagcacgcgtgtgaagattcaggagcacgagcatcaggtgacaggagggggcacggaggcagcaccagatggatgtgtgccgaggggatgctgcagccgggctggcgagggaggtcacaggaacgggcgcaggcatctccctccagccgcacttgacaggagggggcacagaggcagcaccagacggatgcctgccaaggggacgctgcagccgtgctggcgagggaggtcacgggaatgggcacaggcgtctccctccagccgcacttaggttttcatgaggacgggtgcagagaaggggatgaaaccgaaatgctgtggggctgaggg

SEQ ID NO: 213331 - DNA, 219 bp, Homo sapiens
  chr10:669947-670166
  hypo
gaagccaacacagttgggctcgaaccgccaccctgctccttctctctgcacccgggacccgccctgagcccctgagtgcgaggactcgggaactgcccagcccaagggcgcagcccctgaccagagaagggagccgcacggcgaggcccccagcacatggatggagggatctgttatctcggtcccagggtcccaagcggggaaggcctggggctccca

SEQ ID NO: 213332 - DNA, 43 bp, Homo sapiens
  chr10:678906-678949
  hypo
accacacaggcaccggtgtgaactcagacgcaacggcaccctc

SEQ ID NO: 213333 - DNA, 213 bp, Homo sapiens
  chr10:679150-679363
  hypo
tgtcaatcaaagcttaggcacgtgggttacttcactgttctctgtaccctttccaaataaaacccggggccgcctgtgtacccaagagcctgggcactgagcagagagagaaaacgtccagggcaacagcgttcacattccggcggtgccatagagcagacggggggagtccgaggcggtgccgcagagcggacgcggggagtccgaggcggt

SEQ ID NO: 213334 - DNA, 105 bp, Homo sapiens
  chr10:679402-679507
  hypo
gagtggatggggagagttcgagccacaggtggccacgcctcccctgcctccggccggtgcccactgctcacgcattcctctctcggcccatcctgagccaggggg

SEQ ID NO: 213335 - DNA, 40 bp, Homo sapiens
  chr10:685212-685252
  hypo
tccacacgtggggacgcgtcaggtcgggagggtgctgccc

SEQ ID NO: 213336 - DNA, 90 bp, Homo sapiens
  chr10:685282-685372
  hypo
ggtcgggagggtgctgcccggctcacggtccacacatggggatgtgtcaggtcgggagagtgctgtccggctcacggtccacacatgggg

SEQ ID NO: 213337 - DNA, 42 bp, Homo sapiens; identical to SEQ ID NO: 79203
  chr10:712415-712457
  hypo

SEQ ID NO: 213338 - DNA, 87 bp, Homo sapiens
  chr10:746703-746790
  hypo
ctgtgtgtgtatgtaaagaaaggctaggaatgaacagagctccctccacacggaagaaaatatgacgcatgggaagatgtcttccct

SEQ ID NO: 213339 - DNA, 229 bp, Homo sapiens
  chr10:769017-769246
  hypo
agtgaacaaaacaaagttgccgcccttgtggaggatgaattctagtggcgagagacagacagcaacaggggacatgcccgtgcagcacgctgagcaacggtggcgccatcatcaccacaccccacgtcacatgacagggatacagtacgtgtcaggggtttcactgtgtgggaaaaggtcacgccatcatcaccatgcccagcgtcacgtgacatggatagagtacatg

SEQ ID NO: 213340 - DNA, 180 bp, Homo sapiens
  chr10:818911-819091
  hypo
cattcatggaacggtgactcagcaggtggggcgaggtgaggacacccctcaaattagtgtaggcactcaaggtgggaccatcctgctgagggtgacgcagtctctgaaaagatcctaacaaggtggaaagactgactctgccaagatttttttttttttttttttttgagacggagtttc

SEQ ID NO: 213341 - DNA, 423 bp, Homo sapiens
  chr10:819611-820034
  hypo
ttgccctggaacacaaatgactcacagagagggacgggtcacgcggagaataagccaggagctgatgcgggaggagacgggtcagaggtgctttccctggcaggaagagccaggccccccagaactcctagagcgccctgagatcttcgggttctgatggtggcaggttctgctggggcgggtggtgggccctgctagggagggtgacgggccctgctggggagggtggcgggccctgctggggagggcggcaggccctgcgggagcatgtgagcagggacatgatggggtcgcgcattttgcagggaaaccagcctctggctgctgcaggggtgcaggaggcgagagggtaggggctgggccaggcgggtggcggtgtgttgagaagctgggtacacgtgctccagacgatggccgtgtccc

SEQ ID NO: 213342 - DNA, 97 bp, Homo sapiens
  chr10:851504-851601
  hypo
cgaggaatggacccggaagcgtcccctgcccagggggtgctgcaggtacccaggggaagagcattcacgggtgccaggcccaaggggctcacgccag

SEQ ID NO: 213343 - DNA, 194 bp, Homo sapiens
  chr10:863715-863909
  hypo
gtcctctgtcttcaaattgccggcagctccaggtaatggagggaagctggacagccccagctcgaagcttggcgacggaggctttggtggcgttggagactgtgtctggctgctctgcaacagaatgacaccccagggtcacggtatggagagagaaggccaagcagcttctcgtttccacacctgtctggaaa

SEQ ID NO: 213344 - DNA, 186 bp, Homo sapiens
  chr10:868640-868826
  hypo
ggaaacatcactgtgacacccgcgactctgaatgcagtggtgtgaaggcctgagaccctgaagaggtgtgcttcccccagctgatcctaacagtagctccaccaaggcagccacctggcgcctggggctcctcatgccattcaacccagctgggccgtgccctgccatggccgccatgcaagggta

SEQ ID NO: 213345 - DNA, 203 bp, Homo sapiens
  chr10:894781-894984
  hypo
gagagcaccagaaaccgccatgacatggacaaacacgtatgctgttttgcttgttacagtttcaatctcttttaaaaataactgacttttaaataaaaataaaaacatatattgtcagtttatagcataagtaactgcaaaaggcatgatgaccaaagcatccgggccacgagagaaacggcggcagactgccctgatgctgt

SEQ ID NO: 213346 - DNA, 154 bp, Homo sapiens
  chr10:978657-978811
  hypo
ctgtcccgaactcccgccccacacctgagacgaaggtcccggccccgaagtcccaaccccacacccgggaccaaggccccggcactgccccgaacccccgccccacacccctaaccaaggcctcggctcagccccggaatccccaaccccacac

SEQ ID NO: 213347 - DNA, 108 bp, Homo sapiens
  chr10:986578-986686
  hypo
tttgaaacagaaaaatagcacgggcatttgtggggtacataagaaagagacaaaatggaaccatttggaccagaaggcatgacgggagaagtgcgggagcgcaggaga

SEQ ID NO: 213348 - DNA, 69 bp, Homo sapiens
  chr10:1120709-1120778
  hypo
gatgagtctgagggagacatcgtgttaggtttaactttatacatctcagatttgccagtctgaagtagt

SEQ ID NO: 213349 - DNA, 62 bp, Homo sapiens
  chr10:1120937-1120999
  hypo
aattcatttaaaagctttgctgagtcacggcagtagtgtcttgagttttctcaagtggtacc

SEQ ID NO: 213350 - DNA, 171 bp, Homo sapiens
  chr10:1147965-1148136
  hypo
tgcgtccctgtgacgtgcgttcccttgctgctgtgcgtccatgtgacatgtttccgtgctgccgtgcgtccctgtgacgtgtgttcccgtgctgctgtgcgtccctgtgacgtgggaacccttgctgttgtgcgtccctgtgacgtgttctcgtgcggctgtgtgtccatg

SEQ ID NO: 213351 - DNA, 90 bp, Homo sapiens
  chr10:1148461-1148551
  hypo
ctttcactcacagcagaaggcgaagcgggagaaggcgtcatgtgatggaaacaggagtaaggcgggggcggggggtgccccacatccaag

SEQ ID NO: 213352 - DNA, 374 bp, Homo sapiens
  chr10:1167465-1167839
  hypo
gcccatgctgctctcgtaacccgtgctgctctcgttacccaggctgggcgtttgcttgtgtcctgccccgtgtgatgccgtggtttccagttgggcagtttccccccaggagacagtgtttgttgtcacccctggggaggggtctgctctagtttctaatgtgcctgggcagggcggctgctacatccacaggccaggatgctgcaccacagggaagggccccgaccagacatcaggtcctagcgggggaataagtgtcagcaatccacaccgcagctgtgggcaccacgaccaggcctttgagaatgcagacgtgaaaacggtcgccgccgcatcatcctgactgtgttccggggtctcggtgtcagagcgtg

SEQ ID NO: 213353 - DNA, 164 bp, Homo sapiens
  chr10:1206577-1206741
  hypo
gtagggacggttcccggagggtgctcagcaccatgccgactactgctggctggcacgttcgcacgtggccatgtcagctccaaggaggatgctgacatcctgctggctggcacgttcgcacgtgtccatgttagctgcgagggccatgccgacatcctgctggc

SEQ ID NO: 213354 - DNA, 43 bp, Homo sapiens
  chr10:1230858-1230901
  hypo
cccccacagctcctccgcccagtggtggcgttgataatctcca

SEQ ID NO: 213355 - DNA, 78 bp, Homo sapiens
  chr10:1230982-1231060
  hypo
tcggggagatggggaaaggcgggcgttaatattcctggcctcacacggggctcccccaagggcagctgcggggaaatg

SEQ ID NO: 213356 - DNA, 163 bp, Homo sapiens
  chr10:1251714-1251877
  hypo
ttctgcgtggtggccgggatggaccgagactgggtagatgccatcctgactgctgacgtttgggacgtgagacatctgggggcatggggcagcccgctgcggccaggtggggtcatggggcagcccactggggtcaggtggaggtcacggggcagcccgctgg

SEQ ID NO: 213357 - DNA, 235 bp, Homo sapiens
  chr10:1252355-1252590
  hypo
tgagagaactggggcgtctcctccaactggggcgtctcctcctcgtgcctgtgcgtctgagagaactgcggggtctcctcctcgtgcctgtgtggtctgagagaactgcggggtctcctcctcgtgcctgtgcggtctgagagaactgcggtggccccttgtgggcctcttggttctggggacagaggacacttttcactcagcccggggacctttggttctttctgtgaagatg

SEQ ID NO: 213358 - DNA, 128 bp, Homo sapiens
  chr10:1252620-1252748
  hypo
gtacctcagccctgcgcctccgtctctgcgtctctgtattgggttggtggcgtccacactgtctgcgtcgttgctgagcatcccaggtccccactcagcccggcctcgtgttttctcttgtcctcctg

SEQ ID NO: 213359 - DNA, 363 bp, Homo sapiens
  chr10:1260018-1260381
  hypo
ttgcacctgtgtccagcatcgtgtaggtttgcacctgtgtccagcgtcatgtaggtttgcacctgtgtccagcgtagtgtaggtttgcacctgtgcccggacctgctggcgttgcatgggtttgcacctgtgtccagcatcgtgtaggtttgcacctgtgcctggacctgccagcgttgcatgggtttgcccctgtgcctggaccttctggcgttgtgtaggtttgcacctgtacccagcgtcacgtgggtttgcacctgtgcctggacctgccggcgtcgcatgggtttgcacctgtgcctggacctgccagcgttgcgtgggtttgcccctgtgcctggaccttctggcgttgtgtaggtt

SEQ ID NO: 213360 - DNA, 117 bp, Homo sapiens
  chr10:1260416-1260533
  hypo
gtgcctggaccttctggcgttgtgtaggtttgcacctgtacccagcgtcgcgtgggtttgcacctgtgcctggacctgccggcgtcgcgtgggttcgcacctgtgtttagtccacca

SEQ ID NO: 213361 - DNA, 175 bp, Homo sapiens
  chr10:1443299-1443474
  hypo
atgcctcccattgtgtgtcccggcagccacaaacaccgtcaggcccagcgtcaccctccccacctcccggatgagaaggagcctccggagcagctgagggacccactgtggaggcagccgggtgggggacggcccggtgtgtgtggtctggtcgtgactttcccacaaggcatca

SEQ ID NO: 213362 - DNA, 178 bp, Homo sapiens
  chr10:1443566-1443744
  hypo
aagcctgggtcctctccctgtcagagaagacagctgggttctggggtttcacagcacacgggtacccccggttccaggactgaccatggagggcaggtgccagcgctgttcggggcctccggtgatggtcccagctcccttcccacaaaggccaggtgcagccttggaatcctctgac

SEQ ID NO: 213363 - DNA, 65 bp, Homo sapiens
  chr10:1558527-1558592
  hypo
gggtgcaacagaggcggctttccctgctccctttcccgaggtgcagctggattcagagcttccca

SEQ ID NO: 213364 - DNA, 53 bp, Homo sapiens
  chr10:1558836-1558889
  hypo
taagggctagaaagaaaacattttcctcgagctgcatgcgaatatcgcccaaa

SEQ ID NO: 213365 - DNA, 53 bp, Homo sapiens
  chr10:1585239-1585292
  hypo
ggcctgttacagcgacggtgcggcttccctgcctgggttgttgggacggaagg

SEQ ID NO: 213366 - DNA, 94 bp, Homo sapiens
  chr10:1585421-1585515
  hypo
ccctcctctaccaggcctcatctggagggctgcgccaggtccttccaacttcaaagagttgcctgtgaagggcgtcctccaggtgggtctgcag

SEQ ID NO: 213367 - DNA, 68 bp, Homo sapiens
  chr10:1708259-1708327
  hypo
gcattggatagggtgggtgggcagggattacttaggtgccaataacccaggagtagaggagatggcac

SEQ ID NO: 213368 - DNA, 173 bp, Homo sapiens
  chr10:1708478-1708651
  hypo
ggccacctgccctgcctgccccgccagggcgagcatctgaatccacattctcctgggccgcagctcatctgcgagtcggagcctccgaaggggggccagtagcacatgtcccagcctctctcgcccaggtgatcctcatgaccagacgcggctttgctacaagacagctcaga

SEQ ID NO: 213369 - DNA, 151 bp, Homo sapiens
  chr10:1708689-1708840
  hypo
cgaggatttttgtcatgcacacgccgctgccagcccattagctctccctgcttcccatggtctgccgcatctggggtatccagcgtcctcctgcagccgagggggaattctgaatgttttgctagaaaccgtctcatcaacattcagtttc

SEQ ID NO: 213370 - DNA, 184 bp, Homo sapiens
  chr10:1994588-1994772
  hypo
atccacacccgttatccgcaccccttatctgcactccttatccgcatcccctatccgcaccccctatccgcacccctggcccaacacctccactccgaggcctcttcagggggtcctttcccagcgcgtctcctctccctccctgggactcccagagccataaaatcaggccccgtccttaggg

SEQ ID NO: 213371 - DNA, 107 bp, Homo sapiens
  chr10:1994802-1994909
  hypo
gctctgtgctgacacccagcaccctccccggcctctgctccgaggggaaaataaaacaggggccttcaggcctcaccgctggctcactccatcgcagcaaatcgacc

SEQ ID NO: 213372 - DNA, 70 bp, Homo sapiens
  chr10:1995298-1995368
  hypo
gagacaaaccgcagacagtaggtgcaggtggccctgagaggcgtcctgcacagcacagcaaaagccaggg

SEQ ID NO: 213373 - DNA, 207 bp, Homo sapiens
  chr10:2006676-2006883
  hypo
tgcagataatccagtatcaacgcggggcggactggagacccaggaaacgcctgaaaggagggccgtgcaggacgaagcccccaggacacgcgaggagacccggccgcgcgccgcgtggggcttgggagcctccgaggggccatgcccagcctggaataaccatttcggtttttgctagatggctgcggagacaatggatgaatgaca

SEQ ID NO: 213374 - DNA, 172 bp, Homo sapiens
  chr10:2416382-2416554
  hypo
taatcctgacctaggctgtgcggtatgttacatgtgcagcgtgttacagtgtgtcacatgtgcagtgtgttgcagcgtgtcacatatgcagtgtgttgcagcgtgttgcatgtgcagcattttacagcgtgttacagtgtgttacatgtgcggtgtgttgcagcatgctaca

SEQ ID NO: 213375 - DNA, 185 bp, Homo sapiens
  chr10:2610008-2610193
  hypo
atattcttggaatcacgggaaaggtcaacagagacaggaggatttctccagtgcgtttcaaggcctccacttcctttatctctcctgacagctccttggatacaatgtcacaaatcttggcctgagcaagaatgtgcaagtgggagcgagggtgagaaattggggtcgttcgcatcatctatcac

SEQ ID NO: 213376 - DNA, 221 bp, Homo sapiens
  chr10:2620065-2620286
  hypo
gggtaaaagtcatcctgtaacgacaattctaaacagtgctaaagcgtttcatgagagtggcctgggcgtcctcccaccacagccgctgtgcgcagcggagcagagggaaggagaacccgggcagagctgcacacctgctgcgggaggggctgcgtctcgcacttcttctgtccggggaggcgccttgctctgaccttcctcctcaaaacacgggcgcggtg

SEQ ID NO: 213377 - DNA, 64 bp, Homo sapiens
  chr10:2620526-2620590
  hypo
tgggcaaaatagcgagactccgcctcaaaaacaaaacaaaacaaaaaaacacgcaagtggaatt

SEQ ID NO: 213378 - DNA, 457 bp, Homo sapiens
  chr10:2932055-2932512
  hypo
tcagatgagaacagcaccaccgtacgtggtcaccaagccgcaaaagccaggcgtaagcgaacagcttccagcgtcttaatcagagaaaatgagcaacaaagtttccccgacacatttgatgcatacgtaattgtcaccgtgctgcatgctaattaagcatcattcctacgtcgttttctaaatgactatgattggaacgatggttgcacagccaccggcagcgttcaggggagcagagcagggcggcgggagatggggcggaaggggaaactcctccggagccccctcccacagggagctggtggcccacgaacccgggaggcagcctcacgggcagcgtctcctccagtgaaccctcatggcctggagtccggagggccacctgcccggcgctctggctgaaaaaggtggctgctgcctttggtttcctccgcccgctgtctcctctagcatggag

SEQ ID NO: 213379 - DNA, 75 bp, Homo sapiens; identical to SEQ ID NO: 201952
  chr10:3109285-3109360
  hypo

SEQ ID NO: 213380 - DNA, 726 bp, Homo sapiens; identical to SEQ ID NO: 201953
  chr10:3109459-3110185
  hypo

SEQ ID NO: 213381 - DNA, 660 bp, Homo sapiens; identical to SEQ ID NO: 201954
  chr10:3110245-3110905
  hypo

SEQ ID NO: 213382 - DNA, 335 bp, Homo sapiens; identical to SEQ ID NO: 201955
  chr10:3111025-3111360
  hypo

SEQ ID NO: 213383 - DNA, 258 bp, Homo sapiens
  chr10:3150860-3151118
  hypo
gttccgcatcctaacgagatgtttccttgcagcttgtcgtcacgcagctgggctatgacacacgtgtgaccatcctcgggcacgtgcagagaggagggaccccttcggcattcgacaggatcttggtgagttgggaagggttgggcatcttcacaaggtctctaggaggaagcgtttctggagaggcacaggcaccagccggccacagaggctggcaaggtgctccccgagagatgcccgcggcccggccctcatctt

SEQ ID NO: 213384 - DNA, 221 bp, Homo sapiens
  chr10:3151597-3151818
  hypo
gacaccccagcttgcgtcgtgtcactgaacgggaaccacgccgtgcgcctgccgctgatggagtgcgtgcagatggtgagtgggcagcccatggccaagggcagggcggagacggctgggacagaagctgcttgtcaggccagcctgggcaccttgggtgtctcgtcggtgcacgatgcattacacggcctttctgagaaggaggtgagctgcccgtgggg

SEQ ID NO: 213385 - DNA, 181 bp, Homo sapiens
  chr10:3160807-3160988
  hypo
ctgccatctgccagccacaacggcatgagtgaaaaggcagacgtttaccgctccttaattaaaaccacagactggggaaggcggccgggtggggaccggcgtggcgtcctgcggaccgcgtggagtttggggtgtctgacatcgttctccacgtggctattttcagcgttctcccggggaa

SEQ ID NO: 213386 - DNA, 146 bp, Homo sapiens
  chr10:3161171-3161317
  hypo
ccagacccagcggccactggagaattgtagaacagcaggatagcaggtggtaagacgtggcctacgagtggcccagttccagtaaagcaacttaaccgagaagcaaaagcttgactccttaacccgggcctcatctattcagtgag

SEQ ID NO: 213387 - DNA, 45 bp, Homo sapiens
  chr10:3168655-3168700
  hypo
acacttccaccctcgcgccccacacgcgacgcagccctaccctgg

SEQ ID NO: 213388 - DNA, 96 bp, Homo sapiens
  chr10:3192559-3192655
  hypo
agagatgtcagcctcgagttccactcacatgcgcccacacacacacacacatgaaaataaatgagatacaaacatgacaagcgctgtcagaagaca

SEQ ID NO: 213389 - DNA, 39 bp, Homo sapiens
  chr10:3192934-3192973
  hypo
aatgaaacgtgtcacggaacaaaacgtgccaaggaacga

SEQ ID NO: 213390 - DNA, 129 bp, Homo sapiens
  chr10:3196875-3197004
  hypo
cattactgaattgttcgtttttcgtatattctgaatacaggcctttatcagacaccatttttgcaaatgttttttcccagaggccaaactacctttgagaatccatttgggtccccttctctcccgtgg

SEQ ID NO: 213391 - DNA, 308 bp, Homo sapiens
  chr10:3197113-3197421
  hypo
aggtgtctaattgcctctcagcagttttctccatccaatttctctatttttctgcaaaactatcctgaatgaggctgcagctacactgctcactgacccgacagttctcctgccttaatacatgaagcacccgtgtgctccccatcttccatacaggccctccccagagccacagggcacacctgtctcccccacacacgctgtcctccctccatgcccaccgctccaccatccctgtgtgcctcacgcctgtcccacagaatcctggtgctgctctgtggctggcacacacccggtatgcctgagac

SEQ ID NO: 213392 - DNA, 70 bp, Homo sapiens
  chr10:3243876-3243946
  hypo
tggagggaagttcacggtgatgctgagtgaggatgagcagctctgggatggaatgcgacacgctgagcca

SEQ ID NO: 213393 - DNA, 188 bp, Homo sapiens
  chr10:3277176-3277364
  hypo
tcgagtggtggaagccgatgttgcatagggagttacaacccagtgtgggcgtctcctggaggaggttcaggggccactgagcatgttgcagtggtgtcacgcatgccagctggggacctggcaccgagtggagaactggtggatgatgaggacagtgaggggcagagggtgccgcggctctcctaaaa

SEQ ID NO: 213394 - DNA, 307 bp, Homo sapiens
  chr10:3329809-3330116
  hypo
cttctcaaaatcgctgcattcagggtttccgccgtcaccctgctggcagtgaactagaggacccgtcccaccggagctggtccatggagaggtgccacagcctgtgagccacggcagagcggagaagcctgggacccctgtcacctctcagagcagcgcctcacatggcagaaggagctgctttccgaagagctaaaggttgccataaatatttataagagacctggcattgctgcgctggagggcagtgtgttatgataaaagtcacaaatggagctgaaaaaacagtggcttctacatgacagct

SEQ ID NO: 213395 - DNA, 118 bp, Homo sapiens
  chr10:3330296-3330414
  hypo
tcaacttttattgctccttgtcctgccggtggccctggcaacatgccacgccggactccagcttagtttccttgttgccttgcagccaaacttacgcagtgtgcagacggagctgctc

SEQ ID NO: 213396 - DNA, 285 bp, Homo sapiens
  chr10:3342840-3343125
  hypo
agcacctgcttgccttttgacgggtgggaatctgggcttgactgtgtcgccgtccacagcaggttgctacagcgggttcagcaatggcacctggtccatcgttccccgctcaggatttttccccgagctgtttggaaatcgctggatgctccatttttcaaattcgcttcacgtgtagatgaatttggcaaaagtcagagaaacagcgagtagccaaacaaacgggaataatttaagctgcagatcataagctcccggtgggcaaggacgaaaccttcatctgtt

SEQ ID NO: 213397 - DNA, 82 bp, Homo sapiens
  chr10:3343155-3343237
  hypo
attctctgatgctgattaccacggctcgattgacacgtttagctcctgtggggacagcgtcgctcatgatgaagagaatcaa

SEQ ID NO: 213398 - DNA, 58 bp, Homo sapiens; identical to SEQ ID NO: 201960
  chr10:3862675-3862733
  hypo

SEQ ID NO: 213399 - DNA, 120 bp, Homo sapiens
  chr10:4886127-4886247
  hypo
agttctctccaatggctgctgacgggcctcttggaacgagactgcaggtctcttgtagtggttagaattgagcactgctgactgaccggcatctgctccacatggtgtgtccggaattgg

SEQ ID NO: 213400 - DNA, 68 bp, Homo sapiens
  chr10:5523192-5523260
  hypo
gttgatccaggacacgggaggagacctgggcagcggcggactcattgcaggtcgctctgcggtgagga

SEQ ID NO: 213401 - DNA, 120 bp, Homo sapiens
  chr10:5529900-5530020
  hypo
ccaacacctcctccatgaagccacgaccacaaggctcccggtgcaggaaaatactgttcatcaaaagcactgagatttgtttttgtttgttttgtttttgtttttgtttgagacggagtc

SEQ ID NO: 213402 - DNA, 444 bp, Homo sapiens
  chr10:5530320-5530764
  hypo
aaaggtcatctgggcagcaaggcaggagctcccggatcaggaaagtgcaggcacaccatgtctctgagtggtggggtggggacagaggctggcaggccaccaacagggcagcatctgctcccaaccaaggtgactcagacctcgccttgtccaacctgcaggcctcccaacagtggggctctataaggctggcgttcgcctccagggttctccccgacactggatgccaacctgcccaggggcagaagggaggttgggcgtggggagtgccgggtacagtcagagttgccaggacagtttggagcagtgcctcttaatcttggccgcacagcacctgggagctttaaatagacccccacgcctgggcgcccccaccgctgacccaccagggctcagtgcagggggatggctcacacggcacattctccagaagctcctggggta

SEQ ID NO: 213403 - DNA, 89 bp, Homo sapiens
  chr10:5538686-5538775
  hypo
actggccaggctctgagcaccgggcaagaaggaacaggtcgcaatgagtgaccgcaagagatcatggtgactcctgaaaacgcccaggc

SEQ ID NO: 213404 - DNA, 193 bp, Homo sapiens
  chr10:5538938-5539131
  hypo
aggccagggccgccacctccccaaagcccgatttcacccaatgctaccataagttggcctgggctgctcctgtacccacctggggcttcagtttccacatctgccaagcaaggtgcctgggtccgaccatctgagacccaggacaaagggagccctgggaacgccaggctgtgatgagcgagcctgggtctcg

SEQ ID NO: 213405 - DNA, 400 bp, Homo sapiens
  chr10:5540251-5540651
  hypo
gatgcacacatacagagacacgcatacagacacacagacacacacacagatgcacacacagacgtacacgtatattatttgcagccgaagagaggcaggctgcgtgcagaggctggcagctgggctccgtctgtccatgcgaggcgcccgctcctgtttgtgcgggacacgtgcccaggtcctcaccagcagctcaggcagaacctggagccacagacaccgcccagcaccatcctcacacatcctctgcccacctgccctctgctccgcgtcaggggaggcaggagctgcccctggggcctgctccaggcagttctgccaccgcaggtgagaggggtgggctggaaggaaccctggaagcaggtgggggccctcggaggcagccgccccacaaacacca

SEQ ID NO: 213406 - DNA, 213 bp, Homo sapiens
  chr10:5541528-5541741
  hypo
gttctgccttggcatgggaaccccctccttttctgcaatcggaacaaagggaggagggaggctccccaccctccaaatgccctggggtgagagcctcctcccagggagggccagatcagctgcagacaggaaatgcaggaatgggagttgggagagctgtcaggtgccaggtgggaactgccatggggtcggggtatcggatggctagcctgc

SEQ ID NO: 213407 - DNA, 194 bp, Homo sapiens
  chr10:5566929-5567123
  hypo
gcccgccggccgcccggatctccacctgccaccccagagctgggacagcagccgggctgcggcactgggagggagaccccacagtggcctcttctgccacccacgcccccacccctggcatggccgaccagctgactgaggagcaggtcacagaattcaaggaggccttctccctgtttgacaaggatggggac

SEQ ID NO: 213408 - DNA, 326 bp, Homo sapiens
  chr10:5567210-5567536
  hypo
gagatcgaccgggacggcaacggcaccgtggacttccccgagttcctgggcatgatggccaggaagatgaaggacacggacaacgaggaggagatccgcgaggccttccgcgtgttcgacaaggacggcaacggcttcgtcagcgccgccgagctgcgacacgtcatgacccggctgggggagaagctgagtgacgaggaggtggacgagatgatccgggccgcggacacggacggagacggacaggtgaactacgaggagtttgtccgtgtgctggtgtccaagtgaggccggcgcccaccatgctcctgggcgcccacgcggcc

SEQ ID NO: 213409 - DNA, 103 bp, Homo sapiens
  chr10:5567566-5567669
  hypo
cctcccccatccccctgcctcccctgggcactgtggcttcctcctgcgcctggttgattcagcccacctctctgcatcccgcttcccgcgtctcttctctgca

SEQ ID NO: 213410 - DNA, 145 bp, Homo sapiens
  chr10:5576085-5576230
  hypo
cgctccctcgcaggcgcacaggccctttctcaggaaagccccacacttggcttaaggctctgctgttgctgccttgaactcttaatgagttttgaacaaggcgccccgcattttcattttgcattaagccccccaaattatgtgc

SEQ ID NO: 213411 - DNA, 101 bp, Homo sapiens
  chr10:5683749-5683850
  hypo
cacttggcgggagcgctgctgctccacgtgtagtcagacggcttcttcccgcggttgtcccgggcgtagatgttgccgccaaactcgataagcatctcgat

SEQ ID NO: 213412 - DNA, 218 bp, Homo sapiens; identical to SEQ ID NO: 201962
  chr10:5707985-5708203
  hypo

SEQ ID NO: 213413 - DNA, 36 bp, Homo sapiens
  chr10:5796177-5796213
  hypo
ttgaacccaggatgtggaggttgtagtaagccactg

SEQ ID NO: 213414 - DNA, 114 bp, Homo sapiens
  chr10:5796243-5796357
  hypo
ccacaacagagcagtaatcttagttctcacttcctttccagatgaagtgataatgattttcatgaagaagagagcatggcaatgctaagttttattcatagcagaagtactttt

SEQ ID NO: 213415 - DNA, 82 bp, Homo sapiens
  chr10:5863290-5863372
  hypo
caaaaaaaaaaaaaaaaaaaaaaagaaaaagaaaaagaaaaagtatttaatgcaggggttcctaactcgagtataattgtac

SEQ ID NO: 213416 - DNA, 90 bp, Homo sapiens
  chr10:5901982-5902072
  hypo
aaaaaaaaaaagtgcgataccacacagctttggtgatgggtatgcctgggaaggaatcttggcaaaagcgatgtctgtggtgctcaagac

SEQ ID NO: 213417 - DNA, 631 bp, Homo sapiens
  chr10:5953029-5953660
  hypo
ctgtactgcatagccgtgcttctctacgccatgagggagaaggggattaacatcagcaataggtaatgccccgggaggaggggaggggatgctgtgataatgggagagtcccagacacagcagcaggtccagccctgccacttagcagtgttagcacctggcaggctgtgggacccacctgctccacctcagtgtcatcttctgcaggagccaggggctgagagtttgatgtggaaaggctggtaagagcgccttatgaacgtgcagttctgagcggctgcgagataccactaaggctgattttaccatcatgggtcctgcagccttaggggaagcccctcgccaagagaagcctttcttattcacccgtggcctcgcttccctaggaaaatgttaggctctacttcctccatatcccacttgtgggatggaaaagactcatccaccttatcctccatgcgggagaggctatggcgtgtcggctgctgattcacaggggccccgatggtttcctcagcagggtggggagtgcctggggggttgtgcatttgacaaacactgaacacctgtgtgtgtccgacagttgtccacgagccggtccactgtgaccggcttagaggagttagaggag

SEQ ID NO: 213418 - DNA, 462 bp, Homo sapiens
  chr10:5960338-5960800
  hypo
gaaaatctttgtaggggacccgcaccagcagatctataccttccggggtgcggtcaacgccctgttcacagtgccccacacccacgtcttctatctcacgcaggtaagtgcgcactctgcatgggaggcattgcatctctctcccaatgtcttacgtgccaggccctgtgaaaggtggtatgccaggctcaccagatctagcaaatccttgcttctaagccatggttctcaaagtgtggttctcaggggtctgccaagtcacactgttttcataagaggtgtgtgcacagcggtcgtctgaggaagagctgctgcggctgaactgtgaaccgatggctgctgccgccttgtacatttgtgcttagaacagttgttagaccagcgctggttgttcagacttgtgtatttggcactttttcaaagacaagtgaaacaagctgcgacttcagggaaaataactga

SEQ ID NO: 213419 - DNA, 168 bp, Homo sapiens
  chr10:5962672-5962840
  hypo
aggctgtacacaccccgagtgtagggaagaatgatatcttgccagctggaggggcgaaggaagcagggtcttgggctgagttttgaaggttaggaagtgactttggtggatgaaagtcagacagaaaaccgcgtgggctgaggcagggcagcacggacaatgtgcagg

SEQ ID NO: 213420 - DNA, 118 bp, Homo sapiens
  chr10:6003855-6003973
  hypo
tgtcaccacctttcatataacttgccctacgctcactgccaatgctccagggctccctgcacaggacgcaccaaggcatcctcagccaagtgcccacggtcgtgccagctcgggtcaa

SEQ ID NO: 213421 - DNA, 49 bp, Homo sapiens
  chr10:6135599-6135648
  hypo
ttctggtggcactaacgtattcataaacactttcggtaaagttctcaag

SEQ ID NO: 213422 - DNA, 160 bp, Homo sapiens
  chr10:6161978-6162138
  hypo
agaatcccaacatcccgcctccacctccttgcttcttactgcctcttccactcagcccacacttgcagaatgaggactgcgtcgactacaaattagacctctgcttccaccaggcctccttgatagttcagctaagagccgtgcggtgagtctcctgacg

SEQ ID NO: 213423 - DNA, 207 bp, Homo sapiens
  chr10:6531176-6531383
  hypo
cattttcttatgcatcaccgtgacaccaagtgaggttgtcagctaggattgaacatagagggatggagttttactttgctccttaaaactgtagccacatctaggcttctctgtgacttgcatggccgcgaagaaaggccaccaccatctccacgagaaggtcctaagtctttgttactaacctatcaggccgtaactcagtttctt

SEQ ID NO: 213424 - DNA, 44 bp, Homo sapiens
  chr10:6647894-6647938
  hypo
tacaggcgtgagccaccgcgcccggctggtgaccagaagtttct

SEQ ID NO: 213425 - DNA, 90 bp, Homo sapiens
  chr10:7202879-7202969
  hypo
tctgggctctcctcaaggaccggagagatggcacagagacaactttcatggcgacgccaggctgcgccctcctgtgcagtggtcccagcc

SEQ ID NO: 213426 - DNA, 39 bp, Homo sapiens
  chr10:7203127-7203166
  hypo
ccttcctgagctcctggcgggccacacactctagcttcc

SEQ ID NO: 213427 - DNA, 48 bp, Homo sapiens
  chr10:7212697-7212745
  hypo
gaggctctgtctctcgtccctgccaggcagctctcagcaggggccttg

SEQ ID NO: 213428 - DNA, 121 bp, Homo sapiens
  chr10:7214457-7214578
  hypo
tcccccgagcccgcggtgaagtccacggcagaagacctccgtttcttctgcacgaaaatggatttccgtcgcttcctccgcctggcgggtttggggtgtccgctgtcggggttgctttccc

SEQ ID NO: 213429 - DNA, 214 bp, Homo sapiens
  chr10:7252611-7252825
  hypo
acaccagcagaatgcaaagccggtgtgagtgcccgcaagcaagacctggacgctggaagccccacctgccctctgggcgtgttccctttgcagatgcctatcaagaagcccagcgcgcaaagcctccctgggtcagctctggagccgaaggcctgggaaaacaaaaccaaaaacaaaaccaaaaacggtgggcgaaactggtggccaggatcaa

SEQ ID NO: 213430 - DNA, 152 bp, Homo sapiens
  chr10:7290536-7290688
  hypo
aaagggctcgcacatattcactgtctcaagcttcatcccaactgtgaagaaatggcttcgcaaatctgcgtgatcctgcagggagaaagatgaaaatattgaaagccacggtattgtaaatgacctcagccactgtccggatgcgctcctgg

SEQ ID NO: 213431 - DNA, 42 bp, Homo sapiens
  chr10:7352682-7352724
  hypo
caggtttgaaaaaaaggcttcgtgtgcaaaaaatgtcagcca

SEQ ID NO: 213432 - DNA, 55 bp, Homo sapiens
  chr10:7409503-7409558
  hypo
taagaccattagggattctacgcaaggttctctctgctccttgcaaaattacagg

SEQ ID NO: 213433 - DNA, 172 bp, Homo sapiens
  chr10:7409632-7409804
  hypo
gttgttctgtgtgcaccaccccacggggtgcaaatccgcgatgactacgtcacaccagaagtcggccctgcggtcctccccgtaaccgcagtagcgcagaagcagcagctgcccgcacgtggtaatgatcgtggccacccagtacgtgtccgggttgttcttattagccact

SEQ ID NO: 213434 - DNA, 60 bp, Homo sapiens; identical to SEQ ID NO: 201967
  chr10:7453036-7453096
  hypo

SEQ ID NO: 213435 - DNA, 51 bp, Homo sapiens
  chr10:7583452-7583503
  hypo
gggaaagtcctgaacgcccccttccccctgtcttttcggcggggctttggg

SEQ ID NO: 213436 - DNA, 331 bp, Homo sapiens
  chr10:7618357-7618688
  hypo
ggtgagtggtatctcaggcccgcgtcccccacacctggctggcacaggtgcctcgtacctggctgcgtgccagctcctcgcacgctctgcaccaccggttcgggtcccatggcagccgacatgccgtgggcctcctccaggccatccatgcgtgggaccggccccctcagcttcatggaggtgaagggagtgaggaagcggtagctcacagccagggcctgggcccgctgccgcagccgctccttctccggttcatcgtcactttgcagccaggagctcagcagctcctttgtggtgaggtagctccagagacgctcgatgtggttggtgt

SEQ ID NO: 213437 - DNA, 41 bp, Homo sapiens
  chr10:7679269-7679310
  hypo
gatattcacgtccacgctcagcctcccggacagctgctggg

SEQ ID NO: 213438 - DNA, 171 bp, Homo sapiens
  chr10:7780611-7780782
  hypo
tccagattccaccccgtcttgggccaatccttcaccaacgcccgtgatctccatgctggcacaaggatctcaggtgctagagtccacgccacccccacatgtgatgagaggtaacgcttctacactgcttgcacgtcccagaactcagccgaccataatcctgggaagcat

SEQ ID NO: 213439 - DNA, 184 bp, Homo sapiens
  chr10:7871223-7871407
  hypo
gttattaaccttttacgtgactatggtacgtgtatcacaattaatgaacaatattgacatgttattattaagtgacgcccgcactgtattgacattccttagtttttactggatgtcctttttctgtttctggatcccatccaggatatcatattgtgtttggttgtcacgtctccttagactt

SEQ ID NO: 213440 - DNA, 126 bp, Homo sapiens
  chr10:7985034-7985160
  hypo
tccttacttagcagcggttgtgatcctgctcagatcaaaggagtccaatcctgtggttccggttccctgtagctccgtgagactctgagaactccactcggcctccagcgctgcctttgccgttgc

SEQ ID NO: 213441 - DNA, 113 bp, Homo sapiens
  chr10:7985194-7985307
  hypo
cttgcttggtttcttggcttctgtcttctgattctggctcctacgcatcacgttctgcttgctccttagcattgcaaactctgacattttagatgatacgtttgtttcctagt

SEQ ID NO: 213442 - DNA, 197 bp, Homo sapiens
  chr10:8055484-8055681
  hypo
cattgaacacttagcgtttttctgtttcttgattctaaaacagtgatgacgctgatcatggcattaatgaagtgctgatctactatattttttagtttaatatgcctgtttattcggttaacagtataaagtaatcattctgatctggcctctttttgttttttttcccattccctccatttttgccgcttccgctt

SEQ ID NO: 213443 - DNA, 107 bp, Homo sapiens
  chr10:8055764-8055871
  hypo
gattgggtgtgacgactgcgatgactggtaccactggtgagtgcccagggcgccctgccggccacactcattaggcagcatcagccgctcctgagatgaagcatcca

SEQ ID NO: 213444 - DNA, 63 bp, Homo sapiens; identical to SEQ ID NO: 201978
  chr10:11060746-11060809
  hypo

SEQ ID NO: 213445 - DNA, 32 bp, Homo sapiens
  chr10:11081058-11081090
  hypo
catcgaccatgtaacggcgataacagccgagt

SEQ ID NO: 213446 - DNA, 41 bp, Homo sapiens
  chr10:11184680-11184721
  hypo
ataaagagattaatgaccacaggatccgagaaatacacacc

SEQ ID NO: 213447 - DNA, 311 bp, Homo sapiens
  chr10:11198992-11199303
  hypo
tctccacaggattcccacagcgtgtgagaatgaagggtggaaatggaaggtcctttgcggaacaggctccagggggtggcatttcaagagcaggttgggggatgaggctgtgtcccctgtgcaaagtcacccatgcacatgactgccgtcggcgccagggtctttgctggtacttccgtgcctctcacacatgcatggttgtagaggagctgtgctctggggccgcgtttcccaccttcccagctcccttccttgttagagccgcctttttctccccagttttttgtttcgtttcaatgccattgccaact

SEQ ID NO: 213448 - DNA, 318 bp, Homo sapiens
  chr10:11296956-11297274
  hypo
cccatgttagtgagcacaggcggtgtagacggcctgcagcaggtggtgtggacggcctgcaggtacactcgttgcccagggtatctggtgtctctctggcttagctgtcgcgcctgtgctgcccatgactgaccaggcttcaccagttcacagcggatccatgctactttgccttctctgaagggaggaaaaagaacttgaattagaagttttccgtcagcgtacaggaggtcaggtcctcagcagtctccctcccaggaattggagcccggggtgcctgttgcccatgtctcctccgagtctgaacacaagcagtgg

SEQ ID NO: 213449 - DNA, 221 bp, Homo sapiens
  chr10:11317672-11317893
  hypo
actgtatttgaaagccagctcgttgaaggattccttcttctaatgagctgcgccagtagtaactgaggtgtggtgattagcgaaaggtcactcctgccgtgccaccttccgtgccgatttccctacctaacacggggccagggaaggcagcgagcgcaataaatcagaacacaggtgcccattaacctgccgtgaggaacggtcagagagccttttccttg

SEQ ID NO: 213450 - DNA, 200 bp, Homo sapiens
  chr10:11344065-11344265
  hypo
ttcctctggaagaacagaaccgtaacttaccactctcacctagtttttgactctgggttccttggtgcccagtgactgttgccctttcctgtcacaaaccaaaccttcccactccctgcagcctctcaccttctcatgcctcagaatcaagttttcacccagtcgtgatggaatttgacagcaccgcatcggatagtcct

SEQ ID NO: 213451 - DNA, 228 bp, Homo sapiens
  chr10:11381731-11381959
  hypo
actgtggagacaggcgcctgactcaggcattcctgagaagcggatccgctccctttcccccatctcccacggcagctcctgttgggcctggcaagttagtgcccagggcaggatggggccgacgccagccccccaccctgcacagcacaaccgagccattcaaacagactcggacaggcacaaggtccctgctactgcagggatgccatttggcggcaggcacgcagg

SEQ ID NO: 213452 - DNA, 174 bp, Homo sapiens
  chr10:11472668-11472842
  hypo
tggtggcaccggagcgcacacacctgggccgtgccagagctctccgtggaagagggcgatctcacccttcatccatcatccaggcagaaggcaagcagaccatttccccaagcagcacttctctccaacaagcagtggtcataaaagcagaggctctgaaactttaagaggcca

SEQ ID NO: 213453 - DNA, 394 bp, Homo sapiens
  chr10:11731855-11732249
  hypo
cagtgattttctttgctggacatgaccatgttttgctgaatgatttcggctttggggagagagagagctgtgctctggcgttatttactcttgagaaaatacaggcgcatggatacagcagccagcgttgcctggtagaatgtgggcagcagcaggctggggggttgcctcgtggttctggaggagcgagcggctcagccatccacacaactccttcaccagcctttcctcacccgcctggagatagccttggacttcgccctcagccagagccagaagatacaggcccaggtttcagtggaatttacactggagaataagaagtccctctatttcttctagaagcctccgccctgaccgctaatctctcgccgcacactcaacccacaggaat

SEQ ID NO: 213454 - DNA, 193 bp, Homo sapiens
  chr10:11870932-11871125
  hypo
acaccagctggagaacgtagcatttgagctgggccaacaagggcagcatagggggcaatttaggccaacatggtggaattgaggagtcagttattatgccgcaaggggttagccttccagtcgggggcatggaccagcgaagctttctgagtaggttgcagtggcagatcttgtttcccggctctcctgtgga

SEQ ID NO: 213455 - DNA, 150 bp, Homo sapiens
  chr10:11894859-11895009
  hypo
cggccactcaagctgatgtttcactcctgtgcaagtaaagatgcttttgtatccttctcagaatccagacctttgcatagctttgggaactttacaaaaagagttggtgaagttaagaggatctcgtgccttccccggtgaggacattca

SEQ ID NO: 213456 - DNA, 46 bp, Homo sapiens
  chr10:11898439-11898485
  hypo
gctgctcggaaagggcggagagctctgcactcgcatggttctcaag

SEQ ID NO: 213457 - DNA, 103 bp, Homo sapiens; identical to SEQ ID NO: 201982
  chr10:12390722-12390825
  hypo

SEQ ID NO: 213458 - DNA, 875 bp, Homo sapiens; identical to SEQ ID NO: 201983
  chr10:12390995-12391870
  hypo

SEQ ID NO: 213459 - DNA, 338 bp, Homo sapiens; identical to SEQ ID NO: 201984
  chr10:12392327-12392665
  hypo

SEQ ID NO: 213460 - DNA, 37 bp, Homo sapiens
  chr10:12602247-12602284
  hypo
caatagaaattcatcgattggggtccgggcgcggtgg

SEQ ID NO: 213461 - DNA, 42 bp, Homo sapiens
  chr10:12671580-12671622
  hypo
cctgattatagtcatcgcagacaaggacgtgttctccacctg

SEQ ID NO: 213462 - DNA, 177 bp, Homo sapiens
  chr10:12707812-12707989
  hypo
ctcctgggagctggttggaaatgcagccttcgaggccccaagcaaacctgctgacgcagggcctgcagtggggccagacccccaggcgattcatctgcacgttgaagtttgagcagcgctggtctaacacagtatttctcaagctctagtttacacgtgtagattatctgagcatct

SEQ ID NO: 213463 - DNA, 34 bp, Homo sapiens
  chr10:13146884-13146918
  hypo
caggaccgggaggcgagtcggccagaaagaggtg

SEQ ID NO: 213464 - DNA, 37 bp, Homo sapiens
  chr10:13150491-13150528
  hypo
atgatgtcataccctcgtctccctcccccatttccca

SEQ ID NO: 213465 - DNA, 201 bp, Homo sapiens
  chr10:13263527-13263728
  hypo
cacatatatatatatatgttatgacccagcgtttcatgtccagaaatcgatcacactgatagacgactgggtgagtcaactctagcatattcggtggcatatgggacatattgagaagagtgagcaatgctcctcaagttcaagctttcaaacacccaagtcagcaagaatcacatcatcgctcagggaagacagcatgac

SEQ ID NO: 213466 - DNA, 241 bp, Homo sapiens; identical to SEQ ID NO: 201985
  chr10:13341387-13341628
  hypo

SEQ ID NO: 213467 - DNA, 170 bp, Homo sapiens
  chr10:13692405-13692575
  hypo
gcatgagcatgaactcgtgtatgtattcgtgtatgtatgtaggtatttcaagcagtgcctacattcccaccgcagctctttcaaacctggttaattctacttctggctgtcagccctatctccatcacctttagcagatgatcgccctcccataccgggggagaaaaagg

SEQ ID NO: 213468 - DNA, 93 bp, Homo sapiens
  chr10:13711293-13711386
  hypo
tcaagtgatctgcgcactctggcctcccaaagtgctgggattttgcagcgaaaggcgtgggccaccacgcccggccacatgagctttagtttt

SEQ ID NO: 213469 - DNA, 180 bp, Homo sapiens
  chr10:13735188-13735368
  hypo
aacatttccaaaccacggctgcctcccttcctctctgcttctttcaaacccactcctcctcctgccatttcagtaaatgacacccccctttttaagtcagtcagatccaggaccttggaactcctctgtccctcccaacatcaaaagacaaaatgacttggccaaggctggcggaagcgg

SEQ ID NO: 213470 - DNA, 95 bp, Homo sapiens
  chr10:13739454-13739549
  hypo
tttctagaatggaaaatatcacagcgacctaacagactcggtggggagaggaccgggaggacatgggcattgtcggggagagtctctctttgcaa

SEQ ID NO: 213471 - DNA, 289 bp, Homo sapiens
  chr10:13771117-13771406
  hypo
gcctggtctctagacgcatggaaagcgttcaggtccactcagactgtgctgcgatctgaaagaatgataacatacgagaaggccctttggtcctacactgtgaatgagtaaggggcagctgcaaaatgctaagaatgctgagtgcattaagtgaagtgtttctcccaggtgtgcacagggtgtggcttccaaggggaatgtggatgctggaatgagggaggcagccacctaggccggtcaagtcagaggcccagcaaggagaaagcgagccaaggcaaacgccgacaga

SEQ ID NO: 213472 - DNA, 141 bp, Homo sapiens
  chr10:13771447-13771588
  hypo
cgcaccgcataatttagcggggcaatgccgccgggagtccacgccaagttaatggaatatttcctgtaaatattattttcccttcctgtctcatcatctcatttcattcaaaaatctttactaatccgggggagtgaaagt

SEQ ID NO: 213473 - DNA, 190 bp, Homo sapiens; identical to SEQ ID NO: 201987
  chr10:13933246-13933436
  hypo

SEQ ID NO: 213474 - DNA, 160 bp, Homo sapiens
  chr10:14626301-14626461
  hypo
gccaaccagatatggaaaaacgcagtgtataaccaagtgaccaggggaaaaccccaaggtggaaaaggacctccgaggtccagctgccgatgagaattatgctttcgcaccccatggccctcggcactcagagtctttcgctccattttcaccataaaca

SEQ ID NO: 213475 - DNA, 435 bp, Homo sapiens
  chr10:14816084-14816519
  hypo
tctgagaatctacacggctttaacacacttcttcgcactagtgagaacgcccgcaatgccttattcagtaaggttaaatgagtttgtttgctgaaacattcgccacatgatcccaacgctcctccagctccatcccgtctataatcgcagagcgaacactcactcaccttgggcgtgtcaataattgatggtctggggatggaagcgtgaaacaccactgcttcacagtccgccccatcatccagggacccgggcacatcttcaggcgtctccgcgggctgggccgcagtgcggtgacttgaattccgattcgcactgccatttctctctgcatgggtgctcgaatcttgccttttctctggagctccttctgcgcttgggtgtcttggctgtctgcctgctttggccacaggctgcacacggacggtggaatga

SEQ ID NO: 213476 - DNA, 36 bp, Homo sapiens
  chr10:14851282-14851318
  hypo
cgcgagccacggcccggcctgactaaggtagtcttt

SEQ ID NO: 213477 - DNA, 36 bp, Homo sapiens
  chr10:14966552-14966588
  hypo
ataaaatcatccaggccaggcgtggtggctcacacc

SEQ ID NO: 213478 - DNA, 60 bp, Homo sapiens
  chr10:15345843-15345903
  hypo
aaaggagttaggaatacaagcgtgggcagaaaagttcacgtatgaaagagattaagtcaa

SEQ ID NO: 213479 - DNA, 44 bp, Homo sapiens
  chr10:15484068-15484112
  hypo
atcccgtctcaaaaataaaacgaaacaaaacaaaattctggctt

SEQ ID NO: 213480 - DNA, 226 bp, Homo sapiens
  chr10:15484142-15484368
  hypo
tttctagcgtcatggctccacactgcgtttccttatctgggaatcccagccttactgaactttcagcttctgcagccagccacgctctttctggcctccggctttgctgtgtgctgtttctccagcctggcgatttgctctgtccccagcccctgcactcctttacctgatctgctccgattgatcctgcagtcctccgcggctgagtcacttccttctgcaggga

SEQ ID NO: 213481 - DNA, 141 bp, Homo sapiens; identical to SEQ ID NO: 201990
  chr10:15762154-15762295
  hypo

SEQ ID NO: 213482 - DNA, 167 bp, Homo sapiens
  chr10:16715632-16715799
  hypo
tgttcaacaggtcaggctccatctcaaatgacgcaggtggaaggatgagcaacggcacagcctcctgcagcacacagatgcttctcaatggggctgatcaggagacctctggcacccaaagactgcgtgatgactgagggactctttatgctcgcttctgcctaggt

SEQ ID NO: 213483 - DNA, 322 bp, Homo sapiens
  chr10:16769206-16769528
  hypo
gagtgacgatgttccgcctggctgcatcttttgttataatttcacagaggagataacttgattggaggcaaatggacacaaatcctcccaaagcacccaattcaacttttatatcaaacttaaaaaacatgctaccttttctgagataaatacgtgtttctggcaaattcacgaccacagtgaaggccaattaaagttcaaacagaagctggcagaaatttcatttccctcagaaacagcagaaggctgttcaatcatggattgccgctaccaatatgcaagtattactgatcacgcgaggtaacaacggctggaatttcaa

SEQ ID NO: 213484 - DNA, 149 bp, Homo sapiens
  chr10:17157465-17157614
  hypo
ccacctctccagcttgctctcgcattaaatcctcacagatgccatggacacagcgtgccacagaacccccttcacagtcgtcatatttggatgcacactggggtccgtacgtctcaggtgggcagtgacaactgttggttacacaagag

SEQ ID NO: 213485 - DNA, 93 bp, Homo sapiens
  chr10:17157644-17157737
  hypo
gtgcctgtctcttaatatcaatgagaaaaataattcaaattacaaatcaacgatgttaacttggaatcgtcagccagcaatgcaaatttactg

SEQ ID NO: 213486 - DNA, 208 bp, Homo sapiens; identical to SEQ ID NO: 201993
  chr10:17270445-17270653
  hypo

SEQ ID NO: 213487 - DNA, 272 bp, Homo sapiens; identical to SEQ ID NO: 201995
  chr10:17495120-17495392
  hypo

SEQ ID NO: 213488 - DNA, 322 bp, Homo sapiens; identical to SEQ ID NO: 201996
  chr10:17495680-17496002
  hypo

SEQ ID NO: 213489 - DNA, 81 bp, Homo sapiens
  chr10:17509666-17509747
  hypo
ttacaagcgtgagccaccgtgcctggcctttggagagcattttcttacactcttacattcgctgaattacttaggatggct

SEQ ID NO: 213490 - DNA, 203 bp, Homo sapiens; identical to SEQ ID NO: 202007
  chr10:21785547-21785750
  hypo

SEQ ID NO: 213491 - DNA, 43 bp, Homo sapiens; identical to SEQ ID NO: 202008
  chr10:21785786-21785829
  hypo

SEQ ID NO: 213492 - DNA, 465 bp, Homo sapiens
  chr10:21797635-21798100
  hypo
agcctgctctgccccgcagaccctgcggtctccaggcccggtaggctttttcaggttccgcaggcctggccgaaccggccagatcccgcgttccaagcgtctggagaactggagacaaagcccaagatccaatcccaccgcagagcggctcaagccggcgcccgggacccgcgggcctaggcgcgacccccagcagcctgtgaccgaagaggggagcccgggacccctccgcctctccgcagccctctcgggcggggtcccccaggcccgcccggttccccctgccgcactcagccagctgcttttggaggcctgcgagttccaaacacgccttcccattaattaaaacctggaaagcctggccactttcttctcaggccgaggcagcatctccagaggtccccgcggcactctcggccggcaacggctcccgcgcggggccttggaggccgagcggccatttac

SEQ ID NO: 213493 - DNA, 168 bp, Homo sapiens
  chr10:21915224-21915392
  hypo
caggggctggtggctgggcccgtgagaaccagtgcaaggcattttgaaaatgactagaaatctcgcacgcgtgccaccccccaagtctatgattcttatgtttacatggcaaagaagctgaaggggaagcaggtacgtgtgcagaacgggagaccaaacatgagaggc

SEQ ID NO: 213494 - DNA, 312 bp, Homo sapiens
  chr10:22042721-22043033
  hypo
aaaaacaaaaaaagcgtaaactgaagaggaaagggagaaagtggttgggttggttctcatgagcaagacggcaagaacagaaaagcaagcacgggctacctgtggcggctgggcacggcatggggaggcctcctcagtgggcagggtgaggtggcttgggaggacacgggtctgggagtgggagaggagaaggggcacggtggggctgtcacgtggctggtggatgtgccacgtccccacatgcattcagcacattccctctcgaggatcctcgctctcctgctgtgacccggggtggcagctgtcatctgt

SEQ ID NO: 213495 - DNA, 77 bp, Homo sapiens; identical to SEQ ID NO: 202012
  chr10:22540630-22540707
  hypo

SEQ ID NO: 213496 - DNA, 163 bp, Homo sapiens
  chr10:22869773-22869936
  hypo
gttgtccctttctgcgatggtaatgtctcgctttacagactcgacaggtgcagtgctctaatgcggcccgggaggctcctttgtagaatggatgagtctgccaactcctgtctgcagacactttgaagtcccaaggcagatgaggctgcaaatggaccaaaca

SEQ ID NO: 213497 - DNA, 130 bp, Homo sapiens; identical to SEQ ID NO: 202014
  chr10:23002068-23002198
  hypo

SEQ ID NO: 213498 - DNA, 260 bp, Homo sapiens; identical to SEQ ID NO: 202015
  chr10:23002228-23002488
  hypo

SEQ ID NO: 213499 - DNA, 264 bp, Homo sapiens
  chr10:24863017-24863281
  hypo
gatccactgtgcaaggctctcgtttagagattcctgcgtgtttcaaggggatgtggaagccgggctgtgtccagtctgtggtaagaggaaagcatatagaagcccatgccccctgcgtgtgcacgcagtggctagagtttgcgttaaaccacttcatctagtcccgtggccacacctagctgtgaaggaggctgagaagtgtggtctctaagaagcagtactgggaaataaccgggactctgcgtcacaatctgtttactgcac

SEQ ID NO: 213500 - DNA, 87 bp, Homo sapiens
  chr10:24908462-24908549
  hypo
ctccattctttttatgtggacctctcgacgtgcatcattgggcagccagcaggtagtgtctgacccggtctcctggtcatttactgc

SEQ ID NO: 213501 - DNA, 96 bp, Homo sapiens
  chr10:24988619-24988715
  hypo
atcaagcacccagactttggagtctcactccctgggcctgcgtgctgctctgcaccttcttagctatgtggccccgacaagagacttaagcccttg

SEQ ID NO: 213502 - DNA, 164 bp, Homo sapiens; identical to SEQ ID NO: 202016
  chr10:25012546-25012710
  hypo

SEQ ID NO: 213503 - DNA, 33 bp, Homo sapiens
  chr10:25097337-25097370
  hypo
attacaggcatgagccaccgtgtctggcctcat

SEQ ID NO: 213504 - DNA, 627 bp, Homo sapiens; identical to SEQ ID NO: 202018
  chr10:25463893-25464520
  hypo

SEQ ID NO: 213505 - DNA, 275 bp, Homo sapiens
  chr10:27020878-27021153
  hypo
cccagcccttcccagtctcgttgagacgtggcttgtaaggatgtgatgcaaggtgtgaaccttccccagaaagaagtgcatacgcacagcacagcctggctgcagcatctgcttcaaacaaaacagtcagccgagctccactttctttgacttaatcattcttcatgctccacccatttccggaaagatgtgaggcatccctctgatgctgagcgcaagtctgtgcacctctttgccttcttgtatgttgtgctatgttgcgtccaatttgtggc

SEQ ID NO: 213506 - DNA, 89 bp, Homo sapiens
  chr10:27089296-27089385
  hypo
gagtgagactgtgtctcaaaaacaaaaacaaaactcctgaatctaatcacaaggaagcattacacatacccatacggagacacattcta

SEQ ID NO: 213507 - DNA, 36 bp, Homo sapiens
  chr10:27096989-27097025
  hypo
cagcctgggcgtcacgagactctgttcaaaaaaaca

SEQ ID NO: 213508 - DNA, 77 bp, Homo sapiens
  chr10:27144551-27144628
  hypo
cccttctctattaccctctgcgcacattgtttttatcccctatgttgccataagaaccctgtttagggccgggtgcg

SEQ ID NO: 213509 - DNA, 200 bp, Homo sapiens
  chr10:27233491-27233691
  hypo
gcccgccccacctttcatttattagtacccggtagcaactttcaggtttccttactgtgaattatgaatatgaattatgcggaaattactgtataccaatgtacctcgcgcactatctgacattcaaagacccaccttgccccatcgcctctgatttttttggaaactagaaaaaagacaaggttcggcagctgttttca

SEQ ID NO: 213510 - DNA, 102 bp, Homo sapiens
  chr10:27478219-27478321
  hypo
tgctgggattacaggcgtgagccacccggccagctatatacagtttgtattaataaaaaataatttgtggctgggcatagtggctcacgcctttatttccag

SEQ ID NO: 213511 - DNA, 31 bp, Homo sapiens
  chr10:27846958-27846989
  hypo
gcgatacaccgtctcaaacaaacaaacaaaa

SEQ ID NO: 213512 - DNA, 60 bp, Homo sapiens
  chr10:27978843-27978903
  hypo
acagctcttgctaaccggaagcatctgattatgttcctttcctattaatctattaaatac

SEQ ID NO: 213513 - DNA, 59 bp, Homo sapiens
  chr10:28824511-28824570
  hypo
agtcaccccagtagcggtgatcacagacatgaaaagatgcgagacgccggagatccttc

SEQ ID NO: 213514 - DNA, 258 bp, Homo sapiens; identical to SEQ ID NO: 202028
  chr10:28966043-28966301
  hypo

SEQ ID NO: 213515 - DNA, 239 bp, Homo sapiens; identical to SEQ ID NO: 202029
  chr10:28966598-28966837
  hypo

SEQ ID NO: 213516 - DNA, 86 bp, Homo sapiens
  chr10:29300155-29300241
  hypo
gttcccacaatgacaaaatcacctaatgatgacgttctcagaatgtgtctgtcgttaagcaacacgtgtatatgtatttaaatttt

SEQ ID NO: 213517 - DNA, 228 bp, Homo sapiens
  chr10:29311385-29311613
  hypo
gttttcttgggacttaaaaacgctgaatgtggcagctcaattctttttgctgtcgaaaatagtttaaatattttatttctcttttaatttgctgttttctctaacccccaccacagagatatgtgtgcacgcgtgccacacacacacgcacatgtctgagccccattttgacactggccccgagcttcagcctgtgttgtgttttacggtctgactggttgcacagaa

SEQ ID NO: 213518 - DNA, 78 bp, Homo sapiens; identical to SEQ ID NO: 202031
  chr10:29738055-29738133
  hypo

SEQ ID NO: 213519 - DNA, 734 bp, Homo sapiens; identical to SEQ ID NO: 202032
  chr10:30024793-30025527
  hypo

SEQ ID NO: 213520 - DNA, 34 bp, Homo sapiens
  chr10:30981747-30981781
  hypo
attgggagatcgcttcgctcggtctgctcaccga

SEQ ID NO: 213521 - DNA, 287 bp, Homo sapiens
  chr10:31108014-31108301
  hypo
cagagtggccccaccgctccacccactctgggtaactcatgggcacaccctggaaaccagaaaaacagtggagctctgcctgtccccgaaggaaagaattacattgccgcaagcaatttggaaaggagcaaggagcttggaaactcggagcaagcggaatcatctcctaccgccccgcttctgctcggctcagggcgcacgatgaaaaggctgaatttgtcacatttccccacactcagtcccaaacaggctatcccagtcgtctctccctccggaggagacccctt

SEQ ID NO: 213522 - DNA, 526 bp, Homo sapiens; identical to SEQ ID NO: 202036
  chr10:31608218-31608744
  hypo

SEQ ID NO: 213523 - DNA, 252 bp, Homo sapiens; identical to SEQ ID NO: 202037
  chr10:31609416-31609668
  hypo

SEQ ID NO: 213524 - DNA, 155 bp, Homo sapiens
  chr10:32205149-32205304
  hypo
acctactgcctgctacaccccgatgctgctcttagcagtctcaaaaacgcccatacaagcttttcatgcctcttaccagtcttcttcctcctccctttttccacgtttcaacaaccaccacccccgacacacacgcctgcttatatattttactt

SEQ ID NO: 213525 - DNA, 36 bp, Homo sapiens
  chr10:32333609-32333645
  hypo
aaaaaaaaaaaaagaagacaacgacagaggacacaa

SEQ ID NO: 213526 - DNA, 40 bp, Homo sapiens
  chr10:33293520-33293560
  hypo
tagagacagagtttcactctcgccactgaggctggagtgc

SEQ ID NO: 213527 - DNA, 43 bp, Homo sapiens
  chr10:34063092-34063135
  hypo
tagcaggcagacacaagtagctggacatcgtgaggaacacatc

SEQ ID NO: 213528 - DNA, 182 bp, Homo sapiens
  chr10:34276837-34277019
  hypo
tcacatcctcactcccgctattttagcttcaagtgtcctagaacctagcagtccaaaccaagacctgtggctctgccattcggacctttgcctttgggtgttagttaactgagtacgctcctgtaccgacaagatgcagcctcctgagcccttttccatccccatcccgtataactaacact

SEQ ID NO: 213529 - DNA, 93 bp, Homo sapiens
  chr10:35043969-35044062
  hypo
aggcagagtgagccaaaaatcgacattttcaatgaggcaaaggatgactgacagcttcaagaagaattgctgggccgaggctgggcgcggtgg

SEQ ID NO: 213530 - DNA, 544 bp, Homo sapiens; identical to SEQ ID NO: 202046
  chr10:35103534-35104078
  hypo

SEQ ID NO: 213531 - DNA, 81 bp, Homo sapiens
  chr10:35254596-35254677
  hypo
cctctgcttgctgacgtgacctgaagttgtctgagaattacggcgtgttgaaaacagacgagggcattgtctgcaggggct

SEQ ID NO: 213532 - DNA, 122 bp, Homo sapiens
  chr10:35503793-35503915
  hypo
ctttgcaggggggaacgttgcacatctcgcacacccttgcgcgtgggatccacagcgctcccacacccgtgcgcgtgggatccggagctccccgcacacccgtgcgcgtgggatccacagct

SEQ ID NO: 213533 - DNA, 34 bp, Homo sapiens
  chr10:35621534-35621568
  hypo
catctgagttttttttgagacggagtcttgctct

SEQ ID NO: 213534 - DNA, 198 bp, Homo sapiens
  chr10:36639323-36639521
  hypo
actgtataccaggaacggctaggctctgtttaggttctgtgacaacttagagaataaaaccccacccctatctttaaggtgtccacagtgagtgtgggaaacacccacataaagagtcaataatgcaaccatatagcagttcattgaggtgggcgttagtgacagagtctcgctctgccacctaggctagagtgcagt

SEQ ID NO: 213535 - DNA, 42 bp, Homo sapiens
  chr10:36930096-36930138
  hypo
aaatgaatattcaacaaatacgcaatgaggtgatccattgtt

SEQ ID NO: 213536 - DNA, 34 bp, Homo sapiens
  chr10:43131976-43132010
  hypo
tattgactcttggccaggcacggtggctcacact

SEQ ID NO: 213537 - DNA, 78 bp, Homo sapiens
  chr10:43605297-43605375
  hypo
ccagtgttgcacatcgtggtgttctttctgggatgtttctcgtaagcacttattaagttgacttgaaactgcagcacg

SEQ ID NO: 213538 - DNA, 77 bp, Homo sapiens
  chr10:43605405-43605482
  hypo
agcagcccgtggcgcctcctcttcaggggccatctgccagttctttcgggtggttctgtgcccgcatcagctcctgg

SEQ ID NO: 213539 - DNA, 37 bp, Homo sapiens
  chr10:43906027-43906064
  hypo
gccatccgcccacctacgcctcccagagtgttgggat

SEQ ID NO: 213540 - DNA, 272 bp, Homo sapiens
  chr10:44163388-44163660
  hypo
cgagtggggtgggccgcgagcgggaggaacacgcacgtcccggggcggccggaggggccccgcttgcgcagggggttgtcagaagactcgcacgcggcaggaggcctggccgtgggtgcagagttcccagtaggacgcccacgaaaaaaacctaactcccattatgttctgtaattctagtctagcccctatttcatgcttgatagagagcagtcgaccccttcttggtgaattctgccaagttagtcacttctcagtcatgttaattaatt

SEQ ID NO: 213541 - DNA, 91 bp, Homo sapiens
  chr10:44163720-44163811
  hypo
tcactgcagcctccgcacctccgactccagcgatcagattcgcctgggttgtccagctttcaagtccaccggggtccccatggaacttctg

SEQ ID NO: 213542 - DNA, 331 bp, Homo sapiens
  chr10:44198241-44198572
  hypo
acggtggcagttttttctgtcaaggactcactttctagggaagaaggagggtggtgggcagcgcgaggccaggaggctggcgtgggcttgccggtaggcgcttctgagctgggtgggctcgccttctcgcccttcctcctctttccttccttgtttcccctaatgacccgggcacttattctagcccagctctggcctcgcgtcactacgctctgcaataggaggacggtagggtccttggccatgctggctcgcctggtcacggcgactcccacgcacgcccggactcctggtgctggtgctcgctcagcaggcgcggctgggggcggct

SEQ ID NO: 213543 - DNA, 303 bp, Homo sapiens
  chr10:44874108-44874411
  hypo
tcctgaatccactttagcttcgggtcaatgcacacttgtctgttgttgttcttcagccgggctctgtgaaaacagaatggcaacagtgtgcggctgcacaggaggaaggcgcggctgcaacgtgtgcatccgctcccccaacacccatctagggccctcgctggcaccccgtgctccacttggtacgctcaggctccagaggtgctcgcggtgtgctggggaaagctcagcgctggcagtgcaggaagttccattgcagagacatggaaatgtgaacagaagtctttccggggcagtgcaggg

SEQ ID NO: 213544 - DNA, 120 bp, Homo sapiens
  chr10:46009889-46010009
  hypo
agctgccaccctacagctgccagcagcagcacatggctggctgtcgcagctggacttgtgagggcttgctgaagccctcagcataccactcctgccatcaaactggactacttcctccag

SEQ ID NO: 213545 - DNA, 31 bp, Homo sapiens
  chr10:46195657-46195688
  hypo
ctgccccgacgagtgcgtgtagttctgtttt

SEQ ID NO: 213546 - DNA, 50 bp, Homo sapiens; identical to SEQ ID NO: 202066
  chr10:49514479-49514529
  hypo

SEQ ID NO: 213547 - DNA, 130 bp, Homo sapiens
  chr10:49541833-49541963
  hypo
cgttgggtcagcaacggccagaggaaatcctaaggccaaacagtatctgtggcctccctacctttgggcatcttctggtcgccaatttgctgcaagtcacagctcccaaatctggttgtgcaggctccaa

SEQ ID NO: 213548 - DNA, 106 bp, Homo sapiens
  chr10:49541993-49542099
  hypo
cacctcctggatctcagagctgctggatggctccacccaccacccgctgagctggccccacttggggctggcattggtggacagcatgttccgggcgcctctgctc

SEQ ID NO: 213549 - DNA, 40 bp, Homo sapiens
  chr10:49592262-49592302
  hypo
ccagcctgggcgacagagcgagacagtctcaaaaaataaa

SEQ ID NO: 213550 - DNA, 86 bp, Homo sapiens
  chr10:50340033-50340119
  hypo
ttggaagccatttcgaaggaggagccgttccacctctgcctcttgatgaactgggcttcatggatgcggggcttcctggtgaccgg

SEQ ID NO: 213551 - DNA, 39 bp, Homo sapiens
  chr10:50340149-50340188
  hypo
agccacaccccgcacagtctgcacgtgcgtgtagaaggc

SEQ ID NO: 213552 - DNA, 115 bp, Homo sapiens; identical to SEQ ID NO: 202069
  chr10:50606762-50606877
  hypo

SEQ ID NO: 213553 - DNA, 193 bp, Homo sapiens
  chr10:50724153-50724346
  hypo
ctaaactgaaggacaagtgacgcaccgacaccatattcctcatgtttagtatttgggtttttaccctgatacggctgaaaccagcaaatgtagcccagacaggtggcaccacaccaaaacttatagccaaaccgaatgggctttccccgaataaattgtttgcacccgtgacgaccaaaataaggaaccatga

SEQ ID NO: 213554 - DNA, 87 bp, Homo sapiens; identical to SEQ ID NO: 202072
  chr10:50969809-50969896
  hypo

SEQ ID NO: 213555 - DNA, 194 bp, Homo sapiens; identical to SEQ ID NO: 202073
  chr10:50970412-50970606
  hypo

SEQ ID NO: 213556 - DNA, 31 bp, Homo sapiens; identical to SEQ ID NO: 202074
  chr10:52177704-52177735
  hypo

SEQ ID NO: 213557 - DNA, 209 bp, Homo sapiens
  chr10:52180040-52180249
  hypo
ttcactaccaataggcgtaacatgaaggcttctttcatatctggaccattttttccattcctggttcaggcattcgtcccctctgcctgagtcactgaggttgagtgtcttctagccgctgttccagcaggcgggcccctccctctatgcctctcaacacatcatcatcatcatcacatgacaaatgtcaaagtcgagcatgccatcat

SEQ ID NO: 213558 - DNA, 126 bp, Homo sapiens
  chr10:52369822-52369948
  hypo
cattgtagcatcatacgcacctccccgcctttgcttccactaagtcaaatggtcttccagtgatgccagcggtatcattttgtttcccatcccacccgtaagacacagaaacgtcaagccgcacag

SEQ ID NO: 213559 - DNA, 111 bp, Homo sapiens; identical to SEQ ID NO: 202078
  chr10:52833457-52833568
  hypo

SEQ ID NO: 213560 - DNA, 289 bp, Homo sapiens
  chr10:59866613-59866902
  hypo
ggcactggacaggagggccccgggagtgtggtcacccaggcggaggttcggcggccagcgaggagcgaggtgcgcatctttctacgggggctcagcccaccgaagctctcatccgtcaatgggcgggttcgttcagcaagcagccactgcgaagtcttcggaaggggtttgcgggagagaagacgggtcatgatcttggagccataagtcctgcccgccctgggctctggtttccgtggcaggcaggaatcagcagtgcctggtcttcggaaaaacccaacctggcttc

SEQ ID NO: 213561 - DNA, 146 bp, Homo sapiens
  chr10:61552612-61552758
  hypo
ggcgttgagtagacggctccattggatgagtcccaacttgaaattcagactaagctcatgcattaaggctgggaggaggggtgcgccgaatgttgcgaaggagtaggctgcgaggtggctgctgaggggaccgtgggctgcatggg

SEQ ID NO: 213562 - DNA, 180 bp, Homo sapiens; identical to SEQ ID NO: 202090
  chr10:62703652-62703832
  hypo

SEQ ID NO: 213563 - DNA, 43 bp, Homo sapiens
  chr10:63669383-63669426
  hypo
ttcagtgagtattttctgagtgactgaacgacataattaaaat

SEQ ID NO: 213564 - DNA, 41 bp, Homo sapiens
  chr10:63757869-63757910
  hypo
ctaaacatctccatccgtggaaaagccgccagcctgaggaa

SEQ ID NO: 213565 - DNA, 103 bp, Homo sapiens
  chr10:64945157-64945260
  hypo
ctgggattataggcgtgagccactatgacgctcagcctcaagttatttatttttaattgagaaagaaaaagcctacaggtcacatttacggttacttatccta

SEQ ID NO: 213566 - DNA, 120 bp, Homo sapiens
  chr10:69853849-69853969
  hypo
atttggtggattttggctggcttcttgaccatatcctgttttatcagcagtatctttacgatctatatcttgtgaaaccaatcctgcccgccttctgtctcatcctgtgactaagaatgc

SEQ ID NO: 213567 - DNA, 439 bp, Homo sapiens
  chr10:70184274-70184713
  hypo
aaacaaaacaggcctgaggccgccgctagccggagcatcaccatgaagttcaatcccttcgtgaacttggaccgcagcaaaaaccgcaaacgtcacttccatgcccccttgcacgtgcaccggaagatcatgtcatccccgctctccaaggagctgcggcagaagtacaatgtccgctccacacccatccgcaaggacgacgaggtccaggtagttcaaggacactacaaaggtcagcaaattggcaaggtagtccaggtgtacagaaagaaagatgtcatctacactgagcaggtgcagcgtgagtaggccaacagcacaaccgtccacgtgggtactcacccaaacaaggtggttatcaccaggctaaatctcaacaaggatcggaaaaaaattattgaacacaaagccaagtctcgacaagtcagaaaagagaaag

SEQ ID NO: 213568 - DNA, 168 bp, Homo sapiens
  chr10:70218971-70219139
  hypo
tgacttagatttaagcggtacctgccaaaaatataatagtaaatagacttagacttaagcggtacctgccaaaaatatgatagcgaatatgaaagtataaatatgagaaaagtaaacgaggacaaaaaaatacatataagcaacccaactgttcgtcagccaataaat

SEQ ID NO: 213569 - DNA, 34 bp, Homo sapiens
  chr10:70266166-70266200
  hypo
tgtaccccagcctgggcagcgagactctgtctca

SEQ ID NO: 213570 - DNA, 112 bp, Homo sapiens
  chr10:70483199-70483311
  hypo
taataccttagattaacttttaattgatttaattctgttagagtttagctactcattcattacaatatactgtatttggcatgttaagttgtcagtattaatgagttatgtt

SEQ ID NO: 213571 - DNA, 1257 bp, Homo sapiens; identical to SEQ ID NO: 202102
  chr10:71078140-71079397
  hypo

SEQ ID NO: 213572 - DNA, 72 bp, Homo sapiens
  chr10:71144613-71144685
  hypo
caggatgcctctgggcttcacgttctcatttccctgccagcagacgagtctggacgcggtgagtctctgttc

SEQ ID NO: 213573 - DNA, 50 bp, Homo sapiens
  chr10:71174693-71174743
  hypo
gccttacaggaggagcgtcttgcccccgctgtcttcgggccaggccacca

SEQ ID NO: 213574 - DNA, 190 bp, Homo sapiens
  chr10:71245588-71245778
  hypo
cctgggccaaaaaggcgatttgatgtatattttggaggcagtaccatcagaggctgttatgccggctagaggagtgaggagaggggcaggttgacagggtgatgcctggcatcctggccctggcagggtttgcagaatccgggccccttagagccagaaaggttctcgtggctcccggctccagctcctt

SEQ ID NO: 213575 - DNA, 166 bp, Homo sapiens
  chr10:71639773-71639939
  hypo
ccagatgggtatttgcggagggggagctggaaagcatcctgggctgggccggggagagactcaggcctgggcagccttgctaagtctcccctctctccctgtgtctccctgtttcccgccactccaatggatcctgttcttctcgcttccccggcctggggtccca

SEQ ID NO: 213576 - DNA, 53 bp, Homo sapiens
  chr10:71871350-71871403
  hypo
cctcgctgaagaacgtgtacttcctgctcttcgacagcgagagcatcggcatc

SEQ ID NO: 213577 - DNA, 301 bp, Homo sapiens; identical to SEQ ID NO: 202112
  chr10:72238283-72238584
  hypo

SEQ ID NO: 213578 - DNA, 185 bp, Homo sapiens
  chr10:72288400-72288585
  hypo
gggtacaggctaggccgctgtcataaagtaacccagataagatgccttcctcaggacgaagctcatctcttacatgcaagtccacgaggacatccaggctgggatggctgctccgtgatcatccaggccccttctccctcattgctccaacatcatcaacatgtggcttccgtcttatgatctaa

SEQ ID NO: 213579 - DNA, 223 bp, Homo sapiens
  chr10:72442676-72442899
  hypo
tgacccagcactgggcctgccggacaaccgtctgggtgaggaggcataaactcctgtagttagatgaggggacagcatttgtcgtcctctccgtggctatctggccatctgctcctaggccagaggtggtgactgctgaggcacgcacactgccatttgccctcctgcgccctggcaggccctgcaggcccgctgtggcacgctgtccctgggcctcagaccc

SEQ ID NO: 213580 - DNA, 251 bp, Homo sapiens
  chr10:72765320-72765571
  hypo
gcctatcatgggctaaaactcgagccaagcgccagagtgggacagatgcacaggtccgtcctcagcctcccaagctcccgctcactaagtaaacacctgtgcgtgggctcgtcgctcacctccctaatgagctcatcgctcacccggctctccatcgcgctccatccgtcttcaccttgctgccatggctccactgtgcagctatttttgcacttcccagtaagcattccactgggcgggggagccagtgc

SEQ ID NO: 213581 - DNA, 37 bp, Homo sapiens; identical to SEQ ID NO: 202115
  chr10:73113223-73113260
  hypo

SEQ ID NO: 213582 - DNA, 192 bp, Homo sapiens
  chr10:73288226-73288418
  hypo
cccgtcccttctgcacggctggccttgcagccggcctgcggcagacacagcttttttgtttttggttaaaaagcctcatcggagcgttatgatattggaatgtgaagggtaattgagctgaaagctattctcttcctgcgaccagcgcgataggagtgattgaggtgcccgggcctccgcagcagcctggga

SEQ ID NO: 213583 - DNA, 196 bp, Homo sapiens
  chr10:73445871-73446067
  hypo
gacaataagcttttgtagagcgagccgctgatttagaactaatagcgaatgcagcgccaagatccggggaaatatcaccgctaataagtttctgcctcatgctctgtcactgacattctccacaccgtttcgtgcagccaagcagaagcttaaatgtataagtatatggggcgctcgcacccgcaccagggacagg

SEQ ID NO: 213584 - DNA, 123 bp, Homo sapiens
  chr10:73455053-73455176
  hypo
tggagctggcagaattaatgcgaagattgcccgtgggcatctgagcacttttcccctggcaggccctgccctggcccatctcagctgggtgtgtctcccagcgccccttatggcttcacaggt

SEQ ID NO: 213585 - DNA, 239 bp, Homo sapiens
  chr10:73514960-73515199
  hypo
cgcccagctcctggcgggaagtgcagctgctcccaactctcaaatgaaaaggaattgtgcctgcatcgtgcctttgcgaatcccaggggctgaactgggggctggagcaggtcactcgcaccgtccacccaccccaggcagggaggaatactcacggcggttggaggctgcctgcctttgcttgtagaccaggagcaggatgagggggaggcagaggattcctacgatgcaggcacccg

SEQ ID NO: 213586 - DNA, 53 bp, Homo sapiens
  chr10:73553163-73553216
  hypo
tcaccattctgatcgatgacatcaatgactcccgccccgagttcctcaacccc

SEQ ID NO: 213587 - DNA, 92 bp, Homo sapiens
  chr10:73574841-73574933
  hypo
cgctgctggccaccgacctcaacagcctgcccgaggaagaccagaagggcctgggccgctcgctggagacgctgaccgctgccgaggccact

SEQ ID NO: 213588 - DNA, 407 bp, Homo sapiens
  chr10:73767529-73767936
  hypo
caagaaccgccgctgcggccccctcaacgtgacgctggccgcagaggcctgccgccgcaaggagcacatggccctcaaggcggtgcgcatccggcagctggagttcctgcagccgctggccgaggacccccgcctggacctgcgcgtcatccagctggtgcgcgacccccgggccgtgctggcctcgcgcatggtggccttcgccggcaagtataagacctggaagaagtggctggacgacgagggccaggacggcctgagggaagaggaggtgcagcggctgcggggcaactgcgagagcatccgcctgtccgcggagctggggctgcggcagcccgcctggctgcggggccgctacatgctggtgcgctacgaggacgtggcacgcgggccgctgcagaaggccc

SEQ ID NO: 213589 - DNA, 131 bp, Homo sapiens; identical to SEQ ID NO: 202120
  chr10:73848222-73848353
  hypo

SEQ ID NO: 213590 - DNA, 443 bp, Homo sapiens; identical to SEQ ID NO: 202122
  chr10:74032458-74032901
  hypo

SEQ ID NO: 213591 - DNA, 418 bp, Homo sapiens; identical to SEQ ID NO: 202125
  chr10:74079275-74079693
  hypo

SEQ ID NO: 213592 - DNA, 193 bp, Homo sapiens; identical to SEQ ID NO: 7426
  chr10:74079752-74079945
  hypo

SEQ ID NO: 213593 - DNA, 84 bp, Homo sapiens
  chr10:74518790-74518874
  hypo
tctttatgtctgttccgcaagtctgcatgtagggtaatagtacttctgttcatctgtagcaggacgagccgcagacaaaactcc

SEQ ID NO: 213594 - DNA, 34 bp, Homo sapiens
  chr10:75493101-75493135
  hypo
agggcgcgcagggggcgggcggggtgctgttcgc

SEQ ID NO: 213595 - DNA, 31 bp, Homo sapiens
  chr10:76013804-76013835
  hypo
gtgagacaccgtgcctggcctacactgtcag

SEQ ID NO: 213596 - DNA, 31 bp, Homo sapiens
  chr10:76019176-76019207
  hypo
gatgtgttataaactcgatgtaatcattttt

SEQ ID NO: 213597 - DNA, 34 bp, Homo sapiens
  chr10:76538433-76538467
  hypo
gtacaggcactcttgggcacgacttgacatggct

SEQ ID NO: 213598 - DNA, 273 bp, Homo sapiens
  chr10:76780240-76780513
  hypo
gtttttaccttgtcactactcatattatttctagtggctcctgttctaagctctgggaatgccacagtgaggaatgcccatttattttttctgccctaggctatttgctttctagaagagaaggccaagcagggtctcctgaaaagcctctctccgatctgggccgtctctcctacctggcatattggaagagcgtcatcttggagtatctctaccaccaccatgagaggcacatcagcatcaaggcaattagcagagcgacgggcatgtgcc

SEQ ID NO: 213599 - DNA, 173 bp, Homo sapiens
  chr10:76796613-76796786
  hypo
ctccttcagagtggaaatcacgcagccatcgtgcctggcttagctctcagggaggcaaactccacacctgagcttacctggctgccccatcgtcccattccacagcagacaacaatttgcaaatactttctgctatgactgaaaagcagctcgtgttgctttgactagaaccc

SEQ ID NO: 213600 - DNA, 338 bp, Homo sapiens
  chr10:76797181-76797519
  hypo
aaaagcaatttctattttaaaatactttttataagaagatgactttcctttcagacaaagccaaacgtttaatcacaacatactgcctacacattttaaaatcttttccctcttccttctcaccaaaaaaacaaaaccaaagcaggagacttggtgcagcgtggcatgctcctctgtgacccagagccggggagcccgtccctcccattttgctgagaggctgagcgctcagctctgcccgggggcagctctgggtcctccctgtccccagcacacatggggaagttgaacaagatggtttggaagagtcgagcttcggtttcaccatcccttctctg

SEQ ID NO: 213601 - DNA, 187 bp, Homo sapiens
  chr10:76818035-76818222
  hypo
tgcctgctcccaagcgagcctgggcctgggcacttactcatcgccaatgtagagcttgggccagacctcgttgacgtgggtgtactggggactgcccttccagaagagccgctccagctcaaaggctccaggggtgcagtagtcctcctcctccccttcctcctccatcttcggcgacagcctcttg

SEQ ID NO: 213602 - DNA, 33 bp, Homo sapiens
  chr10:76875399-76875432
  hypo
ctatagaatgtaacatactgcgggcacggtggc

SEQ ID NO: 213603 - DNA, 88 bp, Homo sapiens
  chr10:76968431-76968519
  hypo
atggctattaaagatcacttcgtttcatttgtcattttatagattaaaaaaatgaggtaggccgagcgcggtggctcacacctgtaat

SEQ ID NO: 213604 - DNA, 396 bp, Homo sapiens
  chr10:76998412-76998808
  hypo
atgcatccaggatccgggggcggctgtgatcttgttcccattttccagagcaggaaagctcagagaccaccgcccagaccctgcagccaacagaggaaacgcgcgtacctctcccttgaaccctgggacccagagggaacaggccttcttggctcctctgctgggacgagggcccagctcgagctggcctgagggccctgcgctcaggtggtgccgctgaccgctctctcccttcagcccgggggtccaggttgcagcaggcccccagctcacactgaaactccctcctacagcctggctttaggccggagcggtggaggttgagggggagcgggtggggaggggaggcatgtcaccatctatccccgtcagattaaaaaactaatttgaaaagat

SEQ ID NO: 213605 - DNA, 284 bp, Homo sapiens; identical to SEQ ID NO: 202137
  chr10:77160017-77160301
  hypo

SEQ ID NO: 213606 - DNA, 540 bp, Homo sapiens
  chr10:79601537-79602077
  hypo
aactcaggaggcttctaatccggacaccacgcactctgcagcccctcttcccgggatgctgtaggagaggctgaaagccagccaccggcccacccacctacctgccgcagcgcctccatctcctcattggccgccttcttctcagatgtgctgctcttgagcttggactcggccagctccacttcggtctgcagcttgtccagctcagagatgacctggtcacgctcactcatgatgagcttgtactcgctgtacacagcgtcccgctcctccctgtatttctccgactcctttgctgtcttcacctgcgtggttctcagctcggtcagctctgactgcagcagctccatctcccactgcaggtccttgttctgcgccgtggccttgttcagctcatggtggatcgcctcaaacctggcaagagaggtggcgagatgtgggaagggcgggggccctgcccggtcagtggccggctgcgctgctgcctcccgccagctctactgtgctggacagtcaagcgtgaagtttcaagtgaagtca

SEQ ID NO: 213607 - DNA, 229 bp, Homo sapiens; identical to SEQ ID NO: 202150
  chr10:79686815-79687044
  hypo

SEQ ID NO: 213608 - DNA, 196 bp, Homo sapiens
  chr10:80540448-80540644
  hypo
ctgagcactccatcccggaagtgccagagtgctacgcagggttgggccaccaaaggtttgtcctccaaggagggtccccaagacagaaataactcaggaagccctgtcctgagtgtccctgggtgctgctgcttgggcctgcactgccgcatggtgttggtgtcagccagcggcctgtgagagccctgccaggtca

SEQ ID NO: 213609 - DNA, 115 bp, Homo sapiens; identical to SEQ ID NO: 202151
  chr10:80733746-80733861
  hypo

SEQ ID NO: 213610 - DNA, 63 bp, Homo sapiens
  chr10:80739956-80740019
  hypo
caagagacaggagcacggtttatgcgtactgggacagtcagtgagattcggtgaaggacatga

SEQ ID NO: 213611 - DNA, 115 bp, Homo sapiens; identical to SEQ ID NO: 202152
  chr10:80827233-80827348
  hypo

SEQ ID NO: 213612 - DNA, 264 bp, Homo sapiens; identical to SEQ ID NO: 202153
  chr10:80828532-80828796
  hypo

SEQ ID NO: 213613 - DNA, 75 bp, Homo sapiens
  chr10:80840369-80840444
  hypo
gtgtgatttcttgtttggtgtttggcgatggggctgtgaagctgtgagtttgacgtcagtttatctcctgcaaaa

SEQ ID NO: 213614 - DNA, 38 bp, Homo sapiens
  chr10:80870193-80870231
  hypo
gacttgatgtccatccgtcccaccgaagaagagttcaa

SEQ ID NO: 213615 - DNA, 120 bp, Homo sapiens
  chr10:80900704-80900824
  hypo
gatttttaaatttttgtggagacggggtctcacttcgttgtccgggggtgggttttgaagacagagccaatttagccctgccctgagagggtgtggtgtgcaatggagtacgactcagat

SEQ ID NO: 213616 - DNA, 282 bp, Homo sapiens
  chr10:80921746-80922028
  hypo
cctcatggtcagtgccgggcctctactgtgggtagacccgctgacctcccactttcattgcagcaggatggagctggagtgaggtggaggggccgcaagctgctgaccggcgtgtggaacactggtggtttgcagatcactgaggtaggtgtgccacggggctggcgggaggtggctgggtcggacgcaggtgagtcctcatgagggcaggtgctagccctagcacgctggacctttgactcgggcctcagccctgaggggcaggagcgggcacaagccacc

SEQ ID NO: 213617 - DNA, 332 bp, Homo sapiens
  chr10:80930801-80931133
  hypo
ccatgggtcctcccaccccagccagggcagcccccatggaagctttccagaaatatccacgcacagtgcggtgagctccagaaatgaaaaggctctcacactccctgctccctcccgttttccactcactgctgctcaggggagttaataagcagaggtgaaaaagctggccctgtcctgatgagatctcgtttgaggcagctgggtctgggctaatgccagagaaggaattcttcactgccgggccttcactccaccggggatgaggccagggcctagaacttagggactggcctgggctgtcgctcagaggatgccgggggccagagctt

SEQ ID NO: 213618 - DNA, 258 bp, Homo sapiens
  chr10:80956060-80956318
  hypo
tgttgcaagcccagacactcacccctcggttcctgtgagctgcagccctgcctgggagcaaagcccccctgggacctggacccagcccagtgccccttggccttgaacaaaacactgatgggccccaggctcctcagagtaaaaccagttgaggcagagcgggtagataggggacctgaaagcaccttcggcccttaatattccaggaatctttctgtccagaagccagttcagtccagccgccggcctccagacaag

SEQ ID NO: 213619 - DNA, 32 bp, Homo sapiens
  chr10:80958501-80958533
  hypo
aatttggagccgggcgcagtcgctcacgcctg

SEQ ID NO: 213620 - DNA, 180 bp, Homo sapiens
  chr10:80958773-80958953
  hypo
agcgagactcagtctcaaaaaaaaaaaaattggaaaaagcttcagggtccctcgtttcaggctggagtgtgagcccccagagcagaggggccttgtctgagggctcaagccttagaacagcacctggcagggggcgatgggcagatgttagttggataatgcttcatcatacctaggaat

SEQ ID NO: 213621 - DNA, 209 bp, Homo sapiens
  chr10:80961378-80961587
  hypo
aaacggccagaatgaattctatggacaggcacatccagcagaccaatgaccgactgcagtgcatcaagcaggtgggtgtggggcaaggcacactccgagggcggggcagatggggcgggctgcagcagcagggcatctggtgggttctggctggagacgatggcagggcctcctgaccacctacctatcgaggccgttattggcatgct

SEQ ID NO: 213622 - DNA, 171 bp, Homo sapiens
  chr10:80971586-80971757
  hypo
cgtgggcttagggaacggcggaagacagaggagacagtgggagagcaggtccaggagggaaccgggtttcacatcagcaggcctctccttcatctccccaatgaggacgccctgcagcttcagaggaggtcagagtcagaaagacttttcgggtcccgccccctgccagta

SEQ ID NO: 213623 - DNA, 498 bp, Homo sapiens
  chr10:80974593-80975091
  hypo
tgttcatgaggaaggcgggtgtgagggagcagatctgggagtcatgggacacctgggaatgggtggggacagagtgaagccagagcggcaacagcttgcaaagccacccaagggtcccctggagcgccccgtcccacactgccccccaggggaccgatggccctcccagtctgccgcctctcaccctgccagtccctacttctgagattttaaggagatgggtgggaccttcaggctccaaacacaccattgctgttatggaagccccccatttgctggggcttaaggctagagacagaccccaggctgagcgtgggagtcctgcggtttctagctgaggttgagggggctgcagggtgcttggcacggagcagcattacaatgcctgccccatcccggaagccttagtcgattaagcagctctgacctgaagccctgtgggaagcagcttgttctaaatcaccgctttttttttttttttgagaaggagtcttgctg

SEQ ID NO: 213624 - DNA, 331 bp, Homo sapiens
  chr10:80975738-80976069
  hypo
ctggcacggaagaggtgttcatcagtatttgctgagcaactgaagaaggcacagtggacttctggctctgcctaatgatggggcactgccttagcttgcccacctcacccacttcacctgcaaaatgggcatatccattggctctgggctccgtgactcacctgccctcctcccctcttgctttcaggtggtcagtcgggtggcagcccagcaaggctttgacctggacctcggctacagactgctggctgtgtgtgctgcaaaccgagacaagttcaccccgaagtctgccggtaggtgtccgtgggggactctgcgatgtcactgggag

SEQ ID NO: 213625 - DNA, 32 bp, Homo sapiens
  chr10:81017844-81017876
  hypo
tgaagttaaatgggccgggcacggtggctcat

SEQ ID NO: 213626 - DNA, 77 bp, Homo sapiens
  chr10:81023807-81023884
  hypo
ggaaaaattacatgcggaatggaaagcaggcgctcagggtggctcctgctggaatgagagctggagtgcaggctccg

SEQ ID NO: 213627 - DNA, 83 bp, Homo sapiens
  chr10:81023914-81023997
  hypo
tctcaccttgcagatggagtgggactgttgacccaggccagcctggggactgcctcctcacctccctgcgcaggctgaccttg

SEQ ID NO: 213628 - DNA, 224 bp, Homo sapiens
  chr10:81032488-81032712
  hypo
agtttggagaggtgaggggagctcagtgggttcactttagacgagttgggtggtgcgtgcttttacgttttacgctgagacatttgaggagtgcttggaagtctggattaaggctcagcattggcagttcgagtctgggatgattccctgctgctgtcccagccccagctgtggtcaccatgaggtgagctggaaggccccaaggtcctcggcaccagcccctg

SEQ ID NO: 213629 - DNA, 203 bp, Homo sapiens
  chr10:81035988-81036191
  hypo
aagatggtgactgagcgcagccagttccccagccctcagcgtcctcatgtacttcaggaggacaggccagctgagacacgatggacagcccaggctgagacacgctggcctgggaggcgcttttggctcctgtggccacgtggggacagtgaacagtgaaagaaaatggaagttttccccagtccccagttcatgtggggctc

SEQ ID NO: 213630 - DNA, 433 bp, Homo sapiens
  chr10:81036657-81037090
  hypo
ccctctttgcctccacggaccactacttcctgcacgcgggccattctgaccccctcttcatgacagaaacttttgtatcctccttcaagggtgtcagtcccatcttacagttgagaatactgaggcctcccaagagggctgagtaagtcttctggcgtcacacgaatctgggagcaaaaccagcatggatagcacccagtctggggagagttgggggggggtcttggtgtggcagagcatgatgaacaagcacccactgactgtcctgtccttcctgcagccttgttgtcctcctggtgcgaagagctcggccgcctgctgctgctccgacatcagaagagccgccagagcgatccccctgggaaactccccatgcagccccctctcagctccatgagctccatgaaacccactctgtcgcacaggtaagtgg

SEQ ID NO: 213631 - DNA, 290 bp, Homo sapiens
  chr10:81050747-81051037
  hypo
ccccatgaatccaggcggcaaccccatggcgtcgggcatgaccaccagcaacccaggcctcaactccccacagtttgcggggcagcagcagcagttctcagccaaggctggccccgctcagccctacatccagcagagcatgtatggccggcccaactaccccggcagcgggggctttggggccaggtgagcagggctgacctgtggcagaagccatggacgccacccctcttcctccttccagtggggagggacccacttaaatcccagctccacgctttctgccctga

SEQ ID NO: 213632 - DNA, 187 bp, Homo sapiens
  chr10:81058000-81058187
  hypo
caggacagagatctgcgagagagaagagtttccctggaggaggctctcctcccgaggggcatggctccaggcccctgggatgagtgcggtgtatgtccatagccatggccccttctgtctccgtaatcccataactcgtgcgtgtcttttctttccctccagcctcccaggccggttcctgtggcaa

SEQ ID NO: 213633 - DNA, 77 bp, Homo sapiens
  chr10:81059003-81059080
  hypo
tggcttccttgggcccgagtggggccctgggcagggggtagcagcatcttctgacaccttcacgtgttcagcatcat

SEQ ID NO: 213634 - DNA, 111 bp, Homo sapiens
  chr10:81060509-81060620
  hypo
caagtgctaccaccacgaggaccggcagatgaacaccaactggcccgcctcggtgcaggtcagcgtgaacgccacgcccctcaccattgagcgcggcgacaacaagacctc

SEQ ID NO: 213635 - DNA, 475 bp, Homo sapiens
  chr10:81063477-81063952
  hypo
acatgccccttcctcgcgaaggcagggcctgctctgcagagacaggggaactgccacagccacctcgtctggcacacacacaccacacgtgtcccacatggagacagcagcccgggcacccggccctgtgactgccacacagtgccacacactgccctctcagcgtttggtgtgggctgggaggagaaccaggacatgccccagctgcacgaggaagtggggagcacgtgcagaccccctacctctgcaggactgtcttgccatcctcacctgtctgtgcctcctgccccgcagtcaagcggaatttcagcagcgtggctgcctcctcgggcaacacgaccctcaacggggaggatggggtggagcagacggccatcaaggtgtctctgaagtgccccatcacattccggcgcatccagctgcctgctcgaggacacgattgcaagcatgtgcaggtgagcggccccagaaagca

SEQ ID NO: 213636 - DNA, 389 bp, Homo sapiens
  chr10:81065710-81066099
  hypo
ccaggcttccgcctcgtccacagtgtggtgagagtgggagcaggggcctcaacaaggtcacctgggtgtctgtcggagctggaggtgcttttatgcccaaagccaggcaccccggagcctcagctctgccacccttcctcccccagctccgagtttgaagaggtcaccatcgatcccacgtgcagctggcggccggtgcccatcaagtcggacttacacatcaaggacgaccctgatggcatcccctccaagcggttcaagaccatgagtcccagccagatgatcatgcccaatgtcatggagatgatcgcagccctgggccccggcccgtccccctatcccctcccgcctcccccagggggcaccaactccaacgactacagcagcca

SEQ ID NO: 213637 - DNA, 181 bp, Homo sapiens
  chr10:81073340-81073521
  hypo
ccttggttggggggcgcgggcatataacctgtcagaagcaaacaggagcggcaacttctaactttgctccaagccactctctttttaaacagcaacaatttaaagctatgaagtcacctggagaaaaggaacgttgctcttggacagcaagcaaaccatttctctccgtctgttctgtttt

SEQ ID NO: 213638 - DNA, 165 bp, Homo sapiens
  chr10:81142185-81142350
  hypo
caagggctgcacttcggagacgtcggagccttctccacgcaccttccgagctgggcccacgggttctgttttgtctttttagctggactcacacgtatggacagacacagacacggacggggtcaccgcatgggggcggaggaggtcggacggcaaggttggcaa

SEQ ID NO: 213639 - DNA, 263 bp, Homo sapiens
  chr10:81145945-81146208
  hypo
cacaagacaaggacgctaagagcccccggcccagccccgcaggcctgcgagggcaccccatgcacagggcgacacgcagcccctcggagtagcacagggaagcagcgtctcctcgggctggcggggggtggctctgggtgcgggcgggcagcccgtcactgcacgcgacggcagtagtagcccaggaccttgcacttctcgcagaggtgctgcgggtgctccttgctctggtcggacacgtccaggccgtcgggcttctccag

SEQ ID NO: 213640 - DNA, 105 bp, Homo sapiens
  chr10:81966466-81966571
  hypo
ttcccatccactgcacactgcgcgccatcgtgcgcttcaccattcttcattacctagctccttactgaaggacatttaggttgttgcctatgtttggctgttaca

SEQ ID NO: 213641 - DNA, 35 bp, Homo sapiens
  chr10:81966596-81966631
  hypo
ttttttttttttttttctgagacggagtctcgatc

SEQ ID NO: 213642 - DNA, 146 bp, Homo sapiens; identical to SEQ ID NO: 202156
  chr10:82213597-82213743
  hypo

SEQ ID NO: 213643 - DNA, 162 bp, Homo sapiens
  chr10:84618971-84619133
  hypo
ggattacaggtatgatccaccgcacccggccagtagtctaactttttaaaacacagatcaatattttcctggaacatgcttttccatatcccatagaccagggtttaaatgatcacacttgggacccttgtatgatcagaatcatctcgctccgttactttt

SEQ ID NO: 213644 - DNA, 33 bp, Homo sapiens
  chr10:86016117-86016150
  hypo
ttttcttatccctgtgtcgcggactaaaaaatt

SEQ ID NO: 213645 - DNA, 42 bp, Homo sapiens; identical to SEQ ID NO: 202161
  chr10:86088147-86088189
  hypo

SEQ ID NO: 213646 - DNA, 178 bp, Homo sapiens
  chr10:86306481-86306659
  hypo
catttgaacatgcacttggccgaggcagccctgggtgctctgcagggaacatacgctaacagctccccttcgagcactgcctgggagaagtgtggagcccaatccagccctcatcacgtccttaatttccaagcaccacttgcagccatgctgtggcgagaattcaactcttacctgc

SEQ ID NO: 213647 - DNA, 180 bp, Homo sapiens
  chr10:88200328-88200508
  hypo
tacaggcgtgagccactgcgcccggccttttttcactgcttttgaggcctgcctcttcctcctttcctgtgtgtgatgggtttctgatttgctcttaaaatcttgtcattggaaataagaaaaagggatataaagatcttgcggggcctccagagccacgatgagaactttggtcttgat

SEQ ID NO: 213648 - DNA, 653 bp, Homo sapiens
  chr10:88441137-88441790
  hypo
gtgtggcctctaaccgctctcttctctctcccctgcatggcctgccctgtgccaggaccccgctctggacacgaacggcagcctggtggcacccagccccagccctgaggcgagggccagcccaggcaccccaggcaccccggagctcaggcccacctttagccctgccttctcccggccctccgccttctcctcactcgccgaggcctctgaccctggccctccgcgggccagcctgagggccaagaccagcccagagggggcccgggacctactcggcccaaaagccctgccgggctcgagccagccgaggcaatataacaaccccattggcctgtactcggcagagaccctgagggagatggctcagatgtaccagatgagcctccgagggaaggcctcgggtgtcggactcccaggagggtaggtaacggacatacagctctccacaggtggcctgggccacctgggtcctcggtgctcggcagagacctggtcaggtggtcagagcgaggcactggccccaatccagccagccccgagcccatgaggtcagcagtgatcctgcggcatttgccatgagccgggcatgctagcgatttatacaaccaaccacgctggggtgacatgtcggattttgcagaggaggaaac

SEQ ID NO: 213649 - DNA, 360 bp, Homo sapiens
  chr10:88702605-88702965
  hypo
agcggcgtcctgcagggccacgcggatctgctcgtagctcaggggcagcggtcccggcgtctgctcagacatctcctccagcacctcctccccgaagagcgcggccagcaccgcctcgtgccgcagcgcgtcctccagcagggcggcgaaggcgctgtgcagctggcgcacctcgtggcgggcctcggccgcggccgccttcagcgcgcccacctcgtcatccagcgcctgcacttggctccggagccgcgacgtggccgcccgcgcccgctcgccctccgctttgtgcgcgtccacggccagcgacacggcgtccacggcgttctgcagggcctgcagggaggagccgtccagctgccg

SEQ ID NO: 213650 - DNA, 277 bp, Homo sapiens
  chr10:90029772-90030049
  hypo
agtgcagtttgaaatccacttgtctaaccaaacccttcatatttctgacaaagccctgagaagaagagtcatttctttaagccagccgggaacatgagtcttctaaactttgaggccctctttgacaagaggagagaggagtaaacgaaacaatgacacttatttctacctataatctccgttgatcgacctttgtactccacggtgagtcttgcagctaagagacgcaaattagacctatttgcactcctagtgcggtcaagtgcagtcaagatct

SEQ ID NO: 213651 - DNA, 61 bp, Homo sapiens; identical to SEQ ID NO: 202172
  chr10:92617539-92617600
  hypo

SEQ ID NO: 213652 - DNA, 136 bp, Homo sapiens
  chr10:93567140-93567276
  hypo
aggtaaagcttctcggcagcgcggctgaactcctcccaggtctggtactgcggcatcgtggcctagagtggaaaagtaaagagaagcaaggcctcagaacccggcccaacaaactacctacgtccgggagtcgcca

SEQ ID NO: 213653 - DNA, 214 bp, Homo sapiens
  chr10:93572698-93572912
  hypo
tccttgttgaacttacgtgtggacaatttgttttcatctaggttttgggcggaaagacgtagttgaatatttgcttcagaatggtgcaaatgtccaagcacgtgatgatgggggccttattcctcttcataatgcatgctcttttggtcatgctgaagtagtcaatctccttttgcgacatggtgcagaccccaatgctcgagataattggaat

SEQ ID NO: 213654 - DNA, 78 bp, Homo sapiens; identical to SEQ ID NO: 202176
  chr10:93647662-93647740
  hypo

SEQ ID NO: 213655 - DNA, 319 bp, Homo sapiens
  chr10:93811840-93812159
  hypo
cccaattcttctttaaaaatcgagaacgaatgcacagatttccagaacactgtaagccctgaggcagtgccctctcttttccctccttgttatctactccagtacttgtggctgggtcggcccgtggctcagctccagcggaacgggacgtgacgagggcggtcgcctccctccttcaccagcggtttgtggaactcccgcccggctcgggaatgtatgctcgcccagcagtattcacagtaatactgcagacaggtgacgttggcacagaagaacggggcaaacttcccaccacagcgtgtgccctggcactcatcac

SEQ ID NO: 213656 - DNA, 37 bp, Homo sapiens
  chr10:93843638-93843675
  hypo
ctccaaaaaatcttcaggatcgccgggcacggtggct

SEQ ID NO: 213657 - DNA, 37 bp, Homo sapiens
  chr10:94310596-94310633
  hypo
agcctggcaacagagcgagactcggtctcaaaaaata

SEQ ID NO: 213658 - DNA, 356 bp, Homo sapiens; identical to SEQ ID NO: 202183
  chr10:94833677-94834033
  hypo

SEQ ID NO: 213659 - DNA, 137 bp, Homo sapiens; identical to SEQ ID NO: 202187
  chr10:95753995-95754132
  hypo

SEQ ID NO: 213660 - DNA, 151 bp, Homo sapiens; identical to SEQ ID NO: 202189
  chr10:96122665-96122816
  hypo

SEQ ID NO: 213661 - DNA, 600 bp, Homo sapiens; identical to SEQ ID NO: 202190
  chr10:96161957-96162557
  hypo

SEQ ID NO: 213662 - DNA, 798 bp, Homo sapiens; identical to SEQ ID NO: 202191
  chr10:96162659-96163457
  hypo

SEQ ID NO: 213663 - DNA, 37 bp, Homo sapiens
  chr10:97118425-97118462
  hypo
cacacacacacacacagacacgcacatgcacagacat

SEQ ID NO: 213664 - DNA, 191 bp, Homo sapiens; identical to SEQ ID NO: 202193
  chr10:97321201-97321392
  hypo

SEQ ID NO: 213665 - DNA, 44 bp, Homo sapiens
  chr10:97617586-97617630
  hypo
aacacaaacaaaggcaaatccgactgctgcaaatcaaaaggaac

SEQ ID NO: 213666 - DNA, 136 bp, Homo sapiens
  chr10:98350862-98350998
  hypo
aggtttcctggcttccgaaacaatctcttccctataccatgctaactcttactgcagagatagcaaagacattttatcctaaatgggctttggcgactagcctaaatattaaatttgaactcaattgaacatggac

SEQ ID NO: 213667 - DNA, 144 bp, Homo sapiens
  chr10:98469423-98469567
  hypo
ctcctcgctgtcccgcacgccgcagagcagcctgaccacgcggtgcggaggatggaaagctctctgcagcaggggcagcaaggcgggcttgtggaagtgctgcaccagctccgcggacagcagcaccacgacacagcgggtgct

SEQ ID NO: 213668 - DNA, 120 bp, Homo sapiens
  chr10:98526399-98526519
  hypo
atctcaaaaaaataaatcaaatcaaatcaaatgaactatacattcattatggatgactcaaaaaggttgggtaaatattaaaagtaataagagacctaggaaggaaataaagaattatga

SEQ ID NO: 213669 - DNA, 240 bp, Homo sapiens
  chr10:99206759-99206999
  hypo
ccggccttttcccggttttttaaactgcagcttccagtcctgcggtccgatcctcttcgcggcccctcatccccacttcagtaagctttctctggttgaaaaagccgaactctggttgtgtgggcccgtcatcaaaagataagcagccccaaaataaagttgttactctttttcttctcagcgtgttagcccagaagggaggtctgcacatgaataaaatgctactctttattgatgttg

SEQ ID NO: 213670 - DNA, 191 bp, Homo sapiens
  chr10:99626199-99626390
  hypo
agagacatagccatgcggggcctgaatctcctgaactacagccagtttcctgagattagaacctgtgtgtatgcacatgtgaatgtatgtgtgagtgcacatgtgtgtaagtgcagtgtgcgtaaatgtgtgagtctgcgtgtgttagcatgcctgtatgtgagcgcgtgtgtgagcgcatgtgtgtgcac

SEQ ID NO: 213671 - DNA, 174 bp, Homo sapiens
  chr10:100170637-100170811
  hypo
ctgctgagagccacacgcccagggccagtgaagtgggatcaagtggggaggtactcacagccaccagtccgttgtgtcctgcaacaaaacgggacagggaaggaaaacatcactggtcagcgggcgggcagacagacagtccttgaggaatgtgctccccgctgcccgtcccca

SEQ ID NO: 213672 - DNA, 142 bp, Homo sapiens
  chr10:100171092-100171234
  hypo
ctggcatgctgctgcgccaacgtcccgtctcgcatggcagcatcagcatccaggggagtgctggtcatgtaggtagttgctatcaagcgcggcttgttttgtccacgtgtggttcacaatcggcacagtggtgccctagaag

SEQ ID NO: 213673 - DNA, 426 bp, Homo sapiens
  chr10:100178510-100178936
  hypo
cagggctgcccccacggcaccggctgggctgtgtggctggcattcaaacctggcctctccagcccacagctctgcctcactttatcaccccacggggccacccaagcacacagactcctgtccctccctagaagtgaaggtaaaggtcacaggaattttctagcacttctgttgtacacacgtcctgggcacttctgagggcacggaggaaagctgggagcctgcaggccgggggagcagagcttgggctccggcttcctcacttacagcctcggtggccctggccatggcgtctgatctccggatcattgtgtctccatccgtacaacggggtcaggaatccctgccccagccactttacagggctgtgagggggtaactgagagaacagtggtggagagccccagtaaccgccctgccctatgg

SEQ ID NO: 213674 - DNA, 239 bp, Homo sapiens
  chr10:101493074-101493313
  hypo
aaaataaaattaaaacaaaattttaaaatattgattagaaaataaccatagtaaacccattacatattgacataatatttttttgaaaaagaaatattcctaaacaacaacaacaaaaaaagcaaaagagtggaaatatatttttgcaagtttcttcagtatatcttaatggaagacagctggattctcatgcccgctgcttcattcagtctaacatgtcaagtagcctcttgaaaacg

SEQ ID NO: 213675 - DNA, 43 bp, Homo sapiens
  chr10:101493373-101493416
  hypo
gagtgagactctgcctcaaaaaagaaaacgcctctcacttgtg

SEQ ID NO: 213676 - DNA, 317 bp, Homo sapiens
  chr10:102766308-102766625
  hypo
tgcagaagggcagcgagctggtggctctgcgggtggcgctgcgggaggcccgtgctacgctgcgggtcagtgagggccgtgcgcggggtctacaggaggccgcccgagctcgggagctggagctggaagcctgttcccaggagctgcagcgacaccgccaggaagctgagcagctgcgggagaaagctgggcagttggatgctgaggcggccggactccgggagccccctgtgccacctgccaccgctgacccattcctcctggcagagagtgatgaggccaaagtgcagcgggcagcagccggggttgggggcagc

SEQ ID NO: 213677 - DNA, 220 bp, Homo sapiens; identical to SEQ ID NO: 202231
  chr10:102802781-102803001
  hypo

SEQ ID NO: 213678 - DNA, 509 bp, Homo sapiens; identical to SEQ ID NO: 202232
  chr10:102822385-102822894
  hypo

SEQ ID NO: 213679 - DNA, 61 bp, Homo sapiens
  chr10:102872322-102872383
  hypo
tgggcaggagggctgcggcagtgaggagagccttgatttggacaggcgtctcacattgagg

SEQ ID NO: 213680 - DNA, 120 bp, Homo sapiens; identical to SEQ ID NO: 202233
  chr10:102973524-102973644
  hypo

SEQ ID NO: 213681 - DNA, 202 bp, Homo sapiens; identical to SEQ ID NO: 202237
  chr10:103348788-103348990
  hypo

SEQ ID NO: 213682 - DNA, 57 bp, Homo sapiens
  chr10:103425893-103425950
  hypo
ccattttccactctccgctcccacacacttagcctctccactccctgctggtctttc

SEQ ID NO: 213683 - DNA, 211 bp, Homo sapiens; identical to SEQ ID NO: 202239
  chr10:103535916-103536127
  hypo

SEQ ID NO: 213684 - DNA, 73 bp, Homo sapiens
  chr10:103553397-103553470
  hypo
ttaaaatgctgtgcgacctgcaaagaaacaatgtgaagtgtatacctagagccgctgcgcttcgcaggcgcgg

SEQ ID NO: 213685 - DNA, 34 bp, Homo sapiens
  chr10:104230570-104230604
  hypo
atgatggcttcctgacgctcgtggacctgcacca

SEQ ID NO: 213686 - DNA, 199 bp, Homo sapiens
  chr10:104239074-104239273
  hypo
ggctaagagaagggaggtgagttggttaagcgcactgcagtccgcggggcgctacgttgctttcacacatacctgctgctgtggcccacacctggcaggggcctttggtcataggacggcgtgggggagaatactgtgtgaagtctgggattggggtgggtcttggtgtcacaggtgagggtgccggtgaagacaggct

SEQ ID NO: 213687 - DNA, 299 bp, Homo sapiens
  chr10:104416699-104416998
  hypo
cctggggccctgcagctccacgcagcacttggtggccctgccgggcggcgcccaaccagtgcactcaagccccgtgttccccccatcgcagtatcccaatggctccgccgcccagcagcccatgctcccccagtatggcggccgcaagattctcgtctgttctgtggacaactgttactgttcttccgtggccaaccatggcggccaccagccctacccccgctccggccactttccctggacagtgccctcgcaggagtactcacacccgctcccgcccacaccctccgtcccccagt

SEQ ID NO: 213688 - DNA, 163 bp, Homo sapiens
  chr10:104417062-104417225
  hypo
ctacagggtgtatgggcagccgtccaccaaacactacgtgacgagctaacgccacgcaggcggcggggcgctggggaatcttcctccccagcccccgggctcgggagttatgcatccagagacctgcccttctaccttcctcgcctcccctcttcctcattcc

SEQ ID NO: 213689 - DNA, 336 bp, Homo sapiens
  chr10:104837797-104838133
  hypo
agctcacagagtgtcgtcgcccacctccctggtccttgctcttgttaacccaagatgctgctacacagatgccaaatggaaatcttccacagggctttttcagtaaacacgtgatgtggagtgcaagctcctccccttcccactagaacatactttaacagaaaacgagtcggaccttctagctgcactctgtactgtgtgccgagaaggcatttctagacccgtgtttttaaaggagggaactttggggattgccagcccctgctcctcctcccagggagccaactgtccctcctcccctgtccctgggcccatggggcccggcagtggctgtgt

SEQ ID NO: 213690 - DNA, 59 bp, Homo sapiens
  chr10:105127076-105127135
  hypo
aaagtaaaaatgacaaaaaaaaaaaaaaagtaagcactattcaggtcaaaatgtaaaac

SEQ ID NO: 213691 - DNA, 33 bp, Homo sapiens
  chr10:105238592-105238625
  hypo
cagagaaacagggcgagcgggggcgtcagcagc

SEQ ID NO: 213692 - DNA, 33 bp, Homo sapiens
  chr10:105725850-105725883
  hypo
ttttaccctcaagggagtgtcgcagtcatcagt

SEQ ID NO: 213693 - DNA, 55 bp, Homo sapiens
  chr10:106075696-106075751
  hypo
atgatctcctcctcgttctcggggactgtggcgttctcccgcgggaacagcagcg

SEQ ID NO: 213694 - DNA, 187 bp, Homo sapiens
  chr10:111684022-111684209
  hypo
gagggttgtaccaccccacccgtgtggttacagcagccccccaaatatcccctcaccatcccgcacctgcacagtccagcctgaacaaagccgccagaccagtcctttgaagcgtgacaccaggtcacttctttgctcagcactttccattaatttctcgtttcacgcagcataaaagctccatttg

SEQ ID NO: 213695 - DNA, 766 bp, Homo sapiens; identical to SEQ ID NO: 202254
  chr10:111767116-111767882
  hypo

SEQ ID NO: 213696 - DNA, 343 bp, Homo sapiens; identical to SEQ ID NO: 202261
  chr10:112327397-112327740
  hypo

SEQ ID NO: 213697 - DNA, 76 bp, Homo sapiens; identical to SEQ ID NO: 202262
  chr10:112328695-112328771
  hypo

SEQ ID NO: 213698 - DNA, 39 bp, Homo sapiens; identical to SEQ ID NO: 202263
  chr10:112333464-112333503
  hypo

SEQ ID NO: 213699 - DNA, 68 bp, Homo sapiens; identical to SEQ ID NO: 202264
  chr10:112335093-112335161
  hypo

SEQ ID NO: 213700 - DNA, 72 bp, Homo sapiens; identical to SEQ ID NO: 202265
  chr10:112337178-112337250
  hypo

SEQ ID NO: 213701 - DNA, 80 bp, Homo sapiens; identical to SEQ ID NO: 202266
  chr10:112337592-112337672
  hypo

SEQ ID NO: 213702 - DNA, 79 bp, Homo sapiens; identical to SEQ ID NO: 202267
  chr10:112338385-112338464
  hypo

SEQ ID NO: 213703 - DNA, 118 bp, Homo sapiens; identical to SEQ ID NO: 202268
  chr10:112340661-112340779
  hypo

SEQ ID NO: 213704 - DNA, 176 bp, Homo sapiens; identical to SEQ ID NO: 202269
  chr10:112341680-112341856
  hypo

SEQ ID NO: 213705 - DNA, 81 bp, Homo sapiens; identical to SEQ ID NO: 202270
  chr10:112342319-112342400
  hypo

SEQ ID NO: 213706 - DNA, 165 bp, Homo sapiens; identical to SEQ ID NO: 202271
  chr10:112343141-112343306
  hypo

SEQ ID NO: 213707 - DNA, 122 bp, Homo sapiens; identical to SEQ ID NO: 202272
  chr10:112343598-112343720
  hypo

SEQ ID NO: 213708 - DNA, 214 bp, Homo sapiens; identical to SEQ ID NO: 202273
  chr10:112343940-112344154
  hypo

SEQ ID NO: 213709 - DNA, 387 bp, Homo sapiens; identical to SEQ ID NO: 202274
  chr10:112349362-112349749
  hypo

SEQ ID NO: 213710 - DNA, 161 bp, Homo sapiens; identical to SEQ ID NO: 202275
  chr10:112350169-112350330
  hypo

SEQ ID NO: 213711 - DNA, 142 bp, Homo sapiens; identical to SEQ ID NO: 202276
  chr10:112350748-112350890
  hypo

SEQ ID NO: 213712 - DNA, 151 bp, Homo sapiens; identical to SEQ ID NO: 202277
  chr10:112352830-112352981
  hypo

SEQ ID NO: 213713 - DNA, 153 bp, Homo sapiens; identical to SEQ ID NO: 202278
  chr10:112356155-112356308
  hypo

SEQ ID NO: 213714 - DNA, 152 bp, Homo sapiens; identical to SEQ ID NO: 202279
  chr10:112357896-112358048
  hypo

SEQ ID NO: 213715 - DNA, 159 bp, Homo sapiens; identical to SEQ ID NO: 202280
  chr10:112359411-112359570
  hypo

SEQ ID NO: 213716 - DNA, 108 bp, Homo sapiens; identical to SEQ ID NO: 202281
  chr10:112360196-112360304
  hypo

SEQ ID NO: 213717 - DNA, 109 bp, Homo sapiens; identical to SEQ ID NO: 202282
  chr10:112360779-112360888
  hypo

SEQ ID NO: 213718 - DNA, 542 bp, Homo sapiens; identical to SEQ ID NO: 202283
  chr10:112361394-112361936
  hypo

SEQ ID NO: 213719 - DNA, 817 bp, Homo sapiens; identical to SEQ ID NO: 202284
  chr10:112362231-112363048
  hypo

SEQ ID NO: 213720 - DNA, 404 bp, Homo sapiens; identical to SEQ ID NO: 202285
  chr10:112363988-112364392
  hypo

SEQ ID NO: 213721 - DNA, 62 bp, Homo sapiens; identical to SEQ ID NO: 202286
  chr10:112403994-112404056
  hypo

SEQ ID NO: 213722 - DNA, 57 bp, Homo sapiens; identical to SEQ ID NO: 202287
  chr10:112431815-112431872
  hypo

SEQ ID NO: 213723 - DNA, 235 bp, Homo sapiens; identical to SEQ ID NO: 202288
  chr10:112432125-112432360
  hypo

SEQ ID NO: 213724 - DNA, 260 bp, Homo sapiens
  chr10:112524228-112524488
  hypo
agaacatgtggcataaacatcgactgatattgtttgccatttacactcagcatgtgtaatgcagcaggaatggctcccggtggcatgtgactgcccttccaggcgggtatgccgtgctcaggcactgctctttctctttcgctccctccctccctcgcttgcataccccctccgctgcccctttccagactcgagagagtttgagtgaaggcttgtcatgattggcatgcagaaagctggtagaatgtcattggaatttt

SEQ ID NO: 213725 - DNA, 210 bp, Homo sapiens
  chr10:114200386-114200596
  hypo
caattggaagaggatctctccgggctgcactcatgtcgatcttcactgtgttccacccaaaggagagctatcgcagcaacaatagcacacgcacaaaatgtttggttatggtaactggtcagactctactgtgacacgtaaaacaacttgatcaaagagataacaacgtggccctgtggccaacgcaaacacagctatttttattttatt

SEQ ID NO: 213726 - DNA, 59 bp, Homo sapiens
  chr10:114571439-114571498
  hypo
ctcaaaaaaaaaaaaaaaaaaaaaaaaaaaaagagtgcagtccatgcctggaagtagag

SEQ ID NO: 213727 - DNA, 121 bp, Homo sapiens
  chr10:114571537-114571658
  hypo
agtggaattcctgggctcctcgagcaagagcagagaactgtgccaggtgcagtgccgcgcctgtcccctgcactggaaccagccttctgtgattccggctgccacacgcaggagctcgttt

SEQ ID NO: 213728 - DNA, 228 bp, Homo sapiens
  chr10:114591692-114591920
  hypo
agaggctgaggtttcggccgctgtacactcagcagccccgcgctcttgccggccgacaccacagtgtgggaatcgagaatatcggcttcggcttggaatttaaggaggaggagagaaaaaggatagctcggctggtcttcaatgattttcttgtaaaacttttacaagggagacttaggctgtttgatgtgttctagacaatcaaatgcccgccgagtctgcggcaga

SEQ ID NO: 213729 - DNA, 33 bp, Homo sapiens; identical to SEQ ID NO: 202295
  chr10:114709864-114709897
  hypo

SEQ ID NO: 213730 - DNA, 102 bp, Homo sapiens
  chr10:114867548-114867650
  hypo
aaggtacatcacttgcaattagggaaataatgcttttgggtcctgtgaaataatggtgtttcttaaagcagcctatattggtcaagcgttgctggcaggggc

SEQ ID NO: 213731 - DNA, 37 bp, Homo sapiens
  chr10:115671808-115671845
  hypo
ggttctcttaagtacgtgatttcgtgaagatagcaat

SEQ ID NO: 213732 - DNA, 201 bp, Homo sapiens; identical to SEQ ID NO: 202298
  chr10:115805287-115805488
  hypo

SEQ ID NO: 213733 - DNA, 33 bp, Homo sapiens
  chr10:115925581-115925614
  hypo
gggcaacagagcgagacactttgtctcaaaaaa

SEQ ID NO: 213734 - DNA, 81 bp, Homo sapiens
  chr10:116011528-116011609
  hypo
aggagttggcatggtcgtgatctctgaatgcagtgagcagaaaacctgtaatttttttttttttttttttttgagattcag

SEQ ID NO: 213735 - DNA, 105 bp, Homo sapiens
  chr10:116028357-116028462
  hypo
tcctcgtttgttaaacgtagaaatagaccctgagctcagaacagactcttaggcagaagtgcttcctggagtaagcggagggatttctttttcttttttcttttt

SEQ ID NO: 213736 - DNA, 112 bp, Homo sapiens
  chr10:116045866-116045978
  hypo
ggagctgctggtggcggtgcctgtgggggagtaccaggatgtgcctgacctggtctggagcctcgatggcattcccttccgtggtggccccaccctgacgggcagtgccttg

SEQ ID NO: 213737 - DNA, 194 bp, Homo sapiens
  chr10:116046022-116046216
  hypo
ccaggaccggccacgtagagtggtggttttgctcactgagtcacactccgaggatgaggttgcgggcccagcgcgtcacgcaagggcgcgagagctgctcctgctgggtgtaggcagtgaggccgtgcgggcagagctggaggagatcacaggcagcccaaagcatgtgatggtctactcggatcctcaggatc

SEQ ID NO: 213738 - DNA, 38 bp, Homo sapiens
  chr10:116282622-116282660
  hypo
agctaggccaggtgcggtggctcacgcctgtaatccca

SEQ ID NO: 213739 - DNA, 933 bp, Homo sapiens; identical to SEQ ID NO: 202303
  chr10:116527400-116528333
  hypo

SEQ ID NO: 213740 - DNA, 187 bp, Homo sapiens; identical to SEQ ID NO: 202304
  chr10:116852441-116852628
  hypo

SEQ ID NO: 213741 - DNA, 360 bp, Homo sapiens; identical to SEQ ID NO: 202307
  chr10:118764203-118764563
  hypo

SEQ ID NO: 213742 - DNA, 72 bp, Homo sapiens; identical to SEQ ID NO: 202310
  chr10:119001564-119001636
  hypo

SEQ ID NO: 213743 - DNA, 99 bp, Homo sapiens
  chr10:119180987-119181086
  hypo
ttgggaggccttcccgcgtgtaatccccacttgctctgttggccctataaatatcaggtaactgtcatccacctactgctatatacttttttttttttt

SEQ ID NO: 213744 - DNA, 308 bp, Homo sapiens; identical to SEQ ID NO: 202311
  chr10:119256046-119256354
  hypo

SEQ ID NO: 213745 - DNA, 220 bp, Homo sapiens; identical to SEQ ID NO: 202326
  chr10:119302473-119302693
  hypo

SEQ ID NO: 213746 - DNA, 47 bp, Homo sapiens
  chr10:120011733-120011780
  hypo
atcaaatccaccaacgagccaacaattatggtcgaacacctggcttc

SEQ ID NO: 213747 - DNA, 108 bp, Homo sapiens
  chr10:120601821-120601929
  hypo
catagctgcagccaccgaaactgcagctgcagacctgggcctcgtgctccatggatcaggcaggagcccagcgcccccgggtgcagctgcagccgcccaaaccatggc

SEQ ID NO: 213748 - DNA, 93 bp, Homo sapiens
  chr10:120822534-120822627
  hypo
taggattagacgtgagccaccgcgcctagccaagatcacctttaacaaggtgacgtggattatccttccagtgtggcacgtttcttcagcttt

SEQ ID NO: 213749 - DNA, 151 bp, Homo sapiens
  chr10:120926967-120927118
  hypo
aagcaggggtttgtccgttgttcgctcttgtgcctggaaaacagcacctggtgcggggtaggcactcaaggatttactgaaacaacgagaaaatgtttccctatctgtcttgcccctaaaccgagttccttgagtgcggaaccagcatctt

SEQ ID NO: 213750 - DNA, 131 bp, Homo sapiens
  chr10:121265440-121265571
  hypo
tgaaagtttaattagcgggatatcatatctgctttaagaacttggtttcgcttgtatatgaaaatcgctgaaagaaggtggaagcaccgccgtctctgaattgcggctctagaatgcgtcctctcttcaca

SEQ ID NO: 213751 - DNA, 216 bp, Homo sapiens
  chr10:121265790-121266006
  hypo
cagcagatgagcagacgaagcagctcaagtcagcccttgccccagagcgccaggacgggccacacagaaggctctgtcgccttgcacggctctccagcttcacgacagaccagccagagatggacagtgtgccaggggtgggattggaactccagaaggagtctggacaccagcgggatcagagagacctcgcttggacgatatcccctcccaagc

SEQ ID NO: 213752 - DNA, 105 bp, Homo sapiens; identical to SEQ ID NO: 202332
  chr10:121301389-121301494
  hypo

SEQ ID NO: 213753 - DNA, 198 bp, Homo sapiens; identical to SEQ ID NO: 202333
  chr10:121301911-121302109
  hypo

SEQ ID NO: 213754 - DNA, 43 bp, Homo sapiens; identical to SEQ ID NO: 202334
  chr10:121356079-121356122
  hypo

SEQ ID NO: 213755 - DNA, 279 bp, Homo sapiens
  chr10:121429483-121429762
  hypo
aaggcgctgagaaccggcaggtgcaccctttccatgtctatccccagcctgggatgcagcgattccgaactgaggcggcagcagcggctcctcagaggtcccagtcacctctgcggggcatgccagaaaccactcagccagataaacagtgtggacaggtggcagcggcggcggcagcccagcccccagcctcccacggacctgaggtaaggagaggccaggctcaccagcctgctggggagcaagccgctgtgcttcccaggccgggcccatcccctc

SEQ ID NO: 213756 - DNA, 174 bp, Homo sapiens
  chr10:121550361-121550535
  hypo
ttctcttaacatagccgtattcacgctcccacgcccttccttacccttgtcagctgtgcggcacttctcctgcagcccctaattactgcttcttcaagtttaactaatctccggacccaaagtgtatgttattaagctgatttcattagtgcatgtgagcgtaggaggagaggg

SEQ ID NO: 213757 - DNA, 61 bp, Homo sapiens
  chr10:121591477-121591538
  hypo
atacacaagcttaccgaaacagcaataatggacgtgcgccacttaccgagccaccacgagc

SEQ ID NO: 213758 - DNA, 34 bp, Homo sapiens
  chr10:123037580-123037614
  hypo
ggtacttattaagaaagtttcgggctgggcgcgg

SEQ ID NO: 213759 - DNA, 34 bp, Homo sapiens
  chr10:123037854-123037888
  hypo
ggagcaagactccgtctcaaaaaaaaaaaaaaaa

SEQ ID NO: 213760 - DNA, 84 bp, Homo sapiens
  chr10:123063523-123063607
  hypo
acagagcaagactcagtactccccgaccccgaaaaaaaaggttgctccttctacttcaaagccgggaaacaataaaaaatggtg

SEQ ID NO: 213761 - DNA, 180 bp, Homo sapiens
  chr10:123880114-123880294
  hypo
agcagctgggatggagctcagcctcgtgcggccttggggagagggactttctgctgtcacattgctcacagtgatgaagggcctgcatagagcctggcgcatgctaggtgctcataaacattgattcccttcacttgttgccacctgtattcattctttctttctttctttttttttttg

SEQ ID NO: 213762 - DNA, 208 bp, Homo sapiens
  chr10:123910210-123910418
  hypo
accatgcccgagtgcctcgccgtgttgatgagccagtttctttaatacttcgctgtcaggagaaggacctgctgagcgctggagtctaggtggagtcatgcagcgttcctgggtcctttcttctgctttgtttgcattttttgatcctgccagccagcctctcggcagatacatcccggttgattctatgccacggactattcggaag

SEQ ID NO: 213763 - DNA, 42 bp, Homo sapiens
  chr10:123971195-123971237
  hypo
ccaagaagaagaagacgcccctaaagacgtaagttcaggggt

SEQ ID NO: 213764 - DNA, 39 bp, Homo sapiens
  chr10:123977732-123977771
  hypo
cacgtgtgagccaccgcgcctgaccgatttctaacagtt

SEQ ID NO: 213765 - DNA, 723 bp, Homo sapiens; identical to SEQ ID NO: 202345
  chr10:124134313-124135036
  hypo

SEQ ID NO: 213766 - DNA, 45 bp, Homo sapiens
  chr10:124712595-124712640
  hypo
atgactcttcttttttgagacggagtctggctctgtcgcccaggc

SEQ ID NO: 213767 - DNA, 290 bp, Homo sapiens
  chr10:125617037-125617327
  hypo
agggaggcaggtgatgccagcgatggaaggcggcgtggagatggaaggcggcgtggagatggaaggcggcgtggagatggaaggcggcgtggagatggaaggcggcgtggagatggaaggcggcgtggagatggaaggcggcgtggagatggaaggcggcgtggagctgctgagttgaaggctagggcaaaacggagaagaacctgagcaatgcaccagcacaggccccactgacgccgaggaacaggaggcacagggcaccacgcacgggactccgcagcttccacgct

SEQ ID NO: 213768 - DNA, 518 bp, Homo sapiens; identical to SEQ ID NO: 202356
  chr10:126107353-126107871
  hypo

SEQ ID NO: 213769 - DNA, 93 bp, Homo sapiens
  chr10:126190197-126190290
  hypo
attctggaactggacagtgatgatggtggcacgacgttctgaatgtgctcgatgccagtgaattgaatactctggtcacggtcataaatttta

SEQ ID NO: 213770 - DNA, 71 bp, Homo sapiens
  chr10:126198878-126198949
  hypo
cctggggtcctgagcgcactttggtatgcggagcccacaagctggcctggacaggcatcactgctccaggc

SEQ ID NO: 213771 - DNA, 284 bp, Homo sapiens
  chr10:126238653-126238937
  hypo
ggcctccgagccaggctcctcgttgcaaatggacttctctcctttgcgtgctgtgaactgggcgtgaacacctcctgtgatggggagctcactccttgccgagggagcctggtaagctgccggcacagtcatcctcataccctctctcctgacctgtgtcttatggcctctgcccccaggcagctgcggggcagggggctggggtgacccccgtcttggttgttgagcccttccactagctggagggtgactgtccccccttctcccccgacacaaggcacagc

SEQ ID NO: 213772 - DNA, 151 bp, Homo sapiens
  chr10:126265312-126265463
  hypo
ggagttacctgccctgtagacggggagaccacattagtgtttgtgcaaagccctgccctcgtgcacctgtccttccgtagcccacgatacctcatccagcccgggcccgtgggtgggctgctgagcacccgaccacagccaggcctccatg

SEQ ID NO: 213773 - DNA, 77 bp, Homo sapiens
  chr10:126287226-126287303
  hypo
catccctatccacctgtccaccctgatgcagttcctgccatccacgtgtccatctgtctacccgtacacctgttcat

SEQ ID NO: 213774 - DNA, 271 bp, Homo sapiens
  chr10:126296072-126296343
  hypo
ccacggacgccattcggctaggtacacgtgcggagtggggctggccggattctcattacaaagcgtcatcttctatggggagacctcttgttccctctcggggctggttgcttttgcctggacaataagcctggccccagggcacctggggaaggtgtccaaggagggggtcctgggggccagtcccccgggggctcggatgatgaatcatgggcggtgtttgctggaagaatttttgttccgcttcgggcaacaaggaacccaaacctct

SEQ ID NO: 213775 - DNA, 411 bp, Homo sapiens
  chr10:126305757-126306168
  hypo
tgtcccccagccaccgacgtccccctgcctgctccgcaaccccagggcctgcagaaaaggcccacgagactcagactggcagagacttaggcggaccaggaacaggggcgcagtctccgtcccacccaaaccctaaccagagagaacacggcacgttgtgccagacggaggacggatgccagcgagggtccatgtcctcactgccgacaaggctgggaactgggccaagtgaagcagaggcctccacgtcagatgtgagcgccaccggcccaggtgactgcagttcttccctccttccgttcggcttgagccctccagaggatcggaaaggctgaggcctgacctggtgccgctgtcctgggtgggtctgtcctgctggtcggttcctgcccctctcggggaggttggctg

SEQ ID NO: 213776 - DNA, 184 bp, Homo sapiens
  chr10:126312314-126312498
  hypo
ggcccatgagcaacgtactcatgaagatgcacctccggccaatgagcgctctgtgctcataaagacacgcgcaattccactattcacctactaactcggcaaagcacacaaatttgatgcagacccagttctggggggctgcggtgaaacaggaatgctcctaacacttcgtccacagcctttc

SEQ ID NO: 213777 - DNA, 75 bp, Homo sapiens
  chr10:126314663-126314738
  hypo
gcctgacgcccgaacgcgtgccagcgttttctgcgagctgtcatgtgaggggcctggggcgtggcctgctgcgag

SEQ ID NO: 213778 - DNA, 217 bp, Homo sapiens
  chr10:126317368-126317585
  hypo
gtccctcctcttgggcgggatcaagtcccacgtgctagtcacacttcgcagctcccaaagcaccaggctgagaagcgacttcagctgagcccacctctttcctgggcctctgcagttcatgggcttccctcgcctccctgaaggttcttgctgggagcatccctctctgtgtcactggcacgagaatccccggctcaggccccgcttctagagaccc

SEQ ID NO: 213779 - DNA, 190 bp, Homo sapiens
  chr10:126325797-126325987
  hypo
gggcctcacagggtccgcaggtggcaggagacaaccagacatgccatgaggcagcgcaggtccaggacgtacctggcaggacgtgggtgcctggctttggctccagccgccttgtgctgggcatgccctggggaagtcttgcttgctctgggcccatctgcacaatgagggtcttcggcttgagccccgg

SEQ ID NO: 213780 - DNA, 32 bp, Homo sapiens
  chr10:126331895-126331927
  hypo
agcccaggcggctcggcagggccctcagcagt

SEQ ID NO: 213781 - DNA, 185 bp, Homo sapiens
  chr10:126332086-126332271
  hypo
gccgcccaaacagagccccgggagggccagcgggggggtgcagggctgggaggacagtgccaattaaaaatctgagcctgtgggcctttctctctcttgttttcattcctacagctacattgtgtccactggcagcggattccaaaggcgaagaggctgcattcacggcccggagctttagagcc

SEQ ID NO: 213782 - DNA, 310 bp, Homo sapiens
  chr10:126370268-126370578
  hypo
acacggctgggagcggctgcgggaaaggccgctggagcgtctcgccagctctggtgttgaggcaggtgtgctgttggctgagggaggacagtattccacaaaggaaaactgctcatgtgagcaagagagggaccgctgcaggtccagccggcctcctcccacggggtgcaggtcagggctccaggtgtcacctgcctgtccacacggggctgagcctggcaccccttggcagggctgccctccaaatcggtggtggagtcctgcctggtcgcagggtgaggagagcacgttggcccgggaagggaggctg

SEQ ID NO: 213783 - DNA, 420 bp, Homo sapiens
  chr10:126690985-126691405
  hypo
ttttcttcggaagcctctgtcatcaactgtgttgggcaggggcccacctgctttggtgctgacctggaccacatgctgctaaggctgccctcccagaacgggaggcccaggttcccatgtggacaggggcctagagctgtgcacacggcaggggcagtttaggggacacacacggcaggggtcatttaggggacgcacccagcaggggtggtttagaggacatgtggccagtcgcattctcccctctggaggcggcactgggtgtctccaaattgagcctgtgccagctgggtgttgctctgagggcagagatgcctcacagccccgcagaccccacacaagggccagcagggactatcctacctgtgtcatgtgaaggcagggccgcaaggtgctccacagcccggcctggaggcagcc

SEQ ID NO: 213784 - DNA, 36 bp, Homo sapiens
  chr10:126709396-126709432
  hypo
tgtggagggggtctgcgctgtcgagggggacacact

SEQ ID NO: 213785 - DNA, 1515 bp, Homo sapiens
  chr10:126714934-126716449
  hypo
ttagtcaaggccacccctgcctgcagggggtacgtggggctcagacgcgctgtcagggcgcaaggggtgggagagctgtacccggagttggaggggaagtgtggggcatgggtgcccacgccaggggcagaataggtggctgccgtctccaggaggtgctgagatggtgcgctggagggacggcgagccgggtctccagctcggggggatgctgtctgcagaggagccgcagcgcccagagaagccaagtcaccatggagcagttcgcttcggtggctgaagctgctggaccgcgcccggggcagcgggcccccccggtcctgcctccgcagctgcatttcggtcctgcagctattggccaggcggctcagaacacgggcctggcccaggttgggtgcgacagacttgatatccgcgtcctccagggtagccaggacggccggggagtcaaagccctgctgcagtagggctcccagcgtggcctctgccagcccctccgcccgcagaaaggccaggaactcagggagcacggtcctcttgccaccaggaccctggaaggtggacaggtcagcttcgtaagtctcgtaagccatcttggatgggatgctttcccgggcaggcccgtagccacgattcagggcccctggggccacccctgtgctgccttcgggggcagcagctgaactggggtccacaaccaggcacgtcggggccacctgtctggcaggggcagggtcaatgggtctttcgctgatgtcgctgaagacctggctgagggggtaggcaggcacctccgccccatacctggtgtcgggctgctcccgtccataccgcccgggagatgcagccctgctctgtgtctgccgcccctgagggatcattttacctccaggatcccggtacaggtgaccggcgtcctgcagggcaggtgaccggccttgcattggatcccatgacgttctgctgccaagcactccgtagctggggaccggccggctgactcctgggtcccgatagaggggaggctctttgggtaccctagcagctccagacggatcactgtagtactcccgtggcagcagggggctgcgaccagacatcactgcctgtctgctgtcgtagaaggtgaagtcaggagtagacccctttcttgcagccactgagttataaacggcctcccggtacaggtagggctcggcggccacgggcagggcagcgtcctgtggtcggtggtttggctcaaaccaagtcccctctgctgtgccatacgtcagggagcttctcctccccagaggccgcagggactcggcgttctcccaggggccctcgtaccacccagcagcatcccagctctgagaacgaccaatatttatatgcctgctgggaactggcattggaaaaaaaatgactgcggatgaggcagaggagaagcttttctttataaatcttcaattacatacatcaaaaacagacctggctgtgtgctaacccttccgagacggcagggacaaccaa

SEQ ID NO: 213786 - DNA, 306 bp, Homo sapiens
  chr10:126732716-126733022
  hypo
gcctgggatcccaaacgacaggactcactcctggaaagcttccttcaccgcagcctacagggcctctcagtgcacccacaggctcatccaggagcctgtgcgaccactgtgccaagatgaggagacagcaacagtccaggcggtggtgacacccagctcttgcacacatagccgaggatcctgctggtgtggtgctggcggcacatctgcagatacggtgccagttaacagggccttgagaacgccagcccaccaatgacttctgcccagaaaacactctgacttttcatccggagttaacagcca

SEQ ID NO: 213787 - DNA, 89 bp, Homo sapiens
  chr10:126751063-126751152
  hypo
acccgctggcagcacgcagcagaactcagcgcgaggggttagagttagggttagggtcgctgccatcagtaataaaaaatacggaggga

SEQ ID NO: 213788 - DNA, 285 bp, Homo sapiens
  chr10:126767711-126767996
  hypo
tctcgaggaaaaaaaaaaaaaaaaaaaaaaggtggaaaaaccagcccctgatgggccaccaggagctttcgggagcctgcccgggatatcacccggctccaccatgtgtgacgctcctgctctaaagtacacggaggacacagggcacagcgcctttcacagccactggctcacatgccagtccacggttcccagcggtggcggcattcctctccagggaggaaaatgctacagaatattcaccaccggtcaattcatctgcccggttggatctccttccaaact

SEQ ID NO: 213789 - DNA, 540 bp, Homo sapiens
  chr10:126771800-126772340
  hypo
cattctcaacatactttccaaagctggaaaaaagcacagccaagtcactcagaaaagcctctcttgatttggcttctggataaaaaagagtctccctgtcgtgccagatggggtcaactactcggtgaaaacagaggcccattccacaggcaccactgctgagcctctgagttcccaggacagggctgtccgaggacacaacactgacagccatgtgcagacccccgacctgggcgaggataccgccctctgagactcagtcgcctgtctacaaaaaaggaaaagataccacattaccgtgaccatctagtctaatgaaaatgccaccaggatcaaagaccataacgcaaagccctctgtttgcaccttagtccgaacaagcacccaggatacactcgctgttgtttgtttgtttgttttaaggcaggatctcactctgcctcccaggctggagtgcagtcttgacctcctggactccagccgtcctgccacgtcagcttctcaagtagctgtgactgtaggcacgcaccatcacaccca

SEQ ID NO: 213790 - DNA, 38 bp, Homo sapiens
  chr10:126772640-126772678
  hypo
cgcctggccccagctacgttttttgattttttgtagag

SEQ ID NO: 213791 - DNA, 199 bp, Homo sapiens
  chr10:126775428-126775627
  hypo
ggccctcagggagggggctccgcctctagaacacaagttcagtgggagcgcggccactgcacctgcggatcctgaggaacagtccacgacacacacgtgcgcccacacacacgatctctgaatggatggatgactgagtctgaagagatcatgagccagccctgattcttcagccctaacttcaaccttgaaaggaaaa

SEQ ID NO: 213792 - DNA, 266 bp, Homo sapiens
  chr10:126789760-126790026
  hypo
cccagtgacctgaatctaaccgcctttcatgtgaagtggccgtgttcccggcctctcccagtgtggctctcgagagaaagcctcatgtcttcgtcctctccatggctggcctcaggctctttggtcacacttaatgttcaggcaaattgcagagacctcaagccatttaaaggagtagagacatgttcccagggaaggatgtccattacgaaacagatgtccaggtgggcataggagcgggtgcagcagcatggtgccagcacctc

SEQ ID NO: 213793 - DNA, 421 bp, Homo sapiens
  chr10:126819309-126819730
  hypo
agcatatttagagaccgactgtactgccagacaagactagcggaactctaactcccaggttgccttgatctgaacaggttctagaaactgccaagcatcgccccctcattttagagggaggcaccctgccacccagagagggcaaagggctcgctgtccaagctggagaaaatccctgggtatcgcctccgacccactgtatctcaaatacgatgtgtgttggctcggctcttccaaaaaccgaagccaagacacgatcagctctggaagagacttcttggggaggcagacaggcggggaggcagagggagacgcaagtctgacagcagatgcagatgagatggcagggaaggcaggaggctggggaggaggagtcttcacctgctgtccccggctgggagcagcccgcagagtgcaggct

SEQ ID NO: 213794 - DNA, 404 bp, Homo sapiens
  chr10:126830138-126830542
  hypo
gaagtcacaggagcacggaacaggaagcagggagacagcacacagtaagcacatggcaagcacacagtaaacacacggcaagtacatggcaaatacacagcaggtacacagcgagcacacagtaagcacacggtaaacactcagcaagtacatggcaaatgcacagcaggtacacagcgagcacacagtaagcacatggcaagcacacagtaaatacacagcaagcacacagcaagtacacagtgagcacgcggcaaacacacgacatgcacacggttagcacactgcccggctccctccaaagccacttcccccacagagaaaggagaaagcggccctggcctggcagtcactcacagtccctctggacctggagccagcggctatggcggacgaagaggcac

SEQ ID NO: 213795 - DNA, 280 bp, Homo sapiens; identical to SEQ ID NO: 202358
  chr10:126847584-126847864
  hypo

SEQ ID NO: 213796 - DNA, 623 bp, Homo sapiens; identical to SEQ ID NO: 202360
  chr10:126849522-126850145
  hypo

SEQ ID NO: 213797 - DNA, 218 bp, Homo sapiens
  chr10:127464203-127464421
  hypo
tgctgttcttccagcttcctcctacctgagcagcgtggaggtcggcaatgggcttggcctggcgcagtggggacggctccaggtccgagcggtcccggctgtggaagagactctcgggctgggtgggccagggagcagccagccagcagagcagcagtgtcggacggaagatggaggcggcgagcattggcctggtctgaacccttgccctccctgcc

SEQ ID NO: 213798 - DNA, 259 bp, Homo sapiens
  chr10:127817216-127817475
  hypo
tgggaatgtgtgcaagtgggcgcctgtgcgagtgtgtggtgtgtgtgtgggaatgtgtgcaagtgggcgcctgtgcgagtgtgtggtgcgtgtgtgggaatgtgtgcaagtgggcgcctgcccatgtgagtgtgtggtgcgcgtgtcggaatgtgtgcaagtggacgcctgcgcatgtgagtgtgtggtgcgtgtgggaatgtgtgcaagtgggcgcctgtgcgagtgtgtggtgcgcgtgtgggaatgtgtgcaagtg

SEQ ID NO: 213799 - DNA, 36 bp, Homo sapiens
  chr10:127937968-127938004
  hypo
cttagaaaaccaacaccaggcggggcgccatggctc

SEQ ID NO: 213800 - DNA, 34 bp, Homo sapiens
  chr10:128767590-128767624
  hypo
aacaccaggaggctgcgtgcgcctgaaattctgg

SEQ ID NO: 213801 - DNA, 44 bp, Homo sapiens
  chr10:128779079-128779123
  hypo
atctcatgcaggaagcggtagctgggctgcgttgcactgcccaa

SEQ ID NO: 213802 - DNA, 140 bp, Homo sapiens
  chr10:128804853-128804993
  hypo
gtccctgggaagcgcgatgagcggtgatgactggtgacgtcaaggccttctcctcgaggctcaggatgggtgcgggactcggggtgttttccacctgtgggtgctcaggctctgattgcgtttcccgcttgtttgctgcc

SEQ ID NO: 213803 - DNA, 254 bp, Homo sapiens
  chr10:128813792-128814046
  hypo
tcaggcagctctgcctggagcgagcgggtcttcctatttcaaggaacggtgcccccgggacttgctagtggttgtgcctgcaaggggcaccgtctctgtaagctgcgcctcctcctaccccaactccccgtggttctgctgacttgaccttcacgctggtccctctcccaccctccatagtggcattcacgtcctgccagccagctaggatcatgcggtggcctccctgctgcgattccatccccactgtgctc

SEQ ID NO: 213804 - DNA, 116 bp, Homo sapiens
  chr10:128816343-128816459
  hypo
cttggagaaaagagccgagagcggctggggctttgttttcttttgcggtggcactgtggtacagagggcctgggctccacaggctgcacctgtcctggctgcggagggctgtcctg

SEQ ID NO: 213805 - DNA, 38 bp, Homo sapiens
  chr10:128874462-128874500
  hypo
aagatccattaagaaaatatcggccaggcacggtggct

SEQ ID NO: 213806 - DNA, 31 bp, Homo sapiens
  chr10:128891890-128891921
  hypo
tacaggtgtgagccatcgcacccatggcctt

SEQ ID NO: 213807 - DNA, 204 bp, Homo sapiens
  chr10:128999161-128999365
  hypo
tcaaaatggagtcgctgtggttcggatgcctctgacatctgcatattccaaagagactcatagatgagcccaacctaagtctgtgatgggcaggttacacccgtcagttcagaagctgtggtagcagatcagccagtgctcaacgcctacgagggaaaagtaactcatatcgccttcgacctgtagggtcgagatcattccctt

SEQ ID NO: 213808 - DNA, 131 bp, Homo sapiens
  chr10:129065863-129065994
  hypo
ttaagaattctcagagatcacgcgcacctcgtcgggagtgcctggctggtactgatgccgcatcccgctggcacttaatgccggaggaggcacttcatgttacgaggaccgaagccaagtgccctctctat

SEQ ID NO: 213809 - DNA, 327 bp, Homo sapiens
  chr10:129195281-129195608
  hypo
tgagcatgagttacacgggcggcgactcctatgtgatctgagcatgagttacacgggcagcgactcctatgtgatctgagcatcagttacacgggcggtgtctcctatgtgatctgagcatcagttacacgggcagcgactcctatgtgatctgagcatgagttacacgggcagcgtctcctgtgatctgagcatcagttacacgggcagcgactcctatgtgatctgagcatgagttacacgggcggcgactcctatgtgatctgagcatgagttacacgggcggcaactcctatgtgatctgagcatgagttacacgggcggtgt

SEQ ID NO: 213810 - DNA, 447 bp, Homo sapiens
  chr10:129195668-129196115
  hypo
gttacatgggcagcgactcctatgtgatctgagcatgagttacaagggcagtgtctcctatgtgatctgagcatgagttacacgggcagcaactcctatgtgatctgagcatgagttacacgggcggtgtctcctatgtgatctgagcatgagttacatgggcagtgtgtcctttgtgatctgagcatgagttacacgggcagcgtctcctatgtgatctgagcatgagttacacgggcagcgactcctatgtgatctcagcagcgtctcctgcatgacacaggtagtagctcctctatgacccgggcagcgactcctgtgtgacccgggcagcgactcctgtatgacacgggcagcgactcctgtatgacacgggcagtgactcctgtatgacacgggcagtgactcctgtatgacccgggcagcgactcctgtgtgacctgtgca

SEQ ID NO: 213811 - DNA, 196 bp, Homo sapiens
  chr10:129236892-129237088
  hypo
atttctttgcattgacgtctatttttccccattaaaaaatagacaaaatatttctatataaatctctaaaagacgagggttccccttttgaaatatgccctaaataccatcctcccatcgtaaatgaacaattccttaatatcatcatcaaatatccggtcagacttcacatttgccctatcgtgctaagtgttct

SEQ ID NO: 213812 - DNA, 200 bp, Homo sapiens
  chr10:129237715-129237915
  hypo
ccgcagggcctggggcgaggccgctctgctgctaggctctgccgctctgttggacttgtttcctacacatgtcctaatatcccagaagatgagcaggagtccttttgttgtcaggaaacagtccttggtgtccgctaatgccttccccttgccccttgctgactggaactcttctaagctagttacggcccaagtgttaa

SEQ ID NO: 213813 - DNA, 698 bp, Homo sapiens
  chr10:129245252-129245950
  hypo
gcaggggcctggcttggcttcgaaagcagtagcagcagcagcggagacggtcctgtggcacccagctgtttaacttccaccgaggcagggggcccgagcagggacagaagaggccggggtgaacatcaccctttctacagtggctcgatgccttgcttcacactccagttttagtgttcgtgtgatacttgctattctctttctagaacattgccgttaggagagggtcccaccctttgtgttcgctccctccctgccctcatctgctctgttgacaaacgttttctgccagatgaagtgtttctgctgtgcctgcctctctgggagggaacgtggagcagctccctgagcattcaggctccgtggggaagtcgggctgattttaaatagatcccggttttccaggcttggagctgaacggcatgacgggggcggacgtggccgatgtcccaccccctctgcctctcaaaggcagcgtggcagattacgggaatttgatggaaaaccaggacttgctgggctcgccaacacctccacctccccctccacaccagagggtaagtcggcaatctgaaacacaggctttcattgcttcgcctccacaaagtaggacgagtccctcattccagatactagcaggtttacttcgggctagtgagcacatgaggaaaaccatgtatgatgggcccgggtttgat

SEQ ID NO: 213814 - DNA, 48 bp, Homo sapiens
  chr10:129245980-129246028
  hypo
tccagtgggtaagatctgtggctctgcgtcattatcaataactgcatc

SEQ ID NO: 213815 - DNA, 130 bp, Homo sapiens
  chr10:129907594-129907724
  hypo
ctctaatacactgccgtcttaagggagggcttgcagagcatttatcagatggctgttttgctgcattctgtgcactgaagaacacatttcctcctgaaataaaaacatacacaataaaaacattctatta

SEQ ID NO: 213816 - DNA, 62 bp, Homo sapiens
  chr10:129907754-129907816
  hypo
cataaaatatggtaaaaaactaaatatttagcttcgtattcactgaacgacatgaggctact

SEQ ID NO: 213817 - DNA, 44 bp, Homo sapiens
  chr10:130203290-130203334
  hypo
ccaggtcaacaggaccccctcgcacagcggtgtgatgtgtaagc

SEQ ID NO: 213818 - DNA, 216 bp, Homo sapiens
  chr10:130300171-130300387
  hypo
tgacctctggctcaaagacacgagctgagaggatgggcgtgtcctggaaatcatcacacggacattctccgcgtggatagcgctctttgtccaatcattactgggacgttctccgcgtggatagcgctttctgtccaataatcactcggacgttctccacatggatagcgctttctgtccaatcatcactcggacgttctccacatggatagcatt

SEQ ID NO: 213819 - DNA, 189 bp, Homo sapiens
  chr10:131566934-131567123
  hypo
gggcctggtggcccgggtgtgcgagccgcgagtgctttccaacagagggcaccagagccgtgcggtgtgctgtggagaccccagcaccacttcccctgctggaggatggatttgaaggagggtggctgggcggcaccccgatggctccctgtgctccctgagaccctacaggccgccctctgcagccac

SEQ ID NO: 213820 - DNA, 191 bp, Homo sapiens
  chr10:131577565-131577756
  hypo
gccctgcagtgtgggcgtgagtgcccgtgtggtcgtttatgtcgaggactgtatgctctgaccacgatgccacgtgacccagttcccaaacatacgaacccacgtctggacctcagtgtgacttaagaccaagggcccgagatggcaccgggtgcatccgcgtcggcgctgaattcgagccatggttgaaa

SEQ ID NO: 213821 - DNA, 392 bp, Homo sapiens
  chr10:131638468-131638860
  hypo
gaggacccagcactggcccacggccccgcaccaccctcaccttgcagtccattcccgttggcgctggtgcaggaaggaggaggagaggcttggggccggaccacgggcgcgaaggcgctcttctgtttcactgcggagatgacattggcaggtgagaatgagaaaatgccgtgtgtgctgctacagtttgaagggagggtgaccgaagaggctgccatggtggggctggacggcactactgcaacaaagcaaacacggtcagcacgcgcggccgcggcacagcgccacggcgagagggcaccaaaggcctcgcctcggacgggggggcaggggcacgaaaacaaaacatgacatgcgtctggctcggccacgctctggataacaggcaagct

SEQ ID NO: 213822 - DNA, 162 bp, Homo sapiens
  chr10:131647557-131647719
  hypo
atacttattggagtacattacttcttgatgtagatggcgttttccgtggagtcactccacggtgcgtggcacaacataaatcagaggtttttcggagactaataagacctgccaccatctattcattactctgcctgcaatttgggccatcactcattagta

SEQ ID NO: 213823 - DNA, 175 bp, Homo sapiens
  chr10:131686725-131686900
  hypo
gttcacaaggccgcggaggcccagtcccactggtgaatggccattgtgtttgtccagctactgatacctgcgcttttgtggaggaaagaaggccggggccacgacatcggcgcagcacaagcatccctctgtgcggatgcccagagcgggtcccggccgcggtgggaaccgaaca

SEQ ID NO: 213824 - DNA, 192 bp, Homo sapiens
  chr10:132992257-132992449
  hypo
tgagattctgataatgttgccgcattggccatctcacgcactgtgctgattaatagccacacctccaacccccagcggcgtgcctaggcttccggcactccggccacaccacacggcatggagctttgacccgtgccaaagcagtgggaatgcgtgtcttcataaaggttcgctttgctttttgttgctcca

SEQ ID NO: 213825 - DNA, 174 bp, Homo sapiens
  chr10:133058420-133058594
  hypo
ggtcccacagcgcctgggcccaggccaggggcatctaaccaggaagcctccgcgcgctcgctaaggcagcaccaggcgtcgggacggcgctccgagcctacctgagacgggggacgtccggaggggtattttgatgggtgccaaggtcaggaagtggcgcggctgcacgctgga

SEQ ID NO: 213826 - DNA, 89 bp, Homo sapiens
  chr10:133557718-133557807
  hypo
ccccagagctggactcggtccatgactggggagccagcctgtagcactgcacggggcatgatgccggagtgtcacgaagtgggaaatgg

SEQ ID NO: 213827 - DNA, 202 bp, Homo sapiens
  chr10:133783038-133783240
  hypo
cgcacacgggagggcgaggtggagacacgggcagcgctcaggtcccggcccaggaaactcagtggcttttatcccgtttccttcaaccccagatgtgagccctctggccaacctacctaacccacctgcccccagtggcattccggtctttccagtctgtccaacacacggcagccacagaacactgtctgcacgccaggac

SEQ ID NO: 213828 - DNA, 34 bp, Homo sapiens
  chr10:133790491-133790525
  hypo
cacttattggcacagcggttcatgcctgtaatcc

SEQ ID NO: 213829 - DNA, 318 bp, Homo sapiens
  chr10:133920809-133921127
  hypo
caaaacacatccatctgtgacgccccgagggacacacgctccttgatggtcaacaggccaggcttgcgggctccccaggtgccggcaaggttccagggccggcgtctgagggctgcaacccagacccgctgggcaccctgcggggcatgtttagttgtacctggaggagaggatgtgctctcttggcacaacgtgcagaaggcaccggaggaaaggaatggagaagaagcctgtttgcctcagagctcctcatcctggacgccctcgccagagggttcatgttatggtttcctgcataagcgatctgagccctgcctc

SEQ ID NO: 213830 - DNA, 592 bp, Homo sapiens
  chr10:133953707-133954299
  hypo
ccaagggcagggccaggacccgctcacccacgggactccaggccccttccccacccgccctgccagccttgccatagagcgcccctcacacccaggccacctcctcggcctgtgccagggacagagatgggagtgtgtcgcagggtggggctgcggcccccaccgttgggcagcgggaggaggcggcgggaggaggcggctgtgcctgggtctggtttgaactgacacgtcgcattttggtcacaagccggtggttgtggagaccttctttggatacgacgaagaggcttccctggaatccgacggctcctccgtctcttaccaaacagacaggacggaccagaccccgtgcaccccggacgatgacttggaggaggtaacgagggtctcctgccgggtcctgggcttggaggaggtaacgagggtctcctgccgggtcctgggcttggaggaggtaacgagggtctcctgccgggtcctgggcttggctgggcatgggctgccggcttttcacggggaagcccttcgcggccctcactggcactgacccgctgatagctgactcgggcacggtgagaagctcccatgacat

SEQ ID NO: 213831 - DNA, 72 bp, Homo sapiens
  chr10:133955513-133955585
  hypo
caggttggagggacgctggacgcagagcgagaagttaaggtctacgtgacttccaccgcgcgttccggcccc

SEQ ID NO: 213832 - DNA, 115 bp, Homo sapiens
  chr10:133982694-133982809
  hypo
gacagggcctgggggctggtgtggagcgtggcgtgagctgtcgctggggcagggtctgcagacatggtgctccacggggacctggcgtctggcagagctggtcctcctcccactt

SEQ ID NO: 213833 - DNA, 93 bp, Homo sapiens
  chr10:133982961-133983054
  hypo
actctgggtgctcccagcagggagggagggaggtcaggactctgggcatgctccaccgtggagctttcctcgccagcggggttccctatggga

SEQ ID NO: 213834 - DNA, 219 bp, Homo sapiens
  chr10:133983713-133983932
  hypo
gcataacatctctaactgtgcggcaaggacagcgcagccagaggtcgggagctccacagcctccagggtcccccgagggcggctggggacagggaacgccccacagcacaacaacacacacggcgtggacatacgcacctccccgccatacgaacctccccgcggaggcttcccggctgcctcactcccaccccctgcgggccaggcctcacagcaggg

SEQ ID NO: 213835 - DNA, 105 bp, Homo sapiens
  chr10:134044632-134044737
  hypo
gctctccccgtcacacgcatcccatcacccacagccagggagcagggacagaagagccacctcgagacagggcctggcctcgcacacccacggctctgctgtcca

SEQ ID NO: 213836 - DNA, 333 bp, Homo sapiens
  chr10:134053690-134054023
  hypo
ctgagtttcatcccagaacccggacacctgcaagctcttctcagccagtgctgctcgccacctgcagcgagtccccccgatggatgaggaaccctcagaaccagctcctcccggcgtggactcagaggccacaggctcagccacggtgtcacagtcacacatggcagggtggtcctacagcagccgctggcgggttgccatagcgaccacaggcactgtcttctcgctgagacggcacagggggcccaggtaaggtggaatccagaggccacgtacacaggccctgcacgggggcatggagctggggagcccggccaggcagaccttcttcac

SEQ ID NO: 213837 - DNA, 87 bp, Homo sapiens
  chr10:134065942-134066029
  hypo
gcgtgatttacgccgtgcagtgatgctgtcagcgcatccttcacccgtgctgtccacctctcaaattaagacgcaggtaaaaggaga

SEQ ID NO: 213838 - DNA, 37 bp, Homo sapiens; identical to SEQ ID NO: 202373
  chr10:134120669-134120706
  hypo

SEQ ID NO: 213839 - DNA, 387 bp, Homo sapiens; identical to SEQ ID NO: 202374
  chr10:134121014-134121401
  hypo

SEQ ID NO: 213840 - DNA, 104 bp, Homo sapiens
  chr10:134164631-134164735
  hypo
tcccacatcacccagcgatgggattccgacctgctgcagcaccaccccatgcacctgaactccaggcacgtcacatcgtccagcccgggcgagctgctggccag

SEQ ID NO: 213841 - DNA, 129 bp, Homo sapiens; identical to SEQ ID NO: 202375
  chr10:134209484-134209613
  hypo

SEQ ID NO: 213842 - DNA, 128 bp, Homo sapiens; identical to SEQ ID NO: 202376
  chr10:134209650-134209778
  hypo

SEQ ID NO: 213843 - DNA, 445 bp, Homo sapiens; identical to SEQ ID NO: 202377
  chr10:134210400-134210845
  hypo

SEQ ID NO: 213844 - DNA, 380 bp, Homo sapiens
  chr10:134212612-134212992
  hypo
gagtcccagggctcctgtttccagccctgcctcggaccgcagggtgctgacctgccttccccaggtgccagtttctcatcagggcgtggtgcccgcccttatcccctgcatgtgacagtggaggcccagtccccaagtgtgggtgctgactcacagggaagagctgctgggagccctatgacaggtgtccgcccacctcagggaacctgtgggtcccagcacaaccggcgctgttgagcgcaggcggcgggcagccaggcacctgttcagagcaatcccacgggaatggcggccccgctcacacaggcgccgggatgcagggctgaggtgggcccagcagccagcgtttgttgtcggccggtttgggagatggcattctc

SEQ ID NO: 213845 - DNA, 43 bp, Homo sapiens
  chr10:134276612-134276655
  hypo
gtggccagtggggatcgggtcaattccacgaggctccacatct

SEQ ID NO: 213846 - DNA, 81 bp, Homo sapiens
  chr10:134279122-134279203
  hypo
ccgtcagtcacaccgagcccagcctggggaaggccccagaagcaggagtgtgcagcctcacagaccgcacccggccctccg

SEQ ID NO: 213847 - DNA, 105 bp, Homo sapiens
  chr10:134279498-134279603
  hypo
caggcacccggaccacgcagggggccttgtgcaggacaggggtcatgtctggtcccgtccaggtcaccttacaggtgagacgcccgggcccgcaggttgaggccg

SEQ ID NO: 213848 - DNA, 106 bp, Homo sapiens
  chr10:134280450-134280556
  hypo
agccagtggggccatcgccttggtgcaggttccgtgggaaagggtcctttttccaacggggcgggaagaggtgccaggcagatggaagtctcggtttccccaaagg

SEQ ID NO: 213849 - DNA, 53 bp, Homo sapiens
  chr10:134302492-134302545
  hypo
agtgtggagacccaacgcacacctcagccaggtgaccccgcctagggcagggt

SEQ ID NO: 213850 - DNA, 420 bp, Homo sapiens; identical to SEQ ID NO: 202378
  chr10:134351274-134351694
  hypo

SEQ ID NO: 213851 - DNA, 55 bp, Homo sapiens
  chr10:134421293-134421348
  hypo
tgcggggtgggcccgggctgcgcctctgctcctgccccacgttgtcttcacagga

SEQ ID NO: 213852 - DNA, 36 bp, Homo sapiens
  chr10:134457709-134457745
  hypo
tgcccggggagcccacgcccacgcccaggagggagg

SEQ ID NO: 213853 - DNA, 209 bp, Homo sapiens
  chr10:134477300-134477509
  hypo
ctcctcttctgagccgtgagctgggcagggccgcgctcacatcattcctctccccctgtcgccgggtgggaaatccgtaacaggctctgtggcaaaggctgggccaaggtgcctcgtgggcagccgatccatcaggcggccgacaggcgtgatcgagtgccgtgtcacacgcagcccaggaaacaaacacgccgcgcgaaaggtattgg

SEQ ID NO: 213854 - DNA, 281 bp, Homo sapiens
  chr10:134491114-134491395
  hypo
aggccatctcgttccatttcagttgctcctcaccgtggtaatcggaaatgttaacgggcgcactcgtctggtggaatttatcgtggccagcgagggcgattaagcggctggtatgtggcgtgtttaccctcgtgtcagcatgactggtgttccaccctggcagatgaaggcccggtccttcctgggctcctaattggggacactacatccaagagccgtgacagggttcagcaacccgcgtgcagaatgccggcttccacggggcacgctttataaaatgc

SEQ ID NO: 213855 - DNA, 220 bp, Homo sapiens
  chr10:134499553-134499773
  hypo
tggtgactgggagcttcagttgcccattagctcccaggctgccttcagagaccagggtcccaccagtgcagccccagccagggcccaggttagccggggtctggatctcctgtgtggcccgcaccggatcgacttttcggtgccccaggggcttggctttgtccagtggaggccgcttcccggctgtgccgtggcctccgggggctggaggactcctgcc

SEQ ID NO: 213856 - DNA, 205 bp, Homo sapiens
  chr10:134517971-134518176
  hypo
gttggacgccagcccgcggcggctgctggtgcgcagagccacccctcgcagcccgccggcaacatgggctctgtcctcccctccttgtacccgaggccccacagctgggacttgaacctggcagcctggcagtcctgtcttacccactgccttgaggccctgggtgctgctggtgtggatcctgtgcgtggctgggccgtggggg

SEQ ID NO: 213857 - DNA, 326 bp, Homo sapiens
  chr10:134527001-134527327
  hypo
tgtgctgttattagcgggtatatggccttggctctcctctgcatctggcccttgctgagggccctgaggcgtggccccttatcccctctgaccgcccctgacctccgtctccagagtgatggagccctggtcccctgccactagcctggtcccggggagggtggcaactgcgaggcctgggtgctgctgtgctcgtggccacacactgaggccggccctcagccctgtgcacggccacaccctctgcaggggacctgtccggcctcccggatatctctggagctggcactgacaccgaggcagggatcggtctgagcctggggact

SEQ ID NO: 213858 - DNA, 172 bp, Homo sapiens
  chr10:134559539-134559711
  hypo
ggtagggcctcggcgttgcctgcacgtgtgcccagatggcttcttcggagccctgagtgggcccccgaggctgtgtgtccacttggcccaggcagggcgctctggacacctggtgattccaggtagagagtggagcccaggcgcctgctggctgtgcgtgcggtgcctggag

SEQ ID NO: 213859 - DNA, 297 bp, Homo sapiens
  chr10:134562783-134563080
  hypo
ggtgtcctcacggttgcagccacgctttgttggggagcagccagcctcaggcccttcgcacgtgtgagggtcggctgttgcgggagtggcccctgaccccaggtgcggaaatctgggtgtgacaccagctgctgtctggaaccagccatcctatcccactgactcggggtgtcgggtgacgctgccatgggcaggtgggcccccctgggacttatctccgttgctgtctttctgcagacgctctgcacaaaagccaccatgcagacggtccgggccgccgacaccaatgaagtggtg

SEQ ID NO: 213860 - DNA, 144 bp, Homo sapiens
  chr10:134577903-134578047
  hypo
tgacactcaggaacacggtcgggtcagtcctgctgcggtgggagggtgtgcgtggtgacactcagaaacacggtcgggtcagtcctgcaggggtgggagggtgtgtgtggtgacactcaggaacacggtcgggccagtcctgca

SEQ ID NO: 213861 - DNA, 208 bp, Homo sapiens
  chr10:134589801-134590009
  hypo
ggctcccgctggagcgcgcggaggatgggagctcctgcgtcagggcagagcaagttcccagtccccggctgtttccaggtggttgggcacagggcccacaggcgcccctgtgggcagggtccggggggcatgggaggggctgcagaatccgcagctgaggtgccgggatggacccgaaacccaatcacagccaacagggaaatttcac

SEQ ID NO: 213862 - DNA, 276 bp, Homo sapiens
  chr10:134593053-134593329
  hypo
tcactcacagcctctcgggttctctggatccgggacttgacactttatgctcagggtgggggacagagcctcacaacacacacctggcggcctttgacagcccctgccttctggggctggagtttggacaggctctccccatggggccacccagtgggcagcgggtgtgcaggacaagcagacgggcgccgggcgcgctccgcagcctcatccatcatgacacgcgccgtcacctcgtcaccaagctccgttctgcctccggagccctaaaacacc

SEQ ID NO: 213863 - DNA, 148 bp, Homo sapiens
  chr10:134593416-134593564
  hypo
ccgtaatttgtttatctgtccaaagattatgcagttgaaaatccacaattttatgctgcctttgtaaattaccacgctgcgtttgatgaatgtttctccacttctgcggaggcgccgcttcacccgcgagaggcgggaaggtgctcat

SEQ ID NO: 213864 - DNA, 131 bp, Homo sapiens; identical to SEQ ID NO: 202380
  chr10:134602414-134602545
  hypo

SEQ ID NO: 213865 - DNA, 202 bp, Homo sapiens
  chr10:134606352-134606554
  hypo
cctggctgctgggagctgccccgtgcgagtgccccgccttctgcagatggaatctgtcatcttcattcacttctcaggtgaagttcttaaaagggtggcacggcccaagctccttggtccccagcggagctgccccatctgttggcaccgctcaggtttctggccatgtgacttcggccctgacgcccgcctgcgttgcccc

SEQ ID NO: 213866 - DNA, 54 bp, Homo sapiens
  chr10:134610520-134610574
  hypo
ccttccctgggagccgtcaagcatgaacctggatgtgcctggcctggtcccggg

SEQ ID NO: 213867 - DNA, 50 bp, Homo sapiens
  chr10:134620149-134620199
  hypo
atgagactggttcaagctctcggtgaactgcgggtgccgtggttcctttc

SEQ ID NO: 213868 - DNA, 127 bp, Homo sapiens
  chr10:134620229-134620356
  hypo
cgagacacacaactggtgtgtcagcagcgggcccccgtgccaggcacgctaactgtgcagtgctggagctctgccgccttgagatgctctgcaagccgcaccctgcggtgtgtgaagcttctgatgc

SEQ ID NO: 213869 - DNA, 201 bp, Homo sapiens
  chr10:134664806-134665007
  hypo
caactgagggggtcaggcatgcctctgaagcatggaagcttctggtaagcctgaatctacatccccacaacttggatgaggcataaccgacgtaagaaactcataacaaactgcgcagatctacagtggaaaactgacacactttgatcacgaatacacccgtgaaaccatcaccaccttcgagataatgcagtagccctt

SEQ ID NO: 213870 - DNA, 385 bp, Homo sapiens
  chr10:134680972-134681357
  hypo
ttatttttctcttttttcaacgcgatctcttttctgcagctaatgcgaggaaaacagacaatacgcaagagccacatggccacgaaaatgtcccttcacgagtaaccaaagaaacgcaaacgaaaacagccacaattacattcttcacgcgcgtgtttacaaagatttttaaaaatcctcaggatctaacggcacatccgactcccaaatttgtgtccatcactggttctctcttccaaactccaaggtcatgtccagctgctgtttgacagccaggggtgtttaatgagcatctccgactccatctctccggcgtgcccagccccggccccgctgtgcctcccgcgggcacccccaccggaaagttcggaaccaactacaggtc

SEQ ID NO: 213871 - DNA, 258 bp, Homo sapiens
  chr10:134698467-134698725
  hypo
tgcattctctgtgcccgtcagctgtggctgctctgcgtgctgccccacaccaggtccctgctgagcttctgtccacacggttctccctttcactaaaggacaaattttaccacgtgcacccacgcttacggcttcacacctgcaaggcctggatggcgttgttgtagcaggccagctctccagacacgctcggcgagttcagggccaggcggtgccacatgcgcgccaagtagtcctcactctcggccttgaatttct

SEQ ID NO: 213872 - DNA, 360 bp, Homo sapiens
  chr10:134722189-134722549
  hypo
ccacggcctgcagcccccacggaccacgcagcgcatgtgatcctaagcagaggcgtggcctgtgaagggccaccgtgccacaaaagctgagctgccacgtccgtgcctgtgaggacccctgatgtccttgtagctcccacaccccacagggtgtcctggacacgggactggcgtgtgcagcccttggctgcccctgagcggctcagggttgggtgggaatggagggtccgctcaaacagcgtttgcctcgcaccaggagacagggatgctctgagcatggagctgaaggaagtgcgtcgagggggcgcagctccgttgggaggtgggggagagcggggcagagtgggggtgagcatgcac

SEQ ID NO: 213873 - DNA, 178 bp, Homo sapiens
  chr10:134733835-134734013
  hypo
gagctcctcacagagctgcagagtggcattgcctgtgtctcctgccggcgatgaggccgagccagtgctcctctgagtgggggaggctccaggaactttggagcagagtctgccaagaccctcctgctgctctgctggctgcgctgtccagctgccctccaagcagaggcacccggcc

SEQ ID NO: 213874 - DNA, 154 bp, Homo sapiens
  chr10:134736024-134736178
  hypo
gggcctggtatagcgtggtgcacagacgcagccgggtggaggccatctggatcctgtcccggtagaggcccaggctgtccaggcgcgcggctttccggaggtgctccgtggcgggctccagccggtcctcgtcctcctcgatctgcgccatctc

SEQ ID NO: 213875 - DNA, 127 bp, Homo sapiens
  chr10:134738018-134738145
  hypo
cacagaggacccgacgtgcctggcccggagctgggacagagggtggcccttattgagtacagggggagtctgttgcttgtggcactgtcatggcaagggggcttgggccaccttctcctcctctgtc

SEQ ID NO: 213876 - DNA, 478 bp, Homo sapiens
  chr10:134738688-134739166
  hypo
gcctgtgctcgctacgcttcccacccccagaatgcctcctccggtctgtgctacacgggcccttcccaggacaaaggctttggccaggatttcagtggagcagtctccccacactcccacctcccacaagccctgctggaccgcccaccgtcctgggctcacttggccacgtccccacagcctgtggcttccacgggggcctagccctcacgctgcccctgggctgggtggggcctgaacctcacaactccatcctgccacttggctgctgggtctgaaagcctcgtacgccggtgccggcccctctgaggtcctcagcaggtgagtcggggaagcagccgcacaacccacagcgccacagccacaagcagcctctgttcactttcacaacaaagtgcaacagccaaagcgtctggaaatcattccttaaacgaacactcattaagcgcctaccacgtgtggcaccagcgcacagcag

SEQ ID NO: 213877 - DNA, 70 bp, Homo sapiens
  chr10:134740788-134740858
  hypo
tatcagacacagacgtcccggggagcaggtcctcggcggcagacgcctccgtcccggggagcaggtcctc

SEQ ID NO: 213878 - DNA, 56 bp, Homo sapiens
  chr10:134740911-134740967
  hypo
tcccggggagcaggtcctcggcggcagacgtccacaagcacgggaagtacccgcag

SEQ ID NO: 213879 - DNA, 193 bp, Homo sapiens
  chr10:134758118-134758311
  hypo
ccagaggcctgctgtatatgcgcccgctggcgttgccatcacggggcactctcatgggcggcttaaacagcgggaaaggaggcgggaaggccgagaacaaggtgcggccggagttggttccttggagggcaccccgcgtggccgtatgtggtcgtcttcttgtctgtgtctcggtgtccaaatgtgcccatct

SEQ ID NO: 213880 - DNA, 70 bp, Homo sapiens
  chr10:134793862-134793932
  hypo
gaggaggagcaagtacctggcgagtgcctggtgagagcccggtgagtgcccggtgagtgcctggtgagtg

SEQ ID NO: 213881 - DNA, 150 bp, Homo sapiens
  chr10:134793968-134794118
  hypo
gtgagtgcccagcgagtgcccggtgaatgcccagcgagtgcccagtgagtgcccggtgaatgcccagtgagtgcccagagagtgcccagcgagtgcccggtgaatgcccagcgagtgcccggtgagtgcccgcaagtgcccaacgagtgc

SEQ ID NO: 213882 - DNA, 198 bp, Homo sapiens
  chr10:134794148-134794346
  hypo
tgcccggcgaatgcccagtgagtgcccagtgagtgcccagcaagtgcccggcgaatgcccagcgagtgcccagcgagtgcccggtgaatgcccagcgagtgcccagcgagtgcccggtgagtgcctgcaagtgcccagcgagtgcctggtgaatgcccagtgagtgcccagcgagtgcccggtgaatgcccagcgagt

SEQ ID NO: 213883 - DNA, 381 bp, Homo sapiens
  chr10:134797188-134797569
  hypo
tcacccctgagctcagaacacggcgtcgcccgagctgaccaccgctccccttctcccgccctccagcccccaacaaccaggaatctcttgccgcctctggattgacctattctggacattccacgtaaatggaatcataaaacatacggcctttcgcgtctggcttatccacggagcgagatgccttccagcttcatcacgccgtagcctgcgtgggttctgggtccctgtcctcgtcactagtcgctccagtgcatggatgagcacgtcctgttcacgcgtcctcgccattggtggtgtctggggggctccccgctgctggctgatgcgaatgttcctgcacgtgtgtttgtgtgaacgccggctttcagctgagggtgg

SEQ ID NO: 213884 - DNA, 43 bp, Homo sapiens
  chr10:134797730-134797773
  hypo
gtcgggccgtctgttacaaaccgtcctgttggtgtgagaatcc

SEQ ID NO: 213885 - DNA, 100 bp, Homo sapiens
  chr10:134807156-134807256
  hypo
ctgtgggcatctgtcttctgcggagtgtgcgtgaggcggcatcgcacactgcggcatctgtcttcggagtgtgtgtgagtgtgtgtgagtatgtgtgagg

SEQ ID NO: 213886 - DNA, 64 bp, Homo sapiens
  chr10:134807307-134807371
  hypo
gtgagtcccgataagcggaaaccgcaacgctccttcagcaccagtgcaggttcacggtttcatg

SEQ ID NO: 213887 - DNA, 504 bp, Homo sapiens
  chr10:134829385-134829889
  hypo
tccgccgcagagtccgcacccctggaaggaggcgtcggggaaggcactgcacccacgcatggcttcgagggcaggaggcaggttgcacagcgggggtcacaggctcctctgtcccaggtgggactgggcgatcccagacacgtgtgctgtggcctctgggcctcatgcggagagcagatgccagggcctgcaactctgacctctgagcacacaggccggcctcagggaagggttgttctggctgtgggaacctgaactcgaaatggcctccgttcgctgcagacactgcccgcctgcaccggggactcagcccaggcagctctgcacacacctcagcaccacccaccctcaggcctcagccgcgctacccagcaggcgcttttgcccagaacgcctgctcagaacaccgtgagccactgcccggcgctgagccggggcctccggaacgtgaaccaagcggctgcagcccaggcccagagccaccggcatcgccccatggcagct

SEQ ID NO: 213888 - DNA, 91 bp, Homo sapiens
  chr10:134878528-134878619
  hypo
gtggcgttccgctgggtgaacacacacacgcacttgagaaggtggcattccgctgtgtgcagggtccagcgtgtgtcaagtaggtcaagat

SEQ ID NO: 213889 - DNA, 66 bp, Homo sapiens
  chr10:134912052-134912118
  hypo
ggggacagagcctgcgccccagggggctcccttccacgcctccccctgcagagcctctgctcatgt

SEQ ID NO: 213890 - DNA, 46 bp, Homo sapiens
  chr10:134912336-134912382
  hypo
ataatattccagcgtttgctcagctatttcccgggaagagggtcgg

SEQ ID NO: 213891 - DNA, 557 bp, Homo sapiens
  chr10:134941895-134942452
  hypo
ggtcacctgtgtgtacttcctgggcacctacgtgcagctgcggcgccacccagggcgcaggtacgagctgcgcacacagcccgaggagcagcggcggctggcgacacccgagggcggccgtgggatccggccaggcaccccacccgcacacgatgcccccggcgcctccgtgctgcagaacgagcactcattccaggcacagctgcgcgccgccgccttcacgctgttcctgttcacggccacgtgggccttcggggcgctggcggtgtcacagggccacttcctggacatggtcttcagctgcctgtacggcgccttctgcgtgaccctgggactcttcgtgctcatccaccactgcgccaagcgtgaggacgtgtggcagtgctggtgggcatgctgcccgccccgcaaggacgcccaccccgcacttgacgccaacggggccgcgctgggccgcgccgcctgcctgcactcgccgggactgggccagccacggggcttcgcgcacccaccgggcccctgcaagatgaccaacctgcaggccgcgcagggccacg

SEQ ID NO: 213892 - DNA, 392 bp, Homo sapiens
  chr10:134980289-134980681
  hypo
acagctgagccctcgcggagtccaggagcccactcggatttggaggtgagcccacatgggggcggccgagccacatggagggaaccgccgtgactgtgtcctccgtgtgaattgcctggaacaaatgttggcagcgcgtgtggttgtaagtcatgtgagtgtcaggatcacgccccgttagctctgcacgagtccacagttggggatgtccactccgtcgcctcgctcatctgttggcagcctccacaggccagtccagccgtgagcctgcggggtcggggtgctccacggagcaggtgacccagcagctctggccgagcctccgggaggaaggccccgtgcccaggctccaggagccgacacctgctctgggcagcacgccgacggtgcca

SEQ ID NO: 213893 - DNA, 229 bp, Homo sapiens
  chr10:134980741-134980970
  hypo
gacgtggtctaaagccctttccctgacccacgcgttgaaacgctgccacgagtcgtccgtttccccagggaatcgtctcggtgggggtgccggggcctggctgggggtcctgccgggctcacggccagggccggtcttggcaggagaacgtgtctctggctgacatcctctccctgcgggaccgcggcctcagcgagcaggaagcctgggccgtgtgcctggagtgcag

SEQ ID NO: 213894 - DNA, 42 bp, Homo sapiens
  chr10:134996909-134996951
  hypo
actggaacccaggctgagccaagacctcgaggcgctgctgag

SEQ ID NO: 213895 - DNA, 158 bp, Homo sapiens
  chr10:135002833-135002991
  hypo
gcttggctccctttcagccgcagatatgccgctgcagccactgtgtcggctggggcagcgctaccctcggggagggctgggaggaggcagctccgaggaccccgggggctggggtcaggccatgtgcgtgcactggcaggtgcgtgcccgtgcaatgg

SEQ ID NO: 213896 - DNA, 353 bp, Homo sapiens
  chr10:135009175-135009528
  hypo
tactgtgtggccgccgttctgtggaccgcagccaagttcagcgtcccccgcaaccacaagctggccctgccacgcaggctcaagaccctcctcctggacatggccaggcgcagtgccccggagcggccgtccgcggctgaggccatcaaggtaaccacaccacagtcatggccccagcccagggtccaaggactgtgggcagtggccgccctcgctgagctgggggtggaggagcacgggctgccagtgtccaggtgatgaggccaccaggtctgtttctaggtccctgtttctagacgtcggcctggccgtcgcatggggaagggagtgggtttcgcgtcatggccacgtcc

SEQ ID NO: 213897 - DNA, 46 bp, Homo sapiens
  chr10:135014642-135014688
  hypo
tccagaagaaaagaggagagcgtgagggggcagagggacacagtcc

SEQ ID NO: 213898 - DNA, 96 bp, Homo sapiens
  chr10:135017612-135017708
  hypo
ggccccatggtgcaggccatgggggaacgtggccaccaccatcctcagaagccaggaccaggtgccccggcagcagaacacagctccatggggaca

SEQ ID NO: 213899 - DNA, 282 bp, Homo sapiens
  chr10:135018070-135018352
  hypo
tgaacccgtgcgtgggagaagacagcacagggaccccgtctccatggaaccaccagatagagcggattcaagtagttaaatagaaatgtcgcctgcatttttttattttgcaaaaaacattcaaaaataaaccctgtcaatagcagagtcactggcggctgacaaggcgagggggtggctgtgtggatctgagccaaccgcacttcacaaaaggaagcctggtggaccggctcgcggatgagcccctcggggcggtcgcttcgggccctgggcacgtgaacc

SEQ ID NO: 213900 - DNA, 175 bp, Homo sapiens
  chr10:135025540-135025715
  hypo
gcacatcacacacatccacacgtgcacatatgcatgcaccttcacacaatccacacgtgcacatgcgtgcacactcaatccacacgtgcacacgcacgtgcaccttcacacagccatacatgcactcgtgtgcaccctcacacatatccacacctacacgtgtgcaccctcacac

SEQ ID NO: 213901 - DNA, 166 bp, Homo sapiens
  chr10:135025748-135025914
  hypo
atccacacatgcacacacgtgcacccgcacacgcatccacacacacacgcatgcaccctcacatccacacgtgcacactcacataccccctccatgttcccggtcccaggcagccctgctgcgctggcacctcctgcaccatcccgggtgctcaggggaggagggt

SEQ ID NO: 213902 - DNA, 220 bp, Homo sapiens
  chr10:135030353-135030573
  hypo
taacaggagggaaattctgacgcctgcggcagcacgatgaacctcgagggactcaggctcagggaaacgagccagtcgcgaagcacggacagtggacggctccacgtacacgaggcgcctggaggcgcaagattcacggagacaaagtagcagggtgggcgccgggggctgggagtggggcacggggagctcgtgttgaacggggaccgagtttccgttt

SEQ ID NO: 213903 - DNA, 40 bp, Homo sapiens
  chr10:135073971-135074011
  hypo
gagagtcaggtgtgcgctgcagagccgggtgtgcactgag

SEQ ID NO: 213904 - DNA, 146 bp, Homo sapiens
  chr10:135081994-135082140
  hypo
ccccaagcccaaccggccaccaaaaccatgccccgccccagcctcaggggaaggtggagtccagagtggcactggccgagtggagccaggaaggcccttcaaactcagcccaagccggggggcgtcatgacgtcggggcacagagg

SEQ ID NO: 213905 - DNA, 151 bp, Homo sapiens
  chr10:135087261-135087412
  hypo
ccacctgaggccggcacaggtgctgaggctggcggctgagtccgggtacccctctacgtggccctggtagaagcagtggtcctgcgggggaagcaggagaggggtccacaggctgtgcccccatggccccacaggctcggggagggccgcc

SEQ ID NO: 213906 - DNA, 77 bp, Homo sapiens
  chr10:135102837-135102914
  hypo
aggcattatgagaaccggatggctaatcgcttcccaaccctttcgtgacggccccgatgtgccgagtccaagtcccc

SEQ ID NO: 213907 - DNA, 579 bp, Homo sapiens
  chr10:135120291-135120870
  hypo
aaaaaataataataaaaaaaataaaaactaccttcaggaaacttcgtatctcttctagaaatagaagcacagatgcccgcacgtcatgagtgttcatcccatgaggagcctgctgctctccctgaatgtggggaccgggcctccaagagggcagcccgtactcgcacagagtccctccccccagaagacctttggaaaagtcctagggcaactctggggtgtcacggtcatggaagggtgctctcgctacttagagggcaagggcgggggatgctaatcatcaacagagctgtcccgccagaaatgcacagcgtcccactgaaaacacagctctgaggaacatctagccgtggctgcttcttggaggaacgtctagccatggccgctgacttggccttcttgatgctcctgaattcttactattaatcacacaaactgacaggcccagcaactgtgactgggagggactgacgtcctcctcacagaggctgtgagctaccgcagggacgcgtgctgagggaagcaatgcacgcatgtcacactccaccacggacaagcggggcacacactcctagtgag

SEQ ID NO: 213908 - DNA, 138 bp, Homo sapiens; identical to SEQ ID NO: 202384
  chr10:135150187-135150325
  hypo

SEQ ID NO: 213909 - DNA, 239 bp, Homo sapiens
  chr10:135153717-135153956
  hypo
tcccccgtcccctccgcctttgtgctgggtcagacccagctgggtttggctctcactcaccctgaggatggccctggcgcccgcatggtgcccagcacacagaaggcgctccataggcatttgcctgagtgcggctcccagctgtgggtggtcagcaatgacaggagcatgcgttggtgatgccttcgttttcattgctaaaccgtaacccattgttcccgctgttaactcatggacat

SEQ ID NO: 213910 - DNA, 37 bp, Homo sapiens
  chr10:135154001-135154038
  hypo
ctttttgttttgttttgttttgtttttttgagacgga

SEQ ID NO: 213911 - DNA, 201 bp, Homo sapiens
  chr10:135204811-135205012
  hypo
gcagctccagatcctgtttgcgggggaagccacacatcgcacgttttactccacgacgcacggggctctgctgtcgggatggagggaggccgaccgcctcctcagtctgtgggccccgcaggtgcagcagcccaggcccaggctctagctgggcccagcctactctgttccacccgtgtcgggggtaggctgggaccctca

SEQ ID NO: 213912 - DNA, 39 bp, Homo sapiens
  chr11:232824-232863
  hypo
tcccaaggaagaagcataagcgataggttttggccgtcc

SEQ ID NO: 213913 - DNA, 161 bp, Homo sapiens
  chr11:233062-233223
  hypo
gtgacgttgggcttgtagtttccagggtacagctccttggccaaagtgaaaaagggcttggggttgtgaaagaagaatgggagttcaaaaatggcctcggggtacgggagatcgtactgctggaggttgctgtacaggccactccccggcgatctgcaggg

SEQ ID NO: 213914 - DNA, 412 bp, Homo sapiens; identical to SEQ ID NO: 202387
  chr11:314083-314495
  hypo

SEQ ID NO: 213915 - DNA, 1659 bp, Homo sapiens
  chr11:375766-377425
  hypo
ttcctcagtgagagggggcccgcgcgggggcgagggcgggggtgcctgccccagccaccctgtgaccgcacctcctgcagctccacgcatggaatcttcgagcctggagaacgtgctggagccctgcgcctacgcccccacctacgtggtcaaggacttcccgatcgccagataccagggcctgcaatttgtgagtgcggctggagaccccgtctcccgtccgggactccgcggagccttctccagccccttgggaggccgccccgggaggtccgcgccctgagccctgcgcccccccaccccccaggtgtacctgtccttcgtttatcccaacgactacactcgcctcacccacatggagacggacaacaagtgcttctaccgcgagtctccgctgtatctggagaggtgggcgcgcggccgggctaatgcggggcggggtgggcggggcgggactcggctctgatgccccgccgcgccccaggtttgggttctataaatacatgaagatggacaaggaggagggggatgaggatgaagaagacgaggtgcagcgccgagccttcctcttcctcaacccggacggtgagtgtccgcagcgcccctggcccgcacccacctgcgcagggagcttctaacccgcgtttcccgcagacttcctggacgacgaggacgagggggagctgctcgacagcctggagcccaccgaggcggccccgcccaggagcggcccccagtcccccgccccagcagcccccgcccagcccggagccaccctcgccccgccgacccctccccgcccccgggacggggggacccccaggcactcccgggccctgagctgggccgccagggccgcccgccctttgccgctcttcttgggccgagctccgcccccgcgccctgcagtggagcagccgcccccaaaggtgtacgtgaccagggtgcggccgggacagcgggcatccccccgggccccagcgccgcgtgcgccctggccgcccttccctggcgtcttcctgcaccccaggcctctgcccagagtgcagctgcgggcgcccccacgcccaccccggccccacggccgcaggaccggcggcccccaggccacacagccgaggcccccagcccgggcgcaggccacccaagggggccgggagggccaggcgcgcacgctgggacctgcggcgcccacagtggactcaaacttgtcctccgaagcgcggcccgtgacctccttcctgagcttgtcccaggtgtccgggccgcagctgcccggggagggcgaagaggaggaggaaggggaggacgatggggccccgggcgacgaggccgcgtcggaggacagcgaggaggccgcgggcccggcgctcggacgctggcgtgaggacgccatcgactggcagcgcacgttcagcgtgggcgccgtggacttcgagctgctgcgctcggactggaacgacctgcgatgcaacgtttcggggaacctgcagctgccggaggcggaggccgtggacgtgaccgctcagtacatggagcggctgaacgcgcgccacggcgggtatgggggcggccgaacgcgcgccagggcggttttggaggcggggacagccggggagaggaggtcctggccttggcggactcctcagaccttcccca

SEQ ID NO: 213916 - DNA, 262 bp, Homo sapiens
  chr11:392314-392576
  hypo
agcccttcggcctgactgggctgcagaggccctccaggctggcttccccctcatgccgcccagcctggcccctgcagggccccaggtgggcctggggtggacctgggtgcagggcgggacccagcccatgccaggcacatacctccaggcccgctctgcgccgcacaaacttgtctcccaggatttttccacacgaaacctgtctcccagggaatcagccagtccgatgagctgggcgttcccaccccgccctccgaggccc

SEQ ID NO: 213917 - DNA, 108 bp, Homo sapiens; identical to SEQ ID NO: 24822
  chr11:393555-393663
  hypo

SEQ ID NO: 213918 - DNA, 269 bp, Homo sapiens; identical to SEQ ID NO: 202388
  chr11:417281-417550
  hypo

SEQ ID NO: 213919 - DNA, 177 bp, Homo sapiens
  chr11:429289-429466
  hypo
ggggagacagacatgggacacgcaccccacacgtggggagacagacacagcgacacgcctcacgggtggacagacacgggacactcaccccacacgtggggagacagacacagggacacgcctcacaggtggacagaccaggacacacgccccacatgtggggagacagactcggga

SEQ ID NO: 213920 - DNA, 51 bp, Homo sapiens
  chr11:429759-429810
  hypo
cagagagccatgaagatggcgaacaccaccgtgccatcattgtcaaagagg

SEQ ID NO: 213921 - DNA, 144 bp, Homo sapiens
  chr11:431645-431789
  hypo
aggcggggccgtccgcggggttcctgtgctctctttgggcagcgttacctgatttcatcaactggctgctcccggaacatgtgtctccaccgcgcccacgtcttcttcaggcgtccctccccctggctcgggtgacagagagtg

SEQ ID NO: 213922 - DNA, 137 bp, Homo sapiens
  chr11:449377-449514
  hypo
aatgttttcaaggtccagctgtgctgtagcatgcgcatgcttcgctcctctatggctaataacatgccgctattatcaaaatgctgcaactaggagcgctagtgtgtaaatttggcgtggacacttgtttccaggtt

SEQ ID NO: 213923 - DNA, 268 bp, Homo sapiens; identical to SEQ ID NO: 202390
  chr11:450011-450279
  hypo

SEQ ID NO: 213924 - DNA, 203 bp, Homo sapiens
  chr11:455934-456137
  hypo
gcccagtgtccaggaggctccgggccccaccccccgccttgctgcatgaccttcacagtgtcacttaccggccctgacttgcctgcgggcaccacgcacacggcatgaaggtgccctggcccggggcacggacacagccagagccaccgcgctcctggctgtcatcacgtcgttggctttgcgatctaaacctgcttgttgtt

SEQ ID NO: 213925 - DNA, 101 bp, Homo sapiens
  chr11:464468-464569
  hypo
ggcatctcccctgcgctcagagtgcctcaccccggctcgggcagtgccagtgcatctgcctgggtgagagcagggtctgtgctgccggccccggcttcctg

SEQ ID NO: 213926 - DNA, 34 bp, Homo sapiens
  chr11:471551-471585
  hypo
gtgacgcacgcctgtcgggcggagggcggcctgg

SEQ ID NO: 213927 - DNA, 195 bp, Homo sapiens
  chr11:472768-472963
  hypo
aaaaaatagatagcgtgtctctgtggccccgtctattcttgcggccacacgaacgtgcgtgtgtgtgtgcagcttccctcacggcagccaaaacccagaggccgcccagcgtgcgaacacgccaaggtgtgactgtcggcacggcactgccgagccgtgggagggactgggtggtgcagcggccagtggatctca

SEQ ID NO: 213928 - DNA, 217 bp, Homo sapiens
  chr11:487548-487765
  hypo
agttgagctcagggtgctctgagtgtggtgggagggtgtcgcactgcagccacccagaggttcgagaagccgtggggctcccggacctcccagaagccctgatcctggtcgggtccccgctccgtcctcagggtcggggcggtggaaagaggcggcagggcaggaagtcccgcccctgcctgggcttgggcactgccccatcccacttctgagggac

SEQ ID NO: 213929 - DNA, 360 bp, Homo sapiens
  chr11:487885-488245
  hypo
aggctgctggaggggcagccacccaccccacgctcaccctgagacctcactgggggccctgccagtgctgtcgactccaagaatgctgccagccggggtgggggctgcacgcacccgtgggcagggccgggcgtggcctgcgtcccatactctggctgccagccgggtgggggctgcacgcacccgtgggcagggccgggcgtggccggcgtcccatactctggctgccagccggggtgggggctgcacgcacccgtgggcagggccgggtgtggccggcgtcccatactctggctgaccctggcgcccacagaccctgatgatccgagactggtggatgtgcatgatcatcagcgtgat

SEQ ID NO: 213930 - DNA, 360 bp, Homo sapiens
  chr11:488485-488845
  hypo
gttacccctcacccctgcaacgagtgctggcccctccctgcagtggatcatggacgtgctcgtctgcaacgggctgggcatctactgcggcatgaagacccttgagtggctgtccctgaagacgtacaagtggcagggcctctggaacattccgacctacaagtacgtcgtgggggctgcgagggcagggccgggtgggggttacctggaggcagcctcagcgtccgtgctccagcagaccccgagcaccaggcccgtccagtgtgcggctcaggaggggtgaccgtggggctttgcctcctggaacctccctctgacctggtgtcactcaagcccggccgcccctcacagtggccatgg

SEQ ID NO: 213931 - DNA, 594 bp, Homo sapiens
  chr11:492551-493145
  hypo
gacacagcctggggggactccgggagccatttgcacccacacccccgggtctgcctcggggccccgggcgtcaaaaagctttacttttagtatttttccttgactacttttggggaaaatttcaagccctctaagtcaagggctgtaatgtggagcacacacaagagcagcctctggggctcagcaggaagacgtccggtgtggccaccgcgcctagcagtcctctttccagtcacggccactcacagctttggcctccgtggccctgcacggatgagttcttccagctgccctgccctgcgtgctgcaggacacatggggccttagcattctgctctttgcaggtggcagctttgatcgctcaggaggaactgccacctgatctccccactgcaggggcccccactccccccctcacgcgctgcgggtcctgtcactccacccacgctgtccatccccgctgatgctctgagccaggtggtagcaggtgggggtggcgccccgctcacggtctccatctgctcttcccgaggagggcgaggcagggcttgtgattaaagtcctgtgttccggcgcccgtgtcccaaaggcagc

SEQ ID NO: 213932 - DNA, 81 bp, Homo sapiens
  chr11:493199-493280
  hypo
gttcctcacgcgctgagatgctccggactcaccttgggcatctctcgccccaggcctggcgtcacccatttccccaaggag

SEQ ID NO: 213933 - DNA, 182 bp, Homo sapiens; identical to SEQ ID NO: 202391
  chr11:518712-518894
  hypo

SEQ ID NO: 213934 - DNA, 37 bp, Homo sapiens
  chr11:534210-534247
  hypo
cctctatagtggggtcgtattcgtccacaaaatggtt

SEQ ID NO: 213935 - DNA, 342 bp, Homo sapiens
  chr11:561904-562246
  hypo
ggggtcaggcaggccgggcaggtagagctgaagtgggacctggtggtccagctccatggtctcccccaaggagagtggggctggttgctgatcctttttgttcttcccaactcttcaagccaggtggacagagagtcggggggacataggctgaccttctcctcttcttcccaggccagactggccgctttgtgcttgtgcagcggcttcgggagaaggagcggcagttgctgccacaagagtgtccagtgggcgcccaggccacctgcggacagtttgccagcgatgtccagtttgtcctgaggcgcacagggcccagcctagctgggaggccctcctcag

SEQ ID NO: 213936 - DNA, 431 bp, Homo sapiens
  chr11:562884-563315
  hypo
ctgtcactcccccacccctgacgtgggcagatatgggggtcacagggtctgactcgggaggcaggtgagcccgcggacctgatcccctgtcactcccccacccctgacgtgggcagatacgggggtcacagggtcccactcgggaggcaggtgagcccggggacctgatcccctgtcactccccaacccctgacgtgggcagatatgggggtcacagggcccgaccagggaaagtgctccctccggagcacaagggctgtggagcccagtggctgtgcctcctaaggatctcatgtgtccccaggctcaggctcaggagctggaggagctgaaccgagagctccgtcagtgcaacctgcagcagttcatccagcagaccggggctgcgctgccaccgcccccacggcctgacaggggccctcctggcactc

SEQ ID NO: 213937 - DNA, 159 bp, Homo sapiens
  chr11:563846-564005
  hypo
gccccaaaggccacgactgcctgttggggacaggagatgcatggacagtgtgctcaagctgtgggcatgtgcttgcctgcgggagaggtccttcactgtgtgtacacagcaagagcatgtgtgtgccacttcccctaccccaacgtgaaaacctcaata

SEQ ID NO: 213938 - DNA, 57 bp, Homo sapiens
  chr11:567175-567232
  hypo
gatcccacctggtgtaagtacgggcagagggcagagccaggctgtatcgaggggcgg

SEQ ID NO: 213939 - DNA, 69 bp, Homo sapiens
  chr11:567262-567331
  hypo
ctcatccccagcacagaagtgctctgtagggccagctgaggacaccccggttcactgagggtggcccac

SEQ ID NO: 213940 - DNA, 221 bp, Homo sapiens; identical to SEQ ID NO: 202394
  chr11:575604-575825
  hypo

SEQ ID NO: 213941 - DNA, 102 bp, Homo sapiens
  chr11:590964-591066
  hypo
agtgctgggattacaggtatgagcccctgctcccggcctatgaaaagaaattctaaaaatttactagtgaatgtccaacaatcttttggaaaagttagcaga

SEQ ID NO: 213942 - DNA, 197 bp, Homo sapiens
  chr11:591096-591293
  hypo
tgtgcacaatgccgcccccacgcctgtccttcctccctttattgttcttacttgtcactgagatgctacgcgttcatggagctgctctttcctccccgctagggctggcagctctgcagggaggcaaggctcgctgtgctccctccactgccgtgttgccagcagcttagtggagggcctggcgcatggaggcattt

SEQ ID NO: 213943 - DNA, 110 bp, Homo sapiens
  chr11:593651-593761
  hypo
ggggtcctgcaggcggccaccacgtttgtctcatcgtcagttcgccctcctcctcatggcctgtgggagtacaggggccttgcagtgcgctccgccggcccttccaggtc

SEQ ID NO: 213944 - DNA, 122 bp, Homo sapiens
  chr11:601646-601768
  hypo
aagatctaagaaacgccaacatcgagtgaagaagagaagagggaagaaggtaaaggtgagcattgggtggcagggcctgagtctcctgctggccacagcaccctcgcgtggttacggagcag

SEQ ID NO: 213945 - DNA, 60 bp, Homo sapiens
  chr11:609531-609591
  hypo
gttccccggatgtggcgcctgcggggaaggaagacagcccctctgcgagtgggagggtac

SEQ ID NO: 213946 - DNA, 116 bp, Homo sapiens
  chr11:618979-619095
  hypo
tgttttctgcacccgggggccccccgggtgtggacgaggttggtggcctcagagttgtgccagagggtggatgagggcctgtgcctcccccagagctggtcgtggagggtccctgg

SEQ ID NO: 213947 - DNA, 164 bp, Homo sapiens
  chr11:688383-688547
  hypo
ccatctgtgtggacgacaatcagtgtcgctttttcggtgttcaggctgtccccgatctgaagggccgtcctaccagactagaaggaaaaaccgctccgtcaggtcacgtccgagagtgacaccaggcgtgtcactgagcccagctgggccgtcctccagcaggg

SEQ ID NO: 213948 - DNA, 152 bp, Homo sapiens
  chr11:700514-700666
  hypo
agaccctgtctcaaaaaaaaaaaaaaggaaaaggcaagctgaggtggctgctgctgctgtgccaggttacttatgttccgtccgcgcctctgctcttcaggtcaggtgttcagctatcctcaccgctacctggtcctcgatcttgctctgct

SEQ ID NO: 213949 - DNA, 215 bp, Homo sapiens
  chr11:733218-733433
  hypo
acaccacccagtgtgcggcgtttgccatggcagccccgtgaaacacagaagcctgccttctcaaccgcactcacctttgctcgaatatgagcagcccccattcttccccgacacacacagtcaaatcagcaaacgtcactgatttgatgcagtctcacctggaagcgtaagcatccggcgtcccgggcgcctgctgcctaggtgttggggctgcc

SEQ ID NO: 213950 - DNA, 33 bp, Homo sapiens
  chr11:744542-744575
  hypo
taagaaaatatttttgaggccgggcgcggtggc

SEQ ID NO: 213951 - DNA, 109 bp, Homo sapiens
  chr11:763193-763302
  hypo
gccctcacctgccccgccctcacctgcccccgccctcacccgcccccgccctcacccatccccgccctcaccgtccccgccctcacccgcccccgccctcacctgtccc

SEQ ID NO: 213952 - DNA, 343 bp, Homo sapiens
  chr11:772778-773121
  hypo
gagacacacgcagagaggaggtcctgaggttccaggtctgtttaccaaaccctaggacgctgcccggcagccccactgcatagcctggcaggcactgtgggaaaggcccctccccggctagacaggacgcccctgggcaggtgggaggtagcctgaggcaatgcctgtgccttgcagtggggacatcctggctccatccgaaaggctgagtgtgttcccacggctgaggtggccacaaacaattgctgcctgtccaggccatgctggggacggcggccccactccaacacacaaagggtgctgtgtagagcgctggcttgtccaccccggccagtggacacac

SEQ ID NO: 213953 - DNA, 34 bp, Homo sapiens; identical to SEQ ID NO: 202396
  chr11:832781-832815
  hypo

SEQ ID NO: 213954 - DNA, 94 bp, Homo sapiens
  chr11:864638-864732
  hypo
ggtgtggatttaccaggcctggaggggcagcgccagcgaccctgggaggctgtgctgtggctctatagcgactggggcacaagggcactgctac

SEQ ID NO: 213955 - DNA, 79 bp, Homo sapiens
  chr11:907472-907551
  hypo
tgtctttaaaaaaaaaaaaaaagtgattctactttctatctttcactggggttgggggcagcggcggtgggagctgaac

SEQ ID NO: 213956 - DNA, 525 bp, Homo sapiens
  chr11:985466-985991
  hypo
ctggagaccatcctgaacaaagcccaagaaccgcccaagtcgaagaaggtccagcactccaacgcgaagaatgccgtgctcttcgaggccatcagcttaatcattcaccatgacaggtgtgtcggctgcctgtggagaggcttcgtctcgcgcacacacacacgttccttctcgttggcacgagactgggcggatcatgtctggtttgtccactccatgggcctccccttcgtcctgcctctgtgctccctgccggatgctttttttctttctgtgcagcccggcccctcctgctctgagctcaccgtggattgctttggtgactgtggtctcatcccacacgagggccttttcctccttcccctgagcatccccactcctgactggcttctcatgtagtggaacagagaggagacgggtggggtggggggtgtgcgcgcatgtcccgtggctttgctggatgtggagccgcacttggtgggtccagggtcgcagggcagtgctggaaacgtctgtgcccatcca

SEQ ID NO: 213957 - DNA, 294 bp, Homo sapiens
  chr11:991642-991936
  hypo
gccctggaagtgtcacggagtcaggttggggtttgggggtccaggctccaggcagggacttggggtgggggggcacagtcaccagcacctgagaggccagtggcagggtgtggagagggggcggcagggtgtggggaggggcggcagggtattaggggtgccctcgggaggtgcgcggtcttgatgcctgctggcgttggtgttggcagctggcgctgttcgaagggggcttggttccaggcgaggtgactttggggagatgagtttggtgttgtacagcctggcagagctcca

SEQ ID NO: 213958 - DNA, 325 bp, Homo sapiens
  chr11:993204-993529
  hypo
gcaccgcgccaggacgtgcccgcctcgccttaactctggcacctggctgccaccccggctcattgtttgtgcttcgcaggctcttcaggctcccgcgtgccacgagaacctggtcaaagtgggcggctacatcctgggggagtttggaaacttgatagctggagacccgagatccaggtgagaggccctttgcgagtcggggctgtgtgcgctccggcgggcctctcggtggtcggtggcaagaggcgaggcaccagctggccctgccgtgaggcctcgcagagccgcttctgctccccatcggcgtctttttgttttccttcag

SEQ ID NO: 213959 - DNA, 301 bp, Homo sapiens
  chr11:996128-996429
  hypo
gagatttgtctgtgagctgccggagcaggggccttcccgtgggtgctgggccggcagcggctccgccctgcagagaggaggacgcggccccagttgggtgaggaggcgagggcaggatgacgtgatccaggggaggctggtgtgcagggattcctggaggccggctttcagcaagggcactgtgaagtcttccacggaaacctgggattgcctgttggaagctgggaaggcaccaggtgctctcgctcccctccagctgctttgacgttaagaggaactcgctgagggagcatggaaaggg

SEQ ID NO: 213960 - DNA, 263 bp, Homo sapiens
  chr11:998037-998300
  hypo
gccgatggcttcccacgcagctcacagctttgtcaggctgtggaggccacagtgttggcgggcgctgtccccggcgtagggagcaaagcgccgccttcagatggtctcatcgagacacgccttggatatttttgggactcttctctgccagctcctctgtgacctcccacccttggagcacatgagacccgtgtcgtcttctcttgcagaggtgctccgtcacaagagcagagcctgggagcctgccccgtttctgactgccc

SEQ ID NO: 213961 - DNA, 56 bp, Homo sapiens
  chr11:1000519-1000575
  hypo
ggctgctcgtggacgtgttctcagactcggcctctgtggtcgcgcctctcgctcct

SEQ ID NO: 213962 - DNA, 99 bp, Homo sapiens
  chr11:1005978-1006077
  hypo
atgtgcacctgtgccgtggctgagccgctgcagtgagggctagtgtgcaacaccgatgctgtgctggacgcgtgcccagccgggtcccctgacaggagg

SEQ ID NO: 213963 - DNA, 240 bp, Homo sapiens
  chr11:1006107-1006347
  hypo
tgcagtcatggggcggggccggcagaggcctgtgtgattgtggcgtccctggaaaagatgcttggcaggcccctccagctgtagcccagcctgcagacggggcgttctgtgggtccttccccgtgcatatgcgtgtgatctcacccatcccgtgtgggtgcgcaggaggggccgagggaggagggtgctggagggcggaagttacctctgactggaggagatacccggcccgtgttacca

SEQ ID NO: 213964 - DNA, 169 bp, Homo sapiens
  chr11:1006970-1007139
  hypo
cagagtgtgggaggcgccagtggggactggagcgcggtgcgcaccccagccgagcttgtgtgtgcttctggcagagcttttagactgaagattttcccttcgtaatgccagaagcgttcctagaacttccccagctaaaacagggagacgctaacgtctctacctctaa

SEQ ID NO: 213965 - DNA, 256 bp, Homo sapiens
  chr11:1013704-1013960
  hypo
gctgctccgcagaggcctggacctccccgctgagctcccggctcacaggggccagggcggtgttgggcagatggagcgcagagtggctcacctgatggggcagcaggcgcctgggtggggtgcccgaacctctctggggtggggttgtgagcaccttggtggacgtggggcaggcctcccacctgtggactcacctggcagcggaaatgcaggcgccctcacagcgggttaccgtcacgttcgccatgcacccctt

SEQ ID NO: 213966 - DNA, 379 bp, Homo sapiens
  chr11:1096252-1096631
  hypo
cccagcccagcccttgcacccgaccccggccgaggggcacaggtggcacggctcactccggctcccttgcaggctactgcacgggctggggcgacccgcactatgtcaccttcgacggactctactacagctaccagggcaactgcacctacgtgctggtggaggagatcagcccctccgtggacaacttcggagtttacatcgacaactaccactgcgatcccaacgacaaggtgtcctgtccccgcaccctcatcgtgcgccacgagacccaggaggtgctgatcaagaccgtgcatatgatgcccatgcaggtgcaggtaggcacagcgtggccacaggaggctggcatggaggcgggtgctgacatgggccccaa

SEQ ID NO: 213967 - DNA, 267 bp, Homo sapiens
  chr11:1098559-1098826
  hypo
agtccgggcagagacgctggggtagagagcaggggagaggcaggtgccacctgagtgtgacctgtgcctctccctgcacagcctgtttgcccagtgccacgcactggtgcccccgcagcactactacgatgcctgcgtgttcgacagctgcttcatgccgggctcgagcctggagtgcgccagtctgcaggcctacgcagccctctgtgcccagcagaacatctgcctcgactggcggaaccacacgcatggggcctgctgtaagtg

SEQ ID NO: 213968 - DNA, 483 bp, Homo sapiens
  chr11:1103491-1103974
  hypo
gggaaggtgctctcatccccaggaatgtccgggggtcccgggctcattctcctttccctctagggctccatcacattcatgcccaatggatgctgcaagacctgtgagtacagggcacagcctggggggtaggcagggtgggggcacaagggctggtgccctcagccccgcctggggtggctggaggctggacaacggcctctgggtgggcagtgagggctgggggctgaggccgagcctggggaggggacgcagcgagggagagcctcctcgaagatgtggaggccctgccctaagccgctgcccgctctccccaggcacccctcgcaatgagaccagggtgccctgctccaccgtccccgtcaccacggaggtttcgtacgccggctgcaccaagaccgtcctcatgaatcattgctccgggtcctgcgggacatttgtcatgtgagtcccaggctgggagtgtgcctggagggggtggtg

SEQ ID NO: 213969 - DNA, 297 bp, Homo sapiens
  chr11:1104214-1104511
  hypo
cacctcccgccgggcccggcgctcccctaggcatctggggagcgggtgagcggggtgggcacagcccccttcactgccctcgacagctttacctcccccggaccctctgagcctcctaagctcggcttcctctcttcagatatttattgtctgagtctttgttcagtccttgctttccaataataaactcagggggacatgctgtactgtgtggtttaggttggtgctgcaggggtgcggcttggccactgtgcatggcggaggccaccaggctctgcgtgcaggacacgggggcac

SEQ ID NO: 213970 - DNA, 345 bp, Homo sapiens
  chr11:1105012-1105357
  hypo
tgtgtgtgagtgcatagccccgggggtcgggtggccctggggaggtggtgtgtgtgtgtgtgcgtgtgtgcgtgcatgcacgtgtgagaatttgctttgcacacgtgtctgcatgtgccatgtgtatgtgatgtgtgtgcacgtgtgtgcatgcatgtgcgtgtgagcatttgcttgtgtgcacacgtgtctgcatgtgccatgtatgtgatgtgtgtgtgcacgtgtgtgtgtgcatgagcgtgtgagcatttgcttgtgtgcacacgtgtctgcatgtgccgtgtgtatgtgatgtgtgtgcacgtgtgtgtgtgcatgagcgtgctagcatttgcttgtgtg

SEQ ID NO: 213971 - DNA, 37 bp, Homo sapiens
  chr11:1214967-1215004
  hypo
ggcttggctgaagcagaaaagaattgggtgggacagc

SEQ ID NO: 213972 - DNA, 271 bp, Homo sapiens
  chr11:1215124-1215395
  hypo
ccctgcctcgctccagccttgtcaagcgcccgctggatggagctctgtgcggacgctggccacgtgtgttctgatgacgtgagggtcttgtgcgccctgtgagatgagacggtggggggtcagggacagatgtgacctgttgggaggaaagccccagggccatggtgccaccacccgagccacccgtaaggctgcccctggggcctggcaggtgtgtgcagcggctggggtgacccccactacatcaccttcgacggcacctactacacct

SEQ ID NO: 213973 - DNA, 304 bp, Homo sapiens
  chr11:1215429-1215733
  hypo
gattgtgcccgtgtatggccacttccgcgtgctcgtcgacaactacttctgcggtgcggaggacgggctctcctgcccgaggtccatcatcctggagtaccaccaggaccgcgtggtgctgacccgcaagccagtccacggggtgatgacaaacgaggtgggggcgcgcccggtgtgccgcggagggggtgggggacgcggctttcccggcaagagcctgagcagcggctgaccgcccgcccgcctgccttctgacttcccgtcgaccacgccctgcgtccagatcatcttcaacaacaaggtg

SEQ ID NO: 213974 - DNA, 765 bp, Homo sapiens
  chr11:1262415-1263180
  hypo
ccggccccaggcaccagccctcagccctccctcagtgccagcacggagcctgctgtgcctaccccaacccagaccacagcaaccgaaaagaccaccctatgggtgaccccgagcatccggtcgacggcggccctcacctcgcagactgggtccagctcaggccccgtgacggtcaccccctcggccccaggtaccaccacctgccagccccggtgtcagtggacagagtggtttgatgaggactaccccaagtctgaacaacttggaggggacgttgagtcctacgataagatcagggccgctggagggcacttatgccagcagcctaaggacatagagtgccaggccgagagcttccccaactggaccctggcacaggtggggcagaaggtgcactgtgacgtccacttcggcctggtgtgcaggaactgggagcaggagggcgtcttcaagatgtgctacaactacaggatccgggtcctctgctgcagtgacgaccactgcaggggacgtgccacaaccccgccaccgaccacagagctggagacggccaccaccaccaccacccaggccctgttctcaacgccgcagcctacgagtagcccggggctgaccagggctcccccggccagcaccacagcagtccccaccctctcagaaggactgacatcccccagatacacaagcacccttggtacagccaccacgggaggccccacgacgcctgcaggctccacagaacccactgtcccaggggtggccaca

SEQ ID NO: 213975 - DNA, 128 bp, Homo sapiens
  chr11:1263764-1263892
  hypo
ccccagtaccccagccaccagctccacggccacgccctcctcaactccggggacgacctggatcctcacaaagccgaccacaacagccactacgactgcgtccactggatccacggccaccccgacct

SEQ ID NO: 213976 - DNA, 238 bp, Homo sapiens
  chr11:1275398-1275636
  hypo
tatgtcctcatgagagagatccatgcacgctttgggaatctcagcctctacctggacaaccactactgcacggcctctgccactgccgctgccgcccgctgcccccgcgccctcagcatccactacaagtccatggatatcgtcctcactgtcaccatggtgcatgggaaggaggagggcctggtgagtccaggctgcgggtggcacagtgttggcccagtcccaaccgcacctgggc

SEQ ID NO: 213977 - DNA, 420 bp, Homo sapiens
  chr11:1275833-1276253
  hypo
cacatggaggcagagccccaaagagaagccctgctccccgagcccacctggcactgcctcccagctcagggttcccctggattcccccagatcctgtttgaccaaattccggtgagcagcggtttcagcaagaacggcgtgcttgtgtctgtgctggggaccaccaccatgcgtgtggacattcctgccctgggcgtgagcgtcaccttcaatggccaagtcttccaggcccggctgccctacagcctcttccacaacaacaccgagggccagtgcggtgagtgggcggcgggtcctgccccggccagggctgctgctgggcctgacaacccagtgagcataggggaagcctggggaggggaatgagtgggggaggggggtgggggctgtgaaaggctccccagattccagccccgcggt

SEQ ID NO: 213978 - DNA, 96 bp, Homo sapiens
  chr11:1301051-1301147
  hypo
gcatggtaagtcccggccgccggtgggcaggggagcatcagccctgctcaggctgaaggcatgtggccctgggctccagacgtctcgcaccacagt

SEQ ID NO: 213979 - DNA, 139 bp, Homo sapiens
  chr11:1307128-1307267
  hypo
gtccccaccccggcgctctaagccccgttccctcctcccgcacctgccctaggccctggggtttctaccaggggagaggcacccagggagggagcacacgcacctgtgatgggcacatagccaacgccctgctggtaca

SEQ ID NO: 213980 - DNA, 109 bp, Homo sapiens
  chr11:1312471-1312580
  hypo
tcagccctgcagctccggctgcctgtaaagcgtcctgcctggaatgcagacggcctccctgtaccactgccacccgctctcctgcagccaacccggctcacccccagga

SEQ ID NO: 213981 - DNA, 199 bp, Homo sapiens
  chr11:1360071-1360270
  hypo
gggggcccgggccacggtggatggttctggagctgcccggcctccagcaggaaaccttcctcttctgcacttgagtgtctgcgggaactcccacgccacttcccgaaaggatgaaccttctcaatgtgctgcgcctgcacctggcgagcagctttggcatttctcaggcgctcatctgtcagggcatccactgggatcc

SEQ ID NO: 213982 - DNA, 395 bp, Homo sapiens; identical to SEQ ID NO: 202399
  chr11:1411047-1411442
  hypo

SEQ ID NO: 213983 - DNA, 57 bp, Homo sapiens
  chr11:1433608-1433665
  hypo
cgccgccccgtcctgcggtgggtggagtctgagctgcgctgccccgtcctgcggtgg

SEQ ID NO: 213984 - DNA, 185 bp, Homo sapiens
  chr11:1446145-1446330
  hypo
ctggcgggaggggtgttctccccgcctccatgggcaaagaatctggggcccttgtcagagaccgcggggtcagtgggattggcgcccaggccctgctgtgacgccacgtgtttcccactcagcgaggctgttcctgccaggcgtggggactcggaccctggtcctgagtgctgccccgaggcccg

SEQ ID NO: 213985 - DNA, 71 bp, Homo sapiens
  chr11:1446400-1446471
  hypo
gagtctcagctccccgggtcatcagtccaagccactcagcaggtggcttcggcttaaggcctctcaggtgg

SEQ ID NO: 213986 - DNA, 346 bp, Homo sapiens
  chr11:1466357-1466703
  hypo
gcctgcgctgggtgcggggtgcgggcaggacgcaggaggcctccccgggctgggcacagggagagtggcaggatgaagggccccaggtgagggcgggcgtcccaccctcgcagccgcccaggcccggccggagctgatgagcgggtggcccgtcctgtgtccacagagggggcaagaatgagcccgaaccagagcagcccattcctcgcaaggtgcagatccgctcgctgcccagcctggaggacatcgaccccgacgtgctggacagcatgcactcactgggctgcttccgagaccgcaacaagctgctgcaggacctgctgtccgaggagtgcgtctggggctg

SEQ ID NO: 213987 - DNA, 42 bp, Homo sapiens
  chr11:1467211-1467253
  hypo
tacccattggcctggggtctcggctgaggccattgggtgggg

SEQ ID NO: 213988 - DNA, 105 bp, Homo sapiens
  chr11:1471460-1471565
  hypo
agcttgtcctgcccccaccgccccccgagccgcccttcgtggcccgccccctggccacctccacggagcccgaagcttgtgggagcgcctcgaggcctggacacg

SEQ ID NO: 213989 - DNA, 48 bp, Homo sapiens
  chr11:1472058-1472106
  hypo
gggagagagcagaggctgccttggggagggccccgcccggcagtgcca

SEQ ID NO: 213990 - DNA, 58 bp, Homo sapiens
  chr11:1483938-1483996
  hypo
gggcagggcgggcgcgcagggctctgtgacagcccgggacagcttcttgttccccact

SEQ ID NO: 213991 - DNA, 161 bp, Homo sapiens
  chr11:1494354-1494515
  hypo
catgtgtgccctgtgcggggctgactcagcccacccgaaggggaagtgcagccccaaaatggacaggccatgaggacggggatgcagtgcccacacctgcctctcaggtgctgtcctccccctgggacagctctgcatgaccttcacgcccaccttcccag

SEQ ID NO: 213992 - DNA, 283 bp, Homo sapiens
  chr11:1497177-1497460
  hypo
tatctgaattgccagcatcacgctcttgcgctttgggccgcctcatgtcacataagagcaacctgagcacgagcaccctggcactgcggcagtggatccacacgggggccgaggcacagctgggccgagggaggaggaggcacacctggagcaggacggtggagaccgcatcacactgctcagaacagcatgcagttgaaaacttattaactgtttatttcgggaattttccattaactattttcagaccatagttgactgtgggtaacggaaactgtagata

SEQ ID NO: 213993 - DNA, 585 bp, Homo sapiens
  chr11:1535822-1536407
  hypo
tcttcagcatcctagtgggacgggagcacccagggaacacaagtgcaccatgacgcggagcccttcatcaccgcaggccacggcgcttgtccttcccagaggcccccaaccacagctgctgagcgacacccacaccgcttctctcttcacacagcggactgatgaggagtcccgccaagcaggagctctgagccacagcacagagtgtgctggcccaagtccacgcctgcatgcaagctcagccatgcgtctaatggcaataaccgtggaatgagctcgtgaggttcggagagtcccaccccgacggggagagccacagggagccccaatctcggcagtgaccggctccaggtccccacgtaccgtgagagtggggacagcggtggacagcagcccttgagcagggcacaaccttcagagagacctcgacaagtgaacacttaaaccaaggtcgaccctgggggaaacgcagacctcctcccagtgcccccttcagaaaaggtactcaaacactggctcccatcatgagctgggcacggaaccaggcatgggtactacctgcctccagggcttggagctcgggag

SEQ ID NO: 213994 - DNA, 208 bp, Homo sapiens
  chr11:1552162-1552370
  hypo
aggtgagcaggaaccacccacggccaagccggaggctgctgagccatgcccaagatcagagacgcacgcgtctggagcagcgcctgacacctgaccctggtggctgaccatgcggcctgcctggcagtcctgggcatgggatgcacacccgcaccctggcccacccaggggcagaagaggggaccacgaagttgtgtgttttctgctg

SEQ ID NO: 213995 - DNA, 39 bp, Homo sapiens
  chr11:1584969-1585008
  hypo
gtatggagatccccccgtgcccagcggacacctccctga

SEQ ID NO: 213996 - DNA, 38 bp, Homo sapiens
  chr11:1586817-1586855
  hypo
ctgggtacctggctgcgtgcagccggctggatgagctc

SEQ ID NO: 213997 - DNA, 459 bp, Homo sapiens; identical to SEQ ID NO: 202400
  chr11:1592786-1593245
  hypo

SEQ ID NO: 213998 - DNA, 117 bp, Homo sapiens; identical to SEQ ID NO: 202402
  chr11:1594039-1594156
  hypo

SEQ ID NO: 213999 - DNA, 212 bp, Homo sapiens
  chr11:1749039-1749251
  hypo
gtttctttgtgattgcgatgactctttaggaaatttctttggaactaaagatcactgtggttgttcaactaccagtttattgatgtattaacatcagtgtattaaactcgggttcctattttatgcaataaactgtaatcttgactaacattattggctttgatgctcaagttgtctctggcgtggccggtgggaagcgactcctgcgtgtt

SEQ ID NO: 214000 - DNA, 223 bp, Homo sapiens
  chr11:1795687-1795910
  hypo
gcttactggggagacaagcccggcgcccaggaagggatgcgaatgtacatggactacccgtgcaaatgcttatggtgaaatgttctgtgtcaacttggctgggccacagtatccagatatttgcaaacgctagtctagatgtttccgtgaaggtgtttttcagaggtgattctcattcccatttaaatccgtagactttgagtaaagccgatgatgtgccagt

SEQ ID NO: 214001 - DNA, 191 bp, Homo sapiens
  chr11:1800816-1801007
  hypo
gctgctctctctgggtcccacgtgggacatgctatagcccctcactcgctcaccccactgagtttgcagggactgcgcccctctctgggcgacacctaacacgggagagtgcaagctgggcagacggaaagggggttctcggggtccgtggctccccctgctccttgtgcgcctaggctgggtcctcttgg

SEQ ID NO: 214002 - DNA, 41 bp, Homo sapiens
  chr11:1824257-1824298
  hypo
atgacgttgatcttcatcgtgccaggcgccagggcggtgat

SEQ ID NO: 214003 - DNA, 441 bp, Homo sapiens
  chr11:1824638-1825079
  hypo
gagctggtggtcgccgtggccacctcctgcttgaagtccagggcaacatagcacagcttctccttaatgtcacacgtgatcgcccgctcggccgtggtggtgaagccgtagccatgcgcagtgagatctttgtgaggtagtcagtctggtcccggccagccgggtccagacacaggatggcatgggggagggtgtagccctcatagatggacactgtgcaggtgaccccgtcgctggagttcatcatgatgccagtggtatggccaggagtgtacttggacagcacggcctggatggccacgtacatggccgaggtgttgaaggtctcaaacatgatctgggtcatcttctttctattggctttggggctcgggaggcctcggtcagcagcaccgggtgctcccgcagctcgttgtagaaggtgtggtgccagatcttctc

SEQ ID NO: 214004 - DNA, 32 bp, Homo sapiens
  chr11:1825139-1825171
  hypo
tctctcgctctgggcctcgccacccacataga

SEQ ID NO: 214005 - DNA, 40 bp, Homo sapiens
  chr11:1825529-1825569
  hypo
gcggcgggtgtggacgggcggcaggcgtggagggtggcgg

SEQ ID NO: 214006 - DNA, 123 bp, Homo sapiens
  chr11:1847136-1847259
  hypo
tgcatgcagtgacacctacacgcagtgggcctgcccgcagtgatgcctgtacgcagtggggcctgcacgcagtgggcctgcccacagtgacgtctgcacgcagtgacgtctgcccacagtggg

SEQ ID NO: 214007 - DNA, 124 bp, Homo sapiens
  chr11:1847321-1847445
  hypo
gggcctgcacgcagggcgtttgctcacggcaggtgcgtgcatggtggaggcggtgccgcggggctttggtccagcctggtcaaggtgtggaaaagcccccgtcgcacctgcaagtcccccacct

SEQ ID NO: 214008 - DNA, 86 bp, Homo sapiens
  chr11:1956448-1956534
  hypo
gtggactcagggttcattttcggaacccctttaagcttatagaaagtccccatcatcacccagctcggccccggggcaccgagtcc

SEQ ID NO: 214009 - DNA, 99 bp, Homo sapiens
  chr11:1985748-1985847
  hypo
ccggcagccctcgcgcggcccagggcaggggtgaagcagcctgttaaacagaacaaggtgctcgcggctcataccttagctttacgaagtgtttggaat

SEQ ID NO: 214010 - DNA, 40 bp, Homo sapiens
  chr11:2209803-2209843
  hypo
catcagaggacatcatcaaccgtaaaaaggcaactcccag

SEQ ID NO: 214011 - DNA, 106 bp, Homo sapiens
  chr11:2294685-2294791
  hypo
gaagctggtgaacctcgagaacacgaggccgcgtgaacgaagccagacaccgaggaccacgtagcgtgagactctcagtctatgaaatgtgcggagtcgataaatt

SEQ ID NO: 214012 - DNA, 89 bp, Homo sapiens
  chr11:2328966-2329055
  hypo
gtttccaccagagaacgccccactccacgactaggggcacgggcatcagtgagagagaggggacagtggttggccgggccatggagacc

SEQ ID NO: 214013 - DNA, 360 bp, Homo sapiens
  chr11:2412989-2413349
  hypo
gtggagaccaccccctgcacgcagctggggcgctcctgcctgtgtcctcagaagcactcggcttagctttgcccatgtgcctgggctgtgggtggcagagcccggccagcatcctccgatctccaagggtgcatctctactggaggcccctcctgggcctcttgctccccgcttcccagatcattaggatatttggggtccagaagggcctcccagccatcctgggccttgtcctccggggccaccagtccagccagtgacaaccacagcatccccggcctggaacgaggctgcccccagcacgttcctcgtactcctgtccagggacaggaggggctgcccctgccaccgagtcccctt

SEQ ID NO: 214014 - DNA, 157 bp, Homo sapiens
  chr11:2414473-2414630
  hypo
agagacactgacagctgtcccgcgggtacagggccctgtctgggtggccaggcccatgtctcgggcccacagtgcgccccccacccttggacggcgccttctccctccccaggtgcatgctgcccagccagggagcgtgggggagttcgggagggct

SEQ ID NO: 214015 - DNA, 306 bp, Homo sapiens
  chr11:2435666-2435972
  hypo
cgctaaatgtccctcgtcctgcggcagggcccagtgtatgcccggggtgtgaggctgtatcgtcctcaccacgtgcacagcggtcccacactcagggtctggggccgcctccaccccaggcagagccgtctgtcctctcctatggaggaggcccctgagggcacctggagccccacggcggtaacaggcagccctggcgaggcccaggacccttcgtccgacccctccgtcacatcctcccccgcgcgcgggcccggccccagccgccggtcactcaccaagggccagccgctcgtatttcgcctc

SEQ ID NO: 214016 - DNA, 407 bp, Homo sapiens
  chr11:2436014-2436421
  hypo
catctctttgaggattttgcaggcggccagtgcggctgccacaccttcctggccctacgagacctggtctcaggaggccgcccctcccctgcccccgcgctgggcccgcggcctgggctcaccatggcccagaagtaggtggccatctcgtggcggttctgcagcacggcccacaggaacaggtcccgccaggggttctcgctcttctggttcaggtccagcagccacttctggcccgtgggccgcttggccgggcccttctcctggaggacacgggcgtcggcctcctgctgcggccccagcctcgccctccatccccacggagcccccgctcaccgccctcctgcggtcccctggccggccgtcctggtagaagcctcggcaggcgtcctgcaggaagtccttga

SEQ ID NO: 214017 - DNA, 157 bp, Homo sapiens
  chr11:2436611-2436768
  hypo
cacgtctgcgccgttgtccacaaagaggcgcacaaactcgggcttgttgctgaccagggcgtccaccatcacctcctccaggtcacaggacttggcggccatgggcacccgagggaagggggacaagagagtgagcgagagacaggaggagggggtc

SEQ ID NO: 214018 - DNA, 109 bp, Homo sapiens; identical to SEQ ID NO: 202408
  chr11:2554316-2554425
  hypo

SEQ ID NO: 214019 - DNA, 64 bp, Homo sapiens; identical to SEQ ID NO: 202409
  chr11:2554454-2554518
  hypo

SEQ ID NO: 214020 - DNA, 38 bp, Homo sapiens
  chr11:2562214-2562252
  hypo
acagacatatgtgcacggatgggcgtgtggacgtatgc

SEQ ID NO: 214021 - DNA, 130 bp, Homo sapiens
  chr11:2594826-2594956
  hypo
ggaagcagggacccggcctgtgggcccagaggctgcccctggctgtgaaggtgggttccggccacctagagcagcccgggagccttggggaagccggtgtgcagcaggcagatcccgcactggaacaccg

SEQ ID NO: 214022 - DNA, 149 bp, Homo sapiens
  chr11:2596284-2596433
  hypo
agtgggtactggccccggcacggctgataagcagtgcccagccttcgctgctgccctgcctgccttcccagccgcccactggagctgtgggcagcggacgctactccccagccccccagcccgcagcagagcggcactcccactcccac

SEQ ID NO: 214023 - DNA, 31 bp, Homo sapiens
  chr11:2597548-2597579
  hypo
ggatgtgagaactctcgaatcccctgagtgt

SEQ ID NO: 214024 - DNA, 385 bp, Homo sapiens
  chr11:2772656-2773041
  hypo
caaagtgagcatctgtcccacgttccacccccaggaaaccctctctcctgacgcggggacttgcgtctcagtgcagagggcagtggagggacagtgcagctccgaaatgagcatctgagttcactgctggtgggcaccatcccggccaacaggccactagtgtgttctccctctttcaaacggggcggcgaccctcgtctgacaggcggctgttctgagagcggtggctgtcccagggaagccctcggtgagcgtagcgttaccatggtttttaaattaaagcatctgcagatgcgctgtgtccctgcaagggcaggcagatcgggaccccagggactggtccccatagccaaggtgttcagccgccctgtcccctacacagagt

SEQ ID NO: 214025 - DNA, 180 bp, Homo sapiens
  chr11:2782400-2782580
  hypo
tttcccctggcatcaggcggctcagcagcctgggctctcctgcgtccaccccagccaaacccttcatcgttcctccggtcaatggtctgccggcctgtcggtgcctgttggtgcctgtcggtgtgctcctacgctggtgtgttcctctcgacctaccctcaacgtccagccgcttgtgtc

SEQ ID NO: 214026 - DNA, 175 bp, Homo sapiens
  chr11:2818020-2818195
  hypo
cacacaagcccccactgctgcgccgtccctcctgcgccacctgacagatgtggcggtgagaaaacgatggggcagggaaacgttcgccattcggtgccaataaaggccgcctttatcccgaccgtaaatggtttctgtgtggagtgagactgtgcctgtcccgggcctaaccccc

SEQ ID NO: 214027 - DNA, 295 bp, Homo sapiens
  chr11:2868805-2869100
  hypo
tgcacacacacaggcgcgaccgagggccttgcagacatagggtgcacacgtgcgtgccgcctgcatacagcatgcacttgcagagacggttggcaccttcccttctctggccccaaacctgggccctgaggctgtctgcacacctgggtgcttcccaccactgactctctcgtctgcctttgtccccgcaggtgacgcagctggaccagaggctggcactcatcaccgacatgcttcaccagctgctctccttgcacggtggcagcacccccggcagcggcggcccccccagaga

SEQ ID NO: 214028 - DNA, 198 bp, Homo sapiens
  chr11:2874227-2874425
  hypo
ctgagtgaggcagagcgtaaaggagatggacagcctggcccagggcagccctgctggactccaggagatgcttgggcccgctccccactcttccttctagaccctcacccatggctcccagaggggacgaggccgcccttaattcccagagccaagcccagccccaccgcccacctatccccaggcttgggtttcgca

SEQ ID NO: 214029 - DNA, 63 bp, Homo sapiens; identical to SEQ ID NO: 202411
  chr11:2905796-2905859
  hypo

SEQ ID NO: 214030 - DNA, 269 bp, Homo sapiens; identical to SEQ ID NO: 202412
  chr11:2906036-2906305
  hypo

SEQ ID NO: 214031 - DNA, 201 bp, Homo sapiens; identical to SEQ ID NO: 202413
  chr11:2906580-2906781
  hypo

SEQ ID NO: 214032 - DNA, 170 bp, Homo sapiens; identical to SEQ ID NO: 202414
  chr11:2906971-2907141
  hypo

SEQ ID NO: 214033 - DNA, 197 bp, Homo sapiens
  chr11:2939101-2939298
  hypo
gaagctttaccctggcgggcgcaacagggccctccgaatggcgaggcctgcagccgggcgaggggtgggcattgggacaatggcctttgcaggcctgaatggcctctccgtgccaggcggcccccgggccagtgtgttcgacctgaaggccatcgcctccctgctgcggctgccagacgtcccgaggatcttcctgg

SEQ ID NO: 214034 - DNA, 304 bp, Homo sapiens
  chr11:2942534-2942838
  hypo
aaccatttatggttccggttggaagcagtttctgttctgcctggcaggaatttgggagggtgactggtcccctgcagaggtgctgcaggctgggcctgccctgtgggcagatactgagcccaggggctcctccagccggggccacccctgcactcccaggcgcgttggcccagcacgccctgcttagtggaggagctgagatgaccagatagagagcctcgccctggcctgggagcagcctgcggccaagcctgtcccaccgagcccatccccgggagcagcctgcggccgagcctgtcccacc

SEQ ID NO: 214035 - DNA, 343 bp, Homo sapiens
  chr11:2965737-2966080
  hypo
aatgtgttctaaggttaggccgagcactctccacaggcctggtcagtgcggacacggccatccccggctgccggagagcgccgtcacccacttgaaaaccccacccaccagccgccaagcggtcacaccaaacccaggaccttcagacaggatgaatggtggggccccgcaatggggctactgagaaagcaggacttgacgctcatacgctccactgaaacgcaggacttcccagcccagtccctcagtggagaagactgccgaagcccggctccggcagcagggtggcgcctgcgtcatgaggacgggctcgcatcttcagccctggtggcagggagcggcg

SEQ ID NO: 214036 - DNA, 84 bp, Homo sapiens
  chr11:2987080-2987164
  hypo
aacacttacacagagcgtgtctgagatccaacttgcgggcaccatggaagagtgggcatcatggaagagcgtacaattcttatc

SEQ ID NO: 214037 - DNA, 52 bp, Homo sapiens
  chr11:3060355-3060407
  hypo
tagcctacaaaggaccgagaacagaaagcaaagggctcggtttctagagcag

SEQ ID NO: 214038 - DNA, 53 bp, Homo sapiens
  chr11:3109135-3109188
  hypo
ggacagggggtgacacggcaagatggccaggagtgcgtcgcacagcagaagct

SEQ ID NO: 214039 - DNA, 165 bp, Homo sapiens
  chr11:3111129-3111294
  hypo
tgcagccgccgcgcctccttcctgcaccgagggcatgggctctcaccgcctgggacggccccgagtgagacaaaggaggggaggggaggagtgaggatgagctggaggtccagtggggctggcacgtgggtcacagggtcatatccagctcgggcctccacccca

SEQ ID NO: 214040 - DNA, 181 bp, Homo sapiens
  chr11:3128518-3128699
  hypo
ccacataggtggtccctctccgcaccggggccccaggggtctctgactggtcgctgccactctccgtcttccggctatggtcctgggtctcggtatctgactcctcagggttctctctctccgacttgtctgagaatgcatcgttctccagggaagacccgttcagtctggaaggtggatg

SEQ ID NO: 214041 - DNA, 425 bp, Homo sapiens
  chr11:3141593-3142018
  hypo
gaatgagccccttggccctacggggcctctgtcttcaaccccacccctccgcagcaccttcacggcccagacggactgatccagcgggtggaagagcttgaagcagaagccgtccttcttggagggccgctcgatgagctcgcagcagtgcagcagcaccgtgcccacccactggcccaccttgggcgtcttgtagatgagcagcacccccggcttcagcacgcaccacagcttggtccagctcttcagggtgccgcggatctgcagggaggatgctggcgtcgatgcccaccctctggggccgccatccctggggcatcttgatggcttggcggggagccaggcacagaccagggtgggctgccgaggggcccttcccctccctcactcccccacaccagttcggaactcaccccttcctcacc

SEQ ID NO: 214042 - DNA, 281 bp, Homo sapiens
  chr11:3145124-3145405
  hypo
atggaaccgttccacggactggcggtcctggcagcactgggcaccaggcttggccttaggcactgaggttagaaagtaaagatgccagtgtcctgctctttcagggagaggcagaccagccaccagcacgcagaggcgggaggagccaggggtcaggtgagcgctgcggttctgcgttctgtgcatggatgtaagcacgttagatcccacagctcaggtcatcgttgttattctcagcattgtacagaggaagagcctacgcacagagaggttcagaaacc

SEQ ID NO: 214043 - DNA, 89 bp, Homo sapiens
  chr11:3164463-3164552
  hypo
gggggcagaggaggcaggtgcggagcggggcagaggaggcaggtacagcccagtgcgtggaccagcgaccggctccaggggcccatggg

SEQ ID NO: 214044 - DNA, 290 bp, Homo sapiens; identical to SEQ ID NO: 202417
  chr11:3186311-3186601
  hypo

SEQ ID NO: 214045 - DNA, 169 bp, Homo sapiens
  chr11:3187736-3187905
  hypo
tagcagcaccagccgcttgtgtgcggatcacaggaacccacggcttacggaggcgagtgggctgatcggacttgccctaagcttacccccagggctagcattgccattccatagtcaccttgtgaggccttgggatgcagaactgctcagtcaagatgctcagggccat

SEQ ID NO: 214046 - DNA, 78 bp, Homo sapiens
  chr11:3187953-3188031
  hypo
caggagagggtctgtgcagctgggatccacatacaactgctgggtctgctctttgaagactccgcccaaagctgaggt

SEQ ID NO: 214047 - DNA, 757 bp, Homo sapiens
  chr11:3243293-3244050
  hypo
tcaccaggggcccagagggacgcacagagggagaccggctgcctgggtccctcctggctgcctcaccatcaggggcgggatgaggagctcagcctcagccacagtgcgcaaggtgaagagttttgatccctcgtacatcctcgagccaggcagggcgcccggcttctatcccaggtagcagagtctcctatcccaggtctccgacggcgaccgcaaccctttgcccgtggaggacttcccctgtctaagggccattgggagtgggatggcctaatttctggggtcgctttctattgggcacttcaaacagtgctgggcaagggcagtcgtttgaggcagcttggagtgaagttcttagggaggaggtcctgcgcagctcggccagccccggtcaggcccaggcagccaccaaccctggtttctccatcacccctgacccctcccacagccccttctcgtgtttgcccaccgtctaggccatgcttccactttctcacctggctgggtatcccctatggggcacgggtgtcggccccgccgaggctgggctttggtctgtcttgttctctctgggaggggtctggtgcgggtggaatacgtggagggagcctccgtggggggagcaactgctcccggtgttgcaaggaggacagagccaatgcccgccccatcgtgtcatggccgacggtggcctcagaagatgtgtccacgtccccagtcgctggaagctgtgcacgagctcttcctggagaaaagg

SEQ ID NO: 214048 - DNA, 154 bp, Homo sapiens
  chr11:3254282-3254436
  hypo
acctctcctcttgcggaccaagtgagagcaagtttcccgcacgtggcctttgacctgtcactacatcagcaggcatcccccagggcaccggcatcctccatccccaaaacggaggggccgcacacaggtcgtctggcgtctgtgcaatgctggt

SEQ ID NO: 214049 - DNA, 242 bp, Homo sapiens; identical to SEQ ID NO: 202418
  chr11:3444553-3444795
  hypo

SEQ ID NO: 214050 - DNA, 50 bp, Homo sapiens
  chr11:3688971-3689021
  hypo
aacctggaggctgcgcgtcggctctgggggcaggcggggcagggctcacc

SEQ ID NO: 214051 - DNA, 124 bp, Homo sapiens
  chr11:3697491-3697615
  hypo
gccaagaggcgcaaagggactcgctgagggtctggtgttgagtcggaggttctatcaggaggatgatgcagactcagcaccacgcgcagcaggttggctacacgtttggccatgtctagagaga

SEQ ID NO: 214052 - DNA, 152 bp, Homo sapiens
  chr11:4599983-4600135
  hypo
acttgcacgcatgcgtgtatgcacacacaaacacacatacacacacaagccggacatttgcctttatgctgaggtggcaaataggaacaaagctttggcctaatgaatttcagacttaatccctagttcccctcaacgtaacttctgaggtt

SEQ ID NO: 214053 - DNA, 120 bp, Homo sapiens
  chr11:5177827-5177947
  hypo
ggatcacaggcgtgagccactgcacccggcctactgaatattttttaaatttatttttattaaggtaaaatatacatacgtaatttaccgtctttactttttttttttccttgagacgga

SEQ ID NO: 214054 - DNA, 105 bp, Homo sapiens; identical to SEQ ID NO: 202421
  chr11:6502787-6502892
  hypo

SEQ ID NO: 214055 - DNA, 40 bp, Homo sapiens; identical to SEQ ID NO: 202425
  chr11:8103155-8103195
  hypo

SEQ ID NO: 214056 - DNA, 94 bp, Homo sapiens
  chr11:8254114-8254208
  hypo
cagccagcagaggtacgcactcaaacaccgactgggaaaatcttgggccaggcccccgctacagcccctacaaggctcacgttccttttgctca

SEQ ID NO: 214057 - DNA, 144 bp, Homo sapiens; identical to SEQ ID NO: 202429
  chr11:8615887-8616031
  hypo

SEQ ID NO: 214058 - DNA, 166 bp, Homo sapiens
  chr11:8656271-8656437
  hypo
tttcacatctcattttcagccgcaacctgtttccaccatcggctcacatagcaccaactccaaggtacttgtacgcagatgttctgcttcaccaaaagtcctcttttggtgaaatacagtcagtgtggaactcgcagaaaggtgcgtggtgccacaggttcttctg

SEQ ID NO: 214059 - DNA, 213 bp, Homo sapiens
  chr11:8752347-8752560
  hypo
gcccaggctgtgggcgcgggtaccggtacgggtcagcaagacgccccgggggccagctgctggccccgggaatggcgtgctctgggcaagggggaggcaggcagcgacccctgctacatcctgggctgcgccttggacactttccttttgggcgtctctcttgcacgccgaagggcttctgtccaaataaccgaagctggcggtcttgaaggg

SEQ ID NO: 214060 - DNA, 179 bp, Homo sapiens
  chr11:8759790-8759969
  hypo
ccctatgctgctttacgcttcagttgatcactccctgtttcttgagcgtctcaggacatcactcttcatggttttcttcttttctcactaaatgctcttctcagtcggtttccttggctagttcttcttcctcgtccagacctcaaaacactggaacgtcccagcgcttggacttctct

SEQ ID NO: 214061 - DNA, 77 bp, Homo sapiens
  chr11:9328213-9328290
  hypo
tagagcgagactccgtctcaaaaaaaaaaagaaagccagaatcacgctcttggcctacaagacgttcaacatgtttt

SEQ ID NO: 214062 - DNA, 129 bp, Homo sapiens
  chr11:9405263-9405392
  hypo
tgagccaccgcgcctggcaggaaggtgtattttaatagggattatgcttttactctgcattaagaggtgatttatatgaagtcccaactaaaatttggatactcaataaaaagccatgatttcagtatt

SEQ ID NO: 214063 - DNA, 36 bp, Homo sapiens
  chr11:9418901-9418937
  hypo
tatatatatattagtcgggcacggtggcaggtgcct

SEQ ID NO: 214064 - DNA, 36 bp, Homo sapiens
  chr11:9422432-9422468
  hypo
aagatactaaaatagctgggcgcaggtggctccccc

SEQ ID NO: 214065 - DNA, 41 bp, Homo sapiens
  chr11:9531940-9531981
  hypo
gattacaggcgtgagccaccgtacccagcccagaagttcct

SEQ ID NO: 214066 - DNA, 151 bp, Homo sapiens
  chr11:9552471-9552622
  hypo
gcatgaaccactgcgcccgcccggctgcggtcttgatgtctatctttgtgtgtgttttgtaaatgaagtctcatgcatcaacaaagcatgtgctgggggcttagcgcctgagcttacacacagctccaccggctgctgcctccctggaagt

SEQ ID NO: 214067 - DNA, 323 bp, Homo sapiens
  chr11:9554672-9554995
  hypo
tgcccagccaccattctattttctgtctctataaatttgactgttgtaggcgcctcatattatatttgtctttttgtgtctggctttatgtgtacctttaaaagcaagtttttcctgtcttttgaccaagaggttgcgtattttcatttttgcacggagccgcacagattatgtagcctgtcctgctgaggcgtgcgcttctattagcccttctgtttttgctgcagatgtgtgacctgtgttttgggaatatattatctcttgttagattatgggctcctttaagacagctggggatttaaatttcccggtaactcctggag

SEQ ID NO: 214068 - DNA, 105 bp, Homo sapiens
  chr11:9567905-9568010
  hypo
ctcccgccgaaatttttaagttctaaacaactctttaatcagtgacaaaccaaaactgaattacagacttttattttttttttgagatggagtcttgccctgtcg

SEQ ID NO: 214069 - DNA, 489 bp, Homo sapiens; identical to SEQ ID NO: 202434
  chr11:9596367-9596856
  hypo

SEQ ID NO: 214070 - DNA, 625 bp, Homo sapiens; identical to SEQ ID NO: 202435
  chr11:9685416-9686041
  hypo

SEQ ID NO: 214071 - DNA, 35 bp, Homo sapiens
  chr11:9771063-9771098
  hypo
attacaggcgtgagccaccacgccctgcccatata

SEQ ID NO: 214072 - DNA, 192 bp, Homo sapiens
  chr11:10519312-10519504
  hypo
aggaggggagcttgacccagcggaaatagctcacactcgtgcgtgcttctgcctggcctggtcagacgccacaacgtgatctcacctaagcctcacaattaccccgttactatcaccattttgttgttaacagtaagcggaattattatgtgcttggtgcgtgttggacacggtgttgagtgctctccctgg

SEQ ID NO: 214073 - DNA, 193 bp, Homo sapiens
  chr11:10712069-10712262
  hypo
gctgccctggactgtcgcctgaactcagagtctagcctccaaggtccacaggactaacatgatatcccctttccctctattcgtgattttcctgtgatttggactgtgacactcagtaactgccccaggacctaagttactaactagcggcagggtgacatctaatgcaggaagcgcccgctttggaccaagg

SEQ ID NO: 214074 - DNA, 34 bp, Homo sapiens
  chr11:10811103-10811137
  hypo
tacagaatctggaactttcccgagtaacgtgctt

SEQ ID NO: 214075 - DNA, 44 bp, Homo sapiens
  chr11:10865158-10865202
  hypo
agtgctgggattacaggcgtgagccaccgcgcgcggctctagtg

SEQ ID NO: 214076 - DNA, 206 bp, Homo sapiens
  chr11:11534254-11534460
  hypo
ctacggagagtctggcggcacctgaggcctgggctcgttatgtgccttaacacagtggtattaccatgctctgctactctcctaacccatctatcacatggacaccaggacacacgggtgctgcctagaaaaaggatgcctctcgacaaagtcccataatgacactaactcctctcatcactcaggtggcccgtgtgtgtgatctg

SEQ ID NO: 214077 - DNA, 262 bp, Homo sapiens; identical to SEQ ID NO: 202440
  chr11:12030561-12030823
  hypo

SEQ ID NO: 214078 - DNA, 54 bp, Homo sapiens; identical to SEQ ID NO: 202441
  chr11:12031006-12031060
  hypo

SEQ ID NO: 214079 - DNA, 168 bp, Homo sapiens
  chr11:12073851-12074019
  hypo
tccaggtgggcctaacgtaatcacaagggttcttagaagagggaggcaggagagtcagagaaggaggtgcgaggatggacacggggttctaagtgatgtgattcctggcttcttccaagatggaggaagaggccacgacccaaggaaagcaagcggcctgtagaagct

SEQ ID NO: 214080 - DNA, 240 bp, Homo sapiens
  chr11:12115710-12115950
  hypo
catggcactgggcttgaaggatgaggagttcgccagacacagaggatgaggagagcagcacgtgagtaaagaaaacagagaaaggaactctctgtcatgttgtgggctggagggcagcattcacactggacaagtgcttcagaaagatccttctggcaggtagtgggcagaaaaatgagtgaagtcagagcgatcgactaggaatccactgaaagtggatttaaatgagaggtgatgaaa

SEQ ID NO: 214081 - DNA, 287 bp, Homo sapiens; identical to SEQ ID NO: 202443
  chr11:12132212-12132499
  hypo

SEQ ID NO: 214082 - DNA, 427 bp, Homo sapiens
  chr11:12209618-12210045
  hypo
gggagtcacaagccacgtggctagggcacttgaaatgtggtaagtccgcattgagctgcgctgtacatataaaatactcacctcattttaaaggcttagtataaaaaatgattatcaaatattttatcgatactttttatattgattacgtgttgcaatgataatattttgcatataatagattagaatattgaaattaacttcctatttcttgtcacttttttagaaaaaatgtggctatcagaaaatttaaaattgcacgtgtggctcaccttatatttctattgcagtgattcttaactggtggctgttttgccttccagggacgtttgataatatttgaagacttttttttattgtcatgctgttgggagagtggcgtggttggcacgagcacctagttggaagaggccggggaagctgctga

SEQ ID NO: 214083 - DNA, 41 bp, Homo sapiens
  chr11:12214008-12214049
  hypo
ctgatttcacttaaacgatttctcctcagaagcaaggcacg

SEQ ID NO: 214084 - DNA, 77 bp, Homo sapiens
  chr11:12230962-12231039
  hypo
ctcatagccaccacacggggggtataatcattctcttcccacctctctctgccaactcatctcatttctctgtcctg

SEQ ID NO: 214085 - DNA, 65 bp, Homo sapiens
  chr11:12231069-12231134
  hypo
cctacagaccattctctgtcggagtttgagtttgacgtcatcattggtgccgatggccgcaggaa

SEQ ID NO: 214086 - DNA, 287 bp, Homo sapiens
  chr11:12240002-12240289
  hypo
ctctcctgcatgaggcgtccacgccaggcactgtcttcactgtgtaatgtcacccactccatcttagggatgcttgggtcatattttgaagggggggtgtttgagacctctcccttctctcttcccccatctcacctccacgccttcggagagagaagtgatcatgtgaccgcggaaacagggatcagaaaggaaatcaaataacaggaattccatcctggacactggggcctgacaaagagctcttggaccagtgctggatgcaatttgggcggtttggtttgaat

SEQ ID NO: 214087 - DNA, 280 bp, Homo sapiens
  chr11:12247647-12247927
  hypo
tgaaggtgctcagctcgccacacctctgcctcctctccctgaatttctctgctttgttttgattctctagcaactttgactctttgaatgaagatgatgctgtggagaacaaccagctcgcatttgatgtggccgagcgagagtttgggatccctccagtgaccacgggcaaagagatggcatctgcccaggagcctgacaagctcagcatggtcatgtacctctccaagttctacgagctcttccggggcaccccactgaggcccgtgggtaagcacct

SEQ ID NO: 214088 - DNA, 344 bp, Homo sapiens
  chr11:12248494-12248838
  hypo
cagccaacacctccttgttatagccatacttcccagagccaggttccaaatcacagttgcgctttatttcccaacagattcttggcgcaaaaactatggagaaaatgctgacctcagcttggccaaatcatccatttctaataactatctcaacctcacatttccaaggaagaggactccacgggtaagttttggcctggtttcggttttatttcccattgcacatggacggggtatgaggaacggagattgtcacattctcagcctgttgaggctagtaagttacatggatcaggcgctcccggaagatgctagtaaaactcggattagtgactgagtgtttt

SEQ ID NO: 214089 - DNA, 54 bp, Homo sapiens
  chr11:12253012-12253066
  hypo
cacctgcacactttccgaagagccgggtggcattacgtgcgaaggtgcctcttc

SEQ ID NO: 214090 - DNA, 118 bp, Homo sapiens
  chr11:12260726-12260844
  hypo
ataagaaatgagagtcgggattcaaaccccaaccacctggctcccaagcctagctgtgcccatcctttggaaagacgcatccctcctgtgagcattgcctctgcgggggtggccctgc

SEQ ID NO: 214091 - DNA, 317 bp, Homo sapiens
  chr11:12276763-12277080
  hypo
cagccttaaccattttttaagggtacggtttagtggtattaaatacatccttcgtgtgcaaccctcaccatcctcccactccagaactcttagttgttgtaaaactggaactctgtacccactaaacaacagcaaccactgttctactgcctgtctctacgattttgactactctaggtaccacatataagtggaatcctagagtacttgtgtttttgcggccacagggttttatttattttcttttctccacctccagaatccccgcgttctgctcctggctggttttgcttctcctgggtcgtggggtgctattt

SEQ ID NO: 214092 - DNA, 381 bp, Homo sapiens
  chr11:12278213-12278594
  hypo
ggaagcagaagcccacgaggtccccagcattcagtgtggaatttctaaaagccttggcctggcatttgaaggctcgggataagccataatacacccactcttctctcccgatccccaggaatctatgcgaaagtcatttccccttaacctgggaggcagcgacacgtgttacttctgtaagaaacgtgtgtacgtgatggaacggctgagcgccgagggccacttcttccaccgggagtgtttccgctgcagcatctgtgccaccaccttgcgcctggccgcctacacctttgactgcgatgaaggtaaccccaggggccagggcagcactgggctctggccttggcctcaggtgtgaccttggctcgggttcctgtccct

SEQ ID NO: 214093 - DNA, 170 bp, Homo sapiens
  chr11:12279381-12279551
  hypo
ggcttgtctggaaggcgcacagtggtcctgggcagtggcagtttcccagtgcgtgccccgtctgggtcttttcctccccatcactgctgccatttgctctcagcatttcccacccgccaggtattccacaaagaaagactgagggtgttcatactcgaagctgtccattt

SEQ ID NO: 214094 - DNA, 320 bp, Homo sapiens
  chr11:12281098-12281418
  hypo
aggagtgagattgccgatcaaaaggcatgcatatttttgaaggctcgtgactcctatggtcagttggcccctagaaaagtgcccgtgttcagcaccggcttcagcatgagtcggggggctgagattattgtgggggctggttgcagggtctggcgagttcagtttgtattggctgttggctttgttgaagtagtcctctggaagacttacagacaaatgccctcatttccatctctttctcaggaggaggcaacatggcaagagcaggaagcccctcggagagacactcccaccgaaagttcttgcgcagtggccgccat

SEQ ID NO: 214095 - DNA, 469 bp, Homo sapiens
  chr11:12283307-12283776
  hypo
tctgtgggaactggcgcctctgtccttgttggcactgttctcagtccgatgacttgcattgtgttttctccaatttttgctgggattttaatgttcagcatggtgggaggaacccttgattccttttgtttgagtatagaaagtaaatttttgaggtcatgatgtgaacggccatgttattgtgattatcttcagctcaggataggctgagatgctttgtggagtgttccatgaagcccgagtcggaatctctgactgtcgtgtacagccataaggagactggtttgaattactgtggcgagacagggcgtgcctgtcagaaatctgagatgtttgtacgctctgagatgttgaacctttctggtgggcagcaccgacacccaggggtggacccccgaggatgaatgcctctaggcctccgcaacatattcaagaatgaatgggagacgctagagtaaaatgggggcag

SEQ ID NO: 214096 - DNA, 395 bp, Homo sapiens
  chr11:12283996-12284391
  hypo
ctctttccaatcttacgccatggccatcagttcatttcagccttccagtgctacacccacttcttggctgacacacttctgctctaaggtgactggttttcttgccaattttcaaagagtggtactaacccccaacccgctttccgcaccccgtcctctccgccagcagtactggttgcactaactgtgagtgtcttgcatactgatggactcatttggtggcatggttggctaacagcatggcggggggtgttcagcttgagacccatgcctgtgttcatttcccatggagctggcagcctggtctaccccaagtgcatgccccgcctctcctctctcccttgggtctgcctgcgtgcatgcttctccagttgcgtctgcgaagctacctactt

SEQ ID NO: 214097 - DNA, 191 bp, Homo sapiens
  chr11:12315587-12315778
  hypo
ctcaaagctggggagcgaatttcccagaaaagtgctgagaatggtagaggaggccgtgtgctaaaaccagtccgccccctgctgctccctagggcagcaggagagcccctgccaacccagagaggggcccaggagaagatggggacccctgcggaacaagctcaaggggagcgaaacgtgcctccacccaa

SEQ ID NO: 214098 - DNA, 33 bp, Homo sapiens
  chr11:12554120-12554153
  hypo
aaaataactatgaatcgacgttagttacaaatt

SEQ ID NO: 214099 - DNA, 215 bp, Homo sapiens
  chr11:12823851-12824066
  hypo
atgtgtgtgggacttcgaaatatggaataatgatgggttttattatttctttttgagaaaaatccagtcactttttttttaacccgaggaagttgaatcctgaagaaggggagatttatctctgccctttgaacttaaagcccataaagtaaaatatatagtttaaaacaattacatgttccccccatctcaccgccgcccgacccttcacagat

SEQ ID NO: 214100 - DNA, 129 bp, Homo sapiens
  chr11:12944977-12945106
  hypo
cctggtgcttagttccgtgtggtatgttcctcacttaattgtaagcctcacgagagcaggccctggctcagcttttgctttttttatccgcagctctgagcattgtgccggatgcggagcagggggttg

SEQ ID NO: 214101 - DNA, 70 bp, Homo sapiens
  chr11:13185770-13185840
  hypo
aggcatagatgaagccgttgactctatgcgcttcacctactcctccaactcactacgctgttctaaggat

SEQ ID NO: 214102 - DNA, 212 bp, Homo sapiens; identical to SEQ ID NO: 202450
  chr11:13298611-13298823
  hypo

SEQ ID NO: 214103 - DNA, 637 bp, Homo sapiens; identical to SEQ ID NO: 202451
  chr11:13689484-13690121
  hypo

SEQ ID NO: 214104 - DNA, 560 bp, Homo sapiens; identical to SEQ ID NO: 202452
  chr11:13690157-13690717
  hypo

SEQ ID NO: 214105 - DNA, 33 bp, Homo sapiens
  chr11:13700080-13700113
  hypo
ggttacaggcatggccacgaaggtcatgctttc

SEQ ID NO: 214106 - DNA, 147 bp, Homo sapiens
  chr11:14498537-14498684
  hypo
atccataatgctcctcggtaaatcctagcacaatacaagatctgaaacatgaacttggcagacaaatcttgaagcagagatctttctttgttaatttaagctcaaataaaaacaagggccaggcactcacgcctgtaatcccagcac

SEQ ID NO: 214107 - DNA, 120 bp, Homo sapiens
  chr11:14542801-14542921
  hypo
gagatcactatattattttaatacagtgggacctcgtcgctacaataataataagaataagaataagaataagaataataaaaaaaaaaggctgggcatgttggcatgggcctgtggtcc

SEQ ID NO: 214108 - DNA, 251 bp, Homo sapiens; identical to SEQ ID NO: 202457
  chr11:15671676-15671927
  hypo

SEQ ID NO: 214109 - DNA, 63 bp, Homo sapiens
  chr11:15959967-15960030
  hypo
attgtgcgggccccgagtggcattttccaacctcggccaggggcttccgctagaggcgcctgc

SEQ ID NO: 214110 - DNA, 365 bp, Homo sapiens; identical to SEQ ID NO: 202463
  chr11:17035667-17036032
  hypo

SEQ ID NO: 214111 - DNA, 110 bp, Homo sapiens
  chr11:17100561-17100671
  hypo
agactgactcagtgccggtacacaacaatgcgttgaaagaatgggcaaatgaagcagcttcttaaaattttaaaaagtaagcatagctctaggaaggagggaggtcagtg

SEQ ID NO: 214112 - DNA, 147 bp, Homo sapiens; identical to SEQ ID NO: 202470
  chr11:17498265-17498412
  hypo

SEQ ID NO: 214113 - DNA, 84 bp, Homo sapiens
  chr11:18512439-18512523
  hypo
atcatcatagcgctcagcctgctcagtgagttggctttctgtaccagctcacttttatccagtcgttcccgtgggagggctgca

SEQ ID NO: 214114 - DNA, 55 bp, Homo sapiens; identical to SEQ ID NO: 202475
  chr11:18610408-18610463
  hypo

SEQ ID NO: 214115 - DNA, 173 bp, Homo sapiens; identical to SEQ ID NO: 202476
  chr11:18610571-18610744
  hypo

SEQ ID NO: 214116 - DNA, 39 bp, Homo sapiens
  chr11:19238182-19238221
  hypo
taggattaccggcgtgagccacagcgcccggctgatgtt

SEQ ID NO: 214117 - DNA, 229 bp, Homo sapiens
  chr11:19256431-19256660
  hypo
tcatcataatctgctcggcgtacttattctcctccccgatgctcttcaaggtgccaagggttttgttgagattgtgtcgcccgtgccaagtgtacctgtttttggcgaggcggctcaccatatgtaaactctctaggacgttcacgatatcgtaaatgcgtcgacgttcaacatctacaaagaatgtgcaattgtgtgttacagatttttgtaacgtgtttagaattga

SEQ ID NO: 214118 - DNA, 261 bp, Homo sapiens; identical to SEQ ID NO: 202483
  chr11:19733695-19733956
  hypo

SEQ ID NO: 214119 - DNA, 968 bp, Homo sapiens; identical to SEQ ID NO: 202484
  chr11:19734005-19734973
  hypo

SEQ ID NO: 214120 - DNA, 338 bp, Homo sapiens; identical to SEQ ID NO: 202485
  chr11:19735066-19735404
  hypo

SEQ ID NO: 214121 - DNA, 97 bp, Homo sapiens
  chr11:27485359-27485456
  hypo
tgacagaaacatatttgaaatgtattaaattcatttaatgttcccttcttatgaactctgattaaattaagtaagaattccgcgtacacttcaactt

SEQ ID NO: 214122 - DNA, 337 bp, Homo sapiens
  chr11:30445728-30446065
  hypo
gaagttcagacaagcggttactttgggtccttggaatatttataatagggggtgaagagaggttcaccgaaggaattgacaagctactaattaatgccatcactgctgcctggcacctctattaagcaaaactcagaaaccgggagccaattttcacatacgctttcttttctaaatggtagcccttctgaattgcaaccttcttcacgcctggcactcccagccgccatcggcccctctccgactgcacatcacaccaggtccaagagaagctaatttaaccaccgctggttaaaatcatactgcacttcacagcgcctttcacatgccatgaagc

SEQ ID NO: 214123 - DNA, 336 bp, Homo sapiens; identical to SEQ ID NO: 202493
  chr11:30607762-30608098
  hypo

SEQ ID NO: 214124 - DNA, 212 bp, Homo sapiens
  chr11:31808822-31809034
  hypo
accttcagagcacacatatacgtgcccaagtgcacacatacagaccctccgctcccacgtcactccttttctcccattcccacctcttgcacctggcgtgcgacatccgggtctccaaagtctctgctgtctacacaacagaaccgtgggccggaactggctgcctgaccgtggtggaaattacagccagcgagaaggaagaagtaagccag

SEQ ID NO: 214125 - DNA, 412 bp, Homo sapiens; identical to SEQ ID NO: 202504
  chr11:32851553-32851965
  hypo

SEQ ID NO: 214126 - DNA, 941 bp, Homo sapiens; identical to SEQ ID NO: 202505
  chr11:32915115-32916056
  hypo

SEQ ID NO: 214127 - DNA, 42 bp, Homo sapiens
  chr11:33183722-33183764
  hypo
attaaatgagattgactgggcgcggtggcccacgcctgtaat

SEQ ID NO: 214128 - DNA, 360 bp, Homo sapiens; identical to SEQ ID NO: 202507
  chr11:33397994-33398354
  hypo

SEQ ID NO: 214129 - DNA, 42 bp, Homo sapiens
  chr11:34109547-34109589
  hypo
tttatttgtttatttagagacgcagtctcgctctatcgccag

SEQ ID NO: 214130 - DNA, 38 bp, Homo sapiens
  chr11:34192314-34192352
  hypo
ttcagggaggtagcccgccttttcgaagtacagagctg

SEQ ID NO: 214131 - DNA, 213 bp, Homo sapiens
  chr11:34265163-34265376
  hypo
atttattatctatctgtgaaaatgggaacaacaatattgattctcttaactttcttgaagagtcaatgagatcatttacggaatgtgcttggcacagactcagtgaaagataaaagcttgaagcctatggttagacctaaggtcagccacccacccagacccaggaccaagccctgaatgtctagagcacggttcttcgcagacacaccccag

SEQ ID NO: 214132 - DNA, 200 bp, Homo sapiens
  chr11:34511230-34511430
  hypo
catctacactggtggcgcatgctgggctctttgtgtgcatcatttctcaaacttaccacgacccacaagggtcacactattttacagataggggaatggagtctcagacgataagcaatccatagacccaagctatggtcctacagacccacacccacgctctttctgtcacactctttccaccacgcttttccccactg

SEQ ID NO: 214133 - DNA, 317 bp, Homo sapiens
  chr11:34516981-34517298
  hypo
cagccgaggcgctacgcgttcttgtcgtctcaagtttctcaggtcccctcaacaatcctatccagtaggtgtaattgggctattccacaaaaaaggaaatagaggctccccttaaaactcaaaggtcttccagagatctcttttaccaccgaagggtgggtggaggggcagttgatttattttatttaaaaattttcagaattttatatgcattaagatcaaagcgtcaatattgtgccagggtgcttgaggctgatgtcgtagcctctacctggcagataggaagagccagggagccggtgagaccgatgactcag

SEQ ID NO: 214134 - DNA, 34 bp, Homo sapiens; identical to SEQ ID NO: 202512
  chr11:35440064-35440098
  hypo

SEQ ID NO: 214135 - DNA, 238 bp, Homo sapiens; identical to SEQ ID NO: 202513
  chr11:35440137-35440375
  hypo

SEQ ID NO: 214136 - DNA, 37 bp, Homo sapiens
  chr11:35516160-35516197
  hypo
gtgagccaccgcacccggcccagggagtggtaagact

SEQ ID NO: 214137 - DNA, 66 bp, Homo sapiens; identical to SEQ ID NO: 202518
  chr11:35641617-35641683
  hypo

SEQ ID NO: 214138 - DNA, 74 bp, Homo sapiens
  chr11:35661156-35661230
  hypo
ccctgccagtgaggcgccaaaaagaaggtcttacattctgaagacaggtggcttccccccgcccctccgcttca

SEQ ID NO: 214139 - DNA, 38 bp, Homo sapiens
  chr11:36060520-36060558
  hypo
cttttttttttttttttagacggagtcttgcctctgtc

SEQ ID NO: 214140 - DNA, 37 bp, Homo sapiens
  chr11:36060798-36060835
  hypo
gtgagccaccgcgcccggcctaaaatttcttatatat

SEQ ID NO: 214141 - DNA, 49 bp, Homo sapiens
  chr11:36248992-36249041
  hypo
tggaagagattgaggcgggagaggtcatccattgcggggaggggaatag

SEQ ID NO: 214142 - DNA, 190 bp, Homo sapiens
  chr11:36476161-36476351
  hypo
gaccagggttttggcgcgtaactcattccatcctccaaggtactgttgtgctttcagtctccaggtcacccgcagggtaggtgaccagagccagagaagcggtttattcccggggctccgcactgcacccacgcgcccgcgcctgtgtttgactgcacgaggattctccggaggtgtcccttcctgccag

SEQ ID NO: 214143 - DNA, 82 bp, Homo sapiens
  chr11:40039796-40039878
  hypo
tctaggcccataagtctcaacgtgttttccttggaacagcagcatcggcatactttgggagcttgttaaaaatgcagattgt

SEQ ID NO: 214144 - DNA, 205 bp, Homo sapiens; identical to SEQ ID NO: 202529
  chr11:43965299-43965504
  hypo

SEQ ID NO: 214145 - DNA, 166 bp, Homo sapiens
  chr11:44608908-44609074
  hypo
tggcggggccccgccggccacacggggagcctggatttaaagtgagtatgtcttcagccacattgcctttggagagtcacagacaggagtgacgagatctgggtcgtgtttttcagagtcctccctgctgctgtgtggacgacacgtgggcacaggcagaagtggg

SEQ ID NO: 214146 - DNA, 200 bp, Homo sapiens
  chr11:44609415-44609615
  hypo
tggaactcagactgccttcaggtggccgagaacttgaaagccctggtgttctttgtggcagtccctccatctgtctgtccatccatccatccacctacctacccctccatccctgcatccacccagtctttcatgcagcaatatttgttgggagtctgccttgttctcgtaaataacagtcttcccgtcaaggtatcaca

SEQ ID NO: 214147 - DNA, 41 bp, Homo sapiens
  chr11:44611373-44611414
  hypo
cttgctgcctcttcgttttgttttttttgagacggggtctc

SEQ ID NO: 214148 - DNA, 41 bp, Homo sapiens
  chr11:44611654-44611695
  hypo
ttacaggtgtgagccaccgcgcctggcgacccttgctgcct

SEQ ID NO: 214149 - DNA, 180 bp, Homo sapiens
  chr11:44621700-44621880
  hypo
cttccagatcctgggcgcagtgatcctgggcttcggggtgtggatcctggccgacaagagcagtttcatctctgtcctgcgtaaggacccctcagcttccccagacccaggcccactgaagaggggagggccagggcgcagatacagctgctcccataagtgcttcggcttcaatgcctg

SEQ ID NO: 214150 - DNA, 332 bp, Homo sapiens
  chr11:44639894-44640226
  hypo
gactggcctgtgtaccaggaggtgtgcggggggctgcggatcgggggcggggctccgagggcgttgggggccatctgggctactgctcagcaattccttcctgcatttagttccttcccttaattcatctgtcatttgtaccttcatctacttctttgttaatgtatttattcaaggaacaggcagagccctctgtaggggcttccgggctgggactggggggctctcggtggttctgcatggcggggtgggatggtgcagagcggggtgatgtgaccgcattctgcccttgcagggctgcatggagaaggtgcaggcgtggctgcaggaga

SEQ ID NO: 214151 - DNA, 519 bp, Homo sapiens
  chr11:44640525-44641044
  hypo
cctggatggtgaggctggggcgtctgaggccgggacacccagcctccctctgactctccgcctctccccacagctcctggggatggtcctgtccatctgcttgtgccggcacgtccattccgaagactacagcaaggtccccaagtactgaggcagctgctatccccatctccctgcctggcccccaacctcagggctcccaggggtctccctggctccctcctccaggcctgcctcccacttcactgcgaagaccctcttgcccatcctgactgaaagtagggggctttctggggcctagcgatctctcctggcctatccgctgccagccttgagccctggctgttctgtggttcctctgctcaccgcccatcagggttctcttagcaactcagagaaaaatgctccccacagcgtccctggcgcaggtgggctggacttctacctgccctcaagggtgtgtatattgtataggggcaactgtatgaaaaattggggaggagggggccgggcgcggtg

SEQ ID NO: 214152 - DNA, 313 bp, Homo sapiens; identical to SEQ ID NO: 202533
  chr11:44748871-44749184
  hypo

SEQ ID NO: 214153 - DNA, 86 bp, Homo sapiens
  chr11:44944309-44944395
  hypo
actggcttctggtttggggacgatcttgcattcagtctggggcatgttgcgtctaagaaacctttggaggccaggcacgttggctc

SEQ ID NO: 214154 - DNA, 47 bp, Homo sapiens
  chr11:45195184-45195231
  hypo
aaaaaaaaagttctgcgggagggaccgccttgggagaatgtgttcca

SEQ ID NO: 214155 - DNA, 96 bp, Homo sapiens; identical to SEQ ID NO: 202537
  chr11:45684299-45684395
  hypo

SEQ ID NO: 214156 - DNA, 186 bp, Homo sapiens; identical to SEQ ID NO: 202538
  chr11:45825485-45825671
  hypo

SEQ ID NO: 214157 - DNA, 195 bp, Homo sapiens
  chr11:45951099-45951294
  hypo
gacctctggcctgcccgtcccatcccgcctgactgcagctcaccctgggctgaggacccacggacaccggagagaggtgagggtccaaaggctgctggggaaggggtaggggggtggggtcctcagggaggaagggccttgtgggagggggcgccaagtggaactggagagccctgcttccgtttagaggaggta

SEQ ID NO: 214158 - DNA, 499 bp, Homo sapiens
  chr11:45953589-45954088
  hypo
tccccaaaggcaagacagagcgaaggccacgctggggctctgtctcagagacgtaccctcaaaacatgtcactcctcctctgttctaagcaccaagggctgatgcagccagcctgtactcccgcaccctcctgtcacggccagggtgcgtgcgcaccacagagctccgctggccagttccctcggaggtgtcccccaggcactcataatgctggtggctgaaagaccaaaagcagcaccaaaggaagggatcttatttaggcaccagccttttgctctagcagaatctgagaagaccacgggtagggccctgataccatccacgcttccatttgggcttcacaacaggagacaagatccctgcaccaagaagagagcacggtcttttctgaggagagagaagggtggggagctccgcctctgtccttcaaggagactggcccaccagtctagagacacacacacggcaaaatgtcatcgtgatcagcagggtctgtgct

SEQ ID NO: 214159 - DNA, 157 bp, Homo sapiens
  chr11:45956742-45956899
  hypo
gtgtggaagaaagagcgagggagggccgtacggatgggcccactcgctcaggtgactaggaagaatcacacgaggggacctggtctgtgtctgctcagtgtcaggtgaggcgctacactccccccacacactgtcaggaatacgcagggccatggct

SEQ ID NO: 214160 - DNA, 62 bp, Homo sapiens; identical to SEQ ID NO: 202540
  chr11:46264958-46265020
  hypo

SEQ ID NO: 214161 - DNA, 332 bp, Homo sapiens; identical to SEQ ID NO: 202541
  chr11:46299415-46299747
  hypo

SEQ ID NO: 214162 - DNA, 340 bp, Homo sapiens
  chr11:46337893-46338233
  hypo
accttacaagatggccgccacccagactgggacctgcctcatggtaggtgtggctccctccaccacagacccacaggaggagagttcttcccaaggctggctttttccagggttgggcagagctttaaggatcggtaacatcgtgggcagcgtcccagggtacaccatcctggcgcctggtgggctggttctagcagactccagactccttctccaagcccatggtgccttctgcctcacaccggtccccgactggttaacacagtgtagatgtgtaggtgactccagtggccccagctaggggacagctgggcaggttccttgaggaggcggcttccac

SEQ ID NO: 214163 - DNA, 342 bp, Homo sapiens
  chr11:46391520-46391862
  hypo
agacgacgccaggacggcaagtgtcggcactgtgggaaggtgagaggccctgcccgaggacatcgccacctgcacctgcggtcctgagcccaggccatgtggccggtgtggcctgccgatcactgaccacaccctggtgtgcagagtccggggctgaccctcagcctggctgcagtgccttcagttctcaagcaccctggcctgctcttggtctctgggcttagtaggagagcagggaggaaagttttcttcccatgtggcacacctggcctgctttgaagctgcaagtggccctttggagaatcgtatagacttactcattcggtgactccatggatactt

SEQ ID NO: 214164 - DNA, 240 bp, Homo sapiens; identical to SEQ ID NO: 202542
  chr11:46413465-46413705
  hypo

SEQ ID NO: 214165 - DNA, 34 bp, Homo sapiens
  chr11:46589409-46589443
  hypo
tagctggggctgggcgcggtggctcacacctgta

SEQ ID NO: 214166 - DNA, 180 bp, Homo sapiens
  chr11:46617388-46617568
  hypo
gccaagcgtggtggcaggagcctgtagtcccagctactcgggactacaaaaaaaaaaaaaaagaaagaaagaaaactctccttcttggagaggcttgtggagcatagctatagccctcattcaaattttactcagataactacattgtttttgtttctttgttttttgagacggactctc

SEQ ID NO: 214167 - DNA, 180 bp, Homo sapiens
  chr11:46783059-46783239
  hypo
tgaggtaactgaagacggaggtccagactcactcaaacgaaataagaggtcagaggcagaacctaatgtgagtgaaaaactggctcacggctgtagcgcaagatgtgatctgacagatactagcatccacactatacacaaataagcactttttaaccaaaaactcgatgcagtaaaaat

SEQ ID NO: 214168 - DNA, 32 bp, Homo sapiens
  chr11:46844005-46844037
  hypo
aaaataatcaatatgggggtcgggtgtggtgg

SEQ ID NO: 214169 - DNA, 34 bp, Homo sapiens
  chr11:46959101-46959135
  hypo
tatgcacacaatacacattttattttattttatt

SEQ ID NO: 214170 - DNA, 186 bp, Homo sapiens
  chr11:47169578-47169764
  hypo
gacctggacaccccacgccacttcaaggccctaggctagaggcagcttgtgcagcacgagtgtgcctccaacacagtccagaagaggagcaaccctcaggaaatggcccaggacaccttcatagcggcctttttcctcccacctggagaaggtaaccagacatcgtgtcatcgctgcttctctcat

SEQ ID NO: 214171 - DNA, 36 bp, Homo sapiens
  chr11:47358890-47358926
  hypo
gtttttaactggggagggggcggggggcaggaccag

SEQ ID NO: 214172 - DNA, 111 bp, Homo sapiens
  chr11:47359237-47359348
  hypo
cacccaggatgggctgcccgccatcgtaggcaggcggctcccactgtactgtgcaggagtcctctcccacgttgctgatcttgggggccgcaggtgcgtctggcacgtctg

SEQ ID NO: 214173 - DNA, 37 bp, Homo sapiens
  chr11:47506517-47506554
  hypo
ccacgcccggcttcacgtctctttttataaccaatgt

SEQ ID NO: 214174 - DNA, 78 bp, Homo sapiens
  chr11:47599039-47599117
  hypo
ttggcacagtgcttggcagccgtatagagctcaggatcactgtgccgatctgccagccacatcacctgaaggcagttt

SEQ ID NO: 214175 - DNA, 66 bp, Homo sapiens
  chr11:47599315-47599381
  hypo
ttcaggttggaagtgaacatggatcggaagaagcagctctgagctgagaggaccagccgatggagc

SEQ ID NO: 214176 - DNA, 42 bp, Homo sapiens
  chr11:57152967-57153009
  hypo
cagacatgagccaccgtgcccggccaagaaaaatttttcaat

SEQ ID NO: 214177 - DNA, 390 bp, Homo sapiens
  chr11:57182504-57182894
  hypo
gccaggcaaagcgccgagagaaagcgtagctccagaaggagcggagttcctgcttctgccctgcccctggggtctctaatggggagaggaggatctgggcgtgaattacgaggaaagtggacaggtaggatggggagtgtggaggcttcaatggaacatttcagatccgggcccaccttctacccttggctcccagaactcacccggcgtgctctgcacctgcctcggactcacacatccccacctccctgctttgtcatgctggccctaccaccttggatgaccctctgtgttcttctctattgaaatccgatctgtctctcacagcctggtcaatgacacttcttgcagtaataccttcctgatctttctcagcgagaaaggtgaaag

SEQ ID NO: 214178 - DNA, 67 bp, Homo sapiens
  chr11:57235458-57235525
  hypo
catttgtaccgctgccagctcagcagcctgcccggcaacatcttccgaggcctggtcagcctgcagt

SEQ ID NO: 214179 - DNA, 431 bp, Homo sapiens; identical to SEQ ID NO: 202547
  chr11:57243735-57244166
  hypo

SEQ ID NO: 214180 - DNA, 51 bp, Homo sapiens; identical to SEQ ID NO: 202551
  chr11:57434928-57434979
  hypo

SEQ ID NO: 214181 - DNA, 32 bp, Homo sapiens
  chr11:57500993-57501025
  hypo
gctgcgattacaggcgtgagtcaccgcgccca

SEQ ID NO: 214182 - DNA, 121 bp, Homo sapiens
  chr11:57580247-57580368
  hypo
gttaggattacatccggcgctcagccacactagccactttgtttaatggaacactgtttttacttggaaaaaaatgtgtggtagacaaagggattattcagatgtgcgcatttggcagaca

SEQ ID NO: 214183 - DNA, 42 bp, Homo sapiens
  chr11:58949204-58949246
  hypo
ctggcaggaactctccgcccagttcgccgcaactactacgac

SEQ ID NO: 214184 - DNA, 176 bp, Homo sapiens
  chr11:59423038-59423214
  hypo
gtggaggtggtgtagcggagggtggagcactaaagaaggcacggaagcctggtgctgggggaagcatctgcccaactcgcccttgtagcaacttgggattcatggcagcaagtggactaccaacaaatccagggacccgtgcaaactggctgggagacatccgtccaggctgtagc

SEQ ID NO: 214185 - DNA, 210 bp, Homo sapiens; identical to SEQ ID NO: 202557
  chr11:59523106-59523316
  hypo

SEQ ID NO: 214186 - DNA, 272 bp, Homo sapiens
  chr11:59665529-59665801
  hypo
tccttctaaaaaaaaaaaaagatttaaagttctaagatggctaagatgggcgcacgacgcgccagtggccactactccgcgggctgacggtggcggcgctggcagcgcggaacgcgggcgcctaagccatggcttcctcagggagagctgagctctgggcgctgaacccgctgcgcttgctgtggctcacgccggccgccgccttcctgctgaccctgctgttgcagcttctgccgctcggcctgctcctgggccgcgcattcttccaggac

SEQ ID NO: 214187 - DNA, 37 bp, Homo sapiens
  chr11:59809609-59809646
  hypo
aacccccccaaaactcgactttctaatgttactgtga

SEQ ID NO: 214188 - DNA, 40 bp, Homo sapiens
  chr11:60143549-60143589
  hypo
aaaaaaaaaaaaaaaaaacgatcacagagcacagtccctg

SEQ ID NO: 214189 - DNA, 150 bp, Homo sapiens
  chr11:60282698-60282848
  hypo
ggtttgcagaaaccgttcctagaggcaccaaaacgtagttaaccgggtgtctgaccacatggctgccaggagcctagtgagtctgcgcacacgcactacctccgccccggcagttcctgagtgggtgcgcaggcgcaagaggagcacacc

SEQ ID NO: 214190 - DNA, 187 bp, Homo sapiens
  chr11:60282878-60283065
  hypo
agcctgagagccggccgggtgctgggctcctggctatccctgtgatggtagctcagcgagatctggggacctggcgctgagcgcgttgccagccgggatcttcctcttcatctaggcctgggcgctggcgtgagaactcggactgggtcctggacgagcgccccccgaaactccttggaaccttgaa

SEQ ID NO: 214191 - DNA, 321 bp, Homo sapiens
  chr11:60514866-60515187
  hypo
catgtgcacactcacactaacgtgtgcacacacacgtgtgcacacattcacacacgtatgcacacacactcatttgtacacacacatgcatacgtatgcacacatgcacatggatgcacacagacttacacgcacgtgtgcacactcacccataggtgttctcacacacgtgtgtgcactggcacgtctgtgcacaatcactcacgtgtgcacacaccttactctcacatgcatgcgcatgcacccacatgcgcatgtgcacacacacgtgtgcacacactaacacactcacacctacacgtgcacacacattcacactca

SEQ ID NO: 214192 - DNA, 230 bp, Homo sapiens
  chr11:60689401-60689631
  hypo
tcatcttcctggccggcttcgtggccctgatgaggtcggtgcctgacccttccacccgggccctgctactcctggccttgctgatcctctacgccctgctgagccggctcactggctcccgagcctctggggcccaactcgaggccaaggtgcgagggctggaacgccaggtggaggagctgcgctggcgccagaggcgagcggccaagggggcccgcagtgtggaggag

SEQ ID NO: 214193 - DNA, 49 bp, Homo sapiens; identical to SEQ ID NO: 202558
  chr11:60692121-60692170
  hypo

SEQ ID NO: 214194 - DNA, 164 bp, Homo sapiens
  chr11:60703904-60704068
  hypo
caatggtgtggtcttcgtcctgcgctatcagcgcaaagaacctcccgacagtgccactgaccccacctccccccagccccacaactgggtctggctgggcactgaccaggaggaactgagccgccagctggaccggcagtcccctggcccgcccaagggggagg

SEQ ID NO: 214195 - DNA, 173 bp, Homo sapiens
  chr11:60880738-60880911
  hypo
aagctttgaagccacgtgagcttgctacttcacctcgtccccacccaaattaaacctcttccccagccacagatgagctgctctgctgagagccccgcaatgggcaactttgcccccactccacagtgagaccaggctacaaggaggcagagcttccacgtggtccacatggg

SEQ ID NO: 214196 - DNA, 189 bp, Homo sapiens
  chr11:60897022-60897211
  hypo
gcctgcagccatagcgacttcagggcatctctaggcatcctccacaggtggccgcccggtcaccttgcggggaaggagaggcggagggctgacatgagggactgttagaagcctggtcttcagactccctccaagctgcccttcctgctgagctgaagacgccctccctggcctcgggataggcagctc

SEQ ID NO: 214197 - DNA, 32 bp, Homo sapiens
  chr11:60926976-60927008
  hypo
tcacttgtggccagacgcagtggctcacacct

SEQ ID NO: 214198 - DNA, 66 bp, Homo sapiens
  chr11:60927368-60927434
  hypo
gtctcaaaaaaaaaaaaaaaaaaaaaaaaaaatccaaacttggccacttactggctgtgtgacact

SEQ ID NO: 214199 - DNA, 68 bp, Homo sapiens
  chr11:61049429-61049497
  hypo
cggagcccttcttccgcccatcccttagctcaaaacacttggggagtttctctgccatgttcttacag

SEQ ID NO: 214200 - DNA, 39 bp, Homo sapiens
  chr11:61049655-61049694
  hypo
gcgtggtaggggtaagccccaatgagaagctcatctcca

SEQ ID NO: 214201 - DNA, 188 bp, Homo sapiens; identical to SEQ ID NO: 202559
  chr11:61062500-61062688
  hypo

SEQ ID NO: 214202 - DNA, 351 bp, Homo sapiens
  chr11:61076171-61076522
  hypo
ttttggcatggaacatcctacgtgcagggaccataggtctcactcgtttctcaagtcccacagcactcaggatctgaaacacatgggggttcacgtaacctagtctaatgcgtggttcaacctcagtttccgagattctcaactcagagctctatcctccacacccgctactttgttctccttcagatctgacacacacgtggccccagacaacctaagagagacacattctgcagacaatgatgggcagcctaaagtaagtaccaagtggtccaggcctcaccgtgctattgatgctggctaacagcttcccgttaaattccaccatagagtacacggcccctttcactt

SEQ ID NO: 214203 - DNA, 267 bp, Homo sapiens
  chr11:61106668-61106935
  hypo
gggctgcggcagggagggcacagtaagcacactgagcccttccggctgctcccgcagtggggacgctccttatcgtgaagaactacactggggatcggctcaacttcggcctggcccgggagcaggcccgggctgaaggcatcccggtggagatggtggtgattggggacgacagcgccttcactgtcctgaagaaggcaggccggcgggggctgtgcggcacggtgcttatacacaaggtgggcttccaccggggacgtggagact

SEQ ID NO: 214204 - DNA, 100 bp, Homo sapiens
  chr11:61108987-61109087
  hypo
tgagtgctggcctgggagctggggaagagagtggggaaggttggacagccctggggcgaggagcaggttcctgttggctgcctagcggtgctccccaggt

SEQ ID NO: 214205 - DNA, 43 bp, Homo sapiens
  chr11:61122609-61122652
  hypo
gattacaggcgtgagccaccacgcctggcctggcctctcctgt

SEQ ID NO: 214206 - DNA, 120 bp, Homo sapiens
  chr11:61263503-61263623
  hypo
gacacaggtgggtgcggcgctgacggctttggtgtgggggtgtggagcctagagggctgacgggacagcaggtggggtggctgctgggcgccgtgagatcagacacggcttgtgacgcgt

SEQ ID NO: 214207 - DNA, 315 bp, Homo sapiens; identical to SEQ ID NO: 202562
  chr11:61276101-61276416
  hypo

SEQ ID NO: 214208 - DNA, 260 bp, Homo sapiens
  chr11:61305393-61305653
  hypo
cagaatggtcccaggatggccgcaagtggcctcagaccccagggacaccaccgaggtggcagtgcgtgagggcaccggctggggagggggcttgtccttccgctccagcatccgctgaaggcaccaccacctcgtccagcagccggggccggtcgaggcaggcggcctctccgcgcctccttctctgccgccgccgccgcaggccctcgcctgtgctcgtacctcttgtccccctgagcgttctggttctgctgggttcc

SEQ ID NO: 214209 - DNA, 50 bp, Homo sapiens
  chr11:61474397-61474447
  hypo
ctggtctctctcagacgttgccgtcagctccttcacggaaaggttcatcc

SEQ ID NO: 214210 - DNA, 120 bp, Homo sapiens
  chr11:61475743-61475863
  hypo
tgttgggattacaggcgtgagccaccgcgcccgacttgggggttgatttaattaaagctctatgtcaccaatctcctcctctgagccagagcctgctttcaacactttacaacttttttt

SEQ ID NO: 214211 - DNA, 44 bp, Homo sapiens
  chr11:61476225-61476269
  hypo
atcctattttatagacgaggagagggctgcgttgtatattgaag

SEQ ID NO: 214212 - DNA, 198 bp, Homo sapiens
  chr11:61478512-61478710
  hypo
ccaccccctccaagtcgatgcctttgagagagtcgcgttcccgggagagtggggtaaagacgtgttagggcatgaggggactgaccaagaagaccaccggggcaggtagaaaggacgaaaaccacagacacccttccccacagacaggcaggagaaaacagcctggtgccacccagtgtggggcggtgtcggcctttg

SEQ ID NO: 214213 - DNA, 189 bp, Homo sapiens
  chr11:61479892-61480081
  hypo
gcctaagaccctgggcggcgggtaggaggggacaaatgtcagtggcctcccactcctgcccctggctgcacaaggcacactgttttcatccctaggcctgggcgtgtgaggacctatctcatgctgaaatctggccccagtcctgggcaggctccgctctgccttctgctctagcgcagctgatgtgtg

SEQ ID NO: 214214 - DNA, 335 bp, Homo sapiens
  chr11:61488115-61488450
  hypo
acctggccttgctcacacgggcgttcctgtgacaggtttgtgatcctgtccgtggtgctcttcggcctggtctataacccgcacgaggcctgctccctgaacctggtggaccacggccgcggctacctgggcatcctgctgagctgcatgatcgctgagatggccatcatctggctgagcatgcgcgggggcatcctctacacggagccccgtgactccatgcagtacgtgctctacgtgcgcctgggtaagggccacccaccctggggtgctgccccagacaactcccacctctccattcactcagccagtatttactgcgcacatgttgcgag

SEQ ID NO: 214215 - DNA, 187 bp, Homo sapiens
  chr11:61490855-61491042
  hypo
gagaggtgtccccagcgcccctacctaatgcctcccactgctgcccgcaggaatggttgtctgcaactgggtagtcatcctcagtgtgtgcatcactgtcctctgcgtcttcgaccccacgggccgcacctttgtcaagctgagagccaccaagaggaggcagcgtaacctgcggacctacaacctg

SEQ ID NO: 214216 - DNA, 143 bp, Homo sapiens
  chr11:61508687-61508830
  hypo
atggtgagccctaccgaggtggacctgactcctgagctcatcttccagcagcagccactccccacggggccgcccatgcccactggccttgccctggagctgccgactgcagaccaccgcaacagcagcgtcaggtgagcctt

SEQ ID NO: 214217 - DNA, 606 bp, Homo sapiens
  chr11:61511517-61512123
  hypo
gcgctgcacaatgggcgcctgggggactcgcccagtcctcaggtgctggaattcgccgagttcatcgacagcctcttcaacctggacagcaagagcagctccttccaagacctctactgcatggtggtgcccgagagccccaccagtgactacgctgagggccccaagtcccccagccagcaagagatcctgctccgtgcccagttcgagcccaacctggtgcccaagcccccacggctctttgccggctcagccgacccctcctcgggcatctcactctcgccctccttcccgctcagctcctcgggtgagctcatggacctgacgcccacgggcctcagtagccaggaatgcctggcggctgacaagatccggacttctacccccactggccacggagccagccccgccaagcaagatgagctggtcatctcagcacgctagcaccccagttgcgtggccagccgggcccaggcaggagcaggtggccctgtgggcacctggtgcctgccccctgccgggcagctttaaggacagacccccaggggcagtttagcctcaggcacaggcatcgctgctgagctgggggtccgcatccctacctca

SEQ ID NO: 214218 - DNA, 360 bp, Homo sapiens; identical to SEQ ID NO: 202564
  chr11:61519988-61520348
  hypo

SEQ ID NO: 214219 - DNA, 458 bp, Homo sapiens
  chr11:61522483-61522941
  hypo
agtgctgtcacactcggggctggggctggggacacctgagctctcatcctggtccccacttggccttggtcatccctctggacagtgggtagcagtccctgtgctctcggctctgggctgggagactgggaaagggttttaccgaaggggctgcagcacagcgcgccccctcacctgacgtggtccccctccctgggcacacaccaagcataggtgctgggtcctgccctgtgccggtggtgggctgggggctaaggcgctttggacctcaggtgggaggccgggacagagcggccccctcgaggctggtacagccgggcccccgtgaccgcccggctaatcccctagagagaggcaaggcagcccagatcggcgggcacagggcctgcagagaggggacccaccgggcaggatgcactggcttccagcaggtaaccgggccatggtataagggggct

SEQ ID NO: 214220 - DNA, 99 bp, Homo sapiens
  chr11:61525593-61525692
  hypo
gagtacagttgggtccggagccccctgccggcctagagtatggagggggctcccggacattctgtcctccctgtgccccaggtcgcatcagtgagggaa

SEQ ID NO: 214221 - DNA, 259 bp, Homo sapiens; identical to SEQ ID NO: 202565
  chr11:61595492-61595751
  hypo

SEQ ID NO: 214222 - DNA, 48 bp, Homo sapiens; identical to SEQ ID NO: 202566
  chr11:61596695-61596743
  hypo

SEQ ID NO: 214223 - DNA, 407 bp, Homo sapiens
  chr11:61632399-61632806
  hypo
tccatagagcacaaacgccctcctgctcacggagggctgcaccctcccctccacacacgtggcaccccactgggcacacacgaggagccacactttgagactggtcctggctgtggacagggtctctgagggccccagccagcctctgcccaggtggtgggaggaagcgggagcagcatggccctctgagtcctcacgctctgcccaccctacacactcctcagcctcttccccaccatgccccggcacaacttacacaagatcgccccgctggtgaagtctctatgtgccaagcatggcattgaataccaggagaagccgctactgagggccctgctggacatcatcaggtgaggggtggaggtccacaggcgctgggccctgggatcacccgtggtgcagacagt

SEQ ID NO: 214224 - DNA, 176 bp, Homo sapiens
  chr11:61634597-61634773
  hypo
cagaatgggggctttcggggagggcgcctagtccccccagctctaagcagccaggagggacctgcatctaagcatctgggttgccatggcaatggcatgccccccagctactgtatgcccccgacccccgcagaggcagaatgaacccatagggagctgatcgtaatgtttatcat

SEQ ID NO: 214225 - DNA, 42 bp, Homo sapiens
  chr11:61635271-61635313
  hypo
ggggctggagaaggccgggagcggtggctcatgcctgtaatc

SEQ ID NO: 214226 - DNA, 215 bp, Homo sapiens
  chr11:61644863-61645078
  hypo
gccacactgttgcacgcacatgtgcaccctgtttgccttcatgggcaggtactgtcccccgaggcaccacctcctgccacggcagccgtatgcccggggtcctgggcaaccccactcaccgcccactgcatgcacaccagcatgtacgccagattttccacttcaaagttcaccagggtgagcagcggcgggccgactgcaagaaggggcatgag

SEQ ID NO: 214227 - DNA, 190 bp, Homo sapiens; identical to SEQ ID NO: 202567
  chr11:61659371-61659561
  hypo

SEQ ID NO: 214228 - DNA, 167 bp, Homo sapiens
  chr11:61662932-61663099
  hypo
agcccagagaggagcgactttgcccaggtgcacagccccggcaggagttccatcaggacagtcttggcagactggaaagcatcctgcaggagtgaagcacgccagtgcgcagctggtctcggctcagcgcctccaccctcagaggccagagtcgttgctaggtttga

SEQ ID NO: 214229 - DNA, 143 bp, Homo sapiens
  chr11:61667785-61667928
  hypo
gggtggaaggtagccggcggctgtgcccgcccgcaacagcccctactgaatgtccaacactcctggggagggacatcaagtgagaggggcacccgcaggctggggagtggagaagcttcggggaggggcgggacggtggtggc

SEQ ID NO: 214230 - DNA, 229 bp, Homo sapiens
  chr11:61668805-61669034
  hypo
ctggtctgggtcactcggcaggggagggtgggagctgggattcctagaggccccttggcactcacggccgacttaaggctggtgcaccagacgcaccgctgaaccttttccaaagcttcggccagcacctgagtctgggcgtcaggagccccgcactctaactggaactctagcatcactcctggattaggtgacattgaatgacagaggggggcgatgtcatcccatg

SEQ ID NO: 214231 - DNA, 248 bp, Homo sapiens
  chr11:61672904-61673152
  hypo
gggggctccccaggtgggagcggccaggccggctcgtaggtgaggtgaaccgccttgctggggaccacgcagaggagcagggagagcagcggggccagcccgggctgggccggatggacagacagacagacagacagacaggtagacaggtgcacagagacagaacaggaggaaggggagaagttaatgtacattcagaagctcagagctcaggaggtggatgagggcctgctcgtcttccctggagg

SEQ ID NO: 214232 - DNA, 378 bp, Homo sapiens
  chr11:61673894-61674272
  hypo
ctgccacccttccccgtgcccagagcccgcttcccaccctcacctccttgccctctctgtctggggtgagggtgtgtcccgcagcgggacacacggcggggcagagggtgctgctggtgctcttgtggcgagagtggccctttcggggcccggccttggtggggctcagcagctgggggtgaagctcgcggttgggagaggctggtgtggacgtgatgaccagcgtcttcaaggctgtcacctctgcctgcagcatgtcgatctgcatgggatgggatggctgtcaaccctcacccagactggatgccatcctggctgccaccgcctatcagcctaactcaggacaatgcacccctgcagtgacaggcacttagtccc

SEQ ID NO: 214233 - DNA, 116 bp, Homo sapiens
  chr11:61674740-61674856
  hypo
cccattcctgctggccccaccgggccaggtgagcgtccactcgggcagcaaagctcagtgctcgctgagccgggaggcagggggggtgcctgggctggcctgggcaggcggggatg

SEQ ID NO: 214234 - DNA, 99 bp, Homo sapiens
  chr11:61675100-61675199
  hypo
cgctcacattcctcgtcctttagcttcagctcctggaggaaaagaggcaggcacttgagcacctcagcatccccaggcctggcacgggagggaccaggc

SEQ ID NO: 214235 - DNA, 154 bp, Homo sapiens
  chr11:61679898-61680052
  hypo
ggctcccctagagagcggccaagtcttcagccccaaacccacaagcatgtcaggttcccaagcgctaggccacatccacgccagcccaccactccacaggtgtcatggcctggaagctcgggacaattgcagggagatgcgctcctccacctgg

SEQ ID NO: 214236 - DNA, 66 bp, Homo sapiens
  chr11:61688731-61688797
  hypo
tgggaacacaggcccggggtcagacgggctggattcaaccccactttcagacggtgtgcctttgag

SEQ ID NO: 214237 - DNA, 221 bp, Homo sapiens
  chr11:61717670-61717891
  hypo
aggctgtgctagccgttgcttctgagcagattacaagaagggactaagacaaggactcctttgtggaggtcctggcttagggagtcaagtgacggcggctcagcactcacgtgggcagtgccagcctctaagagtgggcaggggcactggccacagagtcccagggagtcccaccagcctagtcgccagaccttctgtgggatcatcggacccacctggaa

SEQ ID NO: 214238 - DNA, 125 bp, Homo sapiens
  chr11:61736227-61736352
  hypo
cggtggaagaactgaatttcaggatgctcacaaacctgcagctggaagctagacttccaaaccttagtttaaaaaagcaactctactgaaatactaaaataaattgccgacggaattagggtgat

SEQ ID NO: 214239 - DNA, 76 bp, Homo sapiens
  chr11:61770026-61770102
  hypo
atgtaaatgtgtatacactttatgcagacaggaaagatttcctgcttccatgagcatccccgcgagtaaccagatg

SEQ ID NO: 214240 - DNA, 148 bp, Homo sapiens
  chr11:61770721-61770869
  hypo
ctgatattctccctacgctgggccaggcagatggagtctccttcagccgagatgtttctggggcagaagatgcacctctgccaccatcctttacttaaaccggaagactcccagcccctgtgaacaagtccgtcggaagttctctgtc

SEQ ID NO: 214241 - DNA, 31 bp, Homo sapiens
  chr11:61811795-61811826
  hypo
tttttgttttttttttgagacggagtctctc

SEQ ID NO: 214242 - DNA, 44 bp, Homo sapiens
  chr11:61825693-61825737
  hypo
gcatttgtcttagcacggtgtgggcgacacgtgctccagagtct

SEQ ID NO: 214243 - DNA, 468 bp, Homo sapiens; identical to SEQ ID NO: 202568
  chr11:62313646-62314114
  hypo

SEQ ID NO: 214244 - DNA, 208 bp, Homo sapiens; identical to SEQ ID NO: 202570
  chr11:62369474-62369682
  hypo

SEQ ID NO: 214245 - DNA, 105 bp, Homo sapiens
  chr11:62387277-62387382
  hypo
agtgctgggattacaggcgtgagccactgcgcccagacaagccctttcaactttaatcagggggttttaactttcttgccaaacggtccctaaggagagagagtt

SEQ ID NO: 214246 - DNA, 31 bp, Homo sapiens
  chr11:62423247-62423278
  hypo
tttgttaaaagctatatcctcgggctgggcg

SEQ ID NO: 214247 - DNA, 197 bp, Homo sapiens
  chr11:62474896-62475093
  hypo
gagcagggtcccccgcagccagtacagactccactgcaggggccgtcataggcccagaccacgccatttgagagggggagtcggccttggcctcagctctgttggggaggtctctagcccagagtcaggatgcctgcaatgggggaggggcaggcagtgaactagcgacagtgggggtgtgcgcagggatgcaggca

SEQ ID NO: 214248 - DNA, 66 bp, Homo sapiens
  chr11:62532994-62533060
  hypo
gattttatgactttacgatggtgtgaaagtgatgtgcattcaatatgcccccgggcttacagtgaa

SEQ ID NO: 214249 - DNA, 206 bp, Homo sapiens; identical to SEQ ID NO: 202576
  chr11:63258404-63258610
  hypo

SEQ ID NO: 214250 - DNA, 54 bp, Homo sapiens; identical to SEQ ID NO: 202577
  chr11:63258770-63258824
  hypo

SEQ ID NO: 214251 - DNA, 201 bp, Homo sapiens
  chr11:63398535-63398736
  hypo
aaaatcaatagctccgcccagctcacgatattgaccagaatacctgatgtagccccaggtgaggagtgctattaacagtagtccaaccatacagttgaacaactgggctacaacctcaagacctatgaagccagtgaggcctgaggctatgtacaaagctacaatgcccgtgaacagcactgcaggggttcggaaggtgct

SEQ ID NO: 214252 - DNA, 152 bp, Homo sapiens
  chr11:63399450-63399602
  hypo
ctctaaaaaacaaaagcaaacggtcgacttctgcagggcccaggtgagaaaggcccacctgtgtcctggttgagggtcctcagggttctttgggacccgaggattcctgaaatcatggatcacccacatacgctttgagacatgctttaatt

SEQ ID NO: 214253 - DNA, 120 bp, Homo sapiens
  chr11:63431996-63432116
  hypo
gcgaaactctgtcttttaaaaaaaagcgtactgagcaatgtgaatgtaatgagcaatatcaatgtaatgacacacagcacatacaataagctattgtttttttgttttttttttttgaga

SEQ ID NO: 214254 - DNA, 88 bp, Homo sapiens
  chr11:63434153-63434241
  hypo
ttacaggcatgagccaccgtgcccggtccacttgtcaggaatcttaaactctggagatctagtctccggggagggtactaaaaatatc

SEQ ID NO: 214255 - DNA, 203 bp, Homo sapiens
  chr11:63675218-63675421
  hypo
cctgacaggcccttgcgtagccacggcccctcctcctacagagattcaaagcattgcagcccctttcctccaaaaggactgcagtcctgagaccctagcgtgtggctccaaaaacgcactcacacctgcaacccccagaacagcgcgtgagccctggctgtgggggagcagcctcgtgccgggccgtgtgctcagtgtgctca

SEQ ID NO: 214256 - DNA, 110 bp, Homo sapiens
  chr11:63675664-63675774
  hypo
tgggtctgtggcggcggaaggagcgagagatcccagcactaaactctccctcgctctgttttttgaggaacctgaatgaacctgaaagcaaagaccgagtggagacgctc

SEQ ID NO: 214257 - DNA, 379 bp, Homo sapiens
  chr11:63676299-63676678
  hypo
gtggggtgcctcagcccccccgtgacgcccgcctctgccctctccacagacctcacgtggtgggcagtggcggcaacgacaaagaaaaggaagaatttcgggaggccaagccccgctccctccgcttcacgtggagtatgaagaccacgagctccatggagcccaacgagatgatgcgggagatccgcaaggtgctggacgcgaacagctgccagagcgagctgcatgagaagtacatgctgctgtgcatgcacggcacgccgggccacgaggacttcgtgcagtgggagatggaggtgtgcaaactgccgcggctctctctcaacggggttcgatttaagcggatatcgggcacctccatggccttcaaaaacattgc

SEQ ID NO: 214258 - DNA, 91 bp, Homo sapiens
  chr11:63676708-63676799
  hypo
acaggctgccaggagcgggggcggcgggggcgggccagctggacgggctgccggccgctgcgccgccccacctgggcgagactgcagcgat

SEQ ID NO: 214259 - DNA, 31 bp, Homo sapiens
  chr11:63743821-63743852
  hypo
cctgaccagccccaccggcccatcctggtca

SEQ ID NO: 214260 - DNA, 69 bp, Homo sapiens
  chr11:63764163-63764232
  hypo
cctcctccccgggcgagtaggatgtgtctcgagtagggtgtctccctccttcccgggcgatgggctgga

SEQ ID NO: 214261 - DNA, 109 bp, Homo sapiens
  chr11:63779256-63779365
  hypo
actcctgtaggagggatgtccagggaccccacgggaagatgggtgtgtctgggcagagtcagatggggtctaacttgggcaggtaggcgattaggactggatgaactca

SEQ ID NO: 214262 - DNA, 182 bp, Homo sapiens
  chr11:63784048-63784230
  hypo
taagtggtgtcgggcggctccgagtggctggtctcccagagctgacagctcttcgcttggggaataattaattccaccgcccaaaaacccagggctgcaagttgccatgttacttgcgagattaatacaagcagctaattaagatggagaggcgaggagcggctgggcgctcccaaagcagg

SEQ ID NO: 214263 - DNA, 437 bp, Homo sapiens
  chr11:63832549-63832986
  hypo
tgagccagactcggcggcctcggagagacttcccagaggagaacgggctacacgtgggcctggaggtgaggtagaagtggcccagggaacgggtgcaggacagagtttcaggaagcaggcctggggtcagagaggcccagagatgaagagcgggtagagtgttgagcgatcggagcagtgaggcggtgggtgggcaggatcgggcaggtggcgggcaagcgtcagctgcctcaacatgcaggaggccaggctttgttctgagggcggctggggccttggagggttttaagccaggtcctcacagatttgccatgtacgaagagttcacccactacctccgctccaaaacagaacatttactgaggctccagagagcctggcagggtgtgtgcttgtcctgagctacagaggacttaaaagatgaacaaggggccagg

SEQ ID NO: 214264 - DNA, 128 bp, Homo sapiens
  chr11:63849252-63849380
  hypo
cctccactgcctcctggagctgccggagagaggtccgggtccgttctccccaattcacagacatgaagactgaggccgtggttccagtggctgctcggtggtggggctggagcttggcagcatcctgc

SEQ ID NO: 214265 - DNA, 77 bp, Homo sapiens
  chr11:63871583-63871660
  hypo
tttggcaggggcctccggaccagtgaccccagtcaaacccagagggtcttgggcggcagcgacgaaggaggtaaggc

SEQ ID NO: 214266 - DNA, 330 bp, Homo sapiens
  chr11:63885570-63885900
  hypo
tcctggaaatccgcggccctgggctgcagatgctgcccatcaacccgtaccgcgccaaagaagagtacgtggtccacactatcttcccctccaacggcagcagcctctgcaaggccacacacaccattggctacggcaccacgcggggctaccgggacggcggcatccccgacatagactactcctacacatgatgcccgcccacccgggctgccccgcctcagccccagctgccctggcgtggccatgtggctttgcccagcctgctgcaatccaagagagcaaggaagagaaattccatgggtgactttcctccgcagaaagcaaagt

SEQ ID NO: 214267 - DNA, 93 bp, Homo sapiens
  chr11:63905995-63906088
  hypo
tgatgatgtttaaaccgtacctgaaatacagccaggcggcaataataaaacagccgcgggccctgctggcagaggaatggctgacagccgggc

SEQ ID NO: 214268 - DNA, 64 bp, Homo sapiens
  chr11:63906118-63906182
  hypo
ctggtttttaccgcaattacaatgtccgaagacagggaggaggcagcagcggggaggaggagag

SEQ ID NO: 214269 - DNA, 144 bp, Homo sapiens
  chr11:63912569-63912713
  hypo
gggcggtgataagcggccagcagattctcacaaatcaaagccccaagacttaaggagatagagcgccacttcatgacttattttaaataaataagcggcttaaaaatctccctgcgaggtcggcttgtcgctgtgaaacatggc

SEQ ID NO: 214270 - DNA, 80 bp, Homo sapiens
  chr11:63934619-63934699
  hypo
aagtacttttatatatttttatgtactattaatattactttatgataaatataatgaatacaggccgggccattataata

SEQ ID NO: 214271 - DNA, 271 bp, Homo sapiens
  chr11:63963859-63964130
  hypo
tccatctcaaaaaaaaaaaaaaaaaaagcttcacaagagcattcctaggagtaatgtgtagcaaagagtgagctgcgggagttgcccttcccgtggtcaccacagcggcttcattgctgccagtgtgaatgttggtcctagcaagactggaaagttgagagtaattcacgtccttgtcgtgatccgaagaatgttgtccacatcaatccctaggcctttgcttcctggctggacatggtgtgtggttgggagtgtccgctaagcagcactc

SEQ ID NO: 214272 - DNA, 215 bp, Homo sapiens
  chr11:63988354-63988569
  hypo
accttggcggccccacgtgggcactgccccttcccaggctcacatgctgtcaccctgatggggaggtgggggctcggtgactctggaggaggggaatagtgcctggcagcccgtcaccagtatggtcccgcagctcaccccacggatcctggaagcccaccagaatgtggcccagttgtcgctggcagaggcccagctgcgcttcatccaggcct

SEQ ID NO: 214273 - DNA, 161 bp, Homo sapiens
  chr11:63990015-63990176
  hypo
acaaagcgacactccgtctcaaaaaaaaaaaaaaaaaaaaaagagatttcaggtcaggagagcagaagaaccagttcttgctccagctctgctgtggacagttcactgtctgggcctgggttcgccggtccgcaagacagggctagcggtggatgctgtta

SEQ ID NO: 214274 - DNA, 58 bp, Homo sapiens
  chr11:64032945-64033003
  hypo
ggcaggtgccggctgcggccaggtgccctgtgagtgtctgggccgcctgtgtgctatg

SEQ ID NO: 214275 - DNA, 320 bp, Homo sapiens
  chr11:64044375-64044695
  hypo
ctctagctttacattctctgcgtgttgggcttctgagtcagcggctggggcggacatccctgctgatgcttccgcgagcatccctgcactgggattttcagagtcctcagattcccaagaaggagaatacgaagttctccctgttttatagatgaggaaacagaggcacacttaattacaagacacttgcacactgaattgcacacttaattaaaacagtggtgttccagaccgtttggagcagtgaagctctgccatcaggcaagggctgggtttggatcctgcccctaccacatgccgaccacacacaatctgctgcc

SEQ ID NO: 214276 - DNA, 39 bp, Homo sapiens
  chr11:64078889-64078928
  hypo
ttttttttttttttttgagacggagtctcgctttgttgc

SEQ ID NO: 214277 - DNA, 115 bp, Homo sapiens
  chr11:64081531-64081646
  hypo
caaggagggtgagcgctgggcaggggctgggcgagggctgggggagtcggggacccgggccaggtgggggtgaggcctgggagttctggtgagtggactcggggaggacagctct

SEQ ID NO: 214278 - DNA, 329 bp, Homo sapiens
  chr11:64088215-64088544
  hypo
tgcctttgtgactggcgagtggggccgagcccacaaggcggaaggcaaggtgaggtgaggggcctgcagggagtcaggaccaggtaggatattcttcttgtgacctttactttctctgcaggttcggctcctggctgatcccactggggcctttgggaaggtgagtgttcccctgaccgccacagggacatggcagtgcggggagcagtgggggcccttagcctcttcaaggatttctgacacttttctctgtctcttcttaggagacagacttattactagatgattcgctggtgtccatctttgggaatcgacgtctcaagaggtaa

SEQ ID NO: 214279 - DNA, 188 bp, Homo sapiens
  chr11:64112373-64112561
  hypo
ctgggagcaagcccggctgcgggaggcagtggaggctgctggccaggagctggagtctgcgtcccaggaacgggaggcgctggtggaggcgctggcagcagcgggccgggagcggaggcagtgggagcgtgaggggtccaggctgcgggcccagtcggaggccgccgaggaacggatgcaggtgctgg

SEQ ID NO: 214280 - DNA, 158 bp, Homo sapiens
  chr11:64118936-64119094
  hypo
cttctgggcagaatgcgatgctggtggcagagaaggcagctttgcaggggcagctgcagcacctggaggggcagctggggagcctgcagggccgtgcccaggagctgctgctgcagagccagcgggcgcaggagcacagcagccgcctgcaggtgggt

SEQ ID NO: 214281 - DNA, 229 bp, Homo sapiens
  chr11:64120593-64120822
  hypo
ggggccggctggcgcggctggagctggagcgggcacagctggagatgcagagccagcagctgcgcgagtccaaccagcagctggacctgagcgcctgccggctgaccacgcagtgtgaggtgtggctggagggccggtgggggtatgggcgtgtggtggggcagaaagcctagacccaggtggtcctgagctgggtcccaccctccgagccatggtgcccccctgccag

SEQ ID NO: 214282 - DNA, 171 bp, Homo sapiens
  chr11:64120948-64121119
  hypo
cgcgaacagcgggagtacctgtgagtgggccgcctgggagcggggtggggcctgcatcccctttgggcgttcctggggagagcccttagtgagggcctagggacagggttggagctgaccttccaggtcagtccaatctgcggcacgggaccagtgcgtcctcgctgcagc

SEQ ID NO: 214283 - DNA, 106 bp, Homo sapiens
  chr11:64124598-64124704
  hypo
cttctcggcactggagtgtcagcggaggccccaggcagcccaagagctcagggagccagggaccccaaggggagtccttggacaaggaggcctgggccctgagatc

SEQ ID NO: 214284 - DNA, 480 bp, Homo sapiens
  chr11:64135717-64136197
  hypo
agcgctatgatgcaggtgggctgggctgggctgggttggggggaaattggttttaggagaggcctaggcccggggactctaggcctagatccaactggcgcccgcagcgtgagctcagcaaggtcctaagcctctccgacatggggcgtggcggggccgcggggctaccaggtgggacctctgacgcgccgccttcgccttcgccttcgccttcgcctccaggactcgcccttcttccagcagtacgagctggacctgcgggagcctgcgctgggccagggcagcttttctgtgtgtcgccgctgccgccagcgccagagcggccaggagttcgcagtcaagatcctcagtcgcaggtgggagggcccaggcgcgggcaggggtgggggtggcagagcgctgtcccgggggcggggccgaagcgcggcgaccgtaactccttctgctccgtcccccaggctggaggcgaacacgcagcgc

SEQ ID NO: 214285 - DNA, 82 bp, Homo sapiens
  chr11:64143181-64143263
  hypo
ttgactctaagcaagttacttctccctaaggtactttgggagtgtaaacaaaaatattccatatgaacgtagagattgcaaa

SEQ ID NO: 214286 - DNA, 164 bp, Homo sapiens
  chr11:64323515-64323679
  hypo
cttccagaccctgcaggtgctcaccttcatcctcccctgcctcatgataccttcccagatgctcctggagaacttctcagccgccatcccaggccaccgatgctggacacacatgctggacaatggctctgcggtttccacaaacatgacccccaaggcccttc

SEQ ID NO: 214287 - DNA, 314 bp, Homo sapiens
  chr11:64323741-64324055
  hypo
ccacagtggcagctcttggaccccaatgccacggccaccagctggagcgaagctgacacggagccgtgtgtggacggctgggtctatgaccgcagcgtcttcacctccaccatcgtggccaaggtagggcctcccccagagccactcgagtcccgtcaccttggaggtcagagtcatggatcaggttggttggactccaaggtccagtcctgggagggacccgcctcctctcgagcctctcagcccctcgtcagccacacacaggggagtgggcggcagggatcagtctacagatggggccagcccaggctcct

SEQ ID NO: 214288 - DNA, 42 bp, Homo sapiens
  chr11:64335474-64335516
  hypo
gggaaagggacagggcggcacgtcgtgcggtggcggcagagc

SEQ ID NO: 214289 - DNA, 87 bp, Homo sapiens
  chr11:64347188-64347275
  hypo
atgaacatctcaccccgggttttcagcagcctcatgatactgtgtacagtttggtgccttgtctttttttttctttttctttttctt

SEQ ID NO: 214290 - DNA, 135 bp, Homo sapiens; identical to SEQ ID NO: 202584
  chr11:64410436-64410571
  hypo

SEQ ID NO: 214291 - DNA, 58 bp, Homo sapiens
  chr11:64418855-64418913
  hypo
gccaggtagctgctgcgactcttgaaggtgacgggatcggccacgatggcacgcaggc

SEQ ID NO: 214292 - DNA, 195 bp, Homo sapiens; identical to SEQ ID NO: 202585
  chr11:64481256-64481451
  hypo

SEQ ID NO: 214293 - DNA, 702 bp, Homo sapiens; identical to SEQ ID NO: 202589
  chr11:64512196-64512898
  hypo

SEQ ID NO: 214294 - DNA, 83 bp, Homo sapiens
  chr11:64607057-64607140
  hypo
gcagggagagtgaggcgtttgacctgtgtgtaagtggccatttaggcacacgcccaggtgcacatgcacggtgtgtgccagca

SEQ ID NO: 214295 - DNA, 400 bp, Homo sapiens
  chr11:64621797-64622197
  hypo
ggcgccatcactcatgtctgcgcttggagggcggcaccaggtgcgggggcaggtcggcaggcagctcgtggccctccagcttgaccttgatgaggtggttggccagcgcgaactcctcgtcgtccagcagcccgtccttgtccacgtcggccagcttccagatcttccctagcacggtgttggggagcttggacttcaccatctccttcttggcgttggcgcccgtgatcttgccgttgacaggggacagcgtgtagaagatctcgtcgtaggtgggcttgtccttgcccaccacccactccacgtcgtcgatgccctcgccggccccctcgccgtagccgtgcccgaacggcccgttcatggtgccgtcaaaggcgccgcccttgaccacctgggaagg

SEQ ID NO: 214296 - DNA, 86 bp, Homo sapiens
  chr11:64624927-64625013
  hypo
aaaataagaaaaacacgcagccctctgtcctccagagccggcatctgacccacgcccgtgcacacagctcacggaggttcaggcca

SEQ ID NO: 214297 - DNA, 331 bp, Homo sapiens
  chr11:64635186-64635517
  hypo
tccatctccgtacccccacctccaaaaaaaagattaaaatggtaaatattatatgttaggtgtattttatcacaatttttaaaaagtgaaaacgaaaagtcctggggctgtgggatgaaagaacagagtggctccgggcaaccaggctgagccaggcatggcacctcagggtagcgtgcacgcaggtgcctctcatggcgacccgcgtcccacccagcctcctccaggccactgcggctctggggcgcccctctccaggcgctggccttacagggtctgccttcctgagaacagctggaccatgtttcccgccagcacagaaggggaagag

SEQ ID NO: 214298 - DNA, 72 bp, Homo sapiens
  chr11:64672165-64672237
  hypo
ttctctgcagctgcacgccgagacatataaacaccccttcataaactgattttaaaacgtacgcagtcctgt

SEQ ID NO: 214299 - DNA, 34 bp, Homo sapiens
  chr11:64804457-64804491
  hypo
tcttgttctgcctcctcccgttcctgctcctgcc

SEQ ID NO: 214300 - DNA, 93 bp, Homo sapiens
  chr11:64809906-64809999
  hypo
accaagcaaacaagaacacatatgcccacgaatatacctgagacagaagtttaaggcattagagatactttctatgggcgatgcattccaata

SEQ ID NO: 214301 - DNA, 377 bp, Homo sapiens
  chr11:64875444-64875821
  hypo
tgccaggtcatcacggcccgcctggcccagcagctgcggcagcgctttaggtgtggcccctctgccctgaccccagcgctcccgccagccccgagccccatctgtgcccggctcctgggccctcctggagctgtccccctgccctgtgtgtgctttgctttcctgctcctgccccatccaccggcagccccggccctgcccttcactacctctccctcgtgcagggagggcggctcaggcgccccggagcaggcagagtgcgtggagctgctgctggccctgggcgagcctgcggaggagctgtgcgaggagttcctggcgcacgcccgcggccggctggagaaggagctgagaaacctggaggccgagctggggcc

SEQ ID NO: 214302 - DNA, 203 bp, Homo sapiens
  chr11:64876158-64876361
  hypo
cgcctgggccaccacctgcagggtctccgggcggccttcctgggctgcctgacagacgtccgccaggcgctggcagcacctcgcgtggctgggaaggagggccctggcctggccgagttgctggccaatgtggccagctccatcctgagccacattaaggcctctctggcagcagtgcaccttttcaccgccaaagaggtgtc

SEQ ID NO: 214303 - DNA, 205 bp, Homo sapiens
  chr11:64898551-64898756
  hypo
agagggacccaggaccgagcttgggacagcagccatgacaagcctacttacagggtgttcatgttgcggatggctcggcgagacatgatggcatctgtcacagctttcttgaactgtctgaaaggacagtcagtgaaagcaggagaagggacgggatcaggtcaggaggatcgggggacagggccgggctcacctcatggccagg

SEQ ID NO: 214304 - DNA, 189 bp, Homo sapiens
  chr11:64950870-64951059
  hypo
attctccctagcacccgcttccccccccggggcaggttggtagagcaggctaatgtgcatccctcctgccccaggggactgctggctcttggcggccatcgcctccctcactctcaacgacaccctcctgcaccgagtggttccgcacggccagagcttccagaatggctatgccggcatcttccattt

SEQ ID NO: 214305 - DNA, 403 bp, Homo sapiens
  chr11:64951332-64951735
  hypo
aattccactcctcccggaggtcggtctcagttgccccatctgagaaaggagtgttcgctggggaaaacagatcagcacgtgtggccttctccacgtgtcaagcctcctatcccccaactcctcctgcgctttggcaaggtctgactgagcccagcagaaaagaaagactcgggattaagtctacgtaaaccagcttttcctgacggtgtgcccagggcccatttttcaagtcacaccaatcaattctcaatgagctgcctttgggagggacatgcccagcaaccctggatgagactctccagccttggaggccccagccctgcccgaaggactcttgggtgttccctccttctgcctggttagagagccccttaccctactctgtccttgcccgccttgcgcg

SEQ ID NO: 214306 - DNA, 211 bp, Homo sapiens
  chr11:64951894-64952105
  hypo
gtacccgccacccacactctccgcaacctgggctcctagggccgcctccaccccgccccgccccccgttgtcctggccccgacccctcagatggtacctcgagtccttggtcgcttctgaccccagacgccttcggccccgaccctgccctgggaaacgtggcctttgtggcatctcagaaacaaagcccgtgattgtgagaaccagtcct

SEQ ID NO: 214307 - DNA, 211 bp, Homo sapiens
  chr11:64955996-64956207
  hypo
cctacacatcagctctgtgccctgacgggctgtgcctcacctgtgtacctcccacctcaggatgtcattccgagacttcatgcgggagttcacccgcctggagatctgcaacctcacacccgacgccctcaagagccggaccatccgcaaatggaacaccacactctacgaaggcacctggcggcgggggagcaccgcggggggctgccga

SEQ ID NO: 214308 - DNA, 200 bp, Homo sapiens
  chr11:64975661-64975861
  hypo
ctctctctccccaggacatggagatcagcgtgaaggagttgcggacaatcctcaataggatcatcagcaaacgtgagtccccgcggggctgtcccaccaccccaccatttcttccacatcagaatccaggctcctgctcacacattgagctgaacctcatcccttggtctgcatgagtcggggaatcctccagtttttct

SEQ ID NO: 214309 - DNA, 317 bp, Homo sapiens
  chr11:64977145-64977462
  hypo
ctcagagaataaggcaagcccggctgtgggctgactgtacatggcttttgctgcttctcctcacccagccccaagtcgacttgccggctcggcggccatctccccttctgcacagttgcccactctcccatgactggtctaagtgatggaatttccttcttaacggccacccagcgtgatggcaatgggaagctgggcctggtggagttcaacatcctgtggaaccgcatccggaattacctggtaggttgtccccactcacctcagtcatgcaggtgcgggccgggcaggtgggaagggccgggtgactcagcctg

SEQ ID NO: 214310 - DNA, 73 bp, Homo sapiens
  chr11:64977534-64977607
  hypo
cctacgagatgcggatggccattgagtcggcaggtgagactccaaggctgacggcacctgtggggcccaggac

SEQ ID NO: 214311 - DNA, 98 bp, Homo sapiens; identical to SEQ ID NO: 202592
  chr11:65189906-65190004
  hypo

SEQ ID NO: 214312 - DNA, 168 bp, Homo sapiens
  chr11:65306213-65306381
  hypo
ctggggtctggcgccgccctgcgcagcccgcgcccacgtcagacgtgaacatcaatttgcttcgaaagccaagggtaaagaggcacgatctgatttatcagtttctaggaaacaccctctgggaggaaggcaggcagcgcccgccggagaccttacaaccgcccgcta

SEQ ID NO: 214313 - DNA, 350 bp, Homo sapiens
  chr11:65306425-65306775
  hypo
cgggagggtctgcgggccctgaaggtccctgggtccgagccacaagtcggggcagaagtgaggccgagctcgcggaaatccctcagtgatcaccgaggtctgggccgagggcggcgtcggcggcgtcagcggcggcgctggggaacgcaggccccgtgcgggcggctgcgcgcgaagccggctttgcagacgcagcggaaggagccgctggtgttcacgcagcgctcgctcttgcacagcagcccgcgctggttcagctctcggcactcgtcgatatctgaaggtgagggcgacaggtgcggcttcgctgagcctccaggcggctcctcaccaccggccccgcccctgcc

SEQ ID NO: 214314 - DNA, 389 bp, Homo sapiens; identical to SEQ ID NO: 202596
  chr11:65306805-65307194
  hypo

SEQ ID NO: 214315 - DNA, 224 bp, Homo sapiens
  chr11:65353078-65353302
  hypo
ttctttcttcccccgccgcagcgcggggtcccgggaagatgggcagagaacgggcgagcccccaaggggccccaaggacagagctggcgcgagggtgacggtttcagagtggcggggctcggctggacccaggaggggctatctgatcagagggaccctggtgctgtggaagagtcctctggtgtggtagtgagctcctcattaggggacgcatttgagccaag

SEQ ID NO: 214316 - DNA, 385 bp, Homo sapiens
  chr11:65366939-65367324
  hypo
gtgcaggagtgggcggggagtcgggcgtcttgagcgagaagcagatgagcggggaagggggcggctcggtcgggcagggcgcgggcgttggcgtggggggtgttgtcggggactccccgcgctcgcgtcctgggcctcccggcggctgcaggtcgcggccaaggcccagcgaggcgagcagggcggtgccgcgcagcagcgcccgctggatcagcttgggcgtcccagagctgctaccgcgctctgcggggacaggcctcttgggctcctcgggctccaggctaggccgcggggggttacctgcgggcagaggcggcacaggtgagggtgtggctggtgcatattccgggtgagggcccaagacctctccgtggtcttggaacaa

SEQ ID NO: 214317 - DNA, 579 bp, Homo sapiens
  chr11:65386921-65387500
  hypo
ccctggcggaacaccgtccccaaccttactcccccagccttgtctgagcatctgtcacttacacttgggggcctctctctgggcagcggccgaggagactggcaggcgggaccgctcaagcagtgtgaggcggacccaggccattcggagacgccacaatgcaggcagcaaccccacccctccagcctctgtcatgggctcgccgcccaggtgagcaccttgccagctgtgccgaggggcaccgggggccggggagggcccgcaagctctagctggcgctgacctggggctgaccctctccagcagcctgcaggaagctcagcggggccgggctgcctcccactcccgggcgctgacgctgccctctgcgctgcatttcgcctcttcactgttgctcacccgggccggtgccaatgtgcatgaggcctgcacctttgatgacacttctgagggtgctgtgcactatttctacgatgagagcggtgagcctttcccaagcccggtggcccagtgcctccccgccttcccccaacagcctgagtcctcctagcagtggtgctcgctcggccctgtggcagg

SEQ ID NO: 214318 - DNA, 223 bp, Homo sapiens
  chr11:65388104-65388327
  hypo
cccagggcacagcctcgacactcgtgccagggtctgggagggaggcacttctgccacctgaccccagcacttgtcccttgagccctggttggtctcggcacagacagccctacctgcctggccttggcctcggcctcgaccccacccagccccagggctcgcccgtggggggatcctgatggctgctgttctcacagggaccgacactcgcattcctccagct

SEQ ID NO: 214319 - DNA, 903 bp, Homo sapiens
  chr11:65397157-65398060
  hypo
gttggcaatggcctcgtcaccttccagctgcgtggccttgagttccggggtgagccgcaggaccaggctcgggtgggcaggcacagctcgggcctgatgtgggagctgtgttcaatagcacgtgcgaaggaggtccagtccagctctgtccaggctggcgggtggccttgggcaaggcactcctcctccctgggcctgcgtttcccagtctgagcaatgaggtggcagggtctcttggccaagccctgtgcctgccccaactttaggtcccagtgactctacaggtcactgcagtgagggcctgggcctggaggtctgagttctcacacccagcctgctctgtggtctcaggcttggcccatgggttgggcgccatgagtgagccagctccttcctctcaggaagacgtgtgtgttggatgcccgagagtgcagaggggccagaccgtgtccctgctccctcccgccctgcccttggatgctgggagttgggaggagaaaggcaggcgctctttcgtgaatcttggcatccaataaggttgactcccctggcgtccaagggggtgaatggcagcaggcctctgatgccatgttggtcactctcccaggacagggcaggtagggattgttctagcagcccctgactgcacacccctcctccacaggcacttactgccagcagcgcgaggtggaggctatcaccgagggtgtggaggaggacgagggctgttgctgctgtgaacctggccacctgccacgggtcctgtccttcaatgctgcctttgggcagcgctggctggcttgggaggtaacagccagcaagtacgtgctggagggctatagcattagtgacaataatgctgcctccatgctgcaggttttcgacctccgcaagatcctcatc

SEQ ID NO: 214320 - DNA, 144 bp, Homo sapiens; identical to SEQ ID NO: 202602
  chr11:65419839-65419983
  hypo

SEQ ID NO: 214321 - DNA, 49 bp, Homo sapiens
  chr11:65425914-65425963
  hypo
cgaaaaggagcctcgggcctcccagcctggtcccgtgaaatacacctca

SEQ ID NO: 214322 - DNA, 37 bp, Homo sapiens
  chr11:65524510-65524547
  hypo
gtgagccaccgcgcccggctagatgtcaactgtattc

SEQ ID NO: 214323 - DNA, 32 bp, Homo sapiens; identical to SEQ ID NO: 202604
  chr11:65553781-65553813
  hypo

SEQ ID NO: 214324 - DNA, 227 bp, Homo sapiens; identical to SEQ ID NO: 202605
  chr11:65554410-65554637
  hypo

SEQ ID NO: 214325 - DNA, 409 bp, Homo sapiens; identical to SEQ ID NO: 202606
  chr11:65554723-65555132
  hypo

SEQ ID NO: 214326 - DNA, 371 bp, Homo sapiens; identical to SEQ ID NO: 202607
  chr11:65582709-65583080
  hypo

SEQ ID NO: 214327 - DNA, 196 bp, Homo sapiens
  chr11:65629224-65629420
  hypo
ccacccactgccccgaaactgcctgctgttttatcccagatttgcagcggatcatcccatcacctggcccattttacagagaaggaaactgagagacaactgagtgacttacccagggccacaaagcctgctggggacttattcaaagatgactggctggctttcatgttcagaactcctctgtacctttcaggtt

SEQ ID NO: 214328 - DNA, 92 bp, Homo sapiens
  chr11:65634006-65634098
  hypo
cccagggcctcctggcgctgtccagagtggagtttcttaggacccctgcaagccagccaagtccaaatctctgggccggggcctggagtccg

SEQ ID NO: 214329 - DNA, 98 bp, Homo sapiens
  chr11:65665116-65665214
  hypo
cttcattttcagacgggagaacagttgtccgcagacacagagccaatgagcccagcagctgggctcttacccactcctgcacccgtttgcacgaagag

SEQ ID NO: 214330 - DNA, 173 bp, Homo sapiens
  chr11:65685172-65685345
  hypo
gacctggcgcccaccctccttggcacgtgggctcaccttggccacctgaagctggccttcaaccacggcccgggcaatgccagcccaggcgtggtccagcttgaagcccggtgccagatgcataagccacttgcccgagagcacgtggtgggtgatggcgagctggcgcaggg

SEQ ID NO: 214331 - DNA, 277 bp, Homo sapiens
  chr11:65698237-65698514
  hypo
acagtttcagatggggcctgcggtgtgatgtggtgaaggccaatctcagccgcattcgcacagccaaagcctgtaataagcctcccacaatgagtccttggagaatgggtccaggcgattcagttgttctcatttgggctcgccttgacctctcagtggctcttgtcatagttggtcgcttgcctcctctttgaaacactttcttcacttggatgggggccctcactctcttggcaatctttttttttttttgagacggagtctcgcactctcaccc

SEQ ID NO: 214332 - DNA, 65 bp, Homo sapiens
  chr11:65733942-65734007
  hypo
ccgggccaagctgcggctgcaggctcagtccctgagcacagtggggccccggctggcctccgaat

SEQ ID NO: 214333 - DNA, 314 bp, Homo sapiens
  chr11:65743837-65744151
  hypo
gtttgcccacagccgctccctcccccaggtggtggagattgtgaagaagctggagtctcgccagcggggctgggaggaggatgaggatcccgagcggaagggggccatcgtgttcaacgccacgtccgagttctgccgcaccttgggggagatccccacctacgggctggctggcaatcgcgaggagcaggaggagctcatggtgcgtctggggcggccccgccctctgcttccctcggctgggtgggctggctggggcctgggccgaccctggtcttttgtgccccaggactttgaacgggatgaggagcgct

SEQ ID NO: 214334 - DNA, 39 bp, Homo sapiens
  chr11:65754937-65754976
  hypo
cctctccctgagccccggacacatcgatgctgtcattgc

SEQ ID NO: 214335 - DNA, 240 bp, Homo sapiens
  chr11:65761070-65761310
  hypo
aaaaaacttgagctttctacagaaaacatctgtaggagggaaagaaattaatcagccgggagcagagatgacagagataaatgagagagcctgaggaattcatgctgctggcattggttcatccctgcccgatgcgcaccactcagagacctcaggtcaatgagccttgcttacttctcctaatttgagttcaattttgtcatttataagaaagtcccgcatacgccaggatggtggctc

SEQ ID NO: 214336 - DNA, 41 bp, Homo sapiens
  chr11:65810130-65810171
  hypo
gcaggcctcggtggccgggccggcgccgccgccgggcaggt

SEQ ID NO: 214337 - DNA, 78 bp, Homo sapiens
  chr11:65817722-65817800
  hypo
tgcccatcaatcttccgctgtgtacaatatcgtgggggaggaggatcttgagaccttgcctccttcccagggctgtta

SEQ ID NO: 214338 - DNA, 70 bp, Homo sapiens
  chr11:66047173-66047243
  hypo
ccatggttccccctgcgctccctttgccatcccctgccaccttgctctttgacatcgggaatccatagac

SEQ ID NO: 214339 - DNA, 268 bp, Homo sapiens
  chr11:66052169-66052437
  hypo
gagtcaggtagagctggagacgctgccgggggacggggccccccatgctgtcggggcccagggctgctgtccgcaaagagcgcacctggaagaaaggagaactgaagcctggccaggagggggaggtttgccctcaagtgaaggcaggggaatgggggggtgcaccagactcacaatgaagtacatgagcgccgatgaggtccaggccagcgccacgtagtagccatcgctgccgaacagcagccccgtgagcacactgaggatcatt

SEQ ID NO: 214340 - DNA, 823 bp, Homo sapiens; identical to SEQ ID NO: 202612
  chr11:66079389-66080212
  hypo

SEQ ID NO: 214341 - DNA, 199 bp, Homo sapiens
  chr11:66099978-66100177
  hypo
ggccactccgcccggcggtagacgaggtagccagtggtgggcagcctgtgggccagggccccagggggcaggcggtggtagccctgctccttgtacaggaagaggccaaaagtgttgggctgggtcactcggaacttggtggcacagagctggttcagggtggcaatcgaggcttctgggggcacggccagggtcttgg

SEQ ID NO: 214342 - DNA, 63 bp, Homo sapiens
  chr11:66113950-66114013
  hypo
ttatgagcacctggctgattcggttgaagccgtactgccgaaagcgctcgtcgaaggtgggca

SEQ ID NO: 214343 - DNA, 181 bp, Homo sapiens
  chr11:66114043-66114224
  hypo
aggggtcctgccaaggtaccacgtaggcgggccgcagcaagctctcttccggcaggttgacccagcgggaatagttggtgggtgcctggcagggggtgcacaacccataatagaagggccgcacctcgccaacctggtagagctgcaccagctcgtttttgttcatgggcatgcggcgggc

SEQ ID NO: 214344 - DNA, 321 bp, Homo sapiens; identical to SEQ ID NO: 202613
  chr11:66176400-66176721
  hypo

SEQ ID NO: 214345 - DNA, 98 bp, Homo sapiens
  chr11:66410884-66410982
  hypo
agtgatagcaacccttcttgcgtctgtttcttcaaggcaaacgaatgcacgtgcagttgtccaccagccggcttaggactgcgcccgggatgggagac

SEQ ID NO: 214346 - DNA, 356 bp, Homo sapiens
  chr11:66411012-66411368
  hypo
gggcactggtccaaagagtgtccgatagatcgttcaggccgcgtggcagacttgaccgagcaatataatgagcaatacggagcagtgcgtacgccttacaccatgagctatggggattcattgtattacaacaacgcgtacggagcgctcgatgcctactacaagcgctgccgtgctgcccggtcctatgaggcagtggcagctgcagctgcctccgtgtataattacgcagagcagaccctgtcccagctgccacaagtccagaatacagccatggccagtcacctcacctccacctctctcgatccctacgatagacacctgttgccgacctcaggagctgctgccacagctgc

SEQ ID NO: 214347 - DNA, 41 bp, Homo sapiens
  chr11:66411557-66411598
  hypo
tgagcgggagcagtatgccgatcgggcgcggtactcagcct

SEQ ID NO: 214348 - DNA, 36 bp, Homo sapiens
  chr11:66453719-66453755
  hypo
agtgcggcctggtgcggccgtcgcacacatccagtc

SEQ ID NO: 214349 - DNA, 248 bp, Homo sapiens
  chr11:66454454-66454702
  hypo
ctgttcctaccccagcttgaagacatgtttgcgctttcggtaatcaaaggcgacgctgccctgggccctggccaggctgacaggcacttctccgtggtatggcactcccgcgctggctgccttggcatccttgtaaaagccgaggctcccacgccgcaggacacagtacacgttctgccaggacctgcgagggacgcggtgctgactggccggcctcagtggcgcccgcaacctggagccctcttggg

SEQ ID NO: 214350 - DNA, 80 bp, Homo sapiens
  chr11:66510746-66510826
  hypo
tggggaggaatggggaggagcgctgagcatagactcgagaagggtatgattcaggtctcgatagacaatgttctttggag

SEQ ID NO: 214351 - DNA, 164 bp, Homo sapiens
  chr11:66513646-66513810
  hypo
ttcttgttaactggtacaaatgaggatcttagttcccagatctccctgcctttaaaaagggggtaataattttccttgtgttgcctccctgtaaaagtgagaatctgtttgcatgaataataatgggagttggccgggcgcggtgggtagcctgtattctcagc

SEQ ID NO: 214352 - DNA, 88 bp, Homo sapiens
  chr11:66557750-66557838
  hypo
agatatgttacttgatcccaaggaacctggaatataaatagaaagatcaagaagtaaacacgtaattacaatacggtgtgattcccag

SEQ ID NO: 214353 - DNA, 52 bp, Homo sapiens
  chr11:66626187-66626239
  hypo
tcctcccgagcccgggctttccccaacgggaccttagagattggggtgaccg

SEQ ID NO: 214354 - DNA, 34 bp, Homo sapiens
  chr11:66628276-66628310
  hypo
acttcagggtctgcggggcggacacaggactgga

SEQ ID NO: 214355 - DNA, 114 bp, Homo sapiens
  chr11:66631165-66631279
  hypo
gcccttggtggggaagtgaacggtcagggggccctccaagggccgggagcaaaggcaggcgggggctgcagcctctcaccttcacacctcggacgcggaactccgcaagggccc

SEQ ID NO: 214356 - DNA, 41 bp, Homo sapiens
  chr11:66643997-66644038
  hypo
tgctcaagaggtgccgggagcaccagcgaggagctcaggtg

SEQ ID NO: 214357 - DNA, 100 bp, Homo sapiens
  chr11:66644472-66644572
  hypo
aggccttcaggaggcggcccgcaggcactgctgagcatcacggcagcttctccgggaagctgtttgcaaaacttatcaagagcctttaaggtatttatgc

SEQ ID NO: 214358 - DNA, 138 bp, Homo sapiens
  chr11:66652536-66652674
  hypo
aggccttggggacttcgggacctgtcaagctcaggacaagcgggtgtcacccggtgttagaggttgaattgtgtcccccaccaaaaaagatacactgaagtcctaacccctagcacctaggtcagaatgtgaccttat

SEQ ID NO: 214359 - DNA, 208 bp, Homo sapiens
  chr11:66655352-66655560
  hypo
agggctgcgcccctccgagggcctgcaacgaatccctcccgagtcttttccagcctctatggctgccgggctcctttgctcgtggccacatcactcccacctctggctctgtctccacatcgccttctcctcagcataggtctctgtcctctaaggacacttgtgatggcattcggggcccacctggatgatccgggatcacctttcc

SEQ ID NO: 214360 - DNA, 92 bp, Homo sapiens
  chr11:66665004-66665096
  hypo
tgcactccagcctgggcgacagagagagacctgcctacaaaaaataaataaacaaaaagcgaataaaatacaacatgcgaaaagctatcctc

SEQ ID NO: 214361 - DNA, 298 bp, Homo sapiens
  chr11:66676020-66676318
  hypo
gtaccaccccaccatcgcaaggaagcaaaacaccaggctgagctctgaccagctccttggaggaggcacagtcaatagctcactgttagatcttttgcttggcctcccgaacccgaggctaattggtcggaggtcttgcatggttcggcgcgctcactgtgtgacagaagctggcatctgaagagagcgggtaggctgagcctgctacgggaacgtaagtgcgccctgatccaagccaggcagaggtctgaacaccccgatgtccccgagaacacgcgttaactgaaaagtcagggtg

SEQ ID NO: 214362 - DNA, 86 bp, Homo sapiens
  chr11:66683850-66683936
  hypo
ccgacctgccaagcagttttgtatgtgcagtctgtgctctgaacagggttaaggaggacttcaccgtctaagcagatctggcttat

SEQ ID NO: 214363 - DNA, 147 bp, Homo sapiens
  chr11:66695456-66695603
  hypo
tctgcttgttggtttcggccacagacatgaagccacaaagggacgtgtggatttcagatgcctatgttgtgccactgcttggctccagggtctaccaccttcagaagcccacctgtggcaggccgggtatggtgtctcacacctgta

SEQ ID NO: 214364 - DNA, 346 bp, Homo sapiens
  chr11:66701354-66701700
  hypo
tctcaaatcccaacacgcagctggggttcacagaatgaacttccagccctaatgctcactacgccccaccagcacactccaacattgcttcccaagtgctaggccctgaggattccacagtgatcaatgcaggcacaacctccacccttgccggcttcccactgccttcctccacgccagcgaggctggggcatcaccctctgtctcatcacctggcctcactcccattgccactgtccgggggcacccgcctcctacgaactcaaatatcacacatgcgaggaccagctcctccacccacctgagagagtcccctcatcttgcagggcctcggattcacatattc

SEQ ID NO: 214365 - DNA, 44 bp, Homo sapiens
  chr11:66710160-66710204
  hypo
taccactgaactgtacgctggaaaatggttaagaaagtttcggc

SEQ ID NO: 214366 - DNA, 127 bp, Homo sapiens; identical to SEQ ID NO: 48692
  chr11:66886029-66886156
  hypo

SEQ ID NO: 214367 - DNA, 120 bp, Homo sapiens; identical to SEQ ID NO: 202625
  chr11:66897392-66897512
  hypo

SEQ ID NO: 214368 - DNA, 49 bp, Homo sapiens
  chr11:66897763-66897812
  hypo
ctttaccacctggctaatttttatattgttttagtagagacagggtttc

SEQ ID NO: 214369 - DNA, 31 bp, Homo sapiens
  chr11:67002080-67002111
  hypo
tcttgtcctagtgctttaggcggcagacgca

SEQ ID NO: 214370 - DNA, 77 bp, Homo sapiens
  chr11:67051193-67051270
  hypo
gagagcccctttttccgctccctggactggcagatggtcttcttgcagaaggtaacagtctgcggcagggactgggg

SEQ ID NO: 214371 - DNA, 49 bp, Homo sapiens
  chr11:67059786-67059835
  hypo
tgggttgctgcagcccgtgtctcactcagactgccggggtggttgggct

SEQ ID NO: 214372 - DNA, 380 bp, Homo sapiens
  chr11:67077778-67078158
  hypo
agagcacctcagagaccagtgacatgccagaggtgaggctggggctgggggagctcagcttgcaggggtgggggccataaggagggagatggggaaagaccaggatgggcgtttgactgtagacctgagcagggcgtacccgggctaagtctggcccgcccatgcagggtgtcctgggaggacccagggggcctggtcccagcctccttcacagtcagcccagtatctcttagcacccggcgtctccagcctgtcccatgaatacccctgaagatggggaccagccacgtcctgggcccctgagagcagctgagatccagtgagggcaggcggaggcactgtaggcacaggctggagaggggtcacgggggcagggcagg

SEQ ID NO: 214373 - DNA, 217 bp, Homo sapiens
  chr11:67078398-67078615
  hypo
agtctgcgcactcacgccgcccaagtcctgcctaagtcagcacccttgatgctcagtgctgcgggcacaagcctaagcctgggagccaggccctgtctgggactcaaggccaaatggctgacttggaggaaggagcatccactgagggcaggaacatttgggagaggcttcctggaggaggtgtgggtggggaaggatagggaggcgtggtgggttg

SEQ ID NO: 214374 - DNA, 361 bp, Homo sapiens
  chr11:67078645-67079006
  hypo
gaggtcctcacccagcaccggacgcacgcatccacccagcccagctcaggggctggtgccggcacgggtttcacctgccggctgcctacgcaaaggcagagaaagcataggaggggaggagggcagggaggcctgggtctccagggagctgaggagggcttctgggggccagaaggaagctacaagcaggtagggttcaaggagcggggcagcagggctggggtgttgtcctccctcccgaggaagcgtggctgtggacagcttggcttttggcgtgcgtgccacaaacattccggccctcgcctcctcctggctctgtgcttggcacccctgccccagatcttcccggctctgtgcttgg

SEQ ID NO: 214375 - DNA, 41 bp, Homo sapiens
  chr11:67091662-67091703
  hypo
ctcggcttactgcaggctctgccccccggggttcacgccat

SEQ ID NO: 214376 - DNA, 207 bp, Homo sapiens; identical to SEQ ID NO: 202626
  chr11:67141093-67141300
  hypo

SEQ ID NO: 214377 - DNA, 41 bp, Homo sapiens
  chr11:67150726-67150767
  hypo
ttaaaaaaattcatcctggccgggcgcggtggctcacgcct

SEQ ID NO: 214378 - DNA, 183 bp, Homo sapiens
  chr11:67166353-67166536
  hypo
ccgagcgcaggcacggccctccccttcccctgccgcaggccggagccaccagcccacctggtgtgctcggcagatgaggtccaagtcgtgcttgtggaggaacttggccaccacctcggctccaaaggtaaaagagacgccacggtcgttctcgccccagccctgcacgtccttgtcagggtc

SEQ ID NO: 214379 - DNA, 381 bp, Homo sapiens
  chr11:67203385-67203766
  hypo
cccgcacggggacctgctctgggctggacgcctctccacattgctgctcgccttccccagggtcagcctgcaggccaccatccgcgacgtggtcatagtctgtgtcctgctcatcctcctgtcgctcaaggtcattgtctgtggaccccagctcagctcgggcctgcagccagcgacctggggggctggcccagagcaggcgccgcgtgcggccccacagcgcggcacctaggcgggccgggtggtagtagccccctgagtcacggctgaggcggcgccaggccagtgctaggccagtggccagcagtaggagcagcagcagcagcaggacaacggtgacagagctggagcccacgctgtcctccgcgctgccacccgagc

SEQ ID NO: 214380 - DNA, 34 bp, Homo sapiens
  chr11:67208822-67208856
  hypo
cgggggtcgatgatgcgcacgctcttgtccttgc

SEQ ID NO: 214381 - DNA, 234 bp, Homo sapiens; identical to SEQ ID NO: 202629
  chr11:67210770-67211004
  hypo

SEQ ID NO: 214382 - DNA, 383 bp, Homo sapiens
  chr11:67259386-67259769
  hypo
tggggctgggggggccagcgctggggccaaaagtctgggtccccagcctcccacacgcagcccctcgggccccttgggtgtgtcaataaataacccaggtccaggctggtgtgggcctcactcctcgctgtccagcttcaggctgatgctccgtgctttgccccgtgccagggtggtgggtggtgttcccgggccctcacgctccgcctggctggggcccctcgagcgaagcagctggctctgtttgcgcaggaagtccacgggggcagccacaccatagctgctcttgcccaaggcagctctcgggggtcccgaggaggcatgcgagtgcgagcccgcttccagctggcccaggtgggccacatagccgtctgacaggaact

SEQ ID NO: 214383 - DNA, 35 bp, Homo sapiens
  chr11:67291006-67291041
  hypo
gattatctttgagcgtctccgctgctgaggggagc

SEQ ID NO: 214384 - DNA, 223 bp, Homo sapiens
  chr11:67432709-67432932
  hypo
aaagggtcttggcccaggtgggctgcggtagggcagcaggactcaccgatgtagcgatcgctctcgttgctctggcccccaatggccacgcggctgcagcccagcaatgcccgcagccgctggaactgtttctggttgatgatgtggcccaggtttggggagctctgggggtcgtcgccatagaaacgggtgatggtgctctgcagggcgggcagcagcctct

SEQ ID NO: 214385 - DNA, 91 bp, Homo sapiens
  chr11:67462527-67462618
  hypo
ggctttttacactcttcactcgctttgtcctacctggccactttcctcacgggaatttaggcccctcttagcattggcgtgccggtataaa

SEQ ID NO: 214386 - DNA, 408 bp, Homo sapiens
  chr11:67462833-67463241
  hypo
ctctgtgaacagagtttatctggtccccgaggcagtgcaatgcaagcctattcgccgttttccacgttgctgagggtccgggtttattcatcacaacaggtaagtccggattcccagtccctgaggccaccgcagtaaggcagtggggcgcctccccttggtgggggggcgggaatcagagaccccgacccgaaggagactgggtgatcccagacgagcccccaagactgttagaaataaatccttattccccgatgtcacaaagaagaatcagcagacgaaaagcttcctcagcaaggtgatttttaccttctgcagaaagagtgctgcccgtccgcaatcctgccacgatcgcatacaaaataaaaaaggcactagaatatttatcccttacgcatgaggtcccta

SEQ ID NO: 214387 - DNA, 95 bp, Homo sapiens; identical to SEQ ID NO: 202634
  chr11:67777602-67777697
  hypo

SEQ ID NO: 214388 - DNA, 132 bp, Homo sapiens
  chr11:67781064-67781196
  hypo
acagcaaatgttttatgcagcgtgatgtcatttaatcctcacaatgacaccaggtgccattagcatccccatttcacagatgaggaaaccgaggcagagaaggtgagtgatttgcccaaggtcccacaacca

SEQ ID NO: 214389 - DNA, 742 bp, Homo sapiens
  chr11:67808550-67809292
  hypo
ctgcttactttctgcgtgacctcagcaccgcatcaagcctgcccaggcctcagtttccacctctgtcagatgggggtggtaacagcagcttccaggattcagtgagtgaaggtgcacaggtgcccgtggttgggaactgtctgtggtctgcccctgactggcccccatccgtgtccacccacaggaccatgggctccatgttccggagcgaggaggtggccctggtccagctctttctgcccacagcggctgcctacacctgcgtgagtcggctgggcgagctgggcctcgtggagttcagagacgtgagttgggtgggcaggcgtgggaagggggctactgccaaggttagcccggaggccggtccaggatggggactgccccccctccgccatagggccctggccccatttgaaccccagcggcccctgccatgggcactgctcatgggaagcccgcagctgaggcccctgagctggctcctccccataccctcctggggcatggggtctggtctgtgctctgatctgcgtcttgtggctcccagggcactccacacctttctggaggaggcagctaaggcctggggagagtcaggcctgggctctagggtgaggagctccctgacccccttcccgggacactcacccctccgtgtggcacccacagctcaacgcctcggtgagcgccttccagagacgctttgtggttgatgttcggcgctgtgaggagctggagaaga

SEQ ID NO: 214390 - DNA, 64 bp, Homo sapiens
  chr11:67810254-67810318
  hypo
ccagcaggccctgcgggcccagctgcaccagctgcagctccacgccgccgtgctacgccagggc

SEQ ID NO: 214391 - DNA, 223 bp, Homo sapiens
  chr11:67811482-67811705
  hypo
gcaggaggtgggtgccctggcctggcctccaggaggtgggtgcaggaggtgggtgcccccggcccagccaccccacctgcctgcccagcccccgctgactgcccactctggcgcaggtcctcggggagacagagcggttcctgagccaggtgctaggccgggtgctgcagctgctgccgccagggcaggtgcaggtccacaagatgaaggccgtgtacctggc

SEQ ID NO: 214392 - DNA, 100 bp, Homo sapiens
  chr11:67815195-67815295
  hypo
agtgcttcagtcgcgccaccagcatcttcccctcgggctggagtgtggccgccatggccaaccagtctggctggaggtgaggcccgggccccagcccggc

SEQ ID NO: 214393 - DNA, 360 bp, Homo sapiens
  chr11:67817115-67817475
  hypo
cctctccctggcaggaggtggtccaggccacgctggtggtcctggccttggccatggtgcccatcctgctgcttggcacacccctgcacctgctgcaccgccaccgccgccgcctgcggaggaggcccgctgaccgacaggtgggaccggggcctaaggtgtggggggctgcttgcggggagaggccactgtccggtgtgtccctgactcctcgcttcctgacagactcctgagtggccaggagcaggcctggcgggtggtgggggacctcctggggctggagtgctgccaacactgcctgctcatgccccaggaggaaaacaaggccgggttgctggacctgcctgacgcatctgtgaa

SEQ ID NO: 214394 - DNA, 210 bp, Homo sapiens
  chr11:67850480-67850690
  hypo
aacactctcgtggccgcatcgttccttagactctgctttgcgggtcgcctcttccaagcagtctgtaaattcctaatgaatagggactgcgtcttttattgatgttagtcttctcccagagcaccaagcaaatctcgatgcccactacactttttaggctgcatgaataaatgaacactccggagtggtatagcacgaggcaagtgagcc

SEQ ID NO: 214395 - DNA, 77 bp, Homo sapiens
  chr11:67864777-67864854
  hypo
ctgcagtagaggtggggaagcgtttttgaaattgcccgtgtgggccgggcacggtggctcacgcctgtaatcccagc

SEQ ID NO: 214396 - DNA, 142 bp, Homo sapiens; identical to SEQ ID NO: 202636
  chr11:67895653-67895795
  hypo

SEQ ID NO: 214397 - DNA, 320 bp, Homo sapiens
  chr11:67931311-67931631
  hypo
agggcaggagtgaggagcagcgccccagcctctgcatctaggacaggtgctccatagttaagatcaacttctccctctggccgattcttctggggcttgtcctgacttgtggcacctgcagagacccgtgtccgcatcttcacagaccgctcgcgagcctctctctggtctcaccttccctatcacagcactaacttcagagggggcagcccagtcagcgaggcataagaggcctgaaaaaccagaatcctccagtcctggcattctaattcagacctgtggactggatttgtgaaaacggattccttgttgtctctact

SEQ ID NO: 214398 - DNA, 257 bp, Homo sapiens
  chr11:67984063-67984320
  hypo
cctgctatgctctctcgctccctttcctcgagtgccaggttcactcagtgacaggatggcagggattcacttgctttgatcctgtgcttactgggatggcccacaggtcacgttgaccccagaattccaggctggaggcaggttgcttttcattgtaaagcgatatgttggctttcgtgctccgcacatgcgtctgccccagtccccaccccgcccggaagctaggactcctctgatgggagcaggtgtctgaaacc

SEQ ID NO: 214399 - DNA, 202 bp, Homo sapiens; identical to SEQ ID NO: 202637
  chr11:68080741-68080943
  hypo

SEQ ID NO: 214400 - DNA, 95 bp, Homo sapiens
  chr11:68133213-68133308
  hypo
ctggcgggaatgggttgcggccgccgggggtgccccagaaggaacctcggcaaacccgttcgaaatgatccacttggcgggtgtggtgattcaag

SEQ ID NO: 214401 - DNA, 192 bp, Homo sapiens
  chr11:68142591-68142783
  hypo
cagaacccttgtgcggctgcgggcactccttgccctttccgcatttggtgatgactccttgtttcgtttcactgaccgtgccctgtgcctctgctctccctccccagttccgtgtgccctggggtcagtgatagaagacacggcccctgggccccaagtctgctgagctgacacctcgggctgccgctcacc

SEQ ID NO: 214402 - DNA, 94 bp, Homo sapiens
  chr11:68158724-68158818
  hypo
ccgcgcccagcctctgttgagcatattttgaggttctcttggtgccagtgatatgttacatgtgtccccatcgcaccatcgtcacccattgagg

SEQ ID NO: 214403 - DNA, 120 bp, Homo sapiens
  chr11:68161251-68161371
  hypo
ataaaacaaaaataaaaataaataaaaatttattaaaacattcatcacagccagcctagtgggtgtcccatgtggctttgcctcgcatttccctgataactaggatgctgagcgtcttgt

SEQ ID NO: 214404 - DNA, 145 bp, Homo sapiens
  chr11:68162351-68162496
  hypo
caggaggtagaagggcggagagagggaacaggcggaggtcacatccttggctttcaaaatgggccagggagagacaccctctgagcatggtaggacaggaaagcaagattggaacacattgagagcaaccgaggtggctgggcgt

SEQ ID NO: 214405 - DNA, 99 bp, Homo sapiens
  chr11:68172056-68172155
  hypo
cttcatggccttcatcgcaccctgcagtcctcatgtaggggatgcaatccatgaatttagttttcccagcctcctttaaaaacgcgttcatgctggggc

SEQ ID NO: 214406 - DNA, 196 bp, Homo sapiens
  chr11:68176056-68176252
  hypo
acagtcatatgctacgcagaattctgtatcctgattttttcacttgacattacaacaggtatttgatggcgctgtgacaaactctttggcacaatcttttaaatgtatgaaatactccactgcacagatgtttgcttttaggcttaactgttcttttattttgcgtgtgctggttacagccgggcacagtggctca

SEQ ID NO: 214407 - DNA, 128 bp, Homo sapiens
  chr11:68177518-68177646
  hypo
agtggcgcggctggacgggcagttccggcaagtcctcgtgtggagggacttggacaacccgaggtcgctggccctggatcccaccaaggggtaagtgtttgcctgtcccgtgcgtccttgtgttcacc

SEQ ID NO: 214408 - DNA, 211 bp, Homo sapiens
  chr11:68190393-68190604
  hypo
ggcctccttccgttggggaaggggttgtaaggggcggcccccaaactgtctgtcctggtgccctgcagagaaaacagtacgtgagggccgcagtccaaaagcttgagtcctggaaggtggaggagacagggatgtgttgggaagggccccatggtcttggatcccttctcgactgtcaatggggccttcatgggagcgccagtctagtgat

SEQ ID NO: 214409 - DNA, 388 bp, Homo sapiens
  chr11:68190854-68191242
  hypo
gtctccaccagtgcccgggggtctccgccagtgccaggggtctccgccagtgcccaggggtctccgccagtgctcaggagtcttggtttctttgtcttacagccctttgttttgacctctctgagccaaggccaaaacccagacaggcagccccacgacctcagcatcgacatctacagccggacactgttctggacgtgcgaggccaccaataccatcaacgtccacaggctgagcggggaagccatgggggtggtgctgcgtggggaccgcgacaagcccagggccatcgtcgtcaacgcggagcgagggtaggaggccaacgggtgggtgggggtgctgcccgtccaggcgtgcccgccgtgtcttctgccgaatgccagcctct

SEQ ID NO: 214410 - DNA, 222 bp, Homo sapiens
  chr11:68191537-68191759
  hypo
cctcccagaggcccccgacgctcccacctgttggtcgtcagagcttctggttggtgggaaggcacccaggaccttgaggtctccagagagaaaagccagggaaagagggagaccgaaacccatgtgacatgaaactcaggctccaaactgagcacgggaacgtttggggacaggagcgcgatggccttcctcagatagctggggggctggcatgaagacggg

SEQ ID NO: 214411 - DNA, 253 bp, Homo sapiens
  chr11:68192497-68192750
  hypo
gtgccctgggctccgtgctgtccgaggagacgccatccccacacccgtccttcacccgccaccctcccgcaggtacctgtacttcaccaacatgcaggaccgggcagccaagatcgaacgcgcagccctggacggcaccgagcgcgaggtcctcttcaccaccggcctcatccgccctgtggccctggtggtggacaacacactgggcaagctgttctgggtggacgcggacctgaagcgcattgagagctgt

SEQ ID NO: 214412 - DNA, 216 bp, Homo sapiens
  chr11:68193464-68193680
  hypo
ggaggacgccaacatcgtgcagcctctgggcctgaccatccttggcaagcatctctactggatcgaccgccagcagcagatgatcgagcgtgtggagaagaccaccggggacaagcggactcgcatccagggccgtgtcgcccacctcactggcatccatgcagtggaggaagtcagcctggaggagttctgtacgtgggggctggcagtggggtg

SEQ ID NO: 214413 - DNA, 41 bp, Homo sapiens
  chr11:68196105-68196146
  hypo
cccacccaaatcatccgagatgacctcgtcttgagatcctt

SEQ ID NO: 214414 - DNA, 77 bp, Homo sapiens
  chr11:68199350-68199427
  hypo
ctggccctcctggctcgggaactccaggccccttcctcacggctcgagagacgtgtatttaccgcacaggtgcttgt

SEQ ID NO: 214415 - DNA, 192 bp, Homo sapiens
  chr11:68201117-68201309
  hypo
tcgactgtatccccggggcctggcgctgtgacggctttcccgagtgcgatgaccagagcgacgaggagggctgccccgtgtgctccgccgcccagttcccctgcgcgcggggtcagtgtgtggacctgcgcctgcgctgcgacggcgaggcagactgtcaggaccgctcagacgaggcggactgtgacggtg

SEQ ID NO: 214416 - DNA, 140 bp, Homo sapiens
  chr11:68203449-68203589
  hypo
tcccaaagtgccatgattacagatgtgagtcactgcgcccagtgagggtcacatttccgttgagatttggaggggcagacgttggagccatctgagccccctcgtcccgctctagcttctcctcccgtgtgccccgcggt

SEQ ID NO: 214417 - DNA, 341 bp, Homo sapiens
  chr11:68204359-68204700
  hypo
tctgcctgcccaaccagttccggtgtgcgagcggccagtgtgtcctcatcaaacagcagtgcgactccttccccgactgtatcgacggctccgacgagctcatgtgtggtgagccagcttctggcacggggaaggggcgtccgggctgggttcccccaggaacgtggagtttaggggaggagacgtgcctttccagcggggctgggggctgtgtgggagactcaggcggctgggaggctccttgcgggaggcagggaagcctttcccagggcagcggccaggaggacagactgtgagctgtgggctcggcggctacagagtctgcctcagtgggcggggct

SEQ ID NO: 214418 - DNA, 62 bp, Homo sapiens
  chr11:68206026-68206088
  hypo
cgcgtggtgtgccagcgctatgcgggggccaacgggcccttcccgcacgagtatgtcagcgg

SEQ ID NO: 214419 - DNA, 128 bp, Homo sapiens
  chr11:68207214-68207342
  hypo
acctgacctcccccgtcccttccctgccaggcatcgcatgcggaaagtccatgatgagctccgtgagcctgatggggggccggggcggggtgcccctctacgaccggaaccacgtcacaggggcctcg

SEQ ID NO: 214420 - DNA, 194 bp, Homo sapiens
  chr11:68207880-68208074
  hypo
ggctggctccagctgagccacgccttgagtgaaatgactgtgaggagaataaactgccgctgccctccaggatcactggggctggctggggagaacccccgtttctgggagcacagtcccaggatgccaaggcgagcttggtgccgagatgtgaactcctgagtgtaaacagcgggggctgacttgacatgctt

SEQ ID NO: 214421 - DNA, 127 bp, Homo sapiens
  chr11:68216740-68216867
  hypo
gaactgccattctttcgtgccctgtgtgcatttgagttgtgtgtccccgtggagggaatgccgacccccggaccaccatgagagtcctcctgcacccgggcgtccctctgtccggctcctgcaggga

SEQ ID NO: 214422 - DNA, 256 bp, Homo sapiens
  chr11:68226749-68227005
  hypo
attttcatgggactctgagaggcgcctcaaatccattttggaataaggcaggttattagcatggggtctaaccgtgggctgtctcggtgtcctgggctggctcttggggcgggggtcctgatgtccgggacctcggtcctacctgggaggcacagatatggcggggaacgggaagcccgggggagcatttagaagctcgtgtgcacagggaaaccctgtctctacaaaaaaattaaattagcggggcccagtggtg

SEQ ID NO: 214423 - DNA, 37 bp, Homo sapiens
  chr11:68505095-68505132
  hypo
ctcctgcaggcaggccgggcacgcctgtaatcccagc

SEQ ID NO: 214424 - DNA, 113 bp, Homo sapiens
  chr11:68549945-68550058
  hypo
attttgaggcagagtcggaacccaggccatcagcccccaggtgcattccacagatgcccatgtgacccctccacaaggaggtctccgtgcccgtcttatttgaatacacagaa

SEQ ID NO: 214425 - DNA, 625 bp, Homo sapiens; identical to SEQ ID NO: 202638
  chr11:68606633-68607258
  hypo

SEQ ID NO: 214426 - DNA, 220 bp, Homo sapiens
  chr11:68682273-68682493
  hypo
taacttgcggttcccaggttctgtgctgcgccccctccaacatcgccgtggacaatctggtggagcgcctggctctgtgtaagcagcggattctgcgcctgggacaccctgcccgcctcctggagtccattcagcagcactccctggatgcggttttagcgcggagcgacagtgcccagattgttgcagatatcaggaaggacatcgaccaggtctttgt

SEQ ID NO: 214427 - DNA, 87 bp, Homo sapiens
  chr11:68727156-68727243
  hypo
gcgagggtgacctgacggaccactgggtgtgcaagtgcgcggagagccgtcggaccccacacgagggagcgccgttcttactccatc

SEQ ID NO: 214428 - DNA, 176 bp, Homo sapiens
  chr11:68838712-68838888
  hypo
ccatttgataggggacgcccccggcgctgtgctatcctgtgccggccacccttgcgttggttttgctgctgtactggtggcgcccctgaccgtggctgtctcctcttgaaggaagcctgtttctgatgaacctgctgacagccatcatctacagtcagttccggggctacctgatg

SEQ ID NO: 214429 - DNA, 71 bp, Homo sapiens
  chr11:68853901-68853972
  hypo
gctgtcctggccacgcagcagtggtgtttgtatcgagtgctcttgctttgctcatcgtggttcacagggtg

SEQ ID NO: 214430 - DNA, 193 bp, Homo sapiens
  chr11:69193143-69193336
  hypo
gtgctggacacacacgaaggacatgagcagccacgggtccacgaaagagccatttctaccacaagccggactgggcttcgcggaggtgccccggggaaacccatggggaggcacagcctggactggacagggaggcagcccccattcatcagctccttccctggcacgcattagttggtacctactgagtgca

SEQ ID NO: 214431 - DNA, 184 bp, Homo sapiens
  chr11:69206200-69206384
  hypo
tctcccagcacacccgggcgagctgaggaaaaggctcaggggctgacagatacagggactgagcgcggctaggatagccctactgagggagccagaggggccctggggagatgcctggcgggcccgtctcctagcgactgacgtcccgccaccccacgggccccttgtgctgggcactgcccac

SEQ ID NO: 214432 - DNA, 320 bp, Homo sapiens
  chr11:69206414-69206734
  hypo
gctgttctgcatgaataagcgccaggcctcttgccaattgtccccctcttaaaaggcagccccggcgaaaggccttttcaagtgggatcgcacagtgccacccaggccgggcgggcattgttttggggagccagggtcctgcttggccgccggggtcggggggcccacaaagcatggtgatggcggctccacgcactcagcgcagcagccctgcttattaatctgcaaaactcacaccgatgcctttggaggggagattgagtgaaaacgatgtccttaggggagtggcctttgcaggcgcctcctgggttcctcactac

SEQ ID NO: 214433 - DNA, 221 bp, Homo sapiens
  chr11:69357102-69357323
  hypo
acggggggaggtgaggtgggcgatggctcctgggggacttgttaagaaatattttggatgattcaatgactctccggactagaagccttttgattttgattaaccacgaaaaaaactccaccggcaacagtgagatcattgcgtgagtggggctgcttcgtattgtcatgagagttccatgaaggccccgagggcactccgaaatatcacagtggcttcca

SEQ ID NO: 214434 - DNA, 95 bp, Homo sapiens
  chr11:69367214-69367309
  hypo
cggagttaggactgcggcatcaggggtttcaggcctaggatttggggtatggggtgtgtcaggcctaggatttggggcatcgtgggtttcaggcc

SEQ ID NO: 214435 - DNA, 146 bp, Homo sapiens
  chr11:69468277-69468423
  hypo
cttagccatggtggacccagcgggcaggttctgcctgctttggcgggcagacacgcgggcgcgatcccacacaggctggcgggggccggccccgaggccgcgtgcgtgagaaccgcgccggtgtccccagagaccaggctgtgtcc

SEQ ID NO: 214436 - DNA, 67 bp, Homo sapiens
  chr11:69468482-69468549
  hypo
atagtagtttttacagctgtgttattctttgcgtgtagctatggaagttgcataattattattatta

SEQ ID NO: 214437 - DNA, 331 bp, Homo sapiens
  chr11:69468609-69468940
  hypo
gggatgattggaatagcttctggaatttgttcaagttttgggtatgtttaatctgttatgtactagtgttctgtttgttattgttttgttaattacaccataatgctaatttaaagagactccaaatctcaatgaagccagctcacagtgctgtgtgccccggtcacctagcaagctgccgaaccaaaagaatttgcaccccgctgcgggcccacgtggttggggccctgccctggcagggtcatcctgtgctcggaggccatctcgggcacaggcccaccccgccccacccctccagaacacggctcacgcttacctcaaccatcctggc

SEQ ID NO: 214438 - DNA, 31 bp, Homo sapiens; identical to SEQ ID NO: 202643
  chr11:69477505-69477536
  hypo

SEQ ID NO: 214439 - DNA, 308 bp, Homo sapiens
  chr11:69931075-69931383
  hypo
gtcagcttgtggggactcagcgagatgacatacctgggccgagaaacagcgtcacccttagtcgcggctcctactaaggggggccgcaccttgggcgtgcagatgggacttgaggctgagctcagcctcccgcctgcgctgtaacccgggctctcctgccctgctgggcctcagtttcctccttggcgaattgagaagaatagctctttcgtgcttctcctgcagaaggaatgcaggccccccgtgctggctacagacttgcgatactggggtcttccgtgaaccccgtccttcatggggctgggcat

SEQ ID NO: 214440 - DNA, 61 bp, Homo sapiens
  chr11:69946372-69946433
  hypo
tgctcctggagcctgcgaacgtggccttgtttggaagaagggtcttcgcagagggaatgaa

SEQ ID NO: 214441 - DNA, 506 bp, Homo sapiens
  chr11:69946945-69947451
  hypo
attactgtattattgcccttcgttcgttcattccataaatatgtgcaaagcggctgctctgagccttccgtgggcagcagggcagcacagaggaggcctgagcggtggtgctggggagaggatggcgtagggcaggcctcgtggacgcagccgggggcctcaccatcagcataagcgaccacggtgggcttcagaaggagcgatgagacaggattcaccccattgccatttgcttttctatcggatcaggaagaagcatgggatgaagctggggtgtcaaggagggtctcccttcctcggtggtcacctgaggtgctggggccccacctttaactctctctgctggacctggaagctttgcccaggtccctgggaccgtcgcgttcacaggcttccaccgaggctctcgctgggtacattgacttgacccacttcagattttgttttcttaaaactcatccccaagtacactttgggaggccgaggcaggcagatcgcctgaggtc

SEQ ID NO: 214442 - DNA, 451 bp, Homo sapiens
  chr11:69962349-69962800
  hypo
caacagggcggccaacagggacgtgcacggcctttctatcataacgggggcacacctgggcaaccctcacactctgtgtgaaatgttgccccaggatgatcttaatttgtgtcaacgagagctgctggggtttatgttttgaaacataatggatgtgagcgcctccaaagctccattggatgataagaacgtccctttcctctttttttaacagggagactacaacggtgaaaacgtcgagttcaacgacagaaaagtaagttgatggagcggagcaggaggtggctctgtcagagcctggaggcgttctggggcggggtgggcctgcagctggaccgaggacttaccggcctccagggcctccccagggcgctcgctgcagggggctgagaagcgggtgtcccctctcaccttttcaggagaaaagtccgtgagctttgtgtggctggtt

SEQ ID NO: 214443 - DNA, 219 bp, Homo sapiens
  chr11:70016944-70017163
  hypo
tgggctgtggctcacggggtgctgactagcactgggctctctctgcagtcatccagtttggcttcgtcaccctgtttgtcgcctccttccccctggccccactgtttgcgctgctgaacaacatcatcgagatccgcctggacgccaaaaagtttgtcactgagctccgaaggccggtagctgtcagagccaaagacatcggtgagtgaccccacgggc

SEQ ID NO: 214444 - DNA, 101 bp, Homo sapiens
  chr11:70020524-70020625
  hypo
tttagcttttagggacaagtgagaaagaggctgtcgaaaaacaggccaccatggccgtctttgcacacccgctctcaagagcaaggcgagattgcacccca

SEQ ID NO: 214445 - DNA, 152 bp, Homo sapiens
  chr11:70022807-70022959
  hypo
tgcttcctgtcatggcctgaaccagtctttcaggttaatttgggggtgccctggccgagacgatgaaccccattcaaatggttcgggggacccttagaattttatttttggtttacagagatccttagagcagtgagtgtcaccctggaatg

SEQ ID NO: 214446 - DNA, 267 bp, Homo sapiens
  chr11:70022989-70023256
  hypo
caccccaggagaggcggatcccgtgggctggggctggggtgccggttcagcatttctctaacacaccccgcggatgtgcagggccacacggagagccatccgcctggacgtagatatcctgcagacctgtcaggacaggctccatcggggcccggaagcgaggaagaccccgctcccggctccatctcatccccgcctcatccctcccatttcctgttgtctctctgggccggttgggcgatcacctgggcggacccccttgcctgc

SEQ ID NO: 214447 - DNA, 142 bp, Homo sapiens
  chr11:70023286-70023428
  hypo
caggagccacgtccctcgggagccccaaagacttcaacctccaccccaggcccaccgcacctcagcaccccacttcggaggtctcaaactcagcgccccaagggccaggtgggccacacgcgcaagtgagactaagtcctgg

SEQ ID NO: 214448 - DNA, 141 bp, Homo sapiens
  chr11:70268911-70269052
  hypo
cgcttggccattctcgtttcttcccgctgtggtgcaccttcttgggctgtttctggatctgtctgcatgcacccacggccacccccatgctcgcctccacctcagagtaagtgttgtgttttgccacgtttcagactactc

SEQ ID NO: 214449 - DNA, 77 bp, Homo sapiens
  chr11:70281167-70281244
  hypo
tcatcaccaacatcgagatgattgacgacggctggtggcgcggggtgtgcaagggccggtacgggctcttcccagcc

SEQ ID NO: 214450 - DNA, 68 bp, Homo sapiens
  chr11:70282721-70282789
  hypo
agtggaagctgcgtcgacactctcggtgtcctgcgccccggacctgggctggcggaggctctcctgcc

SEQ ID NO: 214451 - DNA, 33 bp, Homo sapiens
  chr11:71184882-71184915
  hypo
tgccctccagggcttcgccggcacagcccatct

SEQ ID NO: 214452 - DNA, 216 bp, Homo sapiens
  chr11:71185635-71185851
  hypo
ctcccctgtaagccgggtgcttagtgagggcccctgtggagaagcccccgggggtcccgcctgctcctggctctcccctgtaagccgggcgcttagtgagggcccctgtggagaagcccccgggggtcccgcctgctcctggctctcccctgtaagccgggtgcttagtgagggcccctgtggagaagcccccaggggtcccgcctgctctgatgg

SEQ ID NO: 214453 - DNA, 535 bp, Homo sapiens
  chr11:71192113-71192648
  hypo
ccctgctgcttccccgtgctgtgaccttgggccccaaggtgctgtccgtccattctgtggttcagtgtccccattttaaaatgaggacgatgataatacccacgtcctgggtctgtcttcagaatcacatgtgtcccttctcacgaggtgcctaaagcagagacgggcgtcctgagagcccagcgttgactctggcactgcagcctcctggggcctgcttgggtgggttgttgggtgctgtgggcaggggccaccgcctccgggctccatgttctgattgccctgcagccttggacctgcctgctggctctgggattttttaagacgaagtcaacaggtaagacttccagtttctagtgagcccactttgcttgttctgctggttggtctggttttattctggggcagggtagggatttttttttttttttttagtgcaaacaacaaaaagcatttcatcactctgcctccatggggagcttagtctgtgctagccagaggcaaggtgggcacagtggctggtgggtcagctcca

SEQ ID NO: 214454 - DNA, 177 bp, Homo sapiens
  chr11:71192889-71193066
  hypo
tatgggtggagcttggctgatccatgggcatgctgcttctccgaggctctgctcacgctgtctgattggtccattccaggcagggtttttgctgcccttgagtggcggggtggacagcgcagccaccgcctgcctcatctactccatgtgctgccaggtctgcgaggccgtgaggag

SEQ ID NO: 214455 - DNA, 812 bp, Homo sapiens
  chr11:71229611-71230423
  hypo
gaagcgcccttgcccgctttacctgcttggcggcgcctcctgcggccagttcctcggagcatccacctgtgcagggcccgcgtcctcccctccccgcgccagcctgaagcccccgggcagcctcggtttctccttttcttctggatctccagggactgcgcggcacctggggtcctctggtggggaatgaatgagtgagtgaatgaatgaatgaggaacagggtggccatctgggtctcagtgtctgtctgggggcggggtggggggcgtcccctgatgggtccggcttgtcagcgccactcctgggggcttcccgtgggggtggcacagggcagggcccccccatctcagggctgcttcctgtggggagggtccccgagaagcggagcgtgggctggtttttagggggtaacccacgaaggttccgccagcccccggtcggttctgggaacccccgggcttgaggaacctgcccggcaccgccctggaacccgggcctgcagcctcctcggggcctcgtctccttcctcccagggaagctgtggggcagggacctggtggacggcgggtgggacccgactccctcccatcccctcacggtggggtcgcggctctgggggctcctggggccgctgccggaccctcagctctgtcgccggggggccgcagtctcggggcggcacagatggggcggctccaaggcttcagccacagacattggtttcctctgttgggggcgcggaggcccaaggtcagggagtctcagggtttgcttccttcccaggcccctcctgggctgggggcgggtgtct

SEQ ID NO: 214456 - DNA, 90 bp, Homo sapiens
  chr11:71282211-71282301
  hypo
gtcctccatgaagagcggcagcctgaagccccgacccctgcagacccaaggctgtctggggacgggccagtgcaccgtgtcctcctgtcc

SEQ ID NO: 214457 - DNA, 82 bp, Homo sapiens
  chr11:71321043-71321125
  hypo
aggtgaggcccccgcgatgcgggcagtcatatcacccccctctggatatgatgattcacgtcgcaggggggcgggcgcccct

SEQ ID NO: 214458 - DNA, 36 bp, Homo sapiens
  chr11:71647445-71647481
  hypo
ttattttttagacagagtctcgctctgtcacccagg

SEQ ID NO: 214459 - DNA, 31 bp, Homo sapiens
  chr11:71673295-71673326
  hypo
caccgcgcccggcagatttttacaacctatt

SEQ ID NO: 214460 - DNA, 770 bp, Homo sapiens
  chr11:71724323-71725093
  hypo
gctccccaagctcccgctgggcccgcagcagctctgcccgcagtcccccagcggcctgcttgctctgctccagctcctcacggtggcgtttctcggcagcggcctgctcggcctgcagctgctggcagaggtgcttagctggcagcagctcactcaccagggcctgtgtgctggtgtgctcgagctgcagggtggagagggcctgctctttctggaagaacttctcctgccacgccttcaattcttggcccagctcctccgcacgctcagcctgtgaggtcagctcctgccgcaggttctctgaagccacccgctgtttctcagcctcctcccggaggctctgcacctcctcccgcagagcagagctgcgttctgcagctctggcactgttgctggctgtctctgcctgcagcaggcgcagcctctcctccagcttctggctcttctctgactcggccatcaccagccgcttcaactccttgctctccccctccttctccaggacctggcgattcaggatggacacctcctcctccaagctgctgatgaggctatttttcctctcagcctcttgccggccccgggccacctgggccttccactcatcttcagccttgctgtggtcttgtaccttggtgcggaaggcagccaactcccgttgggccgaggctaaggcactctgactgtgccctagctcctgggccttctcctctaactggccctgcagagtctccagagcactgtcccgctcagcccgggaggcccgctca

SEQ ID NO: 214461 - DNA, 196 bp, Homo sapiens
  chr11:71725580-71725776
  hypo
ccatcagcgcggcccgcagccgttccagctcattgcccatctgctctgcctcccgctccatagcctgcagcgctgcctgtgtgctgcagaactggcgtccctgttgctcttccagccactcgggctgtctgtctcctgccctcgcaggctccttgactaactcccgggaggctgtttcctgctgctcacctgcctt

SEQ ID NO: 214462 - DNA, 54 bp, Homo sapiens
  chr11:71948504-71948558
  hypo
ccagggccagtggtccggggccgtggtggggctgaggcccgtggcccaccacct

SEQ ID NO: 214463 - DNA, 49 bp, Homo sapiens
  chr11:72006579-72006628
  hypo
tgcctcagctgcagcgcgtgctgtgcgatctcgtcgctggccacattgg

SEQ ID NO: 214464 - DNA, 500 bp, Homo sapiens
  chr11:72408027-72408527
  hypo
ctgaggcctccagccaggttaggcgctgggcgcgagtgaagagcccatcaggcaggtcgcgcaggaagcgcttgagcgccgaggaaacatcatccacgtgctgctcgccctccttgaggtgcacagagcgcgcatcctgccgcaggctctccagcagccgctgtgtcttcgatgtctgcccacacttgcggtagatgccctcggaggtcaggcctagggaggggcggggccaagcgttcggggcctgaggcatagagtcatggggcggggccgcgcagctctggggcgggaggcggctctccgggaggggcggggctggcaccctaggggcagggctcaccgcactgcgtgatgtagtccacacagcggtacacgatcaccgggatatccgagtccccaagctgctgctccgacagcgtgtcccccatgctggcggctgctttctggatggcccccagccaacccatgaagtccagccgccgctcgccctgtatgtacag

SEQ ID NO: 214465 - DNA, 107 bp, Homo sapiens
  chr11:72437783-72437890
  hypo
ggtgaagcaggtgggcggaaggcagctcctccggggcgggatgggtggggcagcggggagcccctcatcctctgtagtggtgggcagcggctcgggtggagtggcag

SEQ ID NO: 214466 - DNA, 141 bp, Homo sapiens
  chr11:72466088-72466229
  hypo
cgggctctgctccgggtgcagccacggcttgaagtgaggcaggtgcttctgtttccactcggggtacttgaggcacgccttgtacatcttcttcatggcctgtgggcccgccgccccgccgggtcagggggtggctagggg

SEQ ID NO: 214467 - DNA, 158 bp, Homo sapiens
  chr11:72475519-72475677
  hypo
aagaacctttgctgtggcagcgcaggtgaagaaactgaggcaggccgggtcgtgggggtcaggtaagtgtccacaggcctccctagcctggcctggctcgtgccctttccatagcccccagcaggcagcactgctgcgctaagcagaagaaattacac

SEQ ID NO: 214468 - DNA, 259 bp, Homo sapiens
  chr11:72475723-72475982
  hypo
attctaagaggcttggggagggacaggtggcggggtagggctgagtctctggagagcaccaggtgggcgggccggtaccaggaacccccagctattaggccctggctgagtgagtgtccacaccagatgttgccgtcaggtgttgcctggtaggccatcttggctgcccccggagaaactccccctggaaacaggaacccaaggggtgttgctccaccaaggagccatgctgggcttgagtacgtttaaagcctggtga

SEQ ID NO: 214469 - DNA, 217 bp, Homo sapiens; identical to SEQ ID NO: 202656
  chr11:73087925-73088142
  hypo

SEQ ID NO: 214470 - DNA, 92 bp, Homo sapiens
  chr11:73093212-73093304
  hypo
gaccccagtcctcagcgtagctccactgggtaggacctgacctgggatggccctgggggcgcctctttccccagcaccgcaagtctggggag

SEQ ID NO: 214471 - DNA, 42 bp, Homo sapiens
  chr11:73464045-73464087
  hypo
ccagagtcaggagcttgaggcgggaatcacttgaggccagga

SEQ ID NO: 214472 - DNA, 38 bp, Homo sapiens
  chr11:73643144-73643182
  hypo
ctgggatgacaggcgtgagccaccgtgcccagcccagt

SEQ ID NO: 214473 - DNA, 286 bp, Homo sapiens
  chr11:73685845-73686131
  hypo
tgtcaaatgtcaactccaccagcactgagacaatgagtagatgagaatgtagaaagagggaaggtggtaggtaaaggagcggaaggaagaggtggggaaagagggaaggagagaagggaaggagggaagagaaagaaggaagaaaaggaaagcatggcccggctagagacaaagccagaggtgatcaggtcagcagcaggagaggctcagaagggagcctctcgggaagtgcaggcagccatgagggctcgtttcagctgctcataggtgacgaacatcaccacgt

SEQ ID NO: 214474 - DNA, 200 bp, Homo sapiens; identical to SEQ ID NO: 202659
  chr11:74022479-74022679
  hypo

SEQ ID NO: 214475 - DNA, 123 bp, Homo sapiens; identical to SEQ ID NO: 202660
  chr11:74022716-74022839
  hypo

SEQ ID NO: 214476 - DNA, 44 bp, Homo sapiens
  chr11:74168144-74168188
  hypo
ctcccaccccagtgacgacctcccttaaccgtgtttcttgttga

SEQ ID NO: 214477 - DNA, 93 bp, Homo sapiens
  chr11:74168435-74168528
  hypo
taggagttgtcatcacggccaggtaggctggcccgcctctcttcagtctggttgtctggccccagccctggccctggccggcagagcaaattg

SEQ ID NO: 214478 - DNA, 247 bp, Homo sapiens
  chr11:74994376-74994623
  hypo
cgttcctgcagccgcgtcaggggcttcttgtcctcgggggccggtgggaacgactgtacgttggccacaaacaggtccttgcgaaaggtcaggcccaggacatccaggtcctcccggccatagcggaaggcgcaggtcagcgtcacatagactgtggggagcgaggagcactgaggaggggcctgggagagcagcaagcgagccccccagagtgccggcagcagccctgggacgggccccactggag

SEQ ID NO: 214479 - DNA, 95 bp, Homo sapiens
  chr11:75026127-75026222
  hypo
atgggggagatcacccgctgtagtgaattttaacaatttcatgttgcttgggcacccactctgagtatgtcagactttctcgtaccagaagcagg

SEQ ID NO: 214480 - DNA, 714 bp, Homo sapiens; identical to SEQ ID NO: 202664
  chr11:75062273-75062987
  hypo

SEQ ID NO: 214481 - DNA, 220 bp, Homo sapiens; identical to SEQ ID NO: 202665
  chr11:75140982-75141202
  hypo

SEQ ID NO: 214482 - DNA, 212 bp, Homo sapiens
  chr11:75161954-75162166
  hypo
tagtttctccagactcgtctcccatctccctccaaaggcctgtccttctcccacagcactgccggccgccctgcctccctggagccgttctagctgctggcagggccttcaccccctttctcccgaggcaacctttcccagaggcagcagcggccagggccctctgatgccgagcagggacagtggcatttctagacgatgagggtggggcg

SEQ ID NO: 214483 - DNA, 127 bp, Homo sapiens
  chr11:75242019-75242146
  hypo
gtgacaaggagaggcgcgggtctgagcctgggccccggctgtggcccaagtgggtgggaggcatcccagaacatctacagggaaagaggctcgagctactgatttgtgtccacgtagggcaagagtg

SEQ ID NO: 214484 - DNA, 120 bp, Homo sapiens
  chr11:75303123-75303243
  hypo
tgcacactgccagcccgggctgtctgtttctgcttcacccacttttctttgtcaaggccctgcctgtccttgaaggctccgctcagctcccacctcctccctggtcttcctgcctgtgtc

SEQ ID NO: 214485 - DNA, 43 bp, Homo sapiens
  chr11:75303273-75303316
  hypo
tgcagcaccgtctcacagtctctctctccgctttctcacatat

SEQ ID NO: 214486 - DNA, 107 bp, Homo sapiens; identical to SEQ ID NO: 202666
  chr11:75380110-75380217
  hypo

SEQ ID NO: 214487 - DNA, 40 bp, Homo sapiens
  chr11:75426561-75426601
  hypo
gagatggtgccagtgcactccagcccgggcgacagtggga

SEQ ID NO: 214488 - DNA, 180 bp, Homo sapiens
  chr11:75536035-75536215
  hypo
gtactggaatgtgtacagctacaaactgaaggtgttttagaaaaagacatctgtcttatgagagaggttgaaacattttaggtttatgctttgttttaggtttaatgacataagtaatgtcttttttttttttttgagacagcgttaccctgttgtcgcccagaatggagtgcaatggca

SEQ ID NO: 214489 - DNA, 50 bp, Homo sapiens
  chr11:75852055-75852105
  hypo
gatctagttggcagcttaaacggaggccacgcgaatgtgcaccctagcca

SEQ ID NO: 214490 - DNA, 139 bp, Homo sapiens
  chr11:75858240-75858379
  hypo
agaggacaggagcacttgggaaggaagcggtctggggggcctaactgagcagcaccctgcctcacaggagagcaagtcacagacgtttcagccccaacgctgccgctcactggctatgtgaccccggcgaggcgcttga

SEQ ID NO: 214491 - DNA, 167 bp, Homo sapiens
  chr11:75882508-75882675
  hypo
gtgtgtgggctaccccgactcctcccagtgcccagggagggcccctcctcaggcgtcccaccctggcagtggggatggcaggcgggaggttctgcagggggtggttgtcagggcctgcacacttgggctggacccactgacactgcgctgaccgccagtggtgccag

SEQ ID NO: 214492 - DNA, 35 bp, Homo sapiens
  chr11:76077428-76077463
  hypo
tagaaaatcagcaattaggccgggcgtgttgtcac

SEQ ID NO: 214493 - DNA, 55 bp, Homo sapiens
  chr11:76164362-76164417
  hypo
caacagaacgccaccgtgctgaagttcggagagcagtaaacgatgaacggttaac

SEQ ID NO: 214494 - DNA, 183 bp, Homo sapiens
  chr11:76339359-76339542
  hypo
acatgtatatatcaccaccacgcatcatagccatctgcatcagcacatgcaaactcgtgtgcacacacctgcatgcacacactcttacctgcatgcctgcagctcgcccatgctgcacacggtgtgtacaccttgccttttctggctcctttgttgctgagcgatcctgcaaaggtgcagaaa

SEQ ID NO: 214495 - DNA, 73 bp, Homo sapiens
  chr11:76372236-76372309
  hypo
tcccagacaggtccagggaggtcacgcgtggcagggggcccaggccaccagcactcagcgcagtggccatcgc

SEQ ID NO: 214496 - DNA, 513 bp, Homo sapiens; identical to SEQ ID NO: 202667
  chr11:76381508-76382021
  hypo

SEQ ID NO: 214497 - DNA, 51 bp, Homo sapiens; identical to SEQ ID NO: 202668
  chr11:76382264-76382315
  hypo

SEQ ID NO: 214498 - DNA, 192 bp, Homo sapiens
  chr11:76408273-76408465
  hypo
taatttggagaggaccgtatatatttagaggacgcctccaattttccaaaccctgctggccttccaaaggtttactggaaagaatgtaggttttggaatgagacagatgtaggttcaagccctggccctgccatttacctggacgacttcacctgggcgagcctcagtttcctcttacgtggaatgaatgtt

SEQ ID NO: 214499 - DNA, 55 bp, Homo sapiens
  chr11:76463185-76463240
  hypo
tctgccttgccctctcgtgcctgggttctcttatatccctcgggctgggttctgg

SEQ ID NO: 214500 - DNA, 104 bp, Homo sapiens
  chr11:76674834-76674938
  hypo
aagtaagccacattatgctgcgttaagaaaagaaacctggtcaagtagccaagatggccaaataggaacagctccagtctacaactctcggcgttagcgacaca

SEQ ID NO: 214501 - DNA, 120 bp, Homo sapiens
  chr11:76901057-76901177
  hypo
gctgcagtacctgcggaacttcatccacgggggcccgcccggctacgccccgtactgtgaggagcgcctgagaaggacctttgtcaatgggacacggacacagccgcccagctggctgga

SEQ ID NO: 214502 - DNA, 480 bp, Homo sapiens; identical to SEQ ID NO: 202671
  chr11:77184356-77184836
  hypo

SEQ ID NO: 214503 - DNA, 660 bp, Homo sapiens; identical to SEQ ID NO: 202672
  chr11:77184896-77185556
  hypo

SEQ ID NO: 214504 - DNA, 323 bp, Homo sapiens
  chr11:78380609-78380932
  hypo
gaagccatcctcatccatcttgtattgcacgtcacccagccgagtgatgcggtcgcggatgtcataccgtagtggtgtgagccgtgcactgttcccagggctcagtaagtgcaggttcccattgaggtcgtagctgtagcgccagagtggcttgtcattgatggagactgtctgcagctggccgtcagcatcatactcataggagtagcgagtggtattggcgtagggtcctaccttcagctccttcttcactactcgccccatgttatcatactggacggtcatccagtacatgagcgagcggaagatctcatactgcactt

SEQ ID NO: 214505 - DNA, 407 bp, Homo sapiens
  chr11:78534089-78534496
  hypo
tctgggctcttgttctgctgcgtctcccagcggtgccccgtgagcacgtgccagagagatcactgagacacacaccaagtactggggagacagccaagtgccgcgctcttcaagagcactaggcccttctgaggagaggcgagcgctcccgggaaatgcctcgtcttccctccacccttaacccacagcagctccagtgcaatgccccggcctcagcgcctgcccagcggtggcccaggtgcaagagacaacacctcgccccgttcccactgcccacagctgattggacccggctgagcacctgacccaagccaagctcaggcacaggctgaacggtgctctgtgacacagcccactgggcagaggttccgggccaataagagcccgttctctagtatttgaactaa

SEQ ID NO: 214506 - DNA, 169 bp, Homo sapiens
  chr11:85692740-85692909
  hypo
acactaaataacacacggagaaaacaatgtgtatattaaacactcacttcttagtggttccatttccgatgccaagatctaggaaaggagaaaaacaaaaaagcattttataacacgagacgcagtttaataaaacaacataaaagaagattaacgtatccaaagacta

SEQ ID NO: 214507 - DNA, 77 bp, Homo sapiens
  chr11:85906159-85906236
  hypo
taaggaccatcttgagatggcggccaccgagggggtcggggaggctgcgcaaggcggtgagccccggcagctggagc

SEQ ID NO: 214508 - DNA, 222 bp, Homo sapiens
  chr11:85906275-85906497
  hypo
agcacgaggaagagatggcagcagaggctggggaagccgtggcgtcccccatggacgacgggtttctgagcctggattcgccctcctatgtcccgtacagggacagaacagaatgggctgatacagatccagtgccgcagaatgatggccccaatcccgtggtccagatcatttatagtgacaaatttagagatgtttgattacttccgagctgtcctgcag

SEQ ID NO: 214509 - DNA, 930 bp, Homo sapiens; identical to SEQ ID NO: 202680
  chr11:86511111-86512041
  hypo

SEQ ID NO: 214510 - DNA, 262 bp, Homo sapiens; identical to SEQ ID NO: 202681
  chr11:86513414-86513676
  hypo

SEQ ID NO: 214511 - DNA, 444 bp, Homo sapiens; identical to SEQ ID NO: 202682
  chr11:86666091-86666535
  hypo

SEQ ID NO: 214512 - DNA, 31 bp, Homo sapiens
  chr11:87434384-87434415
  hypo
tacaaccatatatacatatgcgtatacatac

SEQ ID NO: 214513 - DNA, 91 bp, Homo sapiens
  chr11:87434775-87434866
  hypo
acaacccatgtattataatcactgtttcaaggatgagaaaatcgaaaggttaaacatttagcttagagtcgcttatcaaataccaaaatta

SEQ ID NO: 214514 - DNA, 185 bp, Homo sapiens
  chr11:91435729-91435914
  hypo
gtagcactaaatagacggtaaaaaggacactcatgtataatacgagagctgaaatagacagagctctgctgtgttccatttcagctggaaatatgcactccagaaactcaaattttttgccagtctgtgcgtgtctgtgaatgactcgtaagtgccattagtattgattacggtattacaataaa

SEQ ID NO: 214515 - DNA, 76 bp, Homo sapiens
  chr11:93425626-93425702
  hypo
gaaaaacttttaatatacagcgccctttttttgctccgtcgcccaggctggagtacagtgacacgatcatcgctca

SEQ ID NO: 214516 - DNA, 173 bp, Homo sapiens
  chr11:93476508-93476681
  hypo
gctctgccacccaggctggagtgcagttgaagcaggatattcctctgaccccttcgtgggtcttgcggctgcggtgcctcacttacttagcccacggctctcaactcctcgcgggagggggggcgcgagtgaatgaggcgggaactggagtgctggaagccacgaactccagt

SEQ ID NO: 214517 - DNA, 193 bp, Homo sapiens
  chr11:93476769-93476962
  hypo
gtaggagcgaactccatgcaggccctgcggctgtgtctaggggatgcccgcgacccctgaagacccacagcctgtcttacaacctgtcatggttgtgaaaagttttgagagaacgtctgcacagtgtctaacggtgtctggtatatagtgtgcactcaaatggtaaccagtttagttgcgatagttggtctac

SEQ ID NO: 214518 - DNA, 34 bp, Homo sapiens
  chr11:94952098-94952132
  hypo
agccgccgcacccggccatatttacccttatttt

SEQ ID NO: 214519 - DNA, 113 bp, Homo sapiens
  chr11:95631021-95631134
  hypo
gttcaacaaggttacgtttacaagtcttcttagtctgtgattcacaaacttactctaactttgtgacctcggcacactagagctggttattcgcttcagtggcctgcctgact

SEQ ID NO: 214520 - DNA, 1330 bp, Homo sapiens; identical to SEQ ID NO: 202700
  chr11:96122355-96123685
  hypo

SEQ ID NO: 214521 - DNA, 180 bp, Homo sapiens
  chr11:97588956-97589136
  hypo
ccaacgaccccatgaagagggaacggtggtccatgcgcgggacccagcctgtaatcaagcccagcaggctccggcctgccgcaccaaggagcccgcccccaccggaacccgcgccggcccaccatcgcggcactcagcctgggctcccgcccacacctctccctccacacctccctgcga

SEQ ID NO: 214522 - DNA, 43 bp, Homo sapiens
  chr11:102245881-102245924
  hypo
tacaccggagctgttcctattcggccatcttggctcctcccct

SEQ ID NO: 214523 - DNA, 705 bp, Homo sapiens
  chr11:103907385-103908090
  hypo
cccccagacagatgagtgtccgcgcctctctgagaggtgaatgagcccggacggtccctacctaccaagtcctgaggagcagcggcaccaacgacgcaggcccgccccagcccgccagtgagccgcccatgccctctgctagcccggcccgcccgggcccccgccatgctgatcaccgtgtactgcgtgcggagggacctctccgaggtcaccttctctctccaggtcagccccgactttgagctccgaaacttcaaggtcctctgcgaagcggagtccagagtccccgtcgaagagatccagatcatccacatggagcgactcctcatcgaggaccactgttccctgggctcctacggcctcaaagatggcgatatcgtggttttactgcagaaggacaatgtgggacctcgggctccagggcgtgccccgaaccagcctcgtgtagacttcagtggcattgcggtgcctgggacgtccagctcccgtccacagcaccctggacagcagcagcagcgcacacccgctgcccagcggtcacagggcttggcgtcaggagagaaggtggccggcctgcaaggtctgggcagccccgccctgatccgcagcatgctgctctccaacccccacgatctgtccctgctcaaggaacgcaaccctcccttggcggaagccctgctcagcggaagccttgagaccttttct

SEQ ID NO: 214524 - DNA, 201 bp, Homo sapiens
  chr11:105850438-105850639
  hypo
ggctgtcattgcatcggacctaccataaaaaccaaaaaaataattgagtgccttaattaaactgttggtgactggtggaaacgcagccctgagggacacgccacgcgcgggtctttgctaaaccaatcctttggctgagagcgggaagtccgtcctaacgcgctggccggacatcagcagcagcaacgtgtgcatgagctc

SEQ ID NO: 214525 - DNA, 155 bp, Homo sapiens; identical to SEQ ID NO: 202712
  chr11:106889162-106889317
  hypo

SEQ ID NO: 214526 - DNA, 87 bp, Homo sapiens
  chr11:107931201-107931288
  hypo
gaaatgcttttttttttaaacgaaatttgagcgaggtagaaataattatgcaaattgaataccactaaaagaagaatctggctggat

SEQ ID NO: 214527 - DNA, 34 bp, Homo sapiens
  chr11:108031057-108031091
  hypo
tggaaaaacatacgtaaatttgatttttccactg

SEQ ID NO: 214528 - DNA, 34 bp, Homo sapiens
  chr11:108674027-108674061
  hypo
tttgtttttcaggccagccacggcggctcacgcc

SEQ ID NO: 214529 - DNA, 200 bp, Homo sapiens
  chr11:110144181-110144381
  hypo
cactggccattcatgcgtgcaatcatggcacactgcaaccttgatctcctggacgcaaacctatactcccacctcaatctaccaagtagctaggagcacaggcgtgtgccgccaggcctagctccaaactctattttaaataataattttattgtgtaaatacctaatatctcaaaaacttaacacgccttaccaaaata

SEQ ID NO: 214530 - DNA, 34 bp, Homo sapiens
  chr11:113747597-113747631
  hypo
tccctagtctgcatgcgggcgcagtttttgacaa

SEQ ID NO: 214531 - DNA, 199 bp, Homo sapiens
  chr11:113921422-113921621
  hypo
aacatgtcatgctacgaggtgaaaattaccaccaccccctgcacaccctgcctcgctctccatttgcctgctcacctcactcccaacagaatgaacgagacgagcctgggagaacaggaccacaaacagctgcgctcagctgcaattagaagccaagaaacacaggtcatgcttcattcttttaaagagatttaaaatt

SEQ ID NO: 214532 - DNA, 217 bp, Homo sapiens
  chr11:114070008-114070225
  hypo
gatgccggacatggatgccgctgggccccgggatggggatgccggacatggatgccgctgggccccgggacggggctgctggacatggatgccgctgggccccgggacggggatgctggacatggatgctgggccccgggatggggatgccagccatggatgccgctgggcagtgggcaggacacagaccttgcccttccccggcctcccaccctag

SEQ ID NO: 214533 - DNA, 340 bp, Homo sapiens
  chr11:114112625-114112965
  hypo
ctacccttgctgctgcgatgtatttgatcaatgtctatcctttagctttagcttccagagctcgggaacgacgtcgattttgcccatcactggggccacatactgggtgctcagtgttgcatagcctgggcccactctggatttgcccctgagcatggggatttggaggtgtgagtcccgacactggctctcactccagatgggtaaagaatgcaccttgtattcccacctttctgaggcaccccctctcctgtctcccacaggcactgacatggccgtcttctgtctgctgtgtgggaagcgcttccaggcgcagagcgcactgcagcagcacatggag

SEQ ID NO: 214534 - DNA, 210 bp, Homo sapiens
  chr11:114113052-114113262
  hypo
catacaggtaggtcagtccagctgatgggtggatctgggtctctgggagccagcgtctatatttacctccaaggacgtaaagtggaggtggtgggctgagtcagccttcagtccttctgctcaaggcttggacgtgcagaggctgcccgtcgtgcaggtaaatgtggacagttctcccagtcccctcctgtggaccgtcggttcaaagtc

SEQ ID NO: 214535 - DNA, 65 bp, Homo sapiens
  chr11:114127910-114127975
  hypo
tggggccaagacccgggtctgtctgaccctggggttgctgagcagaaaccgcctggagctacccc

SEQ ID NO: 214536 - DNA, 238 bp, Homo sapiens; identical to SEQ ID NO: 202728
  chr11:115374753-115374991
  hypo

SEQ ID NO: 214537 - DNA, 398 bp, Homo sapiens; identical to SEQ ID NO: 202729
  chr11:115375434-115375832
  hypo

SEQ ID NO: 214538 - DNA, 170 bp, Homo sapiens
  chr11:116591713-116591883
  hypo
ctctgccacttaaatcgcctcaacacccctgtcccttcccccgactgtggtcctcagcacaggacatggccttactgctccaccacgtgcttagtattcaagccatgcgctgccaccatgcttcccaccatgtctcctccaaagcagagccttccgcggtgtgccctgca

SEQ ID NO: 214539 - DNA, 33 bp, Homo sapiens
  chr11:116959822-116959855
  hypo
tataagagtaagaagctggccgggcgcggtggc

SEQ ID NO: 214540 - DNA, 36 bp, Homo sapiens
  chr11:117047303-117047339
  hypo
ctaatttggccgggcgcagtggctcacgcctgtaat

SEQ ID NO: 214541 - DNA, 104 bp, Homo sapiens
  chr11:117056079-117056183
  hypo
atggattatttattcagcaaatatttatggagcacctcctatatgccaggtggtatgctaaggcagcagtccttggtgggggcggggtcctgtctagaggaaca

SEQ ID NO: 214542 - DNA, 335 bp, Homo sapiens
  chr11:117073748-117074083
  hypo
cctatggcatgagccgcgaagtgcagtccaaaatcgagaagaagtatgacgaggagctggaggagcggctggtggagtggatcatagtgcagtgtggccctgatgtgggccgcccagaccgtgggcgcttgggcttccaggtctggctgaagaatggcgtggtgagtggcaccctgggctagggcgctggggggctggggtgtgccaccctgtgagtcctgggccaatccctgagctgactgctaagctgcgtcctatgccctatgcctggtagattctgagcaagctggtgaacagcctgtaccctgatggctccaagccggtgaaggtgcccg

SEQ ID NO: 214543 - DNA, 70 bp, Homo sapiens
  chr11:117074288-117074358
  hypo
ggggtgtgcttgcccgcacacagcagggatgggatatgccgagaataacacgccacgctcacagggccca

SEQ ID NO: 214544 - DNA, 139 bp, Homo sapiens
  chr11:117075033-117075172
  hypo
ggcatgacaggctacggacgacctcggcagatcatcagttagagcggagagggctagccctgagcccggccctcccccagctccttggctgcagccatcccgcttagcctgcctcacccacacccgtgtggtaccttca

SEQ ID NO: 214545 - DNA, 234 bp, Homo sapiens
  chr11:117076078-117076312
  hypo
ctctgcagtcctgccgcaggattccctagtgaagcagctcaggcctgggggagccgtgtgtatcccagctgtgccggcagcatcataccaatcgtgggggtggtgaaggagccaggggttcattcatggttggtttctgatcaggcatcttgggaatggataatggaggcagccgctttcaggacaggcatgtccaggggctcctcccagcctctaccccgaagtcctcttccc

SEQ ID NO: 214546 - DNA, 115 bp, Homo sapiens
  chr11:117097881-117097996
  hypo
ggctcccgtaggccacgcccacggcacagaagctgttgttgggcacagccgcgatctctcctgcacatcgcgtgccatggtggttgccattctccacatccgggtggggcatggg

SEQ ID NO: 214547 - DNA, 639 bp, Homo sapiens; identical to SEQ ID NO: 202732
  chr11:117186498-117187137
  hypo

SEQ ID NO: 214548 - DNA, 120 bp, Homo sapiens
  chr11:117188182-117188302
  hypo
acaagataacgacaacaacaacaaatgtagtaataacaggctacgttactcccattaaaggcaggctttggaaaggaaagatcattatctctactctttttttttttttttttgagaagg

SEQ ID NO: 214549 - DNA, 76 bp, Homo sapiens
  chr11:117188542-117188618
  hypo
ctgggattacaggcgtgagccaccgcgcccggccgatcattatctctactcttatcctacacggttcagaccggtc

SEQ ID NO: 214550 - DNA, 150 bp, Homo sapiens
  chr11:117267876-117268026
  hypo
cttgtgcagcagacacgctccatgcggaggcggcagacagctctgaaagctgcccagcagcattggcgccatgagctggccagtgcgcaggaggtggccaaagacccaccaggcatcaaggccctggaagatatgcgcaagaacctggag

SEQ ID NO: 214551 - DNA, 231 bp, Homo sapiens
  chr11:117335664-117335895
  hypo
cagagtggtggcattgatctcgctggaagagggccccgtgccagcccgattgaaggcttggaccaccaccccatactgggcgaacttcttgaggttgtccagggtgtagacctcgctgtcccccgtggccttcatctccacgatgctgtactgcccgttgctgccggggctgttctctctgtagccaatctggtagccccggatgacaccgttctgcagctccttcttggg

SEQ ID NO: 214552 - DNA, 198 bp, Homo sapiens
  chr11:117380436-117380634
  hypo
tgacctgtgagtcagcggcgccctctccagtgctcagggctagtagctgcatgtgtgcctggccatttccatttctgggaaagccatcctcccggaggtggggtctgaccccctgcaccctggtgatgacctgggccctctttactgtggagtccagcctacagatctgcccccgagtcccagcgtgtccctagcagg

SEQ ID NO: 214553 - DNA, 381 bp, Homo sapiens
  chr11:117389166-117389547
  hypo
atgtagacaggcacctcttacgtttattcgcgcctgatattcagcactgcccaccaagttccgcgctgtgcaccggtacacgcccccgtcgcggatctgggggcctgtgacgttcatgtggctgatggtggtgccgtccgacatggtgtactggttggtgcggtggctgccatcccgcacgatgggctcatcgtcgagggcccaggtgaccgtggggggcggggcgcccttggccgcacacatcagtgagaactgctccccggggttgaccaccttctcgctgaaggacgagacgatgcggggcgtgccatctgcagggagcgagaagcccccttcagggtcaccaagccatggagagacggtccccccagccaccccacc

SEQ ID NO: 214554 - DNA, 125 bp, Homo sapiens
  chr11:117957555-117957680
  hypo
cacagctgcttgccgttggttttggggagggatgcaggttctggggtcagagagcagagtgaggctccctcagaggagcactgtggccgggccccactctgcaagctgacggcaagcacctctgg

SEQ ID NO: 214555 - DNA, 32 bp, Homo sapiens
  chr11:117977482-117977514
  hypo
gccactgcacccagccccgtgcatctttttat

SEQ ID NO: 214556 - DNA, 39 bp, Homo sapiens
  chr11:117994509-117994548
  hypo
attacaggggtgagccaccgtgcccggccaattactgtt

SEQ ID NO: 214557 - DNA, 261 bp, Homo sapiens
  chr11:119044183-119044444
  hypo
tcagaagctatacagcggcaccgccggaacctggctgagtggttcagccggctgcccagggaggagcgccagtttggcccaacctttgccctagacacggtccacgttgaccctgtgatccgcgagagtacccctgatgagctacttcgcccacccgcggagctggccctggagcatcagccaccccaggccgggctccccccactggccttgtctcagctctttaacccggatgcctgtgggcgccgggtgcagacagtg

SEQ ID NO: 214558 - DNA, 236 bp, Homo sapiens; identical to SEQ ID NO: 202736
  chr11:119103176-119103412
  hypo

SEQ ID NO: 214559 - DNA, 83 bp, Homo sapiens; identical to SEQ ID NO: 202737
  chr11:119142431-119142514
  hypo

SEQ ID NO: 214560 - DNA, 106 bp, Homo sapiens; identical to SEQ ID NO: 202738
  chr11:119144575-119144681
  hypo

SEQ ID NO: 214561 - DNA, 130 bp, Homo sapiens; identical to SEQ ID NO: 202739
  chr11:119145547-119145677
  hypo

SEQ ID NO: 214562 - DNA, 142 bp, Homo sapiens; identical to SEQ ID NO: 202740
  chr11:119146702-119146844
  hypo

SEQ ID NO: 214563 - DNA, 102 bp, Homo sapiens; identical to SEQ ID NO: 202741
  chr11:119148462-119148564
  hypo

SEQ ID NO: 214564 - DNA, 291 bp, Homo sapiens; identical to SEQ ID NO: 202742
  chr11:119148945-119149236
  hypo

SEQ ID NO: 214565 - DNA, 158 bp, Homo sapiens; identical to SEQ ID NO: 202743
  chr11:119149265-119149423
  hypo

SEQ ID NO: 214566 - DNA, 492 bp, Homo sapiens; identical to SEQ ID NO: 202744
  chr11:119155748-119156240
  hypo

SEQ ID NO: 214567 - DNA, 126 bp, Homo sapiens; identical to SEQ ID NO: 202745
  chr11:119167631-119167757
  hypo

SEQ ID NO: 214568 - DNA, 86 bp, Homo sapiens; identical to SEQ ID NO: 202746
  chr11:119168098-119168184
  hypo

SEQ ID NO: 214569 - DNA, 175 bp, Homo sapiens; identical to SEQ ID NO: 202747
  chr11:119169061-119169236
  hypo

SEQ ID NO: 214570 - DNA, 100 bp, Homo sapiens; identical to SEQ ID NO: 202748
  chr11:119170361-119170461
  hypo

SEQ ID NO: 214571 - DNA, 214 bp, Homo sapiens
  chr11:119243142-119243356
  hypo
ttcattgggcgcagcagagcattcctgagaacactactggactatcctcgagtgcgcgggccctgagtgggctttctaggcagagtgggaaggcccctcccctcggcacggagccccaggggcaccagatgtgccaggatgacttctcttgtttgtctccaccaggagcagcctgtcagtcatcagtcaggttgggagtcgagccctcagcctg

SEQ ID NO: 214572 - DNA, 298 bp, Homo sapiens
  chr11:119290804-119291102
  hypo
ccagagtggtggagtgcacacgtgtaggtgccctcgtccttgctagtgaaggcggataagtagaggaccttcatgttgtatttgctggtgaagttggttcgggagcggtatgtgtgctcaggcacccccacagtgccaaagagcacgtgcttctttgtctcacgggtcaggctgaactcgtactggatgggtgaactgctggtattctcatggcggcagtccagacgaaggctctggtccactaggcaggccgttaggctggtcaccttctgccctcgggagacctgcaagactggca

SEQ ID NO: 214573 - DNA, 90 bp, Homo sapiens
  chr11:119405812-119405902
  hypo
caggcgtgagccaccgcgcctggcccagactgggtatattaataggctgctaatgtctctggcatccccgagcagtggtcctggcttttc

SEQ ID NO: 214574 - DNA, 85 bp, Homo sapiens
  chr11:119493220-119493305
  hypo
accgtgtctggcctgacaggagatttattctacctgggactgaaattttcctgagctgtcctgagggtgccggctcctgtcccca

SEQ ID NO: 214575 - DNA, 67 bp, Homo sapiens
  chr11:119493693-119493760
  hypo
gggactcggcccagcggagacgtccgaagctctgagtgcccagaagaggttacgttctggtctgagt

SEQ ID NO: 214576 - DNA, 225 bp, Homo sapiens
  chr11:119505167-119505392
  hypo
cagatctcagcacgcggcagaccgtggcagtgtggacccggacagctgcggagcgtggctggctgcagccccagctgccaccccgctggatccacccagcatttgtgctgagaccgcaattcccctagaccgctctcagccaacaactagacaggctgggaatccagcgcaggccctttcctgtgggacgcaggagtcctctaatagcagcgatggcccaaggat

SEQ ID NO: 214577 - DNA, 186 bp, Homo sapiens
  chr11:119523994-119524180
  hypo
cacggttgagacctatcctctcgcttcctatgtcaggtggctcccggggcatttctgtggattaaactgtagaaggcactggaagcctttgctccggggtgaatgtggcctcacattcctgcagctggcctcagtgtcccctgcaggagggtggcccggcgcggggatcccaacccagccctgccc

SEQ ID NO: 214578 - DNA, 39 bp, Homo sapiens
  chr11:119524226-119524265
  hypo
ctggtgggtcgtggtgcgagacgacgtcaatcagagaga

SEQ ID NO: 214579 - DNA, 122 bp, Homo sapiens
  chr11:119532474-119532596
  hypo
gctttcagcaggatcagaccattccctctgccacatctgtgctgagtggccatctggctgtgcatgcatgcgtgtgtacatgcgtgtacacatgcctgcgcgtgggtgtgttggaggtgtga

SEQ ID NO: 214580 - DNA, 784 bp, Homo sapiens
  chr11:119535381-119536165
  hypo
ggtggggggtgggcagggggcgtgcggggaggggctggggaggagcggtcacagacagaggctctggaaggggggctacacgtaccactccttcttggaaatgaaagacccgtcgttctgagaaaccatgttctcagccaagtccagctgctcagggtcgtactggtagcccagagtccggtccccgtagccgtcctgacgggcctcggcctcatccacggtgaagtagggccgcttggcgtcctcgtcatatttggggtgggggccgcccaccttgcgctcgccccctccaccgccctcctcctcctcctcctcctcctcatagctgcttccacccagtgggccggccttcttctcgtcgtctgagtcgtcggggtactgcaggttctgtgccattggtgggtggtgctgggggatgcctgccttgctgtagccgttgccatacacgtgcttcttggtgctgtagtcacccttgaaggtgtgccggcgccgacgcagggcgaccacgatcccgccgaccacaatcaacaccagcaggatgctccccgccacgcccccaatgatggccgtgggcaccggcccggcgcgccgcccatgttcgggaggagacggggtgtaggggaattctgggtgaggaaaagagatggaggggacagcatcagcgtgtgctcctggggtgtagagggggtgggagggaggcagggaaaggagaggccaggaaggacaggctgtctgcaccccaggtttgagcagctccagttcgaggccccgcagcactccaccc

SEQ ID NO: 214581 - DNA, 99 bp, Homo sapiens
  chr11:119541630-119541729
  hypo
gagccaccacgcctagccaacttttttccttaagtcttaaggaggtttactctttcctggggatcttttgggaccaaagaaccccggttattttgttta

SEQ ID NO: 214582 - DNA, 420 bp, Homo sapiens
  chr11:119548348-119548768
  hypo
tgctgggcaccaggcggtagcggctgatgaccgtcactgtgccattggggttccggatctcctggtactctgcctcaccttttaaccgagtttcccaggataccacactgggaggcttcccattggctgaggtgcaggtggccaccaggaccttgtcatcctgccccttcttggctcgaagcactgcctgggtaccctctatccaattggtgggtttggctgcgaggaagcagagagagtgatgggactagccctgttgacttgtccaagatgcaccggccaaaagggcgtggcatccgtcaggccttgtcttcaggtccccttggccatccctgcctctcagctgtgctgcaccaaagactgtcccagaacctcttgcaggaagttcatcatgtctaacgttatgtcctccctgcccta

SEQ ID NO: 214583 - DNA, 383 bp, Homo sapiens
  chr11:119549111-119549494
  hypo
cagggcagcttacccatcaccgtgagattgagctggctttctcgattgcccgtagggaaggtagcaaactcgcagatgtagacaccctcatcctccagctccaggcgggagaggcggatagtgccatcggtgaaggagggccgcaggaattccacacgctcgcggtagggagccagcacggacacgcccatggatgggttgtagatggccacgttctgcttggagccattggtggacttctgccatgtgacctgggtgatcttcacgctgggaagcgggttggcaaagctgcagtgcagaaccacgtctgtgccgatgaagccatacatggagtcgttcacctggaccacctgggagtggacgcctggccaggaggatggcag

SEQ ID NO: 214584 - DNA, 217 bp, Homo sapiens
  chr11:119574638-119574855
  hypo
cgctcacagggagagagtggcctttatcatgcccatcctttcacactcggagtacgtgttagtgtgcctttttgccacctcttctccaagacaatggttcctcctggcaaatctccccagctttacccaggaacacggttctccgggcaagaagctgcctcaaaaggctcacccaaggtcacacagctgggtgcacccctcacgccccaccatcatt

SEQ ID NO: 214585 - DNA, 73 bp, Homo sapiens
  chr11:119576250-119576323
  hypo
caggtgcaaaggccccgtggcgggagagcgtctggtaactgtggccggtgtagctagacggaggagactgatg

SEQ ID NO: 214586 - DNA, 500 bp, Homo sapiens
  chr11:119579305-119579805
  hypo
gtggttgtcaggggccgggggagggaaaatggggagtgactgctaatgaataccgaggttctttccgaggtgatgaaaatgctgtggattaggcagtggtgacggcctattgtgaatatactaaagccactgactcgtatacttcaggagggcgaattttgtggtttgcgaattatatctcaacaaagacaaaagaagaaaagaggcacatgaagaaggatggatgatggcagggctaggctggagacaagcaggctaccagaagacctctgcaagcctgcagcacccccaagcgtgggggccctggggtcccacggctcagcgcagctgctaagagcaccggtcttctgaagtccaagactcagcttccctcctcaggactgcccaggactgattctgcccaggactgattttgctgggggagggggcaccggagagatcctgagacactctaccccccacgcccgcccacatagccaacatatcgcacatatcctgca

SEQ ID NO: 214587 - DNA, 312 bp, Homo sapiens; identical to SEQ ID NO: 202752
  chr11:119587838-119588150
  hypo

SEQ ID NO: 214588 - DNA, 158 bp, Homo sapiens
  chr11:119588398-119588556
  hypo
accctcaaaggggcccggtcccagagggcagaggagagggacataaaagtggctaagcttgggagcccggcaggcacctgcaggcccgggggtaggggggctctgggcaatgctggtcccttcgtgctggctgggcaatgctccggcttggatgggag

SEQ ID NO: 214589 - DNA, 147 bp, Homo sapiens
  chr11:119590581-119590728
  hypo
gcttgcggggggagcgggtcatgaaagcttcacaatagaagtggctcttgacttcagtattcagatttcatatttatgggaaataagcgggaatgggggaacagcatgtgcaaaggcacggaggcaggaaagcgctgggcatggaaa

SEQ ID NO: 214590 - DNA, 269 bp, Homo sapiens; identical to SEQ ID NO: 202753
  chr11:119598243-119598512
  hypo

SEQ ID NO: 214591 - DNA, 314 bp, Homo sapiens; identical to SEQ ID NO: 8414
  chr11:119599011-119599325
  hypo

SEQ ID NO: 214592 - DNA, 57 bp, Homo sapiens; identical to SEQ ID NO: 202755
  chr11:119600032-119600089
  hypo

SEQ ID NO: 214593 - DNA, 102 bp, Homo sapiens
  chr11:119606539-119606641
  hypo
gttgtgagtagaggcggcactcctgattagggatgggagcacttaaaactcaacggtgatactgagaagagggtttcatccaggatccgcatagaccggaga

SEQ ID NO: 214594 - DNA, 326 bp, Homo sapiens
  chr11:119970226-119970552
  hypo
ttccagccctgcttcgttatcaggcacgaggcaacaaggatggcctggtgggcacacggttggagcagggtcccgtcctatccctgttcacaacgtgtcatttagaaagtcaccaatacacacagcctctctgtttcttcatctgtggaatgggacgtagtaagtaatgctgcttaactacccacagttgaagtgacgacgaaggccggctgagatgaattctggcccccatctgaatgctcaccgtgtgctttcgacacagcttccactttcacgccgcgtaacacggtgagggagaaaccgccgccttcataccattgatatgg

SEQ ID NO: 214595 - DNA, 331 bp, Homo sapiens
  chr11:119994862-119995193
  hypo
ctcgccacacacctcgtacaggacgcagggccacacctgtacagaggccgtggccagcattgtgacctagaaatgggacagtgagcggccaggagcctgaacagtttctgcaaggctcaccccaccccagtctaggccatcccccaggcctggccggacctcaccggaggggctgccctgccgagtttgtaccccagggacgatgattatcacactcctcaaccccacttctgcagccaccgccagccgcagcttctcagatgagagggcatgggagactgaacagcagagtgttcaaccccgccgtaccccctaccgagcagtgcgccct

SEQ ID NO: 214596 - DNA, 67 bp, Homo sapiens
  chr11:120008004-120008071
  hypo
gtagcagatgcaggtctggtcggtctggcagaagagctccatcgtcttgccatgcacgggacacttg

SEQ ID NO: 214597 - DNA, 344 bp, Homo sapiens; identical to SEQ ID NO: 202757
  chr11:120196176-120196520
  hypo

SEQ ID NO: 214598 - DNA, 142 bp, Homo sapiens; identical to SEQ ID NO: 202758
  chr11:120206447-120206589
  hypo

SEQ ID NO: 214599 - DNA, 274 bp, Homo sapiens; identical to SEQ ID NO: 202759
  chr11:120207766-120208040
  hypo

SEQ ID NO: 214600 - DNA, 67 bp, Homo sapiens
  chr11:120367536-120367603
  hypo
ggttactactgtatcgattaaactccgctttgtttcagagatgatcataatttggccagcttcattt

SEQ ID NO: 214601 - DNA, 65 bp, Homo sapiens
  chr11:120367696-120367761
  hypo
gcttttcccttagtctgaaatgtactttggaaacttccaagatgagtattaaaagtaatagctgg

SEQ ID NO: 214602 - DNA, 35 bp, Homo sapiens
  chr11:120950504-120950539
  hypo
cttgggaaacaaactcgataaatgttttgtttttt

SEQ ID NO: 214603 - DNA, 161 bp, Homo sapiens
  chr11:120998441-120998602
  hypo
cttcctttccccgcgtcagtgtccacagtgcagtgcccgagcttcagccactactccgtgtgcacaagcagctgccccgacacatgctccgacctgacggcctcgcggaactgcgccacgccgtgcacagagggctgcgagtgcaaccagggcttcgtcct

SEQ ID NO: 214604 - DNA, 224 bp, Homo sapiens
  chr11:120998833-120999057
  hypo
ccagaaccaggtgctgcacacctttgacggcgcctcctacgccttcccctccgagttctcctacaccctcctgaagacctgccctgagcgcccagagtacttggaaatcgacatcaacaagaagaagcccgatgcaggacctgcttggctgcggggacttcggatcctggtggccgaccaggaggtcaagataggaggcatcggggcttcggaagtcaaggtaa

SEQ ID NO: 214605 - DNA, 339 bp, Homo sapiens
  chr11:121000556-121000895
  hypo
ttctgtctccccaacggcaagtgcacggacaacctggcagtgttcctggaaagctggacaactttcgaggagatctgcaatggagagtgtggggacctgctgaaggcctgcaacaatgactcggagctgctcaagttttatcgaagccgctccaggtgcggcatcatcaacgacccctccaacagctccttcctggagtgccatggggtggtgaacgtcactgcctattaccgcacctgccttttccgcctgtgccagagtgggggcaatgagtcagagctctgtgactctgtggcccggtatgcaagcgcctgcaagaatgcggacgtggaggtgggg

SEQ ID NO: 214606 - DNA, 165 bp, Homo sapiens
  chr11:121023446-121023611
  hypo
gtaatgaagaaaggcggcagacctcctggctcctgcctctccccgtgcctttcatctccctgagtaggtgagcaatggccatgagaaaaccctcctcggtgccttgtgatcgtgcgagtcttgacttgtctctcttgttccagctgtcacctgccctccaaacag

SEQ ID NO: 214607 - DNA, 240 bp, Homo sapiens
  chr11:121665534-121665774
  hypo
agcaatccacatcttcactccgaggtcccagggcagcccccggcgaggcgggtcgtccgagttgcccctcgagctctccgaagaggcagcccttagcctcggagctcggggtagtccgagcagtcctcgcctacactgcgcagcagacactccttcctccatgactgttcaagggcgggggtggggagggaggaacgagcaggccatgaatatttaatcggggaaaagtaggagcacatt

SEQ ID NO: 214608 - DNA, 240 bp, Homo sapiens
  chr11:122628720-122628960
  hypo
ccttctttaaacactcaaccactccttttgagtcgaagcttcctgggggcccttcgtctggcaagggcttaggtgtctttaccaagtgccaaattgccagattccctgagcgctgggaactgaggcccagaaggaaggcgaagatgtggccgggggtggggccggtctggggggtatcgtagttgggccagcagacacacggctggctagagagttttggacccctctcacttcctggcg

SEQ ID NO: 214609 - DNA, 104 bp, Homo sapiens
  chr11:122632802-122632906
  hypo
tttcgccattaccgtcaatggcaaaaaccacagttacttttgcaccgacctaataacatctgtgacctcattctggaatcaccgtgcccctggcttgctgttgt

SEQ ID NO: 214610 - DNA, 180 bp, Homo sapiens
  chr11:124071495-124071675
  hypo
gtgaaactccgtctagaaaaaaaaaaaaaatcactaagaccgtaccaggcagacacacaggcggctggacgtcgagaggcgcacaccgacaggcaccagcatgccagcaggccaccgaccggcagaagcagaacgacacagtttggcgggggcagttggaggaaagcccaggccactgag

SEQ ID NO: 214611 - DNA, 99 bp, Homo sapiens
  chr11:124387388-124387487
  hypo
cctccaaccctcgccgtggccctccccgctgtgtacttcattccctctacagcccttgatcaagtcggtaaaaccggcggcccttctctggagaggtgg

SEQ ID NO: 214612 - DNA, 69 bp, Homo sapiens
  chr11:124638960-124639029
  hypo
caggcaagaaagggggtgtgcgtgctaacagcttcttgaaaacgggctctggaaggagcttgatccttg

SEQ ID NO: 214613 - DNA, 85 bp, Homo sapiens
  chr11:124639059-124639144
  hypo
taggggaggagctttgggaacattctggcgaggcttcacgtggccattctcagtctgtcctctcgctctccttgactttctttgc

SEQ ID NO: 214614 - DNA, 249 bp, Homo sapiens; identical to SEQ ID NO: 202775
  chr11:124709233-124709482
  hypo

SEQ ID NO: 214615 - DNA, 210 bp, Homo sapiens; identical to SEQ ID NO: 202776
  chr11:124709856-124710066
  hypo

SEQ ID NO: 214616 - DNA, 37 bp, Homo sapiens; identical to SEQ ID NO: 202777
  chr11:124736457-124736494
  hypo

SEQ ID NO: 214617 - DNA, 309 bp, Homo sapiens
  chr11:124794645-124794954
  hypo
cttctccccagtgaaggtgtcgtcggtgatggagatctcgacctcataggtgccctcatcggccagctgcaggtcgctgagaagcagggagccattttcaaagagtcggatacggtctcgatagtcaggccgcagggtgccgatgacctctgtgccaatggactgcaccacggtcactggcttgtcccgcttcagctgccacttcactacaggcctgtcgctgctggtactgctgtactgcacagaaagcagagccgacttccccacggtgccatggatcaggcgcacggggctggtgatgttcacccc

SEQ ID NO: 214618 - DNA, 335 bp, Homo sapiens
  chr11:125817624-125817959
  hypo
tctgtccagggagtgcgaggtggctccgtggagctggcctgtggctcagggcctgccccgctgctggtcctctggagcttcacccccctgggctccctggttccccggcctgtggccgtcaccgatggagccatgtccaaggtggaggccatcgcctcggctctgggagtcgtgagtctgaggaacagcagcctggtgctgggggagcttcacgagggtgcccgtggccacttcctatgccaggttctgcacgtggctggcggccagctccacgctgcctactcccacctcacgctggctgtgctgggtgagggcctggccccagctgcagctgg

SEQ ID NO: 214619 - DNA, 31 bp, Homo sapiens
  chr11:125836034-125836065
  hypo
aaaaaaaaaaaaaattcgataaaaagtactg

SEQ ID NO: 214620 - DNA, 178 bp, Homo sapiens
  chr11:125902449-125902627
  hypo
gtacctttgaaaaatcgctgacactgcaatgtggaaaacagttgaggataagagaagttagaaggctatggtgagagatacggggacctgtactggagaaatatcacgggataaatttgaaaggtttttcaaaaatttttaagacacggtcatatttaaaagacgtaagaggccagga

SEQ ID NO: 214621 - DNA, 56 bp, Homo sapiens; identical to SEQ ID NO: 202779
  chr11:125932494-125932550
  hypo

SEQ ID NO: 214622 - DNA, 436 bp, Homo sapiens; identical to SEQ ID NO: 8456
  chr11:125932556-125932992
  hypo

SEQ ID NO: 214623 - DNA, 127 bp, Homo sapiens; identical to SEQ ID NO: 202781
  chr11:125933201-125933328
  hypo

SEQ ID NO: 214624 - DNA, 40 bp, Homo sapiens
  chr11:125945776-125945816
  hypo
aagttgttacccacccgccaggtgcggtggctcacgcctg

SEQ ID NO: 214625 - DNA, 197 bp, Homo sapiens
  chr11:125971129-125971326
  hypo
caccccatcatcactcgagggccacagcggggcagttgggcacagacagcttggggatgtgcggctcccccaaggcggggctgggatatcaaagttggaagcgcgggggcatgtcagcctggctttgtgagtggggctcccatcagtgcatgaaagccttgctctacaaactgcattcgctgcgctcccaacctgca

SEQ ID NO: 214626 - DNA, 124 bp, Homo sapiens
  chr11:125988689-125988813
  hypo
gaggcagtctcgcccggactcctggagacccgcatagccctcgctgggagacactatgggccttttctacatgtcccctcacctctctgtcttctctggctgtctggcccgagctgccgtccat

SEQ ID NO: 214627 - DNA, 360 bp, Homo sapiens
  chr11:126055133-126055493
  hypo
atccagcccacccatttattttccaaaactcctgggagagacgacagagggacagaggcgcagggctctgtggaagccaggcctgcacccctcccccaggcggcctcctctccactctgggaccagccctgccttcccccaggctgcggtgggtcccgtcggagcacagcggctgctcataaagctcccgatgaaaggcacgctggacaggagaggtcaaggttcacacaagcagctccgccttctgtttcatttacaagtggcagtcacctcattaaacccggtccccctccacccctaccccaccctcacccccagcccaccgcacgcatccccacacccggtccctcccgctcagcc

SEQ ID NO: 214628 - DNA, 249 bp, Homo sapiens; identical to SEQ ID NO: 202782
  chr11:126225803-126226052
  hypo

SEQ ID NO: 214629 - DNA, 206 bp, Homo sapiens
  chr11:126619095-126619301
  hypo
atttcgactgttttcgtggaggtatttatagaccgtgattgtgttcccgctgagccggatcctttctcaactatataaatttgactctctcgctttctcccgatacgacttatctgctaatccctagaacatttgttggtatttatgtcttgcttggattttctacaccttttctaaattgctccgacttgcgtggttcaagttac

SEQ ID NO: 214630 - DNA, 119 bp, Homo sapiens; identical to SEQ ID NO: 202783
  chr11:128391774-128391893
  hypo

SEQ ID NO: 214631 - DNA, 637 bp, Homo sapiens; identical to SEQ ID NO: 202784
  chr11:128392116-128392753
  hypo

SEQ ID NO: 214632 - DNA, 160 bp, Homo sapiens
  chr11:128737284-128737444
  hypo
agtttactttataaccggatccaacaagagtaggcgtggcagttaagtgagtgagataccaaaggtgttgagctaccaaggctaactaagaaggatttgtttatggaaccctggcttggaaccagaaggccggtatgctcatgtcgatgtgtctaagtca

SEQ ID NO: 214633 - DNA, 541 bp, Homo sapiens; identical to SEQ ID NO: 202786
  chr11:129148499-129149040
  hypo

SEQ ID NO: 214634 - DNA, 809 bp, Homo sapiens; identical to SEQ ID NO: 202787
  chr11:129149096-129149905
  hypo

SEQ ID NO: 214635 - DNA, 79 bp, Homo sapiens
  chr11:129207798-129207877
  hypo
catggagttggagtgcgccaccctcctggcagcacatggatgcattcactaatccagaaggtctctgaatactatcatt

SEQ ID NO: 214636 - DNA, 216 bp, Homo sapiens; identical to SEQ ID NO: 202789
  chr11:129765560-129765776
  hypo

SEQ ID NO: 214637 - DNA, 288 bp, Homo sapiens
  chr11:129775501-129775789
  hypo
aggaaaaacccgaccgagtagcgtagcttaccgaagtaaccgccttcacctggccagtagtaactggagttgccacaccactgtctgtaatcacaaactgacccggaggaagcgtcatcatttgaatctcagatgctaaaaaacaggaaatattcatagttcagtggtctcagattttaacacaagtcttagaaacaaaaacataaccagtagccacagtccgcactgatttgcttgccatgagagtctcacaatgatgtgatttcttggtgccgtgaaagcatctct

SEQ ID NO: 214638 - DNA, 125 bp, Homo sapiens
  chr11:129785494-129785619
  hypo
ccttaagagattcctcgcatggcggttttgaccttagctttagtcagaaactccccctaccttgctgctgtactgcttggagcagtggggacagcagacgggaggggtggcgatggtgcccgtca

SEQ ID NO: 214639 - DNA, 73 bp, Homo sapiens
  chr11:129802032-129802105
  hypo
ggtgatttccaggcggataaattttggaggacgccccggccgtcgacctggaccgaatcgcctcttgcctcgt

SEQ ID NO: 214640 - DNA, 147 bp, Homo sapiens
  chr11:129803839-129803986
  hypo
acccttcagccacgcgagcatctccagttcaatccttccggtgctttcgtgcagctctgcatcactgccttgatgttctctccccttcttccacagcatacgctccaaggtcatccactggaaccactccctcgtgcgtgctctcag

SEQ ID NO: 214641 - DNA, 98 bp, Homo sapiens
  chr11:129859713-129859811
  hypo
aacagtgtaactactcgttcactctacgactcctgaaacatacagtctttagttcaaacagactgaaccaagcctcagacacaagattaagaagaaaa

SEQ ID NO: 214642 - DNA, 190 bp, Homo sapiens
  chr11:129902831-129903021
  hypo
ctggagaacggctcgatgcacagggcctcaaaggcgtcgtgtgcccggaaggccagccccactgtggctggggcctgcggccgtgccgtttggctggtgaagccacactcgcccagtgtcttgccatcatccaagagttggtagtccttgtacagccgctgctcgtcgggcggccgcttgaggattccct

SEQ ID NO: 214643 - DNA, 48 bp, Homo sapiens
  chr11:129993504-129993552
  hypo
agctgtctgctcccaggaggcgatgacggggccctgccgggccgtgat

SEQ ID NO: 214644 - DNA, 197 bp, Homo sapiens
  chr11:129993759-129993956
  hypo
gtggtgtccctgcccactcgggtgtttgctgtcggtcgtcttcccctcatctttgtgctttctagatctaggctttgctctcctgccggcagtggtaagctcagttctcgtgtcctgtgctcaccgtgtgtctggtggtgcttggtggtgatggtgcgtacccaccttggtatagcgggcagcacagccaggggctt

SEQ ID NO: 214645 - DNA, 95 bp, Homo sapiens
  chr11:130059523-130059618
  hypo
tggcaggcccaggtgtgccccgagccgcccatgtgtcctggagtcgctctgggcgcacgtgggggaaatggggcccagagctccgcctcaggctc

SEQ ID NO: 214646 - DNA, 67 bp, Homo sapiens
  chr11:130059738-130059805
  hypo
cccgcgggcgcgctccctgaagtcctttgtggtcacctcagtggtggctttccgtgagtccgagggc

SEQ ID NO: 214647 - DNA, 249 bp, Homo sapiens
  chr11:130060407-130060656
  hypo
ggcttccctgacagcccctaccccgctcatgcccgctgccagtgggccctgcggggggacgccgactcagtgctgagcctcaccttccgcagctttgaccttgcgtcctgcgacgagcgcggcagcgacctggtgacggtgtacaacaccctgagccccatggagccccacgccctggtgcagtgagtaccccggggggcgggtagggctgtgggagcttggcggctgccctgtagggggccagcttct

SEQ ID NO: 214648 - DNA, 269 bp, Homo sapiens; identical to SEQ ID NO: 170301
  chr11:130067921-130068190
  hypo

SEQ ID NO: 214649 - DNA, 149 bp, Homo sapiens
  chr11:130079179-130079328
  hypo
gccagagcccactgagtagacgcggattacccgtttgtcagccccgggcatctgggctgttccagagttttctagtccaatgacccgtggggagcgtctcgaatgacgctgccctcgaagcagcccggctctcagccccgtcctgccct

SEQ ID NO: 214650 - DNA, 451 bp, Homo sapiens
  chr11:130079388-130079839
  hypo
cacctgcgagaacctcctgccgcagcagatcacgccgcgcatgatgtgcgtgggcttcctcagcggcggcgtggactcctgccaggtggcccccggggcaggagggcggcaggtgggccccgggagaggcgggactggggactcacggcagggcttgtctccgcccagggtgattccgggggacccctgtccagcgtggaggcggatgggcggatcttccaggccggtgtggtgagctggggagacggctgcgctcagaggaacaagccaggcgtgtacacaaggctccctctgtttcgggactggatcaaagagaacactggggtataggggccggggccacccaaatgtgtacacctgcggggccacccatcgtccaccccagtgtgcacgcctgcaggctggagactggaccgctgactgcaccagcgcccccagaacatacactgtg

SEQ ID NO: 214651 - DNA, 44 bp, Homo sapiens
  chr11:130264261-130264305
  hypo
tgcgcatttacggagcgtccactatgggccgtgctgacccatta

SEQ ID NO: 214652 - DNA, 165 bp, Homo sapiens; identical to SEQ ID NO: 202792
  chr11:130319352-130319517
  hypo

SEQ ID NO: 214653 - DNA, 124 bp, Homo sapiens; identical to SEQ ID NO: 202793
  chr11:130319633-130319757
  hypo

SEQ ID NO: 214654 - DNA, 81 bp, Homo sapiens
  chr11:130356098-130356179
  hypo
cctgctggcggctcgcacctcagagcctgcgtgggccgcggctgcacccgagtcctctgcttcatcgaaagagactgactt

SEQ ID NO: 214655 - DNA, 143 bp, Homo sapiens
  chr11:130781407-130781550
  hypo
gggagcagagaaccttgaaacggcattctcctccccgatccctcccataaaccaacaggccaatcagcgtggctcgacgtgggaagcaagcgggcagtaggggttggggaaactcctgacttttgatgaactttcgtagatct

SEQ ID NO: 214656 - DNA, 200 bp, Homo sapiens
  chr11:131648918-131649118
  hypo
ctggaaggaagcaaacggcaccattgtggactgccgatgggggctacgtggccaacaaccacatcacagtaagcatctaggaactgggagtggccccagctgacagctcataagatcacaaggacctcagttccaacgccacagaaaatgaattctgcccacacaaatgagcctggaagaggattcgaaacctcaggtga

SEQ ID NO: 214657 - DNA, 191 bp, Homo sapiens
  chr11:133703493-133703684
  hypo
cccactccgcggccgcgcggcgccctgatcgcgcgtctcaggccccgctggaacccggggcctccctgcccgctccactccttcccgcggcgcacccccgccctccgcctgcccctgccctgctggccccccgccaggcagcctctcccgcatcggagaccacccgcccggttttcatgtcccggtttggc

SEQ ID NO: 214658 - DNA, 641 bp, Homo sapiens
  chr11:133734782-133735423
  hypo
ccaaagacctggccgctctggttggcgccctgcgcgtagcccatctgcagggacatgaaagagttgttacacttgtcggttcccagcttggtgtcatagatgtaccgccgggtcccgggagccgtcgtgcccacctggctggcacacttgtttgcacccatctggaggctgatggtcgagcggtccatggggggcaatacgtggttcttggggtcatagagatgcctcctcgtgctgtacgcggtcatgcgggactggctggtgcatttgtgggtgcccatctgcagcccgatgacgcactggcgggcattcatggtggcgtcctcaaagtcccactcctgcttctccgagtgcgtgtcaccgatgtccgcccctctctgcggccccttagtcttggccttccctgccagggcgagaagagacacctgcacctgcatcgtgttcccactctcagacaggtcgttggcctcaaacaggtccacggggttcatgccgtaggttttctagctggtgccagttctgcacggagcggttgatcttggggtctgagcccggctgcagcttgttcatgagtgtgcgtaagataatccaatccttcaggccctaatggaagtcgggacgatggagaggccagtgagtcc

SEQ ID NO: 214659 - DNA, 113 bp, Homo sapiens
  chr11:133777670-133777783
  hypo
ggcaggatccagagcgtcccaggccccagcagccagaggcgccctagcttcacctgagctcatccccctgcagctcaggtccaccggaggacgaaggccccggggcagagaag

SEQ ID NO: 214660 - DNA, 294 bp, Homo sapiens
  chr11:133777845-133778139
  hypo
taatcaatctggagaattagctcccacaaaagcaaaggaggatccaatcagccgctgtggaacagcactgcacagagtgctgagccggggacggtataaatagagccggcagcttggcgctagcacaggtggctccgcagtggggagactttggccacagagctcacggcctggctgggcggaagggcgccgacggatgcgctggacatgtgcaccagaggcttgctttagccccgcggctgagttagcctctactcctgcagcgtgagccacgctggaaggaagaaagatgca

SEQ ID NO: 214661 - DNA, 35 bp, Homo sapiens
  chr11:133790244-133790279
  hypo
aggtctgtcctgccacttggcggcggggggcgctg

SEQ ID NO: 214662 - DNA, 919 bp, Homo sapiens
  chr11:133790369-133791288
  hypo
aggtggggggcagtcctcgggggaggccggccttgggctgcagactctcgggcacatcacagggtggcagctggtgggggaacatcatcgctggggtctccagccccccgaaggggaattctggccggccccagggctcaggggagcgccctcctgtaggtgtctgagtcaagggcagcgtgctgttggatgcattctctccattctcctcggggatggtggggtggccaaagggcccctcggtgggcaggggcggggacgacatgacggagctcagggggctgcccacttctggcacgtagaacgggggcggctccacctccccagggctgctgctgctgaggtacccataatactggccatggtggaagggccggggggcagggggccgggcctggcctgtggcctgaagccgaccttccaggccaccggggccctccagcccgcggggctggaaccgagggctgtatgctggtggtggcaggtaggactcctggctggatgacagaggggtgagctgggacttcagggcggccacagatgtgggcaccagtgggtcctcgttctcctcgtccgactggcggaactcggggtacatgtccgtctcctcggcgaaggggaagccctcgatgcgcctgctcttcagcgagggctccatctcggcagggtccatcacgaagcggccgtcagggcctctgctgatgagctcgatgggcgtggtggcctctgcctcggcctctgccttggccacgctgtacttcttgctgctgatggcccgcttggtcttcttgtacagcgacagctccttctcacgggtggggctcagcatcctcttggccgcgggctggccctggtcgtcggaggattctgacggcgctcggagcgtgcggatgctctcggggctcaccttgccagagga

SEQ ID NO: 214663 - DNA, 183 bp, Homo sapiens
  chr11:133799603-133799786
  hypo
tggttcccaggacacgttggcagttgtcatggagacctggacccggacactgcccggggcatgggggctggtgcctggagatcaagtggagacctctcagactgaaaagaactcagccacgtggctgggtgcccaccgtctggctgtggggaacctgagaggctgaagcgcatggcagcggag

SEQ ID NO: 214664 - DNA, 219 bp, Homo sapiens
  chr11:133800201-133800420
  hypo
cctctgcttcgaggaacctacactagagaaaccccagctcgcacctcccgagttgtgaaggacgagctgtgcagaccacttggaacagaacctaaaactggtggtaaaggctccaaaagcattggctgtgactgtgattatagccgtcaggacccagaaggacaggctgagagggcccaggcgaaggtcctgggacacgcgcttcgggcaatcggaaac

SEQ ID NO: 214665 - DNA, 100 bp, Homo sapiens
  chr11:133804995-133805095
  hypo
agccacccaaggggagaggccgcggacgccagagggagcaggcgcaggagctggagcacatcgcccccgacacagacgcggtgtggaaaggcagggagta

SEQ ID NO: 214666 - DNA, 219 bp, Homo sapiens
  chr11:133805692-133805911
  hypo
cagaaggggatcttgccgcagacacacagtcaccgtcactgccccagatgtggcatggagagcccatgcccctggcatccccagggcccctccatgcagaccctggccttggcatgtgagacacacggaccagactgcccacctcccccagctccaagagccacgggcagcctgcccgtgcaatttctgctcaggggccctgcccgtgggggctggggt

SEQ ID NO: 214667 - DNA, 36 bp, Homo sapiens; identical to SEQ ID NO: 202801
  chr11:133938736-133938772
  hypo

SEQ ID NO: 214668 - DNA, 175 bp, Homo sapiens; identical to SEQ ID NO: 202802
  chr11:133939437-133939612
  hypo

SEQ ID NO: 214669 - DNA, 187 bp, Homo sapiens
  chr11:134015727-134015914
  hypo
gaagctgaaagcaagcgagcaggtgtcgacctagttctggacccagctggctgtgctctcagaaatcggccccatgatgggtccgattatttacttgtcattccctgaaacaggtgttcactgctgttcacaaggacgactctgggcagtactactgcattgcttccaatgacgcaggctcagccag

SEQ ID NO: 214670 - DNA, 138 bp, Homo sapiens
  chr11:134023320-134023458
  hypo
gttgtccgtgggacgtaggcagggtgtccacatcagtgtcccagcggcggccctcagacctccactggaccctgtcccagggcctggcagtgttgagggcccctcctggggatgctcctttccgtctctctgaccccc

SEQ ID NO: 214671 - DNA, 35 bp, Homo sapiens
  chr11:134071993-134072028
  hypo
ctccaatgcctggaacgcatcgggaaggaccagat

SEQ ID NO: 214672 - DNA, 97 bp, Homo sapiens
  chr11:134083475-134083572
  hypo
tgctgggactacaggtgtgagccaccgtgtgtggcctcgtctctcttaaaaaaaaaaaaaagaaaaagaaaagccatgaccacgtgacaggcagtct

SEQ ID NO: 214673 - DNA, 178 bp, Homo sapiens
  chr11:134088871-134089049
  hypo
ttaatacatgcaggacgcttagaacaaaacctcatacacactctaccaaacatgttcaaactccactgctgaacctcacgtaaagctacccgtgacctacccttactctaccttaccatcccgttccaccacactttttctgtatgcctcttgacacttcctgcgtgttcccattggg

SEQ ID NO: 214674 - DNA, 386 bp, Homo sapiens
  chr11:134212673-134213059
  hypo
tgcggctccgccatcgacagctggggctgcaggccaagggctggaacttcatgctggaggattccaccttctggatcttcgggggctccatccactatttccgtgtgcccagggagtactggagggaccgcctgctgaagatgaaggcctgtggcttgaacaccctcaccacgtaggtgctgcccctgtccccccggagcctggttcctaagcagggcgcctggtgtctgcatgcgaaaaaatataagaggaaccggcccaggtcctctgcccagggcgagagagccagggtctccctcctcctccccaccacagagctcctgactcatgggcgccaagggacatgaaatggatgtgaggtctagaggaaccgcagtagcaatgtc

SEQ ID NO: 214675 - DNA, 386 bp, Homo sapiens
  chr11:134228005-134228391
  hypo
ccagcagatgatctcgctgtctatccacttccaaaagatttcagcggaaataaacagtcttggcataatatctgcagggaagattacgagaagacacctctgttgggatttttgatccaaaagatcctagcacctcagcacagagcctttggctctgggttcaggcccacgttgccatgggccctgtaacctgcgatgcttgacttcacgcctccgaggcgcgtctctactgtgaagacagcaactgcaaggctcgcgtaggacagtctgtgtatgagcggagggcctggcgtggcagtgactgctctgcggatgtcaggggacgctctgagtggtgattgtcgtcactgcccctcaagcacagcgtttcttccacttcactctct

SEQ ID NO: 214676 - DNA, 420 bp, Homo sapiens
  chr11:134252615-134253035
  hypo
ggctgccttgggctccaggtcgttgagggtgacaagttctcgaaggaggctgctttcctggtagcctcccttcacacctcgcagcttgaagtaggcctggcttcgctgcagaatgagccgcaggttgacggcaaatccagccatgtctattgcaaatggccggtgggggtcaaacaccgtcttccagccgaccaccttccctgccccgttcacccgtggggcctcgtaccgcaggccacccacgaaggcgacgggccacacggacaccctcctggtgctgcgcatctacaaggggggggtccagagtcagggcgccggcactgcagatgaggacggccgcgcgtgcccaagggaggcgacatccttcagccacctctatctatgcccatggccagccgcggccacctagggggtgtccag

SEQ ID NO: 214677 - DNA, 235 bp, Homo sapiens
  chr11:134458242-134458477
  hypo
acctgtgctggattccctgctgagagctgcacctgtgatgtgaacctgtgctggattccgtgccgagagctgcacctgcgatgtgaacctgtgctggattccctgctgagagctgcacctgcgatgtgaacctgtgctggattccctgccacgtgctgcacctgcgatgtgaacctctgctggattccctgccgagtgctgcacctgcgatgtgaacctgtgctggattccctgc

SEQ ID NO: 214678 - DNA, 197 bp, Homo sapiens
  chr11:134608740-134608937
  hypo
ctgtgtgtctctctgtgcgtgtctgtgtgagtccgtgtgtctctccgtgagtgtctgtgcgagcctgtgtgtctctccgtgcatgtctgtgtgagtctgtgtgtctctccgtgcgtgtctgtgtgagtctgtgtgtctctccctgcgtgtctgtgtgaatctatgtctttctgtgcgtgtctgtgtgagtctgtgtg

SEQ ID NO: 214679 - DNA, 185 bp, Homo sapiens
  chr12:287240-287425
  hypo
gaagcaagctctaccagcagcgtgtcctggaagcctgcctgcctgcctgcccgtctgcacaggtgtcttgatccagccctgcgtcttcgagcccctgtgccaccggtccccacggcccgccaggagtctctttgtacccactaggcttccctgatgaccatctgtctgtccgtccctgtttttgc

SEQ ID NO: 214680 - DNA, 271 bp, Homo sapiens
  chr12:417387-417658
  hypo
ctcttctgtagggtgcggtacaaagatggcatgccttgaaatcaagcaacctgggtacaaagcctggctcttgtacttttagactgttaatatggggtacaagtttcagaacgtccgttttctgaaaaatgagaatactaccaaccgtattttgctgttttacggattaaataagataacatatgaaagtgcctaacctggtaccttgcacaaggtaaacactcttaaagtattagtttcctatcacctcgtaattcattccctggggcaa

SEQ ID NO: 214681 - DNA, 187 bp, Homo sapiens
  chr12:646784-646971
  hypo
attaccttgagtaaataaatcgttatgtcaagatttccgagtagcacggtgctttggggatgaaaattttaaatttgagtttcctattttacaacttgtttagaacccagcgtctttagtctcgaggccctgcggacacagattacttttcttggctgggtggtacgggctagctcattgtcttcat

SEQ ID NO: 214682 - DNA, 108 bp, Homo sapiens
  chr12:658733-658841
  hypo
gctggcagagggggccgaaggcagatgaatcgtgaagccaccgctgtggcgggggccagagggagtgtggctgcgcacatcctacaccgtcgccgctggagtcaggag

SEQ ID NO: 214683 - DNA, 91 bp, Homo sapiens
  chr12:667201-667292
  hypo
gtggaaactttgaacgctcagctggacttcaggctggcatagacctcgtgaaggtaaagggcctggatggggcctgcgagatggaattcaa

SEQ ID NO: 214684 - DNA, 148 bp, Homo sapiens
  chr12:670522-670670
  hypo
gcctggacgtggagcgtctctccctcaggaatttcttccatcatttccattccaagcgaggcatgtggagccgtcgccagatgaagacgctgtagccggagggtgtccgcggggcccagcactccccgctctggactagcagtggctc

SEQ ID NO: 214685 - DNA, 209 bp, Homo sapiens; identical to SEQ ID NO: 202807
  chr12:694940-695149
  hypo

SEQ ID NO: 214686 - DNA, 38 bp, Homo sapiens
  chr12:750707-750745
  hypo
ctaaagaaacaggctagggccgggcgcggtggctcaca

SEQ ID NO: 214687 - DNA, 120 bp, Homo sapiens
  chr12:751045-751165
  hypo
tctcttctaacactgccctggagctaggacatttcctagactggctcagaaaagacctgtctttgaggacaatgccgctttagggtagaatctagcggaacaccacctttcgacatggtc

SEQ ID NO: 214688 - DNA, 206 bp, Homo sapiens
  chr12:934133-934339
  hypo
tcaatatgcttcacccgtaaacccttcagtatgcatttcgttagagttccagtatttgtgtactttatttttcttttacctccaaacagcatcaggatagaataaattattattgtacgattgaatgagttttgacaaggcattcattcgtgtaaccaaaactctcaagatagagaacatttccatcatatcggaaaatgccctta

SEQ ID NO: 214689 - DNA, 237 bp, Homo sapiens
  chr12:939093-939330
  hypo
ctctgcttctcaccccggtgagtaacgtctgaagcttctgctcgcattgagtctgaatcgttcttttaatttaaggtaccccagagttcatggcccctgagatgtatgaggagaaatatgatgaatccgttgacgtttatgcttttgggatgtgcatgcttgagatggctacatctgaatatccttactcggagtgccaaaatgctgcacagatctaccgtcgcgtgaccagtgtaa

SEQ ID NO: 214690 - DNA, 279 bp, Homo sapiens
  chr12:1026128-1026407
  hypo
gcaggaggagccaaacaatttcatgttctgtgttagtgaagttttgataaaaaggaatccttctttggttttgacttagggcagatgttctgtaaaatcgcatttgaatctttcctgggctgctgggtctgtctttgctgcctccttgtcctttttccacggaaatgagcacacacagtctctgtggaggtctgtaccttcccaaccctttctgccagggccacccctgcaaatcgcgctcgtcactgagggagcctcgggcacgctgtggcatcacga

SEQ ID NO: 214691 - DNA, 99 bp, Homo sapiens
  chr12:1411786-1411885
  hypo
catattgtaataaggcgagtcacgcaaatttattggtttcccagtgcttataaaagttatatgtaagcagggtggaatgggtcacgcctgtaatcccag

SEQ ID NO: 214692 - DNA, 53 bp, Homo sapiens
  chr12:1607425-1607478
  hypo
gctgtggccacctcccggggaggacagtctgctggggacagctaagcccagtg

SEQ ID NO: 214693 - DNA, 228 bp, Homo sapiens; identical to SEQ ID NO: 202809
  chr12:1639666-1639894
  hypo

SEQ ID NO: 214694 - DNA, 115 bp, Homo sapiens; identical to SEQ ID NO: 202811
  chr12:1640206-1640321
  hypo

SEQ ID NO: 214695 - DNA, 287 bp, Homo sapiens; identical to SEQ ID NO: 202812
  chr12:1640476-1640763
  hypo

SEQ ID NO: 214696 - DNA, 54 bp, Homo sapiens
  chr12:1738021-1738075
  hypo
tcaagaattggctcgcatctgtctgccaggacagagagcgtcctgagggggctg

SEQ ID NO: 214697 - DNA, 120 bp, Homo sapiens
  chr12:1840409-1840529
  hypo
tcttattatgttgtctaggctggtctcgaactttctcccgcttcagcctcccaaagttctgggagccactgtgctgggccagattcctttttttaaattgtgggaaaatacacgtaacat

SEQ ID NO: 214698 - DNA, 180 bp, Homo sapiens
  chr12:1840589-1840769
  hypo
atgttgtacaatcatcacactacctagttccagaactactttatgatcccaatcagaaactatgcgcattatacaataactcctcattgttctcttctcccagttcctggtaagttctattacactttctgacgctatcagtttgcctgttctaagtatcatataaatggaatcatatag

SEQ ID NO: 214699 - DNA, 495 bp, Homo sapiens
  chr12:1943596-1944091
  hypo
gagcctgctaagcccaagcccggggctgagccggagccggagcccagcacagcctgcccacagaagcagaggcaccggccggcgagcgtgaggcgagccatgggcacggtgatcattgcaggggtcgtgtgcggcgtcgtctgcatcatgatggtggtggccgctgcctatggctgcatctacgcctccctcatggccaagtaccaccgggagctcaaaaagcgccagcccctgatgggggaccccgagggcgagcacgaggaccagaagcagatctcttctgtggcctgagcgcccatccccacccggccaggtaggaagggcggggagagcacacggcattgctcagccacagctcccaccttgacccggcgctggccactgcctccccgagtccaccctcctccccgccctccagcagacaagccacaccgggttctctccctgcactttcgaggctccctgaaagccaccgtgctgggggctcctgctgat

SEQ ID NO: 214700 - DNA, 196 bp, Homo sapiens
  chr12:1992047-1992243
  hypo
ggcctctgtccagatgatgtcgtggtcgtggttgatgaccatggggcggctgagcacgtgcaggtattccatcacgttctcctgggtgtccgccagcgttgagatctgcgtgtagtagcctgcggtggggaaggccgcgtgggtgtggaaggcagggcttccctgggaacccctcgccagggcctgcaccctcccc

SEQ ID NO: 214701 - DNA, 96 bp, Homo sapiens
  chr12:2017665-2017761
  hypo
ctcggcctctcccacgcggtgttggagggcgtgctaggattgcctccggtggagccccggccccgtttcctccacacgaccgggttcacacctgaa

SEQ ID NO: 214702 - DNA, 213 bp, Homo sapiens
  chr12:2017874-2018087
  hypo
caactcccacgccggactgcgtcacggacatccccacgccaactcccacgccggactgcctcacggacatccccacgccaactcccacgccggacagcgttatggacatccccacgccaactcccacgccggactgcgtcacggacatccccacgccaactcccacgccggactgcgtcacggacatccccacgccaactcccacgccaggtt

SEQ ID NO: 214703 - DNA, 182 bp, Homo sapiens
  chr12:2023975-2024157
  hypo
tgccctctgccacccggtgggctctctggaagggggtgactgaccttctgcagcaagagagagcctgagtatttggtcacagtgttatacaggtccccgccgaaggtgtcagcccatagcttcactctgccaggcaatgaaaggacacgcgtatacacacacgtacacgcacaaatacagaa

SEQ ID NO: 214704 - DNA, 88 bp, Homo sapiens
  chr12:2046016-2046104
  hypo
tgggcaggctccccagcctgcgcggccacgcacctttacaccacgccgcgctgccccagcctgcgtgctgcaaacgacgcatttgacc

SEQ ID NO: 214705 - DNA, 87 bp, Homo sapiens
  chr12:2046134-2046221
  hypo
aaggcaggctgatttcttggagaagggaggaggcggcacatgtctgaatagagcaggccctgttagaaaacagaaggcttcattgct

SEQ ID NO: 214706 - DNA, 246 bp, Homo sapiens; identical to SEQ ID NO: 202818
  chr12:2144046-2144292
  hypo

SEQ ID NO: 214707 - DNA, 64 bp, Homo sapiens; identical to SEQ ID NO: 202819
  chr12:2144442-2144506
  hypo

SEQ ID NO: 214708 - DNA, 73 bp, Homo sapiens; identical to SEQ ID NO: 202820
  chr12:2163510-2163583
  hypo

SEQ ID NO: 214709 - DNA, 90 bp, Homo sapiens
  chr12:2595422-2595512
  hypo
tagcaggtaagaggggcaggcggctgcgctcccaaggccctgccctctatcgctcccagcacctttcccgctgctggctacaccaacatg

SEQ ID NO: 214710 - DNA, 250 bp, Homo sapiens
  chr12:2602368-2602618
  hypo
agatgacccttccccttgtgcgctggaaacgggccacgggcggcagtgccagaacggcacggtgtgcaagcccggctgggatggtcccaagcacggcatcaccaactttgacaactttgccttcgccatgctcacggtgttccagtgcatcaccatggagggctggacggacgtgctgtactgggtacgtagcatgagtgggcagtcagagggtgggggaacagcggccgtgaacccttccctgacacct

SEQ ID NO: 214711 - DNA, 157 bp, Homo sapiens
  chr12:2613883-2614040
  hypo
atttgcacctagagggtccccggatcctggcgctgcgtgggtcagtgtctcgggagccggggaccggcactggccgtgctcggttgctgagtgtgcctcactaactatcattccgttcttccaggtcaatgatgccgtaggaagggactggccctgg

SEQ ID NO: 214712 - DNA, 83 bp, Homo sapiens
  chr12:2778072-2778155
  hypo
ccagctttgcttctcttcgcctgcagcgcctggtctccatgaacatgcctctgaacagcgacgggacagtcatgttcaatgcc

SEQ ID NO: 214713 - DNA, 268 bp, Homo sapiens
  chr12:2788594-2788862
  hypo
ccttcttgcctacagagggccggtggcctgttcggcaaccacgtcagctactaccaaagcgacggccggagcgccttcccccagaccttcaccactcagcgcccgctgcacatcaacaaggcgggcagcagccagggcgacactgagtcgccatcccacgagaagctggtggactccaccttcaccccgagcagctactcgtccaccggctccaacgccaacatcaacaacgccaacaacaccgccctgggtcgcctccctcgccccg

SEQ ID NO: 214714 - DNA, 48 bp, Homo sapiens
  chr12:2788914-2788962
  hypo
ccctgccatccgggtgcaggaggtggcgtggaagctcagctccaacag

SEQ ID NO: 214715 - DNA, 89 bp, Homo sapiens
  chr12:2995016-2995105
  hypo
aggcgtgaaccaccgcgcccggcctactttgacttttactctgttaggttttccagaatgctgactcttctgcccggcctactttgact

SEQ ID NO: 214716 - DNA, 148 bp, Homo sapiens
  chr12:3030587-3030735
  hypo
tgagccaccatgcccggcaagaactgttgttttctagatgccagatgaatgagtttagaatgacctatttgaggagctcttgattgttaaatcgtggcagaggtgaatcatgaagccgggaataggtagagagcgtccattcttccaa

SEQ ID NO: 214717 - DNA, 523 bp, Homo sapiens
  chr12:3103769-3104292
  hypo
ctcacagatctttcacttcacgctttgcttcctgagcaactgattcgggctctggcactccccggagtgccttcatcccgtggcccacgcagttcttccactgctcaccggggctgtggttcctgtccccacaggtccaacgagcgctcctccaagcggagccttggagggcacggccggcaccattacctccaacgagtggagctctcccacctcccctgaggggagcaccgcctctgggggcagtcaggcactggacaagcccatcgacaatgacgcagagggcgtgtggagcccggatattgagcagagtttccaggaggccctcgccatctacccgccctgtggcaggcgcaaaatcatcctgtcggacgagggcaagatgtatggtaaggagcccgtcgggttcagccctgtacctgaggctgaggcaaggggccgacaccagaaccttggggttcctgccgggccacagaaggggatgaccacttggggctttgtcgggtggacactgctttcttcc

SEQ ID NO: 214718 - DNA, 196 bp, Homo sapiens
  chr12:3118651-3118847
  hypo
agggaagagacttaccgtgctcccaaagctcattggtggagctgccaggctctagcctggctcaccagctcccaggtctgtggccctacttcattcacccaccggtgatgacttagacccgagatgctgcatgggtggctttagttagacctggggtagaactgtcgaccgttcactggaccgccaaagcctttcc

SEQ ID NO: 214719 - DNA, 142 bp, Homo sapiens; identical to SEQ ID NO: 202827
  chr12:3129463-3129605
  hypo

SEQ ID NO: 214720 - DNA, 36 bp, Homo sapiens
  chr12:3147030-3147066
  hypo
tcccagccctagagccgggaccgggaccctgaggtc

SEQ ID NO: 214721 - DNA, 739 bp, Homo sapiens; identical to SEQ ID NO: 202828
  chr12:3186331-3187070
  hypo

SEQ ID NO: 214722 - DNA, 46 bp, Homo sapiens
  chr12:3215227-3215273
  hypo
catagcatgcacactcgctcttgtgcgcgcacgcacacacacacat

SEQ ID NO: 214723 - DNA, 178 bp, Homo sapiens
  chr12:3302735-3302913
  hypo
ctgacaagggctgaccgtagccggggggcagctttgctcttgggctttgagaggtgacacgcaacactagggaatgtgtaagggttcaccagagacttggagctggggcagcagtgctcctggctgtgctccgtggagcccctccaagaggcccagcccactccgaatgggcagaggt

SEQ ID NO: 214724 - DNA, 164 bp, Homo sapiens
  chr12:3389603-3389767
  hypo
gaacaacgtggggctgaagaacgcctggaacatcatccaggctgaggtgcgggctgggccgccctggtggggccaggcagggaggaggggtggcggccggtacttctagctgccttccccggtgacctggccgggcacctgtgctttctggattttagccggga

SEQ ID NO: 214725 - DNA, 111 bp, Homo sapiens
  chr12:3390417-3390528
  hypo
aacacggttcccgaccgctgctgcatggagaactcccagggctgcgggcgcaacgccaccacgcctttgtggagaacggtgaggctggggatggaccgcttgggtccaaga

SEQ ID NO: 214726 - DNA, 336 bp, Homo sapiens
  chr12:3392358-3392694
  hypo
gcgctctccagatatgacccctgcacccaccccccacagcctgccctaccccacctaccctgcctcagcctcggacttctcagtgggtggagtgccagggaggaggaggcacacggagacctggggctcggggcccctggattcctgcatctgcatatgcgtatttgccaaagacgacagggtgggctggggtgcgctccggaggaacccccggcactgatgggcttctgcccctgcccttcctcacactgacactttgtccccacatggggtggggagcagagtgcccgccccgtggagataccgccccagcgggggctgcgacatccatggcca

SEQ ID NO: 214727 - DNA, 200 bp, Homo sapiens
  chr12:3414073-3414273
  hypo
agggcagggagtcacgcggcctcacacatccctgtgtctctgtctgtgtgtgctggcgccgcacgactgctgggccacttgcttgtaaaatggggccaacaaaaggacctgcgccctgggccatcgtgcggactgaaagaggtgattcatggaaagcaattagaagagagcctggcgcagcacccgcagttaatgagaga

SEQ ID NO: 214728 - DNA, 102 bp, Homo sapiens
  chr12:3414306-3414408
  hypo
gcgcgtgcccgtgtcatttacatccatggggtgctgctgggaggcctgacgctagccctggctctgcagccactgctttctgggggtcggtctcctgcctga

SEQ ID NO: 214729 - DNA, 234 bp, Homo sapiens; identical to SEQ ID NO: 202829
  chr12:3600534-3600768
  hypo

SEQ ID NO: 214730 - DNA, 86 bp, Homo sapiens; identical to SEQ ID NO: 202830
  chr12:3601256-3601342
  hypo

SEQ ID NO: 214731 - DNA, 101 bp, Homo sapiens; identical to SEQ ID NO: 202831
  chr12:3601377-3601478
  hypo

SEQ ID NO: 214732 - DNA, 298 bp, Homo sapiens; identical to SEQ ID NO: 202832
  chr12:3601723-3602021
  hypo

SEQ ID NO: 214733 - DNA, 115 bp, Homo sapiens
  chr12:3901112-3901227
  hypo
tctgatacaacatctaaggacgctttggtctttgattcttatctttgaaagacgatggcaaggataaaggagttgtgtgtgtgcgcgtgcgcgcgtgcttgccattaatacagac

SEQ ID NO: 214734 - DNA, 105 bp, Homo sapiens; identical to SEQ ID NO: 202836
  chr12:4377789-4377894
  hypo

SEQ ID NO: 214735 - DNA, 244 bp, Homo sapiens; identical to SEQ ID NO: 202837
  chr12:4378558-4378802
  hypo

SEQ ID NO: 214736 - DNA, 284 bp, Homo sapiens; identical to SEQ ID NO: 202839
  chr12:4380196-4380480
  hypo

SEQ ID NO: 214737 - DNA, 153 bp, Homo sapiens
  chr12:4433845-4433998
  hypo
gcggccgctggcacgcactgtacagctgcgtcagctgctcgcaggacacgtcccgtcccgcagctggtccaagtctgtgccgcggtaggtgagtttgcggaaggtccgcttcttctgctctacctcggccatcttgtcggatcctcagaaaag

SEQ ID NO: 214738 - DNA, 460 bp, Homo sapiens
  chr12:4554341-4554801
  hypo
catgagcccaaacccccaagcgtcccgactggctgcagctggcactcactgtaggggttctcctcgtgggtcccgctgatccggccgtcggggagcacctggaggtgaaagccgatgcccacgttgcagtagagcctccgctgccgcttgatccccaccaaatagccactttcccagttcaccccggcaatctctccagctagcccggcgcgagacctggacagcagggtgccccagcccctcgagtccagcagcgtgttgttggcacgggtgcctgcaggcgagggcaccaccatgcccactaggatgcctaggaagacgagagcccacagcgtgccctgcagacgtcctgctccccgggacatagtgatgaacagtttctgtcccagggccatccaccttgcctctcaggcacgtggtcagaattaatggccctaaaaataccgcccttcttgttttt

SEQ ID NO: 214739 - DNA, 223 bp, Homo sapiens
  chr12:4672161-4672384
  hypo
ctctgacatgtcttaagcaacggacagcatcaccaatattaattcaagcttcactgtccaggcttaagtggagactcggcaaaagcaggaggccatttagtggaaaagttcaaaccgtggaaacaacaaatgaaaatgtcctttgtcttgcttgagcgatttgatcacctacatgtggtcggtatgtaaaacctaggagttcgaagaaattcttcaaacatgc

SEQ ID NO: 214740 - DNA, 125 bp, Homo sapiens; identical to SEQ ID NO: 202847
  chr12:4918558-4918683
  hypo

SEQ ID NO: 214741 - DNA, 176 bp, Homo sapiens; identical to SEQ ID NO: 202848
  chr12:4918713-4918889
  hypo

SEQ ID NO: 214742 - DNA, 583 bp, Homo sapiens; identical to SEQ ID NO: 202849
  chr12:4920225-4920808
  hypo

SEQ ID NO: 214743 - DNA, 322 bp, Homo sapiens; identical to SEQ ID NO: 202852
  chr12:5541693-5542015
  hypo

SEQ ID NO: 214744 - DNA, 500 bp, Homo sapiens
  chr12:5603567-5604067
  hypo
tgcccaaagctgaggctccccgagagccggagcggggagggcccgccaagtcagcattccagccggtgattgcaatggacaccgaactgctgcgacaacagagacgctacaactcaccgcgggtcctgctgagcgacagcacccccttggagcccccgcccttgtatctcatggaggattacgtgggcagccccgtggtggcgaacagaacatcacggcggaaacggtacgcggagcataagagtcaccgaggggagtactcggtatgtgacagtgagagtctgtgggtgaccgacaagtcatcggccatcgacattcggggacaccaggtcacggtgctgggggagatcaaaacgggcaactctcccgtcaaacaatatttttatgaaacgcgatgtaaggaagccaggccggtcaaaaacggttgcaggggtattgatgataaacactggaactctcagtgcaaaacatcccaaacctacgtccgagcactgacttca

SEQ ID NO: 214745 - DNA, 128 bp, Homo sapiens
  chr12:5726939-5727067
  hypo
ccacgctctctttccggaagcgttactacatgccttcagcaggtagttatttttttgttttcttccgttatgctttatatgtccctgtgttaactacccacacccacgccctttgaaaattgacaata

SEQ ID NO: 214746 - DNA, 161 bp, Homo sapiens
  chr12:6030343-6030504
  hypo
gcctgtctccccattggagacgatagccagcgagtggccagggaagccttgggccaggtgcaccccgcgtttccggtagtggtaggcaagtacatagtcgaccttcctctgactgtcatggaagtgcatgcggctaagacgggcctccaaggacacaggct

SEQ ID NO: 214747 - DNA, 40 bp, Homo sapiens
  chr12:6159830-6159870
  hypo
aaacaatcctccaggctgggcgtggtggctcatgcctata

SEQ ID NO: 214748 - DNA, 79 bp, Homo sapiens
  chr12:6220788-6220867
  hypo
atgagccaccccgctctggcctagcagtgctatttaaaatggtatcggtcgagtgcggtggctcacgcctgtaatccca

SEQ ID NO: 214749 - DNA, 85 bp, Homo sapiens
  chr12:6294432-6294517
  hypo
ccataaaaactgcagcgtgtatctctaagagatacggttttctcagaaacataaccatggccgggcgcagtggctcatgcctgta

SEQ ID NO: 214750 - DNA, 823 bp, Homo sapiens; identical to SEQ ID NO: 202854
  chr12:6309398-6310221
  hypo

SEQ ID NO: 214751 - DNA, 301 bp, Homo sapiens
  chr12:6344303-6344604
  hypo
ttagagagaacaagatggaacgcataacatttgttcgtggaggaagatgtgaaaatgccgtctctgcccctctctcgtctgcccattgtaggtgattaaggaagtccaggagttttacaaggacacctacaacaagctgaaaaccaaggatgagccccagcgggaaacgctgaaagccatccactatgcggtatgtcgccttggcaaagacaccctcctgcgctttctccggattgtgtctgcacacagggtgctgactgcaccagaccagtgcaaacattctaatcgtcttcttacaatt

SEQ ID NO: 214752 - DNA, 184 bp, Homo sapiens; identical to SEQ ID NO: 202855
  chr12:6387950-6388134
  hypo

SEQ ID NO: 214753 - DNA, 187 bp, Homo sapiens
  chr12:6388701-6388888
  hypo
cctctgtcttgctctccacccgatcctgacttgtaagccccgtttgcccgcatagtcccacaatgtacgaaatgaatggatggatgaggggctctggggtgcaagggagaaggaagcaggcagaaaagccttcctcatcggggggcttcctcctccactgtcatccgcaagggactaaggtcctgaa

SEQ ID NO: 214754 - DNA, 275 bp, Homo sapiens
  chr12:6391153-6391428
  hypo
tcaaaacaaaacaaaacaaacaaaaaacatgcatttggtaacacgggcatcttaaaaagccaaaacgatcacccaaagctccctcctttccacctccccctcactcacgactgcgccccgtttctctgctgtctttcagagcccagcttctccggagctgcctgctcacgaggctgcactccctctggcctctgccactccctcccggctgggctgaaactgctcttgtccaagtcaccaacagcctctgcgctgcctgccgagcacagtgggtg

SEQ ID NO: 214755 - DNA, 38 bp, Homo sapiens
  chr12:6396069-6396107
  hypo
ctgggattacaggcgtgagccaccgcgcccagcgagag

SEQ ID NO: 214756 - DNA, 105 bp, Homo sapiens
  chr12:6421423-6421528
  hypo
ccctccaaggactcgtggcctcccgcattgagacttatgggggccggcatcgagcctctgctcagagcactgctggcagactctatccccgaggataccctgtgc

SEQ ID NO: 214757 - DNA, 50 bp, Homo sapiens
  chr12:6422991-6423041
  hypo
caattgtgatggctccgcagatgaccagcaagctccgggagctgagaaca

SEQ ID NO: 214758 - DNA, 213 bp, Homo sapiens
  chr12:6425447-6425660
  hypo
gtccccagcctgattcgaacccaccggagcttttgggatgaggtgctggggcccaccctggaggagactcgggcctcgggccagcctctggaccccattggtctgcaaagtggcttcctgacggtgaggcctgtgaagggctgtgtctggatggggcaggactcggagccctcgggggtcctgtgtgtagggcatgcccacagtatgcaaatc

SEQ ID NO: 214759 - DNA, 214 bp, Homo sapiens
  chr12:6438303-6438517
  hypo
actgtcggcggcgcgcaggcagctgagaaaagctatgtacatcgaggggttagcaccaagtaggcggctgctagctcctgcttgcccctgcaggacccctcctttccagaaaaaagtggggttggaaggcgatctcgcaggacggtccttagagctgcccgcaggggcgcagcctcatctgagaagactgggcgcgggcgggagggcggcgggg

SEQ ID NO: 214760 - DNA, 158 bp, Homo sapiens
  chr12:6464388-6464546
  hypo
ctctgcaatctgaggcgctccttccaggcctcccagtcagcatccttgccttcctcatgctgatggaggtctccacgccaggccgcaagttaaagccaccatcatccataaaggcaggttcatcctgcccgtgcaccattacccgggccccagtcact

SEQ ID NO: 214761 - DNA, 92 bp, Homo sapiens
  chr12:6483476-6483568
  hypo
ccctggaccacccttccaggcgcaggcaccagggaaggggcagagggactaaccgacctgtagggattgagggtgcagatggtcactgcggg

SEQ ID NO: 214762 - DNA, 247 bp, Homo sapiens; identical to SEQ ID NO: 202861
  chr12:6493106-6493353
  hypo

SEQ ID NO: 214763 - DNA, 33 bp, Homo sapiens; identical to SEQ ID NO: 202862
  chr12:6493416-6493449
  hypo

SEQ ID NO: 214764 - DNA, 475 bp, Homo sapiens
  chr12:6678912-6679387
  hypo
tagtggttaggtgttaaaaccgttccatgtacttcactggtttaacttgacaaccgtatgaggtatacatgagatatctgcatcccaccaaagttaaacaacttgctcaaggtcacagagccattaagcggcggtgcccgcagttttgcagcctctcattttccacaggtggaagtcaacgttggcaaggcacatactgcacccacacacagaacccagttactcagtggggtatcaggacaccacgtagcccttaattttcaactatacaggtgccaggctcctgccgcacacactcatccacctgcacctacacccacactgaaccagagcactaaaatacaaggaaacttttattttcaattttcatcaagaaatttgctgtggttttttatgcttttggttttttcctttttttttttttccactttatttcatttagccgctcagtggctagagccgctgggttcctggt

SEQ ID NO: 214765 - DNA, 44 bp, Homo sapiens
  chr12:6831877-6831921
  hypo
aaaaaaaaaaaaaaaagataagcttggggcggggaggggtggat

SEQ ID NO: 214766 - DNA, 210 bp, Homo sapiens
  chr12:6857750-6857960
  hypo
aagaaaaaacttacgttaagagccaggagttggggtttaatcccctatgtcagtgagaacattgttctctttccatgtcaacttgtactaccaaaggcagctcctgcgggagcctgaactgagcctgccttgcagccgaggaccgtccgcaggtgcaccccaccctccttactcctgatacttacaagagaggctgagggcccggggccc

SEQ ID NO: 214767 - DNA, 265 bp, Homo sapiens
  chr12:7858583-7858848
  hypo
gggctgctcgactccgtcgtgcccccttgggcttccactgcaggaatgcaaggcgggtaaccttcaaagccaggtggaaacgtccggtttgaaccgcacatatgctagggtggagagtgagaacgaatgcaaagagaggctagcgttggggtggggctgccggggcaaagggacaggcccgggggaggcccgggccgccacggttagaaagcatggaaagagcttaagtaaaatagctgcgtgtcggcagggcgcggtggctcac

SEQ ID NO: 214768 - DNA, 32 bp, Homo sapiens
  chr12:8009570-8009602
  hypo
ggcacggtggctcacgcctgtaatcccagcac

SEQ ID NO: 214769 - DNA, 32 bp, Homo sapiens
  chr12:8017218-8017250
  hypo
ccaccgtgcccggctgagcttttactgttaag

SEQ ID NO: 214770 - DNA, 31 bp, Homo sapiens
  chr12:8146997-8147028
  hypo
taaaaacatgtggaaggaatcgcttgaactc

SEQ ID NO: 214771 - DNA, 31 bp, Homo sapiens
  chr12:8147088-8147119
  hypo
gcgagatttcgtcccaccaccccaaaaaaaa

SEQ ID NO: 214772 - DNA, 31 bp, Homo sapiens
  chr12:8180905-8180936
  hypo
ttgagatggagtctccgatctgtcgcccagg

SEQ ID NO: 214773 - DNA, 120 bp, Homo sapiens
  chr12:8181176-8181296
  hypo
cacgctcggctaaacagtactttttaaaaaattgtttatcttgtaataattcaaacacacacaaaagtagagaaaataagatttttttttttttgagacagtctcattctgtcactcagg

SEQ ID NO: 214774 - DNA, 32 bp, Homo sapiens
  chr12:8398731-8398763
  hypo
gcaagtgaagattacgacggatgcttaaaaac

SEQ ID NO: 214775 - DNA, 36 bp, Homo sapiens
  chr12:8423886-8423922
  hypo
tctcaaaaacaaaacaaaaaacggatgctatgtccc

SEQ ID NO: 214776 - DNA, 231 bp, Homo sapiens
  chr12:8757695-8757926
  hypo
accagaatccccgcccacttcttcccctcgagcttccccactaactcattcattccgcatcgcaatcccgaatgcgggctgctgcactgcgcctgcgcggaaggccctttcgcacctttgaaggtcatgatggctatttgcaccccggcgcggtgcagccgccgcagcccctcgggctcagccttgcggtcctcacagaagtagaggcgcgcggtgaagatcctcagactg

SEQ ID NO: 214777 - DNA, 183 bp, Homo sapiens
  chr12:8757966-8758149
  hypo
cacagtcgtagcaggggctccaggaggtgaaccaggtgacgcggtagcagcggccagggtctaggtcccagtccgagatgtagcggaggaagagcaattccacgtggcagccgttctggagagacagagaggaccacgctaaaattcactgacttttattgcggctctggtagccttagtcat

SEQ ID NO: 214778 - DNA, 150 bp, Homo sapiens
  chr12:8808409-8808559
  hypo
cgcttgagtcacatcgtctgaaaagaaaattagaaaacaatttctgagattctctgtctccctgccacccttgcacttccagtaagttaaattgcgaagcatagtgcccagcggagttgagtatcccacaaatgtttttccttgactgct

SEQ ID NO: 214779 - DNA, 33 bp, Homo sapiens
  chr12:8808923-8808956
  hypo
gtgagccaccgcgcccagcccataattctgata

SEQ ID NO: 214780 - DNA, 32 bp, Homo sapiens
  chr12:8890590-8890622
  hypo
tgagccactgcgcctggcccatgaattttctc

SEQ ID NO: 214781 - DNA, 180 bp, Homo sapiens
  chr12:8893949-8894129
  hypo
ggcgacagagcaagactccaccttaaaaaaaaaaaggagaatcagttcttcaatttgaagtataacttgatggaaggaaaaaataaatcaataaaatagaagaaccaggagggagcggcgcaagggttataaaactaactgttggggctgggtgcggtggctcatgcctgtaatcccagc

SEQ ID NO: 214782 - DNA, 300 bp, Homo sapiens
  chr12:9108768-9109068
  hypo
aaagaacagcaggtgaaaggctgtagccctcctgccctctcctggcaccaggcggccaccccacgttatgggaagtggtggtggcgccaggccagcccaggagccgtgggctggtgggactgaacaagttgggacatgcccccgttcggcaaagcttgtggacagcaggaatgaatgaactgtaacacaaacgagctgagactcttcggggtgcagacctcgggattccccaagccagagctgtaacatgctgtaacaccccccaccgcatttttttttctttttcttttgagacagagt

SEQ ID NO: 214783 - DNA, 199 bp, Homo sapiens
  chr12:9585208-9585407
  hypo
gacagcaactgtccacgggcccgagagggggttgtgtaatgttgagacccacttccacagggtggggtctataagaccctcccaagtactgcctactgtgtctcatcggaacactgtaacgttttacttttgttctccagaaagagcccgtaaaatcatctccaagccaacgattcggaccagacgctcacccagagag

SEQ ID NO: 214784 - DNA, 47 bp, Homo sapiens
  chr12:10264178-10264225
  hypo
cagacctcagcagcgcgagctggagcacagccgagcccaaggcgctt

SEQ ID NO: 214785 - DNA, 112 bp, Homo sapiens
  chr12:10267999-10268111
  hypo
cagcctaggccacagagcgagactccgtctcaaaaaaataaaaggatcattcaggtaaagcagataagaatcaccaataccttgaggtggaagcacgcctgacatggttgag

SEQ ID NO: 214786 - DNA, 32 bp, Homo sapiens
  chr12:10767896-10767928
  hypo
aagtgtgtaaaacatgccggtagtacagcaga

SEQ ID NO: 214787 - DNA, 44 bp, Homo sapiens; identical to SEQ ID NO: 202870
  chr12:11801643-11801687
  hypo

SEQ ID NO: 214788 - DNA, 427 bp, Homo sapiens; identical to SEQ ID NO: 202871
  chr12:11802787-11803214
  hypo

SEQ ID NO: 214789 - DNA, 198 bp, Homo sapiens; identical to SEQ ID NO: 202872
  chr12:11905383-11905581
  hypo

SEQ ID NO: 214790 - DNA, 165 bp, Homo sapiens; identical to SEQ ID NO: 202873
  chr12:11992073-11992238
  hypo

SEQ ID NO: 214791 - DNA, 382 bp, Homo sapiens; identical to SEQ ID NO: 202874
  chr12:12006113-12006495
  hypo

SEQ ID NO: 214792 - DNA, 546 bp, Homo sapiens; identical to SEQ ID NO: 202875
  chr12:12022357-12022903
  hypo

SEQ ID NO: 214793 - DNA, 147 bp, Homo sapiens; identical to SEQ ID NO: 202876
  chr12:12037378-12037525
  hypo

SEQ ID NO: 214794 - DNA, 101 bp, Homo sapiens; identical to SEQ ID NO: 202877
  chr12:12038859-12038960
  hypo

SEQ ID NO: 214795 - DNA, 2801 bp, Homo sapiens; identical to SEQ ID NO: 202878
  chr12:12043874-12046675
  hypo

SEQ ID NO: 214796 - DNA, 1481 bp, Homo sapiens; identical to SEQ ID NO: 202879
  chr12:12046855-12048336
  hypo

SEQ ID NO: 214797 - DNA, 188 bp, Homo sapiens
  chr12:12184633-12184821
  hypo
cttcatacatacagtcggtttttgactgaaacatcattacattcagcacgtgaatgtaattgcgatgaagtgaaagataaaggttatagttctagtgtatccacagtgctttaggagatgaactgttagggaaagccagaaaaatctccaccacggaaaaaatatttggcctgcgtcttgaaggataa

SEQ ID NO: 214798 - DNA, 40 bp, Homo sapiens
  chr12:12604522-12604562
  hypo
gcaacattgaactggctgggcgcagtggctcacgcctcta

SEQ ID NO: 214799 - DNA, 223 bp, Homo sapiens
  chr12:12618403-12618626
  hypo
cacaggctggacacccggccctgcggagaggacttgattaaacaaggtataatgtacttctctttcccatccacagatggatctgtctgtagaaactctgttcagcttcatgcaggagcgccagaaaagatacgccaagtatgccgagcagatccagaaagtgaacgagatgtccgccatcctccgccgcatacagatgggcatcgaccagactgtgcccctg

SEQ ID NO: 214800 - DNA, 263 bp, Homo sapiens; identical to SEQ ID NO: 202883
  chr12:12877458-12877721
  hypo

SEQ ID NO: 214801 - DNA, 176 bp, Homo sapiens
  chr12:12989449-12989625
  hypo
ctaggcagggaccgcgcctaatttgtggatattactaatatcatacagggcccatacgcagtaaatgttcaatatctgtcattttctgaaacctaagatgtgtcaggcggcttgacctgtattatttctagttctttgaacaatcccgaacagtcgatattattgttcccaatatg

SEQ ID NO: 214802 - DNA, 114 bp, Homo sapiens
  chr12:13035881-13035995
  hypo
aggagagctagcacacagtacgacttcaatcaatacttggttcttacctctgtcttccctgaggtgtttcattcttcagatgcctcaggaaaccatgagtgaggctgtattaaa

SEQ ID NO: 214803 - DNA, 447 bp, Homo sapiens; identical to SEQ ID NO: 202885
  chr12:13152998-13153445
  hypo

SEQ ID NO: 214804 - DNA, 100 bp, Homo sapiens
  chr12:13215310-13215410
  hypo
tgaaaaaaactgggatttgagttaactgtagaactgaagccatctggaaaacttcctatgatgctgtggtgcttacttatgtgaccgtgtgggggaagga

SEQ ID NO: 214805 - DNA, 174 bp, Homo sapiens
  chr12:13222376-13222550
  hypo
tcatcacctctaatgcgtgccaacttctatgctgaatgctggagacacaaaattaatgaagacagagtcactacatagctctaccatgcggtggaaagtgctgttgtggaggttcgcacaggggtccaccgggaacacagggagcagatggagtgcaggcgagctggagggcca

SEQ ID NO: 214806 - DNA, 603 bp, Homo sapiens
  chr12:13716472-13717075
  hypo
gttctgacccgtcaccgtcgtggagtagttgtgcagcttggagggacagctgcggcagaagttgcccccggaccggtcctcccactccacgttggtcaggttcttctcccaaggtgcaggtaccccgctgaccacgccgtgtttgtcgcccgtcccgtgcttgatgtgagacctgttggtacagggccctcctccgctgacggagtcgcgcttaaagtcatcactccgctccttgtagatgtcggtcaggtctacgtgctcccagtggggtgagttctcctttgttcggaactggtccaggtagaagtcccgtagcccttccttgtccctgaagtagcgcttgtggtcaggggagcggggcggtcggcgacggtaggccagctcgatctcgtcaaactccctgcgggacttggccgaggcaggccgcttcttcaggctgtccttatattgctgcttacgcctcttggcggcattgccctcgatgttcccataggtgacggtgtgggttgagatgtcagagacatcggagcggatcaagtcgtcgtggccactgtagcggtcgctcttgaaggagaatttgccgtacaggtcactgagctggct

SEQ ID NO: 214807 - DNA, 36 bp, Homo sapiens
  chr12:14721513-14721549
  hypo
acaaaaagaactaagccagccgggcgccgtggctca

SEQ ID NO: 214808 - DNA, 36 bp, Homo sapiens
  chr12:14721789-14721825
  hypo
gacagagcgagattcgtctcaaaaaaaaataataat

SEQ ID NO: 214809 - DNA, 87 bp, Homo sapiens
  chr12:14818119-14818206
  hypo
aggccgggcaacactgcgaggctccgtctcaggaaaaaaaaaaaaaaaaaaagctaaggaaagttgagattccggttaaatcttgag

SEQ ID NO: 214810 - DNA, 75 bp, Homo sapiens
  chr12:14818749-14818824
  hypo
caagttccagtcatgcatatcgtatttctatactatttcaaaggttgagttgctgaagcggcttcattgtctggg

SEQ ID NO: 214811 - DNA, 165 bp, Homo sapiens
  chr12:14818867-14819032
  hypo
cacagacgcaaacacggagcgggtcaagtagcggaaagtttaataggcaggaaagaagagaacagctcaccggtagagaggtaggagggctctgaagggaaaaaaccatgcttgtggtgggaagcagtaggttatatagggaggcttcaggaggcggtgtctgat

SEQ ID NO: 214812 - DNA, 240 bp, Homo sapiens
  chr12:14819092-14819332
  hypo
tggccctctcaccctaatcttttattatgcaaatgcggcctctacctggctggcgccatgacacccacacatgtggctttacccggccggcacaatgacacccccacacatggctacaaagaaaagggaggggaaatcgctatattgggtggacctggcttttagtacagctgcgggcattcatctacgcaagcttccagcttgcttatttatgcttgcagttcagcttttcaggctgct

SEQ ID NO: 214813 - DNA, 1112 bp, Homo sapiens; identical to SEQ ID NO: 202894
  chr12:15941609-15942721
  hypo

SEQ ID NO: 214814 - DNA, 196 bp, Homo sapiens
  chr12:16150422-16150618
  hypo
gctcagcaaggtgttcggtaaaaatacttgagttagggggcgttcttgaaatcatcagcttattctgcagtcatgactttaacggaatcgtatgcaaaagagtcattgttagaatgaggaaactacatatctaaagacagggaaatatagcatggaacttttttctctttttaaattttaacgtggctctaaaaaa

SEQ ID NO: 214815 - DNA, 86 bp, Homo sapiens; identical to SEQ ID NO: 202899
  chr12:19282247-19282333
  hypo

SEQ ID NO: 214816 - DNA, 840 bp, Homo sapiens; identical to SEQ ID NO: 202900
  chr12:19282363-19283203
  hypo

SEQ ID NO: 214817 - DNA, 249 bp, Homo sapiens; identical to SEQ ID NO: 202901
  chr12:19283425-19283674
  hypo

SEQ ID NO: 214818 - DNA, 275 bp, Homo sapiens
  chr12:19459372-19459647
  hypo
aggctgtagcatcggatacccacctcccacgaaccggttcctcttccccctccttgctgtgtgtttgatgtgttgaagcaggagggagaacgccgcgagcagcgccgtgagcaacactaccatcgtccccagcactgcggatccgggccctagcggcgggcccagtagcggaggtggtggcggcggtggaggcggcggcatcgaggtaataggtgactgatctccccgggcgctagctctgagcagatgcggactctcttcggtttcctaggcaa

SEQ ID NO: 214819 - DNA, 36 bp, Homo sapiens
  chr12:19539887-19539923
  hypo
gtcaaaatggagtggcgcccacgaaaaaaatccatg

SEQ ID NO: 214820 - DNA, 180 bp, Homo sapiens
  chr12:20704639-20704819
  hypo
ctgccctgagtgccggaatgatgccagcgaggtggtactggcgggagagcggctgagagagagcaagaagaaggcgaagatggcctcggccacatcgtcctcacagcgggactgggacaagggcatggcctgtgtgggccgcaccaaggaatgtaccatcatcccgtccaaccactacgg

SEQ ID NO: 214821 - DNA, 131 bp, Homo sapiens; identical to SEQ ID NO: 202908
  chr12:21681020-21681151
  hypo

SEQ ID NO: 214822 - DNA, 109 bp, Homo sapiens
  chr12:21847672-21847781
  hypo
ctggatggcctgggcgctctcctccgactgccccagccaaactccgtgtcagtctgccagtcggttggtggcttgttggcctgctggtgcttgtcggtgcgttcctctc

SEQ ID NO: 214823 - DNA, 139 bp, Homo sapiens; identical to SEQ ID NO: 202911
  chr12:22488705-22488844
  hypo

SEQ ID NO: 214824 - DNA, 252 bp, Homo sapiens; identical to SEQ ID NO: 202912
  chr12:24715505-24715757
  hypo

SEQ ID NO: 214825 - DNA, 42 bp, Homo sapiens
  chr12:25344062-25344104
  hypo
aaagtagcctcacacggtggctcactcctgtaatagcattcg

SEQ ID NO: 214826 - DNA, 259 bp, Homo sapiens; identical to SEQ ID NO: 202917
  chr12:25404339-25404598
  hypo

SEQ ID NO: 214827 - DNA, 206 bp, Homo sapiens
  chr12:25537194-25537400
  hypo
agtttccctgtaggtttaatgaggagaaaagaatctgccattacccaatggcctgaactaggagtaaagtgcttatacaaagattaatcattaagcgactttattataggatactgttgcaaacacgaggcaatgagaaaatgagcttaagtatcttgggttttcctaaaaagtatctcttacatgaggacacacaaaaaaacatg

SEQ ID NO: 214828 - DNA, 179 bp, Homo sapiens
  chr12:26398930-26399109
  hypo
ccccactgcatttgagagagcgaccaaatatgcaacttaaagctaacacacattggacgtgggagtccgtaggtacaacagaaataagcaccatcatcggccatgccgccggaacagttagaaacattcttcacctgctcaacctgaaaaaaggacccggctccagcttatcttggtaa

SEQ ID NO: 214829 - DNA, 165 bp, Homo sapiens
  chr12:26492034-26492199
  hypo
tccttccatcctgccgctccctgccctctccagccttttgggcaagccttttcttcctgatgcattgcgaatgtgtgatgtacgctttctagcagatgcatttgaggttaggtcttcgcaaccatgaaaacacagttataaattgttctcggagctaacccactc

SEQ ID NO: 214830 - DNA, 199 bp, Homo sapiens
  chr12:26966974-26967173
  hypo
cagctggaccatcatcgagccagccattgcaacagtaataaccatagtgtttttttctggagtttaggggaatgaggcactcttttcagctctggtgtaagaggacagaggtaaggctgcggcagatagcagccatgccataaacaaaacacctgcgcaagggcaggactaatgctgatgacgccgcagaatgaaggaa

SEQ ID NO: 214831 - DNA, 79 bp, Homo sapiens
  chr12:27742242-27742321
  hypo
tggccagttagacttggatccgtgcatcctcttgagccgtgaattttctggtctcaaagtcccaggctcaagcgatcct

SEQ ID NO: 214832 - DNA, 78 bp, Homo sapiens
  chr12:27742381-27742459
  hypo
atgtatttgacactataattaagagatactgagatatttcctattttaaaatacttcgtcctgctttctaatatatag

SEQ ID NO: 214833 - DNA, 114 bp, Homo sapiens
  chr12:27950701-27950815
  hypo
ttgaaacatgtgacgtccacattcgcaagcagcagatggtgtctgtggaagagaccatctacatcgtgggggggtgtctccacgagctggggcccaaccgcaggagcagccaga

SEQ ID NO: 214834 - DNA, 465 bp, Homo sapiens; identical to SEQ ID NO: 202923
  chr12:29301986-29302451
  hypo

SEQ ID NO: 214835 - DNA, 103 bp, Homo sapiens
  chr12:29373862-29373965
  hypo
ggtcttgtgtcccttctccccgattcttcccttggggcaggctgtccttatccacattgggctgccagcgcttgggaggggctactggcgcagtgtgtttact

SEQ ID NO: 214836 - DNA, 198 bp, Homo sapiens
  chr12:31255770-31255968
  hypo
gaggctgagggaaggggtagaacggagcagctggtgacgtgggtgatgacccgggaggtcctgacgtccacctgctgggctcttgtctcccccgcccaggtgtgtggtgatggtgggcatgcccttccccaacatcaggtctgcagagctgcaggagaagatggcctacttggatcaaaccctcgtgagtgaccccag

SEQ ID NO: 214837 - DNA, 36 bp, Homo sapiens
  chr12:31986810-31986846
  hypo
tgaatctgggccaagcgcagtcactcacacctgtaa

SEQ ID NO: 214838 - DNA, 39 bp, Homo sapiens
  chr12:32140933-32140972
  hypo
gctgggattacagacatgagacaccgtgcctggcctcta

SEQ ID NO: 214839 - DNA, 180 bp, Homo sapiens
  chr12:32142773-32142953
  hypo
aaactctgtctcaaaaaaaaagtcagttagcattgaaacatgcatatgggaaaaacttgcatcaatgaagaaatatactcttaatcagaacaggacaaataacctaaagaggagggaatgaagagcagtgagaggcctgacagtgggaaaacaatgcctctcgggttggaaggcagaaag

SEQ ID NO: 214840 - DNA, 142 bp, Homo sapiens
  chr12:32155239-32155381
  hypo
aagactccatctcaaaaaaaaaaaaaaaaaaaaaatcaagtagcttgctcggggttccataacacctcttccttctgtttctctggctttccctcagtccacatataaggcttcatgagagaagacacgaatggatataaac

SEQ ID NO: 214841 - DNA, 34 bp, Homo sapiens
  chr12:32831180-32831214
  hypo
ttttttatttatttatttatttatttggtagaga

SEQ ID NO: 214842 - DNA, 34 bp, Homo sapiens
  chr12:32831540-32831574
  hypo
actgctcacgcctgtaatcccaacactttgggag

SEQ ID NO: 214843 - DNA, 193 bp, Homo sapiens
  chr12:32864283-32864476
  hypo
ttatggctttaactacgtaaggctctgtatattgacggcattcaaatatctccagacttgtatatctagttgctattcgacatatacacttaaatgtctaatagacatttcaaactctaataccgaattcctgacctgttcctcaactagatttggtatttctatagtcttcccccatcgcaataaatggcaa

SEQ ID NO: 214844 - DNA, 349 bp, Homo sapiens; identical to SEQ ID NO: 202934
  chr12:33049652-33050001
  hypo

SEQ ID NO: 214845 - DNA, 136 bp, Homo sapiens; identical to SEQ ID NO: 202937
  chr12:33592092-33592228
  hypo

SEQ ID NO: 214846 - DNA, 59 bp, Homo sapiens; identical to SEQ ID NO: 202938
  chr12:33592320-33592379
  hypo

SEQ ID NO: 214847 - DNA, 115 bp, Homo sapiens; identical to SEQ ID NO: 202939
  chr12:33592401-33592516
  hypo

SEQ ID NO: 214848 - DNA, 682 bp, Homo sapiens
  chr12:34319319-34320001
  hypo
ccagatccatgaacacagtgcggggcacgtacctgccacctgagtgggaccggagagcattagcgaggggagggtcgccgttcccaggagagtggttggggaaggactggggtctcaccgctggcctcattgtagtacacgttgatacgctccagctgcaggtcactgatcccgtggtaggtgcctgcggagtcgatggcatgttcatcagagttcacctcccagaactgcaagagattggaggggccagacgagccagggctgagtcaggaggccaggacgccggaggcgccccagtccctctcccacccccacccgcacccccatccctaggccgcagtgtccctgaggtccacactggccgtctcgccagccggccagttccaccgcgtccccagcagggagcccaggggccgcaaacgcaggggcgccacccctgccactgccactaccaacatcttctctggccacccggcaggcccgagctgggccctcagagccccggctgccaaccttggcgccgatctggttcccgcactgcccagtctgcgtgaacgctatctccctcatggccaaggcaggattagggcggcaggagaaacgcgaggaggagcagacgcgcagtgacccagcccgccctccgccaacgctgaaatagccccacgcccacctccctcaacct

SEQ ID NO: 214849 - DNA, 205 bp, Homo sapiens
  chr12:34358287-34358492
  hypo
agactggggaaggactggagcgtcggaggaaagggggcctcccggaaagctcaaagtctgagcaggggatggaaaactctggcgtccccactcaacagcagggcggtgctgcggcgatccagtgcacgcccttgccgccggcgatggcgggaggctcttggaggccggaaagcgcagcgcagcggcccacagtgctccggcgtgg

SEQ ID NO: 214850 - DNA, 158 bp, Homo sapiens
  chr12:34358522-34358680
  hypo
ggctgaggggtccctgatccgagccccgcggcctccgagtggggatgaagcctggagtcaggcaggcgtggctgggccaggctcttgtgtcatccaggcatcactgccggtgtctatggccataccaccctgaaggcgcctgatcttctctggtctgt

SEQ ID NO: 214851 - DNA, 572 bp, Homo sapiens
  chr12:38548366-38548938
  hypo
agtgggccaggatcctcccacggatgacagtgttttcccggcagcccctgagccaggccctggagggtcgtggagtctctggcttgcaccaagggtgcgtgtgaagcccacgggggacaccccaaagcggcaagaaggcctccggggatagggaacaggacgccaggcttgaaacaggacgttgaggcagcacagggaaaaaagcggaaggccggagtcccccccacggatgacagtgccttccaggcagccactgcgccatgcccggggggcttgtgcagtccctgactcccacccaggctgcgtgtcgcacccacaggggtcaccctaaagcggcaagaaggccccagggggaagggaacaggacgccaggcttgaaaggggactttgaggtagtccggggaaaaacttcccacggaggacagtgttttccccgtagcccctgcgccagacccgggagagccatgcagcccatggctttcacccagggggcgtatcgctcccatgagggacaccccaaagcagcaagaaggcctccgggggaagggaacatgacgccacgattgaaatgt

SEQ ID NO: 214852 - DNA, 123 bp, Homo sapiens
  chr12:38548968-38549091
  hypo
caggccagggtagtcccacggatgacagtgccttcccggcagccgctgcgcctgtcctgggagggtcgtggattctctggcttgcacccagggtggcatcgcgcccactggaggcacccaaag

SEQ ID NO: 214853 - DNA, 166 bp, Homo sapiens
  chr12:38550987-38551153
  hypo
ggctgtgggttgaagtccttctaacaatgacgctgccttcctggcagcctctacgccctgcccaatagggttgtggagtcgcttgcttgcacccagggtgcgtgtcgcaccccagggggcaccccaaagcgccaagaaggcctccgggggaagggagtagaacgcc

SEQ ID NO: 214854 - DNA, 60 bp, Homo sapiens
  chr12:38551305-38551365
  hypo
ggggggacaccccaaagcggcaagaatgccccctgggaagggaacaggacgccaggcttg

SEQ ID NO: 214855 - DNA, 314 bp, Homo sapiens
  chr12:38553516-38553830
  hypo
cgggaaggcaacaggacgccaggcttgaatggggacgtttaggtagcctggagaaaaaagcagcgaggctggggtgatcccacgaatgacagtgccttaccggcagcccctttgccgggcatgcgggggttgttgattccctggcttgcacccagggtgagtgtcttgcccacggcgggcaccacaaagcagcaagaaggttcccgggggaaagggacagcacgtcagtcttgaagggggaagttgaggcagccccggggaaaaaaagcggggatgctggggtcctctcacggacgacactgccttcccagcag

SEQ ID NO: 214856 - DNA, 338 bp, Homo sapiens
  chr12:38553866-38554204
  hypo
gtcttgcaccccgggtgcgtgtctcacccacggggagcaccacaaagcggcaagaaggccactgggggaagggtacaggacgccagggttgaaggggatagtggagacagtccaaggaaaaaagtggcgggatggtgtcgtcccaaggatggccacccctgcgccgggccagggatggtcgcggagtccctggcttgcacccaggttgtgtgtctcgcccacagggggcaccccaaagcagcacgaaggcctccaggggaagggaagaggacgccaggcttggaaggtgacgttgaggcagcagggggtaaaaagtggcgggccgggccctcccacgg

SEQ ID NO: 214857 - DNA, 278 bp, Homo sapiens
  chr12:38554258-38554536
  hypo
tctggcttgcacccagaatcgtgcggcgcccacgacgggcaccccaaagcggcaagatatcccccgctggaagggaacaggatgccaggcttgaaaggagaagttgagccagtccggggaaaaaaatcccatggagaacagtgtcttcccggcagtctctttgccgggttcggtcgtggagtccctggcttgcacccagagtgcgtgtctttaaagcggggcatcctgttaccattctccgggggaattcttgccgccatggggtgccccctgagggc

SEQ ID NO: 214858 - DNA, 90 bp, Homo sapiens
  chr12:38595391-38595481
  hypo
gaccgggcagtgcgggaaccagatcggcgccaaggttggcagccagggctctgagggcccagctcgggcctgccgggtggccagggaaga

SEQ ID NO: 214859 - DNA, 34 bp, Homo sapiens
  chr12:38595561-38595595
  hypo
cagctggcgaggcggccagggtggaccccaggga

SEQ ID NO: 214860 - DNA, 91 bp, Homo sapiens; identical to SEQ ID NO: 202945
  chr12:40618249-40618340
  hypo

SEQ ID NO: 214861 - DNA, 43 bp, Homo sapiens; identical to SEQ ID NO: 202946
  chr12:40619048-40619091
  hypo

SEQ ID NO: 214862 - DNA, 60 bp, Homo sapiens; identical to SEQ ID NO: 202950
  chr12:41582147-41582207
  hypo

SEQ ID NO: 214863 - DNA, 89 bp, Homo sapiens
  chr12:42857519-42857608
  hypo
ctcaaaaaaaaaaagagcttgtaaagtgtgtgggccaattttggtatcttagaatacatacagaataattcaagcgtacaatatctttc

SEQ ID NO: 214864 - DNA, 36 bp, Homo sapiens
  chr12:46610346-46610382
  hypo
atcctggccaggcgcggtggctcacacctgtaatcc

SEQ ID NO: 214865 - DNA, 36 bp, Homo sapiens
  chr12:46610622-46610658
  hypo
acagagtgagatgccgtttcaaaaaaaaaaaatcct

SEQ ID NO: 214866 - DNA, 237 bp, Homo sapiens
  chr12:47628809-47629046
  hypo
tgcaaaggaaggagctaggctgtgcgccctgggcgtcatgatccttctgcgggcctccgaagtgcggcagctgcttcacaataagttcgtggtcatcctgggggactctgtgcatagggcagtatacaaggacctggtgcttctgctgcagaaggaccgcctgctcactcccgggcagcttagagcaaggggggagctgaacttcgaacaagatgagctggtggacggaggccagcg

SEQ ID NO: 214867 - DNA, 141 bp, Homo sapiens
  chr12:47629208-47629349
  hypo
gaattcctgcctctgggacatctccaggtatggtccgaactcctggagaagctacctggagaacctggagaacctgttccagtgcctgggccaggtgctgcccgagtcttgcctcctggtgtggaacacggccatgcctgt

SEQ ID NO: 214868 - DNA, 111 bp, Homo sapiens
  chr12:47629379-47629490
  hypo
gcccaagctccggcggcagaaggccaccttcctgaaaaacgaagtggtcaaagccaacttccacagcgccaccgaggcacgtaaacataacttcgatgtactggacttgca

SEQ ID NO: 214869 - DNA, 264 bp, Homo sapiens
  chr12:47629544-47629808
  hypo
tggacgtgtgcaccgctgcctctcccagctgctgctggcccacgtggccgacgcctggggtgtggagctgccccaccgccaccccgtgggcgagtggatcaagaagaaaaaacctggcccgagagtcgaagggccgccccaggccaacagaaatcacccggccttacctctgtccccacccttaccttcccccacataccgccccctgcttgggttcccaccccagcgcttgccgctgctcccgctcctgtccccacagcctcc

SEQ ID NO: 214870 - DNA, 493 bp, Homo sapiens; identical to SEQ ID NO: 202958
  chr12:48576976-48577469
  hypo

SEQ ID NO: 214871 - DNA, 59 bp, Homo sapiens
  chr12:48745168-48745227
  hypo
cttgagagagcactgaggaggagtcacttattctgcctgaggggaagtcaggttgctat

SEQ ID NO: 214872 - DNA, 138 bp, Homo sapiens
  chr12:49065584-49065722
  hypo
gagcttcatgttccactttgcgattatgtaagtatcggcgcttcttctccttgagcagatgctgaagtcgtttaaactgatcaatatacaacgactgcaaacgaattagcttttcacgcataatcagggccacttctt

SEQ ID NO: 214873 - DNA, 335 bp, Homo sapiens; identical to SEQ ID NO: 202960
  chr12:49182447-49182782
  hypo

SEQ ID NO: 214874 - DNA, 295 bp, Homo sapiens; identical to SEQ ID NO: 202961
  chr12:49183035-49183330
  hypo

SEQ ID NO: 214875 - DNA, 38 bp, Homo sapiens
  chr12:49191468-49191506
  hypo
agccaccgtgcccggccgggtaatgttattttgacact

SEQ ID NO: 214876 - DNA, 481 bp, Homo sapiens; identical to SEQ ID NO: 202963
  chr12:49351242-49351723
  hypo

SEQ ID NO: 214877 - DNA, 60 bp, Homo sapiens; identical to SEQ ID NO: 202964
  chr12:49364178-49364238
  hypo

SEQ ID NO: 214878 - DNA, 319 bp, Homo sapiens; identical to SEQ ID NO: 202965
  chr12:49371614-49371933
  hypo

SEQ ID NO: 214879 - DNA, 41 bp, Homo sapiens; identical to SEQ ID NO: 202966
  chr12:49375529-49375570
  hypo

SEQ ID NO: 214880 - DNA, 176 bp, Homo sapiens
  chr12:49416383-49416559
  hypo
agattttctcccgccggttggccacctcgttccgaatgatggtgccaatgtactcgataaccattgtgtgcttttctaggtccttggctgcatagagccccaggccctggatacgggagcgagccaggtacacgttgttcttccattcggtgcgcagccgccggtactgagatgac

SEQ ID NO: 214881 - DNA, 250 bp, Homo sapiens
  chr12:49422761-49423011
  hypo
tgtgtaacacttggccgcctctcccccagcttcggacaacccaggtgaactgggcctggcccacatccagagtagcacatacctgggatgctggcccgaggaatgagggggatgacaggggagagggcccggtcctcttgctcccaccggcctgagcccagatgagggaaacgaggggcctcctcccccaagatgctctcaggggatgaagctggcacaatgctgtcaggagaatcgctatcctcatcac

SEQ ID NO: 214882 - DNA, 48 bp, Homo sapiens
  chr12:49436025-49436073
  hypo
tgtgggggtggagggcgtggtgccacctgagcccgtccaggggctgtc

SEQ ID NO: 214883 - DNA, 154 bp, Homo sapiens
  chr12:49620906-49621060
  hypo
gggcagcggggcacggggtttgcttcagatccgtgggtccttgctgagctctacttcattaagcgatcaatatttcctggctcctgagtggaactgcagttacatttccctttggaaaagctggtctgtttttaccaataggcctgcagaaaaa

SEQ ID NO: 214884 - DNA, 301 bp, Homo sapiens; identical to SEQ ID NO: 202975
  chr12:49761541-49761842
  hypo

SEQ ID NO: 214885 - DNA, 247 bp, Homo sapiens
  chr12:49935483-49935730
  hypo
gtctctcacaaggacatcagcgaaaccaagaaccgagggggccccgacagatggaaggagacaggtaggtgcatgtaggtgctgtggtcggggtattgggtgccgcaggcccgggcggggccttggcacccagtctgagtacgggggtcccccatgcacctgcattcatttcactcccactcaggctgcctgagaggcctgtgctgctctcatctccacattcctcggtatgggaatattttttcca

SEQ ID NO: 214886 - DNA, 57 bp, Homo sapiens
  chr12:49989816-49989873
  hypo
acttagagaaacaggccattaggaatccattctcactgtgttcgctctagacaaaac

SEQ ID NO: 214887 - DNA, 182 bp, Homo sapiens
  chr12:50185746-50185928
  hypo
gggtgcggctacccccgaaaggtgggccctggggcgtaggggacgggcggctgggctcctggcttcgcttccggtccacgggcagggcctgggaaaggaggggcagctcgggaggaagctcctctccacctttcggcccagcctcagaggcactgagctctgaggggcgtctgtgcacctga

SEQ ID NO: 214888 - DNA, 97 bp, Homo sapiens
  chr12:50322851-50322948
  hypo
gccaccgtacccagctgagtttccaaatatttctgatttcaccagcgggggaagactggcaggctcctatatcctcgaagtatcctgccatgagatg

SEQ ID NO: 214889 - DNA, 307 bp, Homo sapiens
  chr12:50366185-50366492
  hypo
tggccttgtgtgatctgacgcggtttgagtcgctgtggaataaaccccttctccacccgcccctctgcaaccccacaggccacagtgtccacagcgtccttggtaaagtcgactgtattcacatctgcattctgtgagtgcgggtataggtgggagtggaggagggaacttactttctgggtttacgggcacggtgtggtgtcagcccatttggaagcaaagcctagatatggagggggccagacgaacaggacctgggaatgcacaggaccccctgaagcaggccggggatctgagtgatcttgct

SEQ ID NO: 214890 - DNA, 233 bp, Homo sapiens
  chr12:50400184-50400417
  hypo
atcactgttctagcacggaaaacaatacacaccagcttttcgcagtcagcctcagctctctgtctccgtttgatctctacatccacctgattacgtgcatgcttcagcttaacatccagagcacttcgctcagtctctgctttcatcaaaagatccttgtatttccccagctcatggtcagtcctctgccactttttacggaaatcctcaaagtccttcgccaactggataaa

SEQ ID NO: 214891 - DNA, 132 bp, Homo sapiens
  chr12:50484303-50484435
  hypo
cagagatccctcagcggctccatgccttgcttatgccaccagaacctatcatcattaatcatgtcatcaggtaggcctgtgtgtgggaggcagtgctgtgccggagctgccttgtgccgatttgcacaagcc

SEQ ID NO: 214892 - DNA, 136 bp, Homo sapiens
  chr12:51116977-51117113
  hypo
cttgcaggcattgagttaatcgccgccttctatggctgcctgtatgcgggctgtatacctgtgaccgtcagacctccacatgctcagaacctcacggccacgctgcccactgtccgaatgattgttgatgtaagta

SEQ ID NO: 214893 - DNA, 40 bp, Homo sapiens
  chr12:51148430-51148470
  hypo
aaaaaagaaagtctattccgtgcctgctggatttttttca

SEQ ID NO: 214894 - DNA, 112 bp, Homo sapiens
  chr12:51346409-51346521
  hypo
acaggtgcagcaacgtcacgtctttcccctgggcgcgtgtgcagctcgaggctttgcaggaggcgcacctgcgatggccttaccgccaggtgagcccggcgggctctcatcg

SEQ ID NO: 214895 - DNA, 181 bp, Homo sapiens
  chr12:51346933-51347114
  hypo
ggaaattgcacatcgtgtcctggccttacaacaaacacctgttctgatctacagcctcttgctgaaggaacaacaggagacagacagcaggtggcggggtgtgccacaggtattgtgcttcttacgcttaagttttctgatgaagtctcattcataggatgaagccgctgtatttgaattc

SEQ ID NO: 214896 - DNA, 34 bp, Homo sapiens
  chr12:51421646-51421680
  hypo
gaaaaatccaaataaagtgcgaagtaaaaacaaa

SEQ ID NO: 214897 - DNA, 151 bp, Homo sapiens
  chr12:51479055-51479206
  hypo
gcagcctcaaactcccgggcacaaatgcctaaccatatttctaaaatggtgcttctccttagtttctatccctgtgccttatatttcttcttagcatccacgtatttgtttttgtcttgtctcacttgactaaattcggtgagagcaagga

SEQ ID NO: 214898 - DNA, 405 bp, Homo sapiens; identical to SEQ ID NO: 202982
  chr12:51818412-51818817
  hypo

SEQ ID NO: 214899 - DNA, 230 bp, Homo sapiens; identical to SEQ ID NO: 202983
  chr12:52294168-52294398
  hypo

SEQ ID NO: 214900 - DNA, 122 bp, Homo sapiens
  chr12:52539734-52539856
  hypo
ggggccagtgtgggcgcagtgtgggcagtctgagcacaagtggggtttgtgggcagtgtggatgctggggggcttagcggagggttactggagacgatagaggtgtgcggtgctcctgggct

SEQ ID NO: 214901 - DNA, 108 bp, Homo sapiens
  chr12:52913700-52913808
  hypo
aagccacctccaaagccagctccgccaccgagcccaaagccaccaccagctccaccgccgaaaccaaatccactaccggcaccacctccaaagccatagccgcctcca

SEQ ID NO: 214902 - DNA, 219 bp, Homo sapiens
  chr12:52913838-52914057
  hypo
ccaccactagtgctgatggatatcctcttggagccccccaggttgtagaggctccggctgccatagccacccactccacaagcacccgcaaggctgaccctgccgaagccaccaccaccgccacccccggaccgggacacggaggtgaagctggtgcgggagacagacggggtgatggcagaggcggtgctgaagctacgactgcccccgctccggaag

SEQ ID NO: 214903 - DNA, 115 bp, Homo sapiens
  chr12:52914087-52914202
  hypo
tgttcctggtggagcaagagaaccaggcactagtgggttgggaggtgctggagagaacagagctcagcaggacgcagaaggtggctctgttacccaggaacggtgatgccccctt

SEQ ID NO: 214904 - DNA, 185 bp, Homo sapiens
  chr12:53007442-53007627
  hypo
cttcactatggggagttttgcggcctcaccttggtctggtacagggcctcggcctcggccttgctcttccgggcgatctcctcatactgggcacggacctcagcaatgatgctgtccaggtccaggttccggttgttgtccatggacaggatgatggacgtgtcgctgatgtgggactggatctg

SEQ ID NO: 214905 - DNA, 105 bp, Homo sapiens
  chr12:53040689-53040794
  hypo
gggcatgctccccacgctgctcggcatctgcgatggcatcttgcacattcttacactatgacagaaggacagagaatggattctgcctgacggaggcggacagag

SEQ ID NO: 214906 - DNA, 268 bp, Homo sapiens
  chr12:53045572-53045840
  hypo
aaagccgcctccaccgaaaccaccaccactgaagccgctgccacctccaaagctgctgccgcctccaaaaccacctcctctgccaccaaatccaccagcggcgccaaagccaccacctcctccagccacactaatggagatgctcttggtccctccaaggccaacaagactccgactgccaaagccgcctccaccgaagcccccgccaccaccaccatggcggctcaagcaggagaagctggaagttgatctccggcttccaccagac

SEQ ID NO: 214907 - DNA, 210 bp, Homo sapiens
  chr12:53183460-53183670
  hypo
gcccggagtgaaacacagtgcactttattggcgacagaccggaggggcggagggggctgtgtgctatatacatcagagctgtagtgagcatcccacccagggaggggactccggggcagcagaaggtggcggcctaggccacacctggacaatcacaggcacaggctggagccggagagaagagcctgaaattctcgtgactgggcttgg

SEQ ID NO: 214908 - DNA, 64 bp, Homo sapiens
  chr12:53241431-53241495
  hypo
agctggggcatgtaggacaccggtctccctgcctttcctccaaggttctccagatctgcttggg

SEQ ID NO: 214909 - DNA, 86 bp, Homo sapiens
  chr12:53467253-53467339
  hypo
acctgcagtggggggaaagacggagctgccacccggcctgcttttccatagctcacctaattctcacaagggtacttttaagatga

SEQ ID NO: 214910 - DNA, 40 bp, Homo sapiens
  chr12:53517536-53517576
  hypo
ccagcgcaccggcccggcatggaacgtgctgatgtggacc

SEQ ID NO: 214911 - DNA, 307 bp, Homo sapiens
  chr12:53685893-53686200
  hypo
ctggggatgactggcgactggggaagacgtcaacaaagaagggcagagaaacctgagaagataggagagggtcctaggaatggctcagacatggaaaggggctgagattgttagagcttgggcctcttggtgagacaagcatcctaatcgccagtgtctcctcctcagtatggggcctcgccagtgctgagtcaaggggtggatccacgaagtaccttctatgtcctgaaccctcacaataacctgtcaagcacagaggagcaatttcgagccaatttcagcaggtcaggggcgcgaagacaagaag

SEQ ID NO: 214912 - DNA, 59 bp, Homo sapiens
  chr12:53686627-53686686
  hypo
ggcaggctgtcctgcggctgagctgtcgggcagtggccctgctgtttggctgtagcagt

SEQ ID NO: 214913 - DNA, 156 bp, Homo sapiens; identical to SEQ ID NO: 202994
  chr12:53719397-53719553
  hypo

SEQ ID NO: 214914 - DNA, 138 bp, Homo sapiens; identical to SEQ ID NO: 202995
  chr12:53765064-53765202
  hypo

SEQ ID NO: 214915 - DNA, 204 bp, Homo sapiens
  chr12:53899813-53900017
  hypo
aactgtccacccagccggccactgtgtgtcatggctctgcaaccaccagggaggcagcccgtggtgaggctgcccgccgtgccctgcagtacctcaagatcatggcaggcagcaagtgaagccccagctggactcatggatgtgcaccctttgctccctgctctttctgcctctgggctcatgtatctgcgcagctctggtacc

SEQ ID NO: 214916 - DNA, 284 bp, Homo sapiens
  chr12:53994512-53994796
  hypo
aacaaacaccagtagaataacaatatggaagacagcaaggcagatttcattacggtagagtgcctacacttcctcataacttggatttacacactgcaaatcctctgatctgattacctccagtgatcacgtaaaatactggctttaaactctttgccttagtgataaaacagccactttgattcacaacgagacattcacaataaagtatattgtaaacgtacctgtccacagcccggggcattgcacacaaacggtctgtcgtctcccatatttcatatagc

SEQ ID NO: 214917 - DNA, 116 bp, Homo sapiens; identical to SEQ ID NO: 203014
  chr12:54393243-54393359
  hypo

SEQ ID NO: 214918 - DNA, 584 bp, Homo sapiens; identical to SEQ ID NO: 203021
  chr12:54426523-54427107
  hypo

SEQ ID NO: 214919 - DNA, 329 bp, Homo sapiens; identical to SEQ ID NO: 203022
  chr12:54427307-54427636
  hypo

SEQ ID NO: 214920 - DNA, 120 bp, Homo sapiens
  chr12:54651137-54651257
  hypo
gcggagagattttgttttctttactgctgtgtcttctaactcttaggaagagtgcaggagggggaagaaaaagacaaaaatgcttgtgattcctaaggaagtaaaccaaaggtatctatc

SEQ ID NO: 214921 - DNA, 178 bp, Homo sapiens
  chr12:54651287-54651465
  hypo
aggaacttactcagaaaagcctttccacttcagtagatattccacttgtcccttaaccacgcgcctgtctagcaccttctccacaacatactcctcctcatcctctgaagaagaactgtcagctgtccgcttggttttctttcccatgtcgcacaccgttccacctgaaagactaagg

SEQ ID NO: 214922 - DNA, 41 bp, Homo sapiens; identical to SEQ ID NO: 203030
  chr12:54686414-54686455
  hypo

SEQ ID NO: 214923 - DNA, 168 bp, Homo sapiens; identical to SEQ ID NO: 203032
  chr12:54812988-54813156
  hypo

SEQ ID NO: 214924 - DNA, 39 bp, Homo sapiens
  chr12:55481152-55481191
  hypo
caggatctgttcctattcggccatcttggctcctccccc

SEQ ID NO: 214925 - DNA, 120 bp, Homo sapiens
  chr12:56116679-56116799
  hypo
aagcctgcgtttgtcaccatcactcagcaaataacctgaatgtctcctgtctctcagccttaatttttcaggcagcatcatgggacacatacttttagttttgagacaaggccttgctct

SEQ ID NO: 214926 - DNA, 269 bp, Homo sapiens
  chr12:56142456-56142725
  hypo
cccagctgtgggtgtacctacggcctgtaccccgcccagccacagtctacctgcagatcttgcgactaaaacccctaactggggaagggaccgcagggggagggggcggaggccggcgtcacatccgtatccgctcactgaagattgagctgcactcacgctcaggccattggcagagcatcgacttcaagcaagtgctacacagctggttccgccagccacagagcaactggggcatcgagatcaacgcctttgatcccagtggcaca

SEQ ID NO: 214927 - DNA, 88 bp, Homo sapiens
  chr12:56182547-56182635
  hypo
cactccagcctgggcaacagaatgaccttgtctcaaaggaaaaaaaagaaagaaagaaaagaaatgtagaccacgctctagcagcctg

SEQ ID NO: 214928 - DNA, 151 bp, Homo sapiens
  chr12:56183314-56183465
  hypo
aaagagaaactatcacggaagcacctttttcagaagacaacctataactactacccaactcgattctcttccctcctctttcttggaaaccttggtacatggacttgctactattgttaagaattatttagggccaggcgcggtggctcac

SEQ ID NO: 214929 - DNA, 31 bp, Homo sapiens
  chr12:56183705-56183736
  hypo
caaaagaatgaaactccgtctcaaaaaaaaa

SEQ ID NO: 214930 - DNA, 151 bp, Homo sapiens; identical to SEQ ID NO: 203036
  chr12:56390556-56390707
  hypo

SEQ ID NO: 214931 - DNA, 272 bp, Homo sapiens; identical to SEQ ID NO: 203037
  chr12:56472732-56473004
  hypo

SEQ ID NO: 214932 - DNA, 374 bp, Homo sapiens
  chr12:56558007-56558381
  hypo
tcttccccacctgcccgctcaccctccctccaggtggacccctctccctcacccttctcccctcttggccccttctcacctggcagtgggctggcactgggcaggaggttgccctgaacagctgccacaatggcagggctttgggctgcggcggatccgagccccggcccgagaggcaaggaagatggcatggtggtggtcgccggcaggttaggatgtagagggttcgccatggacacaggcaggttaggtggggggagagtgcccggggcgaacgggagatggtggtgatgcccatgcaggttaggaggagcggggaggttaatactgatggagtcagctagactaccaaatgggatgatggatggagcagg

SEQ ID NO: 214933 - DNA, 148 bp, Homo sapiens
  chr12:56601395-56601543
  hypo
catgaaatcactccacgtcctgagtgacactcactctaggatctcgttgtattcaattgtctcctccaggttctgaaggttggggttgacactgcggattgcacgcatgtatgcctttagcagctggatgtctcgcttctgttgtggg

SEQ ID NO: 214934 - DNA, 207 bp, Homo sapiens
  chr12:56604087-56604294
  hypo
cctgttcacaggtcacaggccgcttcgggttgtgctcacagtcgctgaggtgagacatgaggttgtcaagccggacaacggcactacagccgaacacagcgttgtcacaggcaatctgcagctttgacaacatgttccgcatgatccgaggtactgggcgcagatgggcgaccgtcacaacactacggtccactggacatgtctgtt

SEQ ID NO: 214935 - DNA, 90 bp, Homo sapiens
  chr12:56610573-56610663
  hypo
aaggaagcacacacacggggtccagtagatttgaacatagctgggagggggaaagaaaaggacaagagaggccgggcgtggtggctcacg

SEQ ID NO: 214936 - DNA, 200 bp, Homo sapiens
  chr12:56993681-56993881
  hypo
ccagtgaccccaccccgcccctgctggctggcccctcagcctctccaggctctctcagcctcttaccactttgttgacagacttctcccaggcaatggacctctccagctggcccaggcacaagcacacctgggctgcgctccggcaccgctcgagggtctggcgccagacacgaatgcgaggggtgatctcatatgatc

SEQ ID NO: 214937 - DNA, 32 bp, Homo sapiens
  chr12:57446184-57446216
  hypo
agcaaaactccgtctcaaaaaaaaaaaaaaaa

SEQ ID NO: 214938 - DNA, 172 bp, Homo sapiens
  chr12:57489924-57490096
  hypo
tctgtatgttcctgcctatccgtcctaggccctgggtcagaatgggcggagaagccttccatgccctaacctgtgctcttacccagcccccctcctgctcagccccatcaccctcagagagctctgtatgtgtgtgtgcgtgcgtgtgcgcgctgcaggtgcaggcatgttg

SEQ ID NO: 214939 - DNA, 114 bp, Homo sapiens
  chr12:57559925-57560039
  hypo
cgctggctctgcgacggggacaatgactgtgggaacagtgaagatgagtccaatgccacttgttcaggtgtggagcggggctcagatcacacgaggcacccctcagtcaaggag

SEQ ID NO: 214940 - DNA, 208 bp, Homo sapiens
  chr12:57570964-57571172
  hypo
ggaccaccctgctggccggtgacattgagcacccaagggcaatcgcactggatccccgggatgggtgaggaccttgcccagccttctcctggccccatggcccccctgaagtcccattcagcctggccagggacaccttactcctcagtgccatctgcctcctcccaccctctacctacgatcccaccacagtcgctccctgagggcc

SEQ ID NO: 214941 - DNA, 71 bp, Homo sapiens
  chr12:57584915-57584986
  hypo
caggccccagcctcggtcaaccccaccctgtccagcttgctcctcatcagctagacgagggagatagcagg

SEQ ID NO: 214942 - DNA, 67 bp, Homo sapiens
  chr12:57595540-57595607
  hypo
ccccatgcccacccgcttgcagcccagatgacctgtggtgtggacgagttccgctgcaaggattcgg

SEQ ID NO: 214943 - DNA, 82 bp, Homo sapiens
  chr12:57885677-57885759
  hypo
acagacaggatctccgctgtcatgggactttctgtctggtaggatagacaggtattttaaaaactgtcacacaaatgtagaa

SEQ ID NO: 214944 - DNA, 105 bp, Homo sapiens
  chr12:57982779-57982884
  hypo
ctgccaccaagacgcggagaccgatagtggcccctaatggctaggcgcactggtatttattgaatacaagacaaggggcagggtaaggaggggtgagttgtccaa

SEQ ID NO: 214945 - DNA, 166 bp, Homo sapiens
  chr12:58152861-58153027
  hypo
ctggatgacatttcagtacccgctggcagctcctcccactcatccagagacggccggtgggcaggcggggagagcagctttccttccctggagagaaccgtctttacctcagctcctagggcctccagccccccagctccaccacggtgacttggtgaagggggac

SEQ ID NO: 214946 - DNA, 251 bp, Homo sapiens; identical to SEQ ID NO: 203054
  chr12:58159038-58159289
  hypo

SEQ ID NO: 214947 - DNA, 147 bp, Homo sapiens; identical to SEQ ID NO: 203055
  chr12:58159346-58159493
  hypo

SEQ ID NO: 214948 - DNA, 102 bp, Homo sapiens
  chr12:58241599-58241701
  hypo
caaaacactgaaaatgagacctgaggtgctgggctttcctcacacccaccgacttactcccatttaggcggccccgactccgcccctcctccctacctccct

SEQ ID NO: 214949 - DNA, 217 bp, Homo sapiens; identical to SEQ ID NO: 203058
  chr12:58259123-58259340
  hypo

SEQ ID NO: 214950 - DNA, 226 bp, Homo sapiens
  chr12:58284085-58284311
  hypo
cttttgacagtcaacatgcccgagtgctgtgaacgttatgagagggccttgttgggaacacgtgctcctgggaatcagcccttccctctgtcctgttcccactcctccccgacgatgctcctgctcagaacccactcctcacctcagtgaagcaacgcagcgggcaccctgtggacaaagctggatattggctctgaataaaagcgaatcatggggaaaatcagtg

SEQ ID NO: 214951 - DNA, 188 bp, Homo sapiens; identical to SEQ ID NO: 203059
  chr12:59313474-59313662
  hypo

SEQ ID NO: 214952 - DNA, 59 bp, Homo sapiens; identical to SEQ ID NO: 203060
  chr12:59314100-59314159
  hypo

SEQ ID NO: 214953 - DNA, 271 bp, Homo sapiens; identical to SEQ ID NO: 203061
  chr12:59314189-59314460
  hypo

SEQ ID NO: 214954 - DNA, 440 bp, Homo sapiens; identical to SEQ ID NO: 203062
  chr12:59989613-59990053
  hypo

SEQ ID NO: 214955 - DNA, 123 bp, Homo sapiens
  chr12:60507737-60507860
  hypo
gtctagtttcatgaacgaggcttctggtgaagttctctacaccaaattatttactttgaaatacgcttcactaattagtgcttctgtcagtatatgccttcagagccattctgaagacatgca

SEQ ID NO: 214956 - DNA, 44 bp, Homo sapiens
  chr12:60507890-60507934
  hypo
gcaacctaaggatttagatataaacataacggtgaattgtggga

SEQ ID NO: 214957 - DNA, 118 bp, Homo sapiens
  chr12:63195617-63195735
  hypo
agcgctccgatgaccaggcactcatggggaatcttcttctcggtaaagaagcgtgtggggggcgtgctgggggagcccggggcccccacccctccgcgcagggaggctgcccgggtca

SEQ ID NO: 214958 - DNA, 164 bp, Homo sapiens
  chr12:63195813-63195977
  hypo
tgtccacgatgtcctgcagctgctccgtgatgtggtgctgcagcaggcgtgacgccaccaccgcggccccggaccccgcgtgcccgtcaaacagcgaccaatagtggcaggaaacaccctcggattcctgtgggagaggacgacagggaggagtgagaacggct

SEQ ID NO: 214959 - DNA, 192 bp, Homo sapiens
  chr12:63271246-63271438
  hypo
gttccaaggtaccacgcgatacggtaatagtaattaacatcagttgagcttaccaactctgctgaacactcgatgtactctctctctctattctctgaactctccatgaaatatatatgattttcctcatttttgagatgaagcaaaccaaaaaagtcatatggctgttaagtggcccggcagatatcccct

SEQ ID NO: 214960 - DNA, 329 bp, Homo sapiens; identical to SEQ ID NO: 203072
  chr12:64237615-64237944
  hypo

SEQ ID NO: 214961 - DNA, 110 bp, Homo sapiens; identical to SEQ ID NO: 203073
  chr12:64238195-64238305
  hypo

SEQ ID NO: 214962 - DNA, 275 bp, Homo sapiens
  chr12:64521629-64521904
  hypo
tgaatgtctaggcaacgaaaaagaggagagccaccccctccagtaaggcgtcctggcaggaccagtgatggccattgcccgctccaccctccacatgccctttctaactcctcagttgacctagggtccccaagccttgccagtcacccccggggcctgctgcagaaccgtggcctcaacaatgacagtcctgagcggaggcgcaggcctggccatggcagcctgaccaacatcagccggcacgactccctcaagaagatcgacagccctcccat

SEQ ID NO: 214963 - DNA, 57 bp, Homo sapiens
  chr12:64783128-64783185
  hypo
ctcctagcgtcgacgcccctccttccaagacgtttcccagcaggccctgcgcccagt

SEQ ID NO: 214964 - DNA, 396 bp, Homo sapiens; identical to SEQ ID NO: 203076
  chr12:64845175-64845571
  hypo

SEQ ID NO: 214965 - DNA, 32 bp, Homo sapiens
  chr12:65557257-65557289
  hypo
cccagaggccggggcgggcggatcacaaggtc

SEQ ID NO: 214966 - DNA, 32 bp, Homo sapiens
  chr12:65557469-65557501
  hypo
cagcctgggcaacagagcgaagtgataacatc

SEQ ID NO: 214967 - DNA, 41 bp, Homo sapiens
  chr12:66213996-66214037
  hypo
aggcgtgagccactgcgcccggcccacaattatgattaaat

SEQ ID NO: 214968 - DNA, 43 bp, Homo sapiens
  chr12:69133795-69133838
  hypo
tagttgctggcagcccgcccgctagtatcggaattcattataa

SEQ ID NO: 214969 - DNA, 209 bp, Homo sapiens
  chr12:69190343-69190552
  hypo
atacagctggcagcacaatagttttgtttacagcagcatcaccacaaatgtatgagtaatgcctttcgttacagtatcaagacagctacaatggcaacaggtgataggaattttcagctccattataatcttaccggaccgctgtcgtatgtgtggtctacattgactgaaccgttgttatgtggtgcgtgactgtatttgggccataa

SEQ ID NO: 214970 - DNA, 39 bp, Homo sapiens; identical to SEQ ID NO: 203092
  chr12:69241507-69241546
  hypo

SEQ ID NO: 214971 - DNA, 102 bp, Homo sapiens
  chr12:69644224-69644326
  hypo
tggaaaagtaggtttcgttatatagaaattaactttaggctgggtgcagtggctcaagcctatatttgggaggccgaggcaggaggattgcttgaactcagg

SEQ ID NO: 214972 - DNA, 131 bp, Homo sapiens
  chr12:69999219-69999350
  hypo
gcattttcttgccagggctccgaataatagaagtcaacaaaatactctgtacaaaaccctttataaaagtctgctgtgtgccgtattagcatattagatcaatagaagatattaagagaacctttttaaaa

SEQ ID NO: 214973 - DNA, 178 bp, Homo sapiens
  chr12:70004624-70004802
  hypo
gctgggggcatggcgagccccagaggacagactcactgagcggggctggctcagctgactgctctggggcctatcctaccctcccattataacttggggattgcatgacaaaagccagtcactttgacagagaaaagtgctcctgatagcaacttgagtgtccggcgacagcgcaaca

SEQ ID NO: 214974 - DNA, 171 bp, Homo sapiens
  chr12:70648187-70648358
  hypo
ccaggtgggatggagcgggatgtcagaaaatttcatcacactcctcagactggtgcccaatttaaaacgtatgaattatttatttctggaattttccatgtaatatttttgtactgcggttcaccatgaataactgaaactgaagaagaagaaaccgcggataaggggaga

SEQ ID NO: 214975 - DNA, 42 bp, Homo sapiens
  chr12:72098321-72098363
  hypo
tttaaaaatgaaaacacagccggacgaggtggcttatgcctg

SEQ ID NO: 214976 - DNA, 120 bp, Homo sapiens
  chr12:72127145-72127265
  hypo
tgtttccaaaaaaaaaaaagagagagagacagaaactgttttctaattttgatttccaaatgttgctattataaagaaatacaactgattttgttttgtttcgttttgttttttggagac

SEQ ID NO: 214977 - DNA, 67 bp, Homo sapiens
  chr12:72165436-72165503
  hypo
gacatagtttaagtattttattaagagaagattgaggccaggcacagtggctcacgcctgtaatccc

SEQ ID NO: 214978 - DNA, 40 bp, Homo sapiens
  chr12:72642202-72642242
  hypo
aaaaaaaaaaaaaaaaagcgaagtgcttattcatatgtgt

SEQ ID NO: 214979 - DNA, 120 bp, Homo sapiens
  chr12:76878984-76879104
  hypo
gacgcaccgtgcccggcctctcactacttttcaaacaacttttaacttctcaatatcaacaaaatttggaatagtaaatgactaagaccgggcgcagtagctcatgcctgtaatcccagc

SEQ ID NO: 214980 - DNA, 38 bp, Homo sapiens
  chr12:76879284-76879322
  hypo
gaggttgcggtgagcagagatcacgccaccgcactcca

SEQ ID NO: 214981 - DNA, 300 bp, Homo sapiens
  chr12:77216028-77216328
  hypo
agaaacatgtaatgatgcaggtgtttttagtaatttacacaatgtcaaaacaacgttaatagggcagtaaattaatttttatagaagttctttaaaggtaactaagatagcctgcttttaaacttttaataggaatttcttctgtttatattatcagggcgaatcagcgcttgatttggcaaaacagagaaaaaatgtgtggatgatcaaccacttacaagaggcaaggcaagcaaaaggatatgacaatccgtccttccttagaaagctgaaagctgataaggtaaactcataactgaa

SEQ ID NO: 214982 - DNA, 114 bp, Homo sapiens; identical to SEQ ID NO: 203107
  chr12:77272744-77272858
  hypo

SEQ ID NO: 214983 - DNA, 32 bp, Homo sapiens
  chr12:77453497-77453529
  hypo
ggaggccaaggcaggcggatcacgaggtcagg

SEQ ID NO: 214984 - DNA, 164 bp, Homo sapiens
  chr12:79926688-79926852
  hypo
cgtgagccaccgcgcccgaccatagaccagcctttactcagctaacagtatgcaggcctgttagagtaaggagagctctgctccaagtgttgacaaatatccctccccctgtggctaaatcagcctgcccggtcatccgtgacgaaagtttgagctcaccagga

SEQ ID NO: 214985 - DNA, 577 bp, Homo sapiens; identical to SEQ ID NO: 203111
  chr12:80084512-80085089
  hypo

SEQ ID NO: 214986 - DNA, 385 bp, Homo sapiens; identical to SEQ ID NO: 203112
  chr12:81330352-81330737
  hypo

SEQ ID NO: 214987 - DNA, 390 bp, Homo sapiens; identical to SEQ ID NO: 203119
  chr12:83080990-83081380
  hypo

SEQ ID NO: 214988 - DNA, 40 bp, Homo sapiens
  chr12:89020039-89020079
  hypo
acaaatccggctgggcgaggtggctcacgcctgtaatgtc

SEQ ID NO: 214989 - DNA, 449 bp, Homo sapiens; identical to SEQ ID NO: 203128
  chr12:89747142-89747591
  hypo

SEQ ID NO: 214990 - DNA, 94 bp, Homo sapiens
  chr12:89800520-89800614
  hypo
aaaactggaggttatcgccatgggaaactacatgcccgatacgtaataatataatatataatatgtgatatataagataataccaggtcttcca

SEQ ID NO: 214991 - DNA, 33 bp, Homo sapiens
  chr12:89915163-89915196
  hypo
gccaccgcacccggcctcccctcacttaatttt

SEQ ID NO: 214992 - DNA, 126 bp, Homo sapiens
  chr12:90049546-90049672
  hypo
ctccatgagagcccgcagctctgcgagcgtaattccaaagtctccatcatgattagcttccttcaaagagtttttcacaccactgtaagcaactgagttgtttgccatgtcgcccattacaagtat

SEQ ID NO: 214993 - DNA, 54 bp, Homo sapiens
  chr12:90313458-90313512
  hypo
tctccaacacagacccggtgagaggtactgggcgatgaggaagtacagctccaa

SEQ ID NO: 214994 - DNA, 271 bp, Homo sapiens; identical to SEQ ID NO: 203130
  chr12:93966030-93966301
  hypo

SEQ ID NO: 214995 - DNA, 64 bp, Homo sapiens; identical to SEQ ID NO: 203132
  chr12:93985620-93985684
  hypo

SEQ ID NO: 214996 - DNA, 42 bp, Homo sapiens
  chr12:94145345-94145387
  hypo
atcctttatcttgggccaggcgtggtggctcatgcctgtaat

SEQ ID NO: 214997 - DNA, 420 bp, Homo sapiens; identical to SEQ ID NO: 203133
  chr12:94542668-94543088
  hypo

SEQ ID NO: 214998 - DNA, 100 bp, Homo sapiens; identical to SEQ ID NO: 203134
  chr12:94544052-94544152
  hypo

SEQ ID NO: 214999 - DNA, 34 bp, Homo sapiens; identical to SEQ ID NO: 203135
  chr12:94544417-94544451
  hypo

SEQ ID NO: 215000 - DNA, 216 bp, Homo sapiens
  chr12:94658439-94658655
  hypo
catttttttaaatgtcgtttatttctggcttgctaaagggtgattaaatacgaatgtaaacaaaggtacactctccacatctaactgttcctaggcattaacccactgatgagcattagtctgccatatgtaagtttaaacataaaataacaaggtatactgtgggtactgcacgtcgctgtgaatgtgcacgcgtgcgcgtgtgcagatgtgcat

SEQ ID NO: 215001 - DNA, 152 bp, Homo sapiens
  chr12:95602736-95602888
  hypo
actcttgagttttccgtatagccataataaatggcaagttctcgtactctggtatttcctcataatggcgtatattttcatactccggtgcacagaggcttgtaacagacttgtaaggtgcctgagatgatgactcccgggagagcatttgg

SEQ ID NO: 215002 - DNA, 109 bp, Homo sapiens; identical to SEQ ID NO: 203138
  chr12:96183926-96184035
  hypo

SEQ ID NO: 215003 - DNA, 72 bp, Homo sapiens; identical to SEQ ID NO: 203139
  chr12:96184965-96185037
  hypo

SEQ ID NO: 215004 - DNA, 219 bp, Homo sapiens; identical to SEQ ID NO: 203140
  chr12:96185121-96185340
  hypo

SEQ ID NO: 215005 - DNA, 62 bp, Homo sapiens
  chr12:97339536-97339598
  hypo
gcattggaaataaccggcaaaatgcaccattgacttccattcaaattcgttttattcagaac

SEQ ID NO: 215006 - DNA, 200 bp, Homo sapiens
  chr12:98947901-98948101
  hypo
tctagcagtctttcatagatgtaatggtaataccaggggatgagagagtgcagggggaaaaataatttcttaagaaatggctgaaaatttactaagttcccagaaactatataagcccaagtatgggaagttcaagtgaccccaaaacaaagtcaaaccaaggcaactgtggccgggcgcggtggctcatgcctgtaatc

SEQ ID NO: 215007 - DNA, 35 bp, Homo sapiens
  chr12:98948341-98948376
  hypo
gtgagactccgtctcaaaaaaaaaaaaaaaaaaaa

SEQ ID NO: 215008 - DNA, 85 bp, Homo sapiens
  chr12:98983724-98983809
  hypo
gaggtggttgcctggcgggatctgctgattcttcttaaaacctactgtccactttgggaggccgaggcaggtggatcacctgagg

SEQ ID NO: 215009 - DNA, 169 bp, Homo sapiens
  chr12:101711200-101711369
  hypo
tttcagattggtgtgcgttcttcatcagtatcctgtgactttctttccacggtagcaatgagtattacccagcagatctgcaagttgctccaacccaggatctacggagaaaaggcaaagggatggtggcagaggaaatcgaagaggaacctgccgcaggagatgatga

SEQ ID NO: 215010 - DNA, 94 bp, Homo sapiens
  chr12:101718176-101718270
  hypo
agttaatttttgtatttttttgtagagacggagtttcaccagctgaaaatttttgtatttttttgtagagatgttgtcccggctggtctcaaaa

SEQ ID NO: 215011 - DNA, 197 bp, Homo sapiens
  chr12:102132858-102133055
  hypo
gagacgcgcggagcgaggtagggccctgcccggccccgccgcgtccctcctgtaagtggtcccagggtgtagcgatggggcccagccccagcccagcccgcccgctttccactaggccctatcctgctcaaggccctgtcctcaggttcgcggcctccgttttctcgtcagaggccccaggcgacgccaggaggtaa

SEQ ID NO: 215012 - DNA, 56 bp, Homo sapiens
  chr12:102133325-102133381
  hypo
gtgaactgggtggcgaggctccgcccccatggggcgattgcgcgcccaaatagctg

SEQ ID NO: 215013 - DNA, 358 bp, Homo sapiens
  chr12:102301886-102302244
  hypo
gcccagagtgagagtgcttgcggttcgatgttgacaaacccacccagagtaacacacatttatgactttttctccaggagttagctgtgccagtggttcatgacgggggcgctcttttggcctttgtctgtggtgtcgtgtacacgctcctacagtccatcatctcttacaaatcatgtccccagtggaacagtctctcgacatgccacatacggatggtcatctctgccgtttcttgcgcagctgtcatccccagtatcctttttcacatttgtgccttgttaaaggaataaaacattcagtgacacttgttaaagaagggtaatgaagactttatagggaccgctgcaatgagttc

SEQ ID NO: 215014 - DNA, 39 bp, Homo sapiens
  chr12:104220732-104220771
  hypo
tacatatgcctgggcgcggtggctcatgcctgtaatccc

SEQ ID NO: 215015 - DNA, 98 bp, Homo sapiens; identical to SEQ ID NO: 203156
  chr12:104459023-104459121
  hypo

SEQ ID NO: 215016 - DNA, 37 bp, Homo sapiens
  chr12:104506941-104506978
  hypo
tacagacgtgagccaccgcgcccggcctggatattga

SEQ ID NO: 215017 - DNA, 42 bp, Homo sapiens
  chr12:104685528-104685570
  hypo
ggattatgggcgtgagccaccgggcccagccctatttttgtt

SEQ ID NO: 215018 - DNA, 92 bp, Homo sapiens
  chr12:104686067-104686159
  hypo
tcagaatcccctggagtactcgttaattatgcatgcccaggctttacccgagttcttttgaagtagactcgggaaagagctaggaatctacc

SEQ ID NO: 215019 - DNA, 35 bp, Homo sapiens
  chr12:104691424-104691459
  hypo
aagctaccatgcccggcctgattttgtttttaatg

SEQ ID NO: 215020 - DNA, 36 bp, Homo sapiens
  chr12:104702054-104702090
  hypo
gagccaccacgcctcgctgcccttttcactcttaat

SEQ ID NO: 215021 - DNA, 35 bp, Homo sapiens
  chr12:104703967-104704002
  hypo
cccaggctggagtgcagtggcgcaatcttggctca

SEQ ID NO: 215022 - DNA, 348 bp, Homo sapiens; identical to SEQ ID NO: 203159
  chr12:104851545-104851893
  hypo

SEQ ID NO: 215023 - DNA, 175 bp, Homo sapiens
  chr12:105096586-105096761
  hypo
ccaagggcggacagcgggtcggcgagagtcgataatgggttccagcagattggacgccgttcagatctaactcgagcctggcgccctttgcagacttggagtccaagtcctcctcatgccttagcagcaagttccaaagcagcctggaggggacggcaggcgtgtggtcaccact

SEQ ID NO: 215024 - DNA, 49 bp, Homo sapiens
  chr12:105132876-105132925
  hypo
ttgggaaccaacgccggtgtgtgccagaggagcccgggtagtgggtgcg

SEQ ID NO: 215025 - DNA, 117 bp, Homo sapiens
  chr12:106460688-106460805
  hypo
ttcaggtactggggccggggccggttctggagcccctcaaagtcctggatctggaggaagttttctgcagagacgcagctgcggatgcgctggcgggcagggcgattctcctgcaaa

SEQ ID NO: 215026 - DNA, 264 bp, Homo sapiens; identical to SEQ ID NO: 203162
  chr12:106640992-106641256
  hypo

SEQ ID NO: 215027 - DNA, 54 bp, Homo sapiens; identical to SEQ ID NO: 203163
  chr12:106641515-106641569
  hypo

SEQ ID NO: 215028 - DNA, 189 bp, Homo sapiens
  chr12:106881472-106881661
  hypo
catgtgcatctgtcccgctcaagcctgatcgcttcaaaggtggtaggataattagtagctaaatgaaacaaacataaagaggaagcggaacagtggtagttatgtgctgcatgtgatcacagagctcatggagaagactgaagggggcagaatgcgtgggtcagctggaataagcgagtcaatactgag

SEQ ID NO: 215029 - DNA, 223 bp, Homo sapiens; identical to SEQ ID NO: 203165
  chr12:107167936-107168159
  hypo

SEQ ID NO: 215030 - DNA, 99 bp, Homo sapiens
  chr12:108926049-108926148
  hypo
actggtgcactggacggcccggtgcagagccttccggcagtgctgggtgtcaccatgagctctaaggcagaaaacaaaaagttgctgccaccaggacac

SEQ ID NO: 215031 - DNA, 390 bp, Homo sapiens
  chr12:108926178-108926568
  hypo
tcttctcccaggtagaaactcactcttcagtaactctagcttctgagaagaccttagctttcagatctatccatgatgctttctccttccagagtctctacagtcacctacgaagtatttccctgaagcactctctccctcagccatgtaggggctactggaaagtgtacctgatattgtgatctgcaaccagcattctgcctttacagcattcacatgtgcggcacatggcgggggagtccaacagctctctgtaacctgatacagtccccagggaaattttactatggcgtcctactgacaggagagttatgaatccagggtagtgtcaaatttcatacccagagtcagatcttttttttttttttgaaagggagtctcgctcttgtc

SEQ ID NO: 215032 - DNA, 32 bp, Homo sapiens
  chr12:108963690-108963722
  hypo
aaacattcatccagccgggcgcagtggctcac

SEQ ID NO: 215033 - DNA, 52 bp, Homo sapiens
  chr12:109208564-109208616
  hypo
ggacctgggagaactgaagtcggggtgccgaggggaggcaaagggaggagag

SEQ ID NO: 215034 - DNA, 151 bp, Homo sapiens
  chr12:109208674-109208825
  hypo
cagccaggcagcagcggagtgggatgcgcatgtgggcatctaaggcatgcccgtgactgctggcctgtgagctctgtgagactgtaggtgtgtctgccgtgctccctgatgtggccccagcacctggcggggcgcccggcacagggaaaga

SEQ ID NO: 215035 - DNA, 126 bp, Homo sapiens
  chr12:109213025-109213151
  hypo
aaacaggcagtaaccagggacggcttctgaacttctctgagctgccccagggttcaggaggtgttcctggagtgcagtgaggaaagtctcttactggccatgagtctcgcgcgaagcagagaccct

SEQ ID NO: 215036 - DNA, 163 bp, Homo sapiens
  chr12:109488356-109488519
  hypo
cagtctggagtcggagaaagcgattgaaagggagggaaaaatcttgctggctctaatgctttataaactgtgctgtccaatacggtagctgctggccacttggggctattgagcacatgaaaagtgggtactccaaactgagaggtacttagtaccaaaaaac

SEQ ID NO: 215037 - DNA, 360 bp, Homo sapiens; identical to SEQ ID NO: 203178
  chr12:109746926-109747286
  hypo

SEQ ID NO: 215038 - DNA, 175 bp, Homo sapiens
  chr12:109887568-109887743
  hypo
ccaacattcacttcgactttctaaaaaagctcaacccaaaagaaagacagggttggtgtttaacacttaaacagtataaaatatttacgaaacattttgtaagccctctttccttagcacttaataaaatccaaatggcctaatataaaagtttctcacacgacagtttaaaaag

SEQ ID NO: 215039 - DNA, 179 bp, Homo sapiens
  chr12:110019852-110020031
  hypo
ctcctcctacggggccgtctccacggagggcgtgtcacctctctgcgttcctattgaccacgtgagtcagtgaggcctgtccagacaggcttgaccacagaccatttctatcattaggagaatgttccttgagaaaccacccagtgcgcagaggttacgcagtttgtcccaggaccagg

SEQ ID NO: 215040 - DNA, 259 bp, Homo sapiens
  chr12:110224453-110224712
  hypo
ggccccgagccagtggggacagttccgccctgccatcctggccccactgccccagcctcacctgaagcaccacctgcggtcaggagtgccgtccgagctcttgcccacggtgaccatctccccagagcggaaggccttcctcaggaatacggggaaggagcgctcaatgtccaggatggtggtggcccactgcggggagggagggtcaggagggacatcggtgagcctcacagcctgcgcctgccgctctggtggcaga

SEQ ID NO: 215041 - DNA, 192 bp, Homo sapiens
  chr12:110378869-110379061
  hypo
ttctgctcccagggcgcatgttctctcctctgtcggctgaggtcttccatccacacctccacgcatgctgtttagttcccagctgctcaaatacaagacacttgctgtgggctcctaaaattcactatgaactcgtgcatcctgaagccactcaaatccatctggcaaatgattaaacgttagcttggagcc

SEQ ID NO: 215042 - DNA, 36 bp, Homo sapiens
  chr12:110388924-110388960
  hypo
ctatgggattaaagcgtcaaccgtcctggcatttat

SEQ ID NO: 215043 - DNA, 444 bp, Homo sapiens
  chr12:110778337-110778781
  hypo
cgcctcaaaaaaaaaaaaagaaaaaaaatgcagaaacctgtctcaatgtttaactgggcatttttcaaactaggggacaaaaactagaacttgccacttttatttaaagtgatgctcttattttagaccaatctgaccttcgttggctgcgtgggcatgctggatcctccgagaatcgaggtggcctcctccgtgaagctgtgccggcaagcaggcatccgggtcatcatgatcactggggacaacaagggcactgctgtggccatctgtcgccgcatcggcatcttcgggcaggatgaggacgtgacgtcaaaagctttcacaggccgggagtttgatgaactcaacccctccgcccagcgagacgcctgcctgaacgcccgctgttttgctcgagttgaaccctcccacaagtctaaaatcgtagaatttcttcagtctttt

SEQ ID NO: 215044 - DNA, 76 bp, Homo sapiens
  chr12:110783768-110783844
  hypo
ttgggggtgcgtttccccacctctccttgctctgcagcttgtccgaaaaccagtccttgctgaggatgcccccctg

SEQ ID NO: 215045 - DNA, 167 bp, Homo sapiens
  chr12:110783925-110784092
  hypo
aagtggttgggtggggcttgggaccagccacctccttccaggggaggctggaggcgtgacacgtcttccctgtgtgtcagctcatcttccagatcacaccgctgaacgtgacccagtggctgatggtgctgaaaatctccttgcccgtgattctcatggatgagacg

SEQ ID NO: 215046 - DNA, 148 bp, Homo sapiens
  chr12:110806697-110806845
  hypo
caccagtagcagaagggttgcggaaattgttccttctgcagaatggattctgcagtactgatgattaaggggtgcactgacgctgcacagaatgtccctgtgcacagcacggcctcgtattttttttttcatacggggtctctgtcgc

SEQ ID NO: 215047 - DNA, 201 bp, Homo sapiens
  chr12:110808573-110808774
  hypo
acctcaatggcccctcccagcgcagggcttcccggtgacctggccacagccgtgcctggaggatgaggtgaggttcatgtggagtctggactcactgcctgtcgtcagcagggaacgcaggcctgagcacaaccccagagagctgctcacggggacagctcacctaagctctgggaagcagctccgcgcaggccctggcct

SEQ ID NO: 215048 - DNA, 120 bp, Homo sapiens
  chr12:110915437-110915557
  hypo
ggcgtgagtcaacgcgcccagtcttgtcatccattcttgactaaatccattatgattaagatggctagaaatatgtgctttttctttttttttgagacagagtctccctctgtcgcgcag

SEQ ID NO: 215049 - DNA, 97 bp, Homo sapiens
  chr12:110916597-110916694
  hypo
tatagaactatgagtcaatacgtgagtgttgttttaagccgctaaagttgtgttgttatggcagcaaaatgaaactaacatagagcccctttttaaa

SEQ ID NO: 215050 - DNA, 37 bp, Homo sapiens
  chr12:110916994-110917031
  hypo
aagtagagaagagtacgtagaaaccaagatctgggtg

SEQ ID NO: 215051 - DNA, 316 bp, Homo sapiens
  chr12:111083708-111084024
  hypo
atccgccctcccaccgaggccagcagagacccgggattactcagtccctgccgttccactgcgaagtcttgactcaactctcccaccagaaccaggcacatcgcttctggcttcttggccatgggtgaagatgtgcagttattactcctcctcagaagggaagacatgggttgggaggagaggcagcagtgcgcacatggcaccgtcagggtctgtgctgatcctgggtgctcagagggcctgcagcagcaggttttgtaccaactctgccggcaacccaggtagaggcaggcacgagcacctgctaaactcagtt

SEQ ID NO: 215052 - DNA, 153 bp, Homo sapiens
  chr12:111087519-111087672
  hypo
cagcttcagggaggatgtgacgcctgggctggatctgaaaggacaaggcaggctcagcccagggaagggcgctctaggtgcatgagcagcgctctgctgcaggcgggtgctgcggcagaggccagcttcccagatatcttttttttttgagac

SEQ ID NO: 215053 - DNA, 120 bp, Homo sapiens
  chr12:111195775-111195895
  hypo
aggatgcggtgaacagtgatcatgccgctgctctccaatttgtgtgatagagtgaaactctgtttctaaaataacaacaaaaaaagttgaataaacataaacaaatgggccaggtgcagg

SEQ ID NO: 215054 - DNA, 33 bp, Homo sapiens; identical to SEQ ID NO: 203182
  chr12:111471132-111471165
  hypo

SEQ ID NO: 215055 - DNA, 353 bp, Homo sapiens; identical to SEQ ID NO: 203183
  chr12:111473017-111473370
  hypo

SEQ ID NO: 215056 - DNA, 65 bp, Homo sapiens
  chr12:111725445-111725510
  hypo
ggcataccctgctgcgcaggccctgcctaatgacggggcgtgggggctgccggcagatgaaagcc

SEQ ID NO: 215057 - DNA, 63 bp, Homo sapiens
  chr12:111725564-111725627
  hypo
cccctgccacctaaacaaacaggccacagcagagtaaaacagggaagccgccttgttccagcc

SEQ ID NO: 215058 - DNA, 335 bp, Homo sapiens; identical to SEQ ID NO: 203184
  chr12:111844275-111844610
  hypo

SEQ ID NO: 215059 - DNA, 113 bp, Homo sapiens
  chr12:111885452-111885565
  hypo
cccacagcacctgcgcctgtcgctgacagagcggggccagtgccgtgtgcagcacctccactttccctcggtcgtggacatgctccaccacttccagcgctcgcccatcccac

SEQ ID NO: 215060 - DNA, 81 bp, Homo sapiens
  chr12:112082472-112082553
  hypo
gacagacccctttctcccatcgtgagggagaatggttttctgccatcgcaatcagctatgcaaagcaagaattttgctcta

SEQ ID NO: 215061 - DNA, 54 bp, Homo sapiens
  chr12:112194070-112194124
  hypo
cattcctggggctctcggagacaagggctgacccagggccgcctccctccactc

SEQ ID NO: 215062 - DNA, 82 bp, Homo sapiens
  chr12:112288155-112288237
  hypo
agatgcagcttttacgtgggtgcgagagtgctataagaaaggcataactatagactctaatatttttcgagaaaaagtcatt

SEQ ID NO: 215063 - DNA, 90 bp, Homo sapiens
  chr12:112574643-112574733
  hypo
ttcttggctttcccaaatgtcgagattacaggcgtgagctatggcatctggccaaaactggccaacgttgaatgagtatgttaattcacc

SEQ ID NO: 215064 - DNA, 35 bp, Homo sapiens
  chr12:112575271-112575306
  hypo
atcttcatttcttggctgggcgcagtggctcacgc

SEQ ID NO: 215065 - DNA, 31 bp, Homo sapiens
  chr12:112591128-112591159
  hypo
tggaggtgagtggaccgggggctgtgtttta

SEQ ID NO: 215066 - DNA, 100 bp, Homo sapiens
  chr12:112591890-112591990
  hypo
cagttctttgcagaggcaggtctctgaaaagaattatcctgagagaaaaaagcttcgtctgcatgcactcgcgcacacacacaaacgatacatagtaggg

SEQ ID NO: 215067 - DNA, 333 bp, Homo sapiens
  chr12:112610022-112610355
  hypo
ctctttggaaacacaggggcacctgaatgggccttcctgcaatcctagcttttaacaaaaacatggtgttccccattatgaaggctaatgcctctactgcaagttatcagactataaatgcttctcactccccatggcagcctggcctcagcggggcctccaggcagcggcctgggcattccccgcagccgtgcatttctgtatctgctccctggctttgttgtcactggcattaaaaaaggccccagactaattaggccacagtcctggctccctgccttgccctccctgtttcgtcagcccactcttccttgcacacctggcgcatagcag

SEQ ID NO: 215068 - DNA, 220 bp, Homo sapiens
  chr12:112610446-112610666
  hypo
gggaggggataggcccagggccacatactcaggagacaggccactctggggtcagcagcatccgcggggtccaggtacacctcatggggatggagccgtgcgggtgtgatggcgaggtggcggcatagctggttgatgtactgcacaagtgccacgtccatctccagggtccactttcttgaggccttctgtgcatgtcggacatcgatgcatgcgcacc

SEQ ID NO: 215069 - DNA, 93 bp, Homo sapiens
  chr12:112612659-112612752
  hypo
ttttcattgattgatgccaggtgcacttgctgtggacaaggctgagtaggggcgtgtgtgtgtgtatgtgcacacgtgcgtgagccagaggga

SEQ ID NO: 215070 - DNA, 70 bp, Homo sapiens
  chr12:112616770-112616840
  hypo
ggcttggtgataggccgcttggtgctcaccaccttcacggggtgctgctccttcccggccttgctgtact

SEQ ID NO: 215071 - DNA, 382 bp, Homo sapiens
  chr12:112657024-112657406
  hypo
caaagatgagagcatggcaccgcaaagagggcatgtcactgcaaaagaatgcacctccaaacggctttgcaaacacttattctaaatgtccttaacttgctgctggccttactcagtgatgtgtgtggaggctgcaggaggcgcgaagcaccgcagagggctcacctgtcttcggtcagcctgcaaaggaggtggtgggggccgagcacagtcccggtagagcatcctcagccgttcacactgtacctccacaactgcaagtcgctctcctgtagagggcacatgttgaatctgtgaaaacaactcccgcaactcccaagtgggtgctgactcttttggagcagcatcaaaacaataaaatgcacttatagagctcattgaa

SEQ ID NO: 215072 - DNA, 114 bp, Homo sapiens
  chr12:112684718-112684832
  hypo
ggggtcccagagatgcttctcgtgaggcccgactgggctgcgatggtgacatgcagcaacagctcggctcggttcattaaactcttcactaacgtctttgttttagccagtggg

SEQ ID NO: 215073 - DNA, 243 bp, Homo sapiens
  chr12:112743070-112743313
  hypo
gtgtggatctaaagcgccgtggctcccagctgcttcttgccccaagccctcctcctctctctgcattccagccactctggcccactttttctccctaaaacatgctgcctcctgccacagacactttgcacgtgtggtatcctctttctggaatgttcttccctcacctactccccagcctcttcatctggtacatgactacttttccttcactaattacgattatctcgtgcgcttatttgc

SEQ ID NO: 215074 - DNA, 35 bp, Homo sapiens; identical to SEQ ID NO: 203186
  chr12:112884177-112884212
  hypo

SEQ ID NO: 215075 - DNA, 58 bp, Homo sapiens; identical to SEQ ID NO: 203187
  chr12:112915451-112915509
  hypo

SEQ ID NO: 215076 - DNA, 116 bp, Homo sapiens; identical to SEQ ID NO: 203188
  chr12:112924321-112924437
  hypo

SEQ ID NO: 215077 - DNA, 49 bp, Homo sapiens; identical to SEQ ID NO: 203189
  chr12:112926827-112926876
  hypo

SEQ ID NO: 215078 - DNA, 65 bp, Homo sapiens; identical to SEQ ID NO: 203190
  chr12:112926914-112926979
  hypo

SEQ ID NO: 215079 - DNA, 97 bp, Homo sapiens; identical to SEQ ID NO: 203193
  chr12:113495127-113495224
  hypo

SEQ ID NO: 215080 - DNA, 248 bp, Homo sapiens
  chr12:113598986-113599234
  hypo
cccctgcacctgtgcctcagcgttaccctaatctgaccacaactgctctgcctacctgtgcacccacactccccaccctggctctcaccttggccacggtctcgcttcccacctcttcgctctgggcctcgccggtcagatgccccttcttcgtccgagtcacgatcatcaattttctgtttctgtttccacttctgatagctgggaaacctcgttaaggaagctgcgtgaagcccctgggatgggag

SEQ ID NO: 215081 - DNA, 156 bp, Homo sapiens
  chr12:113629777-113629933
  hypo
ctgacaatctctagtcgattcttgcctttttctcccgattgcggatttgggggccacctctaagatgcctctctccagccctgtctcaaccatactccaaattagtgccaacccaggggcctggcacctcccacatcatccattgtcttgctgcca

SEQ ID NO: 215082 - DNA, 308 bp, Homo sapiens
  chr12:113669642-113669950
  hypo
ataaccttgaaaacagtcagcggggccactgttagagcagtgtagagacagaccacagtccacaccgcgtgacaggcggtggtctcacccaccacattcagggaatcaggacgagtctgaatgtagtgggcagtccaaggaatttcccagggtaactctggtcacactcagctctgccttctccctgcctttaaagccagctgctgcctaagatgggctggaccatgtgccttttctgagtgaaggaaggattgggctcgcgggggctggctgaggtctgagcaggatgctccgtctctgctttggtg

SEQ ID NO: 215083 - DNA, 86 bp, Homo sapiens
  chr12:113704020-113704106
  hypo
aaggatgccaaggcgctggcggcctacctctttgcacacaatcacctcttctacctgatggagctggccacggccctgctgctgct

SEQ ID NO: 215084 - DNA, 558 bp, Homo sapiens; identical to SEQ ID NO: 203195
  chr12:113796336-113796894
  hypo

SEQ ID NO: 215085 - DNA, 61 bp, Homo sapiens
  chr12:114254876-114254937
  hypo
atcctttcctagacgctgcggagcacagacgggcgctgcgagagacggccctgcacaaaag

SEQ ID NO: 215086 - DNA, 468 bp, Homo sapiens
  chr12:114273298-114273766
  hypo
ggaaaagctgcatctttgacactctggctgggaggcagtgggggccggggtcagtgggggctgccgggaccagggctctagcaagcaggctccttccctgctcctcgcgaggctgggagggtgactgtttgctggaggccggcgacccatggggacagccacccgtctgtgccggaagagcacttctccgggcactctgctcatagatctcccgccccagcccaacctggcttgggcaggcgggggaaggccccactgccagccactcgccatgctggtcatgtctgcgctcccagctctggaggtgaaaggtagagacgctaaccacagcccatcagtcctccccagctggaataagacaacatgggaagcagagccacgctcccagccaaataaaagcctgtttgcccagcctccctggctgtgagtgctgtaaaacacagggttctgcgcacggatttcttccat

SEQ ID NO: 215087 - DNA, 148 bp, Homo sapiens
  chr12:114273850-114273998
  hypo
ttgtaacacgctcaggaagaaaaggacacagccagcggcggactttcctctttcttccctccttgctctctcttttcaaactcccacatgcaaggcagtgaagaatagcacttcacctaccacggggctgctgcgctggagatgagaa

SEQ ID NO: 215088 - DNA, 109 bp, Homo sapiens
  chr12:114282487-114282596
  hypo
ccgtcttccgccgcagggcctgcagggtcacctcggagtcggcccactccagcaccagcctccgcccgtacaagtgggtgctgtgacacagggcgttgaaggctctctg

SEQ ID NO: 215089 - DNA, 197 bp, Homo sapiens
  chr12:114282867-114283064
  hypo
gccgtgtgtcatccgatctgtggagggcgaccccattagtgggctcgcctcccacccggctgtctgcatggcggccacttgagaaagccgagccctggccggctgctggatgacaagcgtgcaggcctctgggtgtcactgggtgtcgctctccttcactgccctggtgactctgtcccccacgctgctcttgaagg

SEQ ID NO: 215090 - DNA, 92 bp, Homo sapiens
  chr12:114290576-114290668
  hypo
tgaagtcccttgtccatgttcgcacagctgcaaagaggccgcttgatgtcacaggccacactaaccagcgtgcagcacgttcctcctctgca

SEQ ID NO: 215091 - DNA, 139 bp, Homo sapiens
  chr12:114318248-114318387
  hypo
gatcctgacaggtacgacagctcttgttctgtgagccttgtcgtaaacatttttctgcatgagggtcatatttcaagtggcttcggtctcaggggaagcagagtgatgtcacagctgcgaacggcgagactctgggcta

SEQ ID NO: 215092 - DNA, 304 bp, Homo sapiens
  chr12:114337459-114337763
  hypo
ttagtaaatatttgctaaaccgacaagttatttcttaactaaaaagcagtgtttgagacctcccttttccgtggaaaactctgcgatgcgtgaggggagagaagctgttcctaaagaggaatcccccaagctgtctggggctccctgctgcctttcaccacccagaatgctggaagacatggcgcgcaattatcagctccaacaatgagccaacggcggccctccgagcaagcccagacaaagcacagagaccttgcagctgaaaaggctctgaatgcagacaggggaggtgtgaaagcaaggt

SEQ ID NO: 215093 - DNA, 146 bp, Homo sapiens
  chr12:114337793-114337939
  hypo
ggaggggaggaatgagggcgcacaatgccacccttcccccggtacaggcacgctctccctggggcaccctgttccactgtctgagcttttgtcgcccactctggaaccagtctaggcgtgcagtgagggaaaacgccagctgcagc

SEQ ID NO: 215094 - DNA, 147 bp, Homo sapiens; identical to SEQ ID NO: 203201
  chr12:114841493-114841640
  hypo

SEQ ID NO: 215095 - DNA, 79 bp, Homo sapiens
  chr12:114983017-114983096
  hypo
gctctaagcactatccatctcgccactcattaattttaaagatgattctgaaaggtacggtaggaaacagaggcacagt

SEQ ID NO: 215096 - DNA, 203 bp, Homo sapiens
  chr12:116394793-116394996
  hypo
gggaatataaacaagagaatcgtttaacaccaaaataacacggtaataagtgaaaattgcatcttgataggatttgggcgtgcggtgaattccaaagcacgatttcctttttatactggcttgactgtaaatgacaagcggcaaagactgttttcaatatgtggcttatgcttctgcagtatgtcttacgaggtttgctttta

SEQ ID NO: 215097 - DNA, 259 bp, Homo sapiens
  chr12:116443623-116443882
  hypo
agtcctttcatgtagcgaaatttttgtttatgtagctacggcaaactcaccccaagttcgtcgtcatcagaattatcaaagatgttgtctaagtcatgcagggaaggtgccaaatctgttacctgtgtaaggctactggagccagctctgccagcagcattatcctgccggacatctgtaggaaaggaggcaaaagacacagaataaacaactccaccaagcgcaaaggagtagggagaggacacggatctcaatgaac

SEQ ID NO: 215098 - DNA, 168 bp, Homo sapiens
  chr12:116756230-116756398
  hypo
tttcactgttcctgctgaagccaaaggtgccagaaaagcctagacattgagctccgcgctccccagtcgtgactctgtgtctacgacgaactttctaaaggcagtggcttataaacgagcagtactgactccatggcggttccatctacttcccgagtgtgtctgtgt

SEQ ID NO: 215099 - DNA, 54 bp, Homo sapiens
  chr12:116941370-116941424
  hypo
attgaaaagaaagaagtacgtttcccatactacggggatttgctcacctaactt

SEQ ID NO: 215100 - DNA, 192 bp, Homo sapiens
  chr12:116999941-117000133
  hypo
gtggtgggatatgagcgtggagcatctctgctgctacctagggagaggctgcctgagaccgatgccaaaaccccagaaagcagagataaaagatagtgggagagtcctgacaacaatatttgtatccctggatccacctgtgcctgaaaccatccgtagctccaaactcgcaagttccgtgaaacaataaat

SEQ ID NO: 215101 - DNA, 324 bp, Homo sapiens
  chr12:117150057-117150381
  hypo
tccaacatcagggactgagtcgtacacaggaagatcactgagtaggttctgtggagacgcagtcggcccatatgcacgtcaccactcggctcccagctcaggtgcagaccaacggcgaccacttgctccactttgctctgtgacagcagacgaggtaaggcatgttgcagatacatgctgaatatagggatgcctgtacacaaaactgcactcatgctgtgataacacgcaaaaggtcacacactggaagagccttgcccaacgaacgatagactaacaggccagaggcggggaaagcttctcggagtcccactatcttctttg

SEQ ID NO: 215102 - DNA, 100 bp, Homo sapiens
  chr12:117150587-117150687
  hypo
agggtgtctgcattcggcggagtccaagagtgcggtgaggacacagtggcaaaggaataatgccattccttgaggcagcgctgggctagtagagacctgt

SEQ ID NO: 215103 - DNA, 243 bp, Homo sapiens
  chr12:117155345-117155588
  hypo
caccaccgtgagcccggcctccggtttcatctttcccgaatgggactggctggaggggccaagctgctttacagaagagttccatctggtaagcccgggtggtgagcgaagccaaagatgacaacacgagaaggggtcaaagccaaggtttcctcacgctgcctttgtcttcttcctgcagcctggcccgatggctgaagctgggtcccaggaggcgagttcttcagcggggcctcctcaccc

SEQ ID NO: 215104 - DNA, 208 bp, Homo sapiens
  chr12:117155627-117155835
  hypo
agctcgggcgggctttctccatagcaatactttgctatggggtcccggtaggtgttctcatgctgcacgctctgttggcaaaaggaaaataagagcgcagtgagagcgagcacagcttcacacacctccctctcggaagagtgagagtggatcgggactgtcagactctccctgcagggggctggccgagtccatctccaaatgtcac

SEQ ID NO: 215105 - DNA, 286 bp, Homo sapiens
  chr12:117407820-117408106
  hypo
ttagataaagcaggcgaaggttctgagtaatgagcagatgctgctaatgcagggacggcggagaccttgccaggactccatctgctccgtgcttgcctgcctttggcctcgtgccacagcattagggaatggcagtgtgcttcgaaacccgctccctggtcaccgagtttgtcttgaaatctcgctctttggtgagaaatgagattacacacttcttaggtgcaaagaagtttttatttgtccccctcagtagagagaggagagacgcgatctggtgcatattagc

SEQ ID NO: 215106 - DNA, 62 bp, Homo sapiens
  chr12:117408136-117408198
  hypo
tcctctttatatggtgccatcaagcacggcaaagtggcttatccacctccgcaacactccca

SEQ ID NO: 215107 - DNA, 155 bp, Homo sapiens
  chr12:117408228-117408383
  hypo
ttgtccgggactgtggctgccctgggcggaggtgactatgatttctcatttactgacgtatcaacaatggacgggggtgggtctctccaagctgctttttagcggtgaacagtaggaccatgttttagttagacggctgtagagactaggtactt

SEQ ID NO: 215108 - DNA, 239 bp, Homo sapiens
  chr12:117466159-117466398
  hypo
cgtgtgccagggctcgagtcccacgtgctgccaactcaaacatagcctccttccccacccagctggccaccctggcctcagctccctcaggacgcctcagggatctcgctgcgcggtcctatacggtccctgcttagccagcttctgtgtgtccgccctcccagctccagccctgcaggccgtcttttccgtctccagccccttacctcttttcctccgagggcctttggatgtgcttg

SEQ ID NO: 215109 - DNA, 134 bp, Homo sapiens
  chr12:117476986-117477120
  hypo
ttggtctcaatgtcgatcccctgccagatctggaagggacggagcagcgttaagggcacgttcccgccgccacctcacacctgaccaggccccccggtcctcggcccttcccacctaccgtctcctgccaccaa

SEQ ID NO: 215110 - DNA, 49 bp, Homo sapiens
  chr12:117484292-117484341
  hypo
ggccttccagaaacgcagaccataagcgggaaaggcactgcgcgtctcg

SEQ ID NO: 215111 - DNA, 202 bp, Homo sapiens
  chr12:117484371-117484573
  hypo
ccatgcacacgctggccgcctccatcatggccccgtcggcgatggagcgagcggactccttctcgatgtgagggtttcccgacagcagctcctcgaccacctgccaggtggggcggaaacaaacggtgaccttgggcctccatcagggtcgtggggggcagagggggaaggcaccaggagccccgggcgggccagaggagca

SEQ ID NO: 215112 - DNA, 40 bp, Homo sapiens
  chr12:117529341-117529381
  hypo
ttaccaccaatctgcggagcgaggacgtcttggagaggac

SEQ ID NO: 215113 - DNA, 43 bp, Homo sapiens
  chr12:117588696-117588739
  hypo
tgtgtgtgtgtcaggcgggaggactgtatgggtggaaagttga

SEQ ID NO: 215114 - DNA, 103 bp, Homo sapiens
  chr12:117588799-117588902
  hypo
tgtgtgtgtcgggcggggaggactgtatgggtggaaagttgagtttggaagcatcaaataagttatggaaaagggaaccaacgtttgtcgaggacatgccatg

SEQ ID NO: 215115 - DNA, 289 bp, Homo sapiens
  chr12:117593454-117593743
  hypo
gcccgaaggaggccggccatggggcgtcggccgcctctgaaggaaccgatggcccacgcccacagtacctacccgagggctcaaacgtgcgctgaaaacacgcccgcggggccactggcacaagcggaacccgccgcttaccttgggctgcgtatcgacaggagccgtcctccaccagcacgttatagaaaggctggtggtggccgtgcggcaggctgtggacgttcatgttccggatccactcgtgtcccatcatgcaggtggggtcccagccgtagatcacacagtt

SEQ ID NO: 215116 - DNA, 225 bp, Homo sapiens
  chr12:117599139-117599364
  hypo
gaccaaggaactccacgggaggtggggagcatcaggcaagcagggccagaccgccgagaacctaaaagccacacggaggagagcaagtctggtcttcaaggcaacaggggagccaccctgaggggtttaagcagtgaagggacctaattgatattttgttaagattcctctggcctgcatacagagcgggttcacaggggctcagagtccagagagggaggacaa

SEQ ID NO: 215117 - DNA, 329 bp, Homo sapiens
  chr12:117600037-117600366
  hypo
ggatcatgatgaggacgaaggtctggcagcaggaaggagaaggtgcctgtgtgctggcttcttcagaagcgctctggccttggcccactgtaccacgggatgccgcatggggtgggctagggcatcagcttgcctgcactgaactcctagtgccgtcacggcatgtgcaggagacctggctaagttatttaacttctccctgcctcagtttcattatttcccatatggcaaaaagaaaaataatatctaccctatagggctgctaagaagatggaaggaggcgttcagtcagtactcccgacttaaaatctcaccatcccgccctctct

SEQ ID NO: 215118 - DNA, 87 bp, Homo sapiens
  chr12:117788578-117788665
  hypo
tccaaacttatctgggctcccgaagaggctgacctctatggacatcaaaaggtctcttggccgggtgcggtggctcaagcctgtaat

SEQ ID NO: 215119 - DNA, 434 bp, Homo sapiens
  chr12:118198873-118199307
  hypo
gatgcagcgcggtgaatcccgggatcaagtgtatcagttttcgggaggagggcggtggggtccccgggggcttcagcttgttcttcttcctcatgggcggcgtgcccggcggggtcacggtggtgacgatgttgggggtgcgcggcggggtgcggaccgcgtgccgctgccggggcgatgggggcagggaacggtggcccgactccagtggcgggggcgggcacaagcccgggtaggcgtccacggtaagcctgtccacgtgggtgtacacaggggccccgggagtggggctggtgtgacaatagtgctggacgcacttggacgggaccctggggctctgggagagatgggtgcggatccacggggtgggctccggggggcacacgggattgttctccttccccgtctctgtcgtgggccactggatggtccag

SEQ ID NO: 215120 - DNA, 202 bp, Homo sapiens
  chr12:118293483-118293685
  hypo
aaacgctttgcatgacagtggggtctccgaatctcgggtttgccactcattatctagataacctctgaccagtcgctcaacctctctgggcctcactttgctcatctgtaaagtgggactcctaagtgtccatacttggcaaggtagcgcaggtgcttagtgctattataattactaccctgtctggcgtcaacactgtgcc

SEQ ID NO: 215121 - DNA, 107 bp, Homo sapiens
  chr12:118474193-118474300
  hypo
gtatcgtaagaagccgtgacaagcagggcagagtcgggggagaagtcacaagagacaacactgctttgatggccctctagcttccgaattaacgtgtaggacctcat

SEQ ID NO: 215122 - DNA, 120 bp, Homo sapiens
  chr12:118481549-118481669
  hypo
ccacataagactttaaatcctagaaacaagctggccttcggtgaaatctgctgtgacttttctttttgtttctttttaagagttgatgtaggccaggcgtggtggctcatgcccgtaatc

SEQ ID NO: 215123 - DNA, 325 bp, Homo sapiens
  chr12:118583595-118583920
  hypo
cataaaatgtgaggccgagtcttattgcccaaaaagcacctttgcttcaagtggtccttttgacccaagaaggatgttctaaagaagatggctgaaaaccttcccccttggtgaagtctggcgcggacaccgtaacaatgcctaagaagtagcctgcacttcccgttctgatgtgttatccacagaggctcagtaccaaagaggtgcgcagggtaggagggtgagaaggtcacggtctcatgccatctgatgtaccgaaagaaaggaaaggaggtgtttgaaggtgcaaatcactgtgatttggtctctgcgatgcaaagggggg

SEQ ID NO: 215124 - DNA, 213 bp, Homo sapiens
  chr12:118590038-118590251
  hypo
tcaaggtgtgctctgcgcagagacactctctgctctagcttctggagctcacgttcatgttgtgcctctgtttgcatcttgattttgctctggtaggcgttgagcagctccatttcctgctggagctgtagcctcaaggcctggcattctgcttcttgagcctcatctagccgtaactgcggacacagaagacacacacggtcatgcaccctt

SEQ ID NO: 215125 - DNA, 45 bp, Homo sapiens
  chr12:118860436-118860481
  hypo
ccttgaactttttttcttttttctttttttttagacagagtcttg

SEQ ID NO: 215126 - DNA, 99 bp, Homo sapiens
  chr12:119626324-119626423
  hypo
ttacaggtgtgagccactgcgcctggcccctaaactcttttccaagccatcgttgcatttagcctttgcagcaaaagtgtgcatcggagaggagacatg

SEQ ID NO: 215127 - DNA, 51 bp, Homo sapiens
  chr12:120117233-120117284
  hypo
ataggaaggtgcggcgggcagctctgagtgccagcccggtggcagattttc

SEQ ID NO: 215128 - DNA, 378 bp, Homo sapiens
  chr12:120117590-120117968
  hypo
tggacaagcccttgcgctgcctgatttgggaagagaggtcggcctgagcgctgcctcctgtcctttgatatctggcactgggaagtaaaggggagaatcttggtttccaaatcccaaatgctcaccgctgcctttgttccctcacagtgtgatccagctttgcttcctgagcccaatcacgtcatgctgaaccacctatacgcgctgtctatcaaggtaatgacatgtctgtccccatgagagctgtgttgcccagtgtgtgctctgaggacccccagcagtggaatgacctggcgggactgacttaaagggcagcttccagggtctggcacaggccatcaggctcaggttctgaagctggcccgggaatttgtggtt

SEQ ID NO: 215129 - DNA, 196 bp, Homo sapiens
  chr12:120134818-120135014
  hypo
ctgttcaggaggtctcgcattccagggaaggcacgaggctggccaggagtccctgacctgctctcacgacctcacatctctggacctccaggcatggcttgccttccctcctgcctgagcacccctcactggtctccctgcccccacctcgtatctgatgggaaatcctccctcacctccacgtccaggctttcaa

SEQ ID NO: 215130 - DNA, 377 bp, Homo sapiens
  chr12:120137279-120137656
  hypo
tggtatgcgtgccccggtgcagttccctggccttgaatctgggctgactctgcggtctgctctaaccagtagagcgtggtggaagtgagcacgcttgccagcttccgcttctatattcttggaagaagccagcgtggaaagcaacaaggcctccagccaccagccgcagctaagcgcccacattatggccagcactcattgcgtgccatgtttgtgagcctgtcttgggctttctagttgtcccagtggccctgctgataccacatgaagcagaactgtccagtcaagccacggagttggggccaataataagctgttgtttgaagtcactaagctttcagatggcttgttatgcagcaagagagaaacaaaatagc

SEQ ID NO: 215131 - DNA, 401 bp, Homo sapiens
  chr12:120147741-120148142
  hypo
gcccacggtggtttcgttgcaatcaggacaaagggtttggctttagatagtcttcgaggcttagcactcttcacttggcctaacagtgggatgttctttgggaatgtcagactgtgctaaactggatactggaagggaactgaatctggacagagggggtccattagctgaggcttgggcatctatggggacacagagataagagctacaacggctcctctctactattttgtgttttacgagcatgaaacgtggcttcaacatattggctcccttgaaagtaaagaaaaaacaccatgtccttggcctcacacctgctatcatgagtagcttctccaggtccttgataatataaatttggaagactgctccaattcctgggacatgggttagggagtttt

SEQ ID NO: 215132 - DNA, 335 bp, Homo sapiens
  chr12:120148396-120148731
  hypo
agtttcagcagggagtttccaagcagtttcttttcataggtgaaagaaaagaaaaacagaagacatcgtgaggctgatctgtttatgaccaaaccatccagagaaaccaagagaaggttaaggccaagttattcctggaaatgctcagaaacgcacatatgctcttagctcagcccgtattttgatctgagctccaaatgcaaaatgcgagtgctattggtatctctggggcagctgttaattagcatctgagttataatttggctgggatgcagaaataagggagggtagtagacatggaaagctattctgtaataagaaataagctgaagcta

SEQ ID NO: 215133 - DNA, 434 bp, Homo sapiens
  chr12:120155994-120156428
  hypo
atatgcccacatgtcttagtcgactaaaagaaatttccatacaactccaacgtaccctctggagttgaagactcctttctgcggctggatggcggggccagcaggctcatggcactgggctggtgctctggcgaccgcacgatggcggacatggcgatctgctgcctcgcggtggctggcgtggatgggtgtgggtggtccgttgctttgcggtgggcagctgcagagagaccaggacaatgccttttggttagctgggtcgcctagaggaccaaactaagccgaatgtccctgggctatctttcaaggacccaagaccaaaagaatatgcgtcacatcaacttggcaatgcacaggggccatacgtttttcagacatgggatgtctggtctgaaagcgtatgggccataaacgaagacactgagctagttagt

SEQ ID NO: 215134 - DNA, 84 bp, Homo sapiens
  chr12:120172972-120173056
  hypo
ggctggtaagctgcatctctcgttccgtgatctcccggcggagatggtccacttcacttcgcagttgtacaatctcgtcgttgg

SEQ ID NO: 215135 - DNA, 145 bp, Homo sapiens
  chr12:120173137-120173282
  hypo
gctgctcctccaggtctgtgattacctaaaagaggaaaggaatccagttacacgccaagcacattcatttcaaataagaaattgcttctagggctatggatttctgaacccacgtgacactggcaatcaacgtgccgctcatgag

SEQ ID NO: 215136 - DNA, 212 bp, Homo sapiens
  chr12:120222435-120222647
  hypo
tcaaagcagatgggatgtatctcagccacaggtgaggacccaggccacctgccggaagaagcagacatctggctgggtcatgctgagaaacggactgtttaaatccagggcctcctctggtttagatttaaaggatttacagcaacagcaaggcccgaattcatctccctctgagctgctggaggcgcgacttcagcgaaggcaggagcgcc

SEQ ID NO: 215137 - DNA, 35 bp, Homo sapiens
  chr12:120545353-120545388
  hypo
acttctacagaaacacgtgcacaagaataagtatc

SEQ ID NO: 215138 - DNA, 297 bp, Homo sapiens
  chr12:120565538-120565835
  hypo
aatactttctgggaacgccatcttccaagctccccattggaacaaatgtattttcaaaaatgaaaacattgagcaaagatgtggagcggcaatgctgctgctggcccaggcctctcatgtcaggatggtgtcgtccacctgctccgtggagtcggcctggctggccagcttcttcagggaccttcggttaacctcgttcagcacctccaaactggccacatccaggatcttggagagggactgtggggaaggatgagcaggaggaaacatagtcagaacatacggctgccacgttct

SEQ ID NO: 215139 - DNA, 156 bp, Homo sapiens
  chr12:120580290-120580446
  hypo
acaaggcccaggaaactcaccgttctcttatctgcacacgtgctggccaggaaacccagcaggagcccaaagagagtgggtaggatctcacgcaaggtgcggggggtattggagacaacaatcttccagacatgcagggacgcctgccgcaccacc

SEQ ID NO: 215140 - DNA, 36 bp, Homo sapiens
  chr12:120580509-120580545
  hypo
agggcagtgatgatcgcctgcagccagtagaagggg

SEQ ID NO: 215141 - DNA, 171 bp, Homo sapiens
  chr12:120613496-120613667
  hypo
aataccaggggccacgcctcaaccacccgcatggccaagaaggcttgctcacctccgaggatagcaaataggtgcttggtcagggattccatggccgaagagtcactgcactggcgtgccaggttccgcagtgccagcacagcttcatccatcaggcggggactgttggat

SEQ ID NO: 215142 - DNA, 201 bp, Homo sapiens
  chr12:120647762-120647963
  hypo
ggggctaacccacgttgtgtgggctcaggcacggccgcgtctggttctgtgcaggaacacaggcagaggcaagccctgggtccgcatcatggctctgccctcactcagattgccttgtacatgtaggttcttgtcctagagcctctttccctacttctaaatgagtggaaagccacccacaagcccgtgagtgaggatgcc

SEQ ID NO: 215143 - DNA, 83 bp, Homo sapiens
  chr12:120758714-120758797
  hypo
cgccatgctcggcttgttaatgtttattatatttcatgactacagtgtcaaaattagcctgtagagtgtggtgaagtctttta

SEQ ID NO: 215144 - DNA, 240 bp, Homo sapiens
  chr12:120908355-120908595
  hypo
atctcgctggactcaggtgatcctcccacctcggggcgccgtgaggggtctgcgctgcgtccagctagtttattttctattttttttgtagagaggctggtctcgaactcctgggctcaaccgatcctccagccttggcctcccaaagtgttggattaccggcttgagcccggcgcccggctggaatactcctaacctaaagattgttcaggctgggtgcggtggctcacgcctgtaatc

SEQ ID NO: 215145 - DNA, 36 bp, Homo sapiens
  chr12:120956375-120956411
  hypo
tttttttccctgagacggaggctcgctctattccca

SEQ ID NO: 215146 - DNA, 31 bp, Homo sapiens
  chr12:120991484-120991515
  hypo
cgtgagccacggcacccaaccaggaagagaa

SEQ ID NO: 215147 - DNA, 94 bp, Homo sapiens
  chr12:121166589-121166683
  hypo
gtgagccaccacacccggccttaaaaatgagttttaaaagggacgtaaaacattgtttttatatgagggacccactaaccgtttcccagatatg

SEQ ID NO: 215148 - DNA, 180 bp, Homo sapiens
  chr12:121203946-121204126
  hypo
tcgagatcacaagctcactcaggggcttaagcagaatcacctccagcgaggagagtgcaaaccgaggcacaggccaatccaagttattgctttcacaggtttataactgctgctctcacctttaaataggccatcgtgaggagtggcaataaagtaaatggcaccaaatagagaagggcg

SEQ ID NO: 215149 - DNA, 241 bp, Homo sapiens
  chr12:121205142-121205383
  hypo
aggttggaggacagccagagcgaggatcatctgcagtctctctggttctcttacctacaaagtatccgatgagggtgcagtgaaagtaggagaccttctgcatgcgcccggagatgttggcaggtccaggggccccacaggagtccccactggcttgctttttgtagttgtcatagcgaaggacaaagcatagtaggagaccaggcataacgatgtctccgatgcccaacatggagaagtg

SEQ ID NO: 215150 - DNA, 37 bp, Homo sapiens
  chr12:121352799-121352836
  hypo
ccctgaggccttcccgggaacgcgtcagcacttgagc

SEQ ID NO: 215151 - DNA, 35 bp, Homo sapiens
  chr12:121531380-121531415
  hypo
gggcagggggcagcacttgtcggggagactcaggc

SEQ ID NO: 215152 - DNA, 300 bp, Homo sapiens
  chr12:121687672-121687972
  hypo
cgggcctggggatggagaggcgtcagggtggcagacacgggaccgccaagaactcggacaggagagatgcgggacggcgggagatactcactggtctggaaattccagggcctgactcttgatcttactgtgtaaacacatgatccgctcgtccatgaatgggcactgcaaagaggccagggacagagtggcagtcaatggcggccacatctgcccttcgagggccacctgtgctgtgccactccacataggatacagcagagaaatcaacaattgcggcccaggctagggggcaagcag

SEQ ID NO: 215153 - DNA, 209 bp, Homo sapiens
  chr12:121688092-121688301
  hypo
tctgtagctgggcctcagtttacctacttacaccaaagcaaacactgctcgtcacctacttgccaggtgaacaacaggaacaacaagaataacacaaaagactttgtgttatttgtggcagcagcagtgattttcaagggcttagcctggatcgcgccacgccctgccctgaggttttcattcactgttccccgtccctggaatgttct

SEQ ID NO: 215154 - DNA, 260 bp, Homo sapiens
  chr12:121688331-121688591
  hypo
cccaccatgcaggtgtctgactaaagctcaccttctcagggaggacttcctgaagccctgtctaaaacagacaacccccaatgccgccaccgcccacatcactcctcatcgtagcacttatccctgacgttatcgtacagatttgtttattgtttaacccctcccacgggaacgttagctccaagaaggcagggatttctggctgtcttgctcactgcggactctccgtgcctaggagcgttcctgcacaaagtaagggc

SEQ ID NO: 215155 - DNA, 178 bp, Homo sapiens
  chr12:121711833-121712011
  hypo
cctggctcaccaccggctcacgcacctgcatacccgtgatggagacgtggtgagactccactgtcggccgccggggcagccgaggcgaggactgcggggagctgacgggtgagtagggcagggacgggcagatgcagcgtccgttcatgtccaggctgccaccggctgccagcccacc

SEQ ID NO: 215156 - DNA, 77 bp, Homo sapiens
  chr12:121754200-121754277
  hypo
ttatcatgactcagcaattccgttcgtaggcatcaaatgaaaacaggtattcaaccccgggcgcggtggctcacgcc

SEQ ID NO: 215157 - DNA, 152 bp, Homo sapiens
  chr12:121756057-121756209
  hypo
ataaaaacagagatcggcttacctgcgcaaaagccaagttcagcactgtttcagaggccaagtactgtaaccggtactccttggagagggccagagcctgcaggagcatgggcagcgcgatggtaggggaggaagatcgccagtacagctct

SEQ ID NO: 215158 - DNA, 180 bp, Homo sapiens
  chr12:122179081-122179261
  hypo
tgcttgatagagaaaaagaacacacaggcaggcacacatacatgggggataaagcaaatacagcatgatggaacagctagtgaatctggtgaagaatagaggcgagttctttgtattgtttttgtaattctgcaagcttgaaattattattattactattattattattttgagacagag

SEQ ID NO: 215159 - DNA, 280 bp, Homo sapiens
  chr12:122182117-122182397
  hypo
ctgtgcctggccgagagtttctcgttcccagtacttcagccgacattctgggttcagtcctcattggctgggattggttgaatgcccatttgtgaaccaatcactgagaagctgcttgggcagcgccatgccgtgtgctaagtctgtggccctgggcggtggagggatggccacatgggtgatgggagaagaagataagtagtttcccgggtgaaagttgggtgctgttataggaaggtgccctgccggacaagtaagcaggcagcgtccttttgtgggt

SEQ ID NO: 215160 - DNA, 43 bp, Homo sapiens
  chr12:122192680-122192723
  hypo
tggacgtgaattttggaaggatgctattcaacccagtacacct

SEQ ID NO: 215161 - DNA, 116 bp, Homo sapiens
  chr12:122192843-122192959
  hypo
ctcagtttcttgacagatacagtgagcgtgacaggagctacttggcagggcagcttggagggcaggagaagctgtgtctggagactggttagactggtgcctgtttaaatattagc

SEQ ID NO: 215162 - DNA, 66 bp, Homo sapiens
  chr12:122192989-122193055
  hypo
agactgggcatacgggaaaaaggctcacagcttcatagctagtgcgtccacagagcaggattctct

SEQ ID NO: 215163 - DNA, 95 bp, Homo sapiens
  chr12:122213469-122213564
  hypo
cagggcagatgccccagcctcgccctcctctctggactcccccaggtgttcgtactggcgttcaccttcctcatcctcttcctcggcaacttcct

SEQ ID NO: 215164 - DNA, 111 bp, Homo sapiens
  chr12:122213693-122213804
  hypo
cagccctctcaggcccgtggcatcgctgggagagggcccaggccctggtcccccagtggaccccagtggtctagaggaatgtgagccccgcctgtccgcacagtgtccgcc

SEQ ID NO: 215165 - DNA, 196 bp, Homo sapiens; identical to SEQ ID NO: 203236
  chr12:122214114-122214310
  hypo

SEQ ID NO: 215166 - DNA, 169 bp, Homo sapiens
  chr12:122218793-122218962
  hypo
ggctccagctgggcggcccggagcttccgcagctgctccttgtccttcctcaggtctgtcttgcagccgatgagcaccatggggatcccgcggcagaaatgcgtgacctcagggaaccactgtggagggaggaggcgggatcaggggtgcggccgggcccagatgtggg

SEQ ID NO: 215167 - DNA, 322 bp, Homo sapiens; identical to SEQ ID NO: 203237
  chr12:122231523-122231845
  hypo

SEQ ID NO: 215168 - DNA, 391 bp, Homo sapiens; identical to SEQ ID NO: 203238
  chr12:122231905-122232296
  hypo

SEQ ID NO: 215169 - DNA, 204 bp, Homo sapiens
  chr12:122252457-122252661
  hypo
gcaggtgctcagccggctgatgacgggccagggcgcctgcccctacccgcccttcatggccgctgcggccgccgctgcctcagctgggctccagtttgtcaacctgccgccctaccggggccccttctccctgagcaactccggcccaggccgcgggcagcactggccaccactgcccaagtttgacccgtcagtgcctccacc

SEQ ID NO: 215170 - DNA, 165 bp, Homo sapiens
  chr12:122261814-122261979
  hypo
catgccaggctcccgagtgaatcattggcacgttttaaggactccctctgcgccaggcccatctcacccccagagttagcaggtctcagggtcacatgtaacagcagtgccgtgcagcttaacagcacacacgggcgcagggcctccttgtcctgtccccttcat

SEQ ID NO: 215171 - DNA, 211 bp, Homo sapiens
  chr12:122276669-122276880
  hypo
ctcaacaacaacaaaaagagatcatcaagccggcagacaagatgctgccaaactctgaccccacctcagggcctttctccgttcgctcttcctggaatccttttcccgagcatggtcccatggctggctcccaaatgtcaccttctcggagaggtcttccgttatcaaaattagctcccctgcgatcttcgcttccacatattctcatcaa

SEQ ID NO: 215172 - DNA, 41 bp, Homo sapiens
  chr12:122282339-122282380
  hypo
aactgaggcatgaaacgattaaggatctattaggccgagtg

SEQ ID NO: 215173 - DNA, 34 bp, Homo sapiens
  chr12:122425316-122425350
  hypo
taaaaagaatgcaggcgatagagtccaggcctgg

SEQ ID NO: 215174 - DNA, 160 bp, Homo sapiens
  chr12:122444435-122444595
  hypo
tgactcttacatcccggtttgtgagttctggatcaggaaccaccaagagcctccccggcgccagctctctgctccagacccggtcccacctgcaggtgagggcctcgcacgcacagcgtctgcgctgggagcccatggacttgccgcgctcctgttcagc

SEQ ID NO: 215175 - DNA, 85 bp, Homo sapiens
  chr12:122455990-122456075
  hypo
ctccgtctcaatcaaaaaaaggccagaaaattaaaatccacgactcacactaagcgggagtcctttcccacgataatctgggccc

SEQ ID NO: 215176 - DNA, 571 bp, Homo sapiens; identical to SEQ ID NO: 203240
  chr12:122460949-122461520
  hypo

SEQ ID NO: 215177 - DNA, 76 bp, Homo sapiens
  chr12:122463063-122463139
  hypo
gagaagaccccagggcgatggtaggagacgaaagcttgggctgcagcgtaagcttggaggcccgctgcggtggctc

SEQ ID NO: 215178 - DNA, 213 bp, Homo sapiens
  chr12:122479007-122479220
  hypo
ccaggttacccgtgtggggccgcctgactgcctggtgcttcctcggcaggttgaggtagaggaggggcgtggggctgggagttgggcagatgggtccggcaagtggctctgctgctcccagcctcagtttccccctccggaaagtgaaggtggtaacggtgcctttccaacgggttgtggggaggattccacgaggtgtccataaatgcttct

SEQ ID NO: 215179 - DNA, 449 bp, Homo sapiens
  chr12:122480940-122481389
  hypo
gactttaagggagtggaccacgtgtcccgtggaatatgccacctcccgctgtctctctctcccttttatttcctatcaagtggaactcagctccaggctggatgcagtcagacagaacgccttggcaatcccgcctcacggaccatgccgtgtcttctgtatcgcttccctgccagacacacaagacgtctggtttctacacccagaatgaggcctcaaatgtccccccaggattttaaatatgttaggccaccatccccagctggctgcctccagacgcagggtacagttggctcagtgtggggaaggtcaggccagtgccggaattctttgcctctctggacacatgggatggctgtggtgcttgggtgggtgggtgggtgggggtcagggggcgggagtgagctcaggggtcccaggaggaggcgtatccagtatccagaccccta

SEQ ID NO: 215180 - DNA, 389 bp, Homo sapiens
  chr12:122481629-122482018
  hypo
gagatccgtctcaaaaaaaaaaaaaacggtaaccagacccctccccgggagagctgccatggggttccgggcattgaggcacagggatgctgagccctctgacctacccgtccttggcagctgtgggatttcatcctgtggttctgttcccaccccctacagacgataacagcaaccagagctccatcgcagatgcctcccccatcaaacaggagaacagcagcaactccagccccgctccagagcccaactcggctgtgcccagcgacggcaccgaggccaaggtggatgaggcccaggctgatgggaaggagcacccaggagctgaaggtatgtggcctctggaggtggggctctgacggcctccctgtaaccggccttcaggcagt

SEQ ID NO: 215181 - DNA, 145 bp, Homo sapiens
  chr12:122483263-122483408
  hypo
gcgatagagcaagactctgtctcagaaaaattttaaaaagttaataataatacggggtcagacagcaggcagcgcctcaggtgtggggggctcgtaaggccactgcctggcctgggttttcatggtaagacgggagccactgggg

SEQ ID NO: 215182 - DNA, 240 bp, Homo sapiens
  chr12:122491189-122491429
  hypo
ccgcgcccggccagggctcctagtctgagaagtaagtgtcaaccctgctcagactccctgggaaggagggtcttgctgtcccgttcccccgccctctgtgtcccggcctgtcccaggccctgcactgtctccttcttcttcccatcttgcctgcttgcttttaaacttaagcatgggttattttcccctttgttattactctgcctcagaaaccccagcagggaagtcttggtcgcacag

SEQ ID NO: 215183 - DNA, 85 bp, Homo sapiens
  chr12:122602777-122602862
  hypo
attccaaatggtgcacggtttaggatttatagattgtttatttctgcaactttccatgtaatattttcagacagcggttgatcat

SEQ ID NO: 215184 - DNA, 276 bp, Homo sapiens
  chr12:122614787-122615063
  hypo
aggaagggaaggatggctggcctcatttgacatccaggccgcacgtaccgagtgggtggggtctgcagagtgggcccactgggcagctgccattcccgtagtgccatggtgggaggacagcagcagggtctagtctgagtcattggcacatttcagataccgttctcttcacggggtacgtgtgccgtgcctaagccgaggcggccgggccgtgactcatgctaaagaaaatcagaagcactcccgggtgtgaccgctcaccttggtggcattcag

SEQ ID NO: 215185 - DNA, 209 bp, Homo sapiens
  chr12:122622385-122622594
  hypo
ctgctcaggctgcccgcatcagttgcaggaggggtgtggccaccaccagagctgtgctgtggggaggaggcagggctgggtggggaaggcggagcttgcagcacctgggatgcaccggttcagccctgccgttcccagccccagctgtgcaccattctgcagagcgggttttctgtggttcccagtcttgtccctccggctcctcattg

SEQ ID NO: 215186 - DNA, 275 bp, Homo sapiens
  chr12:122622642-122622917
  hypo
ctggcccttgggcacccaggatcagcgtagggggtgaggaagggtggacagtgtgcctgcaatgtgcctgtcttagtgaccagcgggttctccagcagaaccggcagatgaagcacatctcagctgagcagaaaaggcgcttcaacatcaagatgtgcttcgacatgctcaacagcctcatctccaacaattccaagctggtgagttgccaagagcgtgggctgtggcagggcaggggagctggcaggacgtgctccctgcgtggtcattgctgg

SEQ ID NO: 215187 - DNA, 345 bp, Homo sapiens
  chr12:122712004-122712349
  hypo
agattttcaagcagcggcactcaacaactaggtgtggtctagagaccaattacaacctccgcgtggtccccgagctctcagggagctgcgcacaggcgttcctagcccaggcggggcgctggcaaccctgcccgccctctgcctgtgtcgccaccacagcccacagggctcagatgtggtttcacagacccagatgggctgagcaggcggcacactagtgggtatttcaagccccttcttgtttttttctgaacattgtaaggggttatggggttatagtgcgaacagtttcgtttctaacaaacacattgagagcagtcccatctcctccgagtctgggcacca

SEQ ID NO: 215188 - DNA, 202 bp, Homo sapiens; identical to SEQ ID NO: 203241
  chr12:122907627-122907829
  hypo

SEQ ID NO: 215189 - DNA, 103 bp, Homo sapiens
  chr12:122952405-122952508
  hypo
aaaaaaaaaaaaaaaaaaaaatttacctagagggaaaaaaagtaaaaaaaccccaattcaagacagaaaaaagcaaaatgattccagccgagaacttgaagaa

SEQ ID NO: 215190 - DNA, 133 bp, Homo sapiens
  chr12:122958416-122958549
  hypo
ggtacctcaggctcatccagcgtctgcttttcagatgtttttccctccgggacagggaggtctagctcatttggacaaggtgatgaggcaacggaattgccagttaaaggtgtgtccacaggaacgtcggagt

SEQ ID NO: 215191 - DNA, 41 bp, Homo sapiens
  chr12:122958579-122958620
  hypo
ctgcccagatccgcctctgctgttcttcaagttcttctaga

SEQ ID NO: 215192 - DNA, 143 bp, Homo sapiens
  chr12:122970385-122970528
  hypo
tttttacgacgacattcttactggcactcgggccaaaaacctgagtcactccgatgactcttttgctctcatattctgcgtccaattcatcaacacatttgatcagctctacttccccagtacatccacgttctaagcacttc

SEQ ID NO: 215193 - DNA, 164 bp, Homo sapiens
  chr12:123044412-123044576
  hypo
cgcccggcctatcttaagcatttttaaatttaatggtattaaatacattcataatcacattcggccatcgtccatctccccaactcttttcatcgttgtgaaactgaaactctgcccattaaacacagacttcccatttctccgtctccccagcccctggcaaa

SEQ ID NO: 215194 - DNA, 37 bp, Homo sapiens
  chr12:123120645-123120682
  hypo
aaagaaaatagctgactgggcgcagtgcctcacgcct

SEQ ID NO: 215195 - DNA, 36 bp, Homo sapiens
  chr12:123120922-123120958
  hypo
acagaccaagactccgtctcaaaacaaacaaacaaa

SEQ ID NO: 215196 - DNA, 540 bp, Homo sapiens
  chr12:123214289-123214829
  hypo
aatcttgaaggagcaaaataagatgatgccgaggggcataaagaactccagctggaacatgatgtcatgccagccattggccgactccatgatgaagctctcacaggagacggccgtctcttgcacgcagagatggttctccagcaaaagatacactgttcccaggatgaccagggcccacagggtgcagacgatgccagccgccacccgggtggagatagtgttcaccgcgtggtgggggtggaccactttgaaatacctgtccgcagccaccaccgtaaggaacacgatgctcccggccctgttcatggccaacgtgaagagccccactcggcagggaatgtccccaaaagcccagtgtctacgtctgaggtaatagtctgtccgaaaaggcaggcagatcataaggaggaaatcagccacggccaaattgaaaaggtaaacagtgctgggcttccaggtcttcatgtggaagcagaaaccacacagggcgaccccattgcctagtgcgcccagcacaaaggccacaatgagcagcgg

SEQ ID NO: 215197 - DNA, 198 bp, Homo sapiens
  chr12:123340660-123340858
  hypo
tgcccagctggagggcgagcggagccagggcctgcgtgaggaggctgagagtacgtggggccttggccacaggggtccaagggtgtgtccccagcccctgccaccccacacggggcatcactgcccctcctctcgcccccagggaaggccagtgccacggaggcgcgctacaacaagctgaaggaaaagcacagtgag

SEQ ID NO: 215198 - DNA, 221 bp, Homo sapiens; identical to SEQ ID NO: 203242
  chr12:123380319-123380540
  hypo

SEQ ID NO: 215199 - DNA, 220 bp, Homo sapiens; identical to SEQ ID NO: 203243
  chr12:123380600-123380820
  hypo

SEQ ID NO: 215200 - DNA, 87 bp, Homo sapiens
  chr12:123409957-123410044
  hypo
aggcatctacccaagagaggcgaaagcaaactcccacaaaaaaaacatgaatgttgggccgggcgcggtggctcatgcctgtaatcc

SEQ ID NO: 215201 - DNA, 157 bp, Homo sapiens
  chr12:123542055-123542212
  hypo
tacaagtatttacaaagtgccgtagacaagaccgcatctgaaatcagagctgggcgggaggcaggacctgtggtttctaagtgctctctccacttccccaggcaatgggcctatggacaccaaagctggggcgcccggccagaacctgaagccccag

SEQ ID NO: 215202 - DNA, 38 bp, Homo sapiens
  chr12:123636568-123636606
  hypo
gccaggaaggccatcgttcccgactcgcctccaggtgc

SEQ ID NO: 215203 - DNA, 273 bp, Homo sapiens
  chr12:123636636-123636909
  hypo
aggcgtaccaccatcacctagaacgcttcagctccttccctccaccaagaggtgccctaggatccatccagaaagatctgcggagcccacagagtcccaacgggaactgtgctcctggatggacgccccttaacccataactcaaggacttctctatgcctgggacttaaaatcaccaacaacccgctcctgcagccagctagcagaaataaacacacaaaggccacacgccagttcacagccacaagtatttattgagtgcctgtagtgcaa

SEQ ID NO: 215204 - DNA, 300 bp, Homo sapiens; identical to SEQ ID NO: 203246
  chr12:123754888-123755188
  hypo

SEQ ID NO: 215205 - DNA, 272 bp, Homo sapiens
  chr12:123959965-123960237
  hypo
aaacagaagagacaaaaagaattatcggtgacagagccgagaattctgaggcttcgctcgagtagaccgagcgcagccagtggcacagctgaaatcacactcaacatccacgtcaaatggagcacacaggtggcggccatgcagcttaagtggccagggggagacaggtcagccccagcagtagccgaagcagacattccaagggggcagctcaaacaaaacccaaaacacacacagtgcctacaagggaaacaagtcgtcggacaggctgc

SEQ ID NO: 215206 - DNA, 216 bp, Homo sapiens
  chr12:123997853-123998069
  hypo
ttgaacacttgtcccgacatgccctgtcctggggcgccaggacccactcactcatttactccttgctggggctgccttggctccccgagaggtgggcgggaggcgagcatgaggagagaggggcggctgggtctatgtggaagcccagcagcctcatcaccttcctgggcggcagccgtaggagctatgagaccgaggcagaagcctggcgcctga

SEQ ID NO: 215207 - DNA, 125 bp, Homo sapiens
  chr12:124111672-124111797
  hypo
ccactctggagtaggcgtgagtcaatattgtctgtggaccgagaaagctttgtcaaaggggcaggctccttgctgctcactcacaccctctgcactgcggcacgtgttcccgacaccctaagcat

SEQ ID NO: 215208 - DNA, 276 bp, Homo sapiens
  chr12:124141811-124142087
  hypo
tagcctagcatcatacgttgactaaaacccagagtcagggcctgccagggccttccagatgctgcttgctgaggctcctgggaaccttttgccccgcatcttccacactctccctcttcagtccggccccaccgcccccttgctattgcctgaaacaggcctgcttcggccagaggggcgctgcactttctgttctctctgctcgcaagctcttcccgcaggtgtttgcatggcctactccctgcctgccttcacgtctctacttctgtgccacct

SEQ ID NO: 215209 - DNA, 167 bp, Homo sapiens
  chr12:124272114-124272281
  hypo
gccccagccctgcacgcaggttggcggctgcaacggaaacctcgcagcttgggactcccgcccttgcacatgggacagggcagccgcttgcccgctctgccttttccgatgaggccgtgaaaccagggggggcgcccgggtcagagcttcacgggacactggctccc

SEQ ID NO: 215210 - DNA, 212 bp, Homo sapiens
  chr12:124335328-124335540
  hypo
accatgaaaatgaatcgccacgcagctcgccgcaggccccctttccaaggggctggccggccgggccacctaactgcttctttctttcttccttcttgccctccagtttgaagggcaggagatttccctggactcccgcatgggcatcttcatcaccatgaaccccggctacgcaggccgcacggagctgcccgagtcggtgaaggcgctgt

SEQ ID NO: 215211 - DNA, 42 bp, Homo sapiens
  chr12:124338357-124338399
  hypo
cacgcacacacgcacgcacacacacgcacacgcacggacaca

SEQ ID NO: 215212 - DNA, 41 bp, Homo sapiens
  chr12:124338459-124338500
  hypo
catacgcacacgcacgcacacgcacacgcacacacacacac

SEQ ID NO: 215213 - DNA, 81 bp, Homo sapiens
  chr12:124404099-124404180
  hypo
ctctggctccggaacgtttccaccagccccgaaatgaaatcccatacccattagcagtcaccccctggccccccactccta

SEQ ID NO: 215214 - DNA, 68 bp, Homo sapiens
  chr12:124404272-124404340
  hypo
tgactggtatctttcactccactccgtgacctcacggttcatccgtgttgctgcgtgtgtcagcgctt

SEQ ID NO: 215215 - DNA, 36 bp, Homo sapiens
  chr12:124514725-124514761
  hypo
caggctctgaaggaacgcctgcgctgtttcagaagg

SEQ ID NO: 215216 - DNA, 162 bp, Homo sapiens
  chr12:124788613-124788775
  hypo
gccttcttggccgcgagaggcacttcccttgcccactccccaggctggctggagtccacagggcgccacgaccgtttcgatgttcgaatagccctgcagccagaaagacgaagctgcgagcctcaggatgaactggtggctgccaccatcttcccttggtgt

SEQ ID NO: 215217 - DNA, 202 bp, Homo sapiens
  chr12:124798824-124799026
  hypo
cgagaccatcgtggcagcacccaactgcacgtggcgcaactaccgcagccagctgaccctggagccacgcccgcgcgccctgcgcttccgcagcaccaccatcatcttccccaagcatgccaggagcactttccggaccaccctgcactgcagcctgggccggcccagccgctggttcaccgccagcgtgcagctgcagctt

SEQ ID NO: 215218 - DNA, 212 bp, Homo sapiens
  chr12:124819472-124819684
  hypo
tcccatggattagggggcggtgatggtgccggtgctcggggctttgggatctcaccctcacccacgccctggatccccccagcgccatgccctggatcccccagccaccccgccaggacagaagggctgtggggttccccatcccctctccaggcctggtgcccccaggtgcaaaggtgacaagcagcagcagagaacgcgtagttacactg

SEQ ID NO: 215219 - DNA, 110 bp, Homo sapiens
  chr12:124831992-124832102
  hypo
ccatggaccagccgcgagaacctgaaagagttctcggagctctccaagcctctcccaatcgcatgtgcctcaccaggatgttctgtaaaacgatacgcaggtggcacctg

SEQ ID NO: 215220 - DNA, 196 bp, Homo sapiens
  chr12:124832318-124832514
  hypo
cgtgactgtacacccgttgggggcaacgagggagcagggaacagggcagtaccttgtgtgatggacccgcggatgtggtgctgctctttgaggtggtgggggctgtgtcgctccggcgggatggcacggcccatgagacctgggtaggagagggtgaggccatcattccgtggctccctgagccgacactgggcag

SEQ ID NO: 215221 - DNA, 360 bp, Homo sapiens
  chr12:124832574-124832934
  hypo
cccagcacgggaaggtccctgcgctacctccagatggagcctcagaaagcccagcctcggtttccccatctgtaaaacggggtcagccatccccccaccgcccaccagggggcaccgagagatgaagtctcctccctgctatcaccttcgatgctggctgaggagatggctctgcccacgcggccctccatcatgtcataggtgcgcttgggggcggccgtctcatgggggggtcctgagctgcttctgccgtcctccttggagcactgggtcacagacatgccacctggaaaccacacaaagcactcggtgaggagctgggcacgggcccaggaccacggtgggcaggcaggacaggca

SEQ ID NO: 215222 - DNA, 255 bp, Homo sapiens
  chr12:124832994-124833249
  hypo
cgaggcctccagagggagctggcagcctgcaggccctgggggcctgccagcaggacccaggagcttttccagggggttgcacggtgggagatgcagggcacgctgcctgcaccctgtaccctagccctccagggtgctctgtctgcaagcaagggtgtgcctgtgaccacatgagcacgtgagtctgtgtccacacccacgggtgccgacatggggcgtgaacaagtgcacacacatgcacgtgagcaaggacgc

SEQ ID NO: 215223 - DNA, 360 bp, Homo sapiens
  chr12:124850181-124850541
  hypo
atggcgcacagacgggggccagacgaggaaggtcaccctgacttctgcatgcacctccaccgcccccaccgccagcccactctcctccctcccctccctccacctgtccagaccctgcttgatctcccaggaccacctaaagcctctcctttggccactgccatgcctcactccctggacctgggcccagctgtgctctccccgccatcctcaaggtacagacaaggtaccctgacccaggtccaaacacagatggtatcacctgtcccaacattctccacctgcggcttcaactgccgccacccctatgtccctccccacaggtttacctaccaccatccgtttcaaccagctcgcact

SEQ ID NO: 215224 - DNA, 263 bp, Homo sapiens
  chr12:124856543-124856806
  hypo
tagggctgcctggcgcccactcaccggttcttgtcgccgccctcggcctcatccacctcgtctgcactgcaggtagcactggagtcgctgtcctggggggcgcccgagctcttggctgtggtggccctgccgctcccgccctccttcttctctgccttgagcgccccctcggccgtggcctcagcggcctccgcgtccttgcccttggccggcccctcctcggcttcctccgtgcactcgctcttgacgggctcctcggcctt

SEQ ID NO: 215225 - DNA, 178 bp, Homo sapiens
  chr12:124869698-124869876
  hypo
catttacacgctggcgaggcgagcctgcaccttctgtgcttgtggaggagggaagggtctcagcctcccgtggcctgcctcaagccctccaggatgctggggctgagacgtccgcccccgcccccccagacctgtccctccccaaccacggcagccctaaagctgtgaggtcaaatgg

SEQ ID NO: 215226 - DNA, 340 bp, Homo sapiens
  chr12:124870152-124870492
  hypo
agaagctgagttctaacaaggcggcataatagcccctccctggcccatgcctcctggggtgcagagacatctcctgaggcagtctgggctcctctcccagcttcccagaggcgcggtgcagcgtgactgggggctcaccatcttcagcttgtgctgctgcaagatctcatcgaggttctgcctcttcttgtagttgaagtagaagttcttacactgcgacacagtcttggagcccaccatccgggcgatggccgaccagttgcggccgtgttccaggagacctgtctcaggagaggagggcagtgagaagaggccaggcccggcacgcagagggggcctg

SEQ ID NO: 215227 - DNA, 270 bp, Homo sapiens
  chr12:124879851-124880121
  hypo
cctgccagcacctgtctccccgccccacccccgctccctcctgccatcgcctggaacacacagccattagcagccaccctgagcagtaattgtccagattgctgtaattcacggcagacgaacatgctgctgctcacgacattattacaaatgtcactgagcagggcctccgcgtgcacggcccccaggggacgctcactgccgtctccatgggcaggacccaggatgagctcactgtcatcactgaggacccaaccttgagatggtggg

SEQ ID NO: 215228 - DNA, 81 bp, Homo sapiens
  chr12:124893321-124893402
  hypo
aaagaaagcgaaggttacaagcactccaagggcattgcttcctgatcatctggctacatggagctacgaagtcatccgtgc

SEQ ID NO: 215229 - DNA, 209 bp, Homo sapiens
  chr12:124893570-124893779
  hypo
acgcagcttccccctacagaaagctggttgttaaacatttaccagcactctacggcagaaagatgcgtgtcgacagaacgtgagcaacatttaacacgcacatggaagcctgttccgcctgtacagatgtgtgctgtgccagccgaggctctgttgtaaatcctaattcagatcccgacccgcaactcggcatcaaatccacagtccct

SEQ ID NO: 215230 - DNA, 33 bp, Homo sapiens
  chr12:124894790-124894823
  hypo
ctgcctctctgatgcgatcgcccctgcactgca

SEQ ID NO: 215231 - DNA, 691 bp, Homo sapiens
  chr12:124895907-124896598
  hypo
ggggaacagtggagagtggacggcagcagtcgggggcggagcctcggcctccctgggcttccttcttggacccaggccggatgactggagcccaggacgggctgttcccgtctcagtgtcccatctctgcagaaagagaggcccccttggccacatgaacccccatcgctgcgggaaggccatattggctaccaggggccgggccctgccacctggcctagccagcctcacatcctcgctccccaacggtctgcagtcaggccccagcattcctgggctctggttttgcaattcactaggataacgcggcccttccatcaatgaatcatggactataaaccactgtgccagcgcttgagctgttccccgcaccgccccacagtccgtgattcacctcagggtggtggtgatggggctcggagcccaagagaggatgctcgggcctcaacccagcctccaggctcaaaagccgctcacggccgatctcaggggccaggttccgggaggtgggggctcggccctcccttgccaaagctcaggcctgtggggtctcatgggggtgggtgtggaggggctagcattccaaaagcctatgcccgggcctgcatccccgtgtcagaacacagagaagcttccagaaagaggatggcaccctccattaaacaagaaggcaatcccaccactctaaaca

SEQ ID NO: 215232 - DNA, 293 bp, Homo sapiens
  chr12:124911265-124911558
  hypo
gatgaacttgatgcgctgctggtcagcgtcgtacagcatgggcgggatcacggccagctggcgcatctgcttctccaggttctgcagggaaacggagggcagggtcagaggcccagggacgaggtgctccggccggcgcaggggacccagggaagacacagaggggacggatggtctgcgccagagcagggaaaacgcgaaaccaaggagaaggagaatgatgagtttaaaaataataatagctcatgctgggggaagggagaatgtaaaggcctccccgacaggtttatggt

SEQ ID NO: 215233 - DNA, 326 bp, Homo sapiens
  chr12:124929576-124929902
  hypo
agttcccatcagccgacccccaaatgaggcagcaggagggaagaaatcaggctgcgaaaagagaaaaacgagcaacggaagaaaccggcttccaggcctgagggggccggtgaaccagggcaacccccgggcaggcagaggcagaatgtgcctgagcgccatctgccgctcatccccaggtcccacgcactttcaccacatcccacgcgggctccatagactcccgggaattcctggagcatcctgcccagggtggggcccatccctcgatggagcccccatctcctgcccctctgcggctgccccggccccgccccggtggtctg

SEQ ID NO: 215234 - DNA, 172 bp, Homo sapiens
  chr12:124967300-124967472
  hypo
ccatggagatgcagacgagcctgaagttgtctggctcccctgcccaaagtgcatccgtggtccctcaggcctgggtggctgcagactcaacccacgctagcccagtgccacacggtggcccaaggagcagccagactgggcagtagaaggcggctttgtcattctaggggtc

SEQ ID NO: 215235 - DNA, 165 bp, Homo sapiens
  chr12:124971726-124971891
  hypo
gggtgggtaagtgatgcccacgcgagggaacgaggctcgggcctcactcgccaggagaaggatggatggtggcaagtgatggcgacaaacacccgacagccagcgaggcccaaagaccaggtttcagaacaaagcgacccctgaccccaaggccgccctgtaaaa

SEQ ID NO: 215236 - DNA, 724 bp, Homo sapiens
  chr12:124979279-124980003
  hypo
gaaggggagctgtgacctatccggcccccttgccccctggaagccaccccaatcctacccaatactgcggcagcgggggagcagaggtgaggctaggctgcaggaaagtgaatacagcaggagctccacattcgcgtgccaatcccactaccagtccagagagggcagagccccagctcagcctggccccagcctccatcttcccagctttaaaatgggagcaaagagattttatcagatattctggaaaaggcttcagacaccaggggtctctgtggcggcctcccctctgccctgggaggctcagagccacatgagcctggctcccaggagaaaggaaggggtgaagactcagtggaatggaagaagggtctcaaaggtagccccaggcgcacacatgtgcacccccttaccgtgtgcgtccgggcgatctgcactgggtaggaaaggctgtggggcgggtagcggggctcagtggccctccacgtctgtgccacaggctgtgtggatcccgacatggtggtgggggtcggcggggagctgctcccaggccccaataagctttctcttaatcaccaccaaggattaaaagccagtcctcgtcatcagctcacgggccaccccgtcactggcacctgcgggaaaacaagaaaagaaaaacaagatcagccacggggcagctggctcctccgtgcacaggtccccgagtcgttcctgtggtccc

SEQ ID NO: 215237 - DNA, 134 bp, Homo sapiens
  chr12:124980537-124980671
  hypo
agaatgacagccagtcgggccctgcagcctagggataggtaccccaaacggctcctggggcagatactggagccttccacgggagaggatctactcgtggccacgccagaggaataacacgaagcgggctagca

SEQ ID NO: 215238 - DNA, 52 bp, Homo sapiens
  chr12:124989193-124989245
  hypo
tgacaaacagatgaaacaaacgcagtctgtccatcaatggactacgattcag

SEQ ID NO: 215239 - DNA, 224 bp, Homo sapiens
  chr12:125009052-125009276
  hypo
gcctgtctgagaacaaggcccgcatggaaggaggcacagctgaggcaaagccagctcccagaggcattgtttgagcacctagatccagccgtgcctgaacgtgtcctaccctggccactctgaggacccatcaactccccgtcatagcctaactcggctcgagtgtgtctctgccacaactcaggagccctaactaactgcccctaactaatcacccccaggtc

SEQ ID NO: 215240 - DNA, 40 bp, Homo sapiens
  chr12:125009306-125009346
  hypo
ggcctgatggaagactaattcagctcttgcctcacccagg

SEQ ID NO: 215241 - DNA, 360 bp, Homo sapiens
  chr12:125042297-125042657
  hypo
gtgtctcccaacttctcccgcttgccttcctcccctggtttacccagcagtgggcatcacccaggagccaccgccacacagaattcctcccaaatcctgaccctgtggacctggccaagcccccaggacccaggaaaggccccctgactcctgccaggctccagagggcgacatcccctgcaggcccccatgctgacaggcctggcccagcctagggaaaagcccaggccagggcctggagctgcatccggccccaaccccacccggcaggctctcctctttagcttcaggagcagggctggcaccaggcaggttcccatggtcaccgagacactatagccacactggggcccatgctcc

SEQ ID NO: 215242 - DNA, 53 bp, Homo sapiens
  chr12:125062418-125062471
  hypo
gagctcggcaaacacgcatgtcctcgcaagccacaacacggagcccacccttc

SEQ ID NO: 215243 - DNA, 131 bp, Homo sapiens
  chr12:125062705-125062836
  hypo
tgcaggggcggggccgagacaagcctgggcagggagaagggaagggagcccgtctgtgcctgtagcctgggcagggagaagggaagggagcccgtctgtgcctggaaaccaatttgctctggcagcgctgt

SEQ ID NO: 215244 - DNA, 93 bp, Homo sapiens
  chr12:125062887-125062980
  hypo
aaaggcacacactgcagtcttggagtgcatcctgctcttagggcctctgggggccaagtcaagccgatgaagggtgtgcgatgtgggtggatc

SEQ ID NO: 215245 - DNA, 129 bp, Homo sapiens
  chr12:125092496-125092625
  hypo
agccatcccgtggccagggcgcagagtgacctcccagatctacgtttcatgtggcgtttctgccgtgtatttttaaacccggggacaaatgtatgcgtagtaaaggtcgtgaggtcatttgtctttggt

SEQ ID NO: 215246 - DNA, 137 bp, Homo sapiens
  chr12:125151971-125152108
  hypo
aggggtagccccacagctgtcggggcaaacctccttcgacgctctccaacagctcaggccagcccatttctcactgacttgtggatggaacgtgtcaccttcagaggaagggggcaaaataaacctttgaaggtgag

SEQ ID NO: 215247 - DNA, 111 bp, Homo sapiens
  chr12:125152254-125152365
  hypo
ccagctacaccagcaggtcgccgaatgtggattgtatccgggtggcatctacacagatcagaaggtagttcagataatgggatcctttgaagcagtcgatgaaacattcca

SEQ ID NO: 215248 - DNA, 333 bp, Homo sapiens
  chr12:125184218-125184551
  hypo
cgcttacaaacggagatgttccatctcagttcttgaatatgaagaactgtgtcctgcaaggttgctgcaaggattgctgcacgtagagggtctcctgtgtgccaggcatggctagggggccagggacacaaaggactagacagggggtcgaaggctcaaaatcatattcaagatgaggaaactgaggctcagagacgctaagcacacttccaaggtcatacagccaatgagcgggagagccaggatttggaccgctgaccacctggtttccaaacctggtctcccttcacccctcctccccgctccacgcctgcagtctccaggacggagaaa

SEQ ID NO: 215249 - DNA, 137 bp, Homo sapiens
  chr12:125184581-125184718
  hypo
ctcattagaactcctacttgcggccgggcgtggcagctcacgcctgtaatcccagcactttcggaggctagaggcaagacaggcagcgtcaacaagcagagctgctggggcacggcgatagggactggaagggagtg

SEQ ID NO: 215250 - DNA, 156 bp, Homo sapiens
  chr12:125223879-125224035
  hypo
gcccatgaatgagaccggaaatggcgaataaaattcaggtctcctcatgccccccagtgctcttccctccttcctcagggccaggtgagagttctccctcccctgctgtagagagcaggtactgttttggggtacaccgcattcatttctcttttt

SEQ ID NO: 215251 - DNA, 140 bp, Homo sapiens
  chr12:125236641-125236781
  hypo
actgatgcatacaagacagccggctcctgaggcctggggcacagcgagcgccgactgccagaaaacaccgtggccgcggggcggctgcactgagccttgtcaatagtgagcactttgccgtgagccctgtctggcttaca

SEQ ID NO: 215252 - DNA, 84 bp, Homo sapiens
  chr12:125333253-125333337
  hypo
gagaacggcagaacgagccgtggtacatccgcaccgtggagcgtttccaggcatctagagaatcagagcgtgatcatcaccaga

SEQ ID NO: 215253 - DNA, 153 bp, Homo sapiens
  chr12:125447387-125447540
  hypo
aaaaaaaattaaaaagtgctggtgaggacgtgaagaaactgaaaccctcattcactgttggtaggcatgtcaaatggggcagctgctgtggaaaacagtttggtggctcctcggtaagttaaacccagagttaccatacggcccagcggttct

SEQ ID NO: 215254 - DNA, 161 bp, Homo sapiens
  chr12:125500619-125500780
  hypo
cagaatagaggcatcggcagcggatccacgagccctgaatgcctgcattcatcaggggagcagctggcgcgttctggaggcgaaacgagcttgcttccgtgtcgaagcttttctagttctgtttgatgcgtaagcttcaaggcatccgaagccctttggaa

SEQ ID NO: 215255 - DNA, 38 bp, Homo sapiens
  chr12:125565910-125565948
  hypo
atcacagttagtttacaaatcgcatcccttacttaagc

SEQ ID NO: 215256 - DNA, 154 bp, Homo sapiens
  chr12:125566139-125566293
  hypo
ccctgcttaaaaaaatacatacatgtgcacaattgccttcatgctccagcgagtagagcaaacaacatgcattagcacatccgtgttgagattgttagaacagctgcctgcgcagcacattttgcttttgaagagtagctatcagcttaccgag

SEQ ID NO: 215257 - DNA, 216 bp, Homo sapiens
  chr12:125578190-125578406
  hypo
tctgctcaccccatggctcccgcagcttctgggaagtgaacagtcccaggccctgcggctacgtctcaggtcagaaaacagggccacctgccctcctgctgagatgcttctctctgtcgctcattttgctagtgtccgaggtatagactccatcctgccggagacgggggtgtgtgtgacgcacgttactcgcactcgaactgagatccagccggt

SEQ ID NO: 215258 - DNA, 43 bp, Homo sapiens
  chr12:125578565-125578608
  hypo
acctggcacaggtcgactgcgcgaaagcctctgctcaccctct

SEQ ID NO: 215259 - DNA, 76 bp, Homo sapiens
  chr12:125636433-125636509
  hypo
gagtcttttaggagcgcaaactctattttgaactgcaggcgtgtcagggatctaggttgtgcgctccttatgagaa

SEQ ID NO: 215260 - DNA, 274 bp, Homo sapiens; identical to SEQ ID NO: 203254
  chr12:128750844-128751118
  hypo

SEQ ID NO: 215261 - DNA, 263 bp, Homo sapiens
  chr12:128773737-128774000
  hypo
ctctcacttgttcattaatgcgcatatgcacctatacacaccctctcacatgttaacatacatgcacacttatacacacgcacacatgctcatgtgcgcacacacacacagacacacatacgtgaatgcagccttgtgactagccgttagtttttaagaacaagggaatctaaatccagatttaggaatttaaaaatgtccctaactccgtggggcacagtcctgttagtacatctatttgcgtgactaaccaaaacagtgaa

SEQ ID NO: 215262 - DNA, 115 bp, Homo sapiens
  chr12:129148525-129148640
  hypo
cacgcacgcgggcactcacacaggcacacacgcatacacacaggcacacgcacccacacgcacgcacgcgggcactcacaggcacacacacatacaggcacaagcacccacacgc

SEQ ID NO: 215263 - DNA, 56 bp, Homo sapiens
  chr12:129148670-129148726
  hypo
gcgggcactcacacaggcacacacacatgcgcacaggcacacgcacccacacgcat

SEQ ID NO: 215264 - DNA, 249 bp, Homo sapiens
  chr12:129189630-129189879
  hypo
gcaggaggctgtattcagcacgtggctgcagttcagtgatggctctgtgacgcccctggacatctacgacaccaaggacttctccctggcagccacctcccaggacgaggctgtcgtgtcagtcccccagccccgctctcccaggtggcccgttgtggtggccgaaggggaaggccagggcccactgatccgagtggacatgacgatcgccgaggcctgccagaaatctaaacgcaagagcatcctggc

SEQ ID NO: 215265 - DNA, 205 bp, Homo sapiens
  chr12:129189909-129190114
  hypo
cggacagaacgatgctgactccagccccggcggggactatgaggaagatgagatcaagaaccacgccagcgaccgccggcagaagggccagcaccatgagcgcacaggccaagatgggcacctctatggcagctctcccgtggagcgtgaggaaggggctctccgaagagccactaccacggccaggtccctgctggacaacaaa

SEQ ID NO: 215266 - DNA, 77 bp, Homo sapiens
  chr12:129190144-129190221
  hypo
aggctggcaggagaggggcagctgcagaacatccccattgacttcaccaacttccctgcccacgtggacctccccaa

SEQ ID NO: 215267 - DNA, 172 bp, Homo sapiens
  chr12:130037481-130037653
  hypo
ctggcatttaaggtcatccacggtccagatccaacaactacaacatggatgccccaagtccgagtctctggggacaagaaaggtcacgccaccatccgagccccagccttgctggtctgacagcatccaccggagcagcttcggttactcaacctttcaaggccaggctctt

SEQ ID NO: 215268 - DNA, 382 bp, Homo sapiens
  chr12:130184348-130184730
  hypo
acttacctcaacgtgaagcgatcttcagtggaatttctggagatggaaacaggaaaagtcagcacgtctcctttcctcacggtctttggtatatagtggatggccacgctgttgtccagacgcagttctctcagggagggtttcctgtgtgtctgataaaggaagatgctcccgatcctctgcaaggggggcccggactcatcgatgtcactgtggcctgtccggatcccattgcttctcctcgcgtcttccctgacgcagtcccctctctcaccccctgggtgcacggtgtagtagagctccacgggggtcccctccggctggtccacggacttcctcctcccggcaaccaccgtgggggggctgaaccagctggacagga

SEQ ID NO: 215269 - DNA, 112 bp, Homo sapiens
  chr12:130184760-130184872
  hypo
ccccctgcagccggcagctgccccgcacctctcgggtctctcggaaagcaaagaccctcaggcacggcagcttctccccggcgctgcggtcgtcccagtctctgcccatgat

SEQ ID NO: 215270 - DNA, 278 bp, Homo sapiens; identical to SEQ ID NO: 203257
  chr12:130645806-130646084
  hypo

SEQ ID NO: 215271 - DNA, 211 bp, Homo sapiens; identical to SEQ ID NO: 203258
  chr12:130646344-130646555
  hypo

SEQ ID NO: 215272 - DNA, 143 bp, Homo sapiens
  chr12:130852207-130852350
  hypo
gagtaaagtggcttctgagccgagctgcactcaccgaccgcaagaaaagcagaatgccagccggagcttacagcgggcaccggcaggcacagggaaatggccttagtagcacgggaggattccgtgagaaagtcaggaaactt

SEQ ID NO: 215273 - DNA, 33 bp, Homo sapiens
  chr12:130894171-130894204
  hypo
gccactgcgcccggcccagaatgtagcttttga

SEQ ID NO: 215274 - DNA, 224 bp, Homo sapiens
  chr12:130906937-130907161
  hypo
gagtaagcagccacatgctccgcggctgaaagacacaacagcgatgatggggccactaaccgatggatgggactgtcacgggccgggacctctgaggaccagcgctgccacggggaaacctccggcccatgtgatccacccgtcctgcagaggctgggttccctaaaatctaaagacaaaacaacaacaaagtcgtaagtctcgccagcattgggaactgaaga

SEQ ID NO: 215275 - DNA, 93 bp, Homo sapiens
  chr12:130909491-130909584
  hypo
agaattagtcctggaggcaccgaggggggggaagcatgcgtctactcaggccgggggcatgccgtggagggctctgcaatgaaaacagaatgg

SEQ ID NO: 215276 - DNA, 215 bp, Homo sapiens
  chr12:130909737-130909952
  hypo
agatggtgggtgtggccacggtgccaggggagactgcccgggggctacatcctcagaaaccctgagggcagctgccactggaggccgtgtgtgactggagacagttcaccagacacggagcctgacccgtccctgtccatccactgggccaacttcccttccagcgctcggcaccctctgcaggactttctagttaggctgacgtgtcacccttc

SEQ ID NO: 215277 - DNA, 360 bp, Homo sapiens
  chr12:130913639-130913999
  hypo
tcaaaaaacaaacaaaacaaaagacacttaggtttttaaaacatgccacgttgtctaacacacacgcgcagacactggcagacagcctggcctggcaggaggtggagccaccgcacagactgtgtgcttactccgggcccagctcagcctcagcatgagacgaagattgtgcagatagtaggggcactgggcggaggctgcggacagcagaaaggcttcaacaaaaaaagtgtgtttaaatgaagaggctacctggtaacatgccagcttggagacagcgacagccctggtggtctctcccagtgatggtgccagcagcagccgctgggtttccactcacagagaaagcacctagtcacg

SEQ ID NO: 215278 - DNA, 558 bp, Homo sapiens
  chr12:130918939-130919497
  hypo
acggaggtgaatgagcgaatggcaggttctgcctgaactgagcctaaccctacccggacctgcaaaaccacccctatgaccgaataccaggatggtgcagcgggggagggtggaagccctgcacttcgactttttcaattatccccaatgagggtatgtgacaggcattaaatataaacttcagaaacctagcacgacttaggaccccagctgggcgtctccatctctctcagggacccaagggtagcggggaaagtgcccatgtctcttgatctccacggggcccgctccgagcccgcgcccaccaggaggatggtgtggggcccggcccgctctcacctgcttgccaagttcagagcctttcaggaagtcgtccaccgaggcgcccctcctcttgaagtctggagagtcataggcgtcctcctcgtctgaggcggcgtactgccccgcgctgcttctctctaggaagacgctccttttctctaacttggaaagaaaaaggaggcacacgggtgaggcagggccaccttcagctacgctcagccccacctgcattca

SEQ ID NO: 215279 - DNA, 141 bp, Homo sapiens
  chr12:130925068-130925209
  hypo
ggagcctctcctgaaggccccgagagaggtgcccttcacctcctgactccccacggagtgcccgtgtctggtgtttctcgttcttcacccccgcactcatcagaaggcatcgcgggaggcgtcagtgaaaagtgggtggcc

SEQ ID NO: 215280 - DNA, 218 bp, Homo sapiens
  chr12:130926824-130927042
  hypo
gtgtctccttgtccaccaggacgttgtagctgctcaccgttccccatcctggtggcaccgccgggggctcccagcccacaataacacttttggcgagttgtttgatgagggtgatttttctagggtaaggcacgatgtcttctccgatgtcgtcgatgttcacgtccagggtcccggcactgttgtcggtgatgcccgcatctatgtgggttggggag

SEQ ID NO: 215281 - DNA, 586 bp, Homo sapiens
  chr12:130933878-130934464
  hypo
tccttgcccacgtccgcctctgcggaagctcccgtggaggacctgagaggtgtgcgggacaaaactggctcattacctctcagcgagcacaaacactgaaggcccctgcacgggaagcccactcagcggctgtcatcgcagcgagatgcagcctgcagcgcccagcagagggtgaggatgcgggagatcagggtgctggacacaccccctttcactctcggtggtggggatcggggctctggacatgtcccctttcactctcggtggcgggatgtcccctggaaagacgcactcatggaccaacccctgcacctgtgaatgggaccttatttggaaacagtctttgcaaatgtgatggagttagtcatactgcagcggggcagattccaatccagggaagggtatccttaaaggaagaggggagaacgcacaaagacagggagggcgaggcggccaggcaggatggaggatggaggcagagactggagccacgcagctacaagccagggccgcctggtctcccggcagccagaagaggaaagaaggacccctccttggagccctcggagggcgagaccctgccgat

SEQ ID NO: 215282 - DNA, 89 bp, Homo sapiens
  chr12:130941113-130941202
  hypo
gggggccaccgcgctgccacccagcaggtcaatcttgccagcgtgctgccggaacttctccaggtcccgggacagcaggttgaactgct

SEQ ID NO: 215283 - DNA, 208 bp, Homo sapiens
  chr12:130968413-130968621
  hypo
acctacacacagtgcccggagcccccgtccccacctagacacggtgcccggagcccctgtccccgcctagatgtgtccctgagccatgccactaacaggggctgcgagggcttccgcggctcctggaaaggccccagaagttcccccaggcactggcttgctggcatggacaatgtcccatgggaaggatagactggaggcgaaacat

SEQ ID NO: 215284 - DNA, 125 bp, Homo sapiens
  chr12:130968690-130968815
  hypo
tggacccctggccccatgtcgcatcccagctgaaagcccctcggtggggagtaaagcggcatgctgtcacagggccacctgactgcctcttgcctcctgatgccgctgccaccaccatctgcctg

SEQ ID NO: 215285 - DNA, 281 bp, Homo sapiens
  chr12:130985315-130985596
  hypo
aggacatggaagacacaagacgcgtcaggtgctagatgagaacggtggccacaggatttgggaacaaaggccgtggtgatggctgcctgagcttcatgctttaacccaagtgagccgcttctatcactctaccacacgcgtcatctaataatggaacaacatgggtttcttgaggatcagcagggaggtccgtagagtgggaacccggagctctcccacccgagcatccaggggtcacgacacactccatctcccacacgtggtgacgccctgaccctgaa

SEQ ID NO: 215286 - DNA, 60 bp, Homo sapiens
  chr12:131077263-131077323
  hypo
tactgagggcacagagaacccgggggaccttggccgtggcgggccaatcagcctgcattt

SEQ ID NO: 215287 - DNA, 116 bp, Homo sapiens
  chr12:131077362-131077478
  hypo
caggcagggaaatcgggagcgggagagatggacagcgagctggtgaggatccgggctgcgatgtcgggagcggtgagagcgagcgcggcttccacgctgacccttctggcctcatc

SEQ ID NO: 215288 - DNA, 79 bp, Homo sapiens
  chr12:131159259-131159338
  hypo
accttcttatcaccccaagccgaaaccccatatccatgaccggccgctccccattccccacccccgcccctgcaccctc

SEQ ID NO: 215289 - DNA, 77 bp, Homo sapiens
  chr12:131159368-131159445
  hypo
gcctgctcgggacgggtcgtatacgtgggatcctgtaacacgtggccttccgggtccggcctcttccacacagcgtg

SEQ ID NO: 215290 - DNA, 260 bp, Homo sapiens
  chr12:131159530-131159790
  hypo
cattcacgtttcgtttatctgctcatctgtagaggggcgtgcagtgagctttttacagatgttcccacccattcgtgtcaaagagagcatccttgatccaaagacacaaactacaaaagggcacagccgggactaggaccccagttgtcccgaaggacctgttggccgccagatagtggttgaaggaagggacgcaagccctggttgacggagccgcggcctctgctgagacaggcgggtttgtccgcaggccttcggga

SEQ ID NO: 215291 - DNA, 287 bp, Homo sapiens
  chr12:131164354-131164641
  hypo
atgtccctgtgttcacccaccgcgggaaggacctgtgactgtgaccacgcagagagtgtgttcgcccgccacgggaaggatccgtgagtgtgatcatgcaggcagtgtgttcacccaccgcgggaaggacccgtgagtgtgatcacgcagggagtgtgttcgcccgccgtgggaaggatccctgagtgtgatcatgcaggcagtgtgttcacccaccgtgggaaggatccctgagtgtgatcacgcaggcagtgtgttcacccaccgtgggaaggaccagcaagtga

SEQ ID NO: 215292 - DNA, 38 bp, Homo sapiens
  chr12:131272292-131272330
  hypo
agcctggtgcatgctcaggaaattcaacaatttcaaaa

SEQ ID NO: 215293 - DNA, 1065 bp, Homo sapiens
  chr12:131272367-131273432
  hypo
tctactcacagggcaacctgctttagcaaactcaacgacacattaaaaagtacaatttgcaaaggagagctaccacctggctgggtgttctgcgcctagagactgggccccgggagagcgctccacagtgaacttgcgaaggatggaatttacataaagaaggcaccgtctttagtcctggaaaggcaccctgggattctctacctccgtccgtctttttcacaggcagggaactgaggtcccaggaggcccaggtcaccccacccaaggaggcagggcctcccctgcactctctggaacctctccctgccaagaagccagaggccctgttttctcaggcttaggaatctgcactctcttgttcaaagactgtgagtcagaagaggagggccaagtgccgccttgaatttctcttactgctcaaatggaaaacaatgaaacagggctgtccacatcacagcctgccacctgccagtcatttagagcctggcgcgcatttccatagctcctctgacgccaggacaatcagacccgtctccggagggctcctgcctctggatgtctaaatgttcttgccttaaacccggtgtgacgctccacccctcccacaccgcacacatacgaattttaacaaaatcttcaaagcagaacttaacaaaaggttgcgtggtaccaggtccatttggttccatgtgaaaccaactaggaagatccgcattaggctcttcctcagctgcgccgagggcctggtttctattcatttgagaagctgtgtgcgcccctgtatggtctgttctttcctttagggctcgcttttaacagtgagtgttgttgtggcaactaaaataaggagccggccagtgctcctagggaggaaaacctcggcaactccgcaggtgcaggcaccggccacagacccacgcctggggcactcgcgtttgcattagcagagcgcaggagtcagggagcgcgggcaggggcgggaggaggggtctgcgcactggccacggtgtgggggacccagccctaccccttcccggggctgagtgggactcgccacgaggc

SEQ ID NO: 215294 - DNA, 40 bp, Homo sapiens
  chr12:131294422-131294462
  hypo
agctggacacagtggcgtgtacctgtagtcacaagtgctc

SEQ ID NO: 215295 - DNA, 724 bp, Homo sapiens
  chr12:131572481-131573205
  hypo
ggcctcagtttgaggagcaccgtcctctgcggacggccgtgacgccttctctctcctcccacgggctccgtttctcctctcccctcccgccagggcccggcccacagggctccctttgggcttccctcgtggtgtcgtagggagcagcccaggggagaaggcgcagagctgcccccatggagagcacctgttcgttcctggagatgggcggactgcacggtgctgtggccaaggctgctcgtcttaccagcagagaaactgagccccagagagaggggggcgcttgctggtggtcgcccgtcgttcaacagcgtgttattgaattaccggtagagcctgggctgtttaggtagcacccgggccatggggacctggcagtgaggatgctgtggcacgcacagagacacagcaagtcagtgcacgccacgtcctgccccgtaagggccacgcgggagatcatgtcggatgacttgtggataattaggctctaaaacgcagtcctggtgatgccggagctgtttgaaagacggaagcccaggagggcctgcctgagaaggtggcggtggattttacatctcagggtggagaggatggagcctcccggccctgagcaaggacagtccgggcagaggacagggtggggacggagggcaaggagggagcagccaggggtggtcctcggggaaacgccagggcggaggcaggggctccaggcccaggggtc

SEQ ID NO: 215296 - DNA, 183 bp, Homo sapiens
  chr12:131573235-131573418
  hypo
gtggcggaggctgctgcggtgactcgagaagcggcagcccgctggtgtggcgggggtggaggggcacgagtcccactgcagatgaccagggttgccccatcttcgactaagaaagctggcgatctgtttctcccacgaaatcttctgactgttagaggtgtcgtcagttattacttctgagcc

SEQ ID NO: 215297 - DNA, 103 bp, Homo sapiens
  chr12:131623221-131623324
  hypo
ctcccacccattctcgcactccgcccccgcccgcagctgtgtgattttccatttgcttagggaccacgtctgccctgctccatgggagctggctggctcatgg

SEQ ID NO: 215298 - DNA, 145 bp, Homo sapiens
  chr12:131623397-131623542
  hypo
gcgtggacagatgcatgggggtgaaagcgtgggtgccgggcagatgggtgagcagaggagggagtgagcgctcagcacagcacgcctgcagtgcccttaaggggagtcagcgtggagaaccgtgcggctggagacgccacagtgc

SEQ ID NO: 215299 - DNA, 350 bp, Homo sapiens
  chr12:131836988-131837338
  hypo
tgggttggaggagaagccagcggaggtgccgggatggcctggccgggcctgctggaaccagaggcaggccgattccaggaccagtgttctttccttggaaaacacggagtgagcttcctgacgtcgctgaccacttccatgagaatggaagaaggaggatgcaccccggaggggcagaatttcttgtcctggaatgccggcagtcagcccctcactcccgtcttcccgcagaggaggctctttgccttctcaggctcttcaggaaacagattccactcgtcaccgataaaccagctccaggtttcgttgtccttgctgccaggctgcccggctgtgtctggccttacctg

SEQ ID NO: 215300 - DNA, 167 bp, Homo sapiens
  chr12:132076259-132076426
  hypo
ccacagaggggtcacgcagcccagtcaccagggccatgcggctccacggcttctacgcttgggcactgaggaccgaggggttcaatcaggtcccagctccagtccaaccttggaagccaagtgttgggaagggagcatccgaggacagacagagccagggcccctga

SEQ ID NO: 215301 - DNA, 125 bp, Homo sapiens
  chr12:132169365-132169490
  hypo
agaatgggaatcatggcgtgtctgtttactgctctgtacaatgggaaggaatcacgcgtgtccgtttcctgctctatagaatgggaatcatggcgtgtctgtttactgctctgtacaatgggaat

SEQ ID NO: 215302 - DNA, 64 bp, Homo sapiens
  chr12:132205019-132205083
  hypo
ggactcttaagtgttcgtgcctagcaggaagttttttcttggacattttcgtaactggattgca

SEQ ID NO: 215303 - DNA, 622 bp, Homo sapiens
  chr12:132218721-132219343
  hypo
tcgctggctcctgccgccctcgaggacttgaaggctgacgttgggctgggtgtggctcgtacataggacagggcccacacactggattcacgtttttcctcacaacttagaatagcaaagttacagactttggattcttacgaagacaagaatgaatgtcttggctaaccatgatcttacccaagaggacttaaaatgaatgtgcaggagaaatgagaagaggacttaagatcaaaaagagagtgactaggaggtcagagaggcagccgcccaccccacgcactccctgcttgtaagccggggccgcattgttgtgttaccacacttctgttttagagcctgttacggttttgagttacacagacatgtgtgggcttgtgcatgtttgaatgccctgtggacccggagctctgtgaggcaaaggctgggactgtcttactagccagcgtgctccttgcacctcgatccaaggggccacggggctcccaggaacattcaccgagtaacttcagaaaagtgaagagcagaagttccaaaagcacctggtgcttcctgggagaagtcacctgcacaggtaccttggatccaactgacaggtgagatgaacgagctctccctgcgt

SEQ ID NO: 215304 - DNA, 118 bp, Homo sapiens
  chr12:132221105-132221223
  hypo
acaggcatcgtgtccgccgaccgtagaacctgaaatccgtagtaaacacccctccagcgctttggttcagctcagctccagcgaatgttaggatgtgaggcttcgtgttacagtagaa

SEQ ID NO: 215305 - DNA, 150 bp, Homo sapiens
  chr12:132222124-132222274
  hypo
taacatctttcccccgtagagacttgcatacccagtactgctgtgtctcgtgggaggctgctgggtcactaagcttttctggctttcatacgctgggtatttaataatcaccttaggatatactcagtcgttctttcttatttacttcct

SEQ ID NO: 215306 - DNA, 295 bp, Homo sapiens
  chr12:132241764-132242059
  hypo
ctgtggagtagaggcgttcagctggtgttgcgagaggaacgggaagctctgaggcaggggtgcagccctaggcaggagccccgtggtgcgagctgcccggccccgtgttgagatgcggtaggtggtcagcagtgacttcgggggtggctggtgaaggagccttggccagcttgccccggtgcaccctgtcggggaggggccagcacatctgacaggctttaggtcagcggaataactttatccagtctggtgactttgtgatgcggttaagccactggagcgacttcagagattt

SEQ ID NO: 215307 - DNA, 75 bp, Homo sapiens
  chr12:132243979-132244054
  hypo
gcttggcaatctgtagaccacgatcacttacaagtatagatgttaaaatattaaactgaattcagctatgtatga

SEQ ID NO: 215308 - DNA, 325 bp, Homo sapiens
  chr12:132259528-132259853
  hypo
cagctggagagttgactcctcgcactcctgtttgtcttgactgtgcctcagatggcgtctcgcgcccgtttggttttgtctttcacagacgtttgccagggaccatgtttttccatctcccctctgttttaacacagcgccttaccaatcacacaccaaattagtgcagtgattttgtgagcgtggagagagtaaatgaggagagttcttcaccagaaaaagacagcaaagacgtgtttctcttccttctcgtcacagaacaaactccttactcgagggtggagtatgtgtctcagctctccttctcttcagctctctctttgtt

SEQ ID NO: 215309 - DNA, 226 bp, Homo sapiens
  chr12:132259883-132260109
  hypo
ggacctgcagcagctctgacttcccgaacactcacaggtgcccgtgttgaggttcccaatggcgtctttcagcccctgggccggcttgctttctgcgcagcgtgtgctcctgatgtagaggccgtggatactggcatttttttagtgcatcagctgatttctctggtgtccacccagggctcgcctcagaggatgtgctcagctcgcaaacctgtgttctttgctc

SEQ ID NO: 215310 - DNA, 111 bp, Homo sapiens
  chr12:132263619-132263730
  hypo
cactcaccggcaccgcactctgcacatacactcaccggtgccacactctgcacacacttcgtgtggcaccggtgagcgtgtgtgcagagatgcagcgacggtgagtgtgtg

SEQ ID NO: 215311 - DNA, 200 bp, Homo sapiens
  chr12:132270179-132270379
  hypo
cacccctggaggggcgcgggtctcagggtccttggccgcgtgtggattatgtcaccacaggagagggacgagtcctttccaggcacatgaggaggaggaatcagtgttaatgggtggctttgcatctgtgaaatcgcataaacttaagttagctgaagctgtcgtgagactggcatttccaaattggattgaaggtttca

SEQ ID NO: 215312 - DNA, 61 bp, Homo sapiens
  chr12:132284638-132284699
  hypo
gcgccggctgcttgctcctggcgcctttcctgacgtgcagatgcccgggactccactgcag

SEQ ID NO: 215313 - DNA, 208 bp, Homo sapiens
  chr12:132285800-132286008
  hypo
tacatggaaaagtttttgtacgtatgtagtctttttttttttttttttttttttgccaaaagcctcgagcacctgatactcccagttggtctcccatccaagtactaaccaggcccaaccctgcttagcctccgcaatcagatgcaaccgggcccgttcaggcatggctgttcgtgtttgccgtggcccgtgtttgccgtggctgttc

SEQ ID NO: 215314 - DNA, 93 bp, Homo sapiens
  chr12:132329467-132329560
  hypo
ctcggcccccgcccgctgaagcggtggacaggcacccccgttttaatttgcctttagcagacctctaggcaaggataggggctccacacaagg

SEQ ID NO: 215315 - DNA, 37 bp, Homo sapiens; identical to SEQ ID NO: 203262
  chr12:132380828-132380865
  hypo

SEQ ID NO: 215316 - DNA, 130 bp, Homo sapiens
  chr12:132400435-132400565
  hypo
gctcctctgcacccgagcactctccccgcacttccgggctgggctgccgcctgcacagcgcccccaacctgtctgacttgcacgtcgtccgccccaagctgcccaaaccccccacggaccccctgggagc

SEQ ID NO: 215317 - DNA, 206 bp, Homo sapiens
  chr12:132406594-132406800
  hypo
ttctttgttcaagcgttcctctggggaccggcagcagaggcaccgtgttctctcagccctggatacgtcttgtaatctttcacactttattcctaaaacgtgtcttatttttatgcagctcattttttctttaaaggagaaaacttgtaggtgtttaagaattggttttgggagggcgaggactgggccaggttagaggcagatgg

SEQ ID NO: 215318 - DNA, 39 bp, Homo sapiens
  chr12:132423550-132423589
  hypo
actgggattacaggcgtgagccactatgcccggccctcc

SEQ ID NO: 215319 - DNA, 56 bp, Homo sapiens
  chr12:132423854-132423910
  hypo
ttgtagatggtcttgcagagacacgaggctatgcatgctcctgccttttccaactg

SEQ ID NO: 215320 - DNA, 271 bp, Homo sapiens
  chr12:132514252-132514523
  hypo
tttgtgattcctccggtggtggcagcacccccgtccctacgggtgccgcggccgccacccctgtacagccacagaatgaggatcttgaggcagggcctgagagagcacgctgcgccgtacttccagcagctgcggcagaccacggctccacgcctgctgcagttccctgagctgaggctggtgcagttcgactcaggtatgcggcagttgggggcgtggcccgtgcgggagctgcaccggccctggatgatgaggcgctcttgatgtgatt

SEQ ID NO: 215321 - DNA, 73 bp, Homo sapiens
  chr12:132529444-132529517
  hypo
tgccccctgtgtacgtgaggaaggagcggaagcgacacaaaacagacccctcaggtgcgcatcccgagggcgt

SEQ ID NO: 215322 - DNA, 660 bp, Homo sapiens
  chr12:132536800-132537460
  hypo
tgtcacacagtggcggatttgggaggcttcctcgttctgtggccccctttccgcacagtagtggagtgatccttgtcagaaggagttggctcagggcccatctccgcaaacccccaggactccctactgcccacgctctgagtcgcctggccctggctttcagccccttggtgctccctgagtgtgctggcagccgcgccccagcccttcacttaactgccctcgtgagatgttttcagagcgcactgttgagaattgcagccccgccctgctgttttcctccatagcagccagtacgtcttcagacccactgcacattttacctgtttgtcgtctgatgtgagtgctgtgatcgctgggactctagcgtctgggagcacagacccatcatttgattgatgttgtcgattaaatgaagagttaattcaccctactaatatttatggaccgcgggcctgcgcggcgtggagcctgggcattctcgggggagcgagagaggcacagtcccgccctccctttacctccctggagaggaactcgagggcatcctcacagaaggaacagacagagattttcccaagtacagtgcagacacatgaggtgggctgtgcgtttgggggctgccacaagtacgctggggacgtgttcggagatactttt

SEQ ID NO: 215323 - DNA, 360 bp, Homo sapiens
  chr12:132537580-132537940
  hypo
ttgggctggagctgccccagcacctggcagcatggtgtttctagggtacgtggtacttgtctgtcttaaaacttgcctgtatgtttttaacctttgcgtctgtctttcagtggaatcaactatgacaagccgctgcctcccatccaggtggcatctctccgtgcagagcgaatcgcaaaagagaaaaaggtcagcgccctgggcccttctgcttgagtgggaaaatgtggtgactgtgacttcatccagggggtatgcaggccgagtctgcccctccagtggctcctcttccttcctggcccctcaggctctggctgatcagcagaaggcacagcagccggccgtggcccagccaccccc

SEQ ID NO: 215324 - DNA, 175 bp, Homo sapiens
  chr12:132541957-132542132
  hypo
cttcatatgctgtatgactccgtttcaataacagaaaacagatgaatgattgccagatgcgggaggggctccactacggagaggaattcgagaacgttgggagtggtggggtcatggcagtagctacgtgatgataatgtgtccgtcagaattcgtagaaccatatattgtactc

SEQ ID NO: 215325 - DNA, 206 bp, Homo sapiens
  chr12:132546645-132546851
  hypo
cttttctagacgccgggaggctctgctcccgcccaggtggtgcacacccagcccccgccacgggcagtcggctccccagccacggcgacccctgacctggtgtccatggcaacgactcagggtgttcgagcggtcacttctgtgacagcctcggccgtggtcactaccaacctgaccccagtgcagaccccggcacggtctttggt

SEQ ID NO: 215326 - DNA, 391 bp, Homo sapiens
  chr12:132549508-132549899
  hypo
gcgtgtcacgtgttacaggagtgagtgtgagacgggttcttttccccgagaacttagtaccccttggacagaggacgggactcaccactcgtggaacattaacacagcagcagctcccagagcccatccaggcatcaccaagcttctcagggcttgaattgaggggggtggagagtgagcgaggtgagatgcagcctgcgtggcttccctgtgctgctgagggaccctgcagggaccaaggcctgtgtggctggagcagagggcgctgtgcatgtaagccgtaggcatgggcaggtggcggtctctgaagctgctctcaggtgaccgctgtaggcagggagagcatttggagatttcagaagggactagcatcaggcgcaagtgctgtctg

SEQ ID NO: 215327 - DNA, 236 bp, Homo sapiens
  chr12:132551505-132551741
  hypo
aggcagcaggtgcccgccccagcacaccctcccgtcctgggcttgagcctggtttcacaggcctctctggtggcagtggtcgccagcgacccgtgttctttcctcacacccacccacttgagcgtgccatcacgtgttctagcacaaacgtgccttggcgctttccaggcgcaaggctgggtcctcaattgaactgttaacattctgaaatttccgtcttaatttaagtgtaattt

SEQ ID NO: 215328 - DNA, 371 bp, Homo sapiens
  chr12:132556450-132556821
  hypo
gagtacaggtgtgtccgagggctgttagtacagtggacagatggactgttgtagtgggttatagtcattgaatcttgtgatgttcaatcattgtgttctggggtgactcactgggtcctgtggtagttgtcattgtgcatggatgagttcaattactgctcttgtgtgtgtgacctcacggcatcggggcagctcagcctcgttcgtgcgctctgcctgccttgtcaggtctgtttctgagacgcgctcctgcttgtgttgcccagggtggcctcgaactcctgaactcaagcagttctccctcctcagcctccggagggcccgggaccgcaggtgtgtgccacgatgccgggcttttgccagggttttta

SEQ ID NO: 215329 - DNA, 38 bp, Homo sapiens
  chr12:132581294-132581332
  hypo
attccaaatatattccgtgtagggatagatcgtaattt

SEQ ID NO: 215330 - DNA, 98 bp, Homo sapiens
  chr12:132581392-132581490
  hypo
taagcctaggaggaacacgcacttacaagactttgtgtggacacatgctggctcttttcctaggtaagtacctaggagtggaacggctggattgtatg

SEQ ID NO: 215331 - DNA, 301 bp, Homo sapiens
  chr12:132603385-132603686
  hypo
cccccacgccgcacgccgcgcagctcgctgggcagaggcagaggcagaggcagcagcagtacgacccctccacggggcctcccgtgcagaacgcctccagcttgcacacgccgggaggctgccccagccggggtccgcgctgcagcgtctttgcaggtctcccagcagcaggcgacagagccacaagcacagctctcagtccagggaaggacccagcagccaatcgcagcgccgccacctttcctgccaggccggcgctcgccaccaggcaggctgtttagcttgcgctccacctccccac

SEQ ID NO: 215332 - DNA, 100 bp, Homo sapiens
  chr12:132630793-132630893
  hypo
ataagggggatcatacggtatgtggcttcttccactcatcggcgtgttcgaagttcgttctctttgtggctgagtagcagcgcgtcgtatagcacagcac

SEQ ID NO: 215333 - DNA, 120 bp, Homo sapiens
  chr12:132643335-132643455
  hypo
gtccccgtcctggcccccagcatcggcgagtggaccttatttggaaatagggtctttgcagattaaggagccagctgagatcatcctgcattcagggtgggccatcagtccggtggccgg

SEQ ID NO: 215334 - DNA, 320 bp, Homo sapiens
  chr12:132643525-132643845
  hypo
ggcctctgggagctggaaaaggcaggaatgggtcctccctgagtctctgagggccccgcctgcccacacctgcccatatttgccccaacctgcccacacctgcctcaggacagcatctcggtctcctggctgccagactgtgatgaagatgcatggttctaggccactggcttgtggtgacttgttgcatcagctgtggggagctcacacggtagcgcctgtcttggggggtgctgggcgggtgaccttcaggagacccctggggccccgctgccctcccaatgcctccagtcccagtgtctctgtggtggcatcctgtg

SEQ ID NO: 215335 - DNA, 47 bp, Homo sapiens
  chr12:132644008-132644055
  hypo
gatactgcaggtggcaggtcccctgaaggcatagtcagaggctttgc

SEQ ID NO: 215336 - DNA, 43 bp, Homo sapiens
  chr12:132653184-132653227
  hypo
ggctgtgctggcgccaggcttagaagccggggccccaactccg

SEQ ID NO: 215337 - DNA, 386 bp, Homo sapiens
  chr12:132665939-132666325
  hypo
acacagcacacacacgcacagtacacacacccaacacaactcaaaccacacacacactcagtacacacacccaacacaactcacacagcacacacacacacactcggtacacacacccagcacgcacacatagtacacacacccagcacaactcacactcagtacacacacccagcacatgtacccacccagcacacgttcactcgcaccctgcacagcccagcgcgcacacacccagcagacagcacatgctctcacatgctggcatcagccgtcagcctcagctgctggagggtgtggtggaggcgggcggtgagcgctgggtgctggggtccacgtccttccaagcccctgcatagcggccgccttggctggcgatgactgga

SEQ ID NO: 215338 - DNA, 47 bp, Homo sapiens
  chr12:132682715-132682762
  hypo
cagggccaggctcccggcttgcacagctggctggtcttccgcctgga

SEQ ID NO: 215339 - DNA, 94 bp, Homo sapiens
  chr12:132986357-132986451
  hypo
ccctggcaggagtgtggccaagtcccagcagcgctgccccgagagaggaggacggcgcagctccattgctccacctgcccggctcagggatgga

SEQ ID NO: 215340 - DNA, 196 bp, Homo sapiens
  chr12:132986701-132986897
  hypo
cgcccacaccccacctccgtggtgacccctgaacccccggagctcaccatccacaccagggtgagaggagaggatgggcaaggaaccgtcaaccagaggggatgctcagctgcgtgcacgtggcgggtggtacatgggggctcggggaggcacccagagaggatgcgtgtgtagtgcagaaaatgaggctttgggg

SEQ ID NO: 215341 - DNA, 193 bp, Homo sapiens
  chr12:133009778-133009971
  hypo
cacctgagagctcacgcgtgtctgtgggtactcagggtgcgatgtgtacacagatctgaatgcagacgcacgtgcccatgagcacgcacgtccagagagacgcacgtctgcttatccacaaggtgcacgcgtgtctggatccgcacaggtgcgcgtctgctcgtggacacgcagaggcgggtggggctgtgca

SEQ ID NO: 215342 - DNA, 41 bp, Homo sapiens
  chr12:133019660-133019701
  hypo
agcctgggggacagagcaagactccgccccgaaaaaaaaaa

SEQ ID NO: 215343 - DNA, 360 bp, Homo sapiens
  chr12:133088633-133088993
  hypo
cactctgaccgaacagaggggagacctggagcatctgttcctgaccttcctgcccacccatctgaggcctggaatgggggtttgtactgtgctcagcatgggggcaccggcctccagatccccccaccgcaaggctactgtgtgggccagtgtgacaggggtcgagacccccctctcggctcatgcctggggggcacccatccccgggatcagtgtcctggggactggtgagggagggtggttcagctcagagtcctctgcatggcctgggcacgcgtgagggagcatggttcagcccagcatcctctgcacagcctgtcaggtgcttgtgttctgctcacggaaggccggggcatggag

SEQ ID NO: 215344 - DNA, 477 bp, Homo sapiens
  chr12:133101020-133101497
  hypo
caccctgtcagccacccagggaggcctgttgctgcaggaggtgcacagagcgggcctctggctgagccgaaggtcggcagggagccaggctcatggctgcagcgagccacaccagccagtcctgggacgggtttccccgggctggggcgtgctcctgacttggatgactcaaagtaaagaacctcaccaggggccctggcatgcgaggcctgggggcccagatgtgctggggcgtgtcactacaaggtgcagaattgttccagatccaagttggccagagagggagaccgctgggcttccacgtgagtctgggcgctggctgtgcaggggcgtccctgctgggcgctggccagcaggagctctggcctctcacttccctcagctttgtgcaggtttgaaattatttccaagtaaaaaaagtaaatacatgcagggctcggggtctggtccctgcatggtcacttaacctgtctgcgc

SEQ ID NO: 215345 - DNA, 290 bp, Homo sapiens
  chr12:133101527-133101817
  hypo
aaaatagtttctactcggggccaccgtgtgagcaaatgtgtgagtgtgtgcaaagcgcccgggccaggccctggcacgcatcggcgcccatgttggctggtgtcaggggtggtggcggtgggcgtggggcgtgggggtggggtgaagggagtatgggtgctcccttcagcaggtgatgaaactgaggcacggggaggccgagcagtggcccaagggcccatggccagggtcaggcaggtcccaccaccacctcgctgcttgctctggcatggagccgaccgaaggaggtg

SEQ ID NO: 215346 - DNA, 136 bp, Homo sapiens
  chr12:133102581-133102717
  hypo
aggaagccgctggttagggtccggtttcccaccaaggctttgtcttagcaatgagcattttgccttcgttaaagcgtgattttttactcattaggactttcccattaggagagatttaaatgaagaaatggtgagt

SEQ ID NO: 215347 - DNA, 430 bp, Homo sapiens
  chr12:133111679-133112109
  hypo
ttatgagaacaggccgggctgctgtgacacgggggttaggaattaatgttaacactgtttctggttaagactttttgtgttgataaataattcatgaggcagttagcactttgagcctgacaacacgagaatatattaatacggtcggctccaagaaaggtcagccacgtgcttggggccagggggccatcttttattcattccctgacacaggctcattaattattctggcccagccggagctgtgctcggagggacactaatgagaaaaaggagagtggatttgagatccacacgccatccgctgtggggacgtagagggagagatggaaagaaacactggtgaggcctctgaggcgggatggggcctgcagcctggctccctgacagtgctggttgggtgtgaagaggtgagcggagctgatccgca

SEQ ID NO: 215348 - DNA, 512 bp, Homo sapiens
  chr12:133121646-133122158
  hypo
cccagcatggggccgtgcggcacggagctcagggcctcgcccagtgtggggcagtgcggcacagagcgggcgtcttctttggagcctgagtcttggcctcctgaccatgcccagcatgtcccttcggggcctggggtctgtcctctgctcccaggcattcctgcctatcacaaacccacaccagggtgacgttccctgagcccccgagcccagccccggcgccgtgaatggtcgcctcactcgggcagcttccgagaggtggatgtgtctctccttttctcctcgccctgattaattgcctcattcaatgccgactccactgcagttaaacattaattcagtaggacttaataacacgaattcattcacgcccctgcctgcgcctggctgacagtgccgtgctatttggttaatgagaggatccatgcagcgtcctctggtgcgcttgctggaaagcacccctcagtgtctccttgctgttggatgcattaaaccctcgcctgtgtggtcag

SEQ ID NO: 215349 - DNA, 44 bp, Homo sapiens
  chr12:133122901-133122945
  hypo
cccttggtgagctccgcacctgcagcctccggggcgggatgggc

SEQ ID NO: 215350 - DNA, 394 bp, Homo sapiens
  chr12:133123360-133123754
  hypo
gagccacctggagtgtgactcgtcatgcgctgggagcagcacgttctcgctgcagagtgtctgctaaagcgcatttcacaccgtactgtgagctccgtcgctgaacactcggcagccgcggctgcacatggagggtggctgtgcgtttggttccctgcattaacccagtgggctccacataggagggcgccgcccacacatccggctggcactcaccaccctccgtgcactggggggtttattcttccaccaggtcattcattcgacgtgaatgcctcataattgcagttgccaggaggggatttttccccttttgactgtttcgggggacattgcagtcagtgtgttcttcgtagagctctgcttactgaaaacggagaacggacagtcagtg

SEQ ID NO: 215351 - DNA, 214 bp, Homo sapiens
  chr12:133131957-133132171
  hypo
acccgagcgtgagcgtggcctccacggtagccgccccacccgagcgtgagcatggcctccacggtagctgcgccaccggagcgtgagcgtggcctccacggtagccgccccacccgagcgtgagcgtggcctccacggtagccgccccacccgagcgtgagcgtgggggccacggtagccgcctcacccgagcgtgagcgtgggggccacaccc

SEQ ID NO: 215352 - DNA, 360 bp, Homo sapiens
  chr12:133147956-133148316
  hypo
cgcctccctgggcccgggggctctgctgcgggcggagttccatcagcaccagcacacacaccagcacacgcaccaacacacacaccagcaccaacacacattcgcccccttccccgcagggctgcccccgacgccgcccgccgcacccccgccggtgcgtaggcccgcgtgctggcagggggcgggggcgggcgtggggcggggacacgcagcaggcacacacagacacacgctcgcacacacaccagcccaggaggaggtggggggccggcggcacctctctgtcgtctgtccggtccccaacgtgccttctggtgtccccaccccaagctgtgccatgaggcccccaccctcggcagt

SEQ ID NO: 215353 - DNA, 197 bp, Homo sapiens
  chr12:133148496-133148693
  hypo
ctggagtcccctccactctctcgagttttattcggaaactggccagtttgtcagtaacccggtgtgtccccagcgcgacccagcagccagggcttcacgccccaggcctcagccaggcacacagactgcctgggggggccgagttcccaccccatgcaaggggacccttagaatggcagggccgccctggtctgaga

SEQ ID NO: 215354 - DNA, 148 bp, Homo sapiens
  chr12:133156531-133156679
  hypo
ttggggcaggctccgtagctgtcggtgtccatccgtcacgcctgaactccgcaggccctggcaattcttaatgttgcttggctgtgtcgtcttttttccttcattaatctcaccagaagtttgtccatttcaccagtattttatttta

SEQ ID NO: 215355 - DNA, 35 bp, Homo sapiens
  chr12:133168163-133168198
  hypo
gcattgaggggaagatgcctgaacccatatgaaac

SEQ ID NO: 215356 - DNA, 136 bp, Homo sapiens
  chr12:133168293-133168429
  hypo
cctgcgcgtgcccgtccccactcacagcccctgacctccggggcccccacgcaccaggcgctccctgcccggccccatctcccggagccctggaggctcagcctgggtgtcgtgtgtgcctcgtgctcttgggaaa

SEQ ID NO: 215357 - DNA, 143 bp, Homo sapiens
  chr12:133199858-133200001
  hypo
tgctgtgtggctcacaaatatccagctcatttttggagaaactggctcttctggttgagccgctgcttgggaaccagggccagagcttcccgtttctgacccctccaccactactcaaatgcccgcagctagcctcacagtga

SEQ ID NO: 215358 - DNA, 128 bp, Homo sapiens
  chr12:133200090-133200218
  hypo
cccatcactcctcattcctgagggttctccagattcgcttccaggaatgaagcctagtcagccagcctccctcctcccctgcttgccctaatttgatttgatctccactctggaggcctcagcactcc

SEQ ID NO: 215359 - DNA, 209 bp, Homo sapiens
  chr12:133209151-133209360
  hypo
cccacctgggggactggcaccggggaccacccatggcacacagaggagttaggtcactggcacatggcagtggcctcaaaagacaaaagactgctcaccgggaagggctccgaccgccccctcggcctcctgggagagctggctggcccccctcctcctcacgggggtgctccctggagcactgcgcctcagcccgtccttcatgcagt

SEQ ID NO: 215360 - DNA, 151 bp, Homo sapiens
  chr12:133210035-133210186
  hypo
actgcgcccggccaacccggaacttttcaaaagagacatagaaagttgcaagagagaactgagaaagttaaagactcaaggacaagtagacaaaaatataaaatgatcatcaacgaaggcctctgtgaccgcatccacctgtgtgtgcaca

SEQ ID NO: 215361 - DNA, 59 bp, Homo sapiens
  chr12:133220203-133220262
  hypo
cacgtgacttctgcccgggatgtggctgtgcccctgcagctgcccggcccactgcccaa

SEQ ID NO: 215362 - DNA, 153 bp, Homo sapiens
  chr12:133222188-133222341
  hypo
acaaacaaaaaaacctgacacgctaaaggatttttaaaaatacccaaagtctcaaatatgtaaaatgtccaggttgcaataaagcgttatttggcgtaacaacaaccaggaaaatctgaataattctcaagcgagaagagaaccagtagggtt

SEQ ID NO: 215363 - DNA, 44 bp, Homo sapiens
  chr12:133225533-133225577
  hypo
tcctccgctttagcgactcgctggttcacgtagaacacacgggg

SEQ ID NO: 215364 - DNA, 463 bp, Homo sapiens
  chr12:133225891-133226354
  hypo
ctgcacaatctgccacggaaggtccaggatgctgcgggcagttcttcgcaagaagctccccagccccgtggcaggaccatcccggatggccccgggcctgagcacaccctctgccgactccagacgctgcctcttcctgcgggcgaggcgctgccgggcctgcagctgccacttcttcttgtggaaccggagccagacaagccattcctcctgggatggatggtgagcacagccagtgtgcaagtggtgagatgggaatgcccgccatgactttctcacaagcagcctccctaggggtcaggacgcatctcgggctccctgggctgtgcagacccctcagagacagacagtatcacagctgtgtgccttacctggctggttcccagggcgggaggctgccccaagatttcctgccagggcacagtcggcgtgaggtcctgggactcctcctggctctcccaaa

SEQ ID NO: 215365 - DNA, 61 bp, Homo sapiens
  chr12:133277669-133277730
  hypo
ttggctccttagagccgcagtgctgagtacacatgtgtgctgtctgcgtacacacagaaca

SEQ ID NO: 215366 - DNA, 150 bp, Homo sapiens
  chr12:133280428-133280578
  hypo
tgggccactggttctcgggaatttagagaaggaagcagagacaactgagaagacagactggccgggaacacggaggatctgggatggaagaggggagagctgggaagccgcgcctctgagtagcgtgggggcagagtcgccatcctaggt

SEQ ID NO: 215367 - DNA, 86 bp, Homo sapiens
  chr12:133308293-133308379
  hypo
ctaagtgctgggattatagtgtgagccgccacgcccggccgctgggattgcaggcctgagctcccgtgcccggccatcgttgatgt

SEQ ID NO: 215368 - DNA, 305 bp, Homo sapiens
  chr12:133312071-133312376
  hypo
tttccagagcttgcgaaaatcttctgcctatgaagaaaaaaaaatgtattgagccgtgtcaggcactgcgcccctcagctgcggaaacctgaagagccgtcgtcatcgcagtagctgcctgtctccgcacacccttccttctctccccttcactagcagatccctgggccacgtgcccacctgtggcatggctgagtggccgcacggctgcactctgacctgggggaggggaggcggtctcctttcttgcagccccgtctgggctgtgaggttcagaaccaggagggcccgagcacgaggcctca

SEQ ID NO: 215369 - DNA, 31 bp, Homo sapiens
  chr12:133348835-133348866
  hypo
gactgggtgacaggccgggcgcaggggctca

SEQ ID NO: 215370 - DNA, 392 bp, Homo sapiens
  chr12:133351310-133351702
  hypo
acacgacgctaaacggcctctcaatccgagcgctgccctcccacctgcctcctggaaaacatggatgtggaccgagcacagaaaaccgccgggcgcctgggcacagctcccgggccccagcccttcacacacagcagggactgccgagtcacagaccaccgctcatctgctttacaaagcacattacaacaaagtggtatttgaattcacagaacgaggaaaacactgttggatgaatgaaaccagaatgaaatgatttcatctgtcaccccattaccactgactacacagcagctgctcagtgtgggctcaacaaatccgtttatgtctgaatgactaacacgtctgccagcctcctgtccgagagcatctacagcgcacgtcggctaccc

SEQ ID NO: 215371 - DNA, 940 bp, Homo sapiens
  chr12:133353641-133354581
  hypo
gtgctatctcctgggaatgtttcccctcccgaatcctagcgtaaaaaaacaagaaagaagggaatcgccacgctcctccagtgtgctgtgccctcccgctgggaaatgctgcctgtggaaggcgttcgtcctggcaggccctctgctgtgcactgcgtgctgcagccatgcttggtgcccacagtgtgcactcgggcagtcctcacgaagcacctgagactcacacttcactggcacccctcacagatcccagagactcactttgccggcacccctcacagatcccagagagtgccggccccgagaccacagtgcatgggacccacagagccacagcatcagccccgcgccgggccgccccttcccgcctctgacctgaagctaagtactcctgctggggcgctttctctcttggggggaggacacggggcagtgagtgaggctcaggattctggagacggaggctgggtgccttctactcctatgattcactcaagtactcggcaatttgcaaaatatagatgaccctcgctgtgctgaaggtgtgaattagaccccgcccattgccaggacagccatgtttgagggctggcggggcccaggcactcactgaaggtcgtcggcctcggcctgcagcttctgcaccaggtgttccttggcctgcagctccttcttcacctcactcagctccaaggaggccgccttgaagtggcggcggttatgcccggcttccaccttggcagcagccacctaggaggaaggaagccacgttgtccatgccctgcgtgacacccacagctttatgacgtgccgggcgcagggggtgaatgcactcccggccccgtgcatgtcctggctgccggcgtgtgcttctccacaggcctgtcaagttccttgtaaagatgaaaccacctgacccggagctcggcacgcagcaagt

SEQ ID NO: 215372 - DNA, 513 bp, Homo sapiens
  chr12:133356750-133357263
  hypo
catgcacagccccccgcgtgcacacacaccacaccccaggcacacgtgcacgcacaccccccatgtgcacacacacggcaagcgtactaggagtagctgctctgtgccaggtatggcggaggtagccagcaagcagcagcgttctaacagaggagcagggcccagacagggcacctgggggtcaggatgggcctctgctggcgacgtgaccaacgtgtcagtgaacacctgaagcagggcaggggccagccacgaaaagacagctctctacacagagaagggtccacagaaccacccctcttatctgccgaacacaaatgggatcatatgctattctcaagtttgcttttgcaatgcaacacgacatacaggacaccactcccagcacaatataaatacacatgcacgcggagctcattggccccaggccctcacagctgcactgccatttaatctaacgccaccttctacggaccagagcaggtgctctgcggcctccgtcaccaacaactg

SEQ ID NO: 215373 - DNA, 218 bp, Homo sapiens
  chr12:133380424-133380642
  hypo
tgagagatgagcccaccaagcggcctccctgggaggactctggacccgggtcactctacacccctcgggctttgtcttcaatcttcccaccctgcttcgccctctccttcccactcctgttcacgcttgctctgagcaggccaaccacagtcttctccgtgtctgctgggcactggagtgtgagctctgggactggcccgggcggggactgagggggt

SEQ ID NO: 215374 - DNA, 200 bp, Homo sapiens
  chr12:133384551-133384751
  hypo
gcggcctggaggacgtccttaatggaggggaactggcccagggtatccgcaggaatctcctggccgttgaccatatagggggtgtcctgcgtgcccactgtcttcgacagaatgccataggtccctcgggtggaggcgctgctgtacgatgagctgtcgctgtcatttccatccacctcagacacgctgtctccagccag

SEQ ID NO: 215375 - DNA, 136 bp, Homo sapiens
  chr12:133412307-133412443
  hypo
gcgttttgatccagcggcccaagtggacccacattcaaggccagcactgggcagggcgggtctcacaaatgcatgctcccagcacagcgcacggccctcacagtgccaggctcccagcacagcgcacggccctcac

SEQ ID NO: 215376 - DNA, 69 bp, Homo sapiens
  chr12:133414280-133414349
  hypo
gctggtcagcgcgcggatctgcagggctaggctgtgctctgcatgcggccctccgtcctcagggaggca

SEQ ID NO: 215377 - DNA, 201 bp, Homo sapiens
  chr12:133424380-133424581
  hypo
gtgggaacaagagctgccgggaacaagagctgcgggaagcggctcctacgaattggtggcaggaggcacaaaaacgaaatacctatttttggaatacggaaaaaacagacaaacaccaatggcatgcagagaaccagctggctgcaccagtgaggaaacatggctcccggctccccaacccgcagcgggtcaggtaaaaca

SEQ ID NO: 215378 - DNA, 387 bp, Homo sapiens
  chr12:133435576-133435963
  hypo
atgcccagccctgccccacacgggacgaagaacctgcagtgccatgttccgtgagccaagggtgaacacggtcgcacctcacgcagtcgtgcagcaggtcctggcagatgatgcatgtcagcgtctcctccatcttgtctggcttcccagccgctgctctgacgtcctcgtggacggtttgggcatttctacgcggttgtgcgaccaacaactgcccgttcaggtcaaggtccccatctacaggagaaagggatgtgttctgtcgtaaccaagaaggaaatacacgcaggttcaggtcaaggtccccgtccacaggagaaagggatgtgttctaactgtcgtaaccgagaaggaaatacatgcagtcttttttttttcgagacagag

SEQ ID NO: 215379 - DNA, 300 bp, Homo sapiens; identical to SEQ ID NO: 203263
  chr12:133443618-133443918
  hypo

SEQ ID NO: 215380 - DNA, 74 bp, Homo sapiens
  chr12:133448788-133448862
  hypo
gtagccaggaggaacgttcagagagcgccctcacgtgcacccccgtgcgggtctgaccccggcaagccttcctc

SEQ ID NO: 215381 - DNA, 125 bp, Homo sapiens
  chr12:133449100-133449225
  hypo
gtgtaaatacgtaacgatgcacacatccacgcacccctcaccattctctcaagaaatggctcgcccacttctccctgactgacagcctaaccagccactacacctcctcacgtgcttggcagctc

SEQ ID NO: 215382 - DNA, 237 bp, Homo sapiens; identical to SEQ ID NO: 203265
  chr12:133464166-133464403
  hypo

SEQ ID NO: 215383 - DNA, 218 bp, Homo sapiens; identical to SEQ ID NO: 203266
  chr12:133464555-133464773
  hypo

SEQ ID NO: 215384 - DNA, 241 bp, Homo sapiens; identical to SEQ ID NO: 203267
  chr12:133706775-133707016
  hypo

SEQ ID NO: 215385 - DNA, 38 bp, Homo sapiens
  chr13:20392320-20392358
  hypo
atgcctccttggtgatgaaacggtgggtgatttggggt

SEQ ID NO: 215386 - DNA, 282 bp, Homo sapiens
  chr13:20392445-20392727
  hypo
atcctgtagaccgtgacctcctcacacagcgccaggacgaggatcgcggtgagccagcaggtgactgcgatcctggagctggtcgcagcaggccatcctgcacgcggtggaggcgccccctgcaggccgcagcgcatccccagcttctggacgcactgtgagcggttatgcagcagcacgctcatatgagatgccccgcagggtgctatgcaggcccacgtccccacaaagcccatggcaggcgcccgggtgccggagcacgcacttggccccatggatctc

SEQ ID NO: 215387 - DNA, 85 bp, Homo sapiens
  chr13:20521929-20522014
  hypo
ggccgctatgtatctcttttaaaaatccgtttacctatcctacaacagcaaaatgaagatgaccgctctattctcaatgacaatt

SEQ ID NO: 215388 - DNA, 127 bp, Homo sapiens; identical to SEQ ID NO: 203270
  chr13:20735305-20735432
  hypo

SEQ ID NO: 215389 - DNA, 720 bp, Homo sapiens; identical to SEQ ID NO: 203271
  chr13:20766627-20767347
  hypo

SEQ ID NO: 215390 - DNA, 276 bp, Homo sapiens
  chr13:21047410-21047686
  hypo
gcggcacccacatgctgctcactgtggccggagcgtcggactttaaggagctgtgagacagctatattttatgtggaaatttccagacttttaaacatcagtgagtcattcaaacaaacaaatgaacaattatttttaaagctgcacatggccagactcggcccctggtaccagcctgagacctctgaactggccttcagctagaagagccagaggcagccttgtgatctcagcggacctggccagagtgggtgggcgggcgccaaggatggcgct

SEQ ID NO: 215391 - DNA, 65 bp, Homo sapiens
  chr13:21057583-21057648
  hypo
ccatatcatcaacatgaagtcagctttctcacttggactgtaacgtaccacatcatcattctaaa

SEQ ID NO: 215392 - DNA, 271 bp, Homo sapiens; identical to SEQ ID NO: 203275
  chr13:21099487-21099758
  hypo

SEQ ID NO: 215393 - DNA, 318 bp, Homo sapiens
  chr13:21572946-21573264
  hypo
acggggcgggggccgcagcgacattgtgcacgccgggtgggggccctgcgacattgtccacgaccttgtgcacgcggggcgggggccctggcgacgttgtccacgcagggtaggagtcccggtgaccttgcgcacacggcgcaagggccctggtgaccttttccacgaccttgtccacgcaggacagggatccccgcgaccttgtgcacgcagggcgggggttctggcgacctggtccacaaccttgtccacgcgaggcaggggccccggtgaccttgggcaggcgcagcacgtgccgtgtgcgagccaattatgact

SEQ ID NO: 215394 - DNA, 215 bp, Homo sapiens
  chr13:21597283-21597498
  hypo
gagggctccgggctccgagggctccgaaggccggggagtgggaccagctcccacacaggagacgcagctcagggcttctacatttctaggaatgctaaaaacccaattttcttaattcctttttttttttctttttagagatagggtctcactacgtcccatcctcctgcctcagtctcctgacacactgggaccacaggcgctcgccccctctc

SEQ ID NO: 215395 - DNA, 788 bp, Homo sapiens; identical to SEQ ID NO: 203277
  chr13:21634968-21635756
  hypo

SEQ ID NO: 215396 - DNA, 228 bp, Homo sapiens; identical to SEQ ID NO: 9203
  chr13:21635777-21636005
  hypo

SEQ ID NO: 215397 - DNA, 46 bp, Homo sapiens
  chr13:21809435-21809481
  hypo
gctctgtgaactgccggtgcgcagcaaagcgcggcccatgtgtgca

SEQ ID NO: 215398 - DNA, 36 bp, Homo sapiens
  chr13:22091944-22091980
  hypo
cgcgcgcgcacacgcgctacatacttaggtttacta

SEQ ID NO: 215399 - DNA, 160 bp, Homo sapiens
  chr13:22214672-22214832
  hypo
ataaccagccttgcccgatcatggcagcattgactggaccccagaaggaaatgaacttgtctgaccagagtgaggcatcccacatgcaaaatgtaagtacctcatgtgctccctctcggggtcatgccagtacaggtctagctcccgagagggagggagg

SEQ ID NO: 215400 - DNA, 150 bp, Homo sapiens; identical to SEQ ID NO: 203280
  chr13:22243864-22244014
  hypo

SEQ ID NO: 215401 - DNA, 556 bp, Homo sapiens; identical to SEQ ID NO: 203281
  chr13:22244074-22244630
  hypo

SEQ ID NO: 215402 - DNA, 380 bp, Homo sapiens; identical to SEQ ID NO: 203282
  chr13:22245019-22245399
  hypo

SEQ ID NO: 215403 - DNA, 96 bp, Homo sapiens; identical to SEQ ID NO: 203283
  chr13:22247845-22247941
  hypo

SEQ ID NO: 215404 - DNA, 45 bp, Homo sapiens
  chr13:22350434-22350479
  hypo
agggctgtggtgcagctcaccgccatgagggacttcccttttttt

SEQ ID NO: 215405 - DNA, 31 bp, Homo sapiens
  chr13:22392838-22392869
  hypo
ctttgggttcactgcgttgtgaattgtaaca

SEQ ID NO: 215406 - DNA, 31 bp, Homo sapiens
  chr13:22392989-22393020
  hypo
actcaccgtgagggtccgcggcttcattctt

SEQ ID NO: 215407 - DNA, 180 bp, Homo sapiens
  chr13:22539244-22539424
  hypo
agtcataaaggggatctctgcgatgctcaggagggaagagaccgcctttaggagaaggggcgggacgtggtcagtgtgcatctagaaccatcactcctattgcggtggagaggtggtcataagggcaaagtgagcggtagcagggccggtgaggatgccgctggagcaagccaaggatgg

SEQ ID NO: 215408 - DNA, 214 bp, Homo sapiens
  chr13:23508986-23509200
  hypo
gccctgaacacgaaccggacggggccttcccgcattactacccgaatgacactgctggggggaccgctctctggatgccattgtggccacgtgtcgggacggtcggctgcttgactccacgacttaaagctagatttggccttttaagcctctgtctcagtgccctcgggtcccttctgcagctcacctacctgtccctcggcctctggggtgg

SEQ ID NO: 215409 - DNA, 201 bp, Homo sapiens
  chr13:23897356-23897557
  hypo
aataaaaatcaagaatgaggcgttagataataacctaaagattctacttgaaaaacatattaacagctatttgacttctttgaccgtgactgcaccagaccatgcacggcacagagctgcctgcaatgctgtggggtcgtgtgatcaagcctcacctggcaggtgcacaccggcgaatgcgtgcagcagacagcaggttgt

SEQ ID NO: 215410 - DNA, 216 bp, Homo sapiens
  chr13:24408085-24408301
  hypo
cccacactaagtggcgcctcccttggcctgaccctgcggaaccctcggaagcaggatgcccctttgctgtcccctgcctcccaccctgaccccttcaccagccgtgtacttgtctgcgggttgctgggtcgccagagctgaggccacccagcaagggtgggtggagagaggccacgcgcccgggatgaggggagaggggccgagcccccggagccg

SEQ ID NO: 215411 - DNA, 358 bp, Homo sapiens
  chr13:24718516-24718874
  hypo
tgcccaagagacaagatgagcgaatgaaactaacatcactcagcaccttctgtgttccaggaactaggccaggtgctacccaaaaagtttcctatttaagaagcgttggaggatggcaaaacccagctctccttcctggttgtcgcacagcgtacacaatgcacaagcactggcccagacaaactttgatcaggcaccgctgagcagctcttgggggctctttggtgcctgcaggttgctgccattgtgcccctcactcagctccgtccgggttgcagcacaccagccccgctgcagcagccaccgagagaggatcccacctttcagactttggccagcgtggcgtagttggtgtttt

SEQ ID NO: 215412 - DNA, 1061 bp, Homo sapiens; identical to SEQ ID NO: 203286
  chr13:24734667-24735728
  hypo

SEQ ID NO: 215413 - DNA, 89 bp, Homo sapiens
  chr13:24797623-24797712
  hypo
tcgaggacacggacgatgccttccagcggagcacacaccgctcccgcagcctccgcagagcctacggcctgggccgcatctgcctgctg

SEQ ID NO: 215414 - DNA, 70 bp, Homo sapiens
  chr13:25026104-25026174
  hypo
acatgcccccagcacgagtccagcacagccagtgaggaggtttacccaggcccttcgggacaagcggaga

SEQ ID NO: 215415 - DNA, 231 bp, Homo sapiens
  chr13:25026475-25026706
  hypo
tcccctgcagggcaacaagacgacctccccgtgggtctggactatgtgaccagctctctgagactcacccgataccgcaggcgaataacctggtgtgcgggcggctcctcttcacgagctgtaatgtcaggctctcatcctggaggtgcccatcagacaccaggaggatgttccgtgaccctcgagcagggtacaataagctaagatatcggagtgttttccagaagtctg

SEQ ID NO: 215416 - DNA, 41 bp, Homo sapiens
  chr13:25642761-25642802
  hypo
cacacacacacaggcacacacgcacgaacgcacacacacgg

SEQ ID NO: 215417 - DNA, 81 bp, Homo sapiens; identical to SEQ ID NO: 203288
  chr13:25746000-25746081
  hypo

SEQ ID NO: 215418 - DNA, 164 bp, Homo sapiens
  chr13:25932257-25932421
  hypo
gggcatttttcatctccacattgagatgtgaagatttcagcatgtagatggaagagactcagattaaatcaggtttcagtttttgccaaacagaaacaatgaagctggtgagggacaagtgtttgggagatgatggcattcaaaatgggcgaggggggaaaatg

SEQ ID NO: 215419 - DNA, 93 bp, Homo sapiens; identical to SEQ ID NO: 203290
  chr13:25946858-25946951
  hypo

SEQ ID NO: 215420 - DNA, 239 bp, Homo sapiens; identical to SEQ ID NO: 203293
  chr13:27334980-27335219
  hypo

SEQ ID NO: 215421 - DNA, 37 bp, Homo sapiens
  chr13:27556411-27556448
  hypo
aaaaccatctcactgcgctttatgggggatttttttt

SEQ ID NO: 215422 - DNA, 178 bp, Homo sapiens
  chr13:27620503-27620681
  hypo
tctacggcatcaccccgaaagcacttgcggggagaagcctcctctcctcacacccccaagtggatgaccctgtgactgagtcattagagggctggccaagcgagctcctgattccatcactgctggagactgaagagcttggctgaattatccagacacgcttcgtgtggaaccctgt

SEQ ID NO: 215423 - DNA, 399 bp, Homo sapiens
  chr13:27690601-27691000
  hypo
tttaaaactgcttccgaacatgattctaaaagcgtatcaatggatacttacattgactaatccaaaatagtgctcattgaccggaaactgttctggaccaatctctttctctaatgccgaagcattggcgccctataaaatgaaaaacaaaaatcttagtatttatagtagtcatgcaccacataatgacacttcagtcaatgacaggccgcaacatgatggtcctatcacattacgatggagctgccctacacaggtgcgtctttatcctttacaccgtatttttagctgtacctttcttacgtttagatatgttcagatgcacacttattcctgtgttacgattgcctagaaaatacaggaacatgctgtataggtttgtggccttcgagcaacagg

SEQ ID NO: 215424 - DNA, 98 bp, Homo sapiens
  chr13:27691060-27691158
  hypo
ctgatgttcgcatgcacaatgacgaaatggcctaacgatacatttctcacaccatatccccatcgttacacatgatcgtattttcataatattgtcac

SEQ ID NO: 215425 - DNA, 275 bp, Homo sapiens; identical to SEQ ID NO: 203294
  chr13:27744759-27745034
  hypo

SEQ ID NO: 215426 - DNA, 31 bp, Homo sapiens
  chr13:27914840-27914871
  hypo
cttcaaaaaatgctcaacagcggcagggcgc

SEQ ID NO: 215427 - DNA, 91 bp, Homo sapiens
  chr13:27915171-27915262
  hypo
ccagctaaagattgctccaagtatactcatccattgcttaacgatggcaatatgttctgagaagcgcattgttaggcgattgagtcattat

SEQ ID NO: 215428 - DNA, 57 bp, Homo sapiens
  chr13:28152523-28152580
  hypo
gtataccgagaagccgcaaacagtcgtagtaatcatattctgcgccgcataacatca

SEQ ID NO: 215429 - DNA, 226 bp, Homo sapiens; identical to SEQ ID NO: 203301
  chr13:28493981-28494207
  hypo

SEQ ID NO: 215430 - DNA, 243 bp, Homo sapiens
  chr13:28575159-28575402
  hypo
agctggaaacctttgtggctcgcgatgccttctgcctgagtattgctcgcagcctctgggcttattccacccactcagcccagcagtctggctcagcttgcaatatgggcccagatcccacacctgccaagggcgagccaggcgcagagccaggaggggtgcgtgggttagtgaccaagggtccgaccactgtgtgcagccaggcacgctggctgctgcagcggggtgggcagctccaggcac

SEQ ID NO: 215431 - DNA, 34 bp, Homo sapiens; identical to SEQ ID NO: 203311
  chr13:28592658-28592692
  hypo

SEQ ID NO: 215432 - DNA, 210 bp, Homo sapiens; identical to SEQ ID NO: 203312
  chr13:28608023-28608233
  hypo

SEQ ID NO: 215433 - DNA, 167 bp, Homo sapiens; identical to SEQ ID NO: 203313
  chr13:28608355-28608522
  hypo

SEQ ID NO: 215434 - DNA, 106 bp, Homo sapiens; identical to SEQ ID NO: 203314
  chr13:28636040-28636146
  hypo

SEQ ID NO: 215435 - DNA, 138 bp, Homo sapiens
  chr13:28745530-28745668
  hypo
tacttggagttagtgcggactccagaggttaagagctcagtcacgcaagactgctctccacttcagataccagtgacatgtagcgggtcctcagattatccacacttctatccgacttggctacaaattgggagttcc

SEQ ID NO: 215436 - DNA, 360 bp, Homo sapiens
  chr13:28745728-28746088
  hypo
ttgcttgactggtttattacaaaggatacagatgaacagtcagatgaaaaggtagaacaaggatcttttttctctgtggagttggggtgtgccaccctcctggctcataaatgtgttcaccggcccacaaactccttgaaccccacagttaagggatttttatggacgcttcatctcgcaggcaagggaaattattaactcagcctgtagcccctctctcctcactggaagatggttgggtagggctgaaagttccaaactggtaatcagggcttggtctttctggtgaacggctcccatctaggtacctaacaaaagtcacctcattagaacaaacgctactcctatcaccctggaaat

SEQ ID NO: 215437 - DNA, 220 bp, Homo sapiens; identical to SEQ ID NO: 203317
  chr13:29292471-29292691
  hypo

SEQ ID NO: 215438 - DNA, 256 bp, Homo sapiens; identical to SEQ ID NO: 203318
  chr13:29293342-29293598
  hypo

SEQ ID NO: 215439 - DNA, 167 bp, Homo sapiens
  chr13:29913841-29914008
  hypo
ggaccatctctctctggatacgggcatagtcccagttgggaggagcggtgaggaggggccgggtgcggacccagcgcttcccattgacgtagacgactttgcagccatccttgacctgggagcggagaaggggcctggaccgcaaggcccggtgtttctgggattgg

SEQ ID NO: 215440 - DNA, 204 bp, Homo sapiens
  chr13:29920653-29920857
  hypo
ccatacagccagcaacgccagtctcactcccaccatgtccccccaacagcacgagagggacatgccccaggctacaagcctccctgctgagaaaggtttcacgtctccccacctgcagcagcttctgtgcgcctgtctgtactcccagatcacctcctctccagactctgtccaggaaactgcacaaatcgtttcaaagttcag

SEQ ID NO: 215441 - DNA, 203 bp, Homo sapiens
  chr13:30079644-30079847
  hypo
tctgagccatcaccgctcccgaaacacatggggcggcagctgctgtgcctccttctcaattcttccacccccccacaccatcagaattcggatttctctccacgtggcgtctgcctctgtccccttccaggctggagcgacgtttccacgttcggatgctgcagcctctgcacctgcctcagacagacccaccagataccacc

SEQ ID NO: 215442 - DNA, 149 bp, Homo sapiens
  chr13:30087251-30087400
  hypo
gtgtgtgaaatggtgctggccgcaggccccgacccaggcaagacgggggtggcgtgcactggagctatgggggtggggaggatgctcgggtctctcccacttgcagaggcgtggggtccgaagcatccggatgacagatacacaaaagg

SEQ ID NO: 215443 - DNA, 45 bp, Homo sapiens
  chr13:30101132-30101177
  hypo
gaggacccacagccgacttcaggaggacccgggtgccgggaccct

SEQ ID NO: 215444 - DNA, 32 bp, Homo sapiens
  chr13:30106967-30106999
  hypo
gatgagaattatgatcactgcgaatatgtcgg

SEQ ID NO: 215445 - DNA, 303 bp, Homo sapiens
  chr13:30107122-30107425
  hypo
ccacaaagcacacacaacagaggagatgtgaggacaactgttagccaggtatttgtagtggagctccatgttgataacatcattgcaggagtcaccgacggtgcactggaatctggcagcagcagccagaccacagtgtatgctgagccagaagtgacggtcgactagtgctaagtgcgagaaggcttctagggcctacagaggaatgcacttcacatcctacccaatatacacaggtgtattctatcaaatatatatatccgaataaaaagttcgcaaaacgagtgttacccttaccacctg

SEQ ID NO: 215446 - DNA, 114 bp, Homo sapiens
  chr13:30123381-30123495
  hypo
atgatcaaagaccaggagaaaaccgtacccgtggaccaggaggaagccagcgaagaacaaggcagcccaggatgcgggaccagtgccattccttcccaccgcatgagagtgcca

SEQ ID NO: 215447 - DNA, 38 bp, Homo sapiens
  chr13:30128333-30128371
  hypo
aaagctctgaggccccggtcaggcgccatgaaggggaa

SEQ ID NO: 215448 - DNA, 81 bp, Homo sapiens
  chr13:30910053-30910134
  hypo
ataaacagaatctgtctgatcgttatcatcatggtagttcgactgatgtactaagatatggatgttcaggtcgcttaagaa

SEQ ID NO: 215449 - DNA, 390 bp, Homo sapiens; identical to SEQ ID NO: 203319
  chr13:30982478-30982868
  hypo

SEQ ID NO: 215450 - DNA, 43 bp, Homo sapiens
  chr13:31185329-31185372
  hypo
atactgctttttttttgagacgcagtctcgctttattgcccag

SEQ ID NO: 215451 - DNA, 206 bp, Homo sapiens
  chr13:31208407-31208613
  hypo
cgaagggaagattcacgttgccagtggaacacagcaggacagcaagagagttcatgatgctactcagaatggcatgaaatttaaagcttataaattgtttctggaattttccgcttaatattttcagaccacggttgagttcaggtaactgaaaccataggaagcaaaacacggatgaagagggaccacttcgtattgcctaattt

SEQ ID NO: 215452 - DNA, 320 bp, Homo sapiens
  chr13:31306006-31306326
  hypo
ctgcgggaatccgggcaggcagggcgggctgcgctcccctccccggctctcccggtgccccttgtctttttgttctgtctcagcagctctctattaagatgaatggcatttccaaaggcttcacctctgataagtgttcctctgcagctgcagccagaatcttaatgtgcgcgctgtaatttaatggccgtctcggctattaacacgctcttctcgggtgaagtggactccctccatccccgggcctctgcacgtgctctgcgcgctggctgggggtgactccaaggagctcagagcggggtgcccggcacctctcgcca

SEQ ID NO: 215453 - DNA, 55 bp, Homo sapiens
  chr13:31579360-31579415
  hypo
ggccgccgagtgccgacccccgggtgggcctgcctcacccggcggagaatgcaca

SEQ ID NO: 215454 - DNA, 120 bp, Homo sapiens; identical to SEQ ID NO: 203320
  chr13:32905094-32905214
  hypo

SEQ ID NO: 215455 - DNA, 157 bp, Homo sapiens
  chr13:32983222-32983379
  hypo
accaacccagactgtttctacgccacagtaataaacacatcggagcgcgcatgtcaagtagtccttgagatactgcggtgaattaagagggagatgaaagacaaaactaaagtaaaatgcttccattttcaaaaacgagtgaatatacattccagaa

SEQ ID NO: 215456 - DNA, 35 bp, Homo sapiens
  chr13:33103876-33103911
  hypo
ttttagacaagagtccgactctattgcccaggctg

SEQ ID NO: 215457 - DNA, 242 bp, Homo sapiens
  chr13:36788474-36788716
  hypo
gcccttcctgctattcgctccccacagttccccgacaatgagagctccccaggccgggctttgagggccgaggggaccaccgacctagggcccgcccgcgaggttataaacgcagctgcctccccttccacagcctcttacctggcccgagatctggcagtgctcctggcagataattgaggaagccatggccgctgcgcacgtgctgggtcctggggcagcctcccagcaggaggagctcc

SEQ ID NO: 215458 - DNA, 268 bp, Homo sapiens
  chr13:36788746-36789014
  hypo
cactaatggctcctggccgcagctgagggcgagcacgccccaggcgcccttaaagtggccctgtcgccagttctggcgcgtgggggagcagcaggccgctctgaggggtcaacgcggaacccgggtcgggggcctgcccgcgggggctactcaagctgtcctgggggcccttaggagaccgcgtcactagctgactgcgcactccaagtccccttcccagggcagctctcacgacactaagccccgcgtactcactcccactgcgccg

SEQ ID NO: 215459 - DNA, 42 bp, Homo sapiens; identical to SEQ ID NO: 203330
  chr13:37005431-37005473
  hypo

SEQ ID NO: 215460 - DNA, 304 bp, Homo sapiens; identical to SEQ ID NO: 203332
  chr13:37393232-37393536
  hypo

SEQ ID NO: 215461 - DNA, 99 bp, Homo sapiens
  chr13:37643590-37643689
  hypo
cactgccaccccaccggctgcagtggggaggtgcgaggggtggcagcaggaacggctgtgggagcagcagtggcggtggtgggtcccctgtgccccacg

SEQ ID NO: 215462 - DNA, 33 bp, Homo sapiens; identical to SEQ ID NO: 203337
  chr13:39612009-39612042
  hypo

SEQ ID NO: 215463 - DNA, 135 bp, Homo sapiens; identical to SEQ ID NO: 203338
  chr13:41345197-41345332
  hypo

SEQ ID NO: 215464 - DNA, 136 bp, Homo sapiens; identical to SEQ ID NO: 203339
  chr13:41345361-41345497
  hypo

SEQ ID NO: 215465 - DNA, 206 bp, Homo sapiens; identical to SEQ ID NO: 203340
  chr13:41364043-41364249
  hypo

SEQ ID NO: 215466 - DNA, 161 bp, Homo sapiens; identical to SEQ ID NO: 203343
  chr13:42615857-42616018
  hypo

SEQ ID NO: 215467 - DNA, 42 bp, Homo sapiens
  chr13:43217491-43217533
  hypo
tggtgatgtgggctcaggagcggatctcttgatctgtgggtt

SEQ ID NO: 215468 - DNA, 126 bp, Homo sapiens
  chr13:43543227-43543353
  hypo
acctagccgtctgggcaccaggtgaaccggtttagctctgttctgctccttccacttctccaggttggccagctcctgctccgcaactaagccaggcgagaaatatcaaatcgtcaattattagac

SEQ ID NO: 215469 - DNA, 84 bp, Homo sapiens
  chr13:43596563-43596647
  hypo
caaagagctgccacgttggtacagaagttggaaaacaccatacgcttcaactgctggttaatttttgctctaaaaacttgatgg

SEQ ID NO: 215470 - DNA, 120 bp, Homo sapiens
  chr13:43620969-43621089
  hypo
ggatccagcagggtgtccactgcgtttctgatccagtgaggtgcacattgccgcacctgatcaggctaaaggctcgcctttgttactgcacggctaagtgccctaatcgagctgaacact

SEQ ID NO: 215471 - DNA, 337 bp, Homo sapiens
  chr13:44544879-44545216
  hypo
caccctgctcacccacgccccggtcactgcaaggggatgctgcaccccctcaaggtgaagagctgattgaggctgccaagaggaacgacttctgtaagctccaggagctgcaccgagctgggggcgacatcatgcaccgagacaagcagagtcgcacgctcctgcaccacgcagtcagcactggcagcaaggatgtggtccgctacctgctggaccacgctcccccagagatccttgatgcggtggaggaaaacggggagacctgtttgcaccaagcagcggccctgggccagcgcaccatctgccactacatcgtggaggccggggccagaccagc

SEQ ID NO: 215472 - DNA, 104 bp, Homo sapiens; identical to SEQ ID NO: 9329
  chr13:45150766-45150870
  hypo

SEQ ID NO: 215473 - DNA, 87 bp, Homo sapiens
  chr13:45154328-45154415
  hypo
aaaagggcaactctacagttagggaaatctgagtttcaaaaatctgggtctctccccctccaaaattcttacgacagcaatatatga

SEQ ID NO: 215474 - DNA, 275 bp, Homo sapiens
  chr13:45926346-45926621
  hypo
gggaaggtggagcagtcatgactcaggcttcgggagcctcaggctcgcagctacaggcttatacacactcacatcaaatgctaatggggcccgagtcagaaagaaattagccagactaagaaaaacaagactttggaaatataaacgtttgaatgaacattttaagcatggtatctgcctgccaccttggttctcaaagtggtctcccagaccttttcagggatctattacatcaaaactattttcagggtttttttttttttttttgagactga

SEQ ID NO: 215475 - DNA, 104 bp, Homo sapiens
  chr13:45936013-45936117
  hypo
agagacgggttttcactgtgttagccaggatggacactttcttcttcctttggaaatacatcctctggtttccctcctccctcgctggcctctcctctcagact

SEQ ID NO: 215476 - DNA, 41 bp, Homo sapiens
  chr13:45938917-45938958
  hypo
gcaatggaagaatggcctcgtacacacgctagagtggaaag

SEQ ID NO: 215477 - DNA, 136 bp, Homo sapiens
  chr13:46037882-46038018
  hypo
tctcaaattctgctcttaaaagatcagagccttcatttgggaacatagccaggcactgatttgtgctataaagcctgaataaagccttcagactttacccagacaatggtcaaaattgctacgaagctgtttccac

SEQ ID NO: 215478 - DNA, 87 bp, Homo sapiens
  chr13:46287705-46287792
  hypo
gcgcgaggagaaccggatgctcagcaaggagaacaagatcctacaggtcttctgggaggagcacaaggcctcgctgggccgagagga

SEQ ID NO: 215479 - DNA, 77 bp, Homo sapiens
  chr13:46288451-46288528
  hypo
tctacgccttcatgccggccaggagccaggaccccaagaagcctagcagggtctgaggcctcggccttgcaccggga

SEQ ID NO: 215480 - DNA, 107 bp, Homo sapiens
  chr13:46543045-46543152
  hypo
attggatggggagcgaagacgaccagacgtatgactacggttactccgattgctcccgaggctgctgctcctcttttgatccataggcttgcgatgctgtgcatctt

SEQ ID NO: 215481 - DNA, 220 bp, Homo sapiens
  chr13:46946223-46946443
  hypo
cagagagaagctgctactcttttcactcgagccatggggagaagcgctgccaacggagtctgtggtatcctcagacaacgttgtctctgccagggagtccccgaggcacgaaggtgaagggcctgagggagaggcagcatctgtcacaaaatgggtcccactgttccctgctgctggcacctgagattgcaagtcctgcggctgttgctgcacatcctgg

SEQ ID NO: 215482 - DNA, 120 bp, Homo sapiens
  chr13:46948515-46948635
  hypo
acaccgtgttttaacacccagaggggtgcgccgttcctaggggtacagcaataccaagttgatgcatggagtggacggagcaagctcctagtccatgtccctgctccaaaaatccattta

SEQ ID NO: 215483 - DNA, 40 bp, Homo sapiens
  chr13:48731919-48731959
  hypo
acatgtatttaaaagggaatcggccgggggcagtgactca

SEQ ID NO: 215484 - DNA, 36 bp, Homo sapiens
  chr13:49848524-49848560
  hypo
acatagttcagtcttcggtgcattacaggttactga

SEQ ID NO: 215485 - DNA, 191 bp, Homo sapiens
  chr13:49922251-49922442
  hypo
ctccttcccttcaaacccggacgctagaggccttgtgtttgttgcagttttgcctgaggctttggggaaatgatggcattgcggttcctttcctctgatgtctcgggcaattcagtgcttgtccgaaacccgcacaccctcctgcttacgacaacaaaagtgccacagtggccgggcgcagtgactcacac

SEQ ID NO: 215486 - DNA, 92 bp, Homo sapiens
  chr13:52334720-52334812
  hypo
tttagcttttttgacgcagctctccctcactcgtaacaatgaaaacaaatgacacacacacaaaatcctacatcagcggccctcaaccttgt

SEQ ID NO: 215487 - DNA, 182 bp, Homo sapiens
  chr13:52335914-52336096
  hypo
gcatgtgccccatgcagccacggtacatggaagctgtcacttgagccatcagaccggctcagcccatgtgaccggagctctgaagaggcacacacgcatgccccgcacaggctgttagcacttgtcgcctcgctgccctggtccagactacccttgcttgcgtcagtcaaaactgttgtaac

SEQ ID NO: 215488 - DNA, 161 bp, Homo sapiens
  chr13:52390091-52390252
  hypo
gtttatgccacccagccagccgcagatcatagagaggtacttgaatagccagaggcagagacagactcaaggccaagcaaagaacctgcagcagcggcacacggtgcacacggcgctgcactccgcaatgcctgtagcaggccagcccgccccctatgtgg

SEQ ID NO: 215489 - DNA, 37 bp, Homo sapiens
  chr13:52564916-52564953
  hypo
caactaggcaaaaataaaaccgaacccaccctggcac

SEQ ID NO: 215490 - DNA, 37 bp, Homo sapiens
  chr13:52565193-52565230
  hypo
agcctggcgacggagcgagactctgtctcatatttaa

SEQ ID NO: 215491 - DNA, 360 bp, Homo sapiens; identical to SEQ ID NO: 203369
  chr13:52702922-52703282
  hypo

SEQ ID NO: 215492 - DNA, 32 bp, Homo sapiens
  chr13:52770512-52770544
  hypo
agtcataaagagggccgggcgcggtggctgac

SEQ ID NO: 215493 - DNA, 160 bp, Homo sapiens
  chr13:60492535-60492695
  hypo
ctttgagaaaagactcgagttctggcctatatcactgacggatgactgcagcgaccttcgtttacagaaaatactcagtggcaaacaggcaacagaagccatgggcttcaggaaccacccaggactgcaacaacattaagaaccacgaaagtaagcctga

SEQ ID NO: 215494 - DNA, 83 bp, Homo sapiens
  chr13:73324107-73324190
  hypo
ttattaaaaagaacccgtcacgtaatagccgctcattaaatatttgtgtaacaaaaacagaacgaatacgtaggttaagttca

SEQ ID NO: 215495 - DNA, 34 bp, Homo sapiens
  chr13:73619752-73619786
  hypo
ctcatttctgccgggcgcggtggctcacacctgt

SEQ ID NO: 215496 - DNA, 51 bp, Homo sapiens
  chr13:73636846-73636897
  hypo
acgcatccactactgcgattaccctggtatgtgctcttacctggttgaagc

SEQ ID NO: 215497 - DNA, 926 bp, Homo sapiens; identical to SEQ ID NO: 203387
  chr13:74707668-74708594
  hypo

SEQ ID NO: 215498 - DNA, 200 bp, Homo sapiens; identical to SEQ ID NO: 203388
  chr13:74709334-74709534
  hypo

SEQ ID NO: 215499 - DNA, 35 bp, Homo sapiens; identical to SEQ ID NO: 203389
  chr13:75794021-75794056
  hypo

SEQ ID NO: 215500 - DNA, 1065 bp, Homo sapiens; identical to SEQ ID NO: 203391
  chr13:76055056-76056121
  hypo

SEQ ID NO: 215501 - DNA, 151 bp, Homo sapiens
  chr13:76352659-76352810
  hypo
gcccggccaatcgagtgccttttaacaatgcgcccttaagcagatgtaagcaccgtaaggcatattgagtttttttgaagtcaacacttgaaaatcattggcagtcgttccaggcgtttcacttaacttcgagtttctttgtgctttttat

SEQ ID NO: 215502 - DNA, 37 bp, Homo sapiens
  chr13:77553746-77553783
  hypo
caaccctttgggaggccgaggcaggtggatcacttga

SEQ ID NO: 215503 - DNA, 216 bp, Homo sapiens; identical to SEQ ID NO: 203394
  chr13:78272438-78272654
  hypo

SEQ ID NO: 215504 - DNA, 36 bp, Homo sapiens
  chr13:79992932-79992968
  hypo
ttttttttttttttctgaggcggagtctcgctctgt

SEQ ID NO: 215505 - DNA, 35 bp, Homo sapiens
  chr13:79993208-79993243
  hypo
gagccaccgcgcccggcccagggtttttgtttgtt

SEQ ID NO: 215506 - DNA, 499 bp, Homo sapiens; identical to SEQ ID NO: 203402
  chr13:80916947-80917446
  hypo

SEQ ID NO: 215507 - DNA, 287 bp, Homo sapiens; identical to SEQ ID NO: 203409
  chr13:95201339-95201626
  hypo

SEQ ID NO: 215508 - DNA, 229 bp, Homo sapiens; identical to SEQ ID NO: 203410
  chr13:95201662-95201891
  hypo

SEQ ID NO: 215509 - DNA, 149 bp, Homo sapiens
  chr13:95238872-95239021
  hypo
acaatcatagagtacgttatctaatcacatacaattaagctagaattccataagaacaagaaaacccatacatgtttggaaattaagacatacgtgtctaagtaacccacggatgagagaagaaatcaaattatttttttttttttttt

SEQ ID NO: 215510 - DNA, 108 bp, Homo sapiens
  chr13:95751946-95752054
  hypo
ctcctgatccatgtttgatacgtgtcccataggtggctggccctttgctgcgatgcacaagcggcactatcggcttcatgactcaacgcaaatgagagagaacactaa

SEQ ID NO: 215511 - DNA, 137 bp, Homo sapiens
  chr13:95852551-95852688
  hypo
ttagtcttaagttatcctgacgtcgtttctatttgctacacatattttgacctcatgcgtttttttatcacacaactagggcaaggtttcccaaagacagcatattttcagggacacgaggacactttctaaagata

SEQ ID NO: 215512 - DNA, 209 bp, Homo sapiens
  chr13:96061946-96062155
  hypo
taaaataagtaacttcgtcttagatagcacctgctgaaaagtttctggccaacacagcttttcctggctccaaagctcctatctgttctttgtcaccacaatacctcactccttaaaggcaacgtctgtcctaggccccactcatagaagcagagggtggacagggctgtacccgtcgtttcctcttcttcacccgagcatccccagcc

SEQ ID NO: 215513 - DNA, 461 bp, Homo sapiens
  chr13:96085829-96086290
  hypo
ttaaaattcgtctacgaaattttaataaatatccgtgtagaaaatcagaacgactctttcaggccatctttaaaatgtcattggtaaaccatacttgatcctaaattcctgtacttcctcaggccatccgagcatgaaacgctgtcacctacccacatccgctggctgtgacgcttgtcaaagtgttctctatcggctgcatgcctagaccaccaaagcgttctgaccggacagtgtcactggagaaggcggcgcgacatgtccagggcgcagatctgggctctggtgtctggtgtcggagggtttggagctctcgttgctgctaccacgtccaatgagtggaaagtgaccacgcgagcctcctcggtgataacagccacttgggtttaccagggtctgtggatgaactgcgcaggtaacgcgttgggttctttccattgccgaccgcattttactatctt

SEQ ID NO: 215514 - DNA, 92 bp, Homo sapiens
  chr13:96126087-96126179
  hypo
caggctgttaagcttcggagggaacaaacccctgccctgaaggggctcgcccacagtgaaggaaacagaaataaaaaataaagtattagaat

SEQ ID NO: 215515 - DNA, 184 bp, Homo sapiens
  chr13:96353304-96353488
  hypo
ctattccagccttttcgacaaaggtagcatccttcctacttttccttcaggtttcaggtgagccttcaggggaatcccccgagggctgtccagtggaactttccgcgatgatgggagatatttggtatcatttgcattgtcccatgcagtggtgttggagcttaggtcacgctaccccaaaata

SEQ ID NO: 215516 - DNA, 87 bp, Homo sapiens
  chr13:96409644-96409731
  hypo
ttgcttcccggtaagtttttgggacccaggtcttctgagtctagatctgttgttcatgctcatggaccatatcggtagaaatcaagg

SEQ ID NO: 215517 - DNA, 583 bp, Homo sapiens; identical to SEQ ID NO: 203416
  chr13:96705319-96705902
  hypo

SEQ ID NO: 215518 - DNA, 204 bp, Homo sapiens
  chr13:97999175-97999379
  hypo
attacataaaggggcgttgcatgagggagaaatgcaaatattttcaccctcctgcacacttgcaggccaaaatcaaagctgcgcagcaccaagccaaccaagctgcggtggccgcccaggcagccgcggccgcggccacagtcatggtaagtgcggccgcccgccgcccctgcaccccggcgcctctgcggaggccgctccggg

SEQ ID NO: 215519 - DNA, 80 bp, Homo sapiens
  chr13:98679646-98679726
  hypo
gacctttctagctgtttgtccgggtgttcttaacattagtgactccttttttttttgagacggagtcttgctctgtcacc

SEQ ID NO: 215520 - DNA, 201 bp, Homo sapiens; identical to SEQ ID NO: 203418
  chr13:98795570-98795771
  hypo

SEQ ID NO: 215521 - DNA, 150 bp, Homo sapiens
  chr13:98869900-98870050
  hypo
tgcctgggcaactcccatggctcatctcaaccacagtcctcggcggtttgttttctgcattagcttctcatgccagaacaccctcttatttgtttacctgcttagtgttggcctcttgcaggtagagtggccactccttggagggcaagg

SEQ ID NO: 215522 - DNA, 241 bp, Homo sapiens
  chr13:98870098-98870339
  hypo
gcatgaaactgactggtgacagttctgctcggtcgtttaactatacgagagttggtgctgtcctagcataacaagggaaagagcaagtgggaagagcttctgagtcccttcctcgtgttttcacagcgtgaaggtggggctgggattggagtccggcccgccagaccctcaacttacccatcttctgggcactaagagccgcctcctttgtgagattcgcggacttcctctgcctcctact

SEQ ID NO: 215523 - DNA, 43 bp, Homo sapiens
  chr13:98917861-98917904
  hypo
cgcgcccagcccttcctgaatttatatacgacatgtgagatca

SEQ ID NO: 215524 - DNA, 334 bp, Homo sapiens
  chr13:99047503-99047837
  hypo
atttggagaaggtgccgaatctccagggggccagagctgccggcgaggaaaggaaccgaaggtttccgccggggagccggggtcgcacccgagccctgcgccgaggagaagccccgcgggtaacaagcaggcggacggagccgcctcggcgcccacggaggaagaggaggaggtcgttaaggataggacccagcagagtaaacctcagcccccgcagccaagcacaggtccagcatcccgggctgccagaggcagcagtacttccattcctttcattgactgcagtgacgtagatagcgaatacgaccttcttagagaacaagcgtcccgatcc

SEQ ID NO: 215525 - DNA, 338 bp, Homo sapiens
  chr13:99068034-99068372
  hypo
tgtacccatgcctttcctcacgttgccgtgatacggaagcgcaggttggctcctgtcgattgggatgggtaagatccgaattcgaggtcacacccccgccatggggctgtcttcagctgtaggtgtgggcctcgttgaaccgcatttcctcctgggtgaaatgtggatggcatctcccatgcagggtgttacgcaaatggcacagtgtctggaaggggcttagtatactgcgctgcgcagagaaagcggggaagctgatcattttttaaaaattaactttttatttggaaataattccagagaaaagttgccaagacaatagtgtttctgtatggtct

SEQ ID NO: 215526 - DNA, 101 bp, Homo sapiens
  chr13:99115922-99116023
  hypo
ggtcactcaggggccgacttacgcgtcggaatcctcggagctcgagtcgtcatggctctgctcggccttccatctcttgtacctgtcgatgagctcggtca

SEQ ID NO: 215527 - DNA, 166 bp, Homo sapiens
  chr13:99204543-99204709
  hypo
gatgatgggaagggacgcagaccctggacgctgggtaccaaattgatcagaaacatgggagaaggtgtggtcagcaaggtggggacaggccagctggggacacaagtggctacgggacagcagagaggcaaaccatctgcagctaagccggcggaggtcttcttcc

SEQ ID NO: 215528 - DNA, 329 bp, Homo sapiens; identical to SEQ ID NO: 203419
  chr13:99229764-99230093
  hypo

SEQ ID NO: 215529 - DNA, 41 bp, Homo sapiens
  chr13:99293494-99293535
  hypo
ctgaaagcgctaccggtttccgagacgcgactgcacgacca

SEQ ID NO: 215530 - DNA, 354 bp, Homo sapiens; identical to SEQ ID NO: 203421
  chr13:99739098-99739452
  hypo

SEQ ID NO: 215531 - DNA, 101 bp, Homo sapiens
  chr13:99851316-99851417
  hypo
aaaaataactcgaacgaacctaaaggtaaatgtaaaatgtacttcaagactgtgaaaatgggctgggcccagaggctcacgcctgtaatcccaacactttg

SEQ ID NO: 215532 - DNA, 111 bp, Homo sapiens
  chr13:99851706-99851817
  hypo
gaagcaaataaaagtcatacttttgccttctataatcagtgttaacattttggcccactggaacctctctttgagggtagggactgtgttgatctacgaatcacagattta

SEQ ID NO: 215533 - DNA, 40 bp, Homo sapiens
  chr13:99863141-99863181
  hypo
aggtgtgagccaccatgctgggccccgctttttccctttg

SEQ ID NO: 215534 - DNA, 160 bp, Homo sapiens
  chr13:100035864-100036024
  hypo
gcttcctagccagggctgtgcgtcagtccccgtgctaagggttgaaagcaacgttccggggaggagcacgctcactgcgtgcatttgtaagcctagtcctcacccactgagtggtcccatgacatgggcggcaccccccgtttggaaaagccctggctgg

SEQ ID NO: 215535 - DNA, 134 bp, Homo sapiens
  chr13:100068639-100068773
  hypo
tttgctcattgatgtcggtagacatgaggacgcagggcactgacagctcccggactgtgctgcgcgggctgtggccccacacctgcccaaaggtgagctcctctgcaccccgtgttctgcgtctccaccccatg

SEQ ID NO: 215536 - DNA, 192 bp, Homo sapiens
  chr13:100068977-100069169
  hypo
agaattaccaaaagcgcttccagaagtgttctaaaattctcccccgggggtgacacagcaaaggtagcctggtcctatcggtggctggaggctgacgctggcctctgctccttctggcctgacagcagtggccgggatcctggagcgtccacgcaggttagggcgtgctctacaccccgcgtaggctagggc

SEQ ID NO: 215537 - DNA, 97 bp, Homo sapiens
  chr13:100307598-100307695
  hypo
ggattataggcgtgagccactgcgcctggcctggtgttgcatttcgttactggcaagatgatgtatgctctttcacgtgcccacatgcaaaggtgtg

SEQ ID NO: 215538 - DNA, 105 bp, Homo sapiens; identical to SEQ ID NO: 203423
  chr13:100620380-100620485
  hypo

SEQ ID NO: 215539 - DNA, 105 bp, Homo sapiens; identical to SEQ ID NO: 203424
  chr13:100620515-100620620
  hypo

SEQ ID NO: 215540 - DNA, 67 bp, Homo sapiens; identical to SEQ ID NO: 203427
  chr13:100622155-100622222
  hypo

SEQ ID NO: 215541 - DNA, 432 bp, Homo sapiens; identical to SEQ ID NO: 203431
  chr13:100632514-100632946
  hypo

SEQ ID NO: 215542 - DNA, 422 bp, Homo sapiens; identical to SEQ ID NO: 203432
  chr13:100633420-100633842
  hypo

SEQ ID NO: 215543 - DNA, 100 bp, Homo sapiens; identical to SEQ ID NO: 203433
  chr13:100634177-100634277
  hypo

SEQ ID NO: 215544 - DNA, 112 bp, Homo sapiens
  chr13:101184480-101184592
  hypo
gccctgctgtacacgaagcactgcaccgcggtgggcgctggcggctcctctgcgcccggggcccggtcctccagcagctgtacccgcagcaccgtgcgctggtacagggccg

SEQ ID NO: 215545 - DNA, 167 bp, Homo sapiens
  chr13:101297851-101298018
  hypo
gagcaggtgagccccgtgcaccgctccaagtccctgactgccgctgtgaggtgagccttgttcactgactgcccccgtagattaggttaggcccagctgtagtgctctaaactgccctgatcacagtctatcacaatattcctcacagagtttatcacaagcacttg

SEQ ID NO: 215546 - DNA, 58 bp, Homo sapiens; identical to SEQ ID NO: 27185
  chr13:101302821-101302879
  hypo

SEQ ID NO: 215547 - DNA, 209 bp, Homo sapiens
  chr13:101317803-101318012
  hypo
ctgggcccccacctcgcgtgaccagttcctgattccaacaggtgggcgcacctgatgggacagcccgtctgtaccagctccctaatcaaatcatcttctgagcacctaagaatgccccaaacagaaatgggtcaaatgatgggtggccccaaagagcaacaaaggtccacagccaccatgcgacttagcacctgcgacttaagtgcttg

SEQ ID NO: 215548 - DNA, 140 bp, Homo sapiens; identical to SEQ ID NO: 203437
  chr13:103046525-103046665
  hypo

SEQ ID NO: 215549 - DNA, 32 bp, Homo sapiens
  chr13:103262164-103262196
  hypo
ggttatatttcgacatgcgatttgggtagaga

SEQ ID NO: 215550 - DNA, 146 bp, Homo sapiens; identical to SEQ ID NO: 203438
  chr13:103450867-103451013
  hypo

SEQ ID NO: 215551 - DNA, 995 bp, Homo sapiens; identical to SEQ ID NO: 203439
  chr13:103451043-103452038
  hypo

SEQ ID NO: 215552 - DNA, 44 bp, Homo sapiens
  chr13:103568843-103568887
  hypo
ctactgttctgaccttattgcggcccactcttcctctaatcttt

SEQ ID NO: 215553 - DNA, 658 bp, Homo sapiens
  chr13:106912353-106913011
  hypo
cttattccagtgactgctgtcgtcatcagaagacgcagaaacccacagagagcggaacagcctgcgaagacacagacgtggggaaggcgccctgcggccatggaggcgcagattgcggtgacaggactgcaggtcaggagcgccagtgtcctccaccgaagctcggagagagagcacggcccgcccccgtcagacttctggcctccagaaccgtgacagaattgattgtgttgatgtaagccacccgttttgtggcagttagctacagcaggcacaggaaaatgatacgggtgtgttaaatttgttacgtctactcccccctgagaagccagttttctgctctgaaccggagatccagaaggaccctccagggatgacctcccaactctttgcctagagatcggcaagcacgttgccggaggctctgtccagaacatccgctctgcggctcacttttcatggtcccacctgaggccacgtctgccgaagctgcctccgatgtcgctcacctgccatcgggagagtatgcagccttcccgcctgtgcctccttcatctccggctgctcgcatcccccaggcaccgcctcaaccccgtgagcacctccctaagtgagaggccctcctaaccggcctttcgctgagcccacaaggctctga

SEQ ID NO: 215554 - DNA, 240 bp, Homo sapiens; identical to SEQ ID NO: 203444
  chr13:107187426-107187666
  hypo

SEQ ID NO: 215555 - DNA, 546 bp, Homo sapiens; identical to SEQ ID NO: 203445
  chr13:107187695-107188241
  hypo

SEQ ID NO: 215556 - DNA, 308 bp, Homo sapiens; identical to SEQ ID NO: 203446
  chr13:107188430-107188738
  hypo

SEQ ID NO: 215557 - DNA, 279 bp, Homo sapiens; identical to SEQ ID NO: 203447
  chr13:107188808-107189087
  hypo

SEQ ID NO: 215558 - DNA, 58 bp, Homo sapiens; identical to SEQ ID NO: 203450
  chr13:108519564-108519622
  hypo

SEQ ID NO: 215559 - DNA, 165 bp, Homo sapiens; identical to SEQ ID NO: 203451
  chr13:108519932-108520097
  hypo

SEQ ID NO: 215560 - DNA, 67 bp, Homo sapiens; identical to SEQ ID NO: 203452
  chr13:108520309-108520376
  hypo

SEQ ID NO: 215561 - DNA, 33 bp, Homo sapiens; identical to SEQ ID NO: 203453
  chr13:108520946-108520979
  hypo

SEQ ID NO: 215562 - DNA, 124 bp, Homo sapiens
  chr13:109779692-109779816
  hypo
ggatggcctgggccagtgcctcgttggcccgtccatctggtctccttcgctgcactcggtgttcagcatggatgacagcagcagcctcccgtctccacggaaacagcccccgcccaagccaaag

SEQ ID NO: 215563 - DNA, 108 bp, Homo sapiens
  chr13:109779846-109779954
  hypo
tatgaggctgtgagcgcctgcctctccgcggccagggaagcggccaacgaaggtcagccctggggagggacccagcctcgtgttccgggctcgcgcatgctctgactt

SEQ ID NO: 215564 - DNA, 44 bp, Homo sapiens
  chr13:109934405-109934449
  hypo
cacccaccctgggtcgagagtcagagaagcgcggccggtcccac

SEQ ID NO: 215565 - DNA, 116 bp, Homo sapiens
  chr13:109985085-109985201
  hypo
tccaccggacctgccgggtgtagcagagagcaggagggagtgggctgttctcacgtgcggctgctgggaaccctcgctctgccacttactcaccgcaccagcggggacacactgct

SEQ ID NO: 215566 - DNA, 204 bp, Homo sapiens
  chr13:110408018-110408222
  hypo
gggctcggtgtggacgtaaacatcgcaggtacctgcactggaatccaacaagcagctgtctacttggaccatttcaataaggccgaggaccgcgctccagacacacagcgcaggggctactacaggaggtcctgtgggacccccgccacggaaatccggctttaccttgaactgaggtaggactgtggtcgttttgagtgtaag

SEQ ID NO: 215567 - DNA, 44 bp, Homo sapiens
  chr13:110424383-110424427
  hypo
catctgggtatgggaagtcccgaacaaagaaaggagggcagaga

SEQ ID NO: 215568 - DNA, 193 bp, Homo sapiens
  chr13:110424587-110424780
  hypo
cggagcggtgcaggtaggtgcacgctcttcccaggtcctctgcagaaggcaaaagttcccagaggcacccaaaccttgctggggaaaaggcttctggccgattcatgaagacccccagaccacacgtctgcatcagttttcctgactaaattggtgggtgctcaacaaacccatcactgcaacacagggcgct

SEQ ID NO: 215569 - DNA, 103 bp, Homo sapiens
  chr13:111122538-111122641
  hypo
aggcgtgagccactgtgccaggccgcacacatcttcaatagtgtttgtctaatgaaaccatggaagccattgtggacaactttccacccgagatgaaacatcc

SEQ ID NO: 215570 - DNA, 170 bp, Homo sapiens
  chr13:111135308-111135478
  hypo
aacatgaagagggggcggtgaaaagcaggggacaggtgagttcccagagaagggagtaccaccaggcacaggaggacacagctttccaggtggaaggacataacacggtgccagagagaacgtggtccacacatgaggtgggttcaaaccctcacgcggacaggcatctc

SEQ ID NO: 215571 - DNA, 46 bp, Homo sapiens
  chr13:111144433-111144479
  hypo
gggcctccagggtcgcagggagagctggggcggattggactgcctg

SEQ ID NO: 215572 - DNA, 828 bp, Homo sapiens; identical to SEQ ID NO: 203455
  chr13:111213552-111214380
  hypo

SEQ ID NO: 215573 - DNA, 321 bp, Homo sapiens; identical to SEQ ID NO: 203456
  chr13:111267987-111268308
  hypo

SEQ ID NO: 215574 - DNA, 41 bp, Homo sapiens
  chr13:111278214-111278255
  hypo
gctgctctggagacaagggagaggaggatgtcaggtggtga

SEQ ID NO: 215575 - DNA, 148 bp, Homo sapiens
  chr13:111278426-111278574
  hypo
tgcagggctgggccccacagggtgtggggctgctgtcagggctgtggctctggccctgagtaagcagggcagggccagtgtgggtcataaaggctcctacgcggctgtggggctgggccggaggctgtggtaaggacctgtgggaggg

SEQ ID NO: 215576 - DNA, 174 bp, Homo sapiens
  chr13:111288424-111288598
  hypo
ctggccactcccacggagcctggggaggcttcagcaagagccaagtgagagcagggcagaggccgggcccagcgccagcgaggcatctggggagccgtgcccttgttagcgctgaaaatggaagcccctccattcaggcctggacagatgatgggcagcgaatgtgctcacctg

SEQ ID NO: 215577 - DNA, 141 bp, Homo sapiens
  chr13:111289026-111289167
  hypo
gccggtggaggcctcgctcggtgttgccctgtatggttgagctgtggtttaaggtgaactctggagtgtgggctgcaggtgagggctccgtccctgggagctggtgggaggagctggaggctggcgccgccctgctcagag

SEQ ID NO: 215578 - DNA, 282 bp, Homo sapiens
  chr13:111290653-111290935
  hypo
cccagggtagctgcggcccccggaccacgacgcccacttccccacacctcctgctgtccccctctccgcaggtccagccctctcctggtggccgcgtttggcgcctgctctctcaccaggcagtgcaaccaccaagccttccagaagcacggtcgctccaccaccacctccgacatgatcgccgaggtgggggccgccttcagcaagctctttgaaacctgagcccgcgcagaccagaagtaaacaggcaccttggacgggggagagcgtgtgtgtgatggg

SEQ ID NO: 215579 - DNA, 226 bp, Homo sapiens
  chr13:111294870-111295096
  hypo
gaagccagcagggcgcggttacgtcccccggagactgtggattgtggatgccccctccccaccccgtggttgggctctgggccgacacccacccagccctgggcttccctgattccctgcagctgggcctctttctgggtctggcagggatgggtacagcccgcgagcgctgggctctgggcaaggctccactcaactctgagcatctgtcgtccaagcaaggctg

SEQ ID NO: 215580 - DNA, 199 bp, Homo sapiens
  chr13:111301303-111301502
  hypo
cagcccccagccacgaggggagcaagcacgagccgggaagagagctctgcgctcgcacacgggattcatctccgccgcctctgcccgtttccagcaacacggagccaggcggaaacagtttctccagcccattcgcctccccgactcttcctctcacggcacggctgggctgctttcatcacgcgtaagtgcacaccac

SEQ ID NO: 215581 - DNA, 289 bp, Homo sapiens
  chr13:111305194-111305483
  hypo
tatttctgccagccttgcaccgaaatgggtatttccttcgatggtcagtgtaggcagcaaacgcatctggaagcacagagcctggcatggtggccacagctgccacaggtgaccccacagggatgacatcacacaccacaactcacacgagaggatggcagccatcagaccccacccacgctgagctaaccgctgagtcaagcagagcccccgctcctctacttcagtatcatcaacggcctttgggatcctatgtattttattttacgtatttaaagcaaattgtaag

SEQ ID NO: 215582 - DNA, 587 bp, Homo sapiens
  chr13:111305920-111306507
  hypo
tctcagaatgtaaacgcatgcagaattagcctcaatgtgttttcacgcatctcatagttctctgaaaccccaacaacattaaaggcttatcttccctgctcttgcgggggcgggcgctactgcagcgagctatagtagtagttctaatagaaatctggaatctaatctttctagagcattgagtttatacggactaaaggagaaacatattataacttcttcattacacagtattctgacaatgatgtgaaaactcttgaatactgtgggtgcacacggacattaattttttagcgtgttcctgctctgtgccggctgatatcagcaagtttctatactactccggttccaccgtgcaacctgccacggctccctgagaggcaaaatgtggcgacggcagtgtaagctcgtgctggaactctccaggaggtaagcaatctcccagagcccaggccggaggaccggattggccttcaggtggggatggtaacaagccatgtgagccccagtgagctcacgaggtaacagggtgcacactcacagggagcccgctgggtacacatgccagttgccgagggacttcctat

SEQ ID NO: 215583 - DNA, 289 bp, Homo sapiens
  chr13:111330263-111330552
  hypo
ccccaccagggaaatccagccggccaccccggtggaagcccctccagccgccagtgggcagcacgccccaggctgtgtctcttcgaaggagccttggcttctcgttcactcctgtttcacccacgtgagggacaggagcaccggcaacgctttcacctcagatgcaccagcgcacagggagagctgggcggccgggaacccacagaggctcatttctcaggaatgtactgtggaccaggtggggttttcccatttttccttattctgtcttacgagaaatactctgctt

SEQ ID NO: 215584 - DNA, 37 bp, Homo sapiens
  chr13:111363843-111363880
  hypo
agccaccgcgtccggccaagtgttatagtcttttgtg

SEQ ID NO: 215585 - DNA, 117 bp, Homo sapiens
  chr13:111363972-111364089
  hypo
aaataacagccatttccccaaatatcaaagccaaagctctcctgctgtgtaggtgagatgaaggggcttaaaagtgaagattaaatccacttcaaagtgtaaagagtatccatccat

SEQ ID NO: 215586 - DNA, 355 bp, Homo sapiens
  chr13:111682505-111682860
  hypo
cagggctcactgccctcagccgttgggactgccatcctgggtcgccactctctccagagagtgcctaccatccccacgctccagccacggttacagggcagaactccctgtcttcgtgggcaaagcatccgtggactcaccgctttgtgccatcgaattgcagcagtgtggctggagcagttggcggccctgatgcccagcgcacagagaacgcatccgggatgcgctcaaggatgctgccaacagggttctcagcctgcccgtggagcctgtcttcctaacttggcactcgtgccatcgttggaccaagatgtcattgggcaccgtcccctccggacagatgctttccagccca

SEQ ID NO: 215587 - DNA, 360 bp, Homo sapiens
  chr13:111880970-111881330
  hypo
tcttagcagatcatcccttgaacaactcggaggacgtcacctgacaggagggtgcatgtggttcaggaaagcggcaggcagacactgctgagcacgggcagacacacacagacattgactctgtgaactctgagtgcgtgagtaacagccaacaaaccacgcacagagccccagcacagaaggtcggaagaggacgtgggaattccgagtttttcagggccatgtctgctctggtggttgaagccagcggtgatgattaactctggactttgctgggttggtgacacgtcacaaatgaaagcgtaaccactgaaacagagggaagcggctgggtggcttccagtcaagcggaagaggcaa

SEQ ID NO: 215588 - DNA, 404 bp, Homo sapiens
  chr13:111881450-111881854
  hypo
cagctgtgcagcgttcctgtgtgtcttggtggactctggttttgctcggggctggctgtgcttcctcagcccaaggaatccagagctcttcagttccagaaaggatcttctcaaggactacttccagctcactccctgatttttctcctgaatatcttactagatgtcttattttgccctctgttttaatccgcgtattttaatctactttgcgtatctgtttgtttcactgtgctgtattatctattcctctgcctgtcagttcattaattccctcctcacggtgatactaacctgtttgtggagatttccattttagtgaccatatttatttgtagaagttttgctgcgcttcagatgttttcagtcttcatggcgccttttttattcgtcgtgattggtcc

SEQ ID NO: 215589 - DNA, 253 bp, Homo sapiens
  chr13:111935987-111936240
  hypo
aggagctggaaaggcgctgagcccaggtggctttcactccctgtgtgtgaggccatcgctcagcatctgcacgctgtctgctgcgtctaacgacccctcctctaggttggggatcctgtccaggagccctgcattttgtcatccagaagccatttgagatgaagagaacatttactaatacaaatgaaaaacaatcacttaggcggtttccccctttgatgcataagaaatcatgatgcggtctttgcttgtc

SEQ ID NO: 215590 - DNA, 105 bp, Homo sapiens
  chr13:111940174-111940279
  hypo
caagatgatgggcccgggttttcacaggaccacgggctgccgtgtggggaacagacaggcacggatggccacgtcgacactgagagttgtcggccttttgttttc

SEQ ID NO: 215591 - DNA, 101 bp, Homo sapiens
  chr13:111967886-111967987
  hypo
agtgcacccgcctgcggcctcccccagcccctcctccctggccccgccctgctgagtcctgcagggcccccgtgcttcactagccccgcttttggacaccc

SEQ ID NO: 215592 - DNA, 186 bp, Homo sapiens
  chr13:111980478-111980664
  hypo
gagtggctttgttttcgggggtgacacttgtgtatgtctgtgcttttgcagtgtgtgacgttcctctgtatgacatttgtgactacaacgtctccagggaccgatgccaggagctcgggtgctgcttctacgaaggcgtctgctacaagaaagcggttcccagtgagtagacgccccggccacccc

SEQ ID NO: 215593 - DNA, 56 bp, Homo sapiens
  chr13:112051223-112051279
  hypo
tcttgtctctacagcgtgtggacagcgcgcgccctctacagcgtgtgggtgcgcgt

SEQ ID NO: 215594 - DNA, 651 bp, Homo sapiens
  chr13:112199983-112200634
  hypo
tggggacttcagtccttgagcggcagcaacgcaaagctccaagtgtgaacaaaagcgaactttttcttgaggccgtgatagaggaatgaccgcctcctgggacctgtggttttcttcggcgcaggagaaggcgacagggccctgtcctcggggatgggcggaggtgctggggatgaaggagggaccctgcgccttctgttctgagcaagcttccagggttccttagctccgcaatgcgttggagactccggcttccttgcacacgtcaggggaggactccacggagcctcgctcctcagaccggggtccggggaccggcggcaccggaatcgcctgggcgcctgtgggactgtcaggccccccccggtctattaaaccggacagcaggcgactgcgcgggacccagggcgactccgacagacggggagccggggggagtgtggtccggagtcgattctcagacgtgagggtgccggagagatcccctgcccggcttgtggagcccgggttgctgggcccgagggtcaggtgaggtcagggatggataaaacggaaaatgtcctcatatattgttcccggagagatgtatttcgagaagaaaatggatgaaaccacttgttaaagccgaaatgtaatggggcacgcagtggg

SEQ ID NO: 215595 - DNA, 85 bp, Homo sapiens
  chr13:112200906-112200991
  hypo
gtcctgatgtctcctgagtgagcccccggccatggagcacccagccttggcgtctgctgcgggcgctgggcccctgttcctggct

SEQ ID NO: 215596 - DNA, 145 bp, Homo sapiens
  chr13:112559742-112559887
  hypo
ctgcgtccccgcccccttccgcgtccccgcccccttccgcgtccccgcccccttccgcgtccccgcccccttctgcgtccccgcccccttccgcgtccccgccccctccaccctcagtgactgtcactttctctctcaagctgcc

SEQ ID NO: 215597 - DNA, 50 bp, Homo sapiens
  chr13:112573544-112573594
  hypo
cataaggaccacacggctgaacacctgcccatgccggggactgcgtgaga

SEQ ID NO: 215598 - DNA, 45 bp, Homo sapiens
  chr13:112618854-112618899
  hypo
cccgaagtgcaaagttagttttattcggaagtcttaccgcggacc

SEQ ID NO: 215599 - DNA, 149 bp, Homo sapiens
  chr13:112618980-112619129
  hypo
ccggaccgctctggcacagcgttgcagcaccgcggagaggctctgcctgagcgctctggtccagcgtttccacccacagctcatacacgtgtggcagagcttccgtacgggcagaaccacatccagccggctcagaagctgcagtgatc

SEQ ID NO: 215600 - DNA, 85 bp, Homo sapiens
  chr13:112690651-112690736
  hypo
tgcattttcctcagcagcagggccaggcccaccgtgacggctccgcaccgacgcacccttctcagggcaagatcgacacagagtg

SEQ ID NO: 215601 - DNA, 225 bp, Homo sapiens
  chr13:112691506-112691731
  hypo
cgcgtctccaccagtggccacggcgcgcagcccttcctcaggcccagctccctccgcgtctccaccagtggccacggcgcgcagcccttcctcaggcccagctccctccgcgtctccaccagccctttcttagacgcaactctctcagcgtctccaggtcagctccccttccctgctgctgaggggagacaacggtgcccacccgctgacaccagccccaggagg

SEQ ID NO: 215602 - DNA, 52 bp, Homo sapiens
  chr13:112998006-112998058
  hypo
ccttctgcaggatgaaggaccgaacacagggcctcgtctccaaaggtgctca

SEQ ID NO: 215603 - DNA, 33 bp, Homo sapiens
  chr13:112998135-112998168
  hypo
tgtccagggctcgggggagcttattaataaata

SEQ ID NO: 215604 - DNA, 461 bp, Homo sapiens
  chr13:113098820-113099281
  hypo
gactggggtttggggtcaagcgggggtctgggaccgtgcctcaccacgggatctgtgtacacagcgatgcacccagcgtacgcgggcccttccctctgagccctcggcccctcatctgcaggatgggtgagccctggagaagcgggcagaagcagaggaggcagcgaacgcagagcatgtggcctgtgactgagcctagaaagtccgctcggcaacagaggctgcaatccagaaagccccctcggtgacagaggctacaatctagaaagctcgctcagcgacagaggctaccacctagaaagcctgctcggcgacagacactacaatctagacagcccatttggcgacagtggctacaacccagacagcccgctcagcaacagtgtctatgatctagaaagctccctcggcaacagcagctgtcatctagaaagcccgctcagcgacagaggccacaatct

SEQ ID NO: 215605 - DNA, 124 bp, Homo sapiens
  chr13:113099323-113099447
  hypo
tctcagtgacagtggctatgatcgctcgcaactctggcccctggctctgttggtcaagcctgccacagcccggaagcctctgcagcctccctgttgctgctgaaaaggacgctggttggagaag

SEQ ID NO: 215606 - DNA, 146 bp, Homo sapiens
  chr13:113244576-113244722
  hypo
accgcgcccggtccagccatctttcttaacgtgcatacacgatgtgactcactggagccctgataagattattgatttcttgaggagaacaatgttgtcggaaaccttctccaactgttgctcacgggtatacagtcagggctgtc

SEQ ID NO: 215607 - DNA, 310 bp, Homo sapiens
  chr13:113291492-113291802
  hypo
accccacagcccaacgtgcttctgtcagtcgacggtttttactccagcgagcagcatcacccttaaaaaggtggcagaaacatgggagatgggtgggaggagggcaacagagccaccgtctgctttcatcgcccaagcgcagcggctctgccacctggcagccgaggccatgcaagatttcgcaggaggagcccatggccgcggggaggaggagtgggcgcaggagcccacggaacaggccaggcaggagggaaggaggagtgggagacccaggccattctccttcccactttggcgctggcagacagat

SEQ ID NO: 215608 - DNA, 176 bp, Homo sapiens
  chr13:113346804-113346980
  hypo
tagatctatataagtgtttgcgtagcttgcatttttaattcccctttgctgtattattacgcttatggcatcacattttcttttaatctaagcggtaaatattctttagtgaacttttccagcatatacattattggataacgtctcgggaatacgagttgtgggataatattatt

SEQ ID NO: 215609 - DNA, 480 bp, Homo sapiens
  chr13:113347533-113348013
  hypo
catgcagagatactttgtatttgtaaatggtgccgtgtttgtataccatgaggagtgcttgtgcttatggggtagtgtatgctccctggggtgatgtatgtgctctggggggcgtggggaaaagcgtgtgtgccgtggggtagtgtatgtgctgtggggtagtgtatgctccctagggtgatgtatgtgctgtcgggggcgtgaggtggtgtatgctctctggggtgatgtatgagctgtgggtacggggagaggggacggggtggagagtgtgtgtgccgtggggtggtgtatgtgctgtgggagccatggggtagcgtgtgtgccgtggactggcgtatgtgttgtggagtagtgtatgtgctatggggtagcatatgagccatggggtagtgcatgtgccatgaggtagtttgacctccatgacgtaacactttaaaagcacttctaggccaggcgcggtggctcatgcctgtaatc

SEQ ID NO: 215610 - DNA, 43 bp, Homo sapiens
  chr13:113350355-113350398
  hypo
ttcaagttccgtctcggctgacggctgcgtggccttggcaagt

SEQ ID NO: 215611 - DNA, 1065 bp, Homo sapiens
  chr13:113350643-113351708
  hypo
gtggagagtgggtgaccttgccctgctctcccggggagagcggtggtcactggtgggaacgcccctgccacgcccagcagcctttctgcctctgcgcttgcctcctccggttggagcgagtgacccgttctgccgaagtccagtcccgtgtgtgctgcggccccgtctctctccctctctgagtgacactgtctgccctgctgcttgccgtcccgctgttggcaccgctttagaccccatatttcccagcggtcaccgtgctcatttttggcttccagctaccgtttttcttaggttaccccgcgtagctggcccgtccttccttctcctgtctcttctgtgcctaccgcggggggttcccttaccaaggtctccatcacccccaggcccacctccctcgggcccctctctgcccttgccctccacctcagcgactccgtggggcttttgtgatcccagctgcagttagcgagcgcccctgtgtgctcagagacacgccagtgagccgggaaggacagagacccaagtcccatccctctggggcccccttggaatgggggaggcgaacaggaaaccaccacagtgagtgttggggtgccccgcaggcgacggtgctgagaaaaagagagtggggttgggggcagtgcgtgcgcaggctggcgggtgggcgaggcgggtggaggatgcgtggggcgcagtgcttgcgcgcagtgggtggcggggtggacgaggtgagggcctggccaggtgggtgcctgcgtgtccagcctgaggggcggcccacgcagcagcctctgggagccctggggccttccgtgggctgcttcctgtggcgtcctgcgggctggccgcccctcggtgggctccggtgctggcctctgccttccccagggccacggtgggctcctagtggcctttcttccctctccatcaacatccttgtcccaggaagaggcgtccactgcctgctacacgccacccagccgtgttcatttccgtgttccagtgtcacccgtgtgcctagaacgttcctggcacagaaaagccacgcagaaaacagctgct

SEQ ID NO: 215612 - DNA, 259 bp, Homo sapiens
  chr13:113358329-113358588
  hypo
tgacaaaattggaccgtgctagttggaagttgcacttgaaatgcaggtcagaacaatgggatacgctggtcctgctgtcccaggcgggggagtcacgggagggctcgagtgccacaccacccacacgtcagccaccatgtgggttcccaaggcaagcagtgagttcccaagccagctgtcgtccacctttctgggttagtgtctttttaaataatcaaaggtctttaccatccattaagtactggcccagttgttgtac

SEQ ID NO: 215613 - DNA, 178 bp, Homo sapiens
  chr13:113369394-113369572
  hypo
tgttgtagcctgtatgactccgccgttcctttgcatggatataccacgttttgctcacacattcacctgttgaaggacacttgggttgtttcctgcggcagcttttcctgaccgaaagcttctcaaaaggactagccccctcaggtgccccaaactcgattgcagaagactgtgttgt

SEQ ID NO: 215614 - DNA, 292 bp, Homo sapiens
  chr13:113379234-113379526
  hypo
ctctgctccagccacccctgcggccatgcctgtggtcccctgtgtgggctgggctgtggccttggacctggtccccacgtcattttcttctcccttggggtggattgtctgtgggcccggtgtgggaccaacagctgatggccgacgcctcttgccgtaggttgccggccatgcatacctgggggaagacttgaactccatccctctgtcaaccctgttctgagtcacaagagacactgcaaaccccccttgtgggagctgactcaggctcgggctgggctcaaggcagtgg

SEQ ID NO: 215615 - DNA, 278 bp, Homo sapiens
  chr13:113383553-113383831
  hypo
gaccttatgacaggccacctcgttaacgattggatgttgtttttatcactctttactacgtttgctttcccacccctgctgtttccatgggtttatccgactctgcccactgaggcagcacagtcccctcgccttagcattgcgggcccagagtatctaacgcgtccgagtgcgaacagtgtcagaaggcactgaggcagcgcggttcccacctcggcattgcaggcccagagtatctaacgcgtctgcgtgtgaacagtgtcggaaggcactgaggc

SEQ ID NO: 215616 - DNA, 110 bp, Homo sapiens
  chr13:113396992-113397102
  hypo
ttcacttagatggtatcccccgtgtgtgacggccggccttcgccctgtgcctccccgcagtgtggctggatctcagggggctcggacacgtgctcagactgaaggtcaga

SEQ ID NO: 215617 - DNA, 391 bp, Homo sapiens
  chr13:113398309-113398700
  hypo
atatttcctgctggtatggacgtggtcattttagtcatcatactatgacggctgagctgcgtgtccagctgcggtgagtgggccacttgcctctttcacgtaaggaaggcttcctcttcacgcatttgtcagtggtcaagaaagttaaaacaagaaggcaggagaatgtcgctgtcctcccagcacccggtttgggacggtctgggagggtgtgatggagtgcagtgttctgtatgttgatgtgtgttgacggatttctctgtcctcccggcacccggcttgggacggtctgggagggtgtgatggagtatggtgttctgtatattgatgtgtgttgatggatttttctttcctcccggcacccggcttcggatggtctgggagggtgtga

SEQ ID NO: 215618 - DNA, 253 bp, Homo sapiens
  chr13:113400147-113400400
  hypo
attgagcacctccacattgtcgtgcagcggaactccagaaattctccgtcttgcaaaactcagcctctgggccgttaaactaggtgtccccacctcccctcccccaggccctggtgaccaccgttctgctttctctgtctgtgattttgaccactttagatacgtcatttcagtggactcatcctgtgtcgttttgtggcggaatcacgttctgttgtgtgtatacaccacgtttttcttgtccgttcacctg

SEQ ID NO: 215619 - DNA, 150 bp, Homo sapiens
  chr13:113400733-113400883
  hypo
ccggctccccgcgtcctccccgggtaactggggctctggttccccacgtcctcaccggcacttggcactgtctagtgttttggtagcagccatcctgctccgtgtaggtagtatctcattgtggggttttgttgttgttttttagagaca

SEQ ID NO: 215620 - DNA, 36 bp, Homo sapiens
  chr13:113401394-113401430
  hypo
gagatgatgagtaggagtgttcagaaggtggtaggg

SEQ ID NO: 215621 - DNA, 121 bp, Homo sapiens
  chr13:113401469-113401590
  hypo
gatgaacgctgcacttgtggacatgcagacgtcttgcaaacaagtggggtcaggatgtggtactcaggtgcagcctcagggccagggtggattcgggagcgtaagggaagggactgttgct

SEQ ID NO: 215622 - DNA, 111 bp, Homo sapiens
  chr13:113417108-113417219
  hypo
gctcacggtatgacgggcagccctccaggagtggcgtggaggccggggcactcagtcacgtgtgtgccgggagcacaggccttcctcgccgtgcgcggctcctgagctctg

SEQ ID NO: 215623 - DNA, 600 bp, Homo sapiens
  chr13:113419419-113420019
  hypo
ttcccagccagcaaagtgcgttgacagtggctggcttgccccccctcccccccgccccggctctggaagcttctccccctgggtcttccagtctcatgtctggacacagacaggagaggtgaggaggagcagcaggggtggcccgggcagttcctgtgacctggaggcctggcaagttgttctgacggccaggcccatccttggggaggcctctgaggacgcctggaaccccaggcccgccctgccttgttttctggtcctggcctgggggggtcgtggtctcgctggtgcagcctcctccgggcaggccccgcctctgctcccttcccctcactccatctgattcggccccgtttccttgtccactccacgttcttctgagcgtgtctctgggacatggttaaggttaagaagcggcctctgaacgagggagaatgtactgaaattgcctaagtgaacttcaaacacaggaagaagcgctcagtcgatgttcatggtgagaacgagggttgatcttttgaatgagtcacgggtttgagagagacctaagaaccattcgatctgaaaactagattcactttgaacaaaatatctcaggtg

SEQ ID NO: 215624 - DNA, 153 bp, Homo sapiens
  chr13:113424730-113424883
  hypo
aggaaggagagaaatccagtcgttaccatgagtgtgacgagagtggggagaaccagtggagcttctgatcctgtcccagcagatgccagtggctcggaccaaggaggacagagggatgggcgtgcccacgtgaagcctcaccccagaccccag

SEQ ID NO: 215625 - DNA, 89 bp, Homo sapiens
  chr13:113424935-113425024
  hypo
ggcggtggaaacgtggtccacctgcggagggcctgtttgcgtttattacacccgagcaaggcccgcacgcccaccagaggggccagggt

SEQ ID NO: 215626 - DNA, 539 bp, Homo sapiens
  chr13:113425234-113425773
  hypo
gtacatttgaataccggccattagggagaatcgccctgtaaacattgatccagtgattgaggccggtcggcttgcttctgttctgccccgcggtgtaattcagctaataggttttgtttgtctcagctgaaatgtgaaacttccattaggtgtctaaccctggctaaaagtggttttcagcctatttttaaaaaatctcctttgtccctgcatgcattctaaccccattctaacctgatgcgggcagccacaacccaggccctaacagagttcatggtaaggatggtgaaggcgtgacccacggtggaaagttggttattttgggtaatccagcgattttctgattgaacttcgaatgcggaaacatcttgcccttactggggcaacgaggggaggcaaggcgtgcgccaggcagagacaccttggaatcccacccagcccagatgtgtctcctgggttctgggacgggcgcaggtgactgtatttgcgctggtgggaggagttgcccccttggttaaatccggaggacacagctgcat

SEQ ID NO: 215627 - DNA, 212 bp, Homo sapiens
  chr13:113445467-113445679
  hypo
actgcttagaactcagcctgcgcagcccagaggtacagagaggcaggaagcacccaggtgtccacatacggtgccattgtggacttgtagggcaggattccaggatatgggtgatgggcgtgtggaaccgcggcgccccctgcacagtgtggctcatttgagccggatgggggccgtgaaggcatcacccagcctgccccctgggagctggc

SEQ ID NO: 215628 - DNA, 190 bp, Homo sapiens
  chr13:113446210-113446400
  hypo
aggaagccctcactcaggaacgcacagaccggggtcaacaggctctcaggagcgccgtctgcgtgcaggtggagggtgtggcggggccaggagagcacttggccgcctttcatctcaacctctgaggacagaagggggctctcaaatccgcccatgcattgagatcttcgctcttcacagaggtgggatt

SEQ ID NO: 215629 - DNA, 200 bp, Homo sapiens
  chr13:113461153-113461353
  hypo
tgtcaccgtagagtcgcctattctaaacatttcgtactcacggctcataggcggtgttttgtgactggctctttcactcagcatgatgttttcaaggtttctctgcatctgagcaggcgtcagcgcttcattccgtctgatgaatgagtcacggtcccctgcacatacctggcattttgtgtatcacgcgtcctctgtgg

SEQ ID NO: 215630 - DNA, 439 bp, Homo sapiens
  chr13:113461413-113461852
  hypo
gtgtttcacacccaccagattggctttcagatgtgaaaggctggagagggcatggcgagggaggcaccacgggccgccggcaggagcgtggcggagccaccaagcacagcagttggcaacatctgacacaggcagagatggggacacacagggtccagtgcagatgataaacatgcagctgtgcagtcagtacatggggcctgtgtgtcttcactaggccagagccggccgtgcctaccgggatacgtgaactaggatattcatggtggctgtcattgattagcaaaggactcgggcaacctggtgtccctccgtaaggaaatggacagctccgccgcggtgcatggcagaacacagcacagtaacgaaacgaactgtgctgcctggagaacagaacatgagggagactcacgcttcccaaggacgcgctgcctgtgac

SEQ ID NO: 215631 - DNA, 111 bp, Homo sapiens
  chr13:113472458-113472569
  hypo
cggtgaccgtgtgtgcgcttggtgacagggcggtgaccgtcggtgcgcttggtgacgggcagtgactgttggtgcgcttggtgacggggcggtgaccgttggtgcgcttgg

SEQ ID NO: 215632 - DNA, 214 bp, Homo sapiens
  chr13:113474214-113474428
  hypo
ttcgtgggtcgcatcaacgtttacagtgacctgaatgaccccgtggtgaggtgagtgcctctgcggatgccttggccacggtcacctcccttgttgcgttagaaatgcattctttgacggacaagggtttccacggcggctgctctggtagatttggaaggtggagttccgctttcccacagggccgggctccactctcgtctctggtttgtct

SEQ ID NO: 215633 - DNA, 334 bp, Homo sapiens
  chr13:113477607-113477941
  hypo
tgcccacttgccttcgtgtccgcatcatttctgatcatcgtatctttacaggcccttaggatcggaaaacctgctgcttagaggagctacactgaagaacactgagaaaatctttggtaaatatttaattaattattaaccattgcccctaacattaaggatgcatgaagcaaaagttaaaacccgcagcggaacccgagagcgtttcttggcaccttgaggtgctggaggctttctggccgcgcaagttctgccccactgagatttgatcagtgaataagtgcaatcctgaagcagcagcatcagagaatacggcttacggattaaggcctct

SEQ ID NO: 215634 - DNA, 37 bp, Homo sapiens
  chr13:113482707-113482744
  hypo
gagtaggggggaaagcgcccagcggtgttgagtgggg

SEQ ID NO: 215635 - DNA, 304 bp, Homo sapiens
  chr13:113488276-113488580
  hypo
gtgccgcgaagcacgtctgtctcccgggtcctctgctggcctctcgcatcccaaagccatgctctgtctctgccgtcccagtggctcccacaaggccctgaaggtcgctgacccccaggcgtgcaggaggaggcattgtatagatgggtgcacccacgtgctggctgaaggcctgcgctggaccttcgttccccgtcagtgactcaagggccttggtgtgggggtaacagcctctcagggtccctctccctctggcatcgtgttctccgctcaacaacaacaaagtccacgaatcaatgagcaa

SEQ ID NO: 215636 - DNA, 576 bp, Homo sapiens
  chr13:113497161-113497737
  hypo
caccacttgttgtatagcaccgcccagcagcccgcacacctgagcctcccactccgtgggtccggctttctgtctttggggctgctgcggtagggggccggcctgagtgtctctcacagcagggcctcccctccccgtcagacgcgctaaagccgggcaacacgtggctggggtggacacgctccctcctgtcagacaccttaactccgggtgatgcgtggctgggtggacatgctccctcctgtgagaggtcctaacgccgagcgacgcatggttgggtggacgtgctctctcccgtcagatgtcctaacgccgagtgacgcacggctgagtgcacatgctccctcctgtgagatgccctaaagctacactgtgcgtggctggggtggacgcactccctcctgtcagacgtcctaaagctgggtgacgcatggccgggtgggcgcgttccctcccatcagatgccctaacgttgggtgatgcgtggctgggtggacgcgctccctctgctccccacgtggctgctttgtcccacggtgtctgcacccttctcccgacaccaccctggggtcttct

SEQ ID NO: 215637 - DNA, 95 bp, Homo sapiens; identical to SEQ ID NO: 27306
  chr13:113498378-113498473
  hypo

SEQ ID NO: 215638 - DNA, 178 bp, Homo sapiens
  chr13:113507108-113507286
  hypo
tctcagtggctttttcgtgatgatacttgcttataaattatttccttataatctccagtcagcaagtgcgaaacatctctgagcctcagcttccttttgaatcgaattgtagggccaggcccggtggagcacgcttgtaaacagggccaggcccggtggagcacgcttgtaatcctcg

SEQ ID NO: 215639 - DNA, 75 bp, Homo sapiens
  chr13:113516326-113516401
  hypo
aggcgtaaggcgtcacgtcaggcgtaaggtgtcacagcaggcgtaaggcatcacgtcaggcgtaaggcgtcacgt

SEQ ID NO: 215640 - DNA, 141 bp, Homo sapiens
  chr13:113536448-113536589
  hypo
cacaggccttgccctcgagcatggcaccctggccgcctggacccagcactgtggttgttgagccacaccagtggcctctgggcattcggctcaacgcaggagggacattctgctggcccaccctgcgcgctgtcatgcaga

SEQ ID NO: 215641 - DNA, 180 bp, Homo sapiens
  chr13:113537191-113537371
  hypo
caccagaacctgtctcgggctgacgggggtggcacacaggacacgggtggatcccaacaggcagcaccgcacctctgcccgcctcccgcactgcagctccgcccgccgggctctgcgtccccacgtcccctcgtcccatccccacgtcccctcatcccgtcacctcgtccccacatcccc

SEQ ID NO: 215642 - DNA, 208 bp, Homo sapiens
  chr13:113539438-113539646
  hypo
catgcagaacatgcacgtgtacacataccacagacacgcgtgtgcatgctcctacacaatacatatgcacatatcatgaacagcgtaagttcctacacacggacgtgtgatacacacatgcatgtacaggtaagcacacatgtacaagctcctacaggcttgctctcacacacgtgtatgcacagcagagagacgtatgagcttctac

SEQ ID NO: 215643 - DNA, 165 bp, Homo sapiens
  chr13:113544111-113544276
  hypo
acctgggagcagccgcggcctgcggggtggatccgggcctgtgcggcggtggggtggggttggaggggtgtttgaggccatggctgctccttggatgacaacctggaacacaccaggggagctcgcttgccatcggttctgagtggctcaacctgggtgactgca

SEQ ID NO: 215644 - DNA, 45 bp, Homo sapiens
  chr13:113555445-113555490
  hypo
ggagccaccgataccgtttattttttattttattttttttgagac

SEQ ID NO: 215645 - DNA, 45 bp, Homo sapiens
  chr13:113555730-113555775
  hypo
gtgctgggattacaggcgtgagccacaatacggtttatttaagta

SEQ ID NO: 215646 - DNA, 211 bp, Homo sapiens
  chr13:113565691-113565902
  hypo
gtgtagacccagacactctcctgcctgggagagcggcccagccgctagtcctgtgcgcccaccaggttcttctctcccagcgtggccgccatgttggccgtgatccccggatcctgcctgctgcaggctcctctgggaatggcccgcccaccatgctcctctgaaaccctccctcacttccagagacctgggccccgggcctcacccaagc

SEQ ID NO: 215647 - DNA, 445 bp, Homo sapiens; identical to SEQ ID NO: 203461
  chr13:113597560-113598005
  hypo

SEQ ID NO: 215648 - DNA, 341 bp, Homo sapiens
  chr13:113627845-113628186
  hypo
gctgaccttctgtgatctgacgccacggctcagtgcttcccaagagctcctgagaacgcagcgctcaggcctcccagctgggtgagtctgacgccctccatgcgaagacggcgcgagcacggcttcacctgtggaaccaggggcagacttatgagctcccgggggtttcagttccggcctgctctgaggacactggggggccggccctgtgtttgcttggagcgcccttcagggagacccgtggctccaggggctggcgctgagtgaccacaggcaaggtctcaggagtgagtgatgccaggcagcacctgagaaggggatgcctgcgaggtgtgttccga

SEQ ID NO: 215649 - DNA, 92 bp, Homo sapiens
  chr13:113644356-113644448
  hypo
agtcctcactcacccgccactcacctcctgcttaccccctgttcactcacctgccgctcacttcctgctgtgcagcccgaccagtaccggtc

SEQ ID NO: 215650 - DNA, 196 bp, Homo sapiens
  chr13:113663192-113663388
  hypo
ggattcttacgcccgcctgcatcagagaacccaggtcttgtgggcgaggcagcgtggagagggagcgcagctctggagacggcccccagggcttgcgggcgggcgggcgaggcagcgtggagagcggagagcgaagctctggagacgacccccagaggagattggccaagtgcggatgtgcgagtcctccctgccc

SEQ ID NO: 215651 - DNA, 62 bp, Homo sapiens
  chr13:113718439-113718501
  hypo
gctgcatcccatccgcacatccatccgcagtgtccaggtgcccccacccacacagccgcccg

SEQ ID NO: 215652 - DNA, 62 bp, Homo sapiens
  chr13:113719023-113719085
  hypo
gcacaggcgactctaggtgacgggcacacgtgtagagtgtgcctggtatgtttctgaagagg

SEQ ID NO: 215653 - DNA, 520 bp, Homo sapiens
  chr13:113719189-113719709
  hypo
gggcagcaggaggtgggtgcagtgcacaaggcatgcaattgtgttttctctgtccccaaggccatcgaaagtttcgccctcatggtgaagcagacggctcagatgctgcagtccttcgggaccgagctggctgaaacagagctgcccaatgacgtccagtcgacaagctcagtgctgtgtgcgcacacagagaagaaggacaaggcgaaggtacatggggggtgctccggctggaagctgtggggggctccggtcagtcagaagctgcgcggggctccggtcggaagctgcggggggtctttcgtcccagcgggagtttgtgtcagcagcacgtaagaccaagaagtcagcaggcttgagatgccttttgatggcaattagctcggcaacctctccgacgagaacggaataaaaggagtgtaaatgaaccctgtagattgctggctgcgcctgccattctggcgttgggtcaaccattggccctgggtggccgtggcttcaggagtgggaccaggggtgg

SEQ ID NO: 215654 - DNA, 110 bp, Homo sapiens
  chr13:113731262-113731372
  hypo
aaagcgggggttgggcgtgccccggcacgttctgcgcctgactgtgtatttttagtgatgacaccaacatgtgcaaggcaccttactgagcatgcggtttcaggagcacg

SEQ ID NO: 215655 - DNA, 263 bp, Homo sapiens
  chr13:113796035-113796298
  hypo
gaggccctcgaaggcggggcctaggcgtcacagctgcaccttgcacagcaaccccactcccactcatagctggcccgacccgcagcgttggcctcacccgggggcatattcgaagggcagagttccaggcccgccttttcaagagcctggtgacccagctcaccttccggcttcaggtgcggctcagcccccagaccgtgttctgcccccggctaccatgactgtcccctccagacacaggttactcccgagtgttctgtcac

SEQ ID NO: 215656 - DNA, 197 bp, Homo sapiens
  chr13:113797733-113797930
  hypo
gaaagaattttgcagggagtcgcacacgcccagcacttgggttctcctgttggcatcctccggccagatgcattcatcccatttcgcccggcccgtttgtctctgtccatccgtcaagctttcttgacttcttggtgcattttcaggcaaaccgcagacgccaacactcccctcgctgcctgggttgctgcctggcg

SEQ ID NO: 215657 - DNA, 133 bp, Homo sapiens
  chr13:113797960-113798093
  hypo
aggccaacgctcggacagctgcgctcacctgcagatccgacccctgccgacgacgtggggcctcgccctgcaagcccgctgcccctccgggtgcccctgcgctctgcctcccggctctctgactcttctccct

SEQ ID NO: 215658 - DNA, 108 bp, Homo sapiens
  chr13:113825854-113825962
  hypo
atgtccccttgaaaatcagactgtaaagaactgacgattgttcatgatttcagattttaacagaacgagccaagacccgctgatgatcaagataacgcacgtccatgt

SEQ ID NO: 215659 - DNA, 187 bp, Homo sapiens
  chr13:113825992-113826179
  hypo
gaatgacctgtcactgctggagctggagtggcccatccagtgcccaggtgcggggctccccgtgtgcacccctgagaaagacttcgctgagcacctcctcatcccacgcaccaggggcctcctcagcggctgggcacgcaatggcactgacctgggcaactcgctgaccacgcggcctgtcacactt

SEQ ID NO: 215660 - DNA, 211 bp, Homo sapiens
  chr13:113884127-113884338
  hypo
gagcggctctttccagcgctgcagttgaaactcggagaaagactgcctgctgcccgtggggtcgcagccctgaggctgtgcgtcccctgtggaatggcttgctcagcctcccggcctcctgagcacatagcactcatcgtccgtcatctttcggggactgtatacaccaggggttctggggcctttcctcagcagcgttcgcggccacgga

SEQ ID NO: 215661 - DNA, 115 bp, Homo sapiens
  chr13:113887569-113887684
  hypo
ctgctgatcgagcgcgagaggagcggcgaggccgtggaccggagcctgttgcggagcctcctgggcatgctgtctgacctgcaggtgagtgctgcctgtgcggaagatacctggg

SEQ ID NO: 215662 - DNA, 115 bp, Homo sapiens
  chr13:113887885-113888000
  hypo
actacataaaatgcacgtttttcatggaaaatataaacagagacaaagccagatgacacgctgggggaaaatattagcaacacacacaaaagacaaagggcgaagttctttagag

SEQ ID NO: 215663 - DNA, 87 bp, Homo sapiens; identical to SEQ ID NO: 203465
  chr13:113951225-113951312
  hypo

SEQ ID NO: 215664 - DNA, 31 bp, Homo sapiens
  chr13:113953158-113953189
  hypo
tttaaaaactcacttcaggccgggagcagtg

SEQ ID NO: 215665 - DNA, 46 bp, Homo sapiens
  chr13:113985423-113985469
  hypo
cccgggtgtgtgcacgaaagcctaggtgtgtgcatgggaacccggg

SEQ ID NO: 215666 - DNA, 323 bp, Homo sapiens
  chr13:114004199-114004522
  hypo
accacccatcgcgacgatgtccttccctgtcctcctagaaacgtttaagccagccacaacccctaggagcccgtgaagcacatggcctaaaatgccaggaacgcactctccaatcccggtggcagccgtgggctccaggctctcagccacggggactcacaggcagtcacgggctgtgcgcacacctggaaaccctcgtggaggccagccctgcccagatgcctgccctgccctcggcgagctcagacagactggaacagcaccaccagcgacaggcccaggcaggacacacaggctgggagactgcacggctcctggttgcc

SEQ ID NO: 215667 - DNA, 211 bp, Homo sapiens
  chr13:114005121-114005332
  hypo
cctcacagccacctcatggcgtcagagggtcccgaggctcacctggcagtagcccactccctggttatggtgcccatatgccagcagcacattgtacagggtcctctgtaagcaggggtccgtggtcttccggaacttcacgttgtcggggaaggtccggttcaggtctgtgggaaattcagaaggaatcacccacgggtttctgttccac

SEQ ID NO: 215668 - DNA, 268 bp, Homo sapiens
  chr13:114009527-114009795
  hypo
aagcagcaggcgcaccgctcacccctggacgctgaggctagacactgggtggaaaccggttccttccggcccccgggccctgcaccagagctcgacccccaccgcctcacctgtcctgatggcgtcctccagcctggggtttctctctccctggagaagctggtggtagtagccgggattctggtccatctgcgcctgggccccactcagcaccatccagacgcgggcacggtgctccagcgggacccctttccggacatagcgcttc

SEQ ID NO: 215669 - DNA, 228 bp, Homo sapiens; identical to SEQ ID NO: 203467
  chr13:114017991-114018219
  hypo

SEQ ID NO: 215670 - DNA, 299 bp, Homo sapiens
  chr13:114055641-114055940
  hypo
gggcagggactctggaggtccgtgtgcttcgtgagagaggggaccctgtcctcctagcaggggtccagcggcaccacagcaagacttctgtggccaagtacacgccatgctcagctctgcccccacccgcacccccggaccatcctgtgtgcagctgggctgccccgggacccacacgcgcgaggggcacccggtgctcaggagcctccacacacagcagctcgcacttagaacccacacgccaagcagaaacccctcgaagcgggctgggagcacggacccctgatttatagaggagg

SEQ ID NO: 215671 - DNA, 58 bp, Homo sapiens
  chr13:114056151-114056209
  hypo
gccactggcgtctgccgggatggaccttccctggaaggagagacctcagccccgcgtg

SEQ ID NO: 215672 - DNA, 175 bp, Homo sapiens
  chr13:114085572-114085747
  hypo
ggcccacggtgaacggccactcaacacggccgctacatggagcatggttgcccgtgacacgccatgcggagacaggccgcagagacaggctgcagagacgctttccagcggctgttgggccactcttgaaggcactcatcagggcctcccttggcccggcgggagggctgcagca

SEQ ID NO: 215673 - DNA, 69 bp, Homo sapiens
  chr13:114108040-114108109
  hypo
ggggctcctctcgctgtccctggaaggagtgcgcacacttccccgtgtgtggcgtggggtgatgcggga

SEQ ID NO: 215674 - DNA, 154 bp, Homo sapiens
  chr13:114115142-114115296
  hypo
gccacgttctgaggaggccccggagtggccccagctcagccctgcagtctccggcaaggtgacagagccaagtggcaacctgtctggacctgcggatctttgtgtgggatgttcatctgctgaaaacctccacgtgtgagacctgaggtggatg

SEQ ID NO: 215675 - DNA, 154 bp, Homo sapiens
  chr13:114123291-114123445
  hypo
ctgtggctgagggcagaggccaccaacagggaagtgcctgggagcagaacaggctgggcgggaaagggacaatggagatggaaaagagagaaaagctgaggaggggggaggagcagtgccagacaatctcagacagcaaagccgacatttctgt

SEQ ID NO: 215676 - DNA, 60 bp, Homo sapiens
  chr13:114185957-114186017
  hypo
gatcaagagcagcacgcgtgtggacctgcaggtgacacggcgccccgtacatgcagatca

SEQ ID NO: 215677 - DNA, 52 bp, Homo sapiens
  chr13:114188351-114188403
  hypo
tttcccagcattgtcgtggaagttctccgaatcctggttttgattggtcaga

SEQ ID NO: 215678 - DNA, 85 bp, Homo sapiens
  chr13:114188957-114189042
  hypo
agctggggcgtggtcgcgctcatgtatagaccagctgctggagagactgagctgggaggatggcttgagcccaggaggccaaggc

SEQ ID NO: 215679 - DNA, 66 bp, Homo sapiens
  chr13:114189671-114189737
  hypo
agtctcagtagtcctgacagcgcacctgggcaccgtcaccattgtcccaacagtgcacctgtgcac

SEQ ID NO: 215680 - DNA, 303 bp, Homo sapiens
  chr13:114189809-114190112
  hypo
gcctgtacacaggtgtttatagcagctttattcgtattagccataaacagtccaaaggtacttcagtgggtaaataaatgttcaacaaactgagctatgtccataccacggaacgccacccagcagtaaaaccaccggcacacacctccgagaactgcgcagagtgggcaggcagcccccaaaggctgcgtactgtgtggttctttttatgtcacatttatgaggcgagaagattctgaagttgaggaaaggctcgtggttcccaggaattgaggatgggcagtctggggaggggctggggat

SEQ ID NO: 215681 - DNA, 281 bp, Homo sapiens
  chr13:114190142-114190423
  hypo
ggcacctgagtgggggtctggggaggggatggggatggcattcgctgtgtttgctgtgtctatatcggcacctgagtcggggtctggggagggactggggatggatggcactcgctgtctttgctgtgtccgtatcagcacctgagtgggatcttgtgctgtaatttggcaagatgttaccattggggaaactaaagggtaatgaggactttgtattactcttaaaactgcaggttaatatataattatctcaaaataaaaagtttccggctgggcgcggt

SEQ ID NO: 215682 - DNA, 139 bp, Homo sapiens
  chr13:114192725-114192864
  hypo
gtcttggctctattcgtgctctttccaaattccactcgagtttttagattcagctggtcagtttcacacacatgagtctcttggcgctcctgtgcgtctgttggccaggggagggagcatccgccgctccgccgtgctg

SEQ ID NO: 215683 - DNA, 149 bp, Homo sapiens
  chr13:114202335-114202484
  hypo
ggttggggcgggggcgggggggcttgggcaaggcttattattttctgctaatgaaccgaaaggcttaattttgccttattgttcagtgtggattatttaagaggttttgcgtgtatttggtgccttcgggtgtttggagtgcttctgtg

SEQ ID NO: 215684 - DNA, 300 bp, Homo sapiens
  chr13:114202514-114202814
  hypo
ccatcgcagcgtgcctgtggctcgtctgggttctctgtttcgtgtgtgtttaactctgtgtgggtccagtcttcagcagtgacgtaatgaaccgctcttgcagtttctcctggcggcgctggtcctgtctctcattctgccgaggagcagccagtacatcaagtggatcgtctctgcggggcttgcccaggtcagcgagttttcctttgtcctggggagccgggcgcgaagagcgggcgtcatctctcgggaggtgagtggcttccccccgcggagcgcttctcgggcggcacgggctgc

SEQ ID NO: 215685 - DNA, 104 bp, Homo sapiens
  chr13:114202853-114202957
  hypo
agcacagcggggcctgggggcagggtcctcctccaggggggcacgcagaggcctggctgctctctgctcatccagcatgtggcgttttcagaggaaagttgcag

SEQ ID NO: 215686 - DNA, 76 bp, Homo sapiens
  chr13:114203747-114203823
  hypo
ccttatactgagtgtgaccacgctcagcctcttgctcgccccggtgctgtggagagctgcaatcacgaggtgtgtg

SEQ ID NO: 215687 - DNA, 208 bp, Homo sapiens
  chr13:114205041-114205249
  hypo
tcctcctgacctaaacacctccctgcaggcctcacctcccaacgcttgcagtgcacatcgaggggacagaagcatttgaaccgtagcaggtaccgtattaggctttttcaactgcatgaatttttttaattgacagataaaagtcaacatatttattgtgtacaacatagcaagtactttaagccagggttttcgtatacctgtcagc

SEQ ID NO: 215688 - DNA, 50 bp, Homo sapiens
  chr13:114237564-114237614
  hypo
ctgggcggaggcccgtcgtgggcttggaggccaccgggtccagcagaggc

SEQ ID NO: 215689 - DNA, 42 bp, Homo sapiens
  chr13:114244325-114244367
  hypo
tttgctgtaagacttcgggatgtagcccgtgtggggctgttt

SEQ ID NO: 215690 - DNA, 145 bp, Homo sapiens
  chr13:114246191-114246336
  hypo
atgattctggttgttcgggtactggccatgcactgctctctgtatctttgtgtgtagcccaagcctggaaaagcatccgccctttgtacctttttcccgactggctgagattcccgcagcatcccgactccgcttcagggctcct

SEQ ID NO: 215691 - DNA, 850 bp, Homo sapiens
  chr13:114251689-114252539
  hypo
ccaggcctggaccccgtcgcgctgtctggcagcgtgtgctgcatttccctctggaggattttcccaccggaacctgtgtgatgtgttgtggaggaagctgtgtgaggcaggggtcccggggcctgaacggctggaccttgctagccctgcgacctcaggtggggactcctggcctctgtgtgctcgcctgtcccacgtgggcggccagctgccctccctacagggcagtgagggagaaaggagggcgtcagctgcttgccacgtcctggctgaacttggatggattcaaaagagtgaacataaggctttgacgaaattaggagcacctcacaggcctgggcgctgtgtaagacctcctcccagccacgaggggctgatctgatcagagctggagggacggccattgccgtgtgtccaatgtgagggctctgagctcaggagccagcatccagacacgctggggactctgcggcctctgtctttgccccagtgttgcacagaggggccctggctttccctgggcactgtttagaatgattgagggggtggcaggtggccagaaacgggagaggtggagtctccgaggcagcaggcctcccctgcaggctgctgcttccaggagggctgcaggcacgaggtgttcaaatgcagcagtgacttcataagaaaagggagtggagccgccgacatttcaggtgagttgtcatcaagagtgcagaatccaactgtgttgggagccacttgctggtgcctggccaagttcccgtctggtccctctactccccaccaccccagccctggaaaaccgtgcctgccaggttcataccacacaacccggtgcagcccaccc

SEQ ID NO: 215692 - DNA, 159 bp, Homo sapiens
  chr13:114271765-114271924
  hypo
ctcacctgcagaaccgttcacctgcagagcccttcacctgcagaaccgttcacctgcagagcccttcacctgcagaaccattcacctgcagagccgctcacctgcagaacccttcacctgcagagccgctcacctgcagagcccttcacctgcagaacc

SEQ ID NO: 215693 - DNA, 944 bp, Homo sapiens
  chr13:114283925-114284869
  hypo
actgggctaacatgcgtgatctgagcacgtgtaaggtaggctggctaagctgtgatgtgtggtaggagaggtggatgacgtgcatttcgacttagggtattttcagctcatgcgggtttatcgggatgttccttgtaagttcctcgttgtaagtcagttcctcgttgtaagtccactctttgtgagtaggtttgctcctgcctggaggacagcggcacggtgacggcatctgttttggggccaagatccagtgccttgcgtggtcctgggattcctggggaagggagtggacccatgaggtgggttagaatcgtgtgtgggattctccagccccctgtacctgtgcgtgtggtatgcgcggagccagccagcactgcctggcgtggagctggcgggttctcagtctgacatcaactcccggagaatggcatctgctgaactcaacgtaggaagccgtgcggggccagcgcgctctcaggcagcctgagtggcagggtccttttgtcagctgtttggatctcccacgtggcccagtgccccagcagcacacacacacacacacacacacacacgcgtattgaacaaaacaagtttcacaggacatttatccacgcccaggagatttatcttttgtatggcttcattttgcagaaaattcacttgtttgatttcatggcctggtgatccacagaaggccgcactctgatgagtctctgatcatcggagagatgagtgtcaatgaaaagatcagtccttgaaatgtttttcttctccggagctgacaggtgatctggcctagggataattggaaagtgtccccgtcagctgctcccagggccaccgcaggtgatgcatttatccccgtaagaaggggagctgggggggcccagcttagagtagctcagggcatcggccacatgaagcccccccgccagcatacaggt

SEQ ID NO: 215694 - DNA, 725 bp, Homo sapiens; identical to SEQ ID NO: 203469
  chr13:114285627-114286352
  hypo

SEQ ID NO: 215695 - DNA, 360 bp, Homo sapiens
  chr13:114294001-114294361
  hypo
ccccgctgccagattcgacccacgctctggactccatcctgtcctgccccgggctctcttttttcctgttgctggttatgagtgaaagtcccggagggagggatctaatggttttacagtttgttccctctggggcactgctcctgatggaatgatgagtgagggagaggcagcgtgtggctctgctcagcctcctgtttctgtcgttatgggttccaggagacagggccagaagagaaccagacagagatggagtaagtgccagagcgttggcgtgctgtagtgcagacactcagcctccccgttctgtttgtgtgactgacaaaacccacacctgtggggcacagcctgtcatttgac

SEQ ID NO: 215696 - DNA, 150 bp, Homo sapiens
  chr13:114295752-114295902
  hypo
ttttattaataaaacgcgcatgggcattttaaacaagctgtgtttctctaattcaggattattatctagaaatttgtctgtcttgttggttttactttatacttgagtgagaaagtaggttgttaggcccagacgcggtgggcccgggtg

SEQ ID NO: 215697 - DNA, 253 bp, Homo sapiens
  chr13:114302352-114302605
  hypo
gccgcagctgtgtttccacctcatctccagcttgagtggcagccagcggcgccacctgcacacgagccccctccattcgagaagcacagactatgagtgtggccacgcgtcccatgacgtgaactcacgtctgcgccgagacctttgccggcggttttttactgacggagtaagcactggagatgcttggtacagcgtcttccatcggtaaattgatttagttaaccttacaacatatctgcaaggtttttaa

SEQ ID NO: 215698 - DNA, 161 bp, Homo sapiens
  chr13:114302635-114302796
  hypo
tttctgtgtgtctgttgggggctgacggacttcgacgcgccagtcgcttgtgcttggggccctttgggtactaacagccacactgctgagcatgtgaaatcaggacccaggctgcacaccgccgtcggggtgagacgcccgtggccttgcatgatgaaact

SEQ ID NO: 215699 - DNA, 209 bp, Homo sapiens
  chr13:114303498-114303707
  hypo
gaagaactgatactcgcgagcaggtccttcagatgtgggcgcttctctggagttcgcacactgacaacaccgttgctccaaaccactttggggatgatttggcagggaactgacgggcaaggtaagcccaaccaggagggtgtccttgagcgaccccgcaggcgtgcccaggacccctgcgcaaaccgtttcacttctcaatcttgagt

SEQ ID NO: 215700 - DNA, 43 bp, Homo sapiens
  chr13:114305093-114305136
  hypo
ctgggaggcggcttgcttgtctgtactcgagggtagccactgc

SEQ ID NO: 215701 - DNA, 37 bp, Homo sapiens
  chr13:114497776-114497813
  hypo
caagcatgcacatgtgtgtgcgtgtgatgagcacaca

SEQ ID NO: 215702 - DNA, 81 bp, Homo sapiens
  chr13:114502706-114502787
  hypo
gataatacatttacagtgtccgagaaacttctggatttccctgagccaccgacagcggcagtgtgacctcatttctctttc

SEQ ID NO: 215703 - DNA, 230 bp, Homo sapiens
  chr13:114537013-114537243
  hypo
gctgtgataggccccggtgtgacaggtcggtgtgacaggcaccagtgtgacaggtaggtcatgctgtgataggccccggtgtgacaggtcggtgtgacaggcaccagtgtgacaggccccggtgtgacaggtaggtcatgctgtgacaggcaccggtgtgacaggccccggtgtgacaggtcggtgtgacaggcaccggtgtgacaggtcggtcacgttggctccctggc

SEQ ID NO: 215704 - DNA, 301 bp, Homo sapiens; identical to SEQ ID NO: 203470
  chr13:114565970-114566271
  hypo

SEQ ID NO: 215705 - DNA, 113 bp, Homo sapiens; identical to SEQ ID NO: 124172
  chr13:114566409-114566522
  hypo

SEQ ID NO: 215706 - DNA, 189 bp, Homo sapiens
  chr13:114617343-114617532
  hypo
ggagagattcacacatgagccgacggtggaggaggcattgatcaggagtgattcacacgtgagccaacagtggaggaggcgttgatcaggagagattcacgcctgagctgacggtggaggaagcgttcatcaggagagattcgcacgtgagctgacagtggaggaggcgttgatcaggagagattcaca

SEQ ID NO: 215707 - DNA, 146 bp, Homo sapiens
  chr13:114748178-114748324
  hypo
gaatcaaacgaacctcgaaagtggaacagggaggccgcctcccatggctgcctggatggcaggcacagtgggagagtaatgctctgaacctcccaatgtgatgaagccgaaagccgaggcggggccagcaggcctcccgggcacag

SEQ ID NO: 215708 - DNA, 292 bp, Homo sapiens
  chr13:114751068-114751360
  hypo
acgggagtggcactcactggcttccatatttcgtcttcttgaacttgtccctcttatactgggcgtgctcctgctccaaagccccaaccccagcgatgacttgctttagcgtcttgtaggtctcctgggggtcgtcaatgacgaacgtcgaatactcctcctgctccgggccgtcatacacagatttgctcccacaggcctctgtggagggcggaggggtcagcgcagggcaggagcccaggccaccggccccgtctccacacagctgcgtcgctgcaggccccacccacag

SEQ ID NO: 215709 - DNA, 168 bp, Homo sapiens
  chr13:114764876-114765044
  hypo
tgatgcgagattccgacacaaactcaccagcacctggtgaacaacccgagtaacacgaagactctgagaagcctggagtgcagtgggtggggaagggtgagcccagggccaggtacgggaagagagcagagaaaacctggccaggcctcaacccgaaagagaggcttg

SEQ ID NO: 215710 - DNA, 172 bp, Homo sapiens
  chr13:114771065-114771237
  hypo
aaggccagccccaagtgcgggtgtggacaacacggccagtggtacagaaatcacaaggctgctggccagcaagggaggaggctgcccccgactagggaatcttctggaatgtgctgggtgctctggggactgggggcccccatccctttctcccctccggccctgccggatg

SEQ ID NO: 215711 - DNA, 42 bp, Homo sapiens
  chr13:114776260-114776302
  hypo
ggggaggagggggccgcgaggggagtagggggctgcgtgacg

SEQ ID NO: 215712 - DNA, 52 bp, Homo sapiens; identical to SEQ ID NO: 203472
  chr13:114776448-114776500
  hypo

SEQ ID NO: 215713 - DNA, 228 bp, Homo sapiens; identical to SEQ ID NO: 203473
  chr13:114776782-114777010
  hypo

SEQ ID NO: 215714 - DNA, 91 bp, Homo sapiens
  chr13:114778731-114778822
  hypo
agagagaagcagggtgaccgttttcctcgggcacaatggcctcgtggggacaccatgccccggccccctgagggtccgcagggaagtccag

SEQ ID NO: 215715 - DNA, 144 bp, Homo sapiens
  chr13:114791748-114791892
  hypo
gggagctgccacctggaactcggtccatgctgcatgcctcctgcacctccaacagggcccaccctccccctgggagcctggcagctccctgccttccctcgctctggcaaaaccatcttctccgcctgtctataagtgaggctt

SEQ ID NO: 215716 - DNA, 153 bp, Homo sapiens
  chr13:114799638-114799791
  hypo
ccgtggctatccacgggctaaaggagtggcctgaccaccaaagacaggagaaagtgcctgacccaagaataaccaagaatccccactgcttcatccccgttctcaaatgccgggcgcaaactctctcaggacagaagcgttcagatttgcaag

SEQ ID NO: 215717 - DNA, 43 bp, Homo sapiens
  chr13:114807147-114807190
  hypo
cctagggtgctttccgtgtgtgtggacacgcacgtgtgtgcat

SEQ ID NO: 215718 - DNA, 106 bp, Homo sapiens
  chr13:114807847-114807953
  hypo
agtcgcacacacatgtgaagtctgagcccatcacagagcacacacgagagcaggagtgaggaaggaaatgttggcagactcctcacgtcttcgttctgcacccaga

SEQ ID NO: 215719 - DNA, 187 bp, Homo sapiens
  chr13:114847025-114847212
  hypo
atcctgagaaacacgactccaaaccctgtcagctggttctaactgtgctcactcttataaacaggtaataaaatatgggaaagaaggcgattgcagacaggggacctctcctccacagagacgtgtccaccaggagactgaggcaaatcctatgggttcaaaaccgaagtttcactggcggctgaaa

SEQ ID NO: 215720 - DNA, 43 bp, Homo sapiens
  chr13:114855701-114855744
  hypo
ggccgtgccttcacacctgcctgcaaagcgcaagcgttaccat

SEQ ID NO: 215721 - DNA, 381 bp, Homo sapiens
  chr13:114867637-114868018
  hypo
agtgccagaaaacagagagacgggggctgtgaagcacaggatccacagcgggcgggtggtaggcgggcagcaggtgggcggtaggcgggcagtgggcaggcagcgggctgagaagcagagcagagccccagccaggagcccagagggcggcagagcagcgggcaccgaaccagactgtcggacctgtgctgggggagagcgagagtgaaggaggaagagagacggagacagagagacggtgagagggagagggacagagagggagtgagagcgcttcccacaagaagaaccaagctcaggtcccaccctcccccagagcctggtgcagctgcgtgggacgggcaggaggtgcgaggggccctgtctctgacgttttgtgcc

SEQ ID NO: 215722 - DNA, 84 bp, Homo sapiens
  chr13:114869700-114869784
  hypo
cacccacccctgatgcgtccacactgccacggccacggacacccacccctgatgcgtccacgctgtccccggccacggacaccc

SEQ ID NO: 215723 - DNA, 70 bp, Homo sapiens
  chr13:114881847-114881917
  hypo
ttcataaacatgccgcattctgaggaatccgaaagactccagcgtaggacagaccgctgttccaagccac

SEQ ID NO: 215724 - DNA, 82 bp, Homo sapiens
  chr13:114917488-114917570
  hypo
ctgaagaagaggcataaaaccgccttgaggaacggcatcgtctgtgctgaagcaggcagcgcccagctgacgactgtcaatg

SEQ ID NO: 215725 - DNA, 117 bp, Homo sapiens
  chr13:114917600-114917717
  hypo
ccatccagggtcctgtccagtgctgtgctaagcacttcacgtggtgacagctagctgcacaccaggcacggtcaggtgcttagcgtttattaagtcgttcaattcttctgtaacccc

SEQ ID NO: 215726 - DNA, 247 bp, Homo sapiens
  chr13:115052295-115052542
  hypo
gttgatggagagcacgtgatttttttagttaagatcattttaagttatgatgcttccgaatgagcagtgcagaagacacatgaatggtctgttcctgagcgtcagggaaggcatgttgtgtcacatagttgaagtcagtggtcacagacggatgcctcaagagcccataggaatgagatgttttgcttgcggtgaggtcatcttgctgcttcaacacaaatgccaggctccccgagccaggccaact

SEQ ID NO: 215727 - DNA, 360 bp, Homo sapiens; identical to SEQ ID NO: 203483
  chr14:21152535-21152895
  hypo

SEQ ID NO: 215728 - DNA, 240 bp, Homo sapiens
  chr14:21304264-21304504
  hypo
atgcggatttttccctgttaaccagggtcctggggaaactcaccagtaggcgagatcagtgaccggtgtgcacgcacagagagctgactggaggctgaggagcttcctttgtccggctgctgtggcctgctctccggggtggaggggtaggtccacgggggatgcagacctgagcctctcccgggttttggcaccaaaatgtaaggttcttgtatccgtttgaaccccgagagggagcca

SEQ ID NO: 215729 - DNA, 555 bp, Homo sapiens
  chr14:21560014-21560569
  hypo
cctacataccctgcgtggcggtcgatcttgcctgggccccagcagcagaggcagagtgccccggtccctcacccgggcgcgggtgcagggaagccagagagcccagcgacctgccccgggcccaggtttcctcctcggcctccaccacctcctcttcttcctcaggctcctccgcacggtgccggcgagcccgggccgggagagcagaggacagcgggcggaagcctccgaagctgcggccgggaccgggctcagcaccctcgccgttgggccggccctcgccagctcgcaggctcaggtagcccaagaggctcgggggctcacggcgctcggccggggtgggagccggggccaagaggagcgctgggcccaacggctcataggccagcaggccgaggtcaggaggctggggggcgcgggcaggcccggaggcaggccccggggcacgcagtgggcccagcttgctggcgtgcaccttcatgtggttcttaaggaaccagggctccttgaagcagcggccgcacaccggacacgcatgatcgaaggaggccttgt

SEQ ID NO: 215730 - DNA, 41 bp, Homo sapiens
  chr14:21688656-21688697
  hypo
ggattacaggcgtcagccaccactctcggcctctatttctt

SEQ ID NO: 215731 - DNA, 120 bp, Homo sapiens
  chr14:21689077-21689197
  hypo
tctactaaaatacacaaaaaaagtcaggtatggtggcgcgccggtattcccaggaactcacaagaggctaaggcaggaggatcccttgaaaccgggaggcaaaaggtgcagtgagctgag

SEQ ID NO: 215732 - DNA, 120 bp, Homo sapiens
  chr14:23470948-23471068
  hypo
caggtgtgagccactgcgcccagctccttcttctttaaatagtctttccttggtcgtccttccttggtcatctttccaaaacagcactgtactgcaggttaaaaaaaaaaaaaaaaaaaa

SEQ ID NO: 215733 - DNA, 104 bp, Homo sapiens
  chr14:23518259-23518363
  hypo
tgatggcaagcagggcgccggtgctgagcccagcagctgagaggtgagcctcaggccagcaggatgccacagagccgtcaggctggcagcggcacacactaaca

SEQ ID NO: 215734 - DNA, 45 bp, Homo sapiens
  chr14:23719831-23719876
  hypo
aagctactgtaaacccggaaaatctgagacaagtctcagttaatt

SEQ ID NO: 215735 - DNA, 154 bp, Homo sapiens
  chr14:23757712-23757866
  hypo
ccactgcgccgggcccacaacttttctttagtaaacgtgcctaaaacttggaaacaatcttttctgaagtgactcttctgttctttggtctttgaaaaagtctcttcttgcctacttaggttaatgtaataccgtatatatacttgcctactta

SEQ ID NO: 215736 - DNA, 188 bp, Homo sapiens; identical to SEQ ID NO: 203499
  chr14:23776071-23776259
  hypo

SEQ ID NO: 215737 - DNA, 41 bp, Homo sapiens
  chr14:23777239-23777280
  hypo
agggggccccaactggggccgccttgtagccttctttgtct

SEQ ID NO: 215738 - DNA, 94 bp, Homo sapiens
  chr14:23793466-23793560
  hypo
tttaacagcaggccccggggtcgcgtctacaggtcaggatagatgggctgctcctctttcccccgcctcccgtgagccccgtatgcttcctcct

SEQ ID NO: 215739 - DNA, 148 bp, Homo sapiens
  chr14:23815819-23815967
  hypo
tgtgggccagcctcccgccagggtactcagaggccgctcagagggcagggttgggggtggcaagcagcgggacgtggtcacagcgggtagggggtggctgccgcagcagggaaggccggcgacacagctccccgtcccggagcacctc

SEQ ID NO: 215740 - DNA, 55 bp, Homo sapiens; identical to SEQ ID NO: 203501
  chr14:23835314-23835369
  hypo

SEQ ID NO: 215741 - DNA, 97 bp, Homo sapiens
  chr14:24629478-24629575
  hypo
atcaatgcccactcgctggacccagccaccttgtatgaggtggaagagctggagacggccactgagcgctacctgcacgtacgcccccagcctttgg

SEQ ID NO: 215742 - DNA, 221 bp, Homo sapiens
  chr14:24731055-24731276
  hypo
agcaagtccacaccgttcactactagcatgccctctgcaaggacacagctccgtgtcagtgaagccccatgaggagcccaggcccttatcattagcttcctatcccccccagaaatgccaggctgagtctctggtcccattaaagccttttagctctcagctgaggaggacagaccggcctcacctcggatggtgccatctccagctgcattgacaccgct

SEQ ID NO: 215743 - DNA, 221 bp, Homo sapiens
  chr14:24731336-24731557
  hypo
gctggaccctcgacccctggagtcagagggttcaggtccccagtcgtcatctgccgcatttcggcatgaacagcagccacagcagcgagcccagaaggaacggcctcctcctctgcgagagcgtccgtctggctctggctctggctctggagatggcgtggtagggggctgcaaggggttgccaccccaacggcccacatcggaacgtggcccatccatca

SEQ ID NO: 215744 - DNA, 53 bp, Homo sapiens
  chr14:24733719-24733772
  hypo
tgtgcaggggctgcggatttgtgcatcactgcagatacgggaaggggcagggc

SEQ ID NO: 215745 - DNA, 41 bp, Homo sapiens
  chr14:31027393-31027434
  hypo
aggcgtgagccaccgcgcccggccctcaaactgtatttttg

SEQ ID NO: 215746 - DNA, 48 bp, Homo sapiens
  chr14:31456398-31456446
  hypo
gccggaaaaagaaaatataaaatacaatttaagggccaggcgcagtgg

SEQ ID NO: 215747 - DNA, 100 bp, Homo sapiens
  chr14:31456881-31456981
  hypo
attattctgactactcgctgtgattctgcccacaatattttcttacattcaatcagttgaatataattttttttttttttgagacagactctcgttctgt

SEQ ID NO: 215748 - DNA, 61 bp, Homo sapiens
  chr14:31478679-31478740
  hypo
cccccccgcccccgcgccccagttgaaaaccacttttgcatttgtacggaaaaaattctga

SEQ ID NO: 215749 - DNA, 205 bp, Homo sapiens
  chr14:31484306-31484511
  hypo
ctacaagcgtgagcgccaccgcgtccagcctcacacccacttttatttatttacttttcattagtttccttgaagggtattctgtgtccagtagccttaccaggaaggctgcttcagaatttgacacaaaccatgccactggtttccacaggtatgagttgcgtttccccaattactatagttttgttccgtttgcctatgttat

SEQ ID NO: 215750 - DNA, 41 bp, Homo sapiens
  chr14:31629124-31629165
  hypo
catgagtcactgtgcctggcgccggtttttattactggccc

SEQ ID NO: 215751 - DNA, 33 bp, Homo sapiens
  chr14:31648025-31648058
  hypo
aaaaaattcagcgctcacctcaaacatgaactg

SEQ ID NO: 215752 - DNA, 79 bp, Homo sapiens
  chr14:31925274-31925353
  hypo
cccacacatcatatagttcacgggtactatttacaataagtaggcggggtgcggtggctcaggcttgtaatcccagcag

SEQ ID NO: 215753 - DNA, 44 bp, Homo sapiens
  chr14:32597576-32597620
  hypo
tgcactccagcatgggctgggctcccaaacaggttcatcctcac

SEQ ID NO: 215754 - DNA, 55 bp, Homo sapiens
  chr14:32597657-32597712
  hypo
agaccctgagaaagtcccttcacctcgctgggctctggtttcctcattccaagga

SEQ ID NO: 215755 - DNA, 37 bp, Homo sapiens
  chr14:34415281-34415318
  hypo
ctaaaaataacagtagaagccgggcgcggtggctcac

SEQ ID NO: 215756 - DNA, 33 bp, Homo sapiens
  chr14:34918992-34919025
  hypo
gccaccacacccgacctaggcattggttttatt

SEQ ID NO: 215757 - DNA, 36 bp, Homo sapiens
  chr14:35117759-35117795
  hypo
atatcaagtgcctaaatggccgggcgcggtggctca

SEQ ID NO: 215758 - DNA, 97 bp, Homo sapiens
  chr14:35578168-35578265
  hypo
ttgcagagatgggcacgtgagccacagtgcctggccttgcattcttttttgtttgctttcgtctgtcttaaggctgaaagtgtcataaactatatta

SEQ ID NO: 215759 - DNA, 200 bp, Homo sapiens; identical to SEQ ID NO: 203523
  chr14:36003242-36003442
  hypo

SEQ ID NO: 215760 - DNA, 393 bp, Homo sapiens
  chr14:36288873-36289266
  hypo
caatgggtaaatctcaaaaacgtcactaaggagaaagtcaagttgtagcatacgtaatgcatgagaccacttaaaaatatgagcattttgagaccgtgctgggttgccgccgccgctgcagccatcgtgccagcccctcgggtctccgcgaggccggctgacggtccagagtgggagacaagccaatttgggagcagataggatccagcttcattccacattactaccagttatttgataacgatagaccccaactaggcgcaatttacattgacgcatcatgccttacgtgggaaggacaacagttccaggggaaagctgccattgtggagaagttgtctagccttcggttccagaaaatccagcacagcatcaccgcgcaggaccatcagc

SEQ ID NO: 215761 - DNA, 34 bp, Homo sapiens
  chr14:37174263-37174297
  hypo
ttttttttttgagacggatctcactctgtcgccc

SEQ ID NO: 215762 - DNA, 382 bp, Homo sapiens; identical to SEQ ID NO: 203556
  chr14:38677790-38678172
  hypo

SEQ ID NO: 215763 - DNA, 316 bp, Homo sapiens; identical to SEQ ID NO: 203557
  chr14:38678202-38678518
  hypo

SEQ ID NO: 215764 - DNA, 243 bp, Homo sapiens; identical to SEQ ID NO: 203560
  chr14:39735535-39735778
  hypo

SEQ ID NO: 215765 - DNA, 291 bp, Homo sapiens
  chr14:39911460-39911751
  hypo
ggcatctccgggcttttgggcgccaccttgttcccctcatcgagacactggtctttgcagcagaagctgcttgcagtacatctggtccagccagagcctcacatggagccagtgcctgtgctggtgcttggtgctgcccgctccgcagcagcagctggtatgcctggctgtgcgcagtggccggattccacactgacttgctcatgcatcccttgtcactgagtgcttggctcacccttagtagccgtgggatccgggccaatagtgagagcgaagcgcagcatgctgggt

SEQ ID NO: 215766 - DNA, 37 bp, Homo sapiens
  chr14:39914481-39914518
  hypo
ctgggcaacaaaagggaaaatccgtctctcaagaaaa

SEQ ID NO: 215767 - DNA, 37 bp, Homo sapiens
  chr14:40470106-40470143
  hypo
ggtttgaaaaggaaagtgtgcggccgggcgcggtggc

SEQ ID NO: 215768 - DNA, 104 bp, Homo sapiens
  chr14:43839406-43839510
  hypo
acacaatggacacacatatacgcacacacgaatactgttcacctttaaagaagtacaacaccgatagaggagccaagatggccgaacaggaaaagctccggtct

SEQ ID NO: 215769 - DNA, 215 bp, Homo sapiens; identical to SEQ ID NO: 203563
  chr14:45431367-45431582
  hypo

SEQ ID NO: 215770 - DNA, 51 bp, Homo sapiens
  chr14:45579811-45579862
  hypo
caatggttcgtttacgaagagtaagtttagaacgacggcatggaaatctgg

SEQ ID NO: 215771 - DNA, 44 bp, Homo sapiens
  chr14:50327506-50327550
  hypo
caagagatacaaaaattagccgggcatgctggtgtgtgcctgta

SEQ ID NO: 215772 - DNA, 160 bp, Homo sapiens; identical to SEQ ID NO: 203567
  chr14:51027685-51027845
  hypo

SEQ ID NO: 215773 - DNA, 125 bp, Homo sapiens; identical to SEQ ID NO: 203568
  chr14:51027881-51028006
  hypo

SEQ ID NO: 215774 - DNA, 480 bp, Homo sapiens
  chr14:51171647-51172127
  hypo
ggtgcagcggacgtcgctgcagaactcgcactcgaaaggcttctcccccagtgcacgatcatgtgccttttcaagtctgagctgattttgaacttggcgctacagagccagcactggaaggagatatccccagtgtgggatcgcaggtggacggtgagctggctggagttgcggctgacataggggcagagctggcatttgtatggctgctcgtccgagtggatccgtaggtgcttcttgaggctcctgctgtccacggcagcatagtcacacaggtaacactcgtgcggcatcacatgtgcatggtcaggttgtccttccgctgaagcacttgtcacagaactcacacttgagcggttcgtcacccgttgtggattctgagatagcggtccaagtctttcatgccatggagagttttgaagtggcaacctgggtagcaacagtcgaatgtcctctctccaagggcggctgtttcttccc

SEQ ID NO: 215775 - DNA, 224 bp, Homo sapiens; identical to SEQ ID NO: 203569
  chr14:51410345-51410569
  hypo

SEQ ID NO: 215776 - DNA, 293 bp, Homo sapiens; identical to SEQ ID NO: 203570
  chr14:51410740-51411033
  hypo

SEQ ID NO: 215777 - DNA, 223 bp, Homo sapiens; identical to SEQ ID NO: 203572
  chr14:51562012-51562235
  hypo

SEQ ID NO: 215778 - DNA, 41 bp, Homo sapiens
  chr14:51836280-51836321
  hypo
gagccaccgcccccggccccgaccatggttttgtaaagaga

SEQ ID NO: 215779 - DNA, 931 bp, Homo sapiens; identical to SEQ ID NO: 203573
  chr14:52117843-52118774
  hypo

SEQ ID NO: 215780 - DNA, 394 bp, Homo sapiens
  chr14:52210541-52210935
  hypo
gtgatattactgcccgcacggcgggggggtgcccccgcctccctgcgttgtggatcgtcatatccatggtgggattggggggtgatattactccccgaatcgaaggggggcccgcccccatgcgatgtggatcttaatatccaggggggagaggcgggtgatattactccccgcatcgaggggggcttccgcgcccctgcgatatggatcgtaatatccagtgggggagaggggagtgatattactccccgatttttcctcggatcctttctatagtgcctccctcggttcacaccctgggacattatcttccatattctagcaggatatggctactaaagtcgcagggggtatacacccgtcaatattattcgtaattttctaggggaatgtt

SEQ ID NO: 215781 - DNA, 48 bp, Homo sapiens
  chr14:52373771-52373819
  hypo
cgctggagaatcttttacagggactccgtgactttatcactaagccac

SEQ ID NO: 215782 - DNA, 105 bp, Homo sapiens
  chr14:53259036-53259141
  hypo
gggcacaggtgagtagaggccgggaatactgcttcacgccttacagtgcgcaggacagcgccgcacaacaaagaattacctggcctgaaatgtctggagtgctga

SEQ ID NO: 215783 - DNA, 120 bp, Homo sapiens
  chr14:55517470-55517590
  hypo
atatgtatatattttgcacaccatataattatcacgacatctttattgctagttagtaggttccttgactggggtcatgtcatctgtgcctgacacaggaggtaatgtttattcagaaat

SEQ ID NO: 215784 - DNA, 142 bp, Homo sapiens
  chr14:55522631-55522773
  hypo
agcgagactccatctcaaaaacaaaacaaaaaacttacgaattatttatttctggaatttttcatttaatatgttcggaccttaggtaattaaaaccacagataaggggggatcaccctaacatgaacgctgtttattctag

SEQ ID NO: 215785 - DNA, 201 bp, Homo sapiens
  chr14:55590026-55590227
  hypo
tctctctggctcacgtctccaccagcacacacacaggacccagccctccacagtcaggtggcctccagtgaggccccatttgggtctatattctgtatgagggccccttggtggcaagtgacagagacaagcgtcagcaagcctgagcagaaaaaggatgcgaaaaggggaggtgggccggacgcggtggctcacgcctgc

SEQ ID NO: 215786 - DNA, 86 bp, Homo sapiens
  chr14:55740426-55740512
  hypo
tgaaggaggtccaaaatggacgcttgcatgtgtctttcccgagcggtagcgattctggggccggctacacggctgtatgtaagtta

SEQ ID NO: 215787 - DNA, 296 bp, Homo sapiens
  chr14:55765714-55766010
  hypo
gttaatgcaggacattgctgaccagcaagaacttggggaggagatttcaacagcaatttcgaaacctgtagggtttggagaaaagtctgacgaggatgagctcatggcggaattagaagaactagaacaggaggaaccagacaagaatttgctggaagtcagtggccccgaaacagtccctctaccaaatgttccctctatagccctaccatcaaaacctgccaagaagaggaagacgacgacatgaaggatttggagaactgggctgggtccagcgcgggcaggatggatgtggt

SEQ ID NO: 215788 - DNA, 76 bp, Homo sapiens
  chr14:55766084-55766160
  hypo
atggtctgcacctagtgggatgggtgggggcgggtagaggggggttgcggggcacgggggctgtgggggagaagtg

SEQ ID NO: 215789 - DNA, 221 bp, Homo sapiens
  chr14:55817970-55818191
  hypo
ctgagtgcctgaagcggcagggccagcgtgagcctgggagcctctcaaggaataacagcttccgtcgaaatgtgggcagagtattgcttgcaaatagcactcaggctgatgaaggcaaaacaaagaaaggcgtcttggaggcacctgacactcaggtgaatcctgtggggtctgtatctgtggattgtggcccttcaagagctgatcgttgttctcctaag

SEQ ID NO: 215790 - DNA, 164 bp, Homo sapiens
  chr14:55819829-55819993
  hypo
ggctatgaaagtgcacgttaaacctgagcgcctttacctttagatgagtgctttggcccctctgtgaatagcacgattaaaatccagttgtatataatggacagctaacggaacaatataatcaccacaatgcagctaggatagtgttgcggctataattttgt

SEQ ID NO: 215791 - DNA, 31 bp, Homo sapiens
  chr14:55894600-55894631
  hypo
ttttttttttttttttgagacggagtctggc

SEQ ID NO: 215792 - DNA, 180 bp, Homo sapiens
  chr14:55894691-55894871
  hypo
cacgccattctcctgcctcagcctcccaggattgctttcatagaacgtgctacagcattcttttttcatcttctccccaatccattctcccctcaccagctgtcaagccccttcctaccggcctagtccatttcacatgccttatcttttttttttttttttttttttttttttgagacg

SEQ ID NO: 215793 - DNA, 55 bp, Homo sapiens
  chr14:56088961-56089016
  hypo
gatagcatgtatgaacggtttttgtgactgaagatcacaccgttcaaagaacctc

SEQ ID NO: 215794 - DNA, 77 bp, Homo sapiens
  chr14:57073649-57073726
  hypo
ggaaacatagcagttgacaggaaagaacttttccttggcactgaattttgtgaagtcaatcacgtaagtccttatgt

SEQ ID NO: 215795 - DNA, 158 bp, Homo sapiens; identical to SEQ ID NO: 124629
  chr14:57265912-57266070
  hypo

SEQ ID NO: 215796 - DNA, 125 bp, Homo sapiens
  chr14:58599612-58599737
  hypo
cttttaaggctctgccacacctcttcaaacaggacagagctcacacccctttccaggtaaaggtgtgtgtgtgtgtgtacgtgcacgcacgcgcgcgctgatggcaatgtcggctgcctcactca

SEQ ID NO: 215797 - DNA, 180 bp, Homo sapiens
  chr14:58761656-58761836
  hypo
ttgagttcttcggcaacatctcaagtagccttaagaggatcagctttgctgattgctcttaaccggtagttatcaacttctggcgaccagccactacgctcctgattttcaagactttccttccctttgcaaaatttcttgaaactgccaggcacagcggctcaagcctgtaatcccagc

SEQ ID NO: 215798 - DNA, 243 bp, Homo sapiens
  chr14:59112403-59112646
  hypo
accaacaaaccaagaaccagcgtgaacgctgaccccacgaaagggcttctgaggaacgggagcgtttgtgtcagagccccgggcggtgtctcacagggcaacagtgtgaaccttaagaattcgaaacaggcgtgtctgccctctggcgggataccttctctgaacaatgggacattctccccaccgaagcagtggtcgaaagaatcaaaggccgaacaagccgaaagcaagagggtgcccctg

SEQ ID NO: 215799 - DNA, 145 bp, Homo sapiens
  chr14:59810623-59810768
  hypo
agtagaatgggcacgtcttagagacgttcctcaggtcctcagggaataagcaacttttctactggtatgtgtgcatgggtgacatgtagcaatttaaaatttactctgttttattccccaaaacagacctcgctgccaaaggcct

SEQ ID NO: 215800 - DNA, 164 bp, Homo sapiens
  chr14:59821078-59821242
  hypo
ggtgattttttattttattttttggctcaaggtctttcttttaaaattctgaggggtgattacttaaggtcagtgcttgatgcactgccctagtctcggagctcacagcacgcctcctgggctcctctacagggttgggcttttgactacgagggtgttggtga

SEQ ID NO: 215801 - DNA, 169 bp, Homo sapiens
  chr14:59935188-59935357
  hypo
agcatccccatcttcgcgttaaggttagtccatgggggaagcctcccttgactgataccgtcctttccccacgtattgggccatgttcccctgttagtttcacagcactctgtattttccattgtagcacataaccatggtctataattttttgcgtgattatctaagc

SEQ ID NO: 215802 - DNA, 77 bp, Homo sapiens
  chr14:59961997-59962074
  hypo
ttatagattttatggcgtttggagacaaaaacaggtgtgggtttgagttctgggtctgccagcggctttattacctt

SEQ ID NO: 215803 - DNA, 83 bp, Homo sapiens; identical to SEQ ID NO: 203605
  chr14:60097110-60097193
  hypo

SEQ ID NO: 215804 - DNA, 719 bp, Homo sapiens
  chr14:60193647-60194366
  hypo
ttgagaaacagcagtgggggcggggcgccaggacctagaggcccagggccctttgtggccgcaggactttggttggaactcgagtcttcttcaggcttccgtggcaacatgggcgtctcaggctccagggctccgtctccagggggcagctcggggccaggctggggctcagttgaggggtagtcgaggaaggaacccggctcggccaggccccgccggcttggcgcacgctcctcggcccggacgccagtctcctcccggatggcatccagggcgctgggcttcatcgggggtgagtcctgctcccgcttggggctctcctccgaggccgaggaggcgtcgcacgactcgatgatgagctcgctgtccagctcggcctcgcgctcctccctcaggatgctgtactggatggatggcgaggcgggcgagggcggcgggccgcccacgtggccaaagctcacatagcctgagggcagcgcgtcctccgcggccatggggtcctcggacaccagctcgatctctgagtcccccgactccgcgctgctggcctcgtggtccagggggctggggatggttggcggtccggacctggccttgacctcgggcctgtcggccagctggcccaccggccgtgggttctcggcggtttcatacgataatccctttgcttctttgatggcggtgatcagctcatcctcggagatgctgcctttcccctg

SEQ ID NO: 215805 - DNA, 58 bp, Homo sapiens; identical to SEQ ID NO: 203606
  chr14:60385921-60385979
  hypo

SEQ ID NO: 215806 - DNA, 120 bp, Homo sapiens; identical to SEQ ID NO: 203609
  chr14:60974092-60974212
  hypo

SEQ ID NO: 215807 - DNA, 331 bp, Homo sapiens; identical to SEQ ID NO: 203618
  chr14:61123209-61123540
  hypo

SEQ ID NO: 215808 - DNA, 608 bp, Homo sapiens; identical to SEQ ID NO: 203619
  chr14:61123681-61124289
  hypo

SEQ ID NO: 215809 - DNA, 148 bp, Homo sapiens
  chr14:62015169-62015317
  hypo
ggtggccttcctgagcgtggtcccgcttgtggtctgagagctgagctcgtgctcatctgtgggtcaagagctccacaggaggaaggcagagaagcaaggctagcgatagatcaagagtgatggggagacctggcgtggtggctcatgc

SEQ ID NO: 215810 - DNA, 400 bp, Homo sapiens; identical to SEQ ID NO: 203626
  chr14:62162324-62162724
  hypo

SEQ ID NO: 215811 - DNA, 220 bp, Homo sapiens; identical to SEQ ID NO: 203627
  chr14:62163024-62163244
  hypo

SEQ ID NO: 215812 - DNA, 196 bp, Homo sapiens
  chr14:62523573-62523769
  hypo
gacggcgtcggaggacaacacgctctggacgagcgcggcgcccaagggtcagcggcagcagcgagcagggggcacgggatgcagggaggctcttcgggaggcatgaaagtcagacgtgttccgaaacgtgagccgcgctggggggcacggcgcacgaccggggacaggaggaggacactgcggtcgcaaagcccag

SEQ ID NO: 215813 - DNA, 42 bp, Homo sapiens
  chr14:64190117-64190159
  hypo
atctctcctttgtcttataacgtaccttaaaaaaattcaggc

SEQ ID NO: 215814 - DNA, 44 bp, Homo sapiens
  chr14:64191361-64191405
  hypo
aaaaggaaaaggaggccaggcgcggtggctcacgcctgtaatgc

SEQ ID NO: 215815 - DNA, 480 bp, Homo sapiens; identical to SEQ ID NO: 203630
  chr14:64761256-64761736
  hypo

SEQ ID NO: 215816 - DNA, 154 bp, Homo sapiens
  chr14:64884526-64884680
  hypo
attctaatttctccacgtggcatgcgaaggagggcagcttctatcctccaactctgatgcaggctggcttttctttcaggggtgccgattgccggaaggcatgctgtggtggttgggcgcagtaaaatagttggggccccgatgcatgacttgc

SEQ ID NO: 215817 - DNA, 80 bp, Homo sapiens
  chr14:64888236-64888316
  hypo
taattatctaacaggcgataaagaaattgctctcctacaactcctcactttgaatacttgcgatatgacattcaagctca

SEQ ID NO: 215818 - DNA, 32 bp, Homo sapiens
  chr14:64904876-64904908
  hypo
ccactgtgcccggcctgttcaagagttttata

SEQ ID NO: 215819 - DNA, 43 bp, Homo sapiens; identical to SEQ ID NO: 203633
  chr14:65005557-65005600
  hypo

SEQ ID NO: 215820 - DNA, 190 bp, Homo sapiens
  chr14:65150031-65150221
  hypo
gttgtcccttcgcccgctctgggtttgttatgacgtactggtcggcagccccaggccgcagaggttgcccaagacaatcatgcttttctgagaggcaggctgtgctgcgagtctcaggccgcagccgcacacacaatgccctctgtctccgctggggcagaaaggcgcattattgcgggtcaggtgactc

SEQ ID NO: 215821 - DNA, 206 bp, Homo sapiens
  chr14:65194543-65194749
  hypo
cagcagctggttgaacgtgaaggggcccctctccccgttcaacagccgggcagcggcagggcctgcacaccacaagctcagctacctgggccgagtggtgcgggagatcgtggagacagagcgcatgtacgtacaggacctgcgcagcatcgtggaggtgcgtgtcggaggccttgcggcacagtattctagcagaagcctgtttc

SEQ ID NO: 215822 - DNA, 239 bp, Homo sapiens
  chr14:65207951-65208190
  hypo
aaggccctgagcagcgaggaggaagaagaaatgggaggtgccgcccaggagcctgagagccttctgccaccctctgtgctggaccaggccagcgtcattgcggagcgatttgtcagcagcttctctcggcggagcagcgtggcacaggaggacagcaagtccagtggctttgggagcccgcggctggtcagccggagcagcagcgtgctcagcctggagggcagcgagaagggcctggc

SEQ ID NO: 215823 - DNA, 140 bp, Homo sapiens
  chr14:65209828-65209968
  hypo
gccagaggaccacctcgcctgggggccggccctccgcccggagccccctcagccccacagagaccttcagctggcccgacgtccgtgagctctgctccaagtatgcctcccgcgatgaggcacgccgagcagggggcggc

SEQ ID NO: 215824 - DNA, 142 bp, Homo sapiens
  chr14:65220230-65220372
  hypo
gccagcagcctctcccgcactcacctgttggaagccttcttgttgggcccctccaggtcatgcttgcggcccaggtagccttccatctgcacactctgcccatggtcccgcggggccggcagcgttgcgggctcatcaccct

SEQ ID NO: 215825 - DNA, 185 bp, Homo sapiens
  chr14:65233479-65233664
  hypo
tggagcctcccctgctgtctcgccttcctcctcttgaggcctaaggaagacacagtctctctttagaaacaagcacccctctgaggccagtgcctcctgcgaggcctggcttttcacctgcgcccacagggaggagcaccaaatagctccccctccagtcagccggcagcctggatggtgcttgg

SEQ ID NO: 215826 - DNA, 84 bp, Homo sapiens
  chr14:65237647-65237731
  hypo
caggagaggaggtcacgggccatgctgaagaagcggaatttatccgccgtgtccactagctgggtccggcgcccggcacaggca

SEQ ID NO: 215827 - DNA, 64 bp, Homo sapiens
  chr14:65239794-65239858
  hypo
cccagggcaggcctgcatcggctggtcccgcctcacactggggaggttacgtcctatgcagcac

SEQ ID NO: 215828 - DNA, 54 bp, Homo sapiens
  chr14:65248987-65249041
  hypo
tctacaacccactcacgtgccttcagcttagccaacatccgattgacactggtc

SEQ ID NO: 215829 - DNA, 221 bp, Homo sapiens
  chr14:65271602-65271823
  hypo
ttgctgaagaggggccgatggcagcagccccggggcccacagaagggactttaccagcatctctccagagagcacctccagcagcttgatgagcatgcgcccatcccgcaggtccttgtagagatcggtgatgcggcaggacactcgagccaggtgcgagttcacccatttcgtgaaggtctttttctgaacaacttcccgctcatctaggtggagagaag

SEQ ID NO: 215830 - DNA, 34 bp, Homo sapiens
  chr14:65492492-65492526
  hypo
cgctgtcctgcagcctggccgacagagtaagacc

SEQ ID NO: 215831 - DNA, 119 bp, Homo sapiens
  chr14:65493164-65493283
  hypo
gggaggcattctcacggcgagtcagtgcagctcctcttatgtttaccgcaattaaggtgagcatgagagcagcctgcctctcttctgttctcccagccatggaagcaggctccattaaa

SEQ ID NO: 215832 - DNA, 42 bp, Homo sapiens
  chr14:66814104-66814146
  hypo
aaaaaaaaaaaaaagccaggcgtagtggttcacgcttgtaat

SEQ ID NO: 215833 - DNA, 169 bp, Homo sapiens
  chr14:67864421-67864590
  hypo
ccatccaggaggatccggcccttgggaggggtcactctccgacccccctcaagcttgtagtacaccagcgtgttctgccgaaggatgaaccatcgcgccttccagttgtggacaatgtggccctatggacagacaagaaagccctgaggtgaggcggtcagtgggaggg

SEQ ID NO: 215834 - DNA, 84 bp, Homo sapiens
  chr14:67876365-67876449
  hypo
ctctgcttctttctcgtctgggtgggattaagagccaactctatcatgtccctgcctgtctctggcttcgctttcaccggtgat

SEQ ID NO: 215835 - DNA, 82 bp, Homo sapiens
  chr14:68130375-68130457
  hypo
gggagactccatttcaaaataaataaataaataaataaaatgtaagtgacagtaataatgatacttgcggatggcaaaaatt

SEQ ID NO: 215836 - DNA, 98 bp, Homo sapiens
  chr14:68829198-68829296
  hypo
gtttctggttctagaacctacgttctttcataaccatcactgctctgaaaaagagtaagcaccagacctgaaagaaacataacagaggccgggcgcag

SEQ ID NO: 215837 - DNA, 91 bp, Homo sapiens
  chr14:69245843-69245934
  hypo
aagggctaatcccttagaatcgtgggctcttagaagctatgacacctgtaccaatagaaaaatcatccattcagtaggtaagtgcctgctg

SEQ ID NO: 215838 - DNA, 227 bp, Homo sapiens; identical to SEQ ID NO: 203648
  chr14:69259278-69259505
  hypo

SEQ ID NO: 215839 - DNA, 229 bp, Homo sapiens
  chr14:69278051-69278280
  hypo
ggtggagcactggtcgggaaagccaaggacaggcactcgcagccagggcggctgtgtgggtgggaggacgcagggggctgcgctccagtctcccctaattagctcaacctggctacatccttaccattgcatgtgttcatccttatgtgaaacggagcccatattgacctagcacccagtatgtgcaaggcgctggctgaatagggagctgcagcgggagatttcagcg

SEQ ID NO: 215840 - DNA, 160 bp, Homo sapiens
  chr14:69345631-69345791
  hypo
gagaaaaaggaaaaacgcattatttcttgccccagacgccacccctgagcgtgctccatgcaggaggcgagtacctgggggtcgttgccaatatcataacccaagctgatgaggcaggctttgaactcctcgggacccagtgtgccggagtgatcctggg

SEQ ID NO: 215841 - DNA, 147 bp, Homo sapiens
  chr14:69352454-69352601
  hypo
agaacatccaccaaccggcgcaacggggaaaagcactctcctcagagcacttccaaggccatgaaagtgtctacgcaggaaggctatgcaggagtctgtgggaatgcatagggcatgacgctatacacacagcgggaaacacagcca

SEQ ID NO: 215842 - DNA, 252 bp, Homo sapiens
  chr14:69354666-69354918
  hypo
agatttatccttcactgctgcgtttttcggcttcgcttccacttttgcaggaggtttaactgacaaccgcgccgatctcctcttgggcttttccttggcggctccttcagcagagctgaccttccccttgggcatcctggcggcagggagggcgcgtgccaggtgtctgcgggccgcggcatgctgacagcctttgcgaaactgtgctgcctggccgctgccactcctcacgcccaggatagattctttaga

SEQ ID NO: 215843 - DNA, 565 bp, Homo sapiens; identical to SEQ ID NO: 203650
  chr14:69444743-69445308
  hypo

SEQ ID NO: 215844 - DNA, 299 bp, Homo sapiens; identical to SEQ ID NO: 203651
  chr14:69445727-69446026
  hypo

SEQ ID NO: 215845 - DNA, 163 bp, Homo sapiens
  chr14:69550073-69550236
  hypo
tgtactgtctggccccgtggtctagacactgcttggacaggatgtctcacctgctgatgaaactcctacgcaagaagatcaagaagtggaacctcaaactgcggcagtggaacctaaagttgcagggggcctcaaatctgaccctgtccgaaactcaaaatac

SEQ ID NO: 215846 - DNA, 104 bp, Homo sapiens; identical to SEQ ID NO: 203653
  chr14:69618203-69618307
  hypo

SEQ ID NO: 215847 - DNA, 95 bp, Homo sapiens; identical to SEQ ID NO: 203654
  chr14:69658738-69658833
  hypo

SEQ ID NO: 215848 - DNA, 259 bp, Homo sapiens
  chr14:69666620-69666879
  hypo
tagtcgtttattgtcgttatcaggtatgtgctatacataattgcatgtgctatacttttatacgactggctgtgctgtaggttcgttaactccagcataattacacacatttgtgagtaacgcattgtgcagcaacgttaggacggttaggatggctatgatgtcactaggcaataggaatttttctgcaccattgtaatcttataattttgtagaactattgtatgtgtcatctgttgttgaccgaaacattgttata

SEQ ID NO: 215849 - DNA, 46 bp, Homo sapiens
  chr14:70236218-70236264
  hypo
atttgccagcctgtctgtgtcgttggccttatgacgaggagtgcct

SEQ ID NO: 215850 - DNA, 440 bp, Homo sapiens
  chr14:70236294-70236734
  hypo
tcttggttgggcctggttgactttgccagtcagctcctacagtgatcagttggccacctctagatctgtgtttgccggtctagacgttatcggtgcacttccttgaagtgccaggttgcagcgatcccagagcgttgataacgtgatctgatccctaagttgagacctgtcttcctgtaacgcttccgaataagaggtccggtcgaaaagagttgaaagatacgaaattaggtggtcgttggaatcctgatcgcagtaaagtggtccttggtaactgctcgagtagaacatgtctgcatccgccaatagtccgctaatagggagggctgtgcgattaaaggcttccatcgattgggtagtgtccttcaagtgggtggcgaagagccagtcgggcatatgtcatgaaggtttctccgaccgattaatggtttgctgcttga

SEQ ID NO: 215851 - DNA, 36 bp, Homo sapiens
  chr14:72939848-72939884
  hypo
ccttttaaaaattattcattcggccgggcatggcgg

SEQ ID NO: 215852 - DNA, 35 bp, Homo sapiens
  chr14:72940124-72940159
  hypo
ctcggcaacagagcgagactccatctctggggaaa

SEQ ID NO: 215853 - DNA, 152 bp, Homo sapiens
  chr14:73302728-73302880
  hypo
accacacgggtgcctcggggagatgctggagacacaagtggctttgaaattagcacaacttacatggcctccaggtctgctgtggaaatccaggtccaaagaagaagccagtgaggaacaggaggctgatcattgtgttctcagaaggggtt

SEQ ID NO: 215854 - DNA, 240 bp, Homo sapiens; identical to SEQ ID NO: 203659
  chr14:73359750-73359990
  hypo

SEQ ID NO: 215855 - DNA, 88 bp, Homo sapiens
  chr14:73390960-73391048
  hypo
tacctttataatcgcgggtgcttaaccaatgggcgctgtgcaccaagtcctgggtgaggtactccatcatcagcgcttactccttaca

SEQ ID NO: 215856 - DNA, 262 bp, Homo sapiens
  chr14:73392079-73392341
  hypo
ctcaagcttcatgaagcggttctttattctgactatgcccacttctctcatttccctcatcacccggccccgctccacatactgcatttatctataaactcctgagagccaggagtttagcctgaaatcctagcttcctggttaagagctgaaatgccttcgcacggcgtgcaatgggtgaaccccaccgcctgctttctaacgggtccaagccgcgggcaggggcctgtgttacggagccgcatgacacaccaggcctact

SEQ ID NO: 215857 - DNA, 327 bp, Homo sapiens; identical to SEQ ID NO: 203660
  chr14:73393291-73393618
  hypo

SEQ ID NO: 215858 - DNA, 73 bp, Homo sapiens
  chr14:73428614-73428687
  hypo
tcagtggaaggtttggctaccgcgggaacaccccagctctccgtcggagcacgtctgtctttggagaggtcac

SEQ ID NO: 215859 - DNA, 335 bp, Homo sapiens
  chr14:73459712-73460047
  hypo
cattcatgtgcttccgcttcttataacctctttccacccagatttccaatcaccagcaccacaaaagctggcgaactgagtgttctcaccacccactggcaccccaatgagaagcccttggggcacaagccaactgaccttcagggctttgaagatgactcccgggtgccggggagaacgggtggtgttattctctagtagctgctccaaagcacgccgaagcccagaaaagtccgtgggagggttgtaagtcctcgttcccttgtagtgaatggaactaaaggcttcagggaaacggcccagcttccggaaccggtcctggatgagcttctctg

SEQ ID NO: 215860 - DNA, 35 bp, Homo sapiens
  chr14:73855377-73855412
  hypo
taaaaccttgaggctgagtgcggtagctcacgcct

SEQ ID NO: 215861 - DNA, 154 bp, Homo sapiens; identical to SEQ ID NO: 203662
  chr14:74111425-74111579
  hypo

SEQ ID NO: 215862 - DNA, 93 bp, Homo sapiens
  chr14:74113149-74113242
  hypo
ttaaacatagaaaagcggccagggtgtggtggctcacacctgtaatcccagaggcctgtaatcccagcactttgtgaggccgaggcgggcaga

SEQ ID NO: 215863 - DNA, 201 bp, Homo sapiens; identical to SEQ ID NO: 203663
  chr14:74180377-74180578
  hypo

SEQ ID NO: 215864 - DNA, 203 bp, Homo sapiens
  chr14:74184829-74185032
  hypo
ctttggacaagaacgctagcccctcccccaacgctgagaaaactttctagccctagcaaggccgccagcaagcagcaaagggagagtacctgccgcggcctccctcccaaggaggaggtggccactcaggacacggtcacgggagcagctcagacaggcctagagactgcagggacagcacaggtgtcaggctgcgccccttc

SEQ ID NO: 215865 - DNA, 922 bp, Homo sapiens
  chr14:74185092-74186014
  hypo
ttgcagccttcgaggtcctctggggaggagaaatgctgctccaaagtgggtgagcttgtgcttggccggccacggtggcttcctggaggccgaggggaggagggggaagcaaataaagggaaaagactgcggggcagcagagcagcagaaatcggagtgtgagaggcggtggagtccctcccgaggggaccgggactctcccggtccaggaaagcacgaggacagcttccgacagaccaaatgcaaagagagctggatcctggagcccttaacgctgctcccagggccttcataaataaaagagccgtttatgtcattgtctcatttgtttcgcagggaaaagtccctgcaatcctctcctcactccctcttgagatgccagggtgtctgcgggcgctggcggcggtgcgggaagggccgaggcccaggactgggccagcctggctcccgcgctcagcccttgtcgcccgcaccgctctcctcccgcagggcctgctggtgggcggcggcggcggcagcagcggcctctttctccttcagcctcagcgctgcagccttcttctcctgctctgcgtggctcttcatatgcgcactgcggctcttcaccttgtaaaacaccctgcagccgggtgggggttgctcagaaccggcctagcccacccgggggcccccagcgcgggtgcgcgaggagccccagccttcaccttcacccccacgctgcacagccgcggccggccagctcgcgtcattttccgaaagctgccccatgacgtcacagccctagaaacccgctgagccaaccagaaacgaggcggacaccgcctgtacctcttccccctcccctccaccccacccccgccccctccgcgcaccagcccgcgggggtcccagcggggacagcgctgcccaccttacctgccac

SEQ ID NO: 215866 - DNA, 39 bp, Homo sapiens
  chr14:74244737-74244776
  hypo
aagaacctgacagaacgcaccttataaaccatgataggg

SEQ ID NO: 215867 - DNA, 136 bp, Homo sapiens; identical to SEQ ID NO: 9841
  chr14:74253328-74253464
  hypo

SEQ ID NO: 215868 - DNA, 35 bp, Homo sapiens
  chr14:74369046-74369081
  hypo
attacaggcgtgagccactgcgcctggccctgata

SEQ ID NO: 215869 - DNA, 91 bp, Homo sapiens
  chr14:74418713-74418804
  hypo
tgccctttacagagcatgctctacagagcatgtccctgtgccccatcctccacagcaaaagctgccaagatggaccgctcactgtctgtat

SEQ ID NO: 215870 - DNA, 88 bp, Homo sapiens
  chr14:74626548-74626636
  hypo
acaggtgtgaatcaccgtgccctgcctacagctgtctttatgaagtgctatgacaaacctaccatacagcaagcgttctcaactttgg

SEQ ID NO: 215871 - DNA, 161 bp, Homo sapiens
  chr14:74628386-74628547
  hypo
acgggaacactctgccggtgcattgccggagcagcccacctgatggcagtgaagaatctttgggggagggagccccaccactgaactgtaaggactgccattgccaaggtgaacatagctgagaccctgcacgccaacctgcttgtcgctgcacagaagag

SEQ ID NO: 215872 - DNA, 94 bp, Homo sapiens
  chr14:74957659-74957753
  hypo
tcacaaagacccacggtttcctaccacttactgggtgtgagatcttgggcaagttactctatgtgcttcgctttcctcatctgtaagacagctt

SEQ ID NO: 215873 - DNA, 71 bp, Homo sapiens
  chr14:75423075-75423146
  hypo
gaactgtacgctgcgcgggggtctgtgtgcatctgcgcgtgtgcatgggcatttgcgggtctgtgaatatc

SEQ ID NO: 215874 - DNA, 196 bp, Homo sapiens; identical to SEQ ID NO: 203675
  chr14:75743668-75743864
  hypo

SEQ ID NO: 215875 - DNA, 165 bp, Homo sapiens; identical to SEQ ID NO: 203676
  chr14:75743897-75744062
  hypo

SEQ ID NO: 215876 - DNA, 71 bp, Homo sapiens
  chr14:75747281-75747352
  hypo
agaaaaggagaatccgaagggaaaggaataagatggctgcagccaaatgccgcaaccggaggagggagctg

SEQ ID NO: 215877 - DNA, 165 bp, Homo sapiens
  chr14:75749314-75749479
  hypo
tttttattctcacaaaatcacgtggagggttattctacttcaaagatgagcaaattgaagaatggttagaataaacaactttcttgatattccgttatcggcattagaatcttcctgctcgttatcgtatccagcaggctgaactgcctcttgatacttggttaa

SEQ ID NO: 215878 - DNA, 322 bp, Homo sapiens
  chr14:76012995-76013317
  hypo
cccgcgcttccagccctgagcttccgatgcggggagagcagagcctcgggaggggcacacagactgtggcagagctgcgcccatcccgcagaggcccctgtccacctggagacccggagacagaggcctggacaaggagtgaacacgggaactgtcacgactggaagggcgtgaggcctcccagcagtgccgcagcgtttcgaggggcgtgtgctggaccccaccactgtgggttgcaggcccaatgcagaagagtattaagaaagatgctcaagtcccatggcacagagcaaggcgggcagggaacggttatttttctaaa

SEQ ID NO: 215879 - DNA, 35 bp, Homo sapiens
  chr14:76128639-76128674
  hypo
gtctaaataaatgttggcaggggttttttgttgtt

SEQ ID NO: 215880 - DNA, 136 bp, Homo sapiens
  chr14:76446058-76446194
  hypo
cccactgccacccctccacccgctctcccgtgacacgcagacacaaagggcgccagcctcctctacgcatccacagccaaaacccgctctccccgtgcccaccggcctggagggcgcccattttgagcacatgaat

SEQ ID NO: 215881 - DNA, 86 bp, Homo sapiens
  chr14:76446468-76446554
  hypo
gaggtctccacactgagaaccgtaagggctcctgacagagccggccttcccctttatggcacccagatgcttacagttactgatac

SEQ ID NO: 215882 - DNA, 321 bp, Homo sapiens; identical to SEQ ID NO: 87130
  chr14:76446750-76447071
  hypo

SEQ ID NO: 215883 - DNA, 160 bp, Homo sapiens
  chr14:76447285-76447445
  hypo
gagaccccagcagacgtgcagaaggagggaggaaaaccaggcggcctccccagatcccaaagactgaggcttggcaagaaggtgcatgaactcactgcactgcgagagcttcaggacttccaggaagcgctggcaaccctgaggacgaagaagcggactg

SEQ ID NO: 215884 - DNA, 36 bp, Homo sapiens
  chr14:76998229-76998265
  hypo
cacctcgcccagcagcaggcccgggcctgccccctt

SEQ ID NO: 215885 - DNA, 295 bp, Homo sapiens; identical to SEQ ID NO: 203682
  chr14:77493464-77493759
  hypo

SEQ ID NO: 215886 - DNA, 132 bp, Homo sapiens; identical to SEQ ID NO: 203685
  chr14:77591041-77591173
  hypo

SEQ ID NO: 215887 - DNA, 116 bp, Homo sapiens; identical to SEQ ID NO: 203686
  chr14:77591751-77591867
  hypo

SEQ ID NO: 215888 - DNA, 31 bp, Homo sapiens
  chr14:77935683-77935714
  hypo
ctgctaacttggggccggggcccctcccttc

SEQ ID NO: 215889 - DNA, 31 bp, Homo sapiens
  chr14:78166103-78166134
  hypo
aatattaggttctggctgggcgcggtggctc

SEQ ID NO: 215890 - DNA, 144 bp, Homo sapiens
  chr14:78189475-78189619
  hypo
cactgcgcccggccaccatgattggtacacatcttaaataacacctacctcttatcaggagctgccctggaaagattccggtcatgctgtctctcttttcgcctgtcatgccggatttcatccctctcacgtgcctccccatcc

SEQ ID NO: 215891 - DNA, 95 bp, Homo sapiens
  chr14:78335482-78335577
  hypo
agggagctttggttggatggcgtattggttttctcgggctagccgcaaacctctggcttaaacaacaaatgtattgtctcacagttctggaggcc

SEQ ID NO: 215892 - DNA, 34 bp, Homo sapiens
  chr14:78335637-78335671
  hypo
tgttctaggcctcggccctagcttctggggggtt

SEQ ID NO: 215893 - DNA, 37 bp, Homo sapiens
  chr14:78388714-78388751
  hypo
gctggagggctggcgtggtagcgggcatagtgtctta

SEQ ID NO: 215894 - DNA, 207 bp, Homo sapiens
  chr14:81231425-81231632
  hypo
taagtgattgcttctcggccttctggctaagatcgagtgtggagatagagtaaacgacacagacaggcaggctcctactctcatagagtcaacaaacatttgcatgaaatgtcattacttttgtcccattcatctggtttgggcatatttatttgaacactaattatggtacccaatgaagtagcgctttctcgcagtttcatgttt

SEQ ID NO: 215895 - DNA, 78 bp, Homo sapiens
  chr14:88457502-88457580
  hypo
acattctttttgttttgtttcgctttggtttggtttttgggtttttttgtttgtttgtgttttgaacggagtctcact

SEQ ID NO: 215896 - DNA, 77 bp, Homo sapiens
  chr14:88457820-88457897
  hypo
caggcgtgagccaccgtgcccggccctacattcttaactacttactgtaccataccgctttccctctctgacatgaa

SEQ ID NO: 215897 - DNA, 78 bp, Homo sapiens; identical to SEQ ID NO: 203698
  chr14:88459631-88459709
  hypo

SEQ ID NO: 215898 - DNA, 33 bp, Homo sapiens
  chr14:88527464-88527497
  hypo
ctgcttaaaataattatttgcggccagacgcgg

SEQ ID NO: 215899 - DNA, 33 bp, Homo sapiens
  chr14:88527737-88527770
  hypo
gagtgagactccgtctcaaaaatatatatatta

SEQ ID NO: 215900 - DNA, 168 bp, Homo sapiens
  chr14:88625251-88625419
  hypo
ttctatttcaggcccaccagcgctattaccgatcttggacaggtccaaaccttctccctctccaatgctcctacacctgcgctgctgaacactgcttgagaaagtcatacacagggcctccagcctctcccgggatcacagcatcccgtaataaccctcacccatatc

SEQ ID NO: 215901 - DNA, 36 bp, Homo sapiens
  chr14:88686789-88686825
  hypo
aaaaaaaaaattactatagagcgaaagtaatcaaga

SEQ ID NO: 215902 - DNA, 51 bp, Homo sapiens; identical to SEQ ID NO: 203699
  chr14:88789656-88789707
  hypo

SEQ ID NO: 215903 - DNA, 75 bp, Homo sapiens; identical to SEQ ID NO: 203700
  chr14:88789887-88789962
  hypo

SEQ ID NO: 215904 - DNA, 782 bp, Homo sapiens; identical to SEQ ID NO: 203701
  chr14:89020631-89021413
  hypo

SEQ ID NO: 215905 - DNA, 427 bp, Homo sapiens; identical to SEQ ID NO: 203702
  chr14:89290763-89291190
  hypo

SEQ ID NO: 215906 - DNA, 180 bp, Homo sapiens
  chr14:89292610-89292790
  hypo
catgagccaccgcgcccagcccccaaatgtgtttttggcatagtaatcttatagatattgcttaaaaaaatacacaatcaaatatgtttgggacttgtgacaaaatattgaccctttacgttggtacaacagaagcttgttaagaacctttgatgtggccgggcacggtggcttatgcct

SEQ ID NO: 215907 - DNA, 238 bp, Homo sapiens; identical to SEQ ID NO: 203703
  chr14:89506861-89507099
  hypo

SEQ ID NO: 215908 - DNA, 180 bp, Homo sapiens
  chr14:89627946-89628126
  hypo
gtgcacagggccaatcttcaggcttatggcttttggaacattttcttaatttaatagagaacagaattcaatgattagcaacatcactaaaaatttaccccatttcttctccatgagtcactgacacccgatgcgcatgaacagtccaacgtccacctcgtaagatgtcatcgggcttca

SEQ ID NO: 215909 - DNA, 81 bp, Homo sapiens
  chr14:89657793-89657874
  hypo
ttcccttgcagattactgcctctgtgtccgccaaacccaatgactaatgatgggggacaaggggctcgcacttgtcagttt

SEQ ID NO: 215910 - DNA, 166 bp, Homo sapiens
  chr14:89711495-89711661
  hypo
gcagaaaaggaatgctaaaacgtgaataaaaacaaaggaaaaatcgagtatgatgaacagacttgtatttttggaaacatatgcaaaagatacgcaggtgggtcattcggggccctttcctctttccatcttcctgacgctccacggatctactgaccaagtggat

SEQ ID NO: 215911 - DNA, 247 bp, Homo sapiens
  chr14:89811174-89811421
  hypo
ctactggaaacattaaaatacgcatattctttaatgagaaatgacgtatctaggaaggaggggcacaggcaacataaagattagaacagctcagtggacttttccgaagaggtacgggcaagcaacccaaacacaccacccctccttccactttccagatctagattccgaaggccccacgccagagtctccttggcaaaggtgtagattccccaagcaagctggcgtggctcggtgtgcatgagta

SEQ ID NO: 215912 - DNA, 366 bp, Homo sapiens; identical to SEQ ID NO: 203706
  chr14:90085338-90085704
  hypo

SEQ ID NO: 215913 - DNA, 208 bp, Homo sapiens
  chr14:90358154-90358362
  hypo
ccgctaccaatttcgggtcgcgctgctgggggacgcggcggtgggcaagacgtcgctgctgcggagctacgtggcgggcgcgcctggcgccccacagcccaagcccgagcccacggtgggcgccgagtgctaccgccgcgcgctgcagctgcgggctgggccgcgggtcaagctgcagctctgggacaccgcgggccacgagcgcttc

SEQ ID NO: 215914 - DNA, 325 bp, Homo sapiens; identical to SEQ ID NO: 203707
  chr14:90420694-90421019
  hypo

SEQ ID NO: 215915 - DNA, 200 bp, Homo sapiens; identical to SEQ ID NO: 9902
  chr14:90421129-90421329
  hypo

SEQ ID NO: 215916 - DNA, 727 bp, Homo sapiens; identical to SEQ ID NO: 203709
  chr14:90422068-90422795
  hypo

SEQ ID NO: 215917 - DNA, 163 bp, Homo sapiens
  chr14:90505789-90505952
  hypo
attaaaagtgactgctcaggcgaagacagtgacagtggcttctggaggtcgtacatcaggtttcgcatagagatgacagtggaaaatgtatgtgtgggtgttcgggcatgggggtgagagcagagtcataagtccttaacccgtggccatttcttagggggtt

SEQ ID NO: 215918 - DNA, 332 bp, Homo sapiens; identical to SEQ ID NO: 203710
  chr14:90527180-90527512
  hypo

SEQ ID NO: 215919 - DNA, 226 bp, Homo sapiens; identical to SEQ ID NO: 203711
  chr14:90527931-90528157
  hypo

SEQ ID NO: 215920 - DNA, 165 bp, Homo sapiens
  chr14:90754241-90754406
  hypo
agccatcaggctttcgtgacggcttctcagcattcccgtgatctgacagccaccacccatgcacacagaaacaacattcatactccccagaagcacacccaggcgacagccaccaacccccctcctgagaggcgccgctactttgtgtctcgcttgcctttcaat

SEQ ID NO: 215921 - DNA, 382 bp, Homo sapiens; identical to SEQ ID NO: 203714
  chr14:90849476-90849858
  hypo

SEQ ID NO: 215922 - DNA, 53 bp, Homo sapiens; identical to SEQ ID NO: 203715
  chr14:90849897-90849950
  hypo

SEQ ID NO: 215923 - DNA, 131 bp, Homo sapiens
  chr14:91127198-91127329
  hypo
aacaagcacctagtgcttggcgatggcacagggtgggcatccgaagaccttgagcaaggtgagcacgggcaatgtgttcagctcagggctggctgcgggcctcatcctacgccatgggacatcggcaggag

SEQ ID NO: 215924 - DNA, 117 bp, Homo sapiens
  chr14:91691046-91691163
  hypo
tcttggtgcagcacaaagtccggagtggcgtctcgggcatcgtgggcatggaggtggatgggctgcccttccacaacacccacgccgagatgatccagaagctggtggacgtcacca

SEQ ID NO: 215925 - DNA, 62 bp, Homo sapiens
  chr14:91739006-91739068
  hypo
ccccgccgggctccggggaggccggactgctctttgagacgctccctcgactgcagtcctcc

SEQ ID NO: 215926 - DNA, 204 bp, Homo sapiens
  chr14:91744281-91744485
  hypo
cggttgctctcctccaggaactcctccaaggtgaccatctcactgctgggggaggccgagcagggccgcactccgacgtagggaggggctgtgcccctcttctgggcaccctcctgtgggagaggcccgttccgaggcaaggggtactcgtggcggccgagggcgttgcgtcccggtgtgctggcttcccggggcaaagtggcc

SEQ ID NO: 215927 - DNA, 172 bp, Homo sapiens
  chr14:91750811-91750983
  hypo
aggtggaatgaatcgggacaggtcatcctacaggtgaagctaaaatgaggatccacaggggaggcagagatgagtgaacagttagcatgagcagcgaacagagaaagcacaattccaacagcatgcgcggaaggcaggtctggaggacccggcaccacggcagcccagggtt

SEQ ID NO: 215928 - DNA, 204 bp, Homo sapiens; identical to SEQ ID NO: 203719
  chr14:91755427-91755631
  hypo

SEQ ID NO: 215929 - DNA, 395 bp, Homo sapiens
  chr14:91770038-91770433
  hypo
ccctacctctccccgagctccttgtgctccagctccagattccgatgcagtgtctttaggcagctgtgctggcggatgagggcctcgtactcggccgattgccgctcgtgcagcgtgcccaggtgctcgtggtcctgcagcagggcctcgtaggccgctgtaagttgctcctgctgcctctgcaggctttcgttctccgtctccttggccgtgtggtggttctgcagcagcgtgtactgcgcggtgagcgctgcgctctgggaactcagcgtggagttctccacctgccgagagggagaagcgcggcgtggcgcaggccccacagtcagcgaggagggctggggagcaggtcaagtgctcgagcagacacgaaaatagccgggaccctcagggca

SEQ ID NO: 215930 - DNA, 100 bp, Homo sapiens
  chr14:91775792-91775892
  hypo
caaggattagccaggtgtggcggtgcatgcctgtggtcccagctaggtagtggtctccagctagggctggaggatcgcttgaacccgggaggtggacatg

SEQ ID NO: 215931 - DNA, 168 bp, Homo sapiens
  chr14:91781818-91781986
  hypo
cccaccttttcccaccgccagttgggaaattgagaattgctgatttaagctgtggctaagctaggtaacggataatccatgcatccacaatacagtaccaggaatggctgtaatcccggctctccgtcttgcaggcaggggttctaggagaggcgttagtggtggagg

SEQ ID NO: 215932 - DNA, 206 bp, Homo sapiens
  chr14:91804548-91804754
  hypo
cctctaggaagggcagaaaggccattgcccttctgcatggtgtctccacgacggcccaggacaagccagctcctggtggccgggggcctccatgtgccaccaccacacgggatctccacctgctgtcactaagaaacagggtcatccccatagccgtgctcaggacaagtggctcttgtgtggcttaaaagcgctgctgttgagct

SEQ ID NO: 215933 - DNA, 1225 bp, Homo sapiens
  chr14:91805118-91806343
  hypo
aaactatgtccatccgccactcaggtctccctccctgtgtgtggggcaggtaaggagaccccagcggcagctgtaccaccccacagccaggctccacaggtgacatccatcagctgcaggaaacctgggagaacaggctcaccagattggagggaaggaggggcacctcatccctccagccaagaaaacacatcaggtgtggtcgtcccggccccaagctggagctgagcgtggactggaggctgcttctgtggacaacttgcaccgtctggacgggaggaaaccctgaagaccgggaagaatccccgcccccatccctgtgcaggcctcagaaggggaggcagctagtccgaggtcaaagagtaagctcagggcagaccccagctgactccggggcacacgtcagagctgtgccattggcagcaccacacatgtgagtcgacaccacaccagaaacatgtctgcaacacacacaaaggtaggagaagcagccggggactcacagctcctgcctgacgcgccgcagcctggccttggtgtcggccagctctacggccaggtgctgcttgtcttcgctagagaggctgctggtggggctgggagtggagtcggcgctggaggacttgatggggctgggtggatgctgtgcctgcaggtagtcccgttcctgagtgaggtccacgatcagctgcagccgggcagagagggggatggaggagaacaaacggggttaaccagcacaacgcctgagcttgaacagggtgaagaaaccgccaaaagacagatatttcagcggagactaagaaacgaggaggaaggtgggaaaaggctggcatgggttttgaaaagaggtgaaatatttagtgaaacaaaagggagtgtacgaaggaggagggccccaagctccgcgtcctgattccctgtatcctcccacaggcccgaggtgaccatgcactgcaggggccgtaaccagggaaagcacgcacgtcccacccccaccagaacctcagcagcaggaccgaggcgtctaggctgaagatgaagggagaggagatgaaggggcctaagccccttcccaggctgaccgggccaccgacccgcggacgcacctcggtgcactcgtcccgctggtcgatgagcctccgcaggtggagcaccatgctcctcgacagggcctccagctcctccggagccacgtcgggcagctccagccactgcaggtcaa

SEQ ID NO: 215934 - DNA, 104 bp, Homo sapiens
  chr14:91825112-91825216
  hypo
ttggggttataggagtgagccactgcgctcggcctcattgagtctttcaaactcacactgagcgtcagagactgcggggacctagaacgcgtgcctgccaggag

SEQ ID NO: 215935 - DNA, 53 bp, Homo sapiens
  chr14:91841581-91841634
  hypo
agggttagcatgcgcgcgtgtctgtgtgtgtgtgtgcgcgcgcgcatgtggga

SEQ ID NO: 215936 - DNA, 236 bp, Homo sapiens
  chr14:91842554-91842790
  hypo
tcctgaaacacccaggtgctcgtcgccgggcatatgcatgtctggctggtggtgggggcgctgtctgctcctgctccctgaccttggtcgccatcttctgcgctttgcacactcatgactgcctcgattttatatccactcatgtgttcattcactcacccaacaagcgtttagtgagcccccgtcccctcaaggcatgtgctaggagccagggcgttatagtgaatggaaacaga

SEQ ID NO: 215937 - DNA, 189 bp, Homo sapiens
  chr14:91848934-91849123
  hypo
gacccagagaagacggagaaatacacaaccaccaaagctggggatgaaattaaatctgacctcagcccaagaagtaggtacaggcatgcatagatgctcccaaggactacctggcctcctacagaaaattcaagggacgaccttgtctgcttggatttttggcacagactcaagcgaacactccaaacc

SEQ ID NO: 215938 - DNA, 207 bp, Homo sapiens
  chr14:91850943-91851150
  hypo
cactattgtgctgcacactacgcactggcaccgggaggaaagggtggccagcctaccccaactgcacacctgggacgcccatcagctgctctctccaacacgtgcggctgctctatggtgcagggccagctggggaaccaggcttgtcaatgtgctgcgaacaagcccagtgtgctgctggactccggatcctggagtcctccccca

SEQ ID NO: 215939 - DNA, 144 bp, Homo sapiens; identical to SEQ ID NO: 203720
  chr14:91976436-91976580
  hypo

SEQ ID NO: 215940 - DNA, 199 bp, Homo sapiens
  chr14:92492743-92492942
  hypo
ataataagaacataatggggcgccccactggctgctctgaaaagccatctttgcattgttcctcgtccgcctccttgctcgccgcagccggcagctttatcgccagagtccctgaactctcgctttctttttaatcccctgcatcggatcactggcgtgccctaccatgtcagacgcagccgtggacaccagctccgaa

SEQ ID NO: 215941 - DNA, 187 bp, Homo sapiens; identical to SEQ ID NO: 203723
  chr14:92980770-92980957
  hypo

SEQ ID NO: 215942 - DNA, 319 bp, Homo sapiens
  chr14:92994813-92995132
  hypo
aacagagtcaagaacgtagtaggcgttgtttccatggtcttctgaagggccctggttccacacccccttgtccactccactcacagtttgcactgcctcttgtgaccccgtgggggtgtggacggcatgatcatctgggaaatggggggcaggtccccagcgccaggtctgcccttgcttactgtgagacctctccgatcattgcttcttccattcatgcagtgtggagatacagggctgcactgtgtcccgggtggagtgtgagcagtgtgtagcacagcagccccgcacagtaggcacttcgcagcaggcatgaaaa

SEQ ID NO: 215943 - DNA, 207 bp, Homo sapiens
  chr14:93423289-93423496
  hypo
agtctgggagccacacgcccagctaggaaggccacctgccctcggaggaaaatgaacacctgcacgtttccaaagtatccacgctctgcatgtgtccatggaaagagaagaggcatctaggggaagaagggctgagagggcaaccgcagcactgcagcccctccatgccgggcggcacaccagccaggagatgtggatggccacagg

SEQ ID NO: 215944 - DNA, 459 bp, Homo sapiens
  chr14:93454159-93454618
  hypo
cttcctcaccccatgactcccggactgggggagggcactggcttccacacggcagacgccaggacggcagctcacgcagactcagaccagggctagccttggtcccagctgccgcctcatgccggcaacgcacctacccggcctggtctgcagctggcgcttagccgccccagggcaggggagccacaagcacaatcctgctctgcggagcctcccctgcactgaaagggcgggtctcagcctgggtggcagacaacagccgatgtgaaaacaaaaacagtggtgctcccacacatccctgaagtccaagaaagggaaccacaaaccaagcacctcccctgagagaccctacctccctggcaccctgtcctccctcattccagacccttcgatggggcacgctgtcccctcacctcagccctgtggtctgggcaggctgacactgggggaggcatgggc

SEQ ID NO: 215945 - DNA, 189 bp, Homo sapiens
  chr14:93486022-93486211
  hypo
actgcaaacaggctgcggtctccctccactagctagaaaagagatgggcccttgggtgcggcccccacaggagaaagggcccagctcctgagactggggaggccacggagaaaaggacactgtgcagggggatgcccggggggaaggacaccacagaggcaggtctcccagatgcgatggggacaggaa

SEQ ID NO: 215946 - DNA, 46 bp, Homo sapiens
  chr14:93525816-93525862
  hypo
ggggtggagggggtgcgggtctcaaggtgggcgcaggtgctggtca

SEQ ID NO: 215947 - DNA, 260 bp, Homo sapiens
  chr14:93533308-93533568
  hypo
cgactgctgaggaatccagtgtttgcatccgagtttctccatctgcacccagattccctaggatcacactctgagtagcaatgctatggataccttcaccccagaatgccaggacagtcagctactttaagagcagaatcttgcttctggccctttctaaaacccccgttccatcccttcctatttcccctgtgtacttcattccatctcttttctttgcttttacgtaaaatgcttacctggcacgctccactgaggcc

SEQ ID NO: 215948 - DNA, 33 bp, Homo sapiens
  chr14:93570836-93570869
  hypo
ttcctgacatcgatcgacggcagctggatgctg

SEQ ID NO: 215949 - DNA, 256 bp, Homo sapiens
  chr14:93706463-93706719
  hypo
tctctttaaaaaaggagcctcgaatgcgatgcacagccgacctgcagattagtgttaactctgggagctcgggagcgtgcaccaccaccagtgtcaccgagcgcacccgcacagcagctaaccagtcaggcagcagaacgagtggcggcagtttgccggggcgtgcagacacacgacatgtttcccatcttggagactatctactgttcggcttttctaaaatgtcagattattcctgagtgtatatccacagggt

SEQ ID NO: 215950 - DNA, 85 bp, Homo sapiens
  chr14:93763605-93763690
  hypo
catgtttaaaaatatcgttaacatttgtgttttcctacaatcttttatagactatatttatatgaaaattaattatttatttaga

SEQ ID NO: 215951 - DNA, 216 bp, Homo sapiens
  chr14:93813480-93813696
  hypo
gggcgagggcagagcgccccctcgtggctggggcgcctgcgcaaaccagctgcctcacgagcactggagcttgcgttacttggcctcacctcacctgtgctgtccacgcctggctttgtctcacctgacgcgatatgcctctcctgcgtgggcgctgtcctgcccgccgccactaccgccgcttggccctgctcggcctgcagcccgctccccgct

SEQ ID NO: 215952 - DNA, 351 bp, Homo sapiens
  chr14:94209923-94210274
  hypo
caaggagccgatgtcggtgaatgtgcttcccaagactccgaggttaagttcagcctttgctgtgggaaaccgaaggcagaagcacctgggctgggagttgtttctctgtcttaaaaccagtgtgggcctggtgactcggccatggggagcagaggtgaaaggagtcacagccctgcttcagggacagtctcatggcaccgctggtcctcagcgtgtgcaggggtcccctttggcaccactccctcccgcccaccaaagtgtcttgaggaaactgtccagaatgtcacggaaaagtgcaaatgcacgggactcggtgcgcgctgaaagggggcgggacgctgaaaagcactt

SEQ ID NO: 215953 - DNA, 224 bp, Homo sapiens
  chr14:94404860-94405084
  hypo
caggcgtgagccaccgcgcccggccaagttctgacttttaaagtaacaacatggacgtgtcctgcctctgggtcgctggctttctgcttctgacctgaccctacaccagcctgctcttgacatgcctttccggatcgtgcttgtttcacatcgcattccaggtgtaggtttgctggaggtgacgagcctcttagtttggcagagttctccgctccatcattggt

SEQ ID NO: 215954 - DNA, 71 bp, Homo sapiens; identical to SEQ ID NO: 203730
  chr14:94640376-94640447
  hypo

SEQ ID NO: 215955 - DNA, 36 bp, Homo sapiens; identical to SEQ ID NO: 203734
  chr14:95864478-95864514
  hypo

SEQ ID NO: 215956 - DNA, 47 bp, Homo sapiens; identical to SEQ ID NO: 203735
  chr14:95932542-95932589
  hypo

SEQ ID NO: 215957 - DNA, 35 bp, Homo sapiens
  chr14:96015607-96015642
  hypo
gattacaggcatgagccaccgcgcctggcctttaa

SEQ ID NO: 215958 - DNA, 295 bp, Homo sapiens; identical to SEQ ID NO: 203736
  chr14:96152751-96153046
  hypo

SEQ ID NO: 215959 - DNA, 40 bp, Homo sapiens; identical to SEQ ID NO: 203737
  chr14:96342210-96342250
  hypo

SEQ ID NO: 215960 - DNA, 60 bp, Homo sapiens; identical to SEQ ID NO: 203738
  chr14:96342530-96342590
  hypo

SEQ ID NO: 215961 - DNA, 76 bp, Homo sapiens; identical to SEQ ID NO: 203739
  chr14:96505691-96505767
  hypo

SEQ ID NO: 215962 - DNA, 80 bp, Homo sapiens
  chr14:96547952-96548032
  hypo
tttgagacagggtctcgctggcacgcagactggaaagcagtggtgccatcagacctcactgcagccatgatttcctgggc

SEQ ID NO: 215963 - DNA, 202 bp, Homo sapiens
  chr14:96653271-96653473
  hypo
gtgttggtgcgtgtgcgctggtatgtgcgacgtgtgtttctgtgtgtgtgcatatgtgtatgtgttgtgggctacttccgattgggcggtcaggcaggcttctctgggagaagtgtcacttgagccaaagtggccaggggacccggctatggaagatgagacaatcagggtgatggttggaactggccgcccccaggattag

SEQ ID NO: 215964 - DNA, 141 bp, Homo sapiens
  chr14:96911952-96912093
  hypo
caccactgcctgccagcctgggcaacagagcgagactcaaaataaataaataaatgagtgaataaataaataaatatagaaaaaaagaaatgaatacaaaataaatgtgaactgcacatttggaagcgtgcattcgattta

SEQ ID NO: 215965 - DNA, 37 bp, Homo sapiens
  chr14:97338413-97338450
  hypo
ttgtaggcgtgagctactgcgccgggcctctagcagg

SEQ ID NO: 215966 - DNA, 57 bp, Homo sapiens; identical to SEQ ID NO: 203741
  chr14:97685959-97686016
  hypo

SEQ ID NO: 215967 - DNA, 117 bp, Homo sapiens
  chr14:99651822-99651939
  hypo
ccagacacagagaaccggaggtgcccaggccaaggagggaaaggtccgcaaggtagggagctgtgtgagcacactcaaggtgcagggcgctgggccacgcgacgcagaaagcagctc

SEQ ID NO: 215968 - DNA, 77 bp, Homo sapiens
  chr14:99707131-99707208
  hypo
tgttagcacattaacgctaggaatattgctccttacgattcatctagccacgcgcgagacgccgctgtaacagaggt

SEQ ID NO: 215969 - DNA, 165 bp, Homo sapiens
  chr14:99880379-99880544
  hypo
caaatgaagcaggcggcgtccagccgcgctacagagggatcatcgcgctgttatgctctcatacatcactgtcaacttaatttgttgtgcccagcagccgccataaatctgcttcttcatatttcgatactagcacccacagacaacgcgcaaaacacaatttaa

SEQ ID NO: 215970 - DNA, 205 bp, Homo sapiens
  chr14:99893210-99893415
  hypo
cctcgctcggccaacgagggcagaggccttgcctttcatatttacctactccccaccttctgcctcccccacactgcatgccccacatgctgcaatcagtaactcaggtggggacgcagggagaagcaggcggtgatgtcagggttttacttggcaggcaagagagcgtggggggcagctggggagcatccggagcgcctcctgt

SEQ ID NO: 215971 - DNA, 100 bp, Homo sapiens
  chr14:99975812-99975912
  hypo
ctgcctgtccctgctgcacacgcagcacgcacacacacgcagcacgcacagacatgcagcacgcacgcagcacgcacacgcacacacatgcacacactcc

SEQ ID NO: 215972 - DNA, 61 bp, Homo sapiens
  chr14:99976343-99976404
  hypo
acatggggcatgggcccatgcgttgggccacagaggaggcgggcagctgctccctgctcct

SEQ ID NO: 215973 - DNA, 1190 bp, Homo sapiens; identical to SEQ ID NO: 203750
  chr14:100069898-100071088
  hypo

SEQ ID NO: 215974 - DNA, 321 bp, Homo sapiens; identical to SEQ ID NO: 203751
  chr14:100071268-100071589
  hypo

SEQ ID NO: 215975 - DNA, 1097 bp, Homo sapiens; identical to SEQ ID NO: 203752
  chr14:100149750-100150847
  hypo

SEQ ID NO: 215976 - DNA, 62 bp, Homo sapiens
  chr14:100587318-100587380
  hypo
tcccaccatccccatcgccctgactcctgtggaatccaagctcagctcgggcgacgagaggt

SEQ ID NO: 215977 - DNA, 66 bp, Homo sapiens; identical to SEQ ID NO: 203756
  chr14:100613202-100613268
  hypo

SEQ ID NO: 215978 - DNA, 199 bp, Homo sapiens
  chr14:100615563-100615762
  hypo
ttgagcacctccatgcgggtcacggccttggggtggacgcagagcggccgtagtgagtagaagaagggctgcagcaccagccagagcagcttgcgggcgggtgtgcagaagaaccagccctccagacgcgtgggcacgtccacgtccagcccgtcgccgcccaggtagcggtggtggtccacgtggtacttcttgaagg

SEQ ID NO: 215979 - DNA, 87 bp, Homo sapiens
  chr14:100644135-100644222
  hypo
tagtggactcctcccaggctcgtcctccttcgccacccattcccagcgcattgccccccgccagccaggtccccaggcctcccaatc

SEQ ID NO: 215980 - DNA, 147 bp, Homo sapiens
  chr14:100644252-100644399
  hypo
gaggagggtgctttgcactcgcggttccccccccgggagcattgatacccccgcccctgggagcattgatcctcctgcccctgcagcccggagcccggagcagcccacgttgctcccgctgcggcccagcccagcccagcccagccc

SEQ ID NO: 215981 - DNA, 180 bp, Homo sapiens
  chr14:100684886-100685066
  hypo
cagtgagcgaggtcctgcaggacagcacgtgggaggccctgcctggtcctgccgtggcctgctccacaggcttcagtctccccaccctggtcctgggcgcacccagtgagctcctgtaaactattataaaagcccacgtggaagctggcagaaatgggccctttttgttgtgactttgtt

SEQ ID NO: 215982 - DNA, 205 bp, Homo sapiens
  chr14:100749240-100749445
  hypo
cggggcagttcttgcggcttgctttctcacacacaggactgggaactcccaggatttggtctcacaccagcaagaaatgcttctgtaacctttcagctccaaggtgggctcaggagcaagagggcgttttaaagagagcctcacccactgttcagaaagcacagcccagtgaaatgcccacgcagccggacctatgagcccatgt

SEQ ID NO: 215983 - DNA, 151 bp, Homo sapiens
  chr14:100749475-100749626
  hypo
tggactcggaagaacttgaccaaatacactgagagctacttaggatttagccaaaagcaaaatgcagagcagagcttcctccctctggttggggccttggtgtctgatgttctgcagagcaaggttcagagtgaggcgtgaagttcattat

SEQ ID NO: 215984 - DNA, 34 bp, Homo sapiens
  chr14:100754246-100754280
  hypo
tggctcagtggctcacggccgtggtctctcccac

SEQ ID NO: 215985 - DNA, 370 bp, Homo sapiens; identical to SEQ ID NO: 203757
  chr14:100773262-100773632
  hypo

SEQ ID NO: 215986 - DNA, 198 bp, Homo sapiens
  chr14:100847790-100847988
  hypo
ctcccagaagactaagacagcggcaggcattaagcacggagacaggcaagggtaaagacgtggagccacaggggccccctgcagggcgtgccccagcccctctctacgtgggcccgggagtgtctgagtttattcagccatatttgaatagccattataaagaaaccacagttccccggaaagtgcttttccacctga

SEQ ID NO: 215987 - DNA, 360 bp, Homo sapiens
  chr14:101004203-101004563
  hypo
cggggcaggggaacagcgggggctggggagaggtgaggccggcccttctggggcacgtgggctggcggggagcgaaccacggccaggcctgcacgcaggcgctcagttgagcaaggttccgtagagctgggccttggtgaggctgtccttgcggctcagccccgagccaccagtccgcggaaaggcctgctgggggctgaggcgggcggcaggatgcatttccggggaggcctccatggagctcggctccaaggagtccctggaaccctgctcgggctcagggctgctggcggtcccacacagctgcaccccgagcctgtccccgtcccccccctcgctgggtgcatagccgggcagtgg

SEQ ID NO: 215988 - DNA, 110 bp, Homo sapiens
  chr14:101133882-101133992
  hypo
gactcagcctttcagcgtaggagggagactgaggctggagagggcgaggcaggagcctggcccacatgcagggccgggagtctccctgggcagcagagggtctgggcaga

SEQ ID NO: 215989 - DNA, 190 bp, Homo sapiens
  chr14:101134022-101134212
  hypo
ggtggctgggcaccctgcccgaaatgtcctcggtcacccactcacgttccaggaggcaactgggccccgggaagcgaattctccaggcctcctgaggagcattcattagccacgcacacagatggagagcagcggcgcccgggaggccggaagcggcccctcgctgctcgccagtggatcaaatgttccc

SEQ ID NO: 215990 - DNA, 78 bp, Homo sapiens; identical to SEQ ID NO: 203758
  chr14:101192402-101192480
  hypo

SEQ ID NO: 215991 - DNA, 42 bp, Homo sapiens
  chr14:101250330-101250372
  hypo
caggctgcatgatgtcatttcggatgcattaagctggaacag

SEQ ID NO: 215992 - DNA, 269 bp, Homo sapiens
  chr14:101348432-101348701
  hypo
ccggtttggtcgtcgatttggatcagggaggcgtgcagggccgtgccggtgacgccggtttccaagtagaatgggttctggggcttggggtggtggaggagaggcgccttgcggaaagccctcttcaggcactcgaaggcctcttgctcctcgactccccagtagaactggtaggagctcagcagctgccgcaccaggggctctgcgatgatgctgaagcgctccacgaagtggcggtaggggaagacgaattcgatgaagtttcgcag

SEQ ID NO: 215993 - DNA, 432 bp, Homo sapiens
  chr14:101349270-101349702
  hypo
caggttcccaaggcgcggtggagggacactcgtaaaaggtctcgctgtgatcactgtctccagcctgctgaagctcagagggctctgattcagaaagatcatcggatccgtctgagcttggctggtcggaagtctcatcatctgcttccttcgggttaaacacgtcggccaggtctgagtatgggtgtggcagtccgggtagcaggctcatgccgtgcctctctagggcaatgcatggcgggggcgggcggaagcagttcttcaggcagtagggagagtggaaggtgcagcggcctttgatccagtcgacttcgggggcgtggactcggagccagcggatgcctaggaccacagagaagttcggtgaaggtacgatgtcaaattcgatggactcctggtggttctggtggatacacaccaggggctccgtgt

SEQ ID NO: 215994 - DNA, 32 bp, Homo sapiens
  chr14:101349750-101349782
  hypo
ccggctgtgggtacggcttctcgtagagctcg

SEQ ID NO: 215995 - DNA, 441 bp, Homo sapiens
  chr14:101489766-101490207
  hypo
aacaacgctgtcttcggggaggaacggttggacccaccaccacttctccatgacacccgaagagatgattttctgtatggcatgtgtttttctgcatgatgcaaaatggcataatctcgctcctcttaaatcaagttctgccttgggaaatcgcgccatccctggggaggagaccttgattcttcccggaatcagtgccattccatggtgctcaatgacgtggttgactacgctacgcttattcagtagacaccgtgacctgcttcttctcagcgtcaaatgcagcctagaagaagcgccctcaggcaacttcgtggacatgagccttcttccagccaccaccaccaccatcgtgcggtacttgaagaaatggtttaccgtcccacatacattttgaatatgtatgtgggatggtaaaccgcttcttggtatccagcccag

SEQ ID NO: 215996 - DNA, 220 bp, Homo sapiens
  chr14:101491464-101491684
  hypo
ccttcgtgggagacacactgatctggcttcagcgccattccacagtacttggagagatggtagagcataaagcatatgcattgttgaatgacagatgtagcatggtccactcattctcagtatcagccagccctggggcttcccggaggccatgccgacttgagagccaggcctgagtggtagccagggtgcagtgcaggtcaccgggtggttggctgca

SEQ ID NO: 215997 - DNA, 274 bp, Homo sapiens
  chr14:101579008-101579282
  hypo
ccaggaactgcctgggaacacggcctggagggagggcccccgggcgtttgtgccttgaagtggcgcagtccctgtggcccatgcacacccgcatgcttagaggatgtgcaggcaccggacatgccccacgctgggttctgaggccgcaacagtaaagcgggcaccgtccctgccttggtgggctctggggctagtggatccggctgacagtgcaggcagctgtggccccctcagggtggcgcagggacctggcgatagggtaaggaaagttctg

SEQ ID NO: 215998 - DNA, 50 bp, Homo sapiens
  chr14:101638848-101638898
  hypo
atgatggaaggtgaacggacagcaggaacatcaaccggtgagagagggag

SEQ ID NO: 215999 - DNA, 89 bp, Homo sapiens
  chr14:102093963-102094052
  hypo
cgtgagccaccgctcccggcctcaccttccacattttctacaatgaacaagaagaacttggcaagtcaagagaagaagcaaagccatag

SEQ ID NO: 216000 - DNA, 113 bp, Homo sapiens
  chr14:102094128-102094241
  hypo
ctgcgctggggttgaggcaggaaccaagcttggggccaaccgactgcgtgggacgtggctcccggatctgcccctcaccagctgaggacaccggagcgtctctctccaggact

SEQ ID NO: 216001 - DNA, 166 bp, Homo sapiens
  chr14:102293900-102294066
  hypo
ctgttgctttctctcgcgaagcttctaccattttctgctgattcttaaaatagatttggatcttgtcaattttggtcgtcaaaaagattgaacttttacaggatgaaatccattattttcctaaattatctcgttttgggaaatcagttctcggccataagtgcag

SEQ ID NO: 216002 - DNA, 270 bp, Homo sapiens
  chr14:102325127-102325397
  hypo
acaaagaatgacaagactcccgctggcctggttcaggtcaaatgcccgcccttgaaccgagtgtgctcccgactgcttgaaaccgcctctcgtttgtatttcacagtagcagtgtgggttactggcaccacttaggatacttaaaagcccttgaggctgtttttatagattaagtcatcattgcctctcctctccctgtcataattgtttcctaacttgattctcctcctgctgtattaacttgtttcccacccaaacctcgcgctgggc

SEQ ID NO: 216003 - DNA, 206 bp, Homo sapiens
  chr14:102343692-102343898
  hypo
gtgctgcctttgttgggcagcgtgattctgcgtctgtgcctctgggtgtgcgctggatccgtaggtctcatttgagagatcacagtgaccctgtgtgctgcccagaagacccgggactccttagacctcagagcttctttggtgttcactgcataacgttgatgtcttctctgtttcctcagaccggatccatgcatccaggtagc

SEQ ID NO: 216004 - DNA, 265 bp, Homo sapiens
  chr14:102355902-102356167
  hypo
ctggcacagagggtagggtgcgtgtcctggggctcccctagaagcaggcgcagtggacagagatgtctcagaggaagggagctgggtctgtcgcagatgggtgcttcagaaagatcgcacctgagacagcacggaggatgcgtgtgggtgtcagtggggaactgggcaggtagaataagaggagttcaggaatcacttctaccctttgcaggaactgtgctaaatattgcgggctttaaaattaagtaagacattggcctatgtt

SEQ ID NO: 216005 - DNA, 209 bp, Homo sapiens
  chr14:102356197-102356406
  hypo
tgaacgagtaaaagatggatgaacagatgtgcgtgtgatcaagcagatggagcacattgctcgtggtcgaatctggtggttgaaatgggtgttcactgtagaattctttccgttttcctagatgcttgaaattttccaaaataaaatattgagaaaaaaattcgtgcaagaccaagttctctgccctcgaggcatttacagctgcaggc

SEQ ID NO: 216006 - DNA, 210 bp, Homo sapiens
  chr14:102360720-102360930
  hypo
gggctttgtctgtaccgtgggtccttgtcttgctgtgggaaggtgtttaacgatgattctagaagaagcacagcagcatttttatgttgaaatgttaatgctctttctccttttactttttagctggcatactgtgtagtgcagtttttagaaaaggacagcaccctcacggaaccagtaagtactgatgctagcgcgtcttgtaagatg

SEQ ID NO: 216007 - DNA, 242 bp, Homo sapiens
  chr14:102467362-102467604
  hypo
tatgagtttgttcagaggcttctgaaaggttacatgaaggtaggtggccagtatcgcacggtgatgagtgtccattagaaacgcacctgcacagatcactttgtttactttctccacagataaatatgctggtgattgaactgaaatccgaagcacttaaagaccgccattggaaacagctcatgaaaaggcttcacgttaattgggttgtttctgagctaacccttggccaaatctgggat

SEQ ID NO: 216008 - DNA, 136 bp, Homo sapiens
  chr14:102493477-102493613
  hypo
ccttaacattgatcagttctcgtaatgtttcagaatattccgtcaacctcaaggccacttgcttctgattggtgttagtggagcaggaaaaactaccctgtctcgtttcgtcgcctggatgaacggtttgagtgtg

SEQ ID NO: 216009 - DNA, 362 bp, Homo sapiens
  chr14:102493651-102494013
  hypo
cccagcaacagatgtgtgtgcagagctcagtgagtaggaatggacctaacttgcctctgcttctgtaggtccataggaagtacacaggggaagactttgatgaagatctacggacagtgttgagacgttctggctgtaaaaatgaaaagatagcatttataatggatgaatctaatgtgttagattctggattcctggagcgaatgaatacccttctggccaatggagaggtaattaggtgacgtgttgcgttgcattacgtgttaccgggggaccagtaagtcagcactgtgctgtttcccaggtgcctggtctctttgaaggagacgagtatgccaccttgatgacgcagtgcaaagagg

SEQ ID NO: 216010 - DNA, 332 bp, Homo sapiens
  chr14:102500550-102500882
  hypo
ggatgtgcgagcagtgtgaggcaagctggtgtttagtgcacagttagagtcttgagaacagtcccatctgtggctgtgaagaggaggaaaggtaacggccttgcctttcagttccgtacagatattgccaggacggaatacctttccaatgctgatgagcgtcttcgctggcaggccagctccttgcctgctgatgacctttgcacagaaaatgccatcatgctgaaacgattcaataggtatgagctcgggtgccaaggagaggcatgggaggaatgtgggtggtgatcttgaatttttttcaaaatacacccttgtttgaagagaggaat

SEQ ID NO: 216011 - DNA, 360 bp, Homo sapiens
  chr14:102516241-102516601
  hypo
tactggctctttgcaggtgacctcggtggcctgagaccattgttcccagatacatgcacttagggtgaccggctggcagttgggtggagcctctgggcgccctgtgactggggtttgtgtagctgttgtgttcacctcagcctgggttttggcttccgcctcacaggtttgaaacttcaaggggccacgtgcaacaacaacaagctgtcactgtccaatgccatctcaaccgcccttcccctgacgcagctgcgctgggtcaagcagacaaacaccgagaagaaggccagtgtggtaaggaggcactgcctttcccaggcattctgcagggacccctgcggtaacaagggcagaggcggc

SEQ ID NO: 216012 - DNA, 224 bp, Homo sapiens
  chr14:102516661-102516885
  hypo
ttcgcacctgtccaaacctctccttgccgggccccatcagctgtcccgggcagtcttccagttttcttacttttcccttaagccaccagtaaacccctctgcttctgcaggtaaccttacctgtctacctgaacttcacccgtgcagacctcatcttcaccgtggacttcgaaattgctacaaaggaggatcctcgcagcttctacgagcggggtgtcgcagtc

SEQ ID NO: 216013 - DNA, 190 bp, Homo sapiens
  chr14:102635326-102635516
  hypo
aatgtgtttctatagcgcttagaataagatctgaattgcttttgatacagtgcttttcccctccccgattccccagtgtgatttgctgccacctcctcctcatttattccatccattgcattccatgaagagcagctgcacccctccccgtcccacccgtggagccaatggtacacgctctgcttagaat

SEQ ID NO: 216014 - DNA, 292 bp, Homo sapiens
  chr14:102650992-102651284
  hypo
actgtgaaatttttacttaacgcatgttacgcactttgtgactgtgtgtctcttctcattttgggatgacatgaaggtgatgttccacacgtcttacatcttgctatttgctgacgtttgacttattgtcttgcctgcctcccctctgtctaattctctgtgccgcctctcaaagccttgctgcggctaaacgcagccccttgaacgtggttggccggggctcattccaggtcagagcccatcagaagcgcgctagagacaatgcaccaacggttggtctttagtgaagggg

SEQ ID NO: 216015 - DNA, 103 bp, Homo sapiens
  chr14:102681974-102682077
  hypo
ctttcagtaggagctcttttcctggctagagttcattgtctgcctactcctcatcttgaatagtgtttgcttaaggctttgtgctggcgtgaggttgtcctgc

SEQ ID NO: 216016 - DNA, 204 bp, Homo sapiens
  chr14:102686024-102686228
  hypo
ctgagtgctgcagcatggggaccctgagttttgatcatgggcacattctctgcatggcgatgcattctaaaagaactgttaaccagggctgccatcaaaagggcgaagcctgctaacgggaacccccagttccgttatgccagtatggactacagaagacgagaggaggacaggtttgagggcggttgattcaagatctctctg

SEQ ID NO: 216017 - DNA, 224 bp, Homo sapiens
  chr14:102695442-102695666
  hypo
tcctaggcagctgcgcgggccgcgggtgcggcagggcgcagggcagcacccagagccccggccagcgcgaaacggacgcaggcgcatccccagccctccgtggcgtctcagcagcagatcacccaggcctggcccggtcgggcttggtgttgcctccgaagtcgagacgacggtgctgctcagttatcttccgcctttccgcactatggtgggcaggcgacact

SEQ ID NO: 216018 - DNA, 233 bp, Homo sapiens
  chr14:102793000-102793233
  hypo
tagggaaggggggactggcccgacattttaaacttaacccaggccacggccagttggaccccgagatggtgctgtctgagaaagccagtggaagcaccctccgggggtgcacggaggaaaggacgctcagcctgacctccctggggctgtccatgccagcggatccatgtgagggaggggcccgctcctgcttggtgacagagtcagcacgcggtggcctgcaggtaatgttt

SEQ ID NO: 216019 - DNA, 80 bp, Homo sapiens
  chr14:102931213-102931293
  hypo
ggggtgccgtgtggcgcctggcaggtggcagagtggccagaggccattattactctcttgagttacggtgttctcaagcc

SEQ ID NO: 216020 - DNA, 638 bp, Homo sapiens
  chr14:102939182-102939820
  hypo
ctcccaggtgctgcccctgccgaggctcccctgggctgaggaaggcgcttctcccgggctgctggcactgacgattgtttgctgagatcagaagtgaagacaagctctgctgccaggcgctcgccttgtgccaggctaatgcctgaagcacatctttccctcagtcctcacaacaacctgggaagtgactgcgtctttccccatttgacagaggagaaaaccctagctcagaggttcagaaagttgcctgaggcctcatagcgggcaggcggcaggggtgggacatagacccaggtgtgtgacacccgcctctgcctctcctgtggctctgaggtccaaggcctgggccaggaccaactgcaggatggcagcaagcaccaggttgtggcgacatgtcataggcttagtggcctcacacgtcgtattttaggacaaagcctacacatgcgaatctttaaatcgcagagggtcctgcaaatgagcccaggagtgaggggagatgggggttcactctgaggactggaacgtcagaagagttggttgaatctgaggattggagaacaagcggggtttatgtattttgattatgttctacatctttccactttgttttatttgttcttcgacttgagcttctt

SEQ ID NO: 216021 - DNA, 168 bp, Homo sapiens
  chr14:102966288-102966456
  hypo
cagcagaggcagccccaggccgggctgcatctctctgtgtctgttgtgccttgcccggcgcctcacggatggcaaagctctcctcacccatgggactgtagtgcaattaaacccgcgtctaggtgatgcttttaaagttgtagcttcgtgctttgtacagttttcttt

SEQ ID NO: 216022 - DNA, 456 bp, Homo sapiens
  chr14:102973276-102973732
  hypo
cctttgccagtgaggtccaacggctgcaggaatgggggcagcggcagctcgtccagggcctcggggaagcggcctggagagatggcggtgaccagcacctgcatggcgcgcgcgaagagcgagggcggcgccaggcccgccagccactggaacttgtcctcacccagcagccgctgccagcgcggccggtcgcccagcagctcctggcgggccgagccggcggcacccacgggggtgtacagcgccaggaggtccagcagcagcaggcggcgctggcgcggctccccgggagctgaggcgggggctccggcggcggagggagtggccccggcgtcgcggcccagctggcgcagcagcagctcgagaggcgtgaggccgccgccgtcccgcagaccgggcgaggcgccgtggcccagcagcaggaagaggcactcggggcgcgccagctcacaggcc

SEQ ID NO: 216023 - DNA, 377 bp, Homo sapiens; identical to SEQ ID NO: 203764
  chr14:102975681-102976058
  hypo

SEQ ID NO: 216024 - DNA, 95 bp, Homo sapiens
  chr14:103046497-103046592
  hypo
agctggaaggacctgggagccgggagagatgccggaggagtcccgcgcgctgcctgtcacagctgtgtgacttcgagacagggctctggccccct

SEQ ID NO: 216025 - DNA, 36 bp, Homo sapiens
  chr14:103109324-103109360
  hypo
aatggaagagattggctgggcgcagtggctcacgcc

SEQ ID NO: 216026 - DNA, 120 bp, Homo sapiens
  chr14:103144544-103144664
  hypo
gagagagggagacgagagggagagggagagggagagctgtttcacagtttttgatgattgtgaataacgctgcctatgtgtgcaggtgcttttttttgtttgtttgttttgaggtggtgt

SEQ ID NO: 216027 - DNA, 173 bp, Homo sapiens; identical to SEQ ID NO: 203767
  chr14:103242390-103242563
  hypo

SEQ ID NO: 216028 - DNA, 206 bp, Homo sapiens
  chr14:103242915-103243121
  hypo
gcgcaggccccagcggcctggtggagggtgcagggggcgcaggggcagccaggaccgccgaggacgctgggggcacgtggcaaactggctaccctgtccacccgtgagcaagacaccactccgggggcgtgggagggtccaagggagggagaaaggaaagtgccaccaaactaatgtggagccctgccctctgcatgcgaaaaggg

SEQ ID NO: 216029 - DNA, 331 bp, Homo sapiens
  chr14:103363985-103364316
  hypo
atgcctttgatctaccgttggagaaataagatgcgaagcttgtatttgttaaattagctgtttttattatttaagatttcatattgttcatgagtagttgctgtgtgcaaagtctcacttcctgcagtgaggtgctgtgcagcccagctactctgtgtgagctttccagtgacacgcgctcacccgctgggtttcactgtggaaatccacacgcacctccagaagaacaaaccagtgaacctttgctcccctgaatagaggcgatgatgtaaaggggactgatgaaatgtcgcttctcctgtcttctgtcgtcacaggtgtctgtggggtg

SEQ ID NO: 216030 - DNA, 384 bp, Homo sapiens
  chr14:103369447-103369831
  hypo
cctggagtcagagccgcgggtggcaggcctcatacaggggcctctgactgttctgctcctagcctgtctgtatttgatggaaggtggtgcagcattttccgagtcctaactgtgttttgctttttaacacctttggtttggaagcgagtgatagacagccaagcagagaaactgaaggagcttgacaaggagatccggcccttccggcagaactgggaggaagcagacagcatgaagagcagcgtggagtccctccagaaccgcgtgaccgagctggagagcgtggacaagagcgcggggcaagtggctcggaacacaggtgaggcaggggccggggccgggccagcagtgtgcatctgggccccgggcgagtgctggggcggg

SEQ ID NO: 216031 - DNA, 61 bp, Homo sapiens; identical to SEQ ID NO: 203768
  chr14:103394622-103394683
  hypo

SEQ ID NO: 216032 - DNA, 136 bp, Homo sapiens
  chr14:103407161-103407297
  hypo
accctagacccctaggaacccgtgctatgggggcgtgggaagcccctctgcagcccggtctgagggcatatgcaagcgaggctaagggcgtcctgcagggagctctggggtccgcgctgtgctcctcacctgctca

SEQ ID NO: 216033 - DNA, 403 bp, Homo sapiens
  chr14:103408404-103408807
  hypo
ctttgcaaaaatgtaaatcctgtgtggttttaaaccctgtgctggctgcctatgaagaggacagggtgttggggggtaagagtccaggacaaggggtgctgaggcagcgggactggccccttcctgcacctcaccgcaggcccacggcccagccccactgcccacacatgtctgctgtggtgtggccatcgggatggagccgggacacactgcagtaagcccgtgggtggagctggccgtgcacctcacaggcctggtgtctagccacgacgccctgggtatgatgccgtctcagcaaggctgacaatggggcagacaaaggggtttagcttcaggtaactgagggagaatgtcattccccaactcttggcctgttacccccatatgcgcggctcgtcttcct

SEQ ID NO: 216034 - DNA, 278 bp, Homo sapiens
  chr14:103410003-103410281
  hypo
catgtgctcagggagagaggttgctgagcccgcctactgctggtctgagacgtgagatctgaaccatgctctctgctgcgggctggcatggggcccacctctcccgatgctctgtgactactcaactaagggactggaagacaaaccaaagcaaaatcgaacacatgctgactgtcggtgggaaaagcagcaacagggatatgcaacagaaaacatatacatactacaggcgacaggagccgcaggccacatgagctcctgcgcgcgtgccctccggc

SEQ ID NO: 216035 - DNA, 199 bp, Homo sapiens
  chr14:103421194-103421393
  hypo
ccactcccagctggccggcctgccctgaggacccctgcacttggcttcctcagctgagtggtgattgcgtgggcaggtggagtctgacaagtcacagtcaccccgctgaggtgagaatttgcctggagacacctctaatgcacagccctgagcatacccgccccctcctgcagcctccttgccccggtcactgaaaggg

SEQ ID NO: 216036 - DNA, 307 bp, Homo sapiens
  chr14:103423609-103423916
  hypo
aggcatgaagatgccgcctctgtctccatctctgctgcccactctccacagctgtgactcacacactcatggacagtactggctgtaaactcacttgctaccgggccctctactctgttaatgttacagaaagctaccgctttcctggccgcctccattcagtgatcaagcaccatctctggttctctggaatccacttattcctccccacagcagtgcccggctccgcagcaacgagagaggcaatgacttgtgcagaaacaggcttatcaaagatctggcgggcacttaccggttaaatagattt

SEQ ID NO: 216037 - DNA, 160 bp, Homo sapiens; identical to SEQ ID NO: 203769
  chr14:103430222-103430382
  hypo

SEQ ID NO: 216038 - DNA, 222 bp, Homo sapiens
  chr14:103433167-103433389
  hypo
ccttcagtgggttggtgggggcgtatctccacctctattccaacagaaccactgccccagacatgagaagttctggggaacagcagtgagacctgcaccccagcctgagaggcacggcctggcgtggagcacaggatcaggcagaagaggcggggcagaccccatggactgagcagggagcggattcacggccgctaatggggccgcgcacgtaccactgaa

SEQ ID NO: 216039 - DNA, 268 bp, Homo sapiens
  chr14:103433869-103434137
  hypo
cgtgaatgcactcacgcaagcctagacggtgcggctgccgcacaccaggccctgtggtacagcctgtcaattccaggccccaagcctgcataccatgttgctgtgcgggacgctgccggcggctgtagcacaatgctaagtatctgtgtatctcaacacagaagaggtagagtaaagtacagtattatgatcgtacgggacgcctgttgtacacacagtctatcattgatggaagcatcgttatatggcacattactgcactgtaaaa

SEQ ID NO: 216040 - DNA, 150 bp, Homo sapiens
  chr14:103442296-103442446
  hypo
ctgtgctccaggtcccgctgcacatcctcatctttggttaatgtgttggactgcattatgctcttcagagagcctcgatcagaaaaacagctgggaaaccaagcaacaggtttttttgatctactgaaaatttagcgatttcattagcat

SEQ ID NO: 216041 - DNA, 213 bp, Homo sapiens
  chr14:103444036-103444249
  hypo
ccctgccaatgctggcggcctattggtcaggggttggcaaactacggcctctgggagaaatctcacccccctggcctctgggagaaatcctgcccgaggcctgtttctgcaccatcacgagcatgaatggttttaacatttttaaagggttgtaaaaagaagaacatacaacaaaggccatgaaacctgaattctttacgacctggatatctg

SEQ ID NO: 216042 - DNA, 276 bp, Homo sapiens
  chr14:103453393-103453669
  hypo
gtggaggaagctggctgggggctgccacacaaagagacggcagtggccagacgaggtccaggaggcaggtggcgatctgggggaagactgctgcaaaccgccccatacccccaaaactgcactttatagatgaagacatggaagctgagccaactgcccacagttacagagcagcacgtgctggagcaggaacataaacacaggtctgtcccactaacgcctgtttctaaactactttctgtgcgctctcaaacacatgtgcgggtgcagggcacc

SEQ ID NO: 216043 - DNA, 276 bp, Homo sapiens
  chr14:103460344-103460620
  hypo
accataatttcacatacacacgaaaaatgtcccaagtggcctgagacaggctaggaagacacagaagagagtaaggaggcgccgagacacgccacaacaggtgttctatggaccgagttagcaggaatgcaacgaccagagtccaggctaaacaggacctggttgccaggaattccctataaaacagggatgtttttccaggggccaccccaggaccaccaacacagtacactctgagaagacaggccgaggaggggtctccggaaggccatcttc

SEQ ID NO: 216044 - DNA, 207 bp, Homo sapiens
  chr14:103468095-103468302
  hypo
ccctcgggcccctaaggaaggccgtggggtcgagtcaagcccttactagctgagccccagccgcgtccacgtctgccgagaactctaagaggaggagcttcctacagcagcactgggtctgatcaacggtctcctggagcatggtctctgaggaaagctaacgcgggagctcgtgaggcagacggcggaggcccactccagaatgag

SEQ ID NO: 216045 - DNA, 1541 bp, Homo sapiens; identical to SEQ ID NO: 203770
  chr14:103523058-103524599
  hypo

SEQ ID NO: 216046 - DNA, 77 bp, Homo sapiens; identical to SEQ ID NO: 203771
  chr14:103541957-103542034
  hypo

SEQ ID NO: 216047 - DNA, 190 bp, Homo sapiens; identical to SEQ ID NO: 203772
  chr14:103593784-103593974
  hypo

SEQ ID NO: 216048 - DNA, 140 bp, Homo sapiens; identical to SEQ ID NO: 203773
  chr14:103594004-103594144
  hypo

SEQ ID NO: 216049 - DNA, 328 bp, Homo sapiens
  chr14:103977231-103977559
  hypo
ctggttaaagggcctgcacgggtctctcacagaagaaggaaagctggtcctgagggtggagccaggggaatctgggggccacttcagcattctttgttgccattggctttggttcagtaagctttgttgatttattttgttgttgttattgttgttagagtgatggggctgattgcttataagttctgaggttcttatttgcgtttccagctccctgggtattcattcatacctggtttctggctgtggtgaaatgtcttctgaccaagtgggttgataaacagggggcttcgctggagcgggggcagggggcgcggtcactgaacag

SEQ ID NO: 216050 - DNA, 34 bp, Homo sapiens
  chr14:103977771-103977805
  hypo
ggacgctcacagcccgcccccaggacctgtgggg

SEQ ID NO: 216051 - DNA, 87 bp, Homo sapiens
  chr14:103977835-103977922
  hypo
ctccgcgtgcacatgggcctccttaccaccctggcagtctcctcctcttggaagttttaactattcaagactcaatggccaggcgcg

SEQ ID NO: 216052 - DNA, 112 bp, Homo sapiens; identical to SEQ ID NO: 203777
  chr14:103989042-103989154
  hypo

SEQ ID NO: 216053 - DNA, 122 bp, Homo sapiens; identical to SEQ ID NO: 203778
  chr14:103989597-103989719
  hypo

SEQ ID NO: 216054 - DNA, 283 bp, Homo sapiens
  chr14:104000853-104001136
  hypo
tgccctctgaccctcgggtcctgtttcccacaggcgggcgcttctgctccttctcaccgtgcatcgagcaggtgcaacgcacatgccaggcgctggcagcgcgcggcttctcagagctgagcaccctggaggtgctgccacaggtctacaacgtgcgcactgtcagcctgccaccgcccgacctgggcacaggcacagatggccctgccggctccgacaccagccccttccgcagcggcacgcccatgaaggaggccgtgggccacaccggctacctgacctt

SEQ ID NO: 216055 - DNA, 437 bp, Homo sapiens
  chr14:104017444-104017881
  hypo
gctgagtggatgcccgcccacctggaacagtgctaggtggggatggggggggggcatcacggggcacacacaagctgtcggaagggccgatgtccacaagggacgagagtcaggggcgcggctgtgggggtggaggcggcctggaagagcaggcatggcacagcggccgctggctcatgtggactggcgaggcactgtcctgctggggccgtcccaaagggaagcatggcccgtcactccccaggctaaaaaccatccacggctgcccctcctcatggctgaagtgcagctcctaggccctaccccgacgctctcaggtccccttctctccctcaccctgtggagagcggacctgcctcctgtccctcggaggactctcaggccccagccctgccgcagcagctcgtggtccagcttggctggccctgcctggccct

SEQ ID NO: 216056 - DNA, 37 bp, Homo sapiens
  chr14:104041400-104041437
  hypo
ctgggcctcgccgcgccccatggctgtcagcgcattc

SEQ ID NO: 216057 - DNA, 155 bp, Homo sapiens
  chr14:104047674-104047829
  hypo
cagacacaagcactgctgtacgacgacagtggatctgatcaccgagacggctgctgagtaactaacgagtggggcgcgtctacactgtggaggtgctggacagagggaggagtcgcctcctgggctggtcggagtaggaccttgggaggtttcat

SEQ ID NO: 216058 - DNA, 1023 bp, Homo sapiens
  chr14:104047889-104048912
  hypo
catttaatattttcagaccccactttacctcgggtaactgaaaccatggaaagaaaaaccatggatggaggggacagctgtgctgccgccatctcccttacacagttgagtaaaccgaggcacagaagaaaatgaagtagccccagatgacgtaggaaatggcagaactgaagggaaaagcagagcagggggctgtagagttaaactgttcttcattccggtggcactagacctgcccgggcggccagaggacacgtggctcctgtcctgtctgccgtgtggctaggggacagccgtgcttgtgctgtgccgtctgagtgtttgtttctgtctgtgggaataaaggggttgccagacaccctccctgctctgtggagggagggtggaatcatgcctttggccactttgcccactcccccttgggccggagcatcagcattagctgtgccacagggtggtatgcgctctgctgaaggtggcaccttcagggaaaggcagtctgccggggaggctagcgagcaccctgggtaggagctgagcgtggcctccgcgcctcctcatgggaagtgctggagatgcaggagcccctgagccagagcccagcgctcttacaagagacctcacttcctgttcggggactggggctgctaagtcagagtgcgcctcctgcacccgccaccctggatgtggttccattccctggtccctgagccatagctggggggcatgagactgtcccctgggctgctttggggaccctacttcagggcagccctgccactccctgtaacgggctgtgggtcctgccctgtggccttcctacctctcttgcgtgtgggtgagcctgagcgtggccaccgccctgggagtgccacagaggcaagcggcactggtcctcatgtgtaaacagccccaccagcacgcggggctggagtagtcaggccgggacctgtcccaggaatgggcaggctgttaacctaggatgcattcaagttaggacacatttcattcccgtgtagcggt

SEQ ID NO: 216059 - DNA, 141 bp, Homo sapiens
  chr14:104048982-104049123
  hypo
acatacctgcctgggtcgtaatcacttgtgaagaaaatgaattatgctgtgacctttagatacgattcacataccataaaattcaccctgccttttttttttttttttgagatggagtctccttgtcgtgccctgcctaaa

SEQ ID NO: 216060 - DNA, 119 bp, Homo sapiens
  chr14:104061735-104061854
  hypo
aacggtgtgctacagcgccttcattcctttccagagtattttcctctgtgatgcatgctctgcagtggatcagcttttgtcgtggatggctgagcgtgaggctgagccacccctgcctc

SEQ ID NO: 216061 - DNA, 114 bp, Homo sapiens
  chr14:104152224-104152338
  hypo
actgtgtaatacacgagtttaaaaattaagagcgattagctgttcactttggtaacaggtagttaagtgtcacacaaggtgttgttgcaatggcatgacggtgacctgttgacg

SEQ ID NO: 216062 - DNA, 140 bp, Homo sapiens
  chr14:104159177-104159317
  hypo
tctgttaacatgatgactagcgtgctgtcagtttgacactaaaacctgaagcactcggtgcagttgctcgggcctcacacagacacatcaggtttacatctgaaagtactgcctcccttccccatcacggaggccgtttg

SEQ ID NO: 216063 - DNA, 149 bp, Homo sapiens
  chr14:104159872-104160021
  hypo
tttgttttttcatgcaggaacgaaataattgtctggccgactcgcgagctctgagtgccagccacactgacctggcccactgagagccagcagggctaggtaacctgtcttgggagtgtgagaccgccccgccctgccacgcccctcac

SEQ ID NO: 216064 - DNA, 144 bp, Homo sapiens
  chr14:104160134-104160278
  hypo
tgttactcggcctgcagccccagtgccaggagccaccccgaccgcgacccggccaggctggctcagggaggccgaggtggcgctgaggtggcttcagcacgctggggattggctcctgctcacggatgctgttgcatttcctgc

SEQ ID NO: 216065 - DNA, 262 bp, Homo sapiens
  chr14:104164990-104165252
  hypo
tgagaaagtggagccgctgccctggaagagctgtgtctgaaccaggctcccagctgtgccacggcccaggcagacgcgttttaaaggcccgagccccgtgtgtcggggcttctcaggcagggctgttgtgcagccgccaccgtgtcagtgggactgggtcccaggtgtccctcgcaccccttcggcactgatcgtgtaggaacaggaggaggggggcaggtggggggcagagagcacccgcagggtccgggctgggcagccg

SEQ ID NO: 216066 - DNA, 57 bp, Homo sapiens
  chr14:104194395-104194452
  hypo
gtttagaagcggttatagagccttcccttcttttcagaggcggaatgtcgtctaaaa

SEQ ID NO: 216067 - DNA, 204 bp, Homo sapiens
  chr14:104194491-104194695
  hypo
aggggaggccctgggcccaggcagcaccttcctccttcccccgggtggaacccggcgccggcgctcgggcgtttgcaaccactgtggctcctcggaggggccggagacctttgcccaatagcacgatgcagacccggttttgagccatctctggggacctggtgtgggagaagggcattctccaggggcatagggtgtgcctcc

SEQ ID NO: 216068 - DNA, 65 bp, Homo sapiens
  chr14:104194750-104194815
  hypo
actgccgtcccagcctcctgtcccctgcctgcccgccgtggggtctgggaccacctgccttcctg

SEQ ID NO: 216069 - DNA, 349 bp, Homo sapiens
  chr14:104202356-104202705
  hypo
gcacatagccctcccggtctccaaggcgagcccaccaccactcagtctcgctttcgtccttgcgcctcaggatggtgagggcgtccccttcgtggaaggacagctcgtcactgttctgggcctcgtagtcccacagagcatacgccacacctttgttcatcacacccagcttttcctgcacccctggagccagagagcaatggtcaggcctcagcagagggtggcctgcagcaagggaccctgctcgaggaacaggacacagtcgtgctgctgccgaggctgctctcagcaggccccacagaggccagcgagggagatgagacactattgaagactagggcccccaccc

SEQ ID NO: 216070 - DNA, 121 bp, Homo sapiens
  chr14:104204087-104204208
  hypo
cagcagtttcaatgtcgcttatggttgaggcaaaaatggcggcaccactctccaccagctgtttgcagaggtgaacgctgttacaagaggcagcgcagtgcagcggcgtcctggaatagag

SEQ ID NO: 216071 - DNA, 88 bp, Homo sapiens
  chr14:104231446-104231534
  hypo
gcccggccaacacagctgttctatagcctgtgtcaggtcataccagtatctgaggtgtttgtcacattttgttcgtgatgtcttattt

SEQ ID NO: 216072 - DNA, 45 bp, Homo sapiens
  chr14:104335355-104335400
  hypo
gggcaagctggggctcagggcggtcagggctggcctaaagacata

SEQ ID NO: 216073 - DNA, 202 bp, Homo sapiens
  chr14:104335677-104335879
  hypo
gagactccgtctcaaaaaaaaaaaaaagacggcaaactggggcagcgttgggtggcaacaagccaaaccagggaccttaaaccaggtctttggtttgatctcaggtggggatctgggttccggaaggctccaagagctgcagttacaggttagttttcaggacagcgtgcagggcatcctggggacacggctgggcatcctg

SEQ ID NO: 216074 - DNA, 82 bp, Homo sapiens
  chr14:104349424-104349506
  hypo
cctgacgggacattgcgcttgtcgaggcgacacagacagacctgatgcagcccctgccgctgctctgcgacccagttccctg

SEQ ID NO: 216075 - DNA, 129 bp, Homo sapiens
  chr14:104353834-104353963
  hypo
gccagggccatgagacgaaagctcagagctcctggtgggagctcggtctcccgccccatccagctggagggtggatggtgccttctcacctctgccccctcatctacccagacacgctgtgccctcctc

SEQ ID NO: 216076 - DNA, 420 bp, Homo sapiens
  chr14:104394018-104394438
  hypo
cctcagcctgtatctttggtccatgtgatcgcctggacctcctgtccgcacctgtttgtgtccagctgtgagtctgacaccgccgcctgagacaccggtttaggaaggaagatgaattcagttatgatccggctgcaaagaacttctcccagatcctcacctcagccatcagggccgcctgccctcccctataaccctgggtggtcctccgtctggcgcattcccccgtatcctgcaggggtctgcctggcgttactttctccgagaccttcctgaccttcttcttgcccctctccccccatattaggtgcaaggatgtcctggtacgtctgacccacgaacgcaaatcccttctctggtttgccttccatctcctcaccctgaggtgctcaagaaacgtatgtagggtcccggtccgct

SEQ ID NO: 216077 - DNA, 381 bp, Homo sapiens
  chr14:104395206-104395587
  hypo
tacacaacccgacgcgcggcccagagcggtgcctgtaaggaagctgagctagaggtttttttttttttttttttttcagttcttaatgtttaacagactagtttttgaggcactcaggttttcaggataacggagcggagggcagaggtcccataggccccttccctcccagagtttcccctgtgagcatctgcgtaaggtgtgggtatttgtgacagtcggcgaacctgcatcgctgcgtcttcgtcacccggaggccatcgttacaggagggttcacgcctcgtactggacgttctgtgggtttggacaaacgcctaacgtcacgcattacagagttcactgacctacagatcttctcggccccactgttcctgcctcc

SEQ ID NO: 216078 - DNA, 63 bp, Homo sapiens
  chr14:104548475-104548538
  hypo
ccaccttgctccaccgtggccagcttctggcctcccctcaccaagccccgggacttcacgtga

SEQ ID NO: 216079 - DNA, 236 bp, Homo sapiens
  chr14:104618440-104618676
  hypo
cgtctgcgccacacacctgcagcagctcacacgggaggccatgcacctgctgcaggcccctgccagccatgaggaccttgacgccccccatggaggccccagcctcgcaccccccagcaccacgaccagctcgagggacacgccaggaccagcgggtcctgcagggaggcagccaggacgagctgggccagacaggaccaaggggctggcctggtcccccgggcccagtgtccagg

SEQ ID NO: 216080 - DNA, 81 bp, Homo sapiens
  chr14:104623761-104623842
  hypo
gtttgatgggggagaggcggaaagtctggcttctggaccaccatctgcctccctctctgcctccaaggagtcctgctgggg

SEQ ID NO: 216081 - DNA, 159 bp, Homo sapiens
  chr14:104641146-104641305
  hypo
cttcccctgagactcagttccgctcccagcgtttggtgggacatggttggtggtgcctgctgtagttttcatcacagtgaccgcagcattggccctgtgctctggggagggtcggggaagcgggggcgtgtaggggagactgggctcggcagctccact

SEQ ID NO: 216082 - DNA, 176 bp, Homo sapiens
  chr14:104645540-104645716
  hypo
atgcctgagcccccgcccgccctgcctcccagggtctggcgtgcgtcagtacaaggctgcggctggcggagcgcaggcagcagcggctgcgggaggtgcaggccaagcacaagcacctgtgtgaggagctggccgagacccagggccggctgatgctggagcctggccgctggctg

SEQ ID NO: 216083 - DNA, 90 bp, Homo sapiens
  chr14:104733749-104733839
  hypo
acacacacgtgcacacacactcccacgcccacacatgcccacatgcccacaagcccacttccccgagacggtagccatgggttcatctgg

SEQ ID NO: 216084 - DNA, 129 bp, Homo sapiens
  chr14:104800476-104800605
  hypo
gctccccagtctctcgtgggttccgggcagtgagtggcagccggagggcccagggcaggtgctgcctgtcaggacctcagcctgtatgtgccgggggatgttcgtgcccaacagaggccacttgtctct

SEQ ID NO: 216085 - DNA, 294 bp, Homo sapiens
  chr14:104800643-104800937
  hypo
ctccttagacagtgccctctcgggccagccggcggctgcccaggtcgggaacagatatgtcgccggcgacaccattatctcccgggcgaacggcgacgtctccgcagccaggcagagcccaggctgccgtgtaattggaccattcagaagtaaattatctgcagctggaaacaagacactgccttttaactcgggcattataaggtcaagactcgagacatcgctgggaaaagcagttattgaaaagcgatgggaaaatgaaatttaaaattcaaagccaccatgggcggcgag

SEQ ID NO: 216086 - DNA, 46 bp, Homo sapiens
  chr14:104854591-104854637
  hypo
ccccttatgcttcatggccccgcagcgtctgccccaaaacaagcca

SEQ ID NO: 216087 - DNA, 185 bp, Homo sapiens
  chr14:104854673-104854858
  hypo
gacagccgcggaccggttgattgctcggggcggccctcgccccgtcggcgactccatcggcaacttcgccgcgctctgatttatgatgggaagaaaatggtcccctgaaccgccaccggctctggtttgggattctgtgtgactctctgtgtggccggcccaccgtttattcacaccactgaagt

SEQ ID NO: 216088 - DNA, 271 bp, Homo sapiens
  chr14:104895986-104896257
  hypo
ccgcatccttgccccgctccagcctctgtaacttagcacgcgtgctcgtccagcggcctttgctctgtgtgtgactgtccgtgttgctgctcaggttgccctgcgtttaggcagcaccctatccgttcatccgtcccactgcgggcgcagcaccctagccagtcattcgtcccactgcgggcgcagcaccatatccattcatccgtcccactgaggaggcagcaccctatccattcatccgtcccgctgcgggagcagcaccctagccagt

SEQ ID NO: 216089 - DNA, 85 bp, Homo sapiens
  chr14:105102963-105103048
  hypo
caggaacggtggtcgtgtgggaaaggatacatttttacgcacacgcgtctccgggccattaacgggccgcgcgtccatctgtgtc

SEQ ID NO: 216090 - DNA, 137 bp, Homo sapiens
  chr14:105103508-105103645
  hypo
gcccgagacctgtgtcgccacccactgaggaacgggcaccacccgtcgcccgagacctgtgtcgccacccactgaggaacgggcaccacccgtcgcccgagacctgtgtcgccacccactgaggaacgggcaccacc

SEQ ID NO: 216091 - DNA, 114 bp, Homo sapiens
  chr14:105153068-105153182
  hypo
cttctgggcctgcaagtggccgcctgctgcatgcagggctgtcctgactgcacggcggcgccaacatcaggctgggaggatttctctcagaacgcccacacctgcctgcctgtt

SEQ ID NO: 216092 - DNA, 56 bp, Homo sapiens
  chr14:105181888-105181944
  hypo
cctgcaggcaggacgcaacctcagtgctggccccgggcatgcgggcctcgagaggg

SEQ ID NO: 216093 - DNA, 208 bp, Homo sapiens; identical to SEQ ID NO: 203784
  chr14:105189965-105190173
  hypo

SEQ ID NO: 216094 - DNA, 148 bp, Homo sapiens; identical to SEQ ID NO: 203786
  chr14:105196124-105196272
  hypo

SEQ ID NO: 216095 - DNA, 157 bp, Homo sapiens
  chr14:105204798-105204955
  hypo
tgccctgtcccagacgcggtgccctgagcggttgttggctggagccttcctgagggtttctcccacggaggggactggcaggggtgggttcccaacatagctggcccagctcatcacccgccggctctacccgcgcagaaagcgagtgagctgggca

SEQ ID NO: 216096 - DNA, 44 bp, Homo sapiens
  chr14:105223769-105223813
  hypo
ccacatgttacatctcgagtcctttctctcgagcctttcttcag

SEQ ID NO: 216097 - DNA, 94 bp, Homo sapiens
  chr14:105236575-105236669
  hypo
tctcaaatgcacccgagaaataaaaaccattaaatacagatcatggcacgaggccgcctctccatccctccaagctatcgtccagcgcagtcca

SEQ ID NO: 216098 - DNA, 142 bp, Homo sapiens
  chr14:105244208-105244350
  hypo
agagaagtggaaaccggtgtgaagccccggcacacccacctcccactcgctcctggatggtccgatctgccccagtatgcaatccccagggccagagtctcgagcccactgccccggaaccgttccccggagaaaagccccg

SEQ ID NO: 216099 - DNA, 58 bp, Homo sapiens
  chr14:105245408-105245466
  hypo
atgctgggaggcccacgtgtccccagcctcccacctagcagggcgcctgggtctccat

SEQ ID NO: 216100 - DNA, 78 bp, Homo sapiens
  chr14:105268575-105268653
  hypo
acactgaagaggcacgagcggacacactcgggtgagaagccctatacgtgtgtgcagtgtggcaaaagttttcagtac

SEQ ID NO: 216101 - DNA, 727 bp, Homo sapiens; identical to SEQ ID NO: 203788
  chr14:105330980-105331707
  hypo

SEQ ID NO: 216102 - DNA, 71 bp, Homo sapiens; identical to SEQ ID NO: 203789
  chr14:105331744-105331815
  hypo

SEQ ID NO: 216103 - DNA, 108 bp, Homo sapiens
  chr14:105350162-105350270
  hypo
cccaggccacaagcacgaggacggcacgcagagtgactcagaggaccccctggccaaggcggcctcggccgctggggtgcccttggaggccagcggggagcaggtgcg

SEQ ID NO: 216104 - DNA, 37 bp, Homo sapiens
  chr14:105457659-105457696
  hypo
ccgggaacactgtttttagagttcttaacagccatac

SEQ ID NO: 216105 - DNA, 581 bp, Homo sapiens
  chr14:105457777-105458358
  hypo
cctcagaaggctctcaaggtcaccttttaacaagtgcatctgttttccagtaacgaatccagaaaactctggagagcccttcagagcatacacaccacgtctacttctcagcgcctctggagcgagtcccgttgccaggagaacttctttcttgttctcggaatagatgctgcgcagaaggtaggcggtttgggttgacacagggctcctgggagtgtggttgaacttcactgtcaccagtggcccttggccgcgcccaaggggtgggtgcaggcagaggtgtgggttcaggtgggttaaagccactaggtggccccataaacgtgtcagggccactggatgactcccgaatgcttgaggcaggagccagcaaagcctagagcaggaggtggggaaaggctctggaaggaacgggcctgagcctgcagcagacaacgcattcagagatgtgcaacagtgtgtgtgcactcatgccactgccgccgccacgcacatgccaccacgcacacgccgccacgcacacgccgccacacacacgcctcacacgccgccatgcacacacctcacgccaccacatgccg

SEQ ID NO: 216106 - DNA, 300 bp, Homo sapiens
  chr14:105469615-105469915
  hypo
caccaaaacagttaattttttaaaaaagaacagcaacacacacaacctgggcaaacctcacgacatgtaaaggccaggccctgcaggtgcccattcacaagcagatcaggcccacaaatcctgttggcaacggtggggacgcacctcccctaccttaacccatagcagctacagggtatcttcccgtgtaaactgttgccaagcggacactgacaattctggcatgttctggactctactatgtacctcaatttttaaaagttaaaaaggaaataaaggggccgggcgtggtggctcacg

SEQ ID NO: 216107 - DNA, 696 bp, Homo sapiens
  chr14:105517523-105518219
  hypo
tggcgggaatggtccgtggccagcacgtagataatggggtcagccacgccgttcaccgtggacaggcacagaaacaccacagaggctgtgtacagcctttcctccaagccgcacatggcgttcctgtctcctctgtagtaggaaaaggcagcggctttgacgaggagaaccaggtggtacggggcgaagcagactaggaagatgacaaccaccgcgatggccgagtgcttcaccttggccttctgggcagcgcttaagcccatgctctgcttgatgctcctgaaaatccggtggttggtgaaggcgatgatggagagagggatggcaaagccaacggtgaacctggcgtagtagtacccggcaatcctgctgtccatctgcagcatgtcaaagcaggtctccttgtcttccgtctggaacaccgggtagtgaacgatcccgacgaggatgaagatgcaggcggagatgaggatggcggtcctccggcggcggcggccccgactctccagcgcgtacaccacggccacgaagcggtcgcaggagatgcagcacaggaagaggatgctgacgtagatgttgcagaagaagatgtaggcggtcaccttgcaggccagcaggcctagggtccagcggtgctggttgcggatatagatgacccagagtggcagcgtgcctgtgtacagcagctcgcagagt

SEQ ID NO: 216108 - DNA, 50 bp, Homo sapiens
  chr14:105533295-105533345
  hypo
ctgggtggtctgtcacgttcaccaggcctcctctgcgcccccggtgaggg

SEQ ID NO: 216109 - DNA, 173 bp, Homo sapiens
  chr14:105538393-105538566
  hypo
aaaccatccatccacactcccgccgtccatccacacgcccgcctgcccgtccacacgcccgcccgcccgtccacacgcccgcccgtccgtccacatgtctgaccgtccgtccacatgcccgccgtccatccacatggccgccatcgactgacgtcagcagacctcagtattcc

SEQ ID NO: 216110 - DNA, 322 bp, Homo sapiens
  chr14:105546626-105546948
  hypo
atttcgtgactgtgcgatgggatggcatcgtgctttcaatctgcactcgcctaatgagaaattatgttgagcgtcttctcatgtgcttatctgccatctgtataccttctgtggcgctctgtttgcgtggctgtgcaatgggatggcattgcgtttaatctacactcgcctaacgagaaattacgtggcgcgtcttttcatgttcgtatctgccgtctgtataccttctgtgactctgtttcttcagatctttagcctttttttttcctttccttttctcttcctctctttttcttttttgagacagtctcactctgtctcc

SEQ ID NO: 216111 - DNA, 220 bp, Homo sapiens
  chr14:105612116-105612336
  hypo
ttgtccaggtggccggagcgtggcaggcagggggtgctcggtggctcttctgcgccgcactccccccaggcctcacagggtggtcgcagacactggcctggggccttctccaggcacctttgccccagtgggcactgggcgctcagggcctcgggctggccggccagcagacaaggcttccatccgcaccacacctgggcaggcacgcacaggagggtca

SEQ ID NO: 216112 - DNA, 219 bp, Homo sapiens
  chr14:105612739-105612958
  hypo
gccatccaggcagcggcagctgttgcagtcttccacccaggagcttccgtgtgggaacggagtgccccgggaccagcaggatctcccgaacccgatcactgtggggagaaggggctcgagggtcagcagtgggcatctggccctcggggctgggtgtcacccatgccccccaacccgccccaacccagggcaatcacacggggcctaccttcctggcac

SEQ ID NO: 216113 - DNA, 57 bp, Homo sapiens
  chr14:105639401-105639458
  hypo
agacaccaaagatgacgccgagggtcttggggatgtccgggtcgtctgcaaaggcct

SEQ ID NO: 216114 - DNA, 668 bp, Homo sapiens
  chr14:105687721-105688389
  hypo
ctgtgacctgaaggcggtcccagtgagggtgacgagactcactgcattctggcgtcggcacacacccaattcttcacgccaggaccactgacgcccacacagccccattggggggactggtggtgccaccacccaagcccaccgcccgagaccaccacacctcccgacagaggatggcagcatccggctctccccatgagaggcacacgcctgaaagatctcccgatgacctcagcgtcccccagggccccatcagaactcactggggtcgctgctctgagaggagatgcattcgcggatggagtctgagatgcccaggctggctgcagtggggagggggtccagcagggaccccagggccggaggtctgccgccccactcggggcttcctgctgcttccgagctgccgggggcaccaccaaggagctcccggtataagtctttgttcaggtggctggccgcggcttccagctcctcgtcctctgtgtcctcctcgccacacaagctggacgcggtgtcctcggtggagcctaggtgtacacaatccacctgttaaccaggcagagggccagggtgcccgcttttgtgacaaaaaacaatgctaccaagctgccaggtaacccatagaacggctgtcagtgcacggtgcctggcggtcaggtgccaaa

SEQ ID NO: 216115 - DNA, 98 bp, Homo sapiens
  chr14:105688874-105688972
  hypo
aaaagaaaaccaggccgcacttcccagacagggggaacacgctcccttgcacttccacgcatggtgctaaccctttggagacaacctgatcagttctt

SEQ ID NO: 216116 - DNA, 442 bp, Homo sapiens
  chr14:105689523-105689965
  hypo
tctcaaaaacaacaaaaaaagacatacacacttgcctttcacataacccagcaatttcactcctcagcaattgacccaaaaggaaatcaacgtccacacaaggacttgtacacgagtgttcacgagcgcatctgaaacagcctcaaacgtgcaatgtcctctaacagatgaatggctacacaccctcagcgtgctgaaggactaccgactgccacacaatacaaacgaacaaaccattgatgcgtgactcaacacacaccctcagcgtgctgaaggactaccgactgccacgccacaacacaaatgagcaaaccattgatgcgtgactcaacataattacactgtgaaaaaagccgaagggaaaaacatatactatgtgatcctactcctacggaattctacagaatacaactaatttatcgtgaaaaaagtagctcactgg

SEQ ID NO: 216117 - DNA, 182 bp, Homo sapiens
  chr14:105739047-105739229
  hypo
caaaggatacgcggcgtgccctccgtacggcagaccaggtagaggcaggcagcaatcacgtgggccatcttccggccgcgggtcaggtgcctgctcacggccatcttgaagaagttgaaggcggtgtccaggcagtgctggttcagctgcagctggttccccaggtggtggatgtggcgcct

SEQ ID NO: 216118 - DNA, 180 bp, Homo sapiens; identical to SEQ ID NO: 203794
  chr14:105781805-105781985
  hypo

SEQ ID NO: 216119 - DNA, 94 bp, Homo sapiens
  chr14:105796585-105796679
  hypo
gagaagcctggggtccgtgtgtgggacggaatggggacaggagcctccgagaagcctggggtccgtgtgtgggaaggaacggggacaggagcct

SEQ ID NO: 216120 - DNA, 420 bp, Homo sapiens; identical to SEQ ID NO: 203795
  chr15:22892204-22892624
  hypo

SEQ ID NO: 216121 - DNA, 118 bp, Homo sapiens
  chr15:22929815-22929933
  hypo
ttcatcaacatgttcgctgtgctggacgagctgaagaacatgaagtgcagtgtgaagaacgaccactcagcgtacaagaggtgagcacccacctcgcgcactgcgggccctcccgaga

SEQ ID NO: 216122 - DNA, 86 bp, Homo sapiens
  chr15:22945063-22945149
  hypo
gaggcccagaagacggacgcggagtaccgcaagctcttcgacctggcgctgcagggcctgcagctgttgtcgcagtggagcgcgca

SEQ ID NO: 216123 - DNA, 142 bp, Homo sapiens
  chr15:22966142-22966284
  hypo
ccaatcccctttagacgtattacactaaaaaagaaaatgtaagtgcacagcagtgtccctacagacagtggaggcacgtcagacagacacccacggaccatggaaactgtaacttcatctttcacagtgagctaaaagaaat

SEQ ID NO: 216124 - DNA, 116 bp, Homo sapiens
  chr15:22968266-22968382
  hypo
agacagacctgtggcggcctttttctacgagcgtaatttggtacaggccatggtgtttctgttggcattggccaaatatgattttgagtaaaatcattggtcgaggctttgatcga

SEQ ID NO: 216125 - DNA, 210 bp, Homo sapiens
  chr15:22968629-22968839
  hypo
ctgtgctccggccccggctgccacatcggacagtgcagcctgggcgagctccagagcagcgcacgtgagggcttgcaaggcctgtgggaacaagtgcacctgccctgccacccacacgtgcctttcagtgacttcaggcacctcagagaaagctggctcagctccaacgcccagggagatgcagccgccggctgggttatactgcagggc

SEQ ID NO: 216126 - DNA, 103 bp, Homo sapiens
  chr15:22979738-22979841
  hypo
gcgtcgccgttctcgtcacaggcagctgccccaccgtcctcgccgtgtctggaagcgcagcagagcccacgagctacctgaggattgcgttgggctcgaggcg

SEQ ID NO: 216127 - DNA, 35 bp, Homo sapiens
  chr15:23077086-23077121
  hypo
ccagcctgggcgacggaaaaagaccctgtcttaaa

SEQ ID NO: 216128 - DNA, 210 bp, Homo sapiens
  chr15:23084862-23085072
  hypo
tactccggtttgtgtggtgttttcctcatgcttacgctagggccgtggattggggaggtgaggtgctttctcaggccatcctatttataaggtcacgcgcgttgaccatctcacccagtcctggggcctgtcacacggacagatgctccctgaagtgtggctgcggtgtgtgtgtatctgtgtgccttagagacagacacatctgcatcc

SEQ ID NO: 216129 - DNA, 301 bp, Homo sapiens
  chr15:25963361-25963662
  hypo
catgctggccctcttggcctcggcccggctgcccgtgcgccggtgggacttggtgctctgggttctgtgcaccacccggacactctggtggctgccgatgctgccgcgctgggacaccgagccccctctgggcaccacctcctcctcctccgagtctgcctcttggtacctggccagacgctgcgctgcggggagagggcgcagggtgaggcatcatgggggaaggctgggcggagcagaaagaaaccattcagtgtgttttaggttccgcgaggcttccggcagggcagccccacaggat

SEQ ID NO: 216130 - DNA, 244 bp, Homo sapiens
  chr15:26026131-26026375
  hypo
tgcctgcaaggccctggaaacgtgggtcacttacaagctccgagaagccgcggaccacctgccgccgcttcaggttggtctctccatccaggttggcggtctcgatgtggcatagcccgtcggggtcactggaggagagcagcagaatgtccgcagggaagatttcgttgcagcgaagacgcacaaagtctcccacgtggatttctttccagaatcggttcacgtatttcttttcttccctaga

SEQ ID NO: 216131 - DNA, 404 bp, Homo sapiens
  chr15:27128173-27128577
  hypo
agtcctccaaatttaccaaacgcactgcaaaagcccccggttgcagagggtgaccctggttactggactgagagcacgagagtgtgccagacgcgcagggtgggtcggtgcagcccagggacctgtgtctgtctttcagagcgcatcactcaggtgaggaccgacatctacgtcaccagcttcggcccggtgtccgacacggaaatggtaggtcccggggcatggctgggcagacaattcttactccgcgccgcaggcccccgcccaggccccgtgccctctgactgcctcgtgccttcctttccactaggagtacaccatagacgtgtttttccgacaaagctggaaagatgaaaggcttcggtttaaggggcccatgcagcgcctccctctcaacaacctcc

SEQ ID NO: 216132 - DNA, 125 bp, Homo sapiens
  chr15:28356786-28356911
  hypo
ctcccgcctggctcgaggacggacgcttctcatcagacacaccaggcagcctacagtctacacagcagcgagcgctctgctgcctggctcaggctctcatctcacgaggacgtttccccatctta

SEQ ID NO: 216133 - DNA, 65 bp, Homo sapiens
  chr15:28390033-28390098
  hypo
tttccgtcacgtgtgaagagcaagttcctccaatccaagctctcccaagccgaagtgcacagtga

SEQ ID NO: 216134 - DNA, 125 bp, Homo sapiens
  chr15:28516951-28517076
  hypo
cccagggccccgcacgcctgctcctccctcagcttgttgtccacacctgttaaggcgggagctggtaccaaacagagtgacagctcaggtgacgtgccctgcacagagcccagtacataggaagg

SEQ ID NO: 216135 - DNA, 176 bp, Homo sapiens
  chr15:28517198-28517374
  hypo
aacaagtgacctcccacacctgtctcatctgactcgctgctattaccaccaaacacacacacgccagagaaaaacactgccgttgacatgcatgctagtcttgctttaaaagtaactagactcgagtgccacctaaacacaaagttccatcatgacactcacgtgcatgtcgccct

SEQ ID NO: 216136 - DNA, 86 bp, Homo sapiens
  chr15:28900534-28900620
  hypo
tatgtgctcctctgacgtgccgttactcagaggtgagtggccgtctcctttccctgtgccctggtgaagagcggtgcagcagcttc

SEQ ID NO: 216137 - DNA, 152 bp, Homo sapiens
  chr15:29101155-29101307
  hypo
aaatttagttcatagtctaacgttgccatttccagtcctcgggggtcccctctttccactccacgcttagttatcaatttgttactctgctttaaaatgtatgttgtttttttgtaatcccagatactcgggagactgaggcaggagaatcg

SEQ ID NO: 216138 - DNA, 32 bp, Homo sapiens
  chr15:29101367-29101399
  hypo
ggcgacagaacgaaactgtgtctcataaaaca

SEQ ID NO: 216139 - DNA, 45 bp, Homo sapiens; identical to SEQ ID NO: 203802
  chr15:29107356-29107401
  hypo

SEQ ID NO: 216140 - DNA, 86 bp, Homo sapiens
  chr15:29111213-29111299
  hypo
gtacctgatatatagcagcccgtcagtatttgttgaaggaaagaaatatgccaccctggccgggcgccttggctcacacctgtaat

SEQ ID NO: 216141 - DNA, 350 bp, Homo sapiens
  chr15:29236505-29236855
  hypo
ttgccatcctctattttgtacgctcagtcaccccagaaaattgctccggcccttggatttacctccgtgtcactgtccatccggtaccctctgcctgggatgcctcctgggtctccatcacccgcctcactcgtttttcctctgcacatggcatctacttccgcccttccgcaggacaccttcccaggctgggtctggaccaccctgcggactcgctcctcgcaatactggccacatgccctcaagcccatctgtttcttagagtcgatgtcccctaaggtgtgagttcctggtgagcaggagaacctgtgccttttataacctggtgtgctgctcggcgtgccgaagga

SEQ ID NO: 216142 - DNA, 743 bp, Homo sapiens
  chr15:29346194-29346937
  hypo
gcccttggagggctatgtgcccgagggcctggagctggctgccctgcggccagagagccccgcgccagaggaacaggagtgccacaaccacagccccgatggggactccagctctgactacgtgaacaacacctctgaggaggaggactatgacgagggcctccctgaggaggaggagggcatcacctactacatccgctactgccctgaggacgacagctacctagagggcatggactgcaacggggaggagtacctggcccacagtgcacaccctgtggacactgatgagtgccaggaggcggtggaggagtggacggactcggcgggcccgcacccccacggccacgaggctgaaggcagccaggactacccagacggccaactgcccattccggaggatgagccctccgtccttgaggcccatgaccaggaagaagatggtcactactgtgccagcaaagagggctaccaggactactaccccgaggaggccaacgggaacaccggcgcctccccctaccgcctgaggcgtggggatggggacctggaggaccaggaggaggacattgaccagatcgtggcagagatcaagatgagtctgagcatgaccagcatcaccagcgccagtgaggccagccccgagcatgggcctgagccagggcctgaggactctgtagaggcctgcccacccatcaaggccagctgcagccccagcaggcacgaggcgaggcccaagtcgc

SEQ ID NO: 216143 - DNA, 156 bp, Homo sapiens
  chr15:29398812-29398968
  hypo
cagctggagaagcacaagggcgagatcctgggcgtggtggtggtggagtcgggctggggctccatcctgcccacggtgatcctggccaacatgatgaatggcggcccggctgcccgctcggggaagctgagcatcggggaccagatcatgtccatc

SEQ ID NO: 216144 - DNA, 427 bp, Homo sapiens
  chr15:29410106-29410533
  hypo
gtctgccccctctttaaaatcgatctacacacatccacgcacatgcgaccccgaggaaacgaaacccactctagaaaacgcgaccttggccgcacctaaagcagccagccgtgagtgcagaccccttggccagcgtggcgcagtggccctgagcagtagtggcatgtgtgtagatcaagtcggatctagtccagctcggttcattagcgatccatgtaatctgacgtcatcttgtctcgaagtctctttttttggcccaggccttgaagaatacactgtgacttaagaagccttaccacgcagtaactaaagctttaggatgactgtattcgaggagtgccgtgtgttgcatgcagctacccgtaggaagacttcgcgcatatcactaataaacctgaagtcgtgatgaaaagccgtgtgtgtgact

SEQ ID NO: 216145 - DNA, 172 bp, Homo sapiens
  chr15:29410566-29410738
  hypo
cctttcattcacagcttggatgcggctctgcaaattcactatgcggtggcagccacagctgctctgtgctcctcctggatcctgaaccttggaagctgtcactaatgagttcggtgggtgggtgctctgggcaccaggtgtcagctgggcaacgccccgctgcaactggagg

SEQ ID NO: 216146 - DNA, 61 bp, Homo sapiens
  chr15:29415482-29415543
  hypo
tctgccaagaacatctgtggcgccaggcgttggtgtccacggtcagaaatgtggctccttc

SEQ ID NO: 216147 - DNA, 294 bp, Homo sapiens
  chr15:29415573-29415867
  hypo
cggcctcctcctcgaggcgctcctcgttggtgacagccaagcgcatggcacccaccatgtgctgtgcctcggtggggagggcacagtgtgagtgttccaaaaacttggccaccaaaaccctggcatccgcataggccttgctgtccactaaagagcgtggccgctctttggaggtcgctgggaagggctctggtgttggccgttggtcagttttccaggtatctgggtcccccgctggtgaaagctgggcccgacaggcagccgtggcagagcgagacatggaagctaaaaatc

SEQ ID NO: 216148 - DNA, 260 bp, Homo sapiens
  chr15:29417874-29418134
  hypo
actgggtgtgagttctccagcgccgggggtgcccaagactcccggggagctactgtgaaatgcaaattcctgcgctgctggccacagggacctggtgccaggtcctaggctccagggcactgcccgcagacacagtcgcatggggcgatttttgaaagctctgggctgtgtggagagccaagctgcctgggaaatgctgctgaaaacgcacctgtgtctgcgtggggcggctccagctgatgacacccccatgcccagag

SEQ ID NO: 216149 - DNA, 128 bp, Homo sapiens
  chr15:29418534-29418662
  hypo
tgcacctgtgagcccatgccaggatcctctggagacacatggccagggggaagggcaggttcggagggtgctggggcgcccacagggccatcgggggatgggctggaacctggcgtagcagtgccctc

SEQ ID NO: 216150 - DNA, 60 bp, Homo sapiens
  chr15:29428200-29428260
  hypo
ctaccagcacaaagctcagacgcacctgggctgtgactcgtggctgcagaaatggaactg

SEQ ID NO: 216151 - DNA, 64 bp, Homo sapiens
  chr15:29448969-29449033
  hypo
gtggaaacatgagatgcctgcgcgtgggccagggactgtgggagagaagcagtcttaacgaaca

SEQ ID NO: 216152 - DNA, 307 bp, Homo sapiens; identical to SEQ ID NO: 203809
  chr15:30113559-30113866
  hypo

SEQ ID NO: 216153 - DNA, 319 bp, Homo sapiens; identical to SEQ ID NO: 203810
  chr15:30113984-30114303
  hypo

SEQ ID NO: 216154 - DNA, 431 bp, Homo sapiens; identical to SEQ ID NO: 203811
  chr15:30114349-30114780
  hypo

SEQ ID NO: 216155 - DNA, 249 bp, Homo sapiens; identical to SEQ ID NO: 203812
  chr15:30114810-30115059
  hypo

SEQ ID NO: 216156 - DNA, 120 bp, Homo sapiens
  chr15:31188901-31189021
  hypo
tcctaggctccagtgatcaccgcgctctgtcgtccaaagtcctgggatcacaagcctgagcctccatgccaggccgatctattcctttctgattaataaattacgccgggcgcggtggct

SEQ ID NO: 216157 - DNA, 55 bp, Homo sapiens
  chr15:31194968-31195023
  hypo
tcaataattacacaacgctagccactgctgcaggcagcagcgattttatagtaaa

SEQ ID NO: 216158 - DNA, 34 bp, Homo sapiens
  chr15:31290000-31290034
  hypo
tttaaaacatatctgcaggccgggcgcggtggct

SEQ ID NO: 216159 - DNA, 33 bp, Homo sapiens
  chr15:31290274-31290307
  hypo
aaacgagactccgtctcaaaaaaaaaacaaaaa

SEQ ID NO: 216160 - DNA, 157 bp, Homo sapiens
  chr15:31395008-31395165
  hypo
gtgagtggctcccacgtgctttgctggagcgcgcacagcccctgggcgcacaatgaccgcagcagcctccctggcctggctcccgagtcttctttcttgaactggtgttggctcctgaggcctgagagagtcacggcttcagcgggaacccttccgg

SEQ ID NO: 216161 - DNA, 315 bp, Homo sapiens
  chr15:31533287-31533602
  hypo
acgaggctcagacatgcacagcccgccatggctctgtcctccatcgcactaacacttgggtggcaaacgcagaggaggactggcatctactggccaagtaaccttgtccatttgattacttagtgcctctcccgggtggattcaaacatccttacaccccgtgcgcaccctcatacgtctatccactacctcttccctggggcctttctgtccctgaacttctggtctcctcccaggctcctgaccataagcccagccactccccactgcccataaatccacggatgtttttaccttgggccttggaaacatgaa

SEQ ID NO: 216162 - DNA, 40 bp, Homo sapiens
  chr15:31533632-31533672
  hypo
tgcccattaggaagatgttcatcgtcggcagatggtgact

SEQ ID NO: 216163 - DNA, 261 bp, Homo sapiens; identical to SEQ ID NO: 125434
  chr15:31620800-31621061
  hypo

SEQ ID NO: 216164 - DNA, 200 bp, Homo sapiens
  chr15:31851205-31851405
  hypo
gatcaagtcccgctcgatgaagctcctgaaatcctcgctgtacacgctcaggtctggcaactggaatgtgtagattggcatctccagggggaactgctcgttgttgcattcacttgccacgtgggaccgggccagggagacgatggctgagctggcgtgggaaatcccccgggaaagccgcttttctgcagggggagaag

SEQ ID NO: 216165 - DNA, 631 bp, Homo sapiens; identical to SEQ ID NO: 203817
  chr15:32162667-32163298
  hypo

SEQ ID NO: 216166 - DNA, 34 bp, Homo sapiens
  chr15:33550215-33550249
  hypo
agagcgagactccgtctcaaaaaaaaaaaaaaga

SEQ ID NO: 216167 - DNA, 172 bp, Homo sapiens; identical to SEQ ID NO: 203819
  chr15:33603879-33604051
  hypo

SEQ ID NO: 216168 - DNA, 165 bp, Homo sapiens
  chr15:34395571-34395736
  hypo
ttgtgaaagtcagtctggttatgtgtggaatgcgcttgttcacacagggcctggcatgaatttgaaagattcagcggatggcctgaaatcatcacgcattgttcttaccttggtcaatgaccttcttggccaagggtattgtgtcttcctcgataactttaatat

SEQ ID NO: 216169 - DNA, 82 bp, Homo sapiens
  chr15:34546026-34546108
  hypo
atactttaaagtattcgcactagggagttgaaggaggtggtgaatgatgagagagtacttaatgggtacaaagtacattatt

SEQ ID NO: 216170 - DNA, 120 bp, Homo sapiens
  chr15:34630947-34631067
  hypo
ctataaagtaccttaaacacatttgtcctactttaattttttgttgttgttcttgtccttttaataaatgctatgtccactttctagtcagactgaaagttccactaaataatacgtttt

SEQ ID NO: 216171 - DNA, 392 bp, Homo sapiens
  chr15:34635789-34636181
  hypo
gtaaagcgaaagagcgtaaagttattttatgaaactggtgaagcatgtttcagcggtcgaaccaagatttaaagttaggtccctaccgcaaattcagcgctctttcttatggtggtgagtagctaataataacgtaataaagtgcaccttctaggagtttttacaatttttaaaagaatatagaagttctccttataagactctcgtttaaagaaatgaaaatgagaaccaaaatatcattacaaagatcatcgttacgccattatttacaatgacaaaagcattggaatatatattaactgtgtaaccagaaaaacctgcacttttttttttttttttttaagaatatggtttggcggggcgcggtggctcacgcctgtaatcccaacact

SEQ ID NO: 216172 - DNA, 43 bp, Homo sapiens; identical to SEQ ID NO: 203820
  chr15:34729901-34729944
  hypo

SEQ ID NO: 216173 - DNA, 37 bp, Homo sapiens; identical to SEQ ID NO: 203825
  chr15:35046833-35046870
  hypo

SEQ ID NO: 216174 - DNA, 129 bp, Homo sapiens
  chr15:35385319-35385448
  hypo
tggcggtggcggtggcggtggcccaggcggcggcggcggacgggagcgtgacaggaggcggttgagagatcgtgaaagatctgggcgattctgagccatgccatttttaccttacgtctgctagaaagt

SEQ ID NO: 216175 - DNA, 80 bp, Homo sapiens
  chr15:35414092-35414172
  hypo
agcggggcatcctgtcggtcttggtcatgagtcgccgggacagcagtttctggtcaggggtcacctcccggtgtactatg

SEQ ID NO: 216176 - DNA, 77 bp, Homo sapiens
  chr15:35529459-35529536
  hypo
taaaacgcgcggccgtgttattgattgaattccagcggcgcgggagcctctgcagagaacgcgagagatgaagatgg

SEQ ID NO: 216177 - DNA, 340 bp, Homo sapiens; identical to SEQ ID NO: 203830
  chr15:37393563-37393903
  hypo

SEQ ID NO: 216178 - DNA, 135 bp, Homo sapiens; identical to SEQ ID NO: 203833
  chr15:38365202-38365337
  hypo

SEQ ID NO: 216179 - DNA, 360 bp, Homo sapiens; identical to SEQ ID NO: 203834
  chr15:38543230-38543590
  hypo

SEQ ID NO: 216180 - DNA, 84 bp, Homo sapiens
  chr15:39415395-39415479
  hypo
atgtagtaaataaaacgaaaggcactaagaaagacatttaatataaaacagtgtcttcttggccgggcgcggtggctcacgcct

SEQ ID NO: 216181 - DNA, 199 bp, Homo sapiens
  chr15:39742868-39743067
  hypo
tgcaggctccaaatgcgagcctcgaagacggcatgaacacggccatgacagctgaggtgggggagtggctggggtcccagagactggtgaggctgagagaatgcacgaggcgcaggagctacattcagtacactgcctcacattctacacagaaacaaacgtcaggtgaatccaacatacaaacataaaaacagtaaca

SEQ ID NO: 216182 - DNA, 158 bp, Homo sapiens
  chr15:39881427-39881585
  hypo
tcaaccacaatggagagcaccggtgtgagaacacggaccccggctacaactgcctgccctgccccccacgcttcaccggctcacagcccttcggccagggtgtcgaacatgccacggccaacaaacaggtacagtcaactagacgagtaaaccagagg

SEQ ID NO: 216183 - DNA, 142 bp, Homo sapiens
  chr15:39971426-39971568
  hypo
caagaagtccaaaaacgctaacggctaaggaataaggaaccctgaatatcttaaaatctagctttacaagccaaagacatcaagacaaatattgtaaggccttgtgcatttgtctgacctgttgcgccgacaaactgacagg

SEQ ID NO: 216184 - DNA, 344 bp, Homo sapiens; identical to SEQ ID NO: 203835
  chr15:40074971-40075315
  hypo

SEQ ID NO: 216185 - DNA, 210 bp, Homo sapiens
  chr15:40423135-40423345
  hypo
attatattaattatcgattgttaataataattattaatattattcctgatatccagggggtcgaggatgacattgcttcctatacctcagaacacgtacacccccatgtgatgttgttcctaataaccagggggtagaggatgacgttactccaaatatcgccgtgggtgtacatcccttctgcgatcttgttgctaatacccaggcggg

SEQ ID NO: 216186 - DNA, 104 bp, Homo sapiens
  chr15:40532821-40532925
  hypo
agacaagcaccagcctgcagtggagaacgcaggaccccgctgcccagaaggagcagccacggtaaggtccccactgccgctgcgtgctccggattcctgggcta

SEQ ID NO: 216187 - DNA, 36 bp, Homo sapiens; identical to SEQ ID NO: 203836
  chr15:40559555-40559591
  hypo

SEQ ID NO: 216188 - DNA, 559 bp, Homo sapiens
  chr15:40631663-40632222
  hypo
gggcctccacctccttgctacgagccctgtctcccagggtgaggcttacaccgggaacctggctgatggtaacggtgaggccatcaggctggaggagtgctggtgtggtcacagccatccccccctgctctgcctgccgacggtcctcctggatctcctgtgggagggctgggggtcagcacacgccatggccccccaggtgcacagagacatagatgctgataggcctacacagagagacaccagtgggacaccagggggcagaggcgccacatcacacatccccaggaccctcaccaagcctctaagagggaccatgcccaccctacccctggccccagccccagaggcgcattgctgagcctgcagggagaccaccacgtgtggggcacagggagcggcagccaagtggtttctcctggccctgtggcagcccactcacctggtacctgcggagcaaggcctggttcttcttgcgcagggcaactatcctccgatccagctctgcgtccttctcctgcctgctcatgggggactcggctctgggagttccctgcag

SEQ ID NO: 216189 - DNA, 33 bp, Homo sapiens
  chr15:40782124-40782157
  hypo
gcggaccgccatcgccggcgctggaaactgctt

SEQ ID NO: 216190 - DNA, 69 bp, Homo sapiens
  chr15:41044231-41044300
  hypo
agctcctccacctcccgccgcagcgccacaaggctggtcagcacaaagtccaggcggtccagcaccttc

SEQ ID NO: 216191 - DNA, 56 bp, Homo sapiens; identical to SEQ ID NO: 203838
  chr15:41046993-41047049
  hypo

SEQ ID NO: 216192 - DNA, 171 bp, Homo sapiens
  chr15:41059265-41059436
  hypo
gaggaggcagggggcgtgcacttaccccagcgcccagcaagcagccagcaagtgtgagtcactacaagagtggccaggctgcctgctgcagacactagctttgtaccaggagcttgctgtgtgcccctcctcaccccccccatcctgtctctttgcagttatgaatactac

SEQ ID NO: 216193 - DNA, 252 bp, Homo sapiens
  chr15:41059466-41059718
  hypo
aagctggaacgcaggggcttccgtgtgctgagcatgacgggggtgggccagacgctggtgtggtgtctgcacaaggagtgaccttctcatgctgatttgcagacggggcacccctgtggaggggctgctgtgggccctgacctccaagctcctgcctcaccgtctgccttgctcctctcttcccaaatcatcaccgccatgggcccagccccaaagggcagtgaatggccttctctgaaaccctgcgtcaag

SEQ ID NO: 216194 - DNA, 150 bp, Homo sapiens
  chr15:41082365-41082515
  hypo
ctgtgttacagatggggctgcgagactctctggggcccacagacccgtctcctgttgctctaattggtcctgaagtgtgggtcacggaaaaagttctcaaagaggagtagaaaattcaggtgtgggccgggcgcagaggctcacgcctgt

SEQ ID NO: 216195 - DNA, 91 bp, Homo sapiens
  chr15:41091048-41091139
  hypo
acagcgttaactcacgacttaatccttcattctggcagccgtggtgccccgccttgtgagtgtgtgtgtaagaatttggcgcttgctggct

SEQ ID NO: 216196 - DNA, 104 bp, Homo sapiens
  chr15:41120622-41120726
  hypo
ccatctccagccagcgctggagctggccccggtcatacttcactgtcaggcggctgggtctccgggacctgggtatcttggaggagtccgggtgggacttggac

SEQ ID NO: 216197 - DNA, 172 bp, Homo sapiens
  chr15:41121306-41121478
  hypo
tgtggtcagattccgcagaagcagggtccctggctggcagggattcttactcagagcgtagcactactgggggcagagccccagctggtagatagagttggaggtcagttattgatggctcccgtaggaccagtgcccccagtgtctgggtgtgtccgaatgtaaactgcta

SEQ ID NO: 216198 - DNA, 260 bp, Homo sapiens; identical to SEQ ID NO: 203839
  chr15:41136857-41137117
  hypo

SEQ ID NO: 216199 - DNA, 44 bp, Homo sapiens; identical to SEQ ID NO: 203840
  chr15:41137147-41137191
  hypo

SEQ ID NO: 216200 - DNA, 78 bp, Homo sapiens
  chr15:41165167-41165245
  hypo
tgccagtagctgccgcaaaggcccgggtgccccaggtctcagaagtctttggcctcctgcctactacttgctatgcag

SEQ ID NO: 216201 - DNA, 33 bp, Homo sapiens
  chr15:41622889-41622922
  hypo
cacgcccggcccgtaatcagtatttgtaaatga

SEQ ID NO: 216202 - DNA, 91 bp, Homo sapiens
  chr15:41732307-41732398
  hypo
ctgaatagtatttaccggtgccctgcatgtgcatattggagtgattgccttctgatcaactgtagtgataatttctttctttttttttttt

SEQ ID NO: 216203 - DNA, 37 bp, Homo sapiens
  chr15:42117757-42117794
  hypo
agcagccttcccagccgctcctcgtggggggcctgta

SEQ ID NO: 216204 - DNA, 146 bp, Homo sapiens
  chr15:42153325-42153471
  hypo
taggcatttgggaagcgaggagggcaggggtgaggtggcaagaatgggtcaggcccacacaggcactctagaagctccttggtgttcgcggtggggcctgcccacagctgcatgggaactgctctagatgacgggtaagtaactgc

SEQ ID NO: 216205 - DNA, 55 bp, Homo sapiens
  chr15:42160236-42160291
  hypo
agcggagtgtgagggcgggaggggacctgcctcctgggccgcgaggatctcctcc

SEQ ID NO: 216206 - DNA, 71 bp, Homo sapiens
  chr15:42167406-42167477
  hypo
tcccctgttccctcacgcttcttcttccctgggggactcaagtggtgctgaccacccgctgggcacacagg

SEQ ID NO: 216207 - DNA, 191 bp, Homo sapiens
  chr15:42192981-42193172
  hypo
tcgcagtcgcagtcggccagcttccagatcttgcccaggacgctgttgggcagcttggaggtcaccatctccttcttggcgttgacacctgatatcttgccattgatgggcgacagagtgtagaagagctcgtcgtagacgggcttgtctttggccacgacccactcctcctcgtcggcgccctccttggc

SEQ ID NO: 216208 - DNA, 110 bp, Homo sapiens
  chr15:42362997-42363107
  hypo
tgttgatgaagtaggcggcgtccaccaggcagagccggggctccttgggggtcagctggctgggcatggagtcaagctggtagtctggtgggaatcgcaggatggtcaga

SEQ ID NO: 216209 - DNA, 44 bp, Homo sapiens
  chr15:42388224-42388268
  hypo
cctgtcatccccatacgcccgccgggatccgctgggggaaccta

SEQ ID NO: 216210 - DNA, 192 bp, Homo sapiens
  chr15:42434610-42434802
  hypo
aggcccaccaggaggcgtgcttagtgacattctccagggaacccaccctcagaacagcgtcccatcaccatcccagggctctgtgggtcagtcccaggcctggagcttcccttacctggggccaggtgtgtgcggaaggtacggttaaccagggggaagtgcagcacaatgggggagcgggggtcctcagcc

SEQ ID NO: 216211 - DNA, 193 bp, Homo sapiens
  chr15:42451757-42451950
  hypo
ctgttcttgccccccgcgtcccctctgctgtgcctaaacacctctcaggaacacttggcagcacgccattgtcagttccaggtccactcatcccctgcgtgttgccgggacccaccttcctgcgctatcccagcacaactctccaaccacaccattgctgaacaaagctggggagtgacggccagggcaggct

SEQ ID NO: 216212 - DNA, 119 bp, Homo sapiens
  chr15:42452409-42452528
  hypo
gagactgaaaactaacagggcggctaccgaggggtgcagggcacagttaccatggagacgtaaaacactacacagaatgcgagccatcgggtccatgcggccagaagcttgagtgctgt

SEQ ID NO: 216213 - DNA, 34 bp, Homo sapiens
  chr15:42562652-42562686
  hypo
gcatagagactcatgcctgtaatcccagctactc

SEQ ID NO: 216214 - DNA, 151 bp, Homo sapiens
  chr15:42784414-42784565
  hypo
atttattattaaacttagcccatacccattccctcagaaacctaattttagtgactaagactatcagataaatgaaatgacattcaggttgataattatgtggagtgtccctcctatattattgagattataacatctctgtttaacaaga

SEQ ID NO: 216215 - DNA, 197 bp, Homo sapiens
  chr15:43020411-43020608
  hypo
gtctcctctggaagcagcgcccgcacagccccagggctcttcctttgacagaacctaaaaggggacagatggggtcagtgatctctgggtatttcagcctggctgcagaagtaaatgccccgagtgcaccaagcccctgacctgggaggctgtaccttggaaggaggcaccgtttgccctcccgccccaccccaggt

SEQ ID NO: 216216 - DNA, 41 bp, Homo sapiens
  chr15:43406098-43406139
  hypo
cctagctgccaggccgggcccggtggctcacgcctgtaatc

SEQ ID NO: 216217 - DNA, 111 bp, Homo sapiens
  chr15:44037226-44037337
  hypo
ctcctgatagtgtgtcgcagcacagcttggctcaagccttgcaaatgctcgatgagagagaaagtatcgatgagacgtgaacgaatggcatcagctcggggaagctgcatc

SEQ ID NO: 216218 - DNA, 32 bp, Homo sapiens
  chr15:44037901-44037933
  hypo
gcgccactgcactccagcgtgggggacagagc

SEQ ID NO: 216219 - DNA, 794 bp, Homo sapiens; identical to SEQ ID NO: 203855
  chr15:44486896-44487690
  hypo

SEQ ID NO: 216220 - DNA, 196 bp, Homo sapiens
  chr15:45439952-45440148
  hypo
cagaagtgcccaggccgaggtcaggaagcagagcgacccttgctgtgtccagaagtgggtcatcacactggtgtgaggccccttttggccagcctgggggttcaggcaggcaggcgggggctctccttatggagtcctccctctcccaggctctcctgaggaaaagtctcgccttatgttccgcatgtacgacttt

SEQ ID NO: 216221 - DNA, 578 bp, Homo sapiens
  chr15:45444141-45444719
  hypo
cagacggtgcaacagttcaagcgcttcattgagaactaccggcgccacatcggctgcgtggccgtgttctacgccatcgctggggggcttttcctggagagggcctactgtgagtgactttacttaccacgagccctgtccctaggcttgcaatgagtgatcgccctgggggtggggcctgcgataagtgccagccctgggtagggtaagtggagcctgtctgagtgaagactgtgcgggggaggcctgttgtgagtggcagccggccagggcctaccgcccctaaccagctctctgtcctctgcactgaccctcgcttgcctgcctgggccccctccacagactacgcctttgccgcacatcacacgggcatcacagacaccacccgcgtgggaatcatcctgtcgcggggcacagcagccagcatctctttcatgttctcctacatcttgctcaccatgtgccgcaacctcatcaccttcctgcgagaaaccttcctcaaccgctacgtgcccttcgacgccgccgtggacttccatcgcctcattgcctccaccgccatcgtcctcacaggcagg

SEQ ID NO: 216222 - DNA, 204 bp, Homo sapiens; identical to SEQ ID NO: 203857
  chr15:45479833-45480037
  hypo

SEQ ID NO: 216223 - DNA, 274 bp, Homo sapiens; identical to SEQ ID NO: 203861
  chr15:45670188-45670462
  hypo

SEQ ID NO: 216224 - DNA, 34 bp, Homo sapiens; identical to SEQ ID NO: 203862
  chr15:45671015-45671049
  hypo

SEQ ID NO: 216225 - DNA, 360 bp, Homo sapiens; identical to SEQ ID NO: 203864
  chr15:45722599-45722959
  hypo

SEQ ID NO: 216226 - DNA, 68 bp, Homo sapiens; identical to SEQ ID NO: 203872
  chr15:48936658-48936726
  hypo

SEQ ID NO: 216227 - DNA, 275 bp, Homo sapiens
  chr15:49268642-49268917
  hypo
ttgcctgctagctgggacagcggtcagtgtttctatcgagagctgagtcctctggccaggacctacgagcagggggacgccagtacaaattactggagccagccgtccggaaggcgcctatgcacacgtgttgtacagcaatgcgaacttgccctggttggggagaagtagcgggtgggaggtgggcaagtttcttcccagcaactatccgctgtccacactccgctactgcctcttccccagagagagaggccgccctgtattctggctgatag

SEQ ID NO: 216228 - DNA, 139 bp, Homo sapiens
  chr15:49658851-49658990
  hypo
ggcaggggacagccgccgctgcggccccatcggactggtgggtggcgggtggggtggcgcggcgcggctcactaggtggggtaggctgggagtcccgccactgcgctgcctccgtggcgggggcggccgggctaggctg

SEQ ID NO: 216229 - DNA, 318 bp, Homo sapiens
  chr15:49698668-49698986
  hypo
gcactgcaggcaggcgtgatcactcagggtgggggagggtctgctgttctccatgcttagcttcactcccacagcagcagctttggcgggagggtggggtgctggccggggtggggctggctagctggctaagtgccggccaaggctccaactgcaatgatggttagtggtggggagtgccgtgggggagcggagtgcacttctgacccagcagtggcagggcagggtgcatacacagagacgtgcacacacacacacactggcagggcaaggaaagcaaaacccacccatacgcatgtgtgccggtacatgtttggg

SEQ ID NO: 216230 - DNA, 217 bp, Homo sapiens
  chr15:49997486-49997703
  hypo
tatcattctgatagtcgtgatataatgtgtcactttgtttaatctgccattgttgaagttcaatatcttttcaagagcttactggctatttggatttcctcttccttcatccattttcaattggattgttttcttattgaccggcccgggttctttctgtgttccacgtacctattagtcccactttgaggcttgtagtttccgtctgtttatggtg

SEQ ID NO: 216231 - DNA, 37 bp, Homo sapiens
  chr15:51016480-51016517
  hypo
aaatgaagaaggagccggcgcggtggctcacgcctgt

SEQ ID NO: 216232 - DNA, 58 bp, Homo sapiens
  chr15:51176888-51176946
  hypo
gaagttttgattctcgttagtatattagtacagggctgggcgcggtggagtatagcct

SEQ ID NO: 216233 - DNA, 185 bp, Homo sapiens
  chr15:51476314-51476499
  hypo
cttccttagcctctgagtttcggccccgacgttggcacatccagctgtgtgcatacctcgctgcccagctcctgcacctcctcccagctaagtcgggaaggcccagcctggtgaggacactcggtatgaaacagagatggctttgctgtggtcttaacctcctttctcctcggatagcctcgact

SEQ ID NO: 216234 - DNA, 59 bp, Homo sapiens
  chr15:52000705-52000764
  hypo
attgggcctttaaaagttttcgctaagtgattttaatgtgcatcaaagtttgaaaacaa

SEQ ID NO: 216235 - DNA, 181 bp, Homo sapiens; identical to SEQ ID NO: 203877
  chr15:52404392-52404573
  hypo

SEQ ID NO: 216236 - DNA, 624 bp, Homo sapiens; identical to SEQ ID NO: 203878
  chr15:52587421-52588045
  hypo

SEQ ID NO: 216237 - DNA, 31 bp, Homo sapiens
  chr15:52968138-52968169
  hypo
acttagtgttaagtacggttatctaattatc

SEQ ID NO: 216238 - DNA, 89 bp, Homo sapiens; identical to SEQ ID NO: 203885
  chr15:55699900-55699989
  hypo

SEQ ID NO: 216239 - DNA, 41 bp, Homo sapiens
  chr15:55806859-55806900
  hypo
gcaagggctggcaagtgtagaagtaccggcctaacaacttt

SEQ ID NO: 216240 - DNA, 37 bp, Homo sapiens
  chr15:55881585-55881622
  hypo
cagacaggagtctcgtccttccggagacagacaccca

SEQ ID NO: 216241 - DNA, 87 bp, Homo sapiens
  chr15:56170930-56171017
  hypo
caactagtagaattactcagcgatgaaatgaaatgaacggatatacaaaataacatatataaatctcaaagaaaagtggtttttttg

SEQ ID NO: 216242 - DNA, 504 bp, Homo sapiens; identical to SEQ ID NO: 203886
  chr15:56285864-56286368
  hypo

SEQ ID NO: 216243 - DNA, 255 bp, Homo sapiens; identical to SEQ ID NO: 203887
  chr15:57598925-57599180
  hypo

SEQ ID NO: 216244 - DNA, 148 bp, Homo sapiens
  chr15:57618572-57618720
  hypo
aagtctgcgatgacagtgctggcatgtggcgcgggggcgcagggtacacatccttgtctcagctgtcccacatggcagcagtgagcgcggacttcgctcctggatgcgctgccctggcctccacctcggtcccggtccctactgattc

SEQ ID NO: 216245 - DNA, 218 bp, Homo sapiens
  chr15:57620411-57620629
  hypo
atttaccgttaacgccagggtcaatttactaaacagtcatcgacgtgtggttccacaagacctctgggtaaattccagaaactgactgggaggaagatagcttgcgcatgaagtcactgaatcctggtcagtgtgactcttgatgatcatctctcagtacaccagaaagcatttccaaagacaggacgccacttggcgtggaaagcctttggaagcta

SEQ ID NO: 216246 - DNA, 129 bp, Homo sapiens
  chr15:57792923-57793052
  hypo
gtaacaaagtgaggccgactttagccaggacagactttttagcaatgcaaaggtagacagcatcctatgaatgaatgaatcggctaactgaatgcttattttaggaacagagggcgctaacattttatt

SEQ ID NO: 216247 - DNA, 376 bp, Homo sapiens
  chr15:57993271-57993647
  hypo
caataagttttttttaattttctctttttatctctagaagtaagttttgacttatcaaatgattacacccatataaccatcaccgcaattaaggtattgagcatccccgtcactcccaaatgtttcctcctgcccctttgtcatccttcctcccagcctctccctgacaccccacaacatccgataatcactgatctgctttctatcactatagatgcgttcgtattttttacaattttatataaatggagtcatacggtgtgtaattttttcctggcctctttctcagtatactcgagattcatcagagttgttgcatgtaccagagtattcgatcatatgcacagactacaacgtgtttatccacttacctact

SEQ ID NO: 216248 - DNA, 154 bp, Homo sapiens
  chr15:58839522-58839676
  hypo
tcttggaagctcagttttctcgtcgaaaacagcggcctcaaggagctgcagtgaagatgcaggcagtggaggagcggagggcacgcagcatacacagcctcctagtaggtgcccaaggaatgcagccgctagcgtccaaggactgcagtgacta

SEQ ID NO: 216249 - DNA, 31 bp, Homo sapiens
  chr15:58896583-58896614
  hypo
tagctctggcgttatctccttaaaggctttt

SEQ ID NO: 216250 - DNA, 37 bp, Homo sapiens
  chr15:59158760-59158797
  hypo
taaaaaaagtgaaaagaggccgggcgcggtggctcac

SEQ ID NO: 216251 - DNA, 84 bp, Homo sapiens
  chr15:59454860-59454944
  hypo
aaaaaaaaaaaaagaaagaaaggtgaaccacctacacaatacgttggccacctatagtcctcaagcccccggaggctctaccaa

SEQ ID NO: 216252 - DNA, 86 bp, Homo sapiens
  chr15:59580024-59580110
  hypo
tgctccctgagctgccgggatagactctggccacctgcaaccctcaactagaaggagtggatcagaaaatgcgtgaatgaatgatt

SEQ ID NO: 216253 - DNA, 132 bp, Homo sapiens; identical to SEQ ID NO: 203894
  chr15:59663973-59664105
  hypo

SEQ ID NO: 216254 - DNA, 420 bp, Homo sapiens; identical to SEQ ID NO: 203895
  chr15:59664451-59664871
  hypo

SEQ ID NO: 216255 - DNA, 164 bp, Homo sapiens
  chr15:59685907-59686071
  hypo
tacattctgcagcatctctctctctcgccgagaagcccttgaatgtggatatcgtaaatcacacaagttcacaaaacaagagtcaatcctagcttgagtttacaagaagataaattggcatccatgtatgatagccagataaaatattgcgcacctgtattttt

SEQ ID NO: 216256 - DNA, 85 bp, Homo sapiens; identical to SEQ ID NO: 203897
  chr15:60289225-60289310
  hypo

SEQ ID NO: 216257 - DNA, 78 bp, Homo sapiens; identical to SEQ ID NO: 203901
  chr15:60690265-60690343
  hypo

SEQ ID NO: 216258 - DNA, 420 bp, Homo sapiens; identical to SEQ ID NO: 203902
  chr15:60884659-60885079
  hypo

SEQ ID NO: 216259 - DNA, 71 bp, Homo sapiens
  chr15:61931913-61931984
  hypo
gtgaggcacgaggcaagaataagacagaacattatttcttagcaagtctgggcagccgatcatttccgaaa

SEQ ID NO: 216260 - DNA, 95 bp, Homo sapiens
  chr15:61932014-61932109
  hypo
gctgtaacgttccattttactaacctttttatccaatttgaaaatacaaatagagctctcagggtgtaattagcggcaatgactcttaatacctg

SEQ ID NO: 216261 - DNA, 97 bp, Homo sapiens; identical to SEQ ID NO: 203912
  chr15:62456139-62456236
  hypo

SEQ ID NO: 216262 - DNA, 291 bp, Homo sapiens; identical to SEQ ID NO: 203913
  chr15:62456395-62456686
  hypo

SEQ ID NO: 216263 - DNA, 130 bp, Homo sapiens; identical to SEQ ID NO: 203914
  chr15:62457008-62457138
  hypo

SEQ ID NO: 216264 - DNA, 187 bp, Homo sapiens; identical to SEQ ID NO: 203915
  chr15:62457296-62457483
  hypo

SEQ ID NO: 216265 - DNA, 240 bp, Homo sapiens
  chr15:62753947-62754187
  hypo
taagaggcgcctactccatgcgaggggaagagcatgcacaggagcactcacagaaattgctggtggctcaagagtggcctggtgagcgcagagtgaccagctgttggctagaccctatccaagctgaggaagtcatggcctgggacatttaacttctcattgttggagtcaggaggaagggctgtatctgtctgtacttttaactaggctgggcgtggtggctcacgcctgtaatcccag

SEQ ID NO: 216266 - DNA, 99 bp, Homo sapiens
  chr15:62776552-62776651
  hypo
aagttcaactgaaacggaggtcattcattttgtgaattatcttcagagatccgctggtccaaggaccatggttttttttttcttttttttgagacggag

SEQ ID NO: 216267 - DNA, 38 bp, Homo sapiens
  chr15:62776891-62776929
  hypo
gggattacaggcgtgagccaccacgcctggctggaccg

SEQ ID NO: 216268 - DNA, 32 bp, Homo sapiens
  chr15:62791806-62791838
  hypo
tctttgtttttgagacggagttttgctcttgt

SEQ ID NO: 216269 - DNA, 180 bp, Homo sapiens
  chr15:62792078-62792258
  hypo
ggcataagccaccgctcctggctgcaaagtttcaaagtttctttaaaaacaagcaaagaaacaaacaaacaaacaaaaaaaacagtcaaaattacaattcaggtgagggaggaggagtgaaggtccaaaacagatggtgggcgttggtggttttctcttgtttaaaatgaatgtaggcca

SEQ ID NO: 216270 - DNA, 180 bp, Homo sapiens
  chr15:62799429-62799609
  hypo
tgtttttaatgagatcgtgcttcgaggttggtttctcaagacgaagttatcagtcagcacaatttgggaaaggtgggggtattctgctatggaataccaaagtctggtaactggtcatctcattgagacccccgtgtgatgcttgagttgcccacctcccgcaaccgagtccccatcaag

SEQ ID NO: 216271 - DNA, 73 bp, Homo sapiens
  chr15:62828095-62828168
  hypo
tgtgtgtgtatgaaccgttctcacttttgacaaatgcgcaaagtcttgtgactgctaccgctctcaacatttc

SEQ ID NO: 216272 - DNA, 40 bp, Homo sapiens
  chr15:62880086-62880126
  hypo
ttttttttttggagacggagtctcactctgcagtccaggc

SEQ ID NO: 216273 - DNA, 52 bp, Homo sapiens
  chr15:62898023-62898075
  hypo
tccccaagctgcaagcgaactacccttcccatcttcacgaaatgtctcttca

SEQ ID NO: 216274 - DNA, 97 bp, Homo sapiens
  chr15:62959085-62959182
  hypo
cttgttacaagatgccgggcctcacccccagagcctcttatccagcaggtgtgggatgaagcctgaacactggcatttctttttctttttctttttt

SEQ ID NO: 216275 - DNA, 184 bp, Homo sapiens
  chr15:62968124-62968308
  hypo
ctcaggaaagtgatacgctgtttagttgtttaactattaggtttcacagatttctgcttgttttgctttgacccctttggcctctcgcctggggccgtggagaaagctctaacttatagtcagtcttcttgtgttgctttctgcaaatggaagcaaaccagccgtgttgcggctgcatccaggg

SEQ ID NO: 216276 - DNA, 263 bp, Homo sapiens
  chr15:62993097-62993360
  hypo
aagggagaatttgcacgccattgagtatctcttgctccttaagaggcctgttaaggatactgtttaggataacttaagggccctgtcggtgctggcctcataagaagaatgtagccaaaatgctggtgtgattttatggcggggcttctccggtctcctgggtaattctgtgctgtgattgtgttgtgccgttgtctggctttgcaggcatctagggtatgggttcagaacaaagtcgacgaatccaaacacgaaatccattc

SEQ ID NO: 216277 - DNA, 263 bp, Homo sapiens
  chr15:63000749-63001012
  hypo
aagcagggaagctggtggaccgctcggtggagaactgtgtccgtgcctgccaggcggccactaccgatagtgagctcctgaagcaggtcagcgcagcggccagcgtggtcagccaggccctccatgatctcctgcagcatgtgcggcagtttgccagccgaggcgagcccatcggccgctacgaccaggctactgacaccatcatgtgtgtcaccgagagcatcttcagctccatgggtgacgctggtaaggcactgtgctgt

SEQ ID NO: 216278 - DNA, 212 bp, Homo sapiens
  chr15:63029147-63029359
  hypo
acaaccgaccccgcggccgcccatgccatgttagattctgctcgagacgtgatggagggctccgccatgctcattcaagaggccaagcaggccctgattgcacctggagatgcagagcgtcaacaaagactggctcaggtgaggctaggaatgagaaattgtggttgtcatggtcatcattaacgtggacatgtggtcgggctgtctcctgg

SEQ ID NO: 216279 - DNA, 93 bp, Homo sapiens
  chr15:63059823-63059916
  hypo
cactgcgcccggctggcatatttcatttcttagctgagtttctttatacggcaattagaaaagggcttgtccgtctgtctgaagaggtttgca

SEQ ID NO: 216280 - DNA, 127 bp, Homo sapiens
  chr15:63060546-63060673
  hypo
cactccttgactgtcgcgctgatccctgctttcgtaatcacattgtcacctgctcttcggtgtctcttctgtctcttagatggacacttgttattggatttagagcccgtcccggtaactcaggaca

SEQ ID NO: 216281 - DNA, 82 bp, Homo sapiens
  chr15:63062564-63062646
  hypo
gaaagaggcctgtgcggaggcagtggttcctgtcgggataagctttttttgttctcccaagttgggcgaatcataaacagag

SEQ ID NO: 216282 - DNA, 194 bp, Homo sapiens
  chr15:63066065-63066259
  hypo
agatatgttttttaaaaaagcggcagcccagaacctggtgttaatgaattacctgcttaccgaggcgtttgcagtgtagcctctccctcactccattgagctcttctgcggtattctctaccccgcagagctcccttctccactcatccccaccccgcccaattcccttctgcggcatccttgatgggccacca

SEQ ID NO: 216283 - DNA, 323 bp, Homo sapiens
  chr15:63068856-63069179
  hypo
tccattgtgggggtatggttttatattctacttttgaaggttattcttagaagactgagcaccgctctcttctgcttaaggaaatgtttcacaattcccttctcaggcacaacacacccatgacgccatcacagaggccgcccagttgatgaaggaagccgtggatgacatcatggtgacgctgaacgaagctgccagtgaagtggggctggttgggggcatggtggacgccattgcagaagccatgagcaaggtgggcatgggctctagggctctctactcccttatctccctcacccatgggcctcgcgtgcttttctcta

SEQ ID NO: 216284 - DNA, 322 bp, Homo sapiens
  chr15:63075603-63075925
  hypo
gaccccccagggctgcgctggcgaggggctggcacactcacctgccagagggtgggccctgggcactggctccaagctgcacagcccgaacgctgagcatgtgcccactgggcccggccagaatctgtggcctgagcggggccctgcgagggctctggccttttgtgtgcaatgcagcatgggcttggcttgaattgccctctccagcatctagccccaaatgcaaggcctggccttcaccccctcaggagcttaaaagtgaatgaaaccctttggcttccagtgatattaacacatggttctcatgcgtttctctctgtgt

SEQ ID NO: 216285 - DNA, 156 bp, Homo sapiens
  chr15:63084827-63084983
  hypo
ttgcctctgcagatcggattccagattcgcactcgtgtgcaggacctgggccacggctgtatcttcctggtgcagaaggcaggggccctccaggtctgccccacagacagctacaccaagagggagctgatcgaatgcgcccgtgccgtcacggaa

SEQ ID NO: 216286 - DNA, 654 bp, Homo sapiens
  chr15:63086976-63087630
  hypo
ctgctgagatctcagcagcacgggggacagagtgtctcatactccatgcctcttgctggcacggtaacacagtgactcccctgccctggtcagcatgtttgaagaaatctacctacgaaacgttgtcagattcttctttgggtcgtagtcaagggtagtgggtgtgtgcacgcagaggttaatacaaagactcaaagagcctccagccactagcctgacacatgcgatttacattgggtgcattgggccatcctgagggcaagaacggtgtgctgtggcgtcccgggaggcagggctgtctctggaagaggagagcagggggaggtgtccggggctcagctgttttgcaggctgcttgaggcacaggatgatacatccgtgcttggtggcttttccttcttccttcactttggcatctgacggggcaactagttcggtggctgcgggagaggggcaggagtcgttgcaggcagagcgcagacccagggtggagaggtgggagtgtttgggaaagtcaggagctggcgggtgtggtgagagccaggtgaagcggacacatgaccagaaacggagctcagccaggggagatttgtaagcagggtgttagtgtggtcaggtttatgtcataggaaagtacctcggagcagtgagggt

SEQ ID NO: 216287 - DNA, 263 bp, Homo sapiens
  chr15:63088321-63088584
  hypo
acaggtctccttggtgctctcggctctccaggccgggaacaaaggaacccaggcatgcattacagccgccaccgctgtgtctgggatcattgccgacctggacaccaccattatgtttgcaacagcggggacgctgaatgcagagaacagtgagaccttcgcagaccacaggtacgtgggggtcctggacggggagaggttcaggctggcctgcccctgaaactcatgatcgacttggagacgccacctgggagccagaaatg

SEQ ID NO: 216288 - DNA, 205 bp, Homo sapiens
  chr15:63089567-63089772
  hypo
agccagcctgggctccgacgaccccgagacccaggtaccagcagggcctggggagtgcgtcctcccggtcttcccgtgaacgctgcacatcgggcctcagaagaggcctaaggcagaacaggaacttttgaagtagacaatgtgtgtgtgagtgtgtctggtttgaggaaccggtaggaggcagtcatccaagcgagatagtggc

SEQ ID NO: 216289 - DNA, 325 bp, Homo sapiens
  chr15:63090012-63090337
  hypo
agtgagtgcgcgtgagcctgcccaggcacggggctgtgggttcagcgactgttgccatagaggtagcgactgcaaccacacgagaggaaaagccagggagtcggggcagagcctggaggaatccagcatttaggaccactttaccgtgcaagtggcacaggagacggagaagcagcagctgctgcagggaggaaagccgcgggcatcatgttgccaggatggagtgtttcaacccaccagagacagagttaagaaagagggaagactgggaactggttattggcctgttccggtaaccatcgagtgccatcgaggacattggtgt

SEQ ID NO: 216290 - DNA, 170 bp, Homo sapiens
  chr15:63115972-63116142
  hypo
gaatgtcagtgagcgctggtgcatgtgctgacagtattgttaatggcgccgtttccacatctgcaggcagacttgtgctccaaagacagttatcggagttgctgcaaaagtgaccaccccctgcagccgtaaccttcaatactgtgcctagtctcgagctcagtcaaacc

SEQ ID NO: 216291 - DNA, 172 bp, Homo sapiens
  chr15:63129979-63130151
  hypo
aatattaattggttcgcgtcccaccctgtgcaagccctcatagtttgcattggtcactttagttcacagaccagatggggcagttaactttgaatgagaagaactctcaactttctgatggcgaaccctcaagcacaagccttcgactctgagggggcgctggacaagaaat

SEQ ID NO: 216292 - DNA, 211 bp, Homo sapiens; identical to SEQ ID NO: 203916
  chr15:63130456-63130667
  hypo

SEQ ID NO: 216293 - DNA, 1053 bp, Homo sapiens
  chr15:63132463-63133516
  hypo
acaggccagaaccagcgtgttttcatggctcagctgggtcattagtctcaaaacccaaacagtgacagaggctggtcgccagagctaagaaagctgttccggatgtgctgcagtgtcccacggtcgcgggagccgtggagctcacatgagcagtggggtgggtcggagggttttctacaaagtgttaggtccatccagcttgttgctttctttctagatcatcgccgcccaggaagaaatgctaaagaaagagcgagaactggaagaagcaaggaaaaaactggcccaaatccgccagcagcagtataagtttttacccaccgagctgagggaagatgagggctaaaggtgcgagcccagatggcgagccccaggggatggccctggctgaactggacagacagtgttcctgagaggctgggcacttagctggaaaccgcccacctccctcccgggtgagcctggagccctgcgtgcttgttctcacatctctgtcccgtcggcactggctgcatgatcgtgatgtcacacggtacaatgtcctacccacaactcctctgccgcctcccctcatgcctcaccgtgtctcaggagagaggggtgcacgtttcatggactgttaccaacaaagaaaagtcagtattatgttgttctcagacactttggcttttgttggtccttctcttaggcctgctcctggacctctttatgatattgtgatagggaaaaaaatcattgacgtcatagaatattcttcttcctctcaggagaagacggaagctggagttggacatggttcataaaagccagaaacacaaacccgtgtggactccgggagggtgactcaggtcctccttccatgtcttgagcactggctcacccagggggtgaaaaattcccgcccctgtttgcacgctttcttgcctccgtgtgtaagctccttgtacaacccagacccatcttgtattttgtggcccagaaaactgaacgattattttgttcctccgtagtccaaagggcagagttgcggaaggccgtcggggcttggtgagc

SEQ ID NO: 216294 - DNA, 89 bp, Homo sapiens
  chr15:63245891-63245980
  hypo
ggccaggcccaacaacgccggccctacggcggcaaaggttcccacctgactccatgcggagaccctatgggtgtcgaccacagcattcc

SEQ ID NO: 216295 - DNA, 47 bp, Homo sapiens
  chr15:63321676-63321723
  hypo
gcgtccatgaaaacacgtgtagtgatgtctcccgcttggatttgccg

SEQ ID NO: 216296 - DNA, 62 bp, Homo sapiens
  chr15:63753619-63753681
  hypo
ggtgcaagaggagcctggggagggagctccaggcctggagcaaaggctcctcctaggggccc

SEQ ID NO: 216297 - DNA, 45 bp, Homo sapiens
  chr15:63772605-63772650
  hypo
tgtctcaaaaaaaagaactggaacgtcagaattggaattttccaa

SEQ ID NO: 216298 - DNA, 350 bp, Homo sapiens; identical to SEQ ID NO: 203920
  chr15:63795501-63795851
  hypo

SEQ ID NO: 216299 - DNA, 343 bp, Homo sapiens; identical to SEQ ID NO: 203921
  chr15:63795894-63796237
  hypo

SEQ ID NO: 216300 - DNA, 244 bp, Homo sapiens
  chr15:63889822-63890066
  hypo
tggcactccagccgcgtgcaggtgtgcagcattgaggactggctcaagagtgccttccagagaagcatctgcagccggcacgagagcctggtcaatgatttcctcctccgggtgtgcgacaggtaggccaccttgcctcctgagcagtgctggccccgctagctctggcttccctcttggggggcagggaagagcaaattacgagaccaagatggctccaccttcggggcgcctcaaactaggc

SEQ ID NO: 216301 - DNA, 58 bp, Homo sapiens
  chr15:63901443-63901501
  hypo
aggtaggcagactgtcgtaaggctgtggagagagacccagagccgtgactggggacat

SEQ ID NO: 216302 - DNA, 77 bp, Homo sapiens
  chr15:64649916-64649993
  hypo
gaaaagagacctcatttattgtgtctgggtgatttggggtttgaaaatattgggaaaatgaatggttggggtaaaag

SEQ ID NO: 216303 - DNA, 240 bp, Homo sapiens
  chr15:64674683-64674923
  hypo
gcaaggcaaggcaaggaaatgaaatgaaacgaaacgaaacgaaaagaccctgccaaatgtggtaagaccacatcgctgtcacacagtgagcataactctaggataaagggtcataatttttttctatctttatgcttaccttctaattactcacaacacccctggggagtgattttcactctctaaataccatacataaaacagaatcggtcaggcatggtggctcacacctgtaatcct

SEQ ID NO: 216304 - DNA, 120 bp, Homo sapiens
  chr15:64682671-64682791
  hypo
gaaaaaagaaagattgaggctatttttgataaattaacaatttgaaatagggtaagaatgatagatgtagtcttctcagtctagaatccagttgtattttgtttggattacacagtatca

SEQ ID NO: 216305 - DNA, 79 bp, Homo sapiens
  chr15:64683091-64683170
  hypo
tcaaaaaaaaaaaaaaattatattccgcctgggaaggaggtcagtgcccgtcggcatgtattacgctaagatactattt

SEQ ID NO: 216306 - DNA, 88 bp, Homo sapiens
  chr15:64865096-64865184
  hypo
tcttgagaaaaaaaagaaaagaaaagaaagtctcctttccaaaaggttgtggctccacgcgggacacgtagttcggctagaaaagcat

SEQ ID NO: 216307 - DNA, 186 bp, Homo sapiens
  chr15:65119040-65119226
  hypo
tggcctcccgaagtcctaggattacaggcatgagcccggaccttatttttcaaatgagaaaaaagcaaggcttccagagattttactgaaggtcacatagctgatatggagagcaaaaccaaacattgaacccagattacctgctcgcttaatcactccatggggcttagctactacaccacactg

SEQ ID NO: 216308 - DNA, 102 bp, Homo sapiens
  chr15:65119640-65119742
  hypo
agaacgagaacttgtctcaaaacaaacaacaacaacaaaaaacaaaaacgaaagtacactccacagtgtgggaggggacccgagatacagaattttcttggg

SEQ ID NO: 216309 - DNA, 33 bp, Homo sapiens
  chr15:65214147-65214180
  hypo
cctggttcggccacttacgaatcctccagatct

SEQ ID NO: 216310 - DNA, 43 bp, Homo sapiens
  chr15:65901233-65901276
  hypo
gttcttttttgtttttgagacggagtcttgcgacatctgtcgc

SEQ ID NO: 216311 - DNA, 81 bp, Homo sapiens
  chr15:66929157-66929238
  hypo
tcagtctgacatgggcgccaccgagccatggaaatgcacttttaattacagcgtggatgtagccggctggacccgagtgtt

SEQ ID NO: 216312 - DNA, 220 bp, Homo sapiens
  chr15:66946022-66946242
  hypo
ggacccactgagcccgaggccctggcatctctctcggggggccctgccacagcctcccagttggtgtccctgcttctgtcctcaccctccagtccattcaccacacaatggccagaggactctgaaaaacacacccgggtcatggcactccccgcctccgaccctctctctacctcctcgccaccacccctgacgtggaccactgaggcccatgccttct

SEQ ID NO: 216313 - DNA, 758 bp, Homo sapiens; identical to SEQ ID NO: 203932
  chr15:66995267-66996025
  hypo

SEQ ID NO: 216314 - DNA, 90 bp, Homo sapiens
  chr15:67011791-67011881
  hypo
tggccttccatctcccggagttctgggggtctgccgatcccgagagccttgttaccctcagtgtcctgggatgtacgtcatccccaaaca

SEQ ID NO: 216315 - DNA, 197 bp, Homo sapiens
  chr15:67049571-67049768
  hypo
ccaatacgcagggtacgggaggaggcgtggtgtgcagccccgacgtctccctctgaaggagtgaacctggtgtctagggggtgtcagacatagcaagaaatgccgctttcctttcagcttggggatcccctccagccaccctttccttaaggaggagtcccccacaatgacagaggttcatgtggactcaggagaca

SEQ ID NO: 216316 - DNA, 480 bp, Homo sapiens
  chr15:67073348-67073828
  hypo
ccggacgccaccaagccgagccactggtgcagcgtggcgtactgggagcaccggacgcgcgtgggccgcctctatgcggtgtacgaccaggccgtcagcatcttctacgacctacctcagggcagcggcttctgcctgggccagctcaacctggagcagcgcagcgagtcggtgcggcgaacgcgcagcaagatcggcttcggcatcctgctcagcaaggagcccgacggcgtgtgggcctacaaccgcggcgagcaccccatcttcgtcaactccccgacgctggacgcgcccggcggccgcgccctggtcgtgcgcaaggtgccccccggctactccatcaaggtgttcgacttcgagcgctcgggcctgcagcacgcgcccgagcccgacgccgccgacggcccctacgaccccaacagcgtccgcatcagcttcgccaagggctgggggccctgctactcccggcagttcatcacc

SEQ ID NO: 216317 - DNA, 142 bp, Homo sapiens
  chr15:67137812-67137954
  hypo
ggggatagcaaggaacgcagtgtggctggagtgagggggacagatgagcgcgtgggcagggatgagactggagaagggaggggccgcacagtgggggggtgggcggatgggggaccctcaaggcaccgagctgccccactta

SEQ ID NO: 216318 - DNA, 196 bp, Homo sapiens
  chr15:67457570-67457766
  hypo
gctctgtctcccccggacagttctacctcctgtgttggtgccacgccacacagagatcccggccgagttccccccactggacgactacagccattccatccccgaaaacactaacttccccgcaggcatcgagccccagagcaatattccaggtaggcacgtgggcggcacaggctggcctgggaggcaggggcag

SEQ ID NO: 216319 - DNA, 233 bp, Homo sapiens
  chr15:68502839-68503072
  hypo
gcccgtgcagggtgcgtgtgctgtgagcaccaactcaggagtgagccgggtccagggctggccctcacctcccagctgcagccttcggagccctcctccctctggcctcagtttctcctgggtaagatgggagggtggaacagatgaagcctcccagcctgggcccgggatctcctgaggctgagaccacatttctgaggtctcccccgactgagggacggggtaggtaggaa

SEQ ID NO: 216320 - DNA, 43 bp, Homo sapiens
  chr15:68506853-68506896
  hypo
aattcttcctgtgatcgctggaccttctcggcagccttgggac

SEQ ID NO: 216321 - DNA, 84 bp, Homo sapiens
  chr15:68624699-68624783
  hypo
cttgcctcgctcacggccctcgttgaagtacatgggtgcgcccaccagcaggacatcagtcacgccgtcgccgtcgatgtccac

SEQ ID NO: 216322 - DNA, 116 bp, Homo sapiens
  chr15:68893750-68893866
  hypo
caccgaggataaaacggtaagtgtggcagaggcctcagcctgcacggagcttacagtcaagagtggtgtgaggtggggattgcggccatgagcgtgcagtgcgaggagggctagga

SEQ ID NO: 216323 - DNA, 258 bp, Homo sapiens
  chr15:69002974-69003232
  hypo
atctcagaaagcctggtgtccgaggaaaggggcacctctcatcaagggacttcttggccgtgtccacccagcctggaccctcatctccctctgcaggtgcggatctgggagatccccgagggcgggctgaagcggaacatgacggaggcgctcctggagctgcacgggcacagccggcgtgtggggctggtcgagtggcaccccaccaccaacaacatcctgttcagcgctggctacgactacaaggtatgcagtggg

SEQ ID NO: 216324 - DNA, 93 bp, Homo sapiens
  chr15:69003955-69004048
  hypo
tccttcaacacggacggcagcctgctcaccaccacgtgcaaggacaagaagctgcgtgtgattgagccccgctctggccgtgttctgcaggtg

SEQ ID NO: 216325 - DNA, 215 bp, Homo sapiens
  chr15:69076663-69076878
  hypo
ctgcaaagccaaggacgagccccaaggcctcagctgggcccctgcagccctgggccgcaccctgtcacccaccatcctcatcctcctcctcatcatccaggccctccacgtagccctcagcatccgagtcaggggcctccttgtcgtcccggtcatagccgtcgagatatgtgagttgcgggaggagcttgaacacattttctcggtagtcgttc

SEQ ID NO: 216326 - DNA, 141 bp, Homo sapiens
  chr15:69322604-69322745
  hypo
attagttaacttacgcgcgacggggagccatcaaagtgtgttgagcaagggattcgcagggatggacctgcattctgaaaagcttttcttcagcaatgttcattttgctgccctggtgccagagggcggaaaacaggtagc

SEQ ID NO: 216327 - DNA, 180 bp, Homo sapiens
  chr15:69322967-69323147
  hypo
ggaaagcagaacaggcggtgtgactggagagtggtataatatactctaattgattctgcatcgtaatgtgatttgggccggaatgatgatcacaacaccaatgagaatttccatgtatatgcaatttccttctcccagatactgcgttaggtgttttaccattatcgagtttccttgagc

SEQ ID NO: 216328 - DNA, 184 bp, Homo sapiens
  chr15:69387167-69387351
  hypo
atcttgtgctgagcccggagcacaatgggagcgggctggcggggtgggttcacagctggactgggagcagcagacatacaggccgtaggcacagacatataaagacagtcatgcagattgcaggatgcctgagagcacagactctcacatgcacaaatacgtgcatgatcgccagtgtgcatcc

SEQ ID NO: 216329 - DNA, 39 bp, Homo sapiens
  chr15:69461181-69461220
  hypo
ttttttaaaaaatttgataggactcgaagaaaaaatata

SEQ ID NO: 216330 - DNA, 214 bp, Homo sapiens
  chr15:69590152-69590366
  hypo
ggacaagcgcatgtcgcacgcacacacacacgcacatgcatacacacccttacaagatgcacagccaccaaaaagcctaataaagcaaggtgcccaagaccacggttcaggatccgtaaaaatggccggagataattgactgcaacctattcactgcaaatggggcaacttgggcccacaaagggccagagacttgacccgagtcacagagtag

SEQ ID NO: 216331 - DNA, 78 bp, Homo sapiens
  chr15:69715405-69715483
  hypo
gggattatagctgtgagccaccatgcccggctgggatcatttacttttaaaatggacttataacgtatacaattgaac

SEQ ID NO: 216332 - DNA, 141 bp, Homo sapiens
  chr15:69883340-69883481
  hypo
aggcagtgtgtggtacccagcggagtgtgtgatgggtgatgggcatgggcggaacactcacacagaagtggcagcgtgccacaggggtggctgcaggggtggccatgcctggggaaacgcgactgcctggtttgtcagtgg

SEQ ID NO: 216333 - DNA, 150 bp, Homo sapiens
  chr15:70126641-70126791
  hypo
tgttccatccctacgctgtgcatatgaacatgaggtgcccaagacttccccttgaggttccagagcccactaaagcagggctttggggcctcactttacctttctcttccctggagaccactgaaatgcactggcgagagagatgggttt

SEQ ID NO: 216334 - DNA, 116 bp, Homo sapiens
  chr15:70342264-70342380
  hypo
gtccagactgtgacggggcacgtgccctctcagccggccggagcgcagccctgaacgctcggctgcctgcggcccatcctccgccatcctcggggcccctcgcctgggggtctccc

SEQ ID NO: 216335 - DNA, 400 bp, Homo sapiens
  chr15:70352913-70353313
  hypo
ttccatgctgtagtccgcagagccccggtgcttctcactggcccggaggctttccgagggtgacacagagttattctggaaggaaaaagagggttcggggttaaaactttctgctgcgtgtaacaattcacacatccgcacacagctaagtgcaggtgacacggaggtcaggggagggaagagaagctgaactcctctctgccctgcagatcgtggctccatcagagccttgccagggaagccttccccactcccctgagactgagtccccggggagatgccctgggcgcatccccaattctcttttgcagctctgcactgctattaaataattaaccctgcagtaagccgtctgccttctggcctgtgggactacgctctgtgagggcgagggtcacct

SEQ ID NO: 216336 - DNA, 87 bp, Homo sapiens
  chr15:70355592-70355679
  hypo
tccaatccaggcctccgcctatctaggcaaactgcctctccgaaaaaatgccactgttagaggatcagtaccgaggcagtgaacatg

SEQ ID NO: 216337 - DNA, 76 bp, Homo sapiens; identical to SEQ ID NO: 203948
  chr15:70391279-70391355
  hypo

SEQ ID NO: 216338 - DNA, 99 bp, Homo sapiens
  chr15:71047985-71048084
  hypo
gcgacaagagggagacttattctcaaaaataaaaaaaaaaaagaatgaatgaaaaccttcctttaccacaatccccaagctgcacgccctctaactccc

SEQ ID NO: 216339 - DNA, 35 bp, Homo sapiens
  chr15:71124501-71124536
  hypo
ggagagcaggggactcgtaccggggcttttctcct

SEQ ID NO: 216340 - DNA, 35 bp, Homo sapiens
  chr15:71164699-71164734
  hypo
gctcggcatcagagggagaccgcggaaagtgggag

SEQ ID NO: 216341 - DNA, 195 bp, Homo sapiens; identical to SEQ ID NO: 203955
  chr15:71184274-71184469
  hypo

SEQ ID NO: 216342 - DNA, 284 bp, Homo sapiens; identical to SEQ ID NO: 203958
  chr15:71407571-71407855
  hypo

SEQ ID NO: 216343 - DNA, 31 bp, Homo sapiens
  chr15:71466447-71466478
  hypo
gtgccttaaaaagacactatcgagcagaaat

SEQ ID NO: 216344 - DNA, 175 bp, Homo sapiens
  chr15:72040756-72040931
  hypo
cagtgctcggtgccctgcggcgtgggacagaggacccgtgatgtgaagtgtgtgagcaacattggggatgtggttgacgatgaggaatgcaacatgaagctccggccgaatgacattgagaactgcgacatgggaccctgtgccaagagctggttcctcaccgagtggagcgaaa

SEQ ID NO: 216345 - DNA, 179 bp, Homo sapiens
  chr15:72462460-72462639
  hypo
tgacggagtaggcgggtctcacacagcgtctttcccgaaagccagaagttctgcttatgcctaggctgggaggaaaatcaacctgtctacctcatctccagtgccaggcagctcgtaggccaggctgagtgaggcctctagccccacccttgaggaggcacactgagagggaggaccct

SEQ ID NO: 216346 - DNA, 135 bp, Homo sapiens
  chr15:72462669-72462804
  hypo
ccaaagtacccgcgcagcatgactgtaaaccatcaggttccgggaaagtaggctgagcacaggaggccttatcaaagctcaggagctgatgcgctgaaggtgtgggaggtggacgcccatcagcctacaggtgag

SEQ ID NO: 216347 - DNA, 41 bp, Homo sapiens
  chr15:72471183-72471224
  hypo
ggattacagttgtgagccacccggcccggctgtcttgcact

SEQ ID NO: 216348 - DNA, 1074 bp, Homo sapiens; identical to SEQ ID NO: 203962
  chr15:72522952-72524026
  hypo

SEQ ID NO: 216349 - DNA, 204 bp, Homo sapiens
  chr15:72992555-72992759
  hypo
ggcatgagccactgcacccggcctgaacatttatttactggttttttttgtgtgtgcatgtgtgtgcaagttttcacttgaataagtgcctagggagtggaattgcttggtcatatgtgaactgtttgttttaactttataataaactgccgaagtattttccaaagtggttgtacagttttacccgaccgccagcaacgtgtg

SEQ ID NO: 216350 - DNA, 268 bp, Homo sapiens; identical to SEQ ID NO: 203966
  chr15:73344037-73344305
  hypo

SEQ ID NO: 216351 - DNA, 84 bp, Homo sapiens
  chr15:73735440-73735524
  hypo
ggtgggccctggggcgctccgcttactgattggttcgatgccagattggcaggtccccgccggcagtgcgtgtggtgaggcagg

SEQ ID NO: 216352 - DNA, 333 bp, Homo sapiens
  chr15:73889351-73889684
  hypo
gctggactcactctgaaggacgcttatggtggcctgggctcgaatccatgttatggaggggttttgcctcaagtcattcctcttggggtcgttgctggccctgcactcgtaagtcccagagtcctccaaggtgagccgggttattctcagcacactcacgccgtttgacccgtaggcggtgtttacggtgacacggcgcttccgagcaccgtcccacagctgtctgaaagactctgcccggttgacttctgcgtaccaccactggatctctggcgtggggctcccgaccacgtcacagtacagctcaaaggcgtcccccgtgagcttagtttc

SEQ ID NO: 216353 - DNA, 120 bp, Homo sapiens
  chr15:73898087-73898207
  hypo
ggaaaatgttaaaagcaaagagaagaatcagctcacaattgaacccctcttgcattccttttgtacgtctgtcttccagggttccttcctatgatcctgaatatcctcacatggactctt

SEQ ID NO: 216354 - DNA, 191 bp, Homo sapiens; identical to SEQ ID NO: 203969
  chr15:74045464-74045655
  hypo

SEQ ID NO: 216355 - DNA, 204 bp, Homo sapiens
  chr15:74315317-74315521
  hypo
atagtgcctttggcgcggttcacgcgcagatgcacgcggccgtcggccagctgggccgcgcgcgtgccgagaccgaggagctgatccgcgagcgcgtgcgccaggtggtagctcacgtgcgggctcaggagcgcgagctgctggaggctgtggacgcgcggtaccagcgcgactacgaggagatggccagtcggctgggccgcc

SEQ ID NO: 216356 - DNA, 91 bp, Homo sapiens
  chr15:74679876-74679967
  hypo
gccagaccaggcagagagagcacatggaccggcggagaccaaggtcccagagaggtggggaacaggaggcgccccctcccctgccacatga

SEQ ID NO: 216357 - DNA, 565 bp, Homo sapiens
  chr15:75091249-75091814
  hypo
gaaggcgggtaccaaactcagcctcatgccgtgagtaccacgaggaggggttggggagggaaggggccttggtcctcctgaaggagcatcaggagcaagcagggaggccagagtgaggggcttgggtgttggggagggcctcaggaggaggtgcagggtgcgggtgcgggacctcacagagcagggctgggggcagaggcaggagggtggcaaagaagggacagggagcagaagaagagggcctcaaatgcctgactgagcgagtgcgagccacgggtgccaagcagagggaaccccttcagaaaggggagccagggtcagtacctttgggccaccatgacctccagccctgctgctccccagttggttccacggcaagatcacacgggagcaggctgagcggcttctgtacccgccggagacaggcctgttcctggtgcgggagagcaccaactaccccggagactacacgctgtgcgtgagctgcgacggcaaggtggagcactaccgcatcatgtaccatgccagcaagctcagcatcgacgaggaggtgtactttgagaac

SEQ ID NO: 216358 - DNA, 183 bp, Homo sapiens
  chr15:75094768-75094951
  hypo
ggcacctggacgccgccatgcggccctccttcctacagctccgagagcagcttgagcacatcaaaacccacgagctgcacctgtgacggctggcctccgcctgggtcatgggcctgtggggactgaacctggaagatcatggacctggtgcccctgctcactgggcccgagcctgaactgagc

SEQ ID NO: 216359 - DNA, 103 bp, Homo sapiens
  chr15:75158701-75158804
  hypo
gggatgacagcaagcaggagcgacttttggttcttggcactacttcacccaaaaatactctgttttctggccgggcgtggtggctcacacctgtaatcctagc

SEQ ID NO: 216360 - DNA, 42 bp, Homo sapiens
  chr15:75158924-75158966
  hypo
cgcctgtaatcccagctactcgggagtgtgactctgtctcaa

SEQ ID NO: 216361 - DNA, 142 bp, Homo sapiens
  chr15:75221041-75221183
  hypo
aatgtacaaaactgttaccttttgctcatctagccttattgctatagcagtggttttcaattaagggtgacttcatccctcaggagacactgggtaatgcctagaaacatttttggttgtcatgatacgaatgtgtgcatac

SEQ ID NO: 216362 - DNA, 97 bp, Homo sapiens; identical to SEQ ID NO: 203977
  chr15:75248843-75248940
  hypo

SEQ ID NO: 216363 - DNA, 32 bp, Homo sapiens
  chr15:75413015-75413047
  hypo
gcttgagccaccgcgcccggcctattgttttt

SEQ ID NO: 216364 - DNA, 69 bp, Homo sapiens
  chr15:75614951-75615020
  hypo
tcgcggcagaggccggcggcgcggtcctgggtggcgggcggcgtgggggcaggcgagcggagcccccgg

SEQ ID NO: 216365 - DNA, 392 bp, Homo sapiens; identical to SEQ ID NO: 203981
  chr15:75640583-75640975
  hypo

SEQ ID NO: 216366 - DNA, 197 bp, Homo sapiens
  chr15:75648445-75648642
  hypo
ctcacaggatggcctcctgaaccggcagcgacaagtgcagccagcagtccacgtggctgccgtgggcctcatacagcctcaggaccagcgagcggcgctgggggctgctctccgcctgcagaggaacacgtctggtgggaggggccgagggcaggcccagttcggaaccccgtccccagcacgtcccaccccttgcc

SEQ ID NO: 216367 - DNA, 104 bp, Homo sapiens
  chr15:75664801-75664905
  hypo
gggctgaaaaagctcgctgttctcaattttagcatgcgttagtataaccgagggaatgtgttaaaaaatacacatttctgaccaggtgcagtgactcatgcctg

SEQ ID NO: 216368 - DNA, 196 bp, Homo sapiens
  chr15:75672985-75673181
  hypo
gtttctgtgctagatgttcacgaagctcaggcgaggtagtatctgaattcatgtatcgctccacgtagtctgaccagcgctaagatggcaaacacaaaatacaggtggaaggaaatcacaaaaacagctcctaatgcattgggcactctagtaaattctatgattacaatgccccgaattcataaatttcaagatc

SEQ ID NO: 216369 - DNA, 36 bp, Homo sapiens
  chr15:75726682-75726718
  hypo
actagtaataaaaaacgtgtaaagtaggccgggcgc

SEQ ID NO: 216370 - DNA, 126 bp, Homo sapiens
  chr15:75981377-75981503
  hypo
gccttgggccagtcgcaaccctgtgctgcggtggatctgtatggccggccggatggccaccaccttcagcgtggccggggggctggcctgcagtccatcgctgacccggaacgtcaagtcctgtgc

SEQ ID NO: 216371 - DNA, 186 bp, Homo sapiens
  chr15:76083847-76084033
  hypo
cagccctggtacctgcgtcgggctgggacgctctgcacttacagccaggagtcatccatgggcccccgtgggcatgctgaccatggttgttttgatgtcgccgatgatgttgggcgcctccctcagcacatggtgcatgcacagcgtctcgttgcaccattttgcctgctccgtggaatcctccat

SEQ ID NO: 216372 - DNA, 62 bp, Homo sapiens
  chr15:76197521-76197583
  hypo
tcccttcacctgcttcccttgaagcaactttttgttgtctgttttaccgggaagacaactgg

SEQ ID NO: 216373 - DNA, 34 bp, Homo sapiens
  chr15:77333014-77333048
  hypo
acagggcaagactctgtctcggggaaaaaaaaaa

SEQ ID NO: 216374 - DNA, 65 bp, Homo sapiens
  chr15:77908020-77908085
  hypo
cagcaggcgcgtctcggtggggatgccctcggggactgccacaaagcgcttgcggtggcacagca

SEQ ID NO: 216375 - DNA, 58 bp, Homo sapiens
  chr15:78193841-78193899
  hypo
ctgtacctgcactcccgccctgaggcctggagcgatgccttctcgctggatgtggcct

SEQ ID NO: 216376 - DNA, 171 bp, Homo sapiens
  chr15:78268339-78268510
  hypo
ggtctcacaggctgcgccccctgcatcctcccatcccatctctagccatggatggggcctgtgcctggacgaccctcctgccaaggacatcatcgacttccccttggtgctgcctggcatcccctatgctgtgagccaccagtgccgcctccagtacggggcctactctgc

SEQ ID NO: 216377 - DNA, 79 bp, Homo sapiens
  chr15:78450091-78450170
  hypo
gttgttaatctccaccgattgtcactttaacagtgtgtgtctcagtgtttgctactgccattatttctttctttctttt

SEQ ID NO: 216378 - DNA, 178 bp, Homo sapiens
  chr15:78463270-78463448
  hypo
gtcagttggcatgtgggtggcggagtgcctggtaatggaataatagggtcggcgatgcccgccaagattccagagtaagtcaggtcgctaggtgagttgtgactgattgcttttcctgcagcgcacgtgagcagtatcagccatctctctcctacccgctccacagcctactgctggc

SEQ ID NO: 216379 - DNA, 101 bp, Homo sapiens
  chr15:78501675-78501776
  hypo
tggcgccgttcttgcgaaatttgtgagcaaggcctgggccacaggcctggagcagcccttccattgctatggcgacccactccagggaggttgtggaaaaa

SEQ ID NO: 216380 - DNA, 45 bp, Homo sapiens
  chr15:78501942-78501987
  hypo
tggcccctgagctctgggttcaggcagcgacggcaaacgagggac

SEQ ID NO: 216381 - DNA, 81 bp, Homo sapiens
  chr15:78510187-78510268
  hypo
gtgagccaccgcacccggcctggaaaatgttttatataaaccatgcgcatatattaaatcgtaatccaggtgttttcatat

SEQ ID NO: 216382 - DNA, 149 bp, Homo sapiens
  chr15:78566544-78566693
  hypo
gtgggaagaagggatcggtggagaagtgcccgctgtgcaaggggcgggggatgcagatccacatccagcagatcgggccgggcatggtacagcagatccagaccgtgtgcatcgagtgcaagggccagggtgagcgcatcaaccccaag

SEQ ID NO: 216383 - DNA, 188 bp, Homo sapiens
  chr15:78699264-78699452
  hypo
cgctcagcttgctcacgtacccctgaccactccacgcctgactccagtctctcttggaggtgtgagatccaggccagtagtgtgagctgagtgcaacctgccagcaaccaacctgagtgggtggaacgagcccagcagcccaagcaaaacttgggcaaaggcaccatcggccacggctctctggccag

SEQ ID NO: 216384 - DNA, 71 bp, Homo sapiens
  chr15:79031606-79031677
  hypo
gagcacgggcatgtcgcagcagctgtgggagggccggggaggggagcgcgcaggtgcgggtgtagcaaagg

SEQ ID NO: 216385 - DNA, 78 bp, Homo sapiens
  chr15:79208260-79208338
  hypo
ttactaagagccagatgtgacgctgagtatttccataaatcatctcaattctgtccacaaaatcgtgaaggcggccaa

SEQ ID NO: 216386 - DNA, 101 bp, Homo sapiens; identical to SEQ ID NO: 203989
  chr15:79237308-79237409
  hypo

SEQ ID NO: 216387 - DNA, 125 bp, Homo sapiens
  chr15:79309573-79309698
  hypo
caaagcaaaactaaatcttccgtgtgcataattgaggctgggtttgatcttaggtagctgccccgactcactgaagaagctacccttggctttcagggacaccgttctctcgctgtgaacattat

SEQ ID NO: 216388 - DNA, 75 bp, Homo sapiens; identical to SEQ ID NO: 203992
  chr15:79723976-79724051
  hypo

SEQ ID NO: 216389 - DNA, 1247 bp, Homo sapiens; identical to SEQ ID NO: 203994
  chr15:80215297-80216544
  hypo

SEQ ID NO: 216390 - DNA, 36 bp, Homo sapiens
  chr15:80451294-80451330
  hypo
aattaaaaaacctctcggctcacgcctgtaacccca

SEQ ID NO: 216391 - DNA, 202 bp, Homo sapiens
  chr15:80471843-80472045
  hypo
tgggacaggcatgggcgtgcattgcatctgagcgtctcggtgggcacgtggtgccttggccccctctgcccacagcctgaccgcccacagctctccctcgctccttggcctgccctgacatcgtgtttgaatcgttcagctccattgcccagtgtccatcccaaggcccggcatgggagaatgggagcgagggctttgctca

SEQ ID NO: 216392 - DNA, 213 bp, Homo sapiens
  chr15:80478441-80478654
  hypo
gtgactgatccttgtcctcctctgttccagggtactgccagggggatggttaccgcatcggctttggccagtgtgctggaaaagtgctgcctgctctcctgccatcatgagattttctctgctcttctggaaacaaagggctcaagcacccctttcaaccctgtgactggggtcctccctcgggctgtaggcctggtccgccattcagtgaca

SEQ ID NO: 216393 - DNA, 176 bp, Homo sapiens
  chr15:81041839-81042015
  hypo
tctgatttctccaggtatggcgtgagtcccgagaacattatcctctatggtcagagcattgggactgtccccacggtagacttggcctcgaggtatgaatgcgcagcggtaattctccattcccctctgatgtctggtttgcgtgtggcttttccggataccaggaaaacatactg

SEQ ID NO: 216394 - DNA, 120 bp, Homo sapiens
  chr15:81247852-81247972
  hypo
cccaatctcaggctctcccagatcagctgaatcagaatctgcattttaagaagggacccagggtagttgtttgcacagtaaagtttgagaagtgtgtgtttgtgcgtgtgtgtgtgtgtg

SEQ ID NO: 216395 - DNA, 207 bp, Homo sapiens; identical to SEQ ID NO: 204002
  chr15:81294107-81294314
  hypo

SEQ ID NO: 216396 - DNA, 183 bp, Homo sapiens
  chr15:81605218-81605401
  hypo
acagtcagggaaacgtggtctctgagagtgatgggcacataaagccttggtgccagagtgcatcgcatggtgtccaggccgagtctctgtcagatggttagaggcctgggtctaccctgccaggagaggcgtgtttgggtaacaggcagatggagtttggaacacatgaatggctcatcacac

SEQ ID NO: 216397 - DNA, 214 bp, Homo sapiens; identical to SEQ ID NO: 204005
  chr15:82339664-82339878
  hypo

SEQ ID NO: 216398 - DNA, 86 bp, Homo sapiens; identical to SEQ ID NO: 204006
  chr15:83377915-83378001
  hypo

SEQ ID NO: 216399 - DNA, 125 bp, Homo sapiens; identical to SEQ ID NO: 204007
  chr15:83378087-83378212
  hypo

SEQ ID NO: 216400 - DNA, 120 bp, Homo sapiens
  chr15:83572358-83572478
  hypo
gaaactcctctaaacacacacacacacacggcaacaagagcgaaactcctctaaacacacacacacacacacgccacaccccacatcaagtaaaaagctgaacaagactgggcgcagtgg

SEQ ID NO: 216401 - DNA, 217 bp, Homo sapiens; identical to SEQ ID NO: 204009
  chr15:83654751-83654968
  hypo

SEQ ID NO: 216402 - DNA, 41 bp, Homo sapiens
  chr15:83827862-83827903
  hypo
gattacaggcataagccaccgtgcccagcctattatttcta

SEQ ID NO: 216403 - DNA, 148 bp, Homo sapiens; identical to SEQ ID NO: 204015
  chr15:85200368-85200516
  hypo

SEQ ID NO: 216404 - DNA, 74 bp, Homo sapiens
  chr15:85383065-85383139
  hypo
aagcgcaaggctgcggcaaagctgcgcgagatcgagcagagctggaagcacgagaaggcggtgcctggggaggt

SEQ ID NO: 216405 - DNA, 89 bp, Homo sapiens
  chr15:85478275-85478364
  hypo
gaagcagccagcactggggccgccatctccgtgaaggtggtcgccaacatcgctgccaacctgattgcgttcctggctgtgctggactt

SEQ ID NO: 216406 - DNA, 113 bp, Homo sapiens
  chr15:85680979-85681092
  hypo
gtaaacagaggctgtgaaagcatatcacattcctatctttctctccagcctttgtagacctgcctgatttaatgcagcatcttgacaacaactttaaatactggaaaggactg

SEQ ID NO: 216407 - DNA, 66 bp, Homo sapiens
  chr15:85681122-85681188
  hypo
cctcctgaatagtgggagacaccacccagagccctgaagctttgttccttcggtcatttggaattc

SEQ ID NO: 216408 - DNA, 151 bp, Homo sapiens
  chr15:85695659-85695810
  hypo
taagtaaagtgttttcgtgagttttgtgagctattctagcaaattatcgaatctgaggagggggttgtgggaagcctctgactttattccagtcattcagaaatataggagacccaggtgggcacggtggctcacgcctataatcccagca

SEQ ID NO: 216409 - DNA, 32 bp, Homo sapiens
  chr15:85886327-85886359
  hypo
ttagcaaatacttggcgaattaaagaatgtat

SEQ ID NO: 216410 - DNA, 31 bp, Homo sapiens
  chr15:86096037-86096068
  hypo
ttttttcaccgtgttagccaggatggattta

SEQ ID NO: 216411 - DNA, 186 bp, Homo sapiens
  chr15:89404008-89404194
  hypo
cgggtcacacctctccgctcctggtgaggagtgtctgagtggggccatcttgtatcgtgcagagtgaaccccaccaagttgcctccatgcttgggtctgcgtggggtttgggtccccttcttgccctgaaggaaatgacacaaacaacggtaatcacccagcacagggattcgtggatgtagggca

SEQ ID NO: 216412 - DNA, 40 bp, Homo sapiens
  chr15:89809026-89809066
  hypo
acaggcgtgagccaccgtgcctggccggattttttgtttt

SEQ ID NO: 216413 - DNA, 191 bp, Homo sapiens; identical to SEQ ID NO: 204024
  chr15:89905554-89905745
  hypo

SEQ ID NO: 216414 - DNA, 68 bp, Homo sapiens
  chr15:90171832-90171900
  hypo
acacaggctcgagcgtttccaggtcaagggtaacggagcgtggaccaagtcccgcgtctcctcccggg

SEQ ID NO: 216415 - DNA, 58 bp, Homo sapiens
  chr15:90192966-90193024
  hypo
ctcaccaacattcccgcgctcatcttcccggagctggatgtcacggctggcagtgccc

SEQ ID NO: 216416 - DNA, 32 bp, Homo sapiens
  chr15:90296997-90297029
  hypo
aagccaagatcgctccattgcactgcagcctg

SEQ ID NO: 216417 - DNA, 136 bp, Homo sapiens
  chr15:90451518-90451654
  hypo
cgacatgaggaagcccgtgttcaccttcctggtggcgctgaagttgggctcgatttcatttcccttggcgtcgaatttacggcgatggatgtgactgggccggatatacagcacgtagtagcgctcctggggccag

SEQ ID NO: 216418 - DNA, 242 bp, Homo sapiens; identical to SEQ ID NO: 204031
  chr15:90455967-90456209
  hypo

SEQ ID NO: 216419 - DNA, 50 bp, Homo sapiens
  chr15:90501230-90501280
  hypo
ttccgactgagcgacgtgcagtaatttgaaggaacgcattactggtgcac

SEQ ID NO: 216420 - DNA, 129 bp, Homo sapiens
  chr15:90501636-90501765
  hypo
tccggaggggaggccgtgttagacatggccaggcctgcaagctcagactgcccacggcctcctgacccagaagaaaaatgaaaatgcatatactcattgtcgcagcgcgactgcaacaggcaataccca

SEQ ID NO: 216421 - DNA, 36 bp, Homo sapiens
  chr15:90548960-90548996
  hypo
tgagccactgcacccggcctaaaacaataggttttg

SEQ ID NO: 216422 - DNA, 159 bp, Homo sapiens
  chr15:90606083-90606242
  hypo
acacacagcctgcctggccgccccagtgaacaagacaacatggacacggggcctgcccccataagcctcacaaagagagcattacagggtggtgtgtgttctactcagccaagtctccaggccagtgtaaaagaaagcgtggggccaactgcccaggtg

SEQ ID NO: 216423 - DNA, 222 bp, Homo sapiens
  chr15:90611551-90611773
  hypo
aaggcccacgaagtgaagcatgagagtggccgctgccatgtctgcgtcgagtgcggcctggacttctccaccctgacccagctcaagcgccacctggcctcccaccagggccccaccctctaccagtgcctcgagtgtgacaagtccttccactaccgcagccagttgcagaaccacatgctcaagcaccagaacgtgcgacccttcgtgtgcactgaatgc

SEQ ID NO: 216424 - DNA, 68 bp, Homo sapiens; identical to SEQ ID NO: 204032
  chr15:90628227-90628295
  hypo

SEQ ID NO: 216425 - DNA, 243 bp, Homo sapiens; identical to SEQ ID NO: 204033
  chr15:90631580-90631823
  hypo

SEQ ID NO: 216426 - DNA, 81 bp, Homo sapiens; identical to SEQ ID NO: 204034
  chr15:90634777-90634858
  hypo

SEQ ID NO: 216427 - DNA, 36 bp, Homo sapiens
  chr15:90729568-90729604
  hypo
tggccaggcatggtggctcacgcctgtaatcccagc

SEQ ID NO: 216428 - DNA, 217 bp, Homo sapiens
  chr15:90746124-90746341
  hypo
ggcagggccctagcggcttcaagtaaccctacctgaacccctgtctgaaatactgcagatgacctgggttcaaatgctacctcagccacttagtaaccatgtgaccttgagcaggctacttaaagtttctgggtcttgatttcttcatctgtaaaacaggtataataacagaacctacctcaaggtagtgaggattaaatcagctcgtgtttgaaaa

SEQ ID NO: 216429 - DNA, 202 bp, Homo sapiens
  chr15:90753863-90754065
  hypo
gaaagtgctcacatactttagctctttgagggctagaggcccagaaggcatgtgagggagacacggagtgatgcttgagactgggggcacaggtacctagaggacggggtggcgtggcccgtgtctggggtctgtcagcgaggcgatccctgggctcttggcagggctggcactgctgaacgtggggctggctgaggcccaa

SEQ ID NO: 216430 - DNA, 203 bp, Homo sapiens
  chr15:90755553-90755756
  hypo
agcccctggctgaagcctgtcggggtggagggagagggttcaccctgaatgggaaaaccggccgcagcctcggcgtgccctgctttcttcatactggactaacccactggatagatggatttagaggatgtccgagcagcacaggcagcccaggagagcgagcgagacactctttgacacaagggagagcataaaagcttaag

SEQ ID NO: 216431 - DNA, 39 bp, Homo sapiens
  chr15:90756079-90756118
  hypo
atgagaccctcgtgtgaccaggtgcgtgcctaagttaga

SEQ ID NO: 216432 - DNA, 151 bp, Homo sapiens
  chr15:90761175-90761326
  hypo
cataagcttctgagattacccggcctgggtttgaatcccagcactacacttacatcgctacgaccttcgacaagtagattcacctgtctaagccttagtgggcccacctgtaaaatggggataatgatccggtctcactgggcttacagtg

SEQ ID NO: 216433 - DNA, 217 bp, Homo sapiens; identical to SEQ ID NO: 204035
  chr15:90792593-90792810
  hypo

SEQ ID NO: 216434 - DNA, 374 bp, Homo sapiens
  chr15:90903997-90904371
  hypo
cccacacgggagaacggcccttcaaatgcccggagtgcgggaagggcttcagagatagttctcattttgtagctcacatgagcactcattcaggagagaggcctttcagttgtcctgactgccacaaaagcttcagtcagagctcacatttggtcacgcaccaaagaacacacacaggtgagagaccttttaagtgcgaaaactgtgggaaaggattcgccgacagctccgccctcattaagcaccaacgaatccacaccggagaaagaccctacaaatgtggagagtgtgggaagagcttcaatcagagctcccactttattacccatcagcgaatccacttaggagacaggccctatcgatgtcctgagtgt

SEQ ID NO: 216435 - DNA, 120 bp, Homo sapiens
  chr15:91072203-91072323
  hypo
tcgagaccagcctgggcaaaatagcgagacccacccccgccccccattgctacaaaaacatttacaaactagccgggcgtggtgacccccgcctgtggtcccagctggtcgggaggctga

SEQ ID NO: 216436 - DNA, 37 bp, Homo sapiens
  chr15:91072383-91072420
  hypo
acactccagaccgggcgacagagaaagacatccattc

SEQ ID NO: 216437 - DNA, 40 bp, Homo sapiens
  chr15:91311952-91311992
  hypo
tgtttttgtttttgttttttcgagaccgagtttcggtatt

SEQ ID NO: 216438 - DNA, 40 bp, Homo sapiens
  chr15:91312232-91312272
  hypo
ggcgtgagccaccgcacccggccttatagaggttttaata

SEQ ID NO: 216439 - DNA, 50 bp, Homo sapiens
  chr15:91312875-91312925
  hypo
catgttagaatcacctgtggcgctttaacgccaccaccccacccccaccc

SEQ ID NO: 216440 - DNA, 72 bp, Homo sapiens; identical to SEQ ID NO: 204036
  chr15:91414358-91414430
  hypo

SEQ ID NO: 216441 - DNA, 107 bp, Homo sapiens
  chr15:91423323-91423430
  hypo
agacatcgggaaacggctcgaggtgcggaagaccgtgaccgcgtgcctgggcgagcccaaccacatcactcggctggagcacgctcaggcgcggctcaccctgtcct

SEQ ID NO: 216442 - DNA, 203 bp, Homo sapiens
  chr15:91425022-91425225
  hypo
ggcaggaggagtgcccgtctgactcagaagaggacgagggccggggcgagaggaccgcctttatcaaagaccagagcgccctctgatgagcccactgcccaccccctcaagccaatcccctccttgggcactttttaattcaccaaagtatttttttatcttgggactgggtttggaccccagctgggaggcaagaggggtgg

SEQ ID NO: 216443 - DNA, 120 bp, Homo sapiens
  chr15:91501898-91502018
  hypo
cctccacaccatattctcatggaatgggcctgggctggttgccaagctcaggaaaccctgggctgagcctcgccaacgtggcaaaacctcgtctttgtacaaaaaatataaaaatgagct

SEQ ID NO: 216444 - DNA, 417 bp, Homo sapiens
  chr15:91503630-91504047
  hypo
catagctgtccagcccttcccggcattactggatctccccatgggctcagatgcagtcaaggccagctgtggatcccggcacacagctgtggtgacacgtgagtggggctgggaggcactctgctccactcgagctggtgcctacggaagggggtgtggtcgacggaaaaacttctgtcttaaggcttctgtggctcatacagagcagctaccttgctcagtggataagccccaacccccttgttgtttcacagtagttccccagcctgtcaggcccagaagtttcttccttctggtgggaggctgatgctttctgtcctccctgcacggccacagacacattccctgcccgccgccgcctctgacagcagggactgtccagtctggcatggaagactgcggcgctcggtagcatgg

SEQ ID NO: 216445 - DNA, 180 bp, Homo sapiens
  chr15:92006882-92007062
  hypo
tctttataaattacccagtgtcaggtttttctttataggaatgggagaacagaataatataccaatgtttcactgttagcattaatactacgatgaacacccttgtacagatatcttcgtatacatgtttgattattttcttaagataattactagaaatgggacgggcacggtggctca

SEQ ID NO: 216446 - DNA, 123 bp, Homo sapiens; identical to SEQ ID NO: 204039
  chr15:92459207-92459330
  hypo

SEQ ID NO: 216447 - DNA, 186 bp, Homo sapiens
  chr15:93153520-93153706
  hypo
gctctgctcaaatgacgcaaggacagtcactgagcttctctctgccaggggaggggagaacacaggtcagaactgcacatactctggtcctgatcgctgggcttggcagggagcaggcgctccctggttgccatgcagaaacaatgacgggtcacagcaagtggggcccagcgcctaggcgggctg

SEQ ID NO: 216448 - DNA, 120 bp, Homo sapiens
  chr15:93350343-93350463
  hypo
gcttgagccactacgcctagcccagcatacttttcaactgttcagttttacctggaacaagtaataggttcacatggtccaaattcataagttactaaattttttttttttattgagagg

SEQ ID NO: 216449 - DNA, 31 bp, Homo sapiens
  chr15:93368949-93368980
  hypo
gcgcccagccgcaaagctatccatttttatg

SEQ ID NO: 216450 - DNA, 94 bp, Homo sapiens
  chr15:93504239-93504333
  hypo
cactgtgcctggccgcatttgtgttttttattttaattaggattttagtctatagctttttgttttgttttgatgtttacgttgctttggtttt

SEQ ID NO: 216451 - DNA, 137 bp, Homo sapiens
  chr15:93546307-93546444
  hypo
ttacagccttggcaacgtagggagacctcgtctctacaaaataaaaacaagcaaaaatctagctgggcattgcggcatgtgcctacgggcccagttgcatgggaggcagaggtgagaggattgcttaggcccaggag

SEQ ID NO: 216452 - DNA, 81 bp, Homo sapiens
  chr15:93567908-93567989
  hypo
tataactggaatgttcggaaaacataaaggacagctcgtaaaggagagagtaagagtcaccaaacacgtggatatttttgg

SEQ ID NO: 216453 - DNA, 393 bp, Homo sapiens
  chr15:93588122-93588515
  hypo
ggccatggtggacacgccaggagatctgcaccccgtgggcggtcccagcccacacatggggaagccgagaggacggagcccgcgcctccctccacatctacgcgtctagcagaacacagggagcagggccaggagcgggacgagggcgcccaggaggggccggggggccaggggcagccccgcagccgccctgcctggcaggtcccgagtcctatcatacaggtgcagtttgtctttgttggagtggagcatcttgacatcctccaacgcgtagtaggcggccagtgtgaagttcacgtcgcccgtggtgaggaggtcgaagacgcaggcctggtagtacaggtcctccaccggcagcttctccttgcacttggccacggctgtctcgtatgg

SEQ ID NO: 216454 - DNA, 101 bp, Homo sapiens
  chr15:93595309-93595410
  hypo
ggcgccctgcaccttgcaggtctggaagcggtcggtgaaagtcctgaggtgtgggtccccgaagaggccacagtgcgtgtagttgggggtggccgagtgct

SEQ ID NO: 216455 - DNA, 135 bp, Homo sapiens
  chr15:93595508-93595643
  hypo
gggccatccttggagcagttgtgctggctcatgaggtcctctatgccatggacggccgagtggtaggccaggtcaccccggcaggtgcgggccgtccgccgcgtgcacagggcgtagctgcgcaaggctgcacag

SEQ ID NO: 216456 - DNA, 37 bp, Homo sapiens
  chr15:93642692-93642729
  hypo
tgatttttttttttctgagacggagtctcgctctgtt

SEQ ID NO: 216457 - DNA, 32 bp, Homo sapiens
  chr15:94014475-94014507
  hypo
tgagccaccgcgcctggccctatatctttttt

SEQ ID NO: 216458 - DNA, 392 bp, Homo sapiens
  chr15:94048777-94049169
  hypo
gaagcctctgtggccagcagcgcctccgcctgggttttacttgcgtccactgggcttgttctgcccacttggcccggcaggctgagctgggctcatgctactgcccagatcccacgcctgccaagggcgagccaggtgcggagcagcaaggggtgtgtgagtgagcgagcatggagtctggccactgtgtgtagccatgcgtgctggctgcagcagggtgggccactccaggcgccggcacaagcgccggctccagccctgtgtgaacctgcagctggagcatgtgtaccacaagcggcttctgctgtgggccccagcgtctggtcaaggggaatgcaattgcgcccaaaagcttggagatgccaggaaccgcaacaccccaaagagggtgt

SEQ ID NO: 216459 - DNA, 43 bp, Homo sapiens
  chr15:94794563-94794606
  hypo
aaaatacacataacctaatacgcattttgttttttttttttga

SEQ ID NO: 216460 - DNA, 650 bp, Homo sapiens; identical to SEQ ID NO: 204046
  chr15:96873518-96874168
  hypo

SEQ ID NO: 216461 - DNA, 136 bp, Homo sapiens
  chr15:98448107-98448243
  hypo
aactggaaacaatccgaatgtttataaatgggaaaatggacggacgaactgtggtatattcataccatgggattgctttcagcaagtaaaaggaatgagctgctggccgggcgcggtggttcacgcctgtaatctc

SEQ ID NO: 216462 - DNA, 255 bp, Homo sapiens; identical to SEQ ID NO: 204055
  chr15:98503622-98503877
  hypo

SEQ ID NO: 216463 - DNA, 51 bp, Homo sapiens; identical to SEQ ID NO: 204056
  chr15:98503946-98503997
  hypo

SEQ ID NO: 216464 - DNA, 409 bp, Homo sapiens; identical to SEQ ID NO: 204061
  chr15:99191317-99191726
  hypo

SEQ ID NO: 216465 - DNA, 63 bp, Homo sapiens; identical to SEQ ID NO: 204062
  chr15:99191748-99191811
  hypo

SEQ ID NO: 216466 - DNA, 120 bp, Homo sapiens; identical to SEQ ID NO: 204063
  chr15:99192612-99192732
  hypo

SEQ ID NO: 216467 - DNA, 110 bp, Homo sapiens; identical to SEQ ID NO: 204064
  chr15:99192792-99192902
  hypo

SEQ ID NO: 216468 - DNA, 265 bp, Homo sapiens; identical to SEQ ID NO: 204065
  chr15:99192941-99193206
  hypo

SEQ ID NO: 216469 - DNA, 37 bp, Homo sapiens
  chr15:99244847-99244884
  hypo
atgagccgccgcacccggccaacctatcccatatttt

SEQ ID NO: 216470 - DNA, 224 bp, Homo sapiens
  chr15:99256135-99256359
  hypo
gccatctagtgtgcactttggactgatgagctcccctacctgaaatcctgtagcaagtccctataggataggcatgtggtacagtgtgaagctcctgagtggtcaacagctaccccgtgacaacatgccacactccatgtgccactccctcccgcctgcctgctgtgtccttggccccagtggtgctctcccgtgctgaccagccggcacggctcacctggccg

SEQ ID NO: 216471 - DNA, 209 bp, Homo sapiens
  chr15:99276212-99276421
  hypo
gagcacccctcacgcgagcccatttttcaaggatacatgtttgtcttttagattctataaggagtagctgctacacagaaagatgtctacgtgtgggtgaacacctggcgtatcccatgcagggaggcttcagcagaccttggtggcgatggaaccaccacagtgatccgaggattgggtctgaaggctcctccgagtctccaataaaa

SEQ ID NO: 216472 - DNA, 38 bp, Homo sapiens
  chr15:99340602-99340640
  hypo
gacagtgagcatggcgagtggaccgttacctgtgcata

SEQ ID NO: 216473 - DNA, 120 bp, Homo sapiens
  chr15:99354751-99354871
  hypo
ccatctcaaaaaaaaaaaaaaagttatttctctatgtaaacaaagaaaactctccttccttataacttgtatgtgttgggtctatttgtattctgtgaaccataagaaataagtcaacta

SEQ ID NO: 216474 - DNA, 159 bp, Homo sapiens
  chr15:99371126-99371285
  hypo
gtattctgcagtggagaatgggagttggaaagaaatgttttctcccacacctgtcccgctcctgtctactgaaagctgattaatcagtcagatagtgagttcctattggtagtacgcctccaaaatttggaagaggggaggtggcgtgatgtgaaaaag

SEQ ID NO: 216475 - DNA, 494 bp, Homo sapiens
  chr15:99434483-99434977
  hypo
ctggccaggcccagagaaggcggtgcctcccctgcccggtctcatctccgtctctcctctctctccacagtgtgcccaagcacgtgtgggaagcgggcgtgcaccgagaacaatgagtgctgccaccccgagtgcctgggcagctgcagcgcgcctgacaacgacacggcctgtgtagcttgccgccactactactatgccggtgtctgtgtgcctgcctgcccgcccaacacctacaggtttgagggctggcgctgtgtggaccgtgacttctgcgccaacatcctcagcgccgagagcagcgactccgaggggtttgtgatccacgacggcgagtgcatgcaggagtgcccctcgggcttcatccgcaacggcagccagaggtcagtcgcggccacacgtgtggtcactacccgccccacctcacccgccaccctagcacacaaaggtagactctgtcggttgtttcatccgggtgcagccctcaggaagtt

SEQ ID NO: 216476 - DNA, 108 bp, Homo sapiens
  chr15:99440185-99440293
  hypo
gttgatgcttttcatgctcccgtccctgagtcaccactaaaatatgggcttagataaacaacatggtgtgtaagcctcacgcatgacgtctcttctttgagtttccct

SEQ ID NO: 216477 - DNA, 211 bp, Homo sapiens
  chr15:99451866-99452077
  hypo
actgtggccaagggcaggtgcgctaacatcgatttctgtgcttctaggaattactccttctacgtcctcgacaaccagaacttgcagcaactgtgggactgggaccaccgcaacctgaccatcaaagcagggaaaatgtactttgctttcaatcccaaattatgtgtttccgaaatttaccgcatggaggaagtgacggggactaaagggc

SEQ ID NO: 216478 - DNA, 41 bp, Homo sapiens
  chr15:99461820-99461861
  hypo
ccagagcagccaggcgcggtggctcacgcctgtaatcccag

SEQ ID NO: 216479 - DNA, 247 bp, Homo sapiens
  chr15:99497132-99497379
  hypo
agccccagtaagctcactgaggcacacaggccccatgtccacagccgctcctggctgaggcgtggttcctaagacgacccttactgttgagggctgccaggagggagagacacattcagccccgcaggtcctctgggaatccggtgagcgtcggcaccgggctggggccgtgctgattcccggcagcgtgtgggaatgtgcgggtgcctcgtggcctgctgacatcgcacacaggtcacagcctgtc

SEQ ID NO: 216480 - DNA, 105 bp, Homo sapiens
  chr15:99506042-99506147
  hypo
cctactctggaaactgatctcggagttaaggcgaattgttcaagaacacaaactacatcgcactcgtcagttgtcagttctggggcatgactttagcgttttgtt

SEQ ID NO: 216481 - DNA, 42 bp, Homo sapiens
  chr15:99506177-99506219
  hypo
atgtcccacgtgtgtgtgtccgcatctttctggtcaacattg

SEQ ID NO: 216482 - DNA, 105 bp, Homo sapiens
  chr15:99512752-99512857
  hypo
ccaggtaggcacacgccgccctcgggccagaagctgcggatgtcggcgtcccggtagccttggttcttgccagactgttccagaatgatcgccttggcggcggtg

SEQ ID NO: 216483 - DNA, 446 bp, Homo sapiens
  chr15:99966717-99967163
  hypo
ctcatggtcacttccaggtgcgcagagtccaggaactgtcccgttttccagatgaggaaatggatgcttttgagagtcacgtcacatgcacggagcacaggtgtgcccgaggccgcgccccgcagcagagctgggattagaatctagctgttttggagccatcgtcttttccgtgatgttctgaggggcctctctgtttcttttgaggagtttcatgctgattattgagacaaggtggttcaggcaagaccgctctcgagcatggacgcaggcacgtaaaagttcatgcacaatcacaccacaggcattccagagcacctcagacgggaggggcctgcgggagggtaaagtcagagggcctgggcgggcggcagatgcagtgatgaggagagagcatcccggggagctactctggggatcggcgtgggaggctggacgaagcagcg

SEQ ID NO: 216484 - DNA, 42 bp, Homo sapiens; identical to SEQ ID NO: 204068
  chr15:100273862-100273904
  hypo

SEQ ID NO: 216485 - DNA, 51 bp, Homo sapiens; identical to SEQ ID NO: 204069
  chr15:100273946-100273997
  hypo

SEQ ID NO: 216486 - DNA, 92 bp, Homo sapiens
  chr15:100274190-100274282
  hypo
gatgcggacaacagggaccaagaaaacttaagtcgtgtttatcaaatgtcaggtggccgaggatttcttaagatgaaaagtggtggaagaat

SEQ ID NO: 216487 - DNA, 209 bp, Homo sapiens
  chr15:100649031-100649240
  hypo
accaggcaacactggcggcaggaggcggcatcactgggtgccttcctaagaaaatccactcccctaggcctcctgagacctctgctctaccccactccctgtctggggagagtgagtctcctctccaaagccccaccaaggaccgaaggagaagtacgtcacctggcacttgccgtgcacgcagagatcagtctcgtagggcccgcagg

SEQ ID NO: 216488 - DNA, 204 bp, Homo sapiens
  chr15:100726606-100726810
  hypo
aatgaaatgcaatcacgcattgctgcatttggccacttttcaaggtgaccaacaacttcatggactctgaattgccgcatacccttttccctcccatcttggcgccatctcaatgtctgatgagcatactacctatctccacagccaggtcatgactacagcagtcaaacaagcagtgattccagcgcccggggcaggcaggaa

SEQ ID NO: 216489 - DNA, 102 bp, Homo sapiens
  chr15:100791527-100791629
  hypo
aaagtatcaaatgagcggtgctatggattgacttgtgtccccacaaaattcttatgtagaaaccctaactcccaatgtgactataggtagagagaggacctt

SEQ ID NO: 216490 - DNA, 474 bp, Homo sapiens; identical to SEQ ID NO: 204071
  chr15:100882092-100882566
  hypo

SEQ ID NO: 216491 - DNA, 237 bp, Homo sapiens
  chr15:101099270-101099507
  hypo
ccatgcgtgccctcgcctcccagcgcgcggcccggcgcagctgacaacgcccccgggtgggagcagctgccggcctcgtcggggggtgggcactgagtgccgcgcagcagcggggaagatggggcccgtggcccaggctgtgggggcagggagggggccctgcgcattcccagtctcgcgcccgccgcctcctccagcttggtagccgccagcgtgctctacggtgtttttgtttgt

SEQ ID NO: 216492 - DNA, 193 bp, Homo sapiens
  chr15:101267000-101267193
  hypo
gctccctcctcactgcgtggagcagcggctttgctgggcttccttctaccatccccattaccctgatttcattcttatcccattcctttcctcctgggaaggcctggaatgatgatatgtcccagtgccatagagtagcacggataccagcacacacacagagtactcggcatgaacccggctctgttccact

SEQ ID NO: 216493 - DNA, 163 bp, Homo sapiens
  chr15:101464764-101464927
  hypo
caccccacagccagcggcagtggcagtgacaacagcgggacctgcctttgaagatcggctgctgcaagggttgatggctggcatgtcgcaaagaccccccagcatgtactggtgtgtggggccggaggagtcagctgtgtgtccagaacgtgccatggagacg

SEQ ID NO: 216494 - DNA, 174 bp, Homo sapiens
  chr15:101469411-101469585
  hypo
ttgggaagacttctggattgcggagggtgggtggaacttgagcagacatcacccaggcagtggctcgcccccccagctctctgtgagtggccgtcgcttcggtcctgaaagccctgccacagtcacacacctctcagagcactgcccaccaccggacccagcatggaccaaagg

SEQ ID NO: 216495 - DNA, 319 bp, Homo sapiens; identical to SEQ ID NO: 204072
  chr15:101835610-101835929
  hypo

SEQ ID NO: 216496 - DNA, 300 bp, Homo sapiens
  chr15:101850267-101850567
  hypo
cagcattctggggcctggaggatgcctgtggttctcagctcaggctgtccaagtggggagagaccccgcagaaccaatcggaccaaggccttgcttcctttgggaggcgtccacactgacgctcttcctggggggtgcttctccaagacccggtgtgtcagccccagcactgtcagcctctgcagggccgaaagctgcccctcacctgggaacaagtacccaggaaactcctgtcctccactgcccaaagagaggtttgcggtggggctgcccgcctgctgcctcctgaggggcaaagag

SEQ ID NO: 216497 - DNA, 196 bp, Homo sapiens
  chr15:101862667-101862863
  hypo
acacactccaagcagcgccaccgccctgacattcctcaggtttcgagggggttttacctgaatccttctttacagacagtacatttctcaggttcatccacgcactttttacagcttgggtggcatttaaggcaatttttctgacctggagaaaaatagcgagataagaaaagagaagggacgacactgacaggaa

SEQ ID NO: 216498 - DNA, 288 bp, Homo sapiens
  chr15:101938605-101938893
  hypo
cacctttttaatgccatactcgaaagcctgcttagccagtcggccgggcccgtccaccgtcttgccgtcgtcgtccggcccccagctggcactgtaaatgtcgatgtagttgggtctgatgcccagcgactttgcctcgaccacatctgtgacatcgccgtccagcatgcggatgcctgaaagcacagaggaggctcggtgtcggcgcccaggctccgggcacacagcgacgggaacccgggcccaggaggctcggatgaggacaccgcatcacagagtccctcccca

SEQ ID NO: 216499 - DNA, 33 bp, Homo sapiens
  chr15:101949373-101949406
  hypo
gcagggaggctgagcgcgggggctcatgcctgt

SEQ ID NO: 216500 - DNA, 32 bp, Homo sapiens
  chr15:101949766-101949798
  hypo
gcgacagagtaagactccgtctcaaaaaaaaa

SEQ ID NO: 216501 - DNA, 214 bp, Homo sapiens
  chr15:101974813-101975027
  hypo
ctctctgtcgtggtcgcaggggcagccctctctctgctaacacacctgctcattgtaagtctctgacggcaagtgaggtgctctcaggccaatggaaccgaacactgtacaacagatgactgaccaggcgtgggggcttctccgtggagacgggatgcaggcagacagcgcggtggcagaggctgattctcccggcactgtgtcccttcctctg

SEQ ID NO: 216502 - DNA, 172 bp, Homo sapiens
  chr15:102004885-102005057
  hypo
tggagggatctactgcgtgacaccctgttaagccacctggcctatactccctggggaggcctggagctggtctcctcaccaaggggttaggaaaatgcctgggggagggtcagcgtcctcctaaagaagtccatggaggctgtccgctctatcccgccggtgacaagggatg

SEQ ID NO: 216503 - DNA, 262 bp, Homo sapiens
  chr15:102022132-102022394
  hypo
aggagccagtacagattccccgagacagagccatgctggtgtgcagccctttgagtctgtgcgcgttcacgcacacgcatgtgcacgcacccggtggacagagggagaaacggcggctggtggggtctccggaggttgctatgcctcttgtctgttcattctggcagaagccgaaaggcttttctgtctgatgatttacctttgtctgggaagcaggtacgaggtgacagcagtagaaggtgagtcagagggtgtggggtcc

SEQ ID NO: 216504 - DNA, 166 bp, Homo sapiens
  chr15:102043329-102043495
  hypo
agctggggaactgcccacactgggaggggttgggaagcgtaggagggcacctgtcgcagacgttgaggaggggctgcctttcccctccaggggctgacctcccaggtgattcccagagccagaccacaattccagaattcagtgaaaacagcgccaaatcctattc

SEQ ID NO: 216505 - DNA, 580 bp, Homo sapiens
  chr15:102076807-102077387
  hypo
gagctgtgggagcagcgtggggacagacccggggaaggtggcagagaaagaaccccagtcgggtggtgggtggtccccagctcagcgctgtcctggggccagtgattcggcctccgggccccagcttcattgtctgggtcttcctggcagggcagtggcgaggagttctacgagctaacgggagtggaatgcctgccctttctcatctccctgacgtgaatcagtttctccaagttcttcacctaacagagcagaaatggtgactcgcggccacacccggggctcttagtcttggaggcctgtccccgccccatctgctgctgcccacagggaaccctcctagagccgtcacggggcataaggcccagggggcctcgcgagctgatctttcctgtgcggagccaaggatgcagcagagggtgtgctcacggcgaggtgtccctctccggaggcagctcttcagggtttggcagaggagaggagcgcagtgaccacccagcactgccctaaggtttgcaggcacccgggagggacaatggctccatggcgggcggaggccgagaagcacttggcaagctag

SEQ ID NO: 216506 - DNA, 174 bp, Homo sapiens
  chr15:102251172-102251346
  hypo
aattcagggcaggaggtggacggggctggctgtttgctaacgattcaagcataggcctatggaatgtgaagcatctgtgacacatccctgtccggcactcaactatgtgagatgtttggctgaggttaatgaggtccttgattatcacggagcgaattaaactagcctctctct

SEQ ID NO: 216507 - DNA, 119 bp, Homo sapiens
  chr16:84351-84470
  hypo
ggttcatgtgcacacacacacggagaaggcacactcacagtcacacgcagacacagctgcgtttgcccacaaatacacataggcacacacaggcaaacgtgtctacaggcactttcaca

SEQ ID NO: 216508 - DNA, 180 bp, Homo sapiens
  chr16:94325-94505
  hypo
cacacacacacacacaaaatctcagaggttctccagggtgcaaataaaagcaccagtcagttttataatagacttcgtaaggcattttggttgtacactccgtttaaccctgaggctgctgaaaatcagcacatggtgaatacgacatttgtaaggcaggcccaaggagatatcgggcat

SEQ ID NO: 216509 - DNA, 93 bp, Homo sapiens
  chr16:101672-101765
  hypo
agtaactgaatagcgcaaacctgggctgccaaaccttaaatttcaggattacataagagttcactcggctgggcgtggtggctgacacctgta

SEQ ID NO: 216510 - DNA, 118 bp, Homo sapiens
  chr16:111055-111173
  hypo
ctgaggtctgaagagcgaacaccgggcagacgaaggcgggagtcccgggcggggaaacgcaccgagcactcctcctccgaggtctgcacgcagcccgacctgtcgttgcgcacgcagc

SEQ ID NO: 216511 - DNA, 54 bp, Homo sapiens
  chr16:112973-113027
  hypo
catcagcgctgcggccgcccggaagctcatcttggccaccgactctcgcttgcg

SEQ ID NO: 216512 - DNA, 104 bp, Homo sapiens
  chr16:114337-114441
  hypo
gggaccaagagagagactggcgctgtgggaaggccctgcgggcagcccggggacccaagaggggcagagtgtggacacgcccgaagcgtacttgtcggctgcta

SEQ ID NO: 216513 - DNA, 197 bp, Homo sapiens
  chr16:114805-115002
  hypo
ggaaagcctgtcgcctcaggggctgggcaacagggtcatggtgagggtactggacagggggcacccacagtccctgcaggccagggcctacctgcaggaagctgggctcttctgccgtcaggggcaccgcagagggaatgtccagctttagccagggtggcttcttgcgctgcaggctgctcgtgctgtccctgcgg

SEQ ID NO: 216514 - DNA, 293 bp, Homo sapiens
  chr16:117786-118079
  hypo
acaacgcaggccatcggggtccctaatctggggtaacggaggattcctcaagatgacctctcagctgggtctgggaagacgagctgcctggcatgagcggatgcaagcaggaacagtcagggggtgagaagagccgagagctgtgagcgtgtacggggaacctgacctccccaggactgtttcggccggggaccacagccggccccaggaacctccccaggactgtctcagccggggaccacagtcggccccaggaacctccccaggactgtctcagccggggaccacagtcg

SEQ ID NO: 216515 - DNA, 143 bp, Homo sapiens
  chr16:136642-136785
  hypo
gggtggggagacgcgagcgcccacctgcgcaccccagcagccttccgccctccgcctgggctcaggggagcagagcctggaagacggcaatgacagggtcctcgtgggtggtcaccaccagcacgctgcggaacttgtcaaac

SEQ ID NO: 216516 - DNA, 180 bp, Homo sapiens
  chr16:142446-142626
  hypo
acgtagcacttgcacggcaagcccccaaaaccaaggagaagcaggtggcagtgctgagggctctcagatcagaaccaacagccaggcaggtagtgcctatccactacacacctgccactctgggctccttgagcttctgtgactcacctcctgcacagcgggggccaggggattcctaaa

SEQ ID NO: 216517 - DNA, 120 bp, Homo sapiens
  chr16:189554-189674
  hypo
aggagatctttgagaccttgggcgaggcagtgacactaaaggcaggagcgactacagaagaataaattaaacttcatcagattaaaaactttactgcggccgggcgcggtggctcacgcc

SEQ ID NO: 216518 - DNA, 40 bp, Homo sapiens
  chr16:232125-232165
  hypo
gtggacaggccgggcgcggtggctcacgcctgtaatccca

SEQ ID NO: 216519 - DNA, 36 bp, Homo sapiens
  chr16:299613-299649
  hypo
gtccacatcgaggacgtcctccgggcactcccacga

SEQ ID NO: 216520 - DNA, 74 bp, Homo sapiens
  chr16:299877-299951
  hypo
tctggttcttactccgtttttttctttcctttgccaaaggaatctatgttttatttatttattatttaaaaaaa

SEQ ID NO: 216521 - DNA, 354 bp, Homo sapiens
  chr16:311206-311560
  hypo
gagcacaggagtgccgccctcccctcctgttggcatctgctctgagtgtgcagtgagccgtgggctcacgagggtgatgcctcaacaggagcctgcctgtcacaggccttgcagttgccgggctgctgttgaaggggactcagggccacgttccgtgaccgtgtgcttgattctaggggaaaccctgtggaaccacagcagcagcttcagcgggaatgcgtccatcctgagccctctgctgcaggtgcctgatgtggacggcgatggggccccagacctgctggttctcacccaggagcgggaggaggtacatcccagcctggctctgctcccaagtcacgaggccacctgcca

SEQ ID NO: 216522 - DNA, 134 bp, Homo sapiens
  chr16:354255-354389
  hypo
aacagcacgacaccgacgcggagcgcgacaccgacgcggcccactcaccatgcgcacgcgcttcagccgctcctccagcttctcctcggcctcccgcgtgcgctgcacagcctccaggcggtggatgagctcct

SEQ ID NO: 216523 - DNA, 333 bp, Homo sapiens
  chr16:356183-356516
  hypo
cacacaggcacgctcacttttctgaaccagttagagtgtatttaacaaaagcaaggtcgctctcatacctaaccacagtacaaatatggatggttaaaaaaactgaccctgatacaataacatcacgtggcagatcttattccaattttgccagctgctccaataacatccttcatagcaaaacatgttttaaaatccaggccgccagtgtctaagccgcggagggatgcagccagggacagctcccctgtgacaagcaagcagggtggcagatgggaggtgggaccctccgtgtgtgtggccttcctgccctcccgccgtgggctctggcgc

SEQ ID NO: 216524 - DNA, 190 bp, Homo sapiens
  chr16:360132-360322
  hypo
tagagctcctggccccgaccgccggtcagcaggcaatgatgaggacacctgtgagccaccaccactgagacacgtgcacacaggtgatgcaggcacccatgtgtgcacaggggaacatgtacacacaaaggttcacacgtgatggtaaagcccaggtgcccagccacgcgtcttcctagctggtatttac

SEQ ID NO: 216525 - DNA, 143 bp, Homo sapiens
  chr16:364475-364618
  hypo
aaggtgtctgggaccggacttacacactgctgtccgtgagggactgggtatccggggcgggacttacacgctgctgtccgtgagggacagggtgtctgcatcgctggacaggctctgctgctcgctgtcgttggcactggtgg

SEQ ID NO: 216526 - DNA, 81 bp, Homo sapiens
  chr16:364964-365045
  hypo
ttgggtttgttttccgtgcacggtactagaaatgggacgcagatgttctgctcattctgcagtgcgcgtcgggagaggaca

SEQ ID NO: 216527 - DNA, 115 bp, Homo sapiens
  chr16:410080-410195
  hypo
acaccccagtgcccagcggttccccctcgagctggcaaggggacattaaatgggaggtgaggaagtgcggcccccagcgggcagctgcctttgccccggcccacctgcgcccccg

SEQ ID NO: 216528 - DNA, 255 bp, Homo sapiens
  chr16:410740-410995
  hypo
cccgtggtgctgcggtgcacgacctctgtgctgtcaccccacagtgtccgctcctgcacgtacacgcgtgcacgcgcacacacgtgcacacgcacacacacacaagcacgccccgctttgatctctaaaggagagtccattgacaagctcttaatcgcagctgcccttgcagggcctgtccctgaagtcccgagtaatgggatttggcgcttctgatccatcgggctggccgcttcccgtgtcataggtggacat

SEQ ID NO: 216529 - DNA, 497 bp, Homo sapiens
  chr16:429079-429576
  hypo
ggcccctccctccgaggttaattaacgacaaaggcttcagaaggaaaagcacagtggacacagcagggggcgggaccctcccctctgctgcagctccccctccccacacactcaggagcgctgcctaggtctcactggagagtggctggctcaggcccaggcccctcctgaggagggagacaggtgagcagcaggctctcctgccagcctcgtgaccctcccatagaggcaccagaagaaacgatacacctgccaatagcagcctgtcggcaaatccaggccaagctccaggggaacctggcgtggcgactgggcaggggctggccaggctccacccacgacgcactccaggctttccaggtgtctgctggccaccaggtcccacccaccaggctgtggcctgataatgtgggcagagaaagctcaagtgctgggagctgaagcaggacagccccccaggaccacggtgtcccggagaaagccggcctctgcggggg

SEQ ID NO: 216530 - DNA, 180 bp, Homo sapiens
  chr16:460351-460531
  hypo
tgagaagttcttccgggtgggtgcctcgtgcgctctgtgagaagttcttccgggtgggtgcctcgtgcgctctgtgagaagttcttccgggtgggtgccttgtgcgctctgtgagaagttcttccgggtgggtgtactcccagcgggggcctccccctgacggccgcccgctccctgccc

SEQ ID NO: 216531 - DNA, 120 bp, Homo sapiens
  chr16:505065-505185
  hypo
aaactaggctttctttcttttttttttttttcttggccacatgcaccagattgaagaataagctttcttgtctgttctctatacagtgatatgtaaaaatcaccactcagatcaaagaat

SEQ ID NO: 216532 - DNA, 228 bp, Homo sapiens; identical to SEQ ID NO: 28639
  chr16:521925-522153
  hypo

SEQ ID NO: 216533 - DNA, 284 bp, Homo sapiens
  chr16:524279-524563
  hypo
tttctctttactgggagcatcgcagtgctcacaccggggtggtcgggtaaaatgtgcagttagtcatggccgagctagtgggtctgctggctcgcactgttttcccagggatcctttcagcaggcagcttataacgggaaagttgctgctatggtgtctgagtaagtggggagagtagaaggggatggactgtggcgccgctgagttcctgggcatggtgatgtctgaggatctgagcaggtggagcccagggggtggtggggctgtttgtcgggtttctggaa

SEQ ID NO: 216534 - DNA, 199 bp, Homo sapiens
  chr16:532454-532653
  hypo
gtgaggtgtggggcgttcgcagttcccctcccagcttgtgcccgctgactgctggcgcactctctcctaggccaacgaggtgacggacagcgcgtacatgggctccgagagcacctacagtgagtgtgagaccttcacggacgaggacaccagcaccctggtgcaccctgagctgcaacctgaaggggacgcagacagt

SEQ ID NO: 216535 - DNA, 141 bp, Homo sapiens
  chr16:533136-533277
  hypo
gagctagttggggccggagtagagggacgggcagagtctgggagaaggtcagatgaaggaggtgtccagtggctcacgtggacctgctttccgtgttgcccctgctactggaaagtccgctcagcacgctgaagtgtaatt

SEQ ID NO: 216536 - DNA, 163 bp, Homo sapiens
  chr16:534203-534366
  hypo
agaacaaaacactcccgcacccagggtcctcccaggcccctgacagcagccagctctccaccggccctgcatcttccttaagttcccccacacagggaggtccttcctgtgcctggcttcttccacttgctgttgcgcttgtggatttagccatttttttttt

SEQ ID NO: 216537 - DNA, 158 bp, Homo sapiens
  chr16:537529-537687
  hypo
agcacagtgggtccgggcggagcagagcgcgcggtcctcctgactctgcccccttctcctgggcacgaggagtcgcctcactctgccaggcccctttctttcctggagtggagcagcgccgggcctgcacagaaggttctcccgaggactcctgcggg

SEQ ID NO: 216538 - DNA, 154 bp, Homo sapiens
  chr16:571959-572113
  hypo
ctgccccaacccccagcattcccgggtgggcccagaccccatcaccaagactggccacccgctgcgtgtgtgtgcgcgcgcgtgtacgtgtggccccacatccgccgccttccacgctaggatgtaagaggtcgcctcctattgtacatttggg

SEQ ID NO: 216539 - DNA, 215 bp, Homo sapiens; identical to SEQ ID NO: 204075
  chr16:577464-577679
  hypo

SEQ ID NO: 216540 - DNA, 209 bp, Homo sapiens
  chr16:584977-585186
  hypo
acagccgtgtacatgattagttagcgagacagtgaggagtgtatgcggagtggacacagctgtgggtgccgcccgcgcaaggctgggggtcgctgtgccagccctgctcccatgtgggctcccagctccccaggtagggacgctgaccccgggaggtgcctttgcctgcatccactggagcctcaggagcatgcgttccgtccccacgg

SEQ ID NO: 216541 - DNA, 72 bp, Homo sapiens
  chr16:587258-587330
  hypo
agaaaggttttctgagtgagcgcaggggagcaggaggctggtgagcagctcgcttcctgccctgggtgcagc

SEQ ID NO: 216542 - DNA, 165 bp, Homo sapiens
  chr16:588070-588235
  hypo
tttccacctgtcttacgtggataccaggagatccgccacgactcccgtggccccgtccacactgcgcggcgctctccggcgtggccgccaggtgccccttcgagggcaggtgtgagtacagggtggtccctgtggagaagcgcctgcaggcgagtgagccaggct

SEQ ID NO: 216543 - DNA, 67 bp, Homo sapiens
  chr16:588487-588554
  hypo
gcttcaaccctcccacgaccccagcaccttcagagaaaacggaccctcgtgccgagtgaagtggttc

SEQ ID NO: 216544 - DNA, 565 bp, Homo sapiens
  chr16:594147-594712
  hypo
agaccaggagactgcagcccagctcgagggaggcaccacgcctgcccctcagagcactgagcagagccccccatggtatcccccgccctgggcacagcaggaggagctgccgaccaagtctggcaccccggtgtgccccgagagctgtctgggcacaggttgcggggctgccccggccggacggggcatctgtgtttctcggtgtggcctcagggctctggtggctttgaccgaggccccgggggacagaatgcagcttcctgctcctcacttttcctaagaaaggggccgcctcccaggactggggctgcgccagtcacaggcccgcggcctccacgctccgggtgctgctgtcccggctgcttcagggcgggctctgtcttgcacgcagcgagcggcttcatcacctcccttttgaattggagctgagtgtcggcaacgcccagataactggggcgcgcgggtcttttgtgctggatttttctgtacagttgcctcgatcttccatccagcttggcctctgtgcagtaaggagcggcccgtcgcctcccccacgtcgcctccc

SEQ ID NO: 216545 - DNA, 92 bp, Homo sapiens
  chr16:612320-612412
  hypo
gcctggcctggccccacatgagactgaccccctaagagacccccagtgcccacctgacgccctgctagagcaggctctgtgccgcctttaga

SEQ ID NO: 216546 - DNA, 40 bp, Homo sapiens
  chr16:613512-613552
  hypo
ctgggcgtgccgccgtggctccaccacgcctaggccccac

SEQ ID NO: 216547 - DNA, 45 bp, Homo sapiens
  chr16:614710-614755
  hypo
gacggggatccaggcggccctgagacccccggccctgagggcccc

SEQ ID NO: 216548 - DNA, 213 bp, Homo sapiens
  chr16:623991-624204
  hypo
ctgtgcaacatcccgcagcccacggtgggggggcagcagcagctctgagccgagcctctcctcttctcttccagcctcccggcatggtgctcaaggccttcttccccacgtgctgcgtctcgacggacagcgggctgctggtgggacggtgggtgccggagcagagcagcgccgtggtcctggcggtcctgcactttcccttcatccccatcc

SEQ ID NO: 216549 - DNA, 253 bp, Homo sapiens
  chr16:643994-644247
  hypo
gctccagggtgtgggccagggtggtgggcccgtgttggcccccaggaaccacccgcacagggtgcacacccttccccaagcccagccgctcccgctctgcagggggcatcgaaggtcctggattaaggcagttccaccctcggcaccgtgtccccacaaaccttcctgggagcaagttttcctcccgccacgttggtcagggtgtgtgtgcccgggtcctggaagacttcagaaggggttaatcctggcttga

SEQ ID NO: 216550 - DNA, 48 bp, Homo sapiens
  chr16:666664-666712
  hypo
ccctccctaacaccaaccttggcagttcctgggctgcagtaagccgag

SEQ ID NO: 216551 - DNA, 77 bp, Homo sapiens
  chr16:667407-667484
  hypo
agaatggattttactccaacaggaaaaagacagtctgggacactgtgtccctagagatcgcggctcccctcctgccc

SEQ ID NO: 216552 - DNA, 330 bp, Homo sapiens
  chr16:668074-668404
  hypo
cattggcacctgtcctggccgccccgctcccctcaggacatccaggtgggtcggcagaggagggaaggaggtgagcctctcacagggaccacagtcccggcccctcccctccccgtatgtttcagggacacgtcgggccagggccggttctgcaccatcttcaggtcctactccaggggcgctcaggtaagaccagcaccgctctttccattgcttttcaaaggatgtttctcctgattctttctgaatgtgagttgttgtcctgtcaaactcccaaggactttctttctttataaggatattctcacattggtttgtttatttgtttgt

SEQ ID NO: 216553 - DNA, 166 bp, Homo sapiens
  chr16:670661-670827
  hypo
gacgggctccaccgcgggcatcccagccccccccgatgggctccaccgcgggcatcccagccccccgccgacgggctccaccgcgggcatcccagccccccgccgacgggctccaccgcgggcatcccagccccccgccgacgggctccaccgcgggcatcccagc

SEQ ID NO: 216554 - DNA, 291 bp, Homo sapiens
  chr16:671080-671371
  hypo
gagctgtcattttccacatgcgaggagcaggttacagacccaggtgcacatgttggtcctgggttgagggtgccaggtgcttccttgccccgggagaagcacctgagtctccaggcgggcctctgaccgccgtgactgagcatttgggccaccccgggagcccagccctgtcctgtgtctctcctgcctggtgagcagcggtgaggtgcgggtgcatccagccgaggtgcagagcccaggtttgcagcagggtttctcccgccgcccctgatgagacacagactagcaagg

SEQ ID NO: 216555 - DNA, 246 bp, Homo sapiens
  chr16:671426-671672
  hypo
aggcctggaaggtccccgcggcctgggtcttgcagatggcaccagcaaaggccaccggccactccccgctgccgtcacctgtcacacagcagcagtcccgcggctcttcccgcgaggcccttcacgtgccgccgaaggccgggctccctagacttcatggtcgtgtttgcatattctgttgctgtgatctgagacggcccctctcagaagcgggtgccacaacccgctggtgggatgagtgggtca

SEQ ID NO: 216556 - DNA, 90 bp, Homo sapiens
  chr16:677347-677437
  hypo
gcctgcaggacctctgctgccgggccatcgtctcctgcacccccgtgcacctcatcgacaagcttccactgcccgtcaccatcaagagcc

SEQ ID NO: 216557 - DNA, 63 bp, Homo sapiens
  chr16:677909-677972
  hypo
gcctttcttatttatatagagaacacttcacttttttgtacatttttaaggggccttcaggga

SEQ ID NO: 216558 - DNA, 127 bp, Homo sapiens
  chr16:678084-678211
  hypo
ctgtgaattcatgcgctgcgagtggcggggctgcccagaggccgggggagcagacagggccggtgctccctctggaagcttgggtgaccggggccctggctcccacgggatggagggtgtggtcctg

SEQ ID NO: 216559 - DNA, 321 bp, Homo sapiens
  chr16:717400-717721
  hypo
gccctggcccacctgcaccgtctacccacagagtgcatgctgaggctggtagactgtgccatggggactgcccaagactttgccggccacgacaacgcagtgcacctgtgcaggtttacaccgtccgccaggctgctcttcacggccgcccgcaacgagatccttgtgtgggaggtccccggcctctgagatgcagcagggactgtggtggtgggcatcacgcctggtcatgccaggcacctggacacaggcttggcagaggcgccaggttgtcaatggcctcatgctgggacaggccaggattcacgtaaatcgcctgga

SEQ ID NO: 216560 - DNA, 50 bp, Homo sapiens; identical to SEQ ID NO: 204077
  chr16:717960-718010
  hypo

SEQ ID NO: 216561 - DNA, 119 bp, Homo sapiens
  chr16:728001-728120
  hypo
aacgtcttcgcctacgacctgctgggcgcccacatccccccaccgccctgaccggctacctgaggctgcacaggccagggctcgggcatgtggtggccgcccaccaggggccttcacgt

SEQ ID NO: 216562 - DNA, 137 bp, Homo sapiens
  chr16:736747-736884
  hypo
ttgcggccaagctctcgagccacctttgcgttgtggtcacagagctcggccagtggccggccagccagcgcataacgctcagctgtgtccacaaaccagcgcatgccgccgccacctggctccgtctcaaagacact

SEQ ID NO: 216563 - DNA, 155 bp, Homo sapiens
  chr16:740914-741069
  hypo
ttaagtctcaatttcagtattttaatgccatcacctattttaatccccaggtccatcatgacatctggtcatccctagacaagttccgagtgcccccagtcttcccctccttcctcactcctcgacctcgggagcagcctcccaacggctttcct

SEQ ID NO: 216564 - DNA, 111 bp, Homo sapiens; identical to SEQ ID NO: 204079
  chr16:765207-765318
  hypo

SEQ ID NO: 216565 - DNA, 518 bp, Homo sapiens
  chr16:767027-767545
  hypo
gccttcccctgaatgcctaccgcagccacatgcctccccacagtaattcacgggatcatccatggggtcacccatgacgtggagctgcaggagtctgtcatcactgtggtggccgcccgtgtcctccgccagacaccgccgctgttccaggcggggcgatccggggaccaggggctgacctccattcgtaccccactgcgctgtggcgtccacccgggcccaggcaccttcctcttcatgggctggagccgctttggggaggcccggctgggctgtgccccacgattccaggagttccgccgtgcctacgaggctgcccgtgctgcccacctccacccctgcgaggtggcgctgcactgaggggctgggtgctggggaggggctggtaggagggagggtgggcccactgctttggaggtgatgggactatcaataagaactctgttcacgcaagctgctgtggacctggtctcctgtgtccagcccagccttgggcctgcctcgcagctgtgaggatg

SEQ ID NO: 216566 - DNA, 71 bp, Homo sapiens
  chr16:771702-771773
  hypo
gtaagtgcctgcgtctgggtcttcgccgccccacaccgcccacctgctggcgggcgcccctgcccacatcc

SEQ ID NO: 216567 - DNA, 439 bp, Homo sapiens
  chr16:771803-772242
  hypo
ctggcggcccacaggtgcggcctccgcccggccgtgggctacgagctgaacccctggctggtggcgctggcgcggctgcacgcctggagggccggctgtgccggcagcgtctgctatcgccgcaaggatctctggaaggtaacctggggatccctggccacccgctgacagcccaaggtgcggctgacacctgcgagggctgggggccgggactcggaagctgcgatgacccggtgcccaccaggcctctccccggccggggcgacttctcttccggcaggtgagcctgagggactgccgcaacgtgtctgtgttcctggcccctagcgtggtaggtgcggggttgccagccccgctgggaagccccagccacaccccagggtgtttgctgctctgaggcctgggcctgcctggtgggtgctaggcttggggctagggg

SEQ ID NO: 216568 - DNA, 144 bp, Homo sapiens
  chr16:809245-809389
  hypo
tcaacggaccctcccgcatcggcctcccacggtgctggctgaagggtgagcccaggctggccacagcgcgttttcatcattgtccgcagcttgcagtcggctggttcagagcttagccgggcacatgggcccctctgaggctcc

SEQ ID NO: 216569 - DNA, 149 bp, Homo sapiens
  chr16:810054-810203
  hypo
ggtttcaggggcagggagggggcttctgtggccccaggtcaggaggagcagctcttccatcagcagcaggcagccagcccagatgcgtagggaagacagctcccacttcgccaggccagagagcgcccgggggcagctctgttccagtc

SEQ ID NO: 216570 - DNA, 205 bp, Homo sapiens
  chr16:844997-845202
  hypo
tgtggagggtctgcgaagcctcgtggggcaggcggcaggcaggagtggagggtctgtggcgggaggtggagggtccgtggtggtgcaccttccctggggtgggcaggagctcaggggttgccggccgcctgcagggcttgtttgacaacttcctgcgtctgcggctgcgagactccagcctgggtgctgtgtgtgtggccctcga

SEQ ID NO: 216571 - DNA, 35 bp, Homo sapiens
  chr16:845815-845850
  hypo
tgcacccaagctccgccccgtgagtgccgtccccg

SEQ ID NO: 216572 - DNA, 307 bp, Homo sapiens
  chr16:894558-894865
  hypo
cacacagtggacagcgagctccaacatgtccacgggtgaacatcagcgtggccaccaccaggtccagagcacagtagaccctgtgccgccagtgtccgtcgccttccacacgtggccgcagttctgtgcatggggccgcccgccatcctgccgcctctgacctgggctgtgggctcgtgacacgtgtctgagctttccagtcgtggccgtgacgctctgtgcggaggctccgtccgcgtgctgcctccgtcccctctgccctggacggccactcactacctttgtctctcaccctgggggtttcatg

SEQ ID NO: 216573 - DNA, 264 bp, Homo sapiens
  chr16:898895-899159
  hypo
tgcggctgcgtaatgctcatgggtgagcacacctggtctgttcatctgggctgtccccacctctgggctgctgcaaacgttccggtgcaagcacacccaggtccccgtttcccgctctcccgggtctacatgcagatgtggagttgcggggtcacgtggttcccgtttctagctctcccaggtctacgtgcagacgtggagttgcggggtcacgtggtccccgtttctagctctcccgggtctccgtgcagacgtggagttgcg

SEQ ID NO: 216574 - DNA, 41 bp, Homo sapiens
  chr16:899189-899230
  hypo
cgggtctacgtgcagacgtggagttgcggggtcatgtggtc

SEQ ID NO: 216575 - DNA, 96 bp, Homo sapiens
  chr16:919967-920063
  hypo
ttgcacttgaactcgtagtcctcccacatggcatcgggggcgctggcgttggagctggctgtgccctgcaggatcacctccgcccgctccttggtg

SEQ ID NO: 216576 - DNA, 47 bp, Homo sapiens
  chr16:943646-943693
  hypo
aggtgggacttgggcagagaggctgcggggctgggggttggttctgc

SEQ ID NO: 216577 - DNA, 257 bp, Homo sapiens
  chr16:945417-945674
  hypo
aacagaaaaccaaccacacacgggagggccttcggggcggccgtgggcccctagccggggccaggcaggacgggagccgccgggttctctggctacatgtgaccgagaaggcagcaggctctgctgctgtctgtgcaggacgacctgggcaggggaggggcgtgtccaattccaacgtgtttggaacatggggctcgcgagactggcgggggagtgggagagccaggagaggctgcaccgcgccctgaaggacggca

SEQ ID NO: 216578 - DNA, 37 bp, Homo sapiens
  chr16:945732-945769
  hypo
accaagagcccagcccggccctacaggaacaccaagc

SEQ ID NO: 216579 - DNA, 207 bp, Homo sapiens
  chr16:947037-947244
  hypo
acccaaagggagccggggacccacactgcccgtgccaccctcccgctctgctcggaatgccagaactttccaggcccatcgacgatgttcccgccttgcaacgtgtggctgcagcagctcttctcctgatgcctgtgtgtcctgggacacacttccccaaatctgccatctggaaactcgaagtgtcttgacggtcgtatgcggaga

SEQ ID NO: 216580 - DNA, 129 bp, Homo sapiens
  chr16:949645-949774
  hypo
caggtcttgatgtcggcagcaccgctccacgtctgcctttcagcgccgcccatgacccacacctcccatgggctgcggaccctctggcaggctcgggggtgaagcatgctcggcgtaaagcgctttgca

SEQ ID NO: 216581 - DNA, 36 bp, Homo sapiens
  chr16:962797-962833
  hypo
ttgaggaattccagcagctgcgcggcgtgcacaagg

SEQ ID NO: 216582 - DNA, 266 bp, Homo sapiens
  chr16:981463-981729
  hypo
gacacagacgcacacgcggctcggatgagctgaggaacgcacgcacaaactgcattctcccaggccgtcccgaacgaggccacaggaaaggagcctccccagaggtctcagatcaggaagcctgaccttccagtgcctttggtctaggtgttctgaggcccagcacccggagtcatacctcagtaactggcagctctatgttctccaagatcagggaagggaagacagttcaaagacgcatggctgctcggaaggcagggagagca

SEQ ID NO: 216583 - DNA, 226 bp, Homo sapiens
  chr16:981843-982069
  hypo
ggaaaacattaacattaatgagtcaacaattcgcttctgagtccctacaattaccacctgctaccgaagaatcagttagaatgtatgacgctcacctgaaaacacccagggagacacaaacgcagaagactgacttccctgggctgggagcgcaagcgcagcccccgacggcggccacacaggctcacgtcccaccccccatgcagaccccgttgcttttgcttca

SEQ ID NO: 216584 - DNA, 281 bp, Homo sapiens
  chr16:982099-982380
  hypo
ccagagtcacccggctcctcgactgcctctgccgctccagcactgcctctgggagtccactgccccaggcacttcccccccaccctacttagagtagagcctgtgttccccaggaggcctcacaggcgggggcacggggagggtgggctccaggccctctcatcctcagcgatgggtcctgtggccctggtgctgagacacggcagcaccgtggcctcgcaggcccatctctcacagggaacacacaagcctcagccgctgccccccgagcctgccccggc

SEQ ID NO: 216585 - DNA, 343 bp, Homo sapiens
  chr16:1017655-1017998
  hypo
atccccgaccacctcgggcagcctcggtcctcccaggagccgtcacggcccgagaacgccgctgcccagatgtgaaccgggtgtccaggatacgcaggctgcacagtggcgtgaatgaagggcagggctgaactccagggcctacggacaatcgctgcacagccgggccagtggctgaccctgcttcctcgctgtccactgggggtagtggcgttgtcaccaggaggtcagcaccgggcagggtgctacttcagcatctgctcaacgcagtaatcacactagggacccgagtccacacgtcaggaagacaggtgtgtcttcaactctgagccctgtgaaaatg

SEQ ID NO: 216586 - DNA, 273 bp, Homo sapiens
  chr16:1022298-1022571
  hypo
taaagatgttgcaacgggtacgaacacacaaacatcctccgcatgctggcccagcctccgggagcgtggtgtgtgcctgagggctcggagccttggggatcgcaggaggcatcggccctggctggcgcccggcacccaagtccctccacagagcccacgacccgtacctctcctcgtgacctgggggccagcttaggaagggccggcacagcccacactgttcccctcatctgtggggaacagggagccccacaccctgggaccacgcctgca

SEQ ID NO: 216587 - DNA, 119 bp, Homo sapiens
  chr16:1081654-1081773
  hypo
gctctgcctctgccggttactgcctctaccatacagatggggaaactgaagctcagggaggtcaggtgcccagcctcagctacccaatgcagcgctcggtgggcagtgtggggctgacc

SEQ ID NO: 216588 - DNA, 109 bp, Homo sapiens
  chr16:1198574-1198683
  hypo
cccctgcctctcccgtcttccacacagacaactgcgaaggtgagaagggtgagcggcgtctagacggcgctgtccacccagcggcaataaaatcggatgtttccgcaca

SEQ ID NO: 216589 - DNA, 204 bp, Homo sapiens
  chr16:1199857-1200061
  hypo
ctcagcgaagggcgcgcatcacggcatcaccgctctcaggacgatttcccgtctcgtctcactggaccgtctgccgtttatgtcctttctcggtggaggccctcacgtcgcgttgaggtggtccccgctccggctgcgtgaacgcggcctcagctgcctcatcttccggcagatggatgttcagagcagggagcatccatgttc

SEQ ID NO: 216590 - DNA, 348 bp, Homo sapiens
  chr16:1236137-1236485
  hypo
ggcgggtgactagacggtcggcgtgcgtaggggccggaggcggggtgtgtgcagggccagggtgtaccgtgctggtcctcccagggctgcttggggagagcctgtttccttagtggtgttttgaataagaatgcgcggctccctcgaggtgtcccagtggggctgttcagaagctgggcccagggagccctgaaggcaggggtccagcctgccgtgaccgcacaggcccagattcctggacgtttcgctttcgtaattgcacacgcagggcctggattcgccgtgcagaaagccggacgatgccgcggcgtggggtgaacgtcaaagggtcactgtggactctgccca

SEQ ID NO: 216591 - DNA, 54 bp, Homo sapiens
  chr16:1237141-1237195
  hypo
ggtcgtcttcttgagcaaattggaaaagtaaggttgagcgttcctgagaatgag

SEQ ID NO: 216592 - DNA, 102 bp, Homo sapiens
  chr16:1248922-1249024
  hypo
caccatgctgtctcccgcccccaccccccatcatggctccgcccagctggcagtcaccgccccacatggctccgcccacggtgcagtcgctgcacatatgcc

SEQ ID NO: 216593 - DNA, 203 bp, Homo sapiens
  chr16:1250534-1250737
  hypo
cgacaacatcggctacgcctggattgccatcttccaggtgggcggcaagatggtgggacggggaccctggggcacggcaggggagcgggtgcaggactcgccccccccagcccagaccccaggggcacggggaggaggaggaggggtcgtgcgggcccaagtcaagccactgcccccccaggtgatcacgctggaaggctggg

SEQ ID NO: 216594 - DNA, 159 bp, Homo sapiens
  chr16:1251835-1251994
  hypo
gtacgtgggccacatattccgcaaggtcaagcggcgcagcttgcgcctctacgcccgctggcagagccgctggcgcaagaaggtggaccccagtgctgtgcaaggccagggtcccgggcaccgccagcgccgggcaggcaggcacacagcctcggtgca

SEQ ID NO: 216595 - DNA, 100 bp, Homo sapiens
  chr16:1265050-1265150
  hypo
catttgggttccgtcggttcttcaaggacaggtgtgtgtggtggggccgtcttgggttctgggggcccctcagggctctgggggctgggggcaggtgagg

SEQ ID NO: 216596 - DNA, 239 bp, Homo sapiens
  chr16:1265333-1265572
  hypo
ccaccatcatccgcatcatgcgcgtgcttcgcattgcccgtggtaggtgcccgcgtgcccgccaggttctctctgcgggtggagggtgggggctcagccatgggtgggagtgaggggcggggcggccagggtccccgcgcagcagggagggtccgcccagccctgctgacgctcagctcccggccctagtgctgaagctgctgaagatggctacgggcatgcgcgccctgctggacact

SEQ ID NO: 216597 - DNA, 94 bp, Homo sapiens
  chr16:1268565-1268659
  hypo
caggcccgtggtgcctgcctcggcgccccacccccgcccgctgcaggaggtggagatggagacctatggggccggcacccccttgggtatggta

SEQ ID NO: 216598 - DNA, 152 bp, Homo sapiens
  chr16:1270045-1270197
  hypo
agagcctggtgagaaaaccccggtgaggccggtgacccaggggggctccctgcagtccccaccacgctccccacggcccgccagcgtccgcactcgtaagcataccttcggacagcgctgcgtctccagccggccggcggccccaggcggag

SEQ ID NO: 216599 - DNA, 353 bp, Homo sapiens
  chr16:1270449-1270802
  hypo
ctgaggccgagcccgctctgggtgcgcgcagaaagaagaagatgagccccccctgcatctcggtggaaccccctgcggaggacgagggctctgcgcggccctccgcggcagagggcggcagcaccacactgaggcgcaggaccccgtcctgtgaggccacgcctcacagggactccctggagcccacagagggctcaggcgccgggggggaccctgcagccaagggggagcgctggggccaggcctcctgccgggctgagcacctgaccgtccccagctttgcctttgagccgctggacctcggggtccccagtggagaccctttcttggacggtagccacagtgtgacccca

SEQ ID NO: 216600 - DNA, 39 bp, Homo sapiens
  chr16:1273470-1273509
  hypo
gacccgccgcacacgtgcaccctccgcaggcggaggctg

SEQ ID NO: 216601 - DNA, 142 bp, Homo sapiens
  chr16:1367993-1368135
  hypo
tacagtgtatgtacgtacctcagccctcaccctgaatctaccaagagctcctgggaatcagtaagaaggctgccatgacgtccagcgtgtccctcacaggaaaggcctccacccagccagcaaatgcggcagggatgcctgg

SEQ ID NO: 216602 - DNA, 193 bp, Homo sapiens
  chr16:1369189-1369382
  hypo
gccagcgacgcagcctgcgtgagcagcctggaagcagcacggcttgagggccaacaccgtcaccccacattccacagcagcgcgctcacgcgtgttcgcactcaggacagccacgcagctgctggtgtcgcccgtgtgctcctgcggtgtgggatggtcgcggtgtgggacggtctgcggtggtgtcttcgcg

SEQ ID NO: 216603 - DNA, 399 bp, Homo sapiens
  chr16:1397859-1398258
  hypo
tgggggcaggggggctcacgactgtgctcctgcaggcttaagtgacccctttgtgatcgtggagctgggcccaccgcatctctttccactggtccgcagccagaggacccaggtgaagacccggacgctgcaccctgtatacgacgaactcttctacttgtgagtgtcctaagccccagccccagccccaggctccaggctgccggagcgagactcccgactggcctctgtccgcagttccgtgcctgccgaggcgtgccgccgccgcgcggcctgtgtgttgttcaccgtcatggaccacgactggctgtccaccaacgacttcgctggggaggcggccctcggcctaggtggcgtcactggtgtcgcccggccccaggtgggcgggggtgcaagggc

SEQ ID NO: 216604 - DNA, 151 bp, Homo sapiens
  chr16:1414494-1414645
  hypo
cgccgtaaaccacagatgcctgttcctgctcaactcctagggacagtcccagccctgagcagaagggtcaggtcatcgcggggatgcgttctcagtcacgtttctgctgcggccgaaaccacactgtcgctccaggggcagacgggacagg

SEQ ID NO: 216605 - DNA, 115 bp, Homo sapiens
  chr16:1424324-1424439
  hypo
agttcttggaccctcactgatgcctggtactggacagtgtgctgctgaggcctgctctgagacaggcaaagccacccctgcctgtccctgaagggccctagacccccttcctcct

SEQ ID NO: 216606 - DNA, 185 bp, Homo sapiens
  chr16:1424469-1424654
  hypo
ggccccaggcaaccgcaccccggggaaacctgtcagacccgaccgtgggggtcggcgcgccgggaacctccacagcctggccagcccctgcctggtgctcggttcagacaagctggggcccagcagaagcaaagaggcggtcactgccccacctacccgacatcgagtcccgccctcgcagacct

SEQ ID NO: 216607 - DNA, 40 bp, Homo sapiens
  chr16:1425360-1425400
  hypo
ggcagaggccacccccaccccactccaccgcacagcacga

SEQ ID NO: 216608 - DNA, 156 bp, Homo sapiens
  chr16:1425684-1425840
  hypo
aagaccccctggggaccaggaacccacagtagcatccgaaaatgcctcagccctcaaggatgctcatcggcggagccaaaggcaggccttgggccagccgcacccagagccattcactcctctccttcccattcacaggacggtggcgtccctgag

SEQ ID NO: 216609 - DNA, 243 bp, Homo sapiens; identical to SEQ ID NO: 204080
  chr16:1429037-1429280
  hypo

SEQ ID NO: 216610 - DNA, 72 bp, Homo sapiens
  chr16:1462654-1462726
  hypo
aaattaaaataaatacgtaaacatcaagagacgaaacatcccagatatattctacagcgtgaatattctaac

SEQ ID NO: 216611 - DNA, 32 bp, Homo sapiens
  chr16:1465337-1465369
  hypo
tagtggtaggaggccgggcgcggtgtctcacg

SEQ ID NO: 216612 - DNA, 120 bp, Homo sapiens
  chr16:1472168-1472288
  hypo
aagcacaacaacaacaaaaacctaagctcaaagatcagtgcctgaaatatttagcagagcgtgcactggatggatcagctggtaccacccagaccggtcatctggcccaaccggttctgc

SEQ ID NO: 216613 - DNA, 105 bp, Homo sapiens
  chr16:1493469-1493574
  hypo
aggggcagctcgacctgtgggtgggggagccgctcacctccggcgcctccttttcgggggcctgggctgccggccgcgcctcctgctgcaactgcctcagctctg

SEQ ID NO: 216614 - DNA, 138 bp, Homo sapiens
  chr16:1493691-1493829
  hypo
ccaccctggccggggcgagagtgggcgagtctggcggtgcccgccgtggaggcggaggcggcggcgacgtggtcctcccccgccagcaccccctgcagggctcaccactgctccagctggttccagtgcttggcggtg

SEQ ID NO: 216615 - DNA, 814 bp, Homo sapiens
  chr16:1510726-1511540
  hypo
tggaacacgctgggctcaggacttctgcccgggactcggcccaggccacgcccccctcccaagctgcagcggccgcactgggaaggatactgcccttgatgaccctgtacttgaggccagccaggttttccaccacgatgtcaatgaagcaggccacgaggcccgtgaggatcccaatgagggcgcagatgacccagcgcttgatctccaccgtccggaaggcctgcagggcgcggtcagggcgagggtcaggcagggccctggcgcagtcactctggcagcagcaggaccgcccagaccgcctgcaggccccgggattatgaagggcccagtgtgcacggtgcgctgagtcccacaaaggacagtttctggccaacatctgaggcgcacccggggcccgagggtgactcggggaggtgggtgaattcccaacaacttcacagccagcggttgttatgctgggcaccgcatctggcggccgtaagagcagccttcttggttacggtgaccgtgaccctcccactgtctctagaaaccagacgaaccacaggcctcagaggcggagtcagaggaggagggaggaggtgcgtcacctcaccccggcagaagagcagccccaggcccggccggcaccaggccccgcaccgtggggccctgcagggagcggcgtccagctcaccgtgtgattgatccgccgctcctcctccaggaacagctggttctcactgttgtcatagtccaagctctgcaggccgggacagcaagggcagcactcagcaccgaacccacgctctgggtgcgggcacaggggacc

SEQ ID NO: 216616 - DNA, 156 bp, Homo sapiens
  chr16:1523650-1523806
  hypo
gatgtgagccaccgtgccctgccgtccttcctaatctttaagcacaagacaagtgtttaaaggactagacaagagaaaatgtaaagaataactgcaaagcagattaagacccatcaacaaaacggtccattaactcaaaagtaacacaatacggcc

SEQ ID NO: 216617 - DNA, 318 bp, Homo sapiens
  chr16:1557430-1557748
  hypo
gtgggggccccgtggagcctcgaggtggctgacaggcagcctggcctggtacttcccaaataggaagtgtgccaggcagggccgcagcgtgggtggtctgccacactgaggggagtgggaggtctggggtgtggtccctgccgagctcagcccccgccttcttgccggcagctacgtgcgccaggggctgttgtcggccgtctcctccgtcctgctcagcctgcctgctgcgcgcctgctggaggacctgatggacgagctgctggaagcccggtcctggctggcgggtgagtgtcggcctgcggtgtgtgtgtgaga

SEQ ID NO: 216618 - DNA, 232 bp, Homo sapiens
  chr16:1560777-1561009
  hypo
tcacaccctccgccggcccgggccgctgcgttctcgcccagctctgtcgcgtattccaacacagacatgttttttcccagcaaaaatgctggctttgccacagctgacaaaaaaattccagaagatgcctttctgcagcagcacgctggtcctggggcccaggcccctcaggggtcgtcatctgcctcttccaccacctcctcgtccagctccctggcgtcctccatgctgt

SEQ ID NO: 216619 - DNA, 224 bp, Homo sapiens
  chr16:1580445-1580669
  hypo
ttaaaaaatctcccgattgtgcacaccctctcccgaggcccaggtgtggggctggacagggctgggacctgcctctacctgccccgcgtggctcctttcctctcccttgtcctgaaaacaactggttccttccgtccacatccaattgcggtggaaaatcacaaacaagcacaggaatgtggcagctgacttgggtcccagacgggctcccctgtgctctgaac

SEQ ID NO: 216620 - DNA, 127 bp, Homo sapiens
  chr16:1580699-1580826
  hypo
tggggagcgggagagagcccgcccgtggggagcgggagagagcccgcaggccggccctggttttgctctggttcctggggcccatgtgtgaccgaggacccagccagcacaccgtcagatgcccgca

SEQ ID NO: 216621 - DNA, 67 bp, Homo sapiens
  chr16:1613977-1614044
  hypo
atacaacaggcagagcgtaccgcagggccagcgcgcccatcttggggctgcccgtttgcagactgag

SEQ ID NO: 216622 - DNA, 383 bp, Homo sapiens
  chr16:1652262-1652645
  hypo
aactgaatttggcaacagcacggttcccatattttgatctttcatactctcgagcatggtcagaaagggtcaaggtctgaaaacagcgtcttgcgcgtgttgactcaccctgtccccagacagcaggcagtttccactggggctccaacggagcacggtgatgtcggctgtgtgtgtcaggggcatcgtgtgctgctccttgtcctgcttgttaaacaccgtcacttctccagtctcccagcccacagccagcaccagccgcgtcgggtgccagcacagggaagcaacccggaacggcctctcgacgtgtgtatctggcacgcactccccctgcattggatgagaggcaaattcccacagttcagagagggacagctactttt

SEQ ID NO: 216623 - DNA, 401 bp, Homo sapiens; identical to SEQ ID NO: 204081
  chr16:1660482-1660883
  hypo

SEQ ID NO: 216624 - DNA, 196 bp, Homo sapiens
  chr16:1668009-1668205
  hypo
ctaatacaccacccacgtgaccctgggacgcactggagatttcggcttagagccgcagaaaccatctgaaagacataagtcaggagacagagtcctgatacctttccctatttggccagttcatgatccagctagccctgggcaaactagtccatcttttggataaaataaacacctgcctcagaatcgcttgaac

SEQ ID NO: 216625 - DNA, 150 bp, Homo sapiens
  chr16:1677033-1677183
  hypo
cagattctgttgtcgtaagtaacgctgtggtgaacatcggtgtgcacgcttcatactttagactgcttctttggcatacagtattagaattaggttcgtgatcggtgagccttgttctttttttttttttggagatggaatctcactctg

SEQ ID NO: 216626 - DNA, 220 bp, Homo sapiens
  chr16:1682397-1682617
  hypo
cccacaggcagggccggcttctgctcagagcgcagcttccagcaagcccgccggacctgctttctggcattttctcaccagccgcttggcctggggctcctcgccttgcagcgctttggctgattgtgtgctgtctaactcggtcaaaccaagttgccaggaagtggcccgtatcccatgctccagggttcttaccactgcttttctgagctatggtttg

SEQ ID NO: 216627 - DNA, 128 bp, Homo sapiens
  chr16:1701258-1701386
  hypo
ggtggactgagatcacggagagctggactgaggtcacacacaggttatggagaggtcgactgagaggtcacacagaggtcatctaggggtggatttaggtcacgcacaggtcacggaaaggtggactg

SEQ ID NO: 216628 - DNA, 130 bp, Homo sapiens
  chr16:1704526-1704656
  hypo
taagtttgcagttcaggggcatttaacacgatcacattgttctgtggccaccgtctctgtccagctccagagcattttcatgacgctagaagaggccctgtgcacctcagcactcactcctctattctcc

SEQ ID NO: 216629 - DNA, 59 bp, Homo sapiens
  chr16:1704800-1704859
  hypo
gttcacccatcatagcgcatcagtacttcattccttccgctcatgtacttctccctcag

SEQ ID NO: 216630 - DNA, 143 bp, Homo sapiens
  chr16:1705539-1705682
  hypo
cctgtgtctggcccacggggtgtggccaaagcattcctaccagcaggttgagcaaaacgaccaagggtcagcccagccttcttcacatccatggctggctcccggccctgcctgctccccacataggcgtggtgcgtgtcagg

SEQ ID NO: 216631 - DNA, 230 bp, Homo sapiens
  chr16:1730076-1730306
  hypo
tccatggaacagtgattattatgcctaggtctgcaccgatgtgggaccaggagtttaaactagtgctcagagcgaatccggtttctggttcctggtggccagagttttgcaccacccacatcagtggggggagggactgcatccccagccctgtcccagttgtgtgcatttagtacgtttcctttttgtttgtgctgcctggcactggctgcccggtaaatgatggtgtt

SEQ ID NO: 216632 - DNA, 119 bp, Homo sapiens
  chr16:1730761-1730880
  hypo
cttccttcaagctggaacatttctatttgtaaggaatttaatccaagtttatttctcactgcttctctctaagcctgaccagtcccctcatcctttctgaaactcggggacaaactatt

SEQ ID NO: 216633 - DNA, 41 bp, Homo sapiens; identical to SEQ ID NO: 89515
  chr16:1732071-1732112
  hypo

SEQ ID NO: 216634 - DNA, 527 bp, Homo sapiens
  chr16:1737775-1738302
  hypo
ttatggtatattatcaagggaagcctgaaagggaaactgctagttgtgttcaccacccaacgagatctggagtcctgccttctttctacacttagtcacacagacctagccccacagccctctagttgcagggcttgattgagaaaagtatgcagaggccgagagtgtgtgtgaccgaccacatcatagccatcgaatgtttatcaattcccattcagtgtttcagtgaatcttcagtagtctctgtgttctttgttagtcacctggtttagatgttccatgaattgttcttcctcttctagcaatgatgaccaacgtctatgaattgttaatatttaccggggactgtgctaagtgctttgcatgtgtatttttcatttggtgttcgctataactaggagtaggttgttttgctcctttcacagaggaggaaacaggcttggaaaaggtcactggcatgcataaatcccaagctagtcagtagcagagctagtcggtagcagaactagtccgtagcagagctagtc

SEQ ID NO: 216635 - DNA, 144 bp, Homo sapiens
  chr16:1753652-1753796
  hypo
taacctttatcgcacgttatttgctggagatggcgccatgctcctttcatggattagctgacattcctaataggctggatattttaggctgttttgcaggcttagaaacagagatttggggccaggcacggtggctcatgcctg

SEQ ID NO: 216636 - DNA, 105 bp, Homo sapiens
  chr16:1804798-1804903
  hypo
ccttgagaaaagacaagcctgtgtaagattcagaagcaccattgaaagacataaaagaagctgtacacgcagagggtgttgccacgtgcccggacctgaagacac

SEQ ID NO: 216637 - DNA, 164 bp, Homo sapiens
  chr16:1805218-1805382
  hypo
atggcatctcaaaccgtggaaaacgggcagatgagtcagtaaatgtactgccttagttgctgctggtgtaaaatgaagtctaagcctgacctccccgtaaacagcagtgatttccaggtggattaaagatctaagtacacaattacgaggacaacagaatgcag

SEQ ID NO: 216638 - DNA, 360 bp, Homo sapiens
  chr16:1808047-1808407
  hypo
tgctgggttttctgtaataagaatgtattgttagttccagtccctaattgacctttgtcccttccttcccctgcctctctgtgcgtcgctggactcgccaggggagttctcaggtgagtatctcactctcctgtctgtctcccctctgtgtgacggggggagtgggtggacgggggatgccccgagctatcccgtcaccgtggctgtgtggactgccccccacgtcgccgcagcgcctctgcttctgctcgcagccaccgccgctcggaagcttgttcggtttgctccaccagccacttgacaatgacctggatatccaacccccccagcctgaggagtcccccgcgggccatttctgaa

SEQ ID NO: 216639 - DNA, 329 bp, Homo sapiens
  chr16:1812259-1812588
  hypo
agatccacctatacgtgtaggcaccccaggaggaagcaggtgtcacccggcctccgagggctggctgagcctctgtgcccctccctccgcaggacaaaatccccatggcccagcgccgccgcttcacgcgggtggagatggcccgtgtgctcatggagcggaaccagtacaaggagcggctgatggagctgcaggaggctgtgcggtggactgagatgatcaggtgggagttgcggccaccccaggaggggctgcgggatcatccctgacggcaggactgcggctccctcctctgcacctccctgtcttctggggggactgaagtgcgc

SEQ ID NO: 216640 - DNA, 216 bp, Homo sapiens
  chr16:1814037-1814253
  hypo
gccctacctgtctcagatttctggagggatgggtaggagccagggttcgtgcccacggcgcctccctgctccctgcagctgagtcccaacgggggccaggaggacacgcggatgaagaacgtgccggtgccggtgtactgccgccctctggtggagaaggaccccaccatgaaggtgagcccgcgaggaccccgctcaggctggctgggcgagcgg

SEQ ID NO: 216641 - DNA, 133 bp, Homo sapiens
  chr16:1814369-1814502
  hypo
caagccagcgccaggccgcgatcccctgacctgcgaccgcgaaggagacggcgagcccaagagcgcccacacgtctcccgagaagaagaaggtgagcatggccgaggccaccgggcaccctccctggcttagt

SEQ ID NO: 216642 - DNA, 307 bp, Homo sapiens
  chr16:1818407-1818714
  hypo
atcccctgcatgccagtggccgccgcctcccccaggaggccgctgtcctgaatcgcttctgccatcccagggaacgtgctggccaccctgaatgggagtgtgctggacagcccagccgagggccctgggccagctgcccctgcctcggaggtcgagggccagaagctgcggaacgtgctggtgctgagcggcggggagggctacatcgacttccgcattggtgagcggggcccagggacagggctgaggttgggcgcggggggagcctggccgtcactctgctgctttgcccgcaggagacggagag

SEQ ID NO: 216643 - DNA, 339 bp, Homo sapiens
  chr16:1989238-1989577
  hypo
ggcagaaagcaagtcactgcaaggcagagcttcaggtgccgttccctgcgctttcacactctgccctggcctgcaggccacaggggagctgaaaagaccagatgcccgactcaggggagtctgtgtaccccattttgttctgacatccacaggagaacccagaatctcttctccctccactcacacggaggacaaataacaacaaaaggacgaaaacatcgcaggtttaccacgcaccagatcctgacaggctgctcgctcaaccccacagcacggtgatggccacaagcgtgtgctgttaacagccccatttcaggcgaggcagtggctcaagcctgt

SEQ ID NO: 216644 - DNA, 110 bp, Homo sapiens
  chr16:1997451-1997561
  hypo
agcagtgacccctgccgccttccacgcatgcattcattcacaggtgttcccaggatcaggttgcaacccatgtgttgtgctaggcactgcggatccggtgcagaatgagg

SEQ ID NO: 216645 - DNA, 334 bp, Homo sapiens
  chr16:2024265-2024599
  hypo
gggggccgtgctgcggagtctggagcaggtgagggcagcctgggtgggtgaggggcaagtggagagggcagcccactcacaccgtgctcggcacaccactctttctcctaggaggaccaggaggacatcactgcctttgacctcagccctgacaacgaggtatgtggggcggggcctggaggggacccgctccagcgcctccctcccagactgagtccaggaagatgtgagcagggtattgctgcccctctgctgacctgtaccctcccccaggtgctggtgacagccagtcgggcattgctgctggctcagtgggcctggcaagagggcagcg

SEQ ID NO: 216646 - DNA, 96 bp, Homo sapiens; identical to SEQ ID NO: 204085
  chr16:2042503-2042599
  hypo

SEQ ID NO: 216647 - DNA, 86 bp, Homo sapiens; identical to SEQ ID NO: 204086
  chr16:2042617-2042703
  hypo

SEQ ID NO: 216648 - DNA, 213 bp, Homo sapiens
  chr16:2043001-2043214
  hypo
acctaccagagcccgcccttcaccgagaccctggacaccagccccaaagggtaccaggtgcccgcctactagcggctggcaggcacagaccagggctccaaggccaccccaccaacgcaggccccagggtctccgggacctcccttgggtccttccagctcagtgccgcggacagagtaggtggccgctttgcgccatccggggccaagaggg

SEQ ID NO: 216649 - DNA, 308 bp, Homo sapiens
  chr16:2049434-2049742
  hypo
gctccagcctgaccccggcccctcccgacacccagggagcaggcctgagccagcacgcgtacctgggggcggcggcatccggggtgggcaggggccgccgagcgctgggaagtcctcctgtggcgtggggcaggggaaggaccccaggggccttgggagcccagggggttccttgggggcactccgagcaggggccgggccctccatgtgtccattaacgacgacggcaactggcccctcggctctgctggcaggagcttccggggcctgcaaagcccctgggggacaggtagcgggcgggggctgtg

SEQ ID NO: 216650 - DNA, 103 bp, Homo sapiens
  chr16:2105384-2105487
  hypo
ccgccgcttctcccccagctgactttgtcctgcagtggatggatgttggcttgtcctcggaattccttctggtgctggtgaacttggtcaaattcaatagctg

SEQ ID NO: 216651 - DNA, 81 bp, Homo sapiens
  chr16:2106519-2106600
  hypo
gggtgccatggcagcggggagaggtggcagcgcaggctgaaggaggtgggaaggaagcctgggtgtcctctcctgtgggga

SEQ ID NO: 216652 - DNA, 62 bp, Homo sapiens
  chr16:2106641-2106703
  hypo
caggtctccctgcaggtgctggacgccgtggtctgctacaactgcctgccggctgagagcct

SEQ ID NO: 216653 - DNA, 37 bp, Homo sapiens
  chr16:2106732-2106769
  hypo
ccatcaacgtcaaggagctctgcgagccttgctggaa

SEQ ID NO: 216654 - DNA, 42 bp, Homo sapiens
  chr16:2106973-2107015
  hypo
gggaggagatggtggcgagctggccggaccttgggtggctat

SEQ ID NO: 216655 - DNA, 440 bp, Homo sapiens
  chr16:2107057-2107497
  hypo
gggcagggcttatgcctgccagcccctgacacgcattgtgtctcgcagctgatgcggaacctccttggcacccacctgggccacagcgccatctacaacatgtgccacctcatggaggacaggtgagtgtggtgggtggggcgcagggcagtggaggccagcacagccctcggggcagctccagtgtcccttgccaagcacacactggcttagagagtccttgtcctctcgggcagctgttccagaggctgccactagagcgaggcccatgacttctaggatccagcccctgtcctctccttcctctgtcagttcaacagaatatccacacccagctcagtgcctgccccatgctcggacgtcctccagcggtgctccccaactacttagcctgttacaaggcgaggctcggggtcttggcttgacgttgcccttgccct

SEQ ID NO: 216656 - DNA, 459 bp, Homo sapiens
  chr16:2108517-2108976
  hypo
cctgtagctcacagcgtggtcagcagtgatgggctgccgcctgtgcgcaggagtgaacaagagtgttactgctggcctctgttccctgcccttccccagcggtgctcctgccccccccaagcacagggacctctggggctgctgcaggagcctcggcaacctcacacatccatggcggaccctgggacagggccctgctcacattccgtctctctggggaacacttttagagcctacatggaggacgcgcccctgctgagaggagccgtgttttttgtgggcatggctctctggggagcccaccggctctattctctcaggaactcgccgacatctgtgttgccatcattttaccaggtaaggcggtttctgtgtgcagtgagctggcaggaacgggagagctcccctcacgcctgcccacccatcccactgggggtcctgctgcgggggctgcggtgg

SEQ ID NO: 216657 - DNA, 148 bp, Homo sapiens
  chr16:2125861-2126009
  hypo
gccatctccctgccgtacaccaacccctccaagtgagtggtcgccccaggccctgtgcctcccagccgtggcccccgctaggccttgcggcagaaagccccggcagcctttgtccccaaggcctgagcgcctcggttttttgcacttc

SEQ ID NO: 216658 - DNA, 118 bp, Homo sapiens
  chr16:2129581-2129699
  hypo
acagaccaaggaggcgccggccaagctggagtcccaggctgggcagcaggtgtcccgtggggcccgggatcgggtccgttccatgtcgggtgagccttggccccagccacctccacac

SEQ ID NO: 216659 - DNA, 71 bp, Homo sapiens
  chr16:2135230-2135301
  hypo
tcacagtcctttgagcggtcggtgcagctcctcgaccagatcccatcatacgacacccacaagatcgccgt

SEQ ID NO: 216660 - DNA, 314 bp, Homo sapiens
  chr16:2135330-2135644
  hypo
tgcggggccggcctaggtgcctggacagggccagctgggcctcagcctgcagtgggtagggagtctgggcccccaacgccccacagagctcaacactgccgggtcccctacagcatgaagtgctcattgagctctgtgccaggtgctgctctgagtgctggggaccccggtgcgagtgacaggttagcgtgggagcacccggcacaccaaggagtgggaaggactgggcgggtggcaccggtcgcagggctggggagggcgctgttggtcagtgagctgacagctgagtggtgagggagcgggcagggggagcc

SEQ ID NO: 216661 - DNA, 69 bp, Homo sapiens
  chr16:2141840-2141909
  hypo
gctcaggcccagctcctgcacgtagcccccgctgtcatacacggcacaggagccccaggaccatgccct

SEQ ID NO: 216662 - DNA, 574 bp, Homo sapiens
  chr16:2141972-2142546
  hypo
caggaggccgcggcactcctggagaactactcccttgtccttggcgtagacgcccggggccctcgctctgctcaccccagcagatccggcgctgaataggcccacgtccccgagccattgtgaggactctcccagccaacgtcgtaatcgctggtgctgaagcctcctgcggccgagcacgtgtggaccctggggccgggagggtctgggtagagtgctgaaacacacagagccccaggccggggccagggcctcatcaaaacccaacaggagtgtttcctgctggccagctcgcctgagctctggttcggcgccaccccagggaaccctcccagcagccatcaattagacaacgttaccatctctcatatacagagaaggaaacggcggtgttaagagggcaaaggtcacacagctagggagcagggctgatgccagagctccgctaaaggctgctctctcaacaagaggaacgatttaagtcttggggcacgccctgccagctcaccttcctgcagccgcacctgccgcagccgtgggggccccagctctgggctggactggttcccgtgga

SEQ ID NO: 216663 - DNA, 412 bp, Homo sapiens
  chr16:2142628-2143040
  hypo
tgccccatgcccgcctcgagtgagcggccaccagagacccagggaacatggctcccactgccctgctggccacggctagacctgggcttctcagccttatcctggggatgttctggggcagacagttgtctgtcatgggcccgtcctgtgcactgcaagacacggacctgtgtccctcccctctgcctactgatgccagcagcacctacctccagttctagcagccacaaaggtatctacacatgtccacatgtcccctagggtctggctggactaaaggcaaaactaaagcccagaagacagaccagtgcaccggatgcccgtaccgcgtgatggccaggaaggcccggctgtgcagctcctgcttgatggcgctttgcagacggtaggcgtgcccatggcatgaggcatc

SEQ ID NO: 216664 - DNA, 182 bp, Homo sapiens
  chr16:2146181-2146363
  hypo
caaatgtcacagggcgtagttacccaaacccagacaccgcagcccctgtgcatgcaggccctgtggtgtggcctgtggctccggggcaccgcacctgcactgcatgccactgcactgaatcctgcaggcagctgcagtgcaacggcagggccgtgtggacctcagcacacctgagcatagga

SEQ ID NO: 216665 - DNA, 63 bp, Homo sapiens
  chr16:2146462-2146525
  hypo
ggtaacctctatatgaccatttgttgataagttacaaaacaaccaagaaattgaggaattttt

SEQ ID NO: 216666 - DNA, 56 bp, Homo sapiens
  chr16:2193200-2193256
  hypo
cacttggtgcagtccggggtagtcagtgattgttacggttacgcaggggtctgttt

SEQ ID NO: 216667 - DNA, 302 bp, Homo sapiens
  chr16:2213343-2213645
  hypo
caggttctttctctggggtgtggctggtgtctccccgctgcagcctggtgctggctgggtcctgaccgcacctgtcgtggcaggaaacacattcgtcgtgccttggctggtccctgtgtgactgcgtcccgccacgtgggccacaccctgggcctacccaccaaggcccagccttggccccagggacattcagcctggaggtgactggctgtgactcaggacccagaggagtagagggagccaggcaggggtccctccacctcggggaagagctggatgggctcttcgggagctcagaaagg

SEQ ID NO: 216668 - DNA, 260 bp, Homo sapiens
  chr16:2213723-2213983
  hypo
ttgcctcctagaggcctgcctgagccggggctggtggtggaaggctgctgcggcggccccacggtgccccacagcaggtctgcacacttgcagcagcccgtctgactcacaggggcctgggctccatctctcaagcccctcatttgtgctccacccacaggaggtgcttcccaaggaccgtagatgcctctctagagcatgagctcaggcaagagtgcccgctacaaccgcttctccggggggcccagcaatcttcccac

SEQ ID NO: 216669 - DNA, 95 bp, Homo sapiens
  chr16:2229595-2229690
  hypo
gggctgccagggcctggcagcggcaccttcttggaggtgggtgtgggcgagccctggagcttgggcacaggctgcgtcaggacgggcttgggaga

SEQ ID NO: 216670 - DNA, 265 bp, Homo sapiens
  chr16:2230223-2230488
  hypo
gtttcactgaggccagcacggtggccacccggcccggctctgggctggcagggcggggagtggggtggccctcaggaggcctgcgggcagcccggcccccacccccaatggaggacagctccagcatggccgcgatgctcttcacactgccggcactacccgtgtccacgctgccggccaggtcactggcccgccggcactgtgcccggacccccagcaggccatcctcaggctcggcgtcaggcaccggctcatccgccaggtt

SEQ ID NO: 216671 - DNA, 321 bp, Homo sapiens
  chr16:2260756-2261077
  hypo
gctgcaggagtaacgggaggcactcacccctgtaggcccaggtttggggcgctcagcacagcagcttgctggttccatcctgcagcccctgctcacaatgtgccgattgtctgcgtcccttgtctgcagccttggccaggggaaactcagaacagaacccctcccctcctgaccctgcgcctccccctcagctctggatctgatatccaggtcagagccaggacagcccctcctcccacctgggggatgcctgtcaccaggcccggctccagacacctggcctgtgcagactggagctcagggtctgggaggcgtagggct

SEQ ID NO: 216672 - DNA, 92 bp, Homo sapiens
  chr16:2278291-2278383
  hypo
gggctggaggaaaagccagacggagccctggctgcccagcctccgccttcccaggccctgctgacagcaggctcgttgcagatgaggacgat

SEQ ID NO: 216673 - DNA, 402 bp, Homo sapiens
  chr16:2280801-2281203
  hypo
tgtgggaggtggggcgggctctggccttgacctggcgtttggtttctgggatggtggcgtcacctgggagcatgaactccttaggttctggcggggtctctgggctgggtctctggccagccaggcccctttccacccacctaaactctagcagcctccagccctaggctcagcacccctccctgtgcttcagcagcccctcttggcacccctgccactctggcacccctgggattttcccctttgcgggcatcctgggtactctgtgtgtgcccttggccagtcagcaggcccggtgggcttagtccagggctgctagctctcctgttggcctctagtggagatggcagagggtcctgcctgctggtggccaagggctggggcgtgccaggtcctgtcttt

SEQ ID NO: 216674 - DNA, 237 bp, Homo sapiens
  chr16:2281402-2281639
  hypo
cttaattgtttctgagtcaccacgcttttgtcgtgtttcaagagaacagcttgtcaaaacaagacgccagccggactgaggtggtttctaagcagtggcttcacagctgtttcccacttgtcatctttatgagcagaaaacctgaactgtgtttacaacctagctttgcacattgtcagatttttcccagcatcctccagaagtgcaaaagcccagcttcctcgcctcaggctgtcc

SEQ ID NO: 216675 - DNA, 71 bp, Homo sapiens
  chr16:2281702-2281773
  hypo
gcctgcctgccctgctgcagtggcccagcccatctcctccgatggaagagtggccccggacgcacatcctc

SEQ ID NO: 216676 - DNA, 824 bp, Homo sapiens; identical to SEQ ID NO: 28823
  chr16:2282326-2283150
  hypo

SEQ ID NO: 216677 - DNA, 94 bp, Homo sapiens
  chr16:2314153-2314247
  hypo
ggctccaggccagcccgccccacctggtactgctgctaccactggaagcgctgcgcctctttcgggttttgtcccggccgcgatccttctcact

SEQ ID NO: 216678 - DNA, 340 bp, Homo sapiens
  chr16:2382409-2382749
  hypo
atacaggatgaggatgtctttgatctccttcttggaagcctcatccatatacttctggtaataggccaccagggctttggagatggactgacgggtagcataaatctgggccacatgaccaccaccctccacacggacacgaatgtccacaccagcaaatcgctccttgctgagaagcaaaactggctccagcagcttgtactgtagcgtgggcggctcaatcttctccaggggccgcccgttcaccttgatgagaccattgccgcgtttgcagtgtgccacagctgtggctgtcttcttgtgtccaaagacccgcaccgattgcctcctccatttcttt

SEQ ID NO: 216679 - DNA, 510 bp, Homo sapiens
  chr16:2485934-2486444
  hypo
gaagaagtggtccccgtgttagcagttcagttgctgtccttgctctatccgatggcctgcctccccattccctctcaggagctcgtgcccagatgtaccctgctgagggacctgctaatgatactctgactttgcaggttacgaaagtcgcctcttgttttagcaaaccctttaatttcagttggcaaagagtgactgagccagagcctcagcacgggggctgtttgggctccctgccctgtgcgccatgagcacgcagacctgcctgtggatgctggccctctccttggccatcctcttagaactctcgagacagagttcagcgtgccctgtaacacagagccaggcttctaaacgggaagcaggtacaggcaggttagaactggcctggtgcctggatcccttcatccccagaggccaggtgctccttgaaagaaacttgcgcagccttttcttctaccagttaactgcttatctgctcagcaccccaaggaacgagcccatgatctg

SEQ ID NO: 216680 - DNA, 99 bp, Homo sapiens
  chr16:2508556-2508655
  hypo
tgctcttgaaccggaaacccagggatgggagatgctcactgagctgctgcttttatgtgtgctggtgctatgtgtgttcatgtccgcggcagctgtctt

SEQ ID NO: 216681 - DNA, 52 bp, Homo sapiens
  chr16:2531017-2531069
  hypo
ctgtcctttgaccacgctgtctctatcccttctgaggctaaggcttcctcac

SEQ ID NO: 216682 - DNA, 33 bp, Homo sapiens
  chr16:2531177-2531210
  hypo
ccatgcctctgtactcctctgcactcaggtacc

SEQ ID NO: 216683 - DNA, 40 bp, Homo sapiens
  chr16:2531240-2531280
  hypo
gaatgcctattaaaatgattaggaccgggcgtggtggctc

SEQ ID NO: 216684 - DNA, 401 bp, Homo sapiens
  chr16:2540427-2540828
  hypo
ttcatggcgagcagcgattcgctcggaccccagaggccacaggaagatggcttcccccacaggaggcaccctcacagggccctgctggcactgtctgccttgggctgcctgaacccggagagagagtgggatagactgttcatggggtgtcacccttatgtcacctgcaccccaccctgtcagtccagagtgaggctcaacccacaggggttgcttgggaactgttgcccgtgaggagttgggtgttattatcggctccgctctgcagacatggcaaccgcaggttagggaagatgcacggcttgtccgcatttcaagcaaacaagtggcagagctggactttgtggccaggcctgtctaactgcaaagctgccccgtttccacagtagcccctgcctccc

SEQ ID NO: 216685 - DNA, 70 bp, Homo sapiens
  chr16:2540933-2541003
  hypo
ggcttatgatgtacagcagcagccagccagcagatagacaacagggaaagccactcggccgtgaaagctc

SEQ ID NO: 216686 - DNA, 81 bp, Homo sapiens
  chr16:2546324-2546405
  hypo
tccgggacattccctgccgcacggtcacgcctgacgccagcgtgtacagcgacatcgtgggcaagatcgtgggcaagcaca

SEQ ID NO: 216687 - DNA, 118 bp, Homo sapiens
  chr16:2546506-2546624
  hypo
tgcctggccaaccagttccccgacatctccttctgccccgccctgccggccgtggtggccctgctgctgcactacagcatcgacgaggccgagtgcttcgagaaggcctgccgcatcc

SEQ ID NO: 216688 - DNA, 145 bp, Homo sapiens
  chr16:2579464-2579609
  hypo
ctctgtcccagacttcgtggtgctcgacgactcccttcacgtccaggccacctacatctcgggtgagctggtgtggcaggcggacgcagctaggcagtgacaaggacctcggctgagaggacacctggccgcagcgggatgccat

SEQ ID NO: 216689 - DNA, 345 bp, Homo sapiens
  chr16:2642768-2643113
  hypo
tgtgctctagatgccgccagtggagctttgcccgcagtctctgtccatgcaccctgggccaccggggagtggaattgtccatttcattgtctctctcaggggatgctggcgcgggggtgggtggcgcctgtccgtggggcccttgcctgcctccccgtggtgctggcgtgttctgtcactgagccactctggggcttcagtgtccctggcatgggtgacactgctgggagtgcctctgggctccttgcctgtggcctttttttttctcaggatggatttctggaagcgaggctacttctcagtactatttccgaatcgcttcctcagtgagtcctccccaggctg

SEQ ID NO: 216690 - DNA, 202 bp, Homo sapiens
  chr16:2645690-2645892
  hypo
aggggcaggccgaggctatggggagttcgtgtggcaggaggagcgtggagaatttctgtttgtgattgtcatgggagcatctctttcttgtttctttccacaggcaccagtttgtagaaaataatttaatactaaagatgggcccagtggataagcggaaggtgagtggtcagtggtcccgctgctccgcacggacacctgc

SEQ ID NO: 216691 - DNA, 249 bp, Homo sapiens
  chr16:2648042-2648291
  hypo
ccagctccatgcacgtcaacccagtcccgcccagactagtggacagacctggtgtcaccagtttttcctagcatcagtccgaaccatgcgcccgccctgccccaactgtgtgctggtcctgctgtggccgaggggaccgggtgtgtttggctctttatgcccctcccgctgtggtcctggaactcttcaccagggagggagccctgcgggggccgcagctttgtggagggagccgccgtgcttctgtca

SEQ ID NO: 216692 - DNA, 64 bp, Homo sapiens
  chr16:2770028-2770092
  hypo
agtagggggctgagccggagccccaggcagtgcagcggagcctggtgggggactgcaccaccag

SEQ ID NO: 216693 - DNA, 48 bp, Homo sapiens
  chr16:2849308-2849356
  hypo
acggtccagctgggcgagctgacttccaggccaactccttggaacctg

SEQ ID NO: 216694 - DNA, 32 bp, Homo sapiens
  chr16:2849623-2849655
  hypo
cctctacccctgttcccgctacacaagcacag

SEQ ID NO: 216695 - DNA, 194 bp, Homo sapiens
  chr16:2974650-2974844
  hypo
gtgggtcacgcaacccccccaggctagtcaaggttcaggcaggtggagacaaagcccggttgctgaggggcctgtggactttaacgggcggagtggcggtgggtcagcatctaccatccaagagcctgaacgggcaagagtgggaacgggtcctcagccttccacaagccggcggtcagggccttttcttgtat

SEQ ID NO: 216696 - DNA, 340 bp, Homo sapiens
  chr16:3021581-3021921
  hypo
gctacactgtgttgtcgggtgtggccggctggcgtgctctcaccgccccctccaccagtgctcggctccgggcatttggatggcaggctgctgcccgcctactggtatttggggcccggggagtgggtctgggttcaggggctccaggctccctgccctgctacctgcgcatggacgcactggcgctgcttgggggactggtaaatgtagcccgtctgcccgagcgctggggacctggccgctttgactactggggcaactcccaccagatcatgcacctgctgagcgtgggctccatcctgcagctgcacgccggcgtcgtgcccgacctgctctgggc

SEQ ID NO: 216697 - DNA, 48 bp, Homo sapiens
  chr16:3062887-3062935
  hypo
tgggccttaaaaccccgcctgcagccgagagcccgcagagtccccagg

SEQ ID NO: 216698 - DNA, 72 bp, Homo sapiens
  chr16:3139013-3139085
  hypo
gggacattcctgcaggcctccgctgtggaggaccccgggtaggtggcgcagggcgcggctggcggaaggcgg

SEQ ID NO: 216699 - DNA, 1077 bp, Homo sapiens
  chr16:3139367-3140444
  hypo
gggccgctcgcccgtgtggctgcggcgatggcgggccaggttggagctattgcggaaacggtggccgcaggtgtcgcaggcgtggggcttctcccctgtgtggatgcgctggtggcgcgccaggtgggcgctctggctgaagccctcaccgcactcgctgcagcggcagggcttctcgcccgtgtggctgcgctggtggcgggccagatcctgggtctggccgaaactcttcccgcactgggtgcagtggtggggccgagggccaccgtgggtcagcaggtggcgggcaaggctggcccggcgcacaaagcgcttcccgcactgcggacaggcgtagggcttctcgcccgtgtgcacccgttggtggctgaccagctgcgagctctgcgtgaagctgcggccgcaagcctggcaggagaagggccgctcgcccgtgtgcaccctccggtgggccaccaggtgctcgctgcgccggaaggccttgccgcagtcgctgcacacgaagggcctccggtcggagtcccggcggcggctgccggagccttcggaggaccggcggtccttgtccctggcgtggatccgcaggtggcgcttgaggctggagcggcgctggaagctctggccgcagtgggagcacaggacatcggtcagtggcggcgcttcggccttactctcaggagcgcagggcggcttctggtcctgggcgtgcgccagcaggtgctgcacaaggctggcgcggcgctggaagccgcggccgcactctgcgcacaggaaggcgggttcggaggagtgggtcagcaggtgcttgctcaggtgcgagctctggcggaagcggtggccgcacaggtggcaggcgtgcggccgctcgtccgtgtgagtgcgcatgtgcagcttgagaatggagctgcggccgaagctcttcccgcagcaaaggcacaggaaggagcgcccagccgggtgcgagcgcagctggtgcgccttcaggcgagacagctgcgggaagctcaccccgcagtccgcgcagatgaactgcaactccggattgggctcggggacgccctcagccactttgacctc

SEQ ID NO: 216700 - DNA, 128 bp, Homo sapiens
  chr16:3170504-3170632
  hypo
gccttggacttgaagcgcccgcctacacagctttgtctcctggtgccctggcgctgattccccgagcgtgggggagctcctgggctaatcccctgtcctcattgaggcatccccgcatcaccactctt

SEQ ID NO: 216701 - DNA, 187 bp, Homo sapiens
  chr16:3189117-3189304
  hypo
tgggtccaggctggccgcccccgattctgctggaacttcagtcttgtttcccaccccatccttagctggttccaaagcaggctctccctaggtcttgccaggagcctgagtaactcctttcttggctgatgatcagtttttgtgcgtttccacatgcagcatgggacggcgccggcgctgcccagcc

SEQ ID NO: 216702 - DNA, 322 bp, Homo sapiens; identical to SEQ ID NO: 204094
  chr16:3200663-3200985
  hypo

SEQ ID NO: 216703 - DNA, 100 bp, Homo sapiens; identical to SEQ ID NO: 204095
  chr16:3208999-3209099
  hypo

SEQ ID NO: 216704 - DNA, 74 bp, Homo sapiens
  chr16:3211569-3211643
  hypo
aaatgatcaggcacttcaggtccccgggaaagcgggcacagaggtggccacccctgttcccctcctggcaccat

SEQ ID NO: 216705 - DNA, 125 bp, Homo sapiens
  chr16:3286323-3286448
  hypo
cagggatggccttatttctcgatgtaataccagcctccagaaagttgacaaaagtaaaaatataaatgaatgcctcttcttaaagttaattatacctgactaatggctgacgatggcttaaaata

SEQ ID NO: 216706 - DNA, 87 bp, Homo sapiens
  chr16:3315530-3315617
  hypo
caggagcttcataggcatagacctccctccttccctcctaccccctcccccctctcccaactaatgccagaccggccactacttttt

SEQ ID NO: 216707 - DNA, 137 bp, Homo sapiens
  chr16:3515977-3516114
  hypo
cccgggaccttgccggaacacctgtggccgttgctgctgttaactgaggtgtaattaacatgcagccaagtgcacagcttcacccagcagatccgtacgttttgacaactgtgaaacaagacgtagcacatcgccat

SEQ ID NO: 216708 - DNA, 88 bp, Homo sapiens
  chr16:3552081-3552169
  hypo
ctggtaaggagaagggagctcgaattcctttgctaagagggtggggaagtggaagaacgaggctaagagtgttggttacggctgggcg

SEQ ID NO: 216709 - DNA, 37 bp, Homo sapiens
  chr16:3552775-3552812
  hypo
gttttgttggggagcgcacacacggagatttcggaat

SEQ ID NO: 216710 - DNA, 165 bp, Homo sapiens
  chr16:3707025-3707190
  hypo
ctgcatgcggccccgggggacgcagtagccgagatcgacgctctctatgacgtctacctggatgtccaagagaaatggggcttggaggtgaggccctcccaggggcagtgggcaccagcggcctccgcatgtcccagggccacaggcagcgtttcctggtaggac

SEQ ID NO: 216711 - DNA, 383 bp, Homo sapiens
  chr16:3741882-3742265
  hypo
cagtgggctgagaaagttgccggcagagcccagcgagggaggaaagcagccaatgtgtccccagccgcacgcagttcaccgacgcaggcccagaaaccagacactttcactccaacacaggactggaccgacccaacaccaacacccactgaccccagggaccacataccaggaccctgccttggtcagtagatttgcaatacgtgatggtgtcaaggatatgtggccagccagccacgccgtgtcaaagtctaagcctaaatgaaccgcatctaactgggagcctctcctgttcttcacaaatttgtaacaagtagaaaggaaagacaacagaatatccaggaatcaaggttttaaaaatcagcatatcagccaggggtgcg

SEQ ID NO: 216712 - DNA, 354 bp, Homo sapiens
  chr16:3776074-3776428
  hypo
cactgtaacagggaccggagctggtgctccaaggtgtctgtccctcagcatttcctcaaacgccacacgggacatgctgcgcggcagcggcaggatttggggggaagtcagaaagcacctcgcgagcctggagcactctctgcctcagattctgggagtcgtgtacggggggggggagccgcctgaacacgggaagaagcgccgcctctgggggtggcagctacgacggacagggaggatggaggagtgggccaaatgcagtttcagaccaactgacgaccctaactgtgtgagcgacaatcacctgtgagcctcgaatgtgtggggccaacgctgagccgcccacctcagtcg

SEQ ID NO: 216713 - DNA, 1164 bp, Homo sapiens; identical to SEQ ID NO: 204099
  chr16:3781398-3782562
  hypo

SEQ ID NO: 216714 - DNA, 924 bp, Homo sapiens
  chr16:3784366-3785290
  hypo
gacacctcagcatcccgcctcctaacacatgcatgtccccggtgcacagggaaggctgccccagcaggagcccctatcaggcctgtcttctggacaaccccactgctgccatgccacaggcaggtgccccctcctggggtggaactcagctgcgcaaagcctgtctcggacgcggtaacctcccgtgtcacccttaggagatggaactcaagcattaactcaccagacaccagtgagaccagctacactccagcgggagcaagtccgaagacaacaggccaggagctctgcttaggagccacctagggcgtaaacccacgccaccccctgcccgcgcctcctctgtcctgcgaatgacactctggggcgccgtccagcaggtggctgcctctcaaccacctgtgcagtgagcacgagtgtgtgtggcggaagcggcccaggccccacgctccgcctacagcccatccggcacccacctcacagacgtgctctcatatgggacaggcaccagagtggcagtatgtccccagccggctcccggctgcctcacccatggcagcagcccacgcaagagccacctccattcaccgcttttcctcactggtcacaatcgcctgtcccaagttctggggctgcagccttcaacgttcgtcatcgctctccctgcacctacagctacagcccacacccacgccaccatcatctcttccccagacagccgcacaaacccgcacacagcgcgcctcctcccaccgcctggcgggtcctcttccagcaccttcctgtggtgggcgggtctggcccacacgccacctccccaaggctccttccccttcagagctctgccacgctcagagcacaccatgcttgggtctgggttctttttgtttcacatcctaccaggacacagccactcccttgggg

SEQ ID NO: 216715 - DNA, 182 bp, Homo sapiens
  chr16:3785796-3785978
  hypo
cctctcttccctctccgagtctaagtggacccccagctccccagagcatccactgtgcagagagtgcagagcccacactgctgcccaccaacgccctgtgctgcaggtggtgtcgacgtgcatgtgtgaacggagacaccaccacaggaaggacctaacagtcgacacgcgcctcccagcct

SEQ ID NO: 216716 - DNA, 152 bp, Homo sapiens
  chr16:3802012-3802164
  hypo
gcacagacacagaggtaagacgcagacaccaagacaacacagagcagaaagccaaggcaaagcattgattagcattcggtctcattgcacacatcacaggccatcatcactaacaacgacaggctcggtccggctccaagaggcaaatgttt

SEQ ID NO: 216717 - DNA, 207 bp, Homo sapiens
  chr16:3811572-3811779
  hypo
tcttgaccaacctccgcagacaccgcctcctctccagggcacgtggctgcttcagacctctgacagcagcctgaggtccgggcaaccaggtaaaaaccccgacgcagcactccccacgcacacggtccccagcacttgaaggtgcaaaggcctggtccagggtgcagacgtgcccttcacagtgggaagcgtcggaaacacacagcc

SEQ ID NO: 216718 - DNA, 209 bp, Homo sapiens
  chr16:3812494-3812703
  hypo
cagactcctgtcttcaccagcacctttctgtaagaagatcccatatgtgcagaagtgaagtcaggagtgtatgtgaactgcgccgctcccctcctctggcccgaggacctgctccacgcggcagggctgttgcagcgcaccagcatctcccaaaaacgcggctctcgagcccttggaggctgctgtctcatatcgcagtccccagcccc

SEQ ID NO: 216719 - DNA, 148 bp, Homo sapiens
  chr16:3900218-3900366
  hypo
gtggtcccattttacgcattactcggagggaaagcccgcggttaggtaggaagtattgaaagtgcttcagttcacttaccttggccatgcctcctgcctgtgcggtgttcagtcccgcgtgaccagtcatttgcggggaaacctgcgt

SEQ ID NO: 216720 - DNA, 309 bp, Homo sapiens; identical to SEQ ID NO: 204100
  chr16:3931082-3931391
  hypo

SEQ ID NO: 216721 - DNA, 86 bp, Homo sapiens
  chr16:3998751-3998837
  hypo
cgccccaaactggaaacagctcaatcgatcctcagcggaacggagaaatcatggcctcttcacgcgatgaaatattatgctgcaat

SEQ ID NO: 216722 - DNA, 360 bp, Homo sapiens
  chr16:4164556-4164916
  hypo
accccgatggcgtggatgcagccgtggagcagccccctgctcagcagctcccagtgcagggccccggctccgggcgaggggaagcaggcttcatcccggaaatggtagccaaaggtctcgaaaaggacagagtaggccacccccagacacaaactcaggtacaaaggtaagtgcatgacggtatagagcaaaaagagcacttcgatgcacatggagaagctccccacttgagataagcaagtatctgtgggccgggctgtggccgtaaggttggagctgtcgccgcgtcctgagacaggcgtcaagacctggaactgcgcagccagggtcagggcgaacaccagcagggtgagagccagc

SEQ ID NO: 216723 - DNA, 562 bp, Homo sapiens; identical to SEQ ID NO: 204101
  chr16:4165866-4166428
  hypo

SEQ ID NO: 216724 - DNA, 454 bp, Homo sapiens; identical to SEQ ID NO: 204102
  chr16:4166526-4166980
  hypo

SEQ ID NO: 216725 - DNA, 217 bp, Homo sapiens; identical to SEQ ID NO: 204103
  chr16:4233232-4233449
  hypo

SEQ ID NO: 216726 - DNA, 204 bp, Homo sapiens; identical to SEQ ID NO: 204104
  chr16:4234087-4234291
  hypo

SEQ ID NO: 216727 - DNA, 391 bp, Homo sapiens
  chr16:4268257-4268648
  hypo
aggaagtttaaacagacccattctaagggccacgtctttctgagaatgggagggaagccctttccgaaggcagaggaccggtaagggcccttcaaagctctctgaaacagcaacacggtcggagggaggtcattagcagtgctgtgtggcttcctcatcctcatggtaagtgagcactgggagtaagacaatcagcccttcagaaaccactcgggcctggagaacgcagccagggctgagccacagagatggggcaggagcagttctggcctccaatatacagcggcgctttgctcctctcgcacaagtgaaatcacagctgatgtctccatggctttgaagagcctcacacacaggcccgctggaccacgtgggccctgctcctccatca

SEQ ID NO: 216728 - DNA, 52 bp, Homo sapiens
  chr16:4312582-4312634
  hypo
gactggaatcccgcgttgatgctctgcatgcgtctccgctcgttgctgttgg

SEQ ID NO: 216729 - DNA, 121 bp, Homo sapiens
  chr16:4385195-4385316
  hypo
tgaggtgggggagagaggggtagagggaggactggggtctccagtgagctgagccgtgccccccgccctccctggagcaggtacaagatgctcatccacatccgcacacacaccaacgaga

SEQ ID NO: 216730 - DNA, 70 bp, Homo sapiens
  chr16:4430996-4431066
  hypo
cccgccaggggaccacggtgccccgagacgtgccacccgacacggtggggctgtacgtctttgagaacgg

SEQ ID NO: 216731 - DNA, 298 bp, Homo sapiens
  chr16:4431189-4431487
  hypo
cctggacctgacagccaacaggctgcatgaaatcaccaatgagaccttccgtggcctgcggcgcctcgagcgcctctacctgggcaagaaccgcatccgccacatccagcctggtgccttcgacacgctcgaccgcctcctggagctcaagctgcaggacaacgagctgcgggcactgcccccgctgcgcctgccccgcctgctgctgctggacctcagccacaacagcctcctggccctggagcccggcatcctggacactgccaacgtggaggcgctgcggctggctggtctgggg

SEQ ID NO: 216732 - DNA, 820 bp, Homo sapiens
  chr16:4431516-4432336
  hypo
ccgcttgcgcaacctccacgacctggatgtgtccgacaaccagctggagcgagtgccacctgtgatccgaggcctccggggcctgacgcgcctgcggctggccggcaacacccgcattgcccagctgcggcccgaggacctggccggcctggctgccctgcaggagctggatgtgagcaacctaagcctgcaggccctgcctggcgacctctcgggcctcttcccccgcctgcggctgctggcagctgcccgcaaccccttcaactgcgtgtgccccctgagctggtttggcccctgggtgcgcgagagccacgtcacactggccagccctgaggagacgcgctgccacttcccgcccaagaacgctggccggctgctcctggagcttgactacgccgactttggctgcccagccaccaccaccacagccacagtgcccaccacgaggcccgtggtgcgggagcccacagccttgtcttctagcttggctcctacctggcttagccccacagagccggccactgaggcccccagcccgccctccactgccccaccgactgtagggcctgtcccccagccccaggactgcccaccgtccacctgcctcaatgggggcacatgccacctggggacacggcaccacctggcgtgcttgtgccccgaaggcttcacgggcctgtactgtgagagccagatggggcaggggacacggcccagccctacaccagtcacgccgaggccaccacggtccctgaccctgggcatcgagccggtgagccccacctccctgcgcgtggggctgcagcgctacctccagggg

SEQ ID NO: 216733 - DNA, 319 bp, Homo sapiens
  chr16:4432396-4432715
  hypo
cggctggtgacgctgcgactgcctgcctcgctcgctgagtacacggtcacccagctgcggcccaacgccacttactccgtctgtgtcatgcctttggggcccgggcgggtgccggagggcgaggaggcctgcggggaggcccatacacccccagccgtccactccaaccacgccccagtcacccaggcccgcgagggcaacctgccgctcctcattgcgcccgccctggccgcggtgctcctggccgcgctggctgcggtgggggcagcctactgtgtgcggcgggggcgggccatggcagcagcggctcaggacaaag

SEQ ID NO: 216734 - DNA, 197 bp, Homo sapiens
  chr16:4478613-4478810
  hypo
gactaaggaactgcggttagctgtcttgttccccaagtgagctcataacctgccatgggcaagttttatatcaggtagtgtacacaggtgagaggtggcatccttcagggtacgtgctgttttcacagatagagtcatcaactggttgggcggggtggctcacgactgtaattccagcgctatgctggcgctgaggc

SEQ ID NO: 216735 - DNA, 249 bp, Homo sapiens
  chr16:4511753-4512002
  hypo
cccacaaggggccgcgaggcgggcaggtcacagcaggttgaagtcccctttgtgctgttccagccactggtccagcgtcagggccttggggttgagtctcagggtcagctcgatgtcacggtcgggtctcagggcatagaaacggaacatgttggccaggtcccgggcaccgggaaagccaagcttttcgtagtcctcaggagtcatctggaagcagaggagcctgtcgtggccggcgtcctccagtgc

SEQ ID NO: 216736 - DNA, 92 bp, Homo sapiens
  chr16:4689936-4690028
  hypo
tccgcggctccgacggtgtttgctgcggctcctctgctgcgttgagtccgtctgtgcactcagatggcctgtgcttcgcctttcgcccgcgt

SEQ ID NO: 216737 - DNA, 526 bp, Homo sapiens
  chr16:4704660-4705186
  hypo
tgtgtcctcagctggaagttcgggtgggtggtgtgaggaggggaccatgtgtcctgtgcacagcccctcgcgtgacaggtgctcttgaaaggagcctgagtgctcgagttgaggggctggtggagacgacttatgtggggaggttcttagggacctgccaccaggtgaggccgcccttgggctctggccttgggctccccggcagccagggctcctcctgtggagcagcactttggggaggaacaggttcctttttctagactttgttctttgaggctctaccttgccccggcacttgattatatttctttaatgacactagtaatgcatgcctgtgtgctatgacaggcgtcgaattcttgggcgtaggagcatttggagtgaccagggcaggcccctctgtcccctccttgcaccccactgcttggggttgagtgtttgacacccacggggcctggtgccctcctcgggcctggccgacatggtggaggagctgggttgtggcgaggtgtccaggggctgccac

SEQ ID NO: 216738 - DNA, 103 bp, Homo sapiens
  chr16:4723493-4723596
  hypo
ggcagccctcggacgacgagaacagcgacaacagcaacgagtgtgtggtgtgcctgtccgacctgcgggacacgctgatcctgccctgccgccacctgtgcct

SEQ ID NO: 216739 - DNA, 198 bp, Homo sapiens
  chr16:4780091-4780289
  hypo
atggacaagctgcggttcaggagttccggctcgctggcttcatcgctgagctcggacatcactgaggaggaaggcccaagggttagatctttcctggctggttgttccagggcatgaaacaggctggtcctgcccctgctacaccactgcactagcagactgataacccagtgcagtcaaccccgggagtaactcaga

SEQ ID NO: 216740 - DNA, 291 bp, Homo sapiens
  chr16:4787716-4788007
  hypo
tggagagtggagagcgggggtggctaggccctcagggctctgcctgctgccttgtcctccaaaagccctctcatttgtccacagtcggactatggggaagaggagctgttcatcttccagcgaaaccaaacctccctgattccagacctgtcggaggagctggctgaagatcctgccgatggcgacaagtccagggcctgggtcgctgcagctgaagagtcccttcccgaggtctgtgggacacagaagagtatacgcctgtgtgtgtgcgatgttagtctaaactgactg

SEQ ID NO: 216741 - DNA, 206 bp, Homo sapiens
  chr16:4802455-4802661
  hypo
tgcttgtgcaggtcggtgccccggcggaagccccggccacaggccgggcaggtgtagggcttctcacctgtgtgcgtccggcggtgggcgctgaagtgcgagctgttgttgaagcgcttcccgcactgggtgcaggcatagggccgctccccgctgtgtgtcctgcggtggatgaccaggctggagctctggctgaagcgcttccc

SEQ ID NO: 216742 - DNA, 206 bp, Homo sapiens
  chr16:4802841-4803047
  hypo
ggtgtacggcttgtcagccccatgggaagcccgtcttcctggtggggggccgcctcttggctgatcaggcctgaccaagcccctgactggggctggcctctgacctgggagcgggtggccaggcccctggcatcgtgccgagagcactcggtaccactccattctcaacggggcatcctccctgccatcaccgccgtcctccaact

SEQ ID NO: 216743 - DNA, 93 bp, Homo sapiens
  chr16:4845270-4845363
  hypo
ggggagccagggagcgcacctgctgggcctgggccctctcccctgggctgggcggcctctgctggccctggggagggcggggctggttgccaa

SEQ ID NO: 216744 - DNA, 174 bp, Homo sapiens
  chr16:4845962-4846136
  hypo
ctgctgctgctggtcgtcgcccactgctgctgctgcagctcccccgggccccgcagggaaagccccaggaaggtgagcccctggaaggtgagccctgccggcctctgggacctgcacggaactgtactgggggtggaggcggaaggtgaggggagtggcgggaagggtgctcat

SEQ ID NO: 216745 - DNA, 96 bp, Homo sapiens
  chr16:4900508-4900604
  hypo
gatttatttccacaacccagcgcatcacaaatatcctgagggccttggagatttcttttagggaaatctcctttaacatcttagtacgtgttggga

SEQ ID NO: 216746 - DNA, 117 bp, Homo sapiens
  chr16:4900634-4900751
  hypo
ctgctaatcgttttgccgcctgattagaattattttaactcttcatttgtagatattttgttcccttatgtgatgttataagttgattttgtgatcataattcgacaaatgaatatt

SEQ ID NO: 216747 - DNA, 138 bp, Homo sapiens
  chr16:4920096-4920234
  hypo
acaagacagggtttgactgccgttggctcctagctttcctctccacgtacggtgagctgatgaagacaggagttgcagtgagctgcagccggtggtgactgtgttttgttcttcagcatagaggcgcagactcgggag

SEQ ID NO: 216748 - DNA, 200 bp, Homo sapiens
  chr16:4920289-4920489
  hypo
gcagcaaggatgccctgctcaagcgtgctcggaaacttcacctctatgaacaggtgggtgactctagagtgaagccctttggctttggggtcctggcggaggggtgactgagtcttaagcaatgatgcgtctgctgccccactgcctccttgtgatcaccccatcatgcgtcctgagcgtaagagcgatgtgtaaacctg

SEQ ID NO: 216749 - DNA, 335 bp, Homo sapiens
  chr16:4920526-4920861
  hypo
tgaaggagcctctccagaagctcaaggaagccattggcagggcgatgccagagcagatggccaagtaccaggacgaatgccaggcacacacgcaggcaaaggttgccaagtaagtttgtcctggcgcttgcaggtgcaaccctcccgtcttgcctcttcccctcccgtttctcggtgtgtactgccgtttcccaaggagcctcttggctcttctttggccttttctccttctctgtgaagtcccagtagtgcagagtgaggggagaggcggtgggcaggagcaccttggggccccatgtaattctattcaccccgtaggatgctggaagaggaga

SEQ ID NO: 216750 - DNA, 255 bp, Homo sapiens
  chr16:4933476-4933731
  hypo
tctgcagggcctcttcgatggagaacttcttgccagacttcctgtcgtgtatcactgaggactccccattgggacccttcactgagatctcctcccagtcgcactcctggcttctgagtttcacgaacatgttccagtcaatgagcccggcacggtgggcttcctccggggacagctcgcggcctgtgtcagggtggatgactacgatggagcgccgcaggtggttctcccgctgctcccgcttgacggccacgg

SEQ ID NO: 216751 - DNA, 157 bp, Homo sapiens
  chr16:4971735-4971892
  hypo
gggattacaggtgtgtaccactgtgcctggccccagcctgcattagaggtggcaactcgaggctgaggacccagtggctcagtaagcccagctgcaaagtggagagctgggactcgaacctaggactgtgtgctgtcctggccgccaggacagcaca

SEQ ID NO: 216752 - DNA, 167 bp, Homo sapiens
  chr16:4980311-4980478
  hypo
caactctctgctcaccgtcctgcacgcaggaggtgactggatggggacagggcagggggcagcctgctcaggcctcgcactcctttccactagctggaacccctgccccattcatccccacctccgggctctgctggtcctggggtgtgaagcgcagggcaatgtat

SEQ ID NO: 216753 - DNA, 681 bp, Homo sapiens; identical to SEQ ID NO: 204109
  chr16:5007929-5008610
  hypo

SEQ ID NO: 216754 - DNA, 206 bp, Homo sapiens
  chr16:5628622-5628828
  hypo
gttctattaatttagcgccaacagctgttagatctaaggccttcaaggttctcggcaaaaatgaaactcatcctcaggaactcctctgtgaagtatcagtaatgaaccatggagggaatgaaggctaaatgaagataaaaatatctccaccgggccagggtgtttttgcgcttcaatcccaaaagtactagcgcatgaaacctcca

SEQ ID NO: 216755 - DNA, 252 bp, Homo sapiens
  chr16:8722899-8723151
  hypo
agcacaggaagaagacgacgtcctgggagaggaagcacaaggcagcccgcacgatatcatcagaataggtaaatagaggtgtgatgtggcccacctgtcaccaaggcaactccgcagtgtcactgctcagggctcagtatgatctgagcgtggactctgcaggcccaggcagcacaggttatgagaaccagctcgggtgagactggggaagctctccacaaccccgtcactcctgcccggctcacaccacca

SEQ ID NO: 216756 - DNA, 565 bp, Homo sapiens; identical to SEQ ID NO: 204115
  chr16:8767886-8768451
  hypo

SEQ ID NO: 216757 - DNA, 281 bp, Homo sapiens
  chr16:8996110-8996391
  hypo
agtcaagtattgaagaaaacgtccaattctagttaagtggaccaaaagggaaacaagctgcactaagtgcagaggactaacgccttctgcacggttccaaaccagatacgctattaacaatatttactgttttattgccgtcggcttcattatctaacattgctggtcgttttgttccattactccttgcttgcatgggccacaatcgaatttgatcttgtggaaatccctgaaaaaaatattaagagtagattaaaataaaaacacgctcatattttagt

SEQ ID NO: 216758 - DNA, 84 bp, Homo sapiens
  chr16:9005257-9005341
  hypo
taacattaagagtgaaagggcgagccacatgctgagtgacaagctctcaatccaacacggaattgtatatccagagtgtatgga

SEQ ID NO: 216759 - DNA, 327 bp, Homo sapiens; identical to SEQ ID NO: 204118
  chr16:9186867-9187194
  hypo

SEQ ID NO: 216760 - DNA, 80 bp, Homo sapiens
  chr16:9222467-9222547
  hypo
ccccaaacatcttcccgtttccacactaccaggtggggtcctggtggtgccctgggcctgcccttcggggctctgttcta

SEQ ID NO: 216761 - DNA, 186 bp, Homo sapiens
  chr16:10631325-10631511
  hypo
caagactccatggggcgtggccctgcctgccctgctggttcacttcccactgcactccagccccactgggcagctctccgtccctcctgtcacagggcttccgtcatgctgttccctctacccaggacactgttccctcctctctctattgagacacaacactgtcgacagcgactcctactcacc

SEQ ID NO: 216762 - DNA, 772 bp, Homo sapiens; identical to SEQ ID NO: 204120
  chr16:10673913-10674685
  hypo

SEQ ID NO: 216763 - DNA, 257 bp, Homo sapiens
  chr16:10868652-10868909
  hypo
agacggggtttctccattccccttacttttaagtgacactgctcagcactcttaagcatgtctcaggagtctaaaccaaagtacctcttggtaccacgcacacaggggacaagcctcgtgtttcggaagtgatgacatcacacgaaagggcctcaccttcacagaccagaagtccagggacaggaggagcagcaccatgacaaaacagcccacaaagctcttgctgaaccagtcgcagctcacgtaggtgacgatgg

SEQ ID NO: 216764 - DNA, 114 bp, Homo sapiens; identical to SEQ ID NO: 204121
  chr16:11035552-11035666
  hypo

SEQ ID NO: 216765 - DNA, 277 bp, Homo sapiens
  chr16:11072881-11073158
  hypo
cagctggtacaaatgaacgtgcttggtaacttaaggagcaagttctcgtgggtcagcctctcatccgtgagtaatggtgaaaggtttctcagatggaaaaatagtgtccttgcaaacagtattgagtgggattttgcggagtggacttttgagtagcaccaagaaaggacagccctagggccgtggaggaagtcagtgggacaggacgcctttgttcacacagaaggcttttggctttgtgtattttgtgctgctcgcttgtgtgacctgatctctc

SEQ ID NO: 216766 - DNA, 47 bp, Homo sapiens
  chr16:11118477-11118524
  hypo
tcccctctggatagcggcttccgcaggcagagcctgtctctcatttg

SEQ ID NO: 216767 - DNA, 208 bp, Homo sapiens
  chr16:11118554-11118762
  hypo
ggcacacagttgtggcctaaagagctgtgtcaaaggcagctagcaccccatgtgcaggttagagaggggaggtgttcacccttgtgcaccgtgaggctcatacatgcccctcctcttttccagacccttcctggatatggtgtaccacgcgctggacagcccggatgatgattaccatgccctgttcgtgctctgcctcctctatgcc

SEQ ID NO: 216768 - DNA, 356 bp, Homo sapiens
  chr16:11151037-11151393
  hypo
acattaaactgcttcggccctcttttaagaatgactgactttcacagctacatggcctcagtgggcttctaacttgagtgactgtcgcctaaactaggcagcttgcacatgcagcaaggaagcaggagggtgaaaaccgagcctttgttccaggccagctcgtgggctcagcacatcaccggtgccatcccgttgtacctgcacggtgggtgccccatttccagaacacaagcctgggcttgggcacgtcacgtgattaccaagccccagcttgagccacagtgtgtctgactacagagccacccaccttcccctgctcattggactgattccccggtgacattgagtttgccaga

SEQ ID NO: 216769 - DNA, 186 bp, Homo sapiens
  chr16:11174343-11174529
  hypo
tggctaccaggtcagtagcccgtgtctggaacattgggcggtccattcgtttcatatggctgctgctacacatttctacaacacccagttattctcttacagctctggaggttagaagtctgccacgggtctcactgggctaaagtctaggtgttggtccttcccgaaatctctggggagaatctg

SEQ ID NO: 216770 - DNA, 143 bp, Homo sapiens
  chr16:11178512-11178655
  hypo
tagtcttctgaactcgccggctatatgagtcatctccactgtggagggaggcaattttaaactggaaaggtcaatcgacatgtcagaatatctagtaaatcattcgcgttccacctggtgccccttccattcccctgaaaaag

SEQ ID NO: 216771 - DNA, 231 bp, Homo sapiens
  chr16:11178685-11178916
  hypo
ctgtggagaaagaggtagccggggctgggtggtgatttacctcgaggaaaattaatatggtgccatcaattctgaaggcagaaagggcccatggccagaaggctgcacgcaggctggaataactcacggcccatgagggccctgagtttggggaggcctctccttggccctggatataaatcagcagcccttttgcagagagagagtcggagttttgtcaggcctggggga

SEQ ID NO: 216772 - DNA, 346 bp, Homo sapiens
  chr16:11192848-11193194
  hypo
acttgctctgtgacacggagagacagctgtgtgggaatgggctttctgtgtgctctgcagagagcgtggcggctaaggtgaggcatgggagtcataacccccaggctgagtgagccaagagtgcatgtggccagagcgccccattccttccaggtcagggagctccaaggccctgggccaggctgcttcatgccacccgggtttgccaggacaggtcattctcatgcacggctcatcggcagacgtggagcagagctgtttcccacggtcccacacagtggacagggtctcgttttcttccctctaacccttcgctgtccaacacggtagccacttgtggctgtct

SEQ ID NO: 216773 - DNA, 398 bp, Homo sapiens
  chr16:11219553-11219951
  hypo
agcttccattccactcgaggagcccaggctcaaacccctttctccttggtctcaaccttggcccgaagccctcacttggcttccgcttgtgcgttgagcctcagtgggaactttgatgttccactggtctctgcagcttgaggctgcctgccgcccacttggcgtctcccaagtgatgtgcctggcagggccacagccactacgatgtccccccccccaaattctcaccacccccctctatcccacatgctcagagtgaaccatgctattgtttgaccgtagccctcctggacctcccaatccagcccaccactgaagtcctggggtttggactcggctcctccacctccactcagcacctgcctttccgcttctacgaccaggggcgccggggcagc

SEQ ID NO: 216774 - DNA, 41 bp, Homo sapiens
  chr16:11232577-11232618
  hypo
actcaacagcgtatcctggagtgtttttcattttagttcgc

SEQ ID NO: 216775 - DNA, 110 bp, Homo sapiens
  chr16:11232663-11232773
  hypo
accactgttcattgagccagtcccctactgatggatgtttaggtggtggccaattttttgtcctttaacaaataggcatctccaagtgcccttgcgcaagggtttcctca

SEQ ID NO: 216776 - DNA, 104 bp, Homo sapiens
  chr16:11265077-11265181
  hypo
ggaaggggacagccccgaggggtcactgactccctggtcacccagaggctccctccgtgtgcagcacctgcctctgagcctccttcgcacgccagaggcagagc

SEQ ID NO: 216777 - DNA, 52 bp, Homo sapiens
  chr16:11370335-11370387
  hypo
ctgcaaggctccccgggagcttgtatataaagggggcgcccactatgactct

SEQ ID NO: 216778 - DNA, 180 bp, Homo sapiens
  chr16:11398242-11398422
  hypo
atcgggtgctctgtcttgcctctctgtgtgctagctgcttctctccaccaaatcacaatatccttaagaacaaggacgttgttttgttcatggcttcagtcccagcacctagcaagtcgtaagtgcttagaaaataatgtgttcagaggccaggcgcggtggctcacacctgtaatccca

SEQ ID NO: 216779 - DNA, 160 bp, Homo sapiens
  chr16:11622039-11622199
  hypo
gcccattttaaccacttttaagtattcagttgagtggcgtcgtgtccactcatgacattgcgcaaccatcactactgtctagttgtgtagtctgacattgggtttgtctttcccagtgctcaggttaggaaaagccaacgggaggcctgacttagcaagg

SEQ ID NO: 216780 - DNA, 108 bp, Homo sapiens
  chr16:11703386-11703494
  hypo
atgggtgaattgtccggtatgtaaattacgtatccaaaacactcttggaaaaaagaaaaagggataaagggagcaaaggattcaggctgcaggactggctgtgccact

SEQ ID NO: 216781 - DNA, 186 bp, Homo sapiens
  chr16:11770870-11771056
  hypo
agttactgcagggaagctaccggacctgcctgggagccagtgaagggcgagtcagggcacgcgtcctggaggctgccagcgtccttgtagcagagcagtttcttgccgcttgggtcttcagcacgccaagccccccaccaaccctccaccccgagtgaaggcttcgctgaaattgctttggtcctc

SEQ ID NO: 216782 - DNA, 214 bp, Homo sapiens
  chr16:11775050-11775264
  hypo
cacaacaactgaaaacacatcgtggccctgtcaagtgggcccatggaagaataccagacgctggacctgcccccacgttctgcggcacaagcctggtcttgtaaggcagagtaaacgtgaattacttcccagaaaaagctgccaagatccctcaggatgtctacctccagacatttacaggacagtgacatccgtgagcatgctatctgctaac

SEQ ID NO: 216783 - DNA, 187 bp, Homo sapiens
  chr16:11792617-11792804
  hypo
caagggcagcatggagcctccgtgcggcacaggctgtctgttctgctcacctgtatcctccgggcctagacgaacaccaggcacacagcaggaactcaacacatgtcttcagcaatcaaaaatgacctaaacttgcacaaggccacggatcatattttacgtgtacgaataaatgaaagagacacct

SEQ ID NO: 216784 - DNA, 180 bp, Homo sapiens
  chr16:11831275-11831455
  hypo
aggtgactagaacaaaactccatctaaaaaaaaaaaaaagaaagaaagtaagtaaaggaacaagaaaagaacaaaagccagacggtacaaatggaaaacaaggagcacgaaggtagacttaaacccaactacctcaacaattacgttaaatataaaaggagaggccgggcgcggtggctc

SEQ ID NO: 216785 - DNA, 141 bp, Homo sapiens
  chr16:11879780-11879921
  hypo
tgtttttttaaagtgacgggtaggtatatatattgacatatgcttgtgtaaacataaaatagtcccagatggaatcatgggagactacagcagtagtagaagactgaggctggaaaaggggtaggacgaggtcttttcaat

SEQ ID NO: 216786 - DNA, 39 bp, Homo sapiens
  chr16:11900211-11900250
  hypo
aaaagatactaatcactggccgggcgcggtggctcacgc

SEQ ID NO: 216787 - DNA, 40 bp, Homo sapiens
  chr16:11968754-11968794
  hypo
tattaacagctgggccgggcacggtggctcacgcctgtaa

SEQ ID NO: 216788 - DNA, 89 bp, Homo sapiens
  chr16:11974694-11974783
  hypo
tgttttctctcattccgtaggttgccaaccccatgaattttttattgtaaaagtctggcctcttttttatttgatatttgagacggagt

SEQ ID NO: 216789 - DNA, 180 bp, Homo sapiens
  chr16:12011433-12011613
  hypo
tgagccaccgcgcccggccgatctgtattttaattttaaacatctgtattgtaaagataaaagagaactcagcctaatgagataggtcaaaaacgaagctgtcaagtatttttcaaaagagtcctaggctacagtaatttgaatttaatattaaactaccaagctttagggattaaaaaa

SEQ ID NO: 216790 - DNA, 224 bp, Homo sapiens
  chr16:12084473-12084697
  hypo
tgggctggtagcgccgggcatcccagatgcccgccagtgtaactgagaatgaattctgcagtgacaacaggttgatgatgtccttgttccctgcaagactctgtatgtggggccttggttagagggcaagggaagatgggagcatgattatgatgcgggcctggtctacagcctgctggggaactctcacgtttaaccatctaaccgcacggtggctgtaaggt

SEQ ID NO: 216791 - DNA, 334 bp, Homo sapiens
  chr16:12132513-12132847
  hypo
cctgactagctttaaaaggattctgtagcagtaagcaatttgcagaattgaaaggtgaaaacacactttaaagcgttcatgtagattcaaggtcggagggaggtgactgcatttttcaagacaggctgcaggtgagagtcacttgactggaaatgtgatggacgtaccgacaatggtctggggtatttcgaaatacgttgttggccagctggcccagggtgttgttgtcgccagattccccgtcctggtttcttgagtgaggcggagaatggaaggaaggctgttttgtacagttgtgtggagtagactgatcggatgagcttgggaagtggat

SEQ ID NO: 216792 - DNA, 78 bp, Homo sapiens
  chr16:12136759-12136837
  hypo
tgttctggtactacgtgaaggaggtcctcaacaagcacgagctgcagcgcttctactccctgcgccacatcgcctcag

SEQ ID NO: 216793 - DNA, 111 bp, Homo sapiens
  chr16:12142577-12142688
  hypo
agtccagtgcacttgcgttttccatttgtgtttctgtttctcatcctcattcactctgaaagggctctgacggccttacctagatgcgagaattgccgggtggaaaaatga

SEQ ID NO: 216794 - DNA, 170 bp, Homo sapiens
  chr16:12210602-12210772
  hypo
atgcttcaacacagatgaaccgtggaaacaggcttagtcaatacctgcttcaacgcggacgaaccgtggaaacaggcttagtcaatacgtgcttcaacgaggacgaaccatggaaacaggcttagtcaatacctgcttcaacgcggacgaaccgtggaaacaggcacggt

SEQ ID NO: 216795 - DNA, 88 bp, Homo sapiens
  chr16:12210896-12210984
  hypo
ggcgtgttcaatacgtgcttcaatgcggacgaaccatggaaacaggcgtggtcaatacgtgcttcagtgcggacgaaccatggaaaca

SEQ ID NO: 216796 - DNA, 88 bp, Homo sapiens; identical to SEQ ID NO: 204123
  chr16:12211191-12211279
  hypo

SEQ ID NO: 216797 - DNA, 196 bp, Homo sapiens
  chr16:12609442-12609638
  hypo
tcttcaggtgacctccgaagtcacctcctcccaggtgccttcctgtcctagccacccaagccaagtccatctctgtgccagcactctttatgatgtattcacgtatctgcttgttggctctactggatctaagctccggagggcaggggtcacatctgtttgccaatacgttccttcaaggcacggtgccttggac

SEQ ID NO: 216798 - DNA, 449 bp, Homo sapiens; identical to SEQ ID NO: 204124
  chr16:12897345-12897794
  hypo

SEQ ID NO: 216799 - DNA, 379 bp, Homo sapiens; identical to SEQ ID NO: 204125
  chr16:14396710-14397089
  hypo

SEQ ID NO: 216800 - DNA, 111 bp, Homo sapiens
  chr16:14725660-14725771
  hypo
agacctattttcaaaatctatctcagccacttattagttctggaatgcattaaaccttcctaaacctcaatttcctgggattgtattgaggctcagtggtgctaatgaatg

SEQ ID NO: 216801 - DNA, 38 bp, Homo sapiens
  chr16:14735318-14735356
  hypo
gagggtgtgaacccaggaggcggagcttgcagtgagtg

SEQ ID NO: 216802 - DNA, 381 bp, Homo sapiens
  chr16:14761337-14761718
  hypo
taggcagaggtctcaggcaccggggacagaagacaaggacattcagcacgggcagccatgctcttcccagcacccagaaaaggcccagggcccggactcctgggtgtggtcatgagaagcgcctccgattcagcctcttctcttcttgtttcaggaccgtgcctcagaggatgtggagccatttctggaaagtatcaacgcaggggctttttgtggccatgttctggcccctcatccctcagtttgtttgcaactgtttgttttactgggccctgtactttaacccaattattaacattgatcttgtggtcaaggaactccggcggctggaaacccaggtgttgtgactggcactgcccaggctgagactcttcaagtccc

SEQ ID NO: 216803 - DNA, 152 bp, Homo sapiens
  chr16:14763027-14763179
  hypo
ttgcatctggaagttcgaagaaattacttgaaataaaaataaagatttctatatagataaaacctatatgtagagaaaaagcaattgtctagaaaacacaaaacttctgcattgccggatagaatcttctagccatgggccgagcgtggtgg

SEQ ID NO: 216804 - DNA, 142 bp, Homo sapiens
  chr16:15129342-15129484
  hypo
agcacaaggtgcaggagtcacgctgcctccaacgccctcgggcagtcgcaccaagcagaggcttccaggtaagtgacgcctctgcaccgagttcaggtaacaggtttcccctgttgactgttacttgcgtttgttttctggg

SEQ ID NO: 216805 - DNA, 314 bp, Homo sapiens
  chr16:15606940-15607254
  hypo
aacatctcctgccccgagtctcccccactaccgatcaaaggccttgaatagcacatcacttatatctcagccattcaccctagaaacatagcccgaaggaaccctgtagatgtgtgcgaagttttcactttgagaacgttcttcactggaacattcttacggtgaaaataattcttacatttttttcctcatgattacagtggggaaaaaataggaaacaacctacatgtctgtggattgcttaagtgcttcgtgatacagccacaaatagaaaaccgccccgccttccatgctgctgccgaggaagaccatcc

SEQ ID NO: 216806 - DNA, 120 bp, Homo sapiens
  chr16:15607783-15607903
  hypo
cacatattatatatataaaaaaccacatatattcatatatgtatatacacacacatatttatatatccgtatgtatgctcacgcttgtaatcccagcacttcaggaggccaagttgggag

SEQ ID NO: 216807 - DNA, 162 bp, Homo sapiens
  chr16:15608920-15609082
  hypo
agagccagactccgtctaaaaacaaaacaaaacaaagcaaacgaagtaaattactttggaaaacacattttctggttcccaaagggtgtgctcacgaatacacatttgtggcacaggctgaagtctgtcctcaaggtgtatgatggtcgcagagcaaggctg

SEQ ID NO: 216808 - DNA, 91 bp, Homo sapiens
  chr16:15649666-15649757
  hypo
agctcatgaatcctacgaaagctgaaccaatgcacatgtttatcatcttggaaccatttgatttgaggaaattgtaatagcacatgctggc

SEQ ID NO: 216809 - DNA, 68 bp, Homo sapiens
  chr16:15693241-15693309
  hypo
ctgggcctggttccgtggcttcctagctgctgactctgggtgagctgtaatacgtgactgcctgagat

SEQ ID NO: 216810 - DNA, 213 bp, Homo sapiens
  chr16:15704176-15704389
  hypo
ataatagaaggaggatacgaccatacagtcaccccttggtgttctcaagggatcgggtccaggaccctgcctggataccaaaatccgcacctactcaagtcttgcggtctgccccgcggaaactgcagacacgaaaaattggcccccagtatccatgagtttcgcatccctcaaatactgtactttctacccgtaactggacctgtgcagttc

SEQ ID NO: 216811 - DNA, 83 bp, Homo sapiens
  chr16:15707174-15707257
  hypo
aaaaggtataagtaatcaaacggaaatctttatagaaaggtggagaggcttgctggtcgcggcggctcatgcctgtaatccca

SEQ ID NO: 216812 - DNA, 82 bp, Homo sapiens
  chr16:15707963-15708045
  hypo
acgtggaccaaaatgactttcgaaggtaaatctgcattaagtggtatttccttcaaatacctgaaagtacttttttttttaa

SEQ ID NO: 216813 - DNA, 260 bp, Homo sapiens
  chr16:15723202-15723462
  hypo
agtttcaacttaagccagaccgcagggggcttgttgggtatcggggacacaggtgactagcaggcaagtgccggaatcaggatacccggggcccactctcttaactgctgcaatcaccaatgacacgtttactttttctaagagctgatttctttctcccttaaatgaagactttgcatgagatcatgtctaacgtacttctgtaactctcagttattaaattatatgtgaagactttcatttaacgtatgggattgccc

SEQ ID NO: 216814 - DNA, 127 bp, Homo sapiens
  chr16:15729537-15729664
  hypo
agtgagccctttaaacaaaccggaggtaccacattaaggtgcaaagagttggtgcacaagtgaggcgttagctccgactgtgaaatgtgctcttccaaatgccctggagccccgcttgtgaaatcag

SEQ ID NO: 216815 - DNA, 99 bp, Homo sapiens
  chr16:15747494-15747593
  hypo
aaaatcagaggtgtgtgtctcgagtgtattttcagacttttttgttagctttaatcatgtaaaacatgcaaaaaaaaaaaaagcatgtggaaacaattt

SEQ ID NO: 216816 - DNA, 53 bp, Homo sapiens
  chr16:15762731-15762784
  hypo
aggtttgctttgtgggttttttgtttgtttgttttgtatttttgagatggagt

SEQ ID NO: 216817 - DNA, 82 bp, Homo sapiens
  chr16:15799467-15799549
  hypo
gacttttgctccccacgcaagggttggataagaagccataaggatgaacacaactcagtgaccaattctttagtcaaaagga

SEQ ID NO: 216818 - DNA, 296 bp, Homo sapiens
  chr16:15820529-15820825
  hypo
gtttttttaatatttaattgaacagggagatcatcgcctctcctccaggaacgcaactagaggaaaggacttgccttgcagcaagagagacctcagcgagccgggaagaggctcctccccacagaactgggcaccacccagcactgcccaccacaccaccgcgccacctcctcacctgcagcttgtggactttgtcattgagctccgcccgggcccgctccccatcgctgcacttggactgcagctcctgcacctgcgcctccagcttcttcttcttatgttccacctcctgcttg

SEQ ID NO: 216819 - DNA, 195 bp, Homo sapiens
  chr16:16103293-16103488
  hypo
tttcttgtgcagtgcgccggagttgcagctagagatgagctgtgagctgagctcttgagtgttcaggcaccggggagcatggtgaccagacaaacagtcctgttggaggtagtggggcgtagcaggctgattacagaccatcacgtgccggcctggatgccagctcaccataccgaggacttgtccttattccag

SEQ ID NO: 216820 - DNA, 306 bp, Homo sapiens
  chr16:16208594-16208900
  hypo
gtggagttttaactccgagtgtctgcagggatcgccgtgtttggctactccatggccgtgtccatcggggggatcttggcttcccgctgtctgcacgtggacctgctgcacagcatcctgcggtcacccatgagcttctttgagcggacccccagtgggaacctggtgaaccgcttctccaaggagctggacacagtggactccatgatcccggaggtcatcaagatgttcatgggctccctgttcaacgtcattggtgcctgcatcgttatcctgctggccacgcccatcgccgccatcatcatc

SEQ ID NO: 216821 - DNA, 206 bp, Homo sapiens
  chr16:16219544-16219750
  hypo
ctcccataattcatacttgttgaaaataatttgtttcctattatctcagtggaaaaaaagaaaaaggaaagtcaagtacgcccgcttactctagaaatgccacgtgactcttccactcacaggtcaccacgtacttgaactggctggttcggatgtcatctgaaatggaaaccaacatcgtggccgtggagaggctcaaggagtat

SEQ ID NO: 216822 - DNA, 200 bp, Homo sapiens
  chr16:16259432-16259632
  hypo
tgagttgacctcagccggtcccggaagcctccctgacctctccgtacctgaaacccagcgtagaggagaaacagtggcaggatggccacagtggccagtggggtagccactgccaccaccaggctgacctccaggagtccaaaggcgtacatcagcagggaccggagtttgtctggaatgtccacgtcaaccgtgtctgt

SEQ ID NO: 216823 - DNA, 186 bp, Homo sapiens
  chr16:16282899-16283085
  hypo
gctgtggtgcctgcacggtccatgtggcccacccgccatgtccgcatgtgcttccctccgtagatcccactcccagtcctgctaacacatgtcctctccgcagtcataagctacataaggctctctctaaagacacagcgcattgctaatggtgatgagtgcgcagccccacggctctaggcatca

SEQ ID NO: 216824 - DNA, 42 bp, Homo sapiens
  chr16:17754966-17755008
  hypo
cccagtaatacagagagtagcgcaggctcttcacaggcattt

SEQ ID NO: 216825 - DNA, 114 bp, Homo sapiens
  chr16:18804300-18804414
  hypo
aaaagcaagaattcaattaacgctgggtaagaaaagtcaaaacactaatgagttgtccatgaagccaactgctaagaacgcgctcaactatacgcgacatgaagacactatgca

SEQ ID NO: 216826 - DNA, 43 bp, Homo sapiens
  chr16:18884774-18884817
  hypo
ctcaggtgatctgcccccctcggtctcccgagggattacaggc

SEQ ID NO: 216827 - DNA, 42 bp, Homo sapiens
  chr16:19184226-19184268
  hypo
cagtttccattcctttctaccgaaaggagatcccggttttga

SEQ ID NO: 216828 - DNA, 355 bp, Homo sapiens
  chr16:19185277-19185632
  hypo
tccatccaagtcagcgtgacaagattccctagcacttagcccagggcctgcacatagtaaaagctcgataaatatccattgcatggatgggtagacggaatgaacaaacaagtgcctttttgctgctccgaacaagaacttcagaaacagggaagcagaaaagcacctccaggctccatcctgtcctccaacgctgtttatgttctctctggcatctttcgttttatttctaatttgctctcctcccgcgcctgcatacaacatctccatctgccagtcgctcagatattttgggaacgcagttttgaagcttctcagccacgtgcctggtccacctctccgtgactgagagagg

SEQ ID NO: 216829 - DNA, 158 bp, Homo sapiens
  chr16:19431054-19431212
  hypo
tattgtcatactttgccagaaaaggtcctgtccccagaagacagggtcaagttcaagctatagagtatcttcataaacacttaatgaataacgcaatgaatcatatttgccaagatttttcgggatgacgtggcaggaggtgacgctattattgctca

SEQ ID NO: 216830 - DNA, 137 bp, Homo sapiens
  chr16:19708367-19708504
  hypo
atgaaggcagagcaggtggtcgccagccagtttgcgagtccgtgcccagcaggtgccagcccgcgtgccctgtgccaaagcgcttttctcttgtagcccgcgggcctgggcgcccacagcacaacctgctccctgat

SEQ ID NO: 216831 - DNA, 47 bp, Homo sapiens
  chr16:19708561-19708608
  hypo
ttgccaaggcaggctcaattttgcccggagtggggaggggaggtgcc

SEQ ID NO: 216832 - DNA, 224 bp, Homo sapiens
  chr16:19719066-19719290
  hypo
ccccacctccctacacggcgcacatggcgcacctcctcccaccacgctacacagcacactctccccctaccatcctacaaagcgcacctcccctaaccacgctacacagtgcactccccccaccaccctacacatcgcactccccccacctccctacacagcacactcccccacctccctacatagcacttcccccactccctatacagcgcacctccccccac

SEQ ID NO: 216833 - DNA, 185 bp, Homo sapiens
  chr16:19845505-19845690
  hypo
actaaggagtagctacgagcgatggagcttatgccatgtgccagacactacactaagcaccttatgtttccacgtagtcctcacacatggtatctcagagaggtgagatcatctccatcgtacagatgaggaaaccggggctgggaggatacatggcttgcacaagtccacgcagccagtcaggc

SEQ ID NO: 216834 - DNA, 343 bp, Homo sapiens
  chr16:19904164-19904507
  hypo
aaacctgatctccagttactcgttattcctttggtgagtacgaatgcggtgaaaacatgaaaatatgcctgtttctttctactctctttcctcaatgtaccaagtggttcttgaagtgttgtccagagaacctctctggaggtctgcaggatcaaaactgtttgcataatagcactaagaccttattttccgcttttaccgtcattctctcacgagtgtacagtggagtttcccagtggcttttggagatgtgatgttgcaacaggccgatggcgggagcaggcgtgacagtcccgctgtcctctattaagtcagatatttcggaggttctcaaaaatgtaaa

SEQ ID NO: 216835 - DNA, 164 bp, Homo sapiens
  chr16:20754570-20754734
  hypo
tgttttttcccctcgcgcatttcccacatagaacagttactcaaaaggcttccagtaaattccatttcagcctcaattttccaggctatgtttctatttcacttaaaaccaaggatgttggctggtgttgtttcatgctgctttcgttgcggccttttatccat

SEQ ID NO: 216836 - DNA, 39 bp, Homo sapiens
  chr16:20803222-20803261
  hypo
ctgggtaacagagtgagactgtctcggaaaaaaaaaaaa

SEQ ID NO: 216837 - DNA, 182 bp, Homo sapiens; identical to SEQ ID NO: 204133
  chr16:20817451-20817633
  hypo

SEQ ID NO: 216838 - DNA, 100 bp, Homo sapiens
  chr16:20823438-20823538
  hypo
tctgaggtgacttttattttcgtttctctgtatcatttattttacaattctctgttaatgagtcttttgtaacaaacacgaattactttattaaacaaat

SEQ ID NO: 216839 - DNA, 53 bp, Homo sapiens
  chr16:21178770-21178823
  hypo
gaaacccatctttgcggatttgcctatggccagctctgcgttaaagcagtctc

SEQ ID NO: 216840 - DNA, 31 bp, Homo sapiens
  chr16:21179024-21179055
  hypo
ttttttgaaaaggagacttgcggtggggcgc

SEQ ID NO: 216841 - DNA, 120 bp, Homo sapiens
  chr16:21515406-21515526
  hypo
ggctgcagtgacctatgatcctgccactgcactccaggctgggctgcggagggtagggagggagggagaagaagaaagagaaaacgcggggcaccatggatggctgactcctgtaatccc

SEQ ID NO: 216842 - DNA, 192 bp, Homo sapiens
  chr16:21569156-21569348
  hypo
aaaattgctatcatcactggcatcgtcatcatctcactacagcagagatccgcagttccccgaaacaaataccacgagtctcaaggtaagacctgcacgtaaggatgtcgaaagataaatatgtcttaagaacatgtccatgagaaggggctttgccagccatgcaagcataaaagaagaaaagtccctcat

SEQ ID NO: 216843 - DNA, 177 bp, Homo sapiens
  chr16:21569399-21569576
  hypo
gtacgggggacagagggaggaggctctaggctctgacttgcccttgcagagcttggaatccaggagtgtcagacggtggtagagataaaaagctgtgtgtctgagaggtgagggcgtgggctttggggccctaaacttgcttgggacgcccgggagggcccccgtggaagcggcgtt

SEQ ID NO: 216844 - DNA, 40 bp, Homo sapiens
  chr16:21633194-21633234
  hypo
tttttttttgggagacggaatctctccctgttgcccaggc

SEQ ID NO: 216845 - DNA, 80 bp, Homo sapiens
  chr16:21635698-21635778
  hypo
ttgtaaaggaaacttcgtatgtgttgagatttggaaataggtgaaatgctaaatttaaagaaatatgggccagtcgtggt

SEQ ID NO: 216846 - DNA, 34 bp, Homo sapiens
  chr16:21666771-21666805
  hypo
cttcagagtccgcaccctccgggatgtgcccttg

SEQ ID NO: 216847 - DNA, 80 bp, Homo sapiens
  chr16:22083799-22083879
  hypo
gactgctactatgctgagcacgagagagactcagcaaaatatttgtgtattggctgggtgcggtggctcacgcctgtaat

SEQ ID NO: 216848 - DNA, 80 bp, Homo sapiens
  chr16:22084119-22084199
  hypo
tccatctcaaaaaaaaaaaaaaaaagtgtattgattttcttatatacagtatgccttctgtttgtcgattagcattagct

SEQ ID NO: 216849 - DNA, 90 bp, Homo sapiens
  chr16:22285049-22285139
  hypo
gccagaacctcagcccggacaggtactgcagctgtcacccaggaggagctggtaggaacctgggctgcaggtgggcgcttgtcctcggta

SEQ ID NO: 216850 - DNA, 414 bp, Homo sapiens
  chr16:22325983-22326397
  hypo
gtttggaagcccttgaggaccggggaacacgggcgtaatggacatggaggtggcgcagggagctcatcctgttctctccgtagcttattaggaccttagaaactcccttccgctctggggaacttagaaaaggcatcctgggcctgtctgctttaaggactctgctggctctggcgcctgggactctaatccccctcaagcctctgggctgggcaggcacgagcaagtataagccgttccctggcgtgtgcaggcagctctgggagggacacggttggaacggaatttaaacgacctgtgctaggaaaggaagggagagtggaaaacccctatacggagttctctggtcttctggcaggggctgagacggcagtccagcaagggtcacaggcctgacggtatgacctcttcccc

SEQ ID NO: 216851 - DNA, 301 bp, Homo sapiens
  chr16:22326427-22326728
  hypo
gagtcagagcaggcccgccagcgccgtgtgcagtcctatgagttcctgcagaagaagcacgcagaggagccctgggtccacctgcattactatggcctgagggtgagcggggcttcgtggggtcctgggggaaacacctcggtgcccggaagggtcatggtgtggcctccgtgtctcaccttgaacttaagtcaaattcatgagtcatagccacagatagaggatcgagtcctgtgggcagtttacacttcactccagccgagccacttagcgtgggccccaggagagcaagaggaaaaga

SEQ ID NO: 216852 - DNA, 192 bp, Homo sapiens
  chr16:22358431-22358623
  hypo
aggccagttcccagccgctggcaacaggctcagactgggcgttcactccagtcaggtccttggctgcagccctggaggtctgcacagccttgtgtgacagggagtcctgttcctcttggcacttcttcagcaactcttcatacttcaccttcagggcgctgtactgcgtgtccacttcgtgcagaagggaga

SEQ ID NO: 216853 - DNA, 79 bp, Homo sapiens
  chr16:22398761-22398840
  hypo
agctttcaaaaatcgttaagccatttgggatagaaatagttctaaaatgttttaagtgttgccacaatttctttatttc

SEQ ID NO: 216854 - DNA, 114 bp, Homo sapiens; identical to SEQ ID NO: 204137
  chr16:23313275-23313389
  hypo

SEQ ID NO: 216855 - DNA, 184 bp, Homo sapiens
  chr16:23402109-23402293
  hypo
tgcctgctctgtcacggctgactcaggaagagctgcttcccagcaaaggtgccgccaggcacgtacttactcctttacaagtttatccataaaaccgtgagctccacttgactgtcagccaagagctgcaaagagcgggcccacagtctactaggacatttttgtttggcgagcagtgtttttt

SEQ ID NO: 216856 - DNA, 41 bp, Homo sapiens
  chr16:23689211-23689252
  hypo
ttacaatggcggggcgcggtggctcacgcctgtaatcccag

SEQ ID NO: 216857 - DNA, 97 bp, Homo sapiens; identical to SEQ ID NO: 204138
  chr16:23766000-23766097
  hypo

SEQ ID NO: 216858 - DNA, 103 bp, Homo sapiens; identical to SEQ ID NO: 204139
  chr16:23766130-23766233
  hypo

SEQ ID NO: 216859 - DNA, 142 bp, Homo sapiens
  chr16:24118921-24119063
  hypo
ctcctctctgagggggcacacgtgtcctatttggaggcagtagtggcagcgtccttcactcactctgtggcgtactggccaccgtgaacacacgctgtggcaccatgcccctgcccgctgcgccaggcactgacatgtctcc

SEQ ID NO: 216860 - DNA, 44 bp, Homo sapiens; identical to SEQ ID NO: 204140
  chr16:24354628-24354672
  hypo

SEQ ID NO: 216861 - DNA, 80 bp, Homo sapiens
  chr16:24772184-24772264
  hypo
aaaccaaccatgatactaacctcaccagtttttccattaacggctttccattctaggatccgatgcgaaatgctgccttg

SEQ ID NO: 216862 - DNA, 761 bp, Homo sapiens
  chr16:24837123-24837884
  hypo
ctcatacctctgttacaaagcgagaaacgccacacccggactggccttttcttcccccttcacggccctcgcttctccctgcaggagctcgggggcgaaacctgtgtatggatttcagtgtatgacttcagatcatgctccaacttgccaggtgtgagctaatgttgtcggacaccttactataagcaaatgttattcagtgcgttcaatgtatattgacttccatactggtttttccaaaaaccaaaggtagctttgaaaaaccatgtctggaaatgtttggagcgttaagctgattgaccttctgaccttggggctttgagtagtatataattcataactgcgttaattgtattgttaaagtgtttgggagttttttgcgcttgttatgtggaaataaagtgtttgatttaaaattttttaaagtggtttggatctttgcctagtccttaaataaatacagctctattccctaagccacccttacttctcggtcttaatcccgactgccagtgcctggatgctgccctttgtctggcacagacctgcagctgaccatgctgggcccatggctcggggctttctagtcacgcagagccaccaagagtcagggtaaactttttaacacaggcacttaacacgttttttctttgttttcttttttccttttctctttctactttcttcctttttcttttttctttctttttctttctttttttttttttctttcgacagggtttcactctggatatcagttc

SEQ ID NO: 216863 - DNA, 153 bp, Homo sapiens
  chr16:25006925-25007078
  hypo
ttgtactgagtaggagccagcggcaatccaccaccagggtgggcaggagagccaagggccagcccaattctaggccatcaggtgtgcgaaccaaactgaaggactgcggaaaacacggaaaggaactctgccggactctgggccttcaaatga

SEQ ID NO: 216864 - DNA, 42 bp, Homo sapiens
  chr16:25266495-25266537
  hypo
cactaggcgtgctccgagtcttccctcttaccattcttgggt

SEQ ID NO: 216865 - DNA, 107 bp, Homo sapiens
  chr16:25266573-25266680
  hypo
tggtgtcctgagtggaggcttccaggttcctcccgagacaccgccctgggttgggtctccacctgctctggctggaagtctgccacctcccacgctgctccaagtgg

SEQ ID NO: 216866 - DNA, 143 bp, Homo sapiens; identical to SEQ ID NO: 204142
  chr16:27121251-27121394
  hypo

SEQ ID NO: 216867 - DNA, 258 bp, Homo sapiens; identical to SEQ ID NO: 204144
  chr16:27280121-27280379
  hypo

SEQ ID NO: 216868 - DNA, 36 bp, Homo sapiens
  chr16:27309235-27309271
  hypo
tgagccaccgtgtccggacaaaaagactagtttttt

SEQ ID NO: 216869 - DNA, 81 bp, Homo sapiens
  chr16:27475124-27475205
  hypo
cagcgtcccaggcccggacaagccccacattgcaggaagccagcgaacacctcattttccacccagaagccccgaccacaa

SEQ ID NO: 216870 - DNA, 73 bp, Homo sapiens
  chr16:27475235-27475308
  hypo
ccaaagaaaacaaaaacgcccagagaagccacatgagaaggccgctgctgatgacagacgtgcaggaaaggaa

SEQ ID NO: 216871 - DNA, 574 bp, Homo sapiens
  chr16:27475618-27476192
  hypo
tgggggacaaggcgcgcggtacctctggggtcttcagagccctctggaggctgcgcctggccgctcagctgctcttggcctggggaactgaactcaccgacaccctcttggtcttcctgtgctgctcccgctgcagcggtgtcttcaagagctgggggtggagatggggcctgggcttctgccccatcttcagctccgggcccaaggctgggggccaaatttgagtcctggagcgctggcctcttggcaggggtcatctgggtgccctcggcgtcggtctccccattctcactggcccagctggcgcgcctcttggtgccccgggggctgtgagaaggaggtgcctgcccctcgggggggctgtcctcactggaagacccctccaggggtctggcctgggggtcttctctctggatgtcggcgtcttctctgtctttcagccgcacggagtgcaggagccaaggccaggcagagcccatggctaccaggcgcgcagtgttgccaccgacctccagcacctgatgctgctccaggagggcctggggaggcaggagacacgcggggtctgtgggga

SEQ ID NO: 216872 - DNA, 338 bp, Homo sapiens
  chr16:27510216-27510554
  hypo
ggtacagctactggcggcaaaattcctcaagtgaccaagcgatcaggctctgccatgggtgccggggctgctcggtcccactgagaaatctggcctggacacagagctgtctccctgcaagtcccttactgggccgtcacagcccactggtctctgttgctacctggagggctgctccgtgcccccttcccactatctgagaatttcccagttgcttgtgagtcctgagggcttccatctggaaaaggtaagcagctttcattaatctacccttgctgagagtggcgtcatgggactcctgccaggcacacgtccaaacaaaccggcagaggatttag

SEQ ID NO: 216873 - DNA, 68 bp, Homo sapiens
  chr16:27523536-27523604
  hypo
gacaacaggagacgcgcctgtctcttcctgttcccttcccagcacccaggacacggcccacactcagg

SEQ ID NO: 216874 - DNA, 37 bp, Homo sapiens
  chr16:27539546-27539583
  hypo
gatcgcaccactgcactatgggcgacaaaagcgagac

SEQ ID NO: 216875 - DNA, 55 bp, Homo sapiens
  chr16:27539976-27540031
  hypo
caccttggctagcccggcgttcagcatatactggtacagacgcttaaacgtcctt

SEQ ID NO: 216876 - DNA, 172 bp, Homo sapiens
  chr16:28043670-28043842
  hypo
aaaattagaaaattacaaaacgaataacaaacacgaatgacaacatgcagagctggcgtagtgagagtgagacaaatagattcatacgttgatgtatgcacgacgcgctcttccaggcgtctcagcccatcctggggctggcggcttctccgttgatgtctccagcctgatc

SEQ ID NO: 216877 - DNA, 54 bp, Homo sapiens
  chr16:28104368-28104422
  hypo
ccaccccaggaggccgcataacccggcctgctctcaatgcctgcccccactcag

SEQ ID NO: 216878 - DNA, 156 bp, Homo sapiens
  chr16:28116153-28116309
  hypo
gcctgtcactacctgcgcaaaagacatccagcccctggagtcctgtcactgcctgtgcaaaagacatctagcccctggagttggcggttcacaccgcgagttcttcaggagagacatggcccacatttgagagagaatgcacgggtcagtgccaag

SEQ ID NO: 216879 - DNA, 164 bp, Homo sapiens
  chr16:28128687-28128851
  hypo
gtcacgaactgctgcgtgttctgccggtgaacttcactgcaatactgtgctaaccagtgagagtaagcctgcagcgcagccagggactgagcatgcctgcagaaagaaaagaagatgtgattttaaaggttaaggtgaaaatatattagcgttcaactcatttt

SEQ ID NO: 216880 - DNA, 141 bp, Homo sapiens
  chr16:28332354-28332495
  hypo
agactaggcaggacgcggcccggcacctggtccgtccccggcgggctggtgagggggccaccaaagacccctagcgcggcctggtgagcgggggcttggcccagaggagccaagccgcacagacccgagaattcggaggcc

SEQ ID NO: 216881 - DNA, 120 bp, Homo sapiens
  chr16:28822780-28822900
  hypo
gagaccattatgtagtgctttttctctcatagccagaatacaagtcagaatcaaggagagatattagatctcgttcttctcgctgtttttttttcttttcttttcttttttgagacaaag

SEQ ID NO: 216882 - DNA, 43 bp, Homo sapiens
  chr16:28887802-28887845
  hypo
cgggtgtgagcctgagtccagcggagacggtgggtgctgggcc

SEQ ID NO: 216883 - DNA, 231 bp, Homo sapiens
  chr16:28914705-28914936
  hypo
gccagtcattgggctcgacgaaatcctcaagttcgttgctcggaactacctagagggtaaggagtgccctctctgtcccaagccctggccccaccacagccccttccccatgacgccgcccccgccccgccccgtactttgcaggtggtaagtttctcagccctggcaggacctgtgtccgccccgttccccctgcgcctgcaggggccacatctccggggcagccccact

SEQ ID NO: 216884 - DNA, 74 bp, Homo sapiens
  chr16:28915762-28915836
  hypo
tgaaaataaacgacggaaaagtctggccttgcctctgtgcaagcttggaggcctgggtcgccgctgtggacaag

SEQ ID NO: 216885 - DNA, 445 bp, Homo sapiens
  chr16:28922140-28922585
  hypo
ttccaccacgtgcaactgattcctgctggactcctcgccctcctgccctagggcccccaggtactcaccatctgcagctgcacccgctcctgggcctggctcacggtcccttgcagggtccgcagcagctgctctgagttctggacctgggccaggagcacctgcatctgggttggagggagggcgaaagtgagggcaagggcatgtcagggggcggcaggtagccagaggccggctggggctgcagcagcggcagggacccacctgcttggcacagtcctcattgctccgtctcaggccctcttggagctcgtcccgctcgcgactgacgctctccaggtccttctgcagctgtcggccctgccacagaccctgccttcagcctgcatctcccaggaacttggcccccctcaccacacttctcgtggcccacctctgcagggag

SEQ ID NO: 216886 - DNA, 116 bp, Homo sapiens
  chr16:28925776-28925892
  hypo
gcgaaggcctcagcggctggacccccatctccgctcagctcctccagaggctccagcgggggcgatggatcccgggacaggggcagcaactccgtggagccgtgcagggaaggggc

SEQ ID NO: 216887 - DNA, 113 bp, Homo sapiens
  chr16:29001662-29001775
  hypo
tcggcctgtgtcccccgaacgctctgcaccttctgacgcagcctgagaatgacctgccctggccccagccctactctgtgtaatagaataaaggcctgcgtgtgtctgtgttg

SEQ ID NO: 216888 - DNA, 54 bp, Homo sapiens
  chr16:29153320-29153374
  hypo
atcctccgtggcatgagggggcggtggaataatcctccgtggcacgagggggca

SEQ ID NO: 216889 - DNA, 280 bp, Homo sapiens
  chr16:29170096-29170376
  hypo
agagccctcaaccagggacggagccgccctgtccacggagcctccagacccaccagaacgcctgggtcaccgcggctcccgggcgggcctcactgcgctgggacacgtcaggacacgtggcagctcccagcgcggtggaaggcctgagccctgggaacactggctggaaaatggaactcggaggacagagcttgtcgacggcgtctcgtatgaatcctggaggagacgcccgtgtcgagggcaattagaatccaggcgtgagccccggctggctgcgtcc

SEQ ID NO: 216890 - DNA, 117 bp, Homo sapiens
  chr16:29324695-29324812
  hypo
ttgcctcaggggatcgtgaatggaaatctgatcttgaaacagggcgagcgaggtggagcactcagcgtccgggatctcagcgtgcggggggcctccgggatctcagcgtgcgggggg

SEQ ID NO: 216891 - DNA, 79 bp, Homo sapiens; identical to SEQ ID NO: 204150
  chr16:29606232-29606311
  hypo

SEQ ID NO: 216892 - DNA, 537 bp, Homo sapiens; identical to SEQ ID NO: 204152
  chr16:29624654-29625191
  hypo

SEQ ID NO: 216893 - DNA, 413 bp, Homo sapiens
  chr16:29755602-29756015
  hypo
accccacactggtccggccttcacgcttccagaaagctgagatctgctccaaggtgacccgtggctggaggccccactcaggatccgggctccctggccgctgcctcctggcctgggggctcccaaactggacgctggcctctggcctctgctcgggttcagcccagctcaccaggcctgtggcggggggcctcccctcccagggctggggcccccagaaggtgctccgggctgggacctccagtacggtctgggggcccaagttgctgggagcagaatttggggctgagggggcaggtggggctgttgctcgggcctccaaagtgcccacctgggtgggaggctcaggggcccgatctgtcagcagggggaccgcagagccataccagtcctcagagcgctctcgggcggtg

SEQ ID NO: 216894 - DNA, 285 bp, Homo sapiens; identical to SEQ ID NO: 204153
  chr16:29822515-29822800
  hypo

SEQ ID NO: 216895 - DNA, 120 bp, Homo sapiens
  chr16:29835153-29835273
  hypo
ctcgtctcagaaaaaaaaaaaaaaaatgagggagaactttttacaatagcaacgggtgaacctcacccagaccaattaaatagaatcaccggagatgggtggctttaaaaaaaggtctcc

SEQ ID NO: 216896 - DNA, 136 bp, Homo sapiens; identical to SEQ ID NO: 204154
  chr16:29836031-29836167
  hypo

SEQ ID NO: 216897 - DNA, 207 bp, Homo sapiens
  chr16:29857083-29857290
  hypo
ctgtcctgggcaccggtttggttggtggccgctgcccttggcgctcctgttcctgctctggccccatgccagcctctcacctgcgctccgtctcctccaggcatgaggctcagagactggagcaggaagcccgcggccggcttgagcggcagaagatcctggaccagtcagaagccgagaaagctcgcaaggaacttttggagctgg

SEQ ID NO: 216898 - DNA, 168 bp, Homo sapiens; identical to SEQ ID NO: 204157
  chr16:29910605-29910773
  hypo

SEQ ID NO: 216899 - DNA, 398 bp, Homo sapiens
  chr16:29912776-29913174
  hypo
tgggtagagtgaggcgggcagctcagggtggcccaggccctgggagagggccaggggtcctaggtattcagcgcccaggcctgcttttcctaccagacctgccttcagccccctttgtgccgcgggacgcccagcggcacgacgtggagctcctggagagcagcttccctgccattttgcgggacttcggggctgtgagctgggacttctcagggactacccctccgcctcggggctggtccccacctctggcccccgggtgctaccagctcctgctgtaccaagcaggccggtgccaacccagcaactgccgccggtgcccgggggcctatcgggcactgagggggcttcgaagctttatgagtgccaacaccttcggcaatgccggcttttccgtt

SEQ ID NO: 216900 - DNA, 133 bp, Homo sapiens
  chr16:29913204-29913337
  hypo
tgtgggcccaccaatgcccgggtcagatgccatctgggtaagtagctgccgcctactgacaacctccttgcctcgatgatttcccccccagacccttctctccgccagagccgtctgctgtctggttctcatt

SEQ ID NO: 216901 - DNA, 287 bp, Homo sapiens
  chr16:30000930-30001217
  hypo
caagaagcagttccaggagacgtgtaagatccagactcggcagtacaaggctctgcgagcacacttgctggagaccacgcccaaagctcagcacaagagcctccttaagcggctcaaggaagagcagacccgcaagctggcgatcttggcggagcagtatgaccagtccatctcagagatgctcagctcacaggcggtgaggcctggggtccagggagggagtgcgctagaggccaggctctgtactttgctttagagaaatggacggtgcagggcatgcacagagc

SEQ ID NO: 216902 - DNA, 56 bp, Homo sapiens
  chr16:30018522-30018578
  hypo
aatgcttcttctgcgaaggcttgaggcggcggaggggcacgcggatctccccaata

SEQ ID NO: 216903 - DNA, 204 bp, Homo sapiens
  chr16:30061414-30061618
  hypo
ggcactgcaggccacggacgtgtccaggggccttgccaaggctgaagtctctctgttggcagaatatgcagaatatgtgttcctggaggccttttgtagggctgaggtgagaactggcctcaacttggtcctcaggattccatcagacaataagaccgcccaaggccgggcacagtggttcacgcttgtaatcccagcaattcg

SEQ ID NO: 216904 - DNA, 33 bp, Homo sapiens
  chr16:30124861-30124894
  hypo
tgcctagccagtgtgggccggctctactactgg

SEQ ID NO: 216905 - DNA, 127 bp, Homo sapiens
  chr16:30125291-30125418
  hypo
ctctccagagccccgtccccagccctgggcagctgggagtgaagggcaccaggcccctgaaagcccaagtcaagtctgtcctcagagccgcacggggcagggcgggggcgtcgcgaacacagacaga

SEQ ID NO: 216906 - DNA, 155 bp, Homo sapiens
  chr16:30169920-30170075
  hypo
aaaagaatttgaaacaaaaacgtgaaacttctgtgattcaaagaacaccgtcaagaaagtgaaaaaacgcctgcctgcccgcctttctttctctctctctctctctttctttctttcaacagtctccctctgttgccgaggctggactatactgc

SEQ ID NO: 216907 - DNA, 403 bp, Homo sapiens
  chr16:30199143-30199546
  hypo
tggcaaggtggcctcgtcgggcggggtgggggtgggaggtgggcaggatgggcctggagagggccagggcagtgggcatccgctggtattgaccctccctccacacctgccacctacagggtgacagctcaatccggtactttgagatcacttccgaggcccctttcctgcactatctctccatgttcagttccaaggagtcccagcggggcatgggctacatgcccaaacgtggcctggaggtgaacaagtgtgagatcgccaggtgactgacccccggccctgaccgcagcatgctccttgggcagtgggcagtcccaagcccacccaaccagactgtgggccccgctcaccttccccttcccacaggttctacaagctgcacgagcggaggtgtgagccc

SEQ ID NO: 216908 - DNA, 335 bp, Homo sapiens
  chr16:30566778-30567113
  hypo
cccgcagtccgggcacgggtagggcttctcgccggtgtgggtgcgcacgtggcgccgcaggtccgaggggtaggcgaaggcgcggccacagtccgggcaggggaagggggtctcgccgctgtgcacgcgccggtgctggtagagggcagagctctggctgaagcggcggccacagtcggcgcagccatagggtttctcgccggtgtggacgcgcaggtgcgaagtcagcgccgagcgctgcgtgaaggcccggccacactccagacagcggtggggccgctccccacgatggatggcccggtgtttgctcagggaggaagcgtggccgaagccct

SEQ ID NO: 216909 - DNA, 115 bp, Homo sapiens
  chr16:30780232-30780347
  hypo
ggatgccctgcggcgcattcggcaggcagaggagcagatagaacacctgcagcgcaagctgggtgccaccaagcaggtgcggcccatgtggtgccctcgcgtcggagcgcaggga

SEQ ID NO: 216910 - DNA, 56 bp, Homo sapiens
  chr16:30784032-30784088
  hypo
gtggagaggttgggccgtgtcacctcctgaagagtgcggtacgccaggttgagacc

SEQ ID NO: 216911 - DNA, 100 bp, Homo sapiens
  chr16:30794665-30794765
  hypo
atgaagctcttcccgcactcggtgcagcggtatggcttctcgcccgcgtggatcttctggtgcttgaggaggttgtggttctggccgaagcgcttcccgc

SEQ ID NO: 216912 - DNA, 68 bp, Homo sapiens
  chr16:30826509-30826577
  hypo
aaaacatctgctctccgaggtgtgggtgaaggtatggggggtccaaaaatgtccgagtcccaccacct

SEQ ID NO: 216913 - DNA, 47 bp, Homo sapiens
  chr16:30835266-30835313
  hypo
tggaggcatccccgcgggcttggtcccctggcgtgtgtcatcaggcc

SEQ ID NO: 216914 - DNA, 570 bp, Homo sapiens
  chr16:30845637-30846207
  hypo
tggaaccacttgccgtatgtcctcgggcgctggaggtctcccagcgctggcatacataagccctggcgtgcggggcggcttctgcgctggggtctctgcgcgtgcacgggcctcaacatatgcatggacgtccaggtgccacgtgggcatctcgtggtgctgcagaaggcgggaggccggcgggtcccctgcgcttgtccccgccacggcccttgcccgctgtggacccggaggctcagtgccggcaggactcgggactcggcgcctctcccggggtggcaggcgcctcgcatggcacactcagaccgctgggagggtggccgcatgggtgcgtgaggaggtgggcgaggcagcccagtgcacccctcccctaggcctctagcaaggcggcctcaggcactggatgtggtccgagttctgccctaagcccttcccatgcattcgggcgccagtggcgagccagatgggtgctgtggccttaggttcgggcaggtgtggggccgctcgccctccgatgttaccgcggtgggtgagctgggaagctctttccgccctcggggcacaggtagt

SEQ ID NO: 216915 - DNA, 47 bp, Homo sapiens
  chr16:30907062-30907109
  hypo
acgcgcacacctgcacactcacacgcacacaaatccactcgcacaca

SEQ ID NO: 216916 - DNA, 259 bp, Homo sapiens
  chr16:30958250-30958509
  hypo
gtgcacctcaatcttgctggtaagcacggtcccccatccgtcctgccagcctgtggatccccacggccagtgccaaccccttgctcacctgcctggtctcagctccactgccccatccccaggttgccaccgcctaacggaccactgcctcccgctgttccgccgctgccctcgtctacgccgcctagacctgcgctcctgccgccagctctcacccgaagcttgtgcccggctggcagctgccgggccccctggcccc

SEQ ID NO: 216917 - DNA, 518 bp, Homo sapiens; identical to SEQ ID NO: 204171
  chr16:30959757-30960275
  hypo

SEQ ID NO: 216918 - DNA, 164 bp, Homo sapiens; identical to SEQ ID NO: 204172
  chr16:30964613-30964777
  hypo

SEQ ID NO: 216919 - DNA, 64 bp, Homo sapiens
  chr16:30968112-30968176
  hypo
ccgtgagcatagggcgccatagccaaagaagcgggcagtgggaccatgacgccaggaggacaca

SEQ ID NO: 216920 - DNA, 148 bp, Homo sapiens
  chr16:30993851-30993999
  hypo
gtcagtggcagcgacgtgtggctggagggaacagagagcccagaccgcacgggcttgggagcctgtgaatccacttgggcctgtggtgagagaggaggaaagtcccggagctttcttcaggagagggtccttccgcaggagagggtcc

SEQ ID NO: 216921 - DNA, 204 bp, Homo sapiens
  chr16:30995028-30995232
  hypo
acgacaccatcatcgatgccaccaagtgtggcaacctggccagattcatcaaccactgctgcacggtgcgccaggggccagccggggcaggagttgggggtcggtgggggtggccacggctcacacgcccttccatccgcagcctaactgctacgccaaggtcatcaccatcgagtcccagaagaagatcgtgatctactccaa

SEQ ID NO: 216922 - DNA, 197 bp, Homo sapiens; identical to SEQ ID NO: 204173
  chr16:31075206-31075403
  hypo

SEQ ID NO: 216923 - DNA, 205 bp, Homo sapiens
  chr16:31099849-31100054
  hypo
acaggccccgccaacgcaaactgcagctggcccgagaaaatctcatccatgttgacacaggtggccacatataccaccccacagagtcctacggagttacatccccactggtggactgtcgcccacaggcggtccccccaccaagaagcagggactgctggggcagagatggcccctgagcccccaccaggccacacccataccc

SEQ ID NO: 216924 - DNA, 319 bp, Homo sapiens; identical to SEQ ID NO: 204175
  chr16:31117073-31117392
  hypo

SEQ ID NO: 216925 - DNA, 319 bp, Homo sapiens
  chr16:31131559-31131878
  hypo
ttctatgtacactacgtgggctgtgagtggcttggcacatctgggcgtgggtgcagggagttggctgccctggcagcactcttatggcccatacttacagttaaccggcggctggacgagtgggtagacaagaaccggctggcgctgaccaagacagtgaaggatgctgtacagaagaactcagagaagtacctgagcgagctcgcagagcagcctgagcgcaagatcactcgcaaccaaaagcgcaagcatgatgagatcaaccatgtgcagaaggtccggatcccttcccatccacgggcccaggaggcccagcttc

SEQ ID NO: 216926 - DNA, 220 bp, Homo sapiens
  chr16:31138387-31138607
  hypo
cttggagaaggagcatgaggcggtaagtggggctgggaagctgcctgcaggtcccccgtctccccttgccgaggagcccctgctgagccgtgcactgtgcctcactcccaccctgcctgcagatcaccaaggtgaagtatgtggacaagatccacatcgggaactacgaaattgatgcctggtatttctcaccattccccgaagactatgggaaacagcc

SEQ ID NO: 216927 - DNA, 213 bp, Homo sapiens
  chr16:31142793-31143006
  hypo
caccccagatccaagcgccagcccagttccggtgggggctcagtcctccggagtccaggagtcagggctcgggggcgctcagcggccagtgggcaagattggggcctttcctgtcctcgaagctgcacaaaggtggccccagcccagaacacagggagagggcagagagatgtgctcatcagtctgggcaggcgggccgggagcagtcttcca

SEQ ID NO: 216928 - DNA, 271 bp, Homo sapiens; identical to SEQ ID NO: 204176
  chr16:31153837-31154108
  hypo

SEQ ID NO: 216929 - DNA, 82 bp, Homo sapiens
  chr16:31447348-31447430
  hypo
gctcgcacagcttctgggccccatcgccccctcctgctgagctgccggctgggtggctggcggaacctgggcaacttccagg

SEQ ID NO: 216930 - DNA, 198 bp, Homo sapiens
  chr16:31487139-31487337
  hypo
gtcaatcctggagcgcagctggaagacggaacacgggagctagatctccatcgcttacaggctgcgtgatctcgaacactggattctttattctgatcgctcagagaggactcgaaaaacgccgcgtaaatcttgcctcactgggcatgtggttgtcagagccgctctgacccgcctcacctcccactcgcaggtggt

SEQ ID NO: 216931 - DNA, 67 bp, Homo sapiens
  chr16:31497941-31498008
  hypo
gtggggcctgaggtcagatgcggaccagagtaggcagggcttggtgccaaggcccgcttgagggacc

SEQ ID NO: 216932 - DNA, 133 bp, Homo sapiens
  chr16:31500389-31500522
  hypo
gacggcagggctgggcttgcacatcctcagcaggctgacctgtttccttcgcagggcgccttctggggactcatcgggggcctgctgatgggcctggcacgcctgattcccgagttctccttcggctcgggca

SEQ ID NO: 216933 - DNA, 76 bp, Homo sapiens
  chr16:31500673-31500749
  hypo
gccccaggcaagcactgtgggacacagcacctaccctctgcttcctggagtgcccagctgggaggacctgaatttc

SEQ ID NO: 216934 - DNA, 37 bp, Homo sapiens
  chr16:31557995-31558032
  hypo
aaatgtctaagttggaaacaacggtaagtggacaata

SEQ ID NO: 216935 - DNA, 542 bp, Homo sapiens
  chr16:46683291-46683833
  hypo
acattgcctccagccgagactgcgcagagatgaacttcaggggagaaaaaagaaacacatgtcacagtttttcttaaaccgtgagagaggaggagcaggaggagaagagaccagagcccctctcccaggcaccggggctttccttggatgtcctgagactcaagatttctcacctctgcaggtggacctgataatcctacgcagaagaaccgctacagggcagcgagaacgcctgcaatggcagcagacagccgagcctccccagcacggcgtctcccgggacaaatgagcgtccacgtcgcttgacgtcatggtgtgtgcatttgtcctgtgctgggctccctacactgctcgtgatcatcggagctgcctgccacgggtcacatgtccagcactttctctatgagacacgcttctggctccactggctgaattcggctatcagccctcttccgtactcattctgccacgagtttcagaaaagcattccatcaaaccgctgtgtcctggaaaggctgagcgagatccacccacccccatat

SEQ ID NO: 216936 - DNA, 97 bp, Homo sapiens
  chr16:46717908-46718005
  hypo
attataggcatgagccaccgcacccagcccatttaccaattattaacagctgctgcacacagagtcatgccttatcgctgaagttaacagaataaga

SEQ ID NO: 216937 - DNA, 109 bp, Homo sapiens
  chr16:46781699-46781808
  hypo
ttgatttctggaacgtggcccccaccaaagcgatggccctgtccaccgcagccaccatcctgaagagggcctccagcctggcaccgtgctgggccgcatcctgctgcat

SEQ ID NO: 216938 - DNA, 303 bp, Homo sapiens
  chr16:46934654-46934957
  hypo
agaaacgtgcccggcggatcctgcaggcttgtggcgggaacagcctgggtgaggccccaacttgccaggcccctaggcgtgaaatgaatgagtgttcccaggcggccccagcctcaagcggagggtcctgcatgcgaatgggtgtgtgaacgtgtgtgggtggctgacagcacacagagtaaacaaaaaatagcgtcctcttcccactcacaccttgctggcctcgtttattaagcaggcggtgccggtgccacctttaggtgcaagtgcctgcatcatgccgggtgtgggtgctcctcctgg

SEQ ID NO: 216939 - DNA, 137 bp, Homo sapiens
  chr16:46945509-46945646
  hypo
ccctaggatctctgagatatcggtagcctgtgctgccgaggctgagacccactgcctcagaagcatggtgcccaagctgcggggccccacttcagacacttggatgtaattgggccggggtatggtttgagagtttg

SEQ ID NO: 216940 - DNA, 78 bp, Homo sapiens
  chr16:46952490-46952568
  hypo
tttgaggaccctttggtgaccgtccctgccgtgcccccgcaggtgtaccaggacaacgtgtactctccagattgcaga

SEQ ID NO: 216941 - DNA, 34 bp, Homo sapiens
  chr16:46992085-46992119
  hypo
caggtgtggtggtacacacccgtagcaagccatg

SEQ ID NO: 216942 - DNA, 44 bp, Homo sapiens
  chr16:47001892-47001936
  hypo
ccgtaagttttaacttataacaatttttacgtggtacagacatt

SEQ ID NO: 216943 - DNA, 166 bp, Homo sapiens; identical to SEQ ID NO: 204182
  chr16:47176606-47176772
  hypo

SEQ ID NO: 216944 - DNA, 40 bp, Homo sapiens
  chr16:47288965-47289005
  hypo
ccagtctgggcaatagaccgagactctgtctcaaaaaagt

SEQ ID NO: 216945 - DNA, 189 bp, Homo sapiens
  chr16:48177832-48178021
  hypo
gtgtcagatgagtcatatgtcgacaatgggggcagggtgtctacggtcagcctttgccggtagcctttcaccatcaccggcgtgagccaggaaaatgtggcgaaggagagtagcccggcatcatccaccgggttgggtgctaacctgcagacaaacaagacactcagcgttccaggcactggggtcatt

SEQ ID NO: 216946 - DNA, 45 bp, Homo sapiens
  chr16:48290944-48290989
  hypo
ttgactgggtgctcacgcctgtagtcccagcactttgggaggctg

SEQ ID NO: 216947 - DNA, 351 bp, Homo sapiens
  chr16:48381406-48381757
  hypo
cttctttcaaggtatctcagcgtttgagtcagccaggagtagcaataggtttggcttggactcccttaggtggagaaatcatgttcgtggaggcgagtcgaatggatggcgagggccagttaactctgaccggccagctcggggacgtgatgaaggagtccgcccacctcgctatcagctggctccgcagcaacgcaaagaagtaccagctgaccaatggtaggagcctgcacccggccaggcaggcgtgacccaggaggcggtaccttccatggcggagactggcatgagctcgagactgccagttacacatctagcaaagtacacaccgttttgaacccctgtggaaat

SEQ ID NO: 216948 - DNA, 86 bp, Homo sapiens
  chr16:48530910-48530996
  hypo
agagatcctgaccctcgcctggctttttgtgaaggaaggcgtcgaaaagatctggctcatgggcggagagccgctcatccagccgg

SEQ ID NO: 216949 - DNA, 156 bp, Homo sapiens
  chr16:48577583-48577739
  hypo
agtggcagtccccaccgactcagtctagatgaggtgtgggtgggtgcccacacttgtatgcacatgggtatgtgcgagtatgtgtgtacagggagggcatctgtatcgctcaaaagcctcccactggactcggcctgcaggcgagaaatgaggcta

SEQ ID NO: 216950 - DNA, 95 bp, Homo sapiens
  chr16:48641693-48641788
  hypo
gtctgcaatccaactgactaaaaaagttaagcccaggaaagcaaacttggttctatatctacaatgctggctttctgatttgttttgttttgttt

SEQ ID NO: 216951 - DNA, 32 bp, Homo sapiens
  chr16:50218668-50218700
  hypo
acagtctcactctgttacgcaggctggagtgt

SEQ ID NO: 216952 - DNA, 44 bp, Homo sapiens
  chr16:50227517-50227561
  hypo
ggattacaggtgtgagtcaccgcgcctggccaggtcctggagtc

SEQ ID NO: 216953 - DNA, 323 bp, Homo sapiens
  chr16:50335444-50335767
  hypo
gaggtggttattaatctcccagatttccgagagacacactttcaaaacaagctttggatgaaactcaggaaagcagggagtggcctgggagccactgggcaggagcctctgagtgtcctgggtgctgactgcaggtcccctggtggctccaggaccccacggtggaggaggcagttccactgccctggccaggtggggcccgccttggcctgtctgctgcccgaccctggcctgcttcagggagtccggcacgtctggccacttctctgtgaatcatccatgaggcttgctcaagaatgtcggcccagccagcgagtggctcc

SEQ ID NO: 216954 - DNA, 46 bp, Homo sapiens
  chr16:50335818-50335864
  hypo
gggggaccaagggctggcctgtgagcctccctacacatctgctggc

SEQ ID NO: 216955 - DNA, 40 bp, Homo sapiens
  chr16:50336316-50336356
  hypo
aatccacccccgcaggctgccaggttgagcagggaaaact

SEQ ID NO: 216956 - DNA, 239 bp, Homo sapiens
  chr16:50336386-50336625
  hypo
ataactgtaaatcatgtttcgcataagtgttgcacgcagtactcaactggacagttgtatttatttggcggccccaccttccccccaccccaccctaccccaccctcttttttgtttaacttcatttatccacgcagttgaaagttcaaaaggtgtgaagggcgtgttgtagaaagactccttgtccccagccggcacatctcagaggggacctgtgcagtgagtttcttgtattccct

SEQ ID NO: 216957 - DNA, 183 bp, Homo sapiens
  chr16:50633343-50633526
  hypo
cccagacctgactgacaactcgagtgagtcacttaacctctctaagcctcagtttcctcatggccaaagtgggggtcatcgcagagcccagcttctagggctgctgggagcacttggtcggtgatgcccctaacgtgcttcatggaacacttggcagatgtcgcacactgactaagactggtt

SEQ ID NO: 216958 - DNA, 66 bp, Homo sapiens; identical to SEQ ID NO: 204188
  chr16:50773734-50773800
  hypo

SEQ ID NO: 216959 - DNA, 57 bp, Homo sapiens
  chr16:50897229-50897286
  hypo
ggcatccatcacgcgggaccagccgggagcggccggtgaggcggcgtgaatgcgccg

SEQ ID NO: 216960 - DNA, 75 bp, Homo sapiens; identical to SEQ ID NO: 204190
  chr16:51189108-51189183
  hypo

SEQ ID NO: 216961 - DNA, 58 bp, Homo sapiens; identical to SEQ ID NO: 204191
  chr16:51189374-51189432
  hypo

SEQ ID NO: 216962 - DNA, 45 bp, Homo sapiens
  chr16:53448551-53448596
  hypo
aggtagtcccagctactctgaaggctgattgaggaggattgcttg

SEQ ID NO: 216963 - DNA, 187 bp, Homo sapiens
  chr16:53563654-53563841
  hypo
tacagaagcttgcagcaaagctcttgataatgttactcttgataaagttgcctggccaccctctctaagtaaataaaggggagaggaatatgacgcatattaattcacccagtttgcagcctactggaggacgagaggggaaaaaaaagttgcaatgggttcagcgcgtggcattttatatgaatac

SEQ ID NO: 216964 - DNA, 240 bp, Homo sapiens
  chr16:53659274-53659514
  hypo
cccggccgccaccccgtctgggaactggggggggcgcctcagcctggcggccgccccgtctggggggtggggtggggggtgcctccacccggcagccgccccatctgggggctggggggggcgcgcctccgcccagcggccgccccgtctagggggtgaggggggggcgcctccgcccggcagccaccccgtcttgggggtgggggggcccctctgcccagccgccatgtctgggaagtg

SEQ ID NO: 216965 - DNA, 82 bp, Homo sapiens
  chr16:53825645-53825727
  hypo
agttacagagttttatgcaacgtttcaatcaagaaagcatgataataaagcgtgtataggccgggcgcggtggctcacgctt

SEQ ID NO: 216966 - DNA, 130 bp, Homo sapiens
  chr16:54128713-54128843
  hypo
ggtagagcatagaagtttagtctcatgagatgactccattcctaagggaatctagaggctttctgcggagcaccgtgacatagatcatatcatcctcctgcttaaaaccctccggcggttccccatctca

SEQ ID NO: 216967 - DNA, 46 bp, Homo sapiens
  chr16:55053597-55053643
  hypo
accaaactcacacaccgcactcacatacatacgacacacagtcaca

SEQ ID NO: 216968 - DNA, 142 bp, Homo sapiens; identical to SEQ ID NO: 204212
  chr16:55513539-55513681
  hypo

SEQ ID NO: 216969 - DNA, 210 bp, Homo sapiens
  chr16:55739211-55739421
  hypo
ctcaaaaggagttaccgctcagctgggagccagttcctgctatatgatctgttttctagcctcgctaatgtgagactgaagcattcttaccaaagaaatcatttcctagtaaagaagcccattgaactcactttatttgtttatttccttcgaaagccaccgaagagagaaaaacagagaaggtgtgtagtgtggcggaaaaagcacagc

SEQ ID NO: 216970 - DNA, 60 bp, Homo sapiens; identical to SEQ ID NO: 204213
  chr16:56225663-56225723
  hypo

SEQ ID NO: 216971 - DNA, 268 bp, Homo sapiens; identical to SEQ ID NO: 204214
  chr16:56225881-56226149
  hypo

SEQ ID NO: 216972 - DNA, 89 bp, Homo sapiens; identical to SEQ ID NO: 204215
  chr16:56228280-56228369
  hypo

SEQ ID NO: 216973 - DNA, 71 bp, Homo sapiens; identical to SEQ ID NO: 204216
  chr16:56228591-56228662
  hypo

SEQ ID NO: 216974 - DNA, 216 bp, Homo sapiens
  chr16:56370720-56370936
  hypo
ctgtgtcgcgctcagcggctatgaccaggtgctccacgaagacgaaaccacggtgagtggcctgggccccccgggcagggggcagcgctgaggagacggccgcaggataggccagccctctgagcactgggcctcgggtgcccacaatggctctggggtccagccagctgttgtggttagaggtttccatcatggacaggccgtgccggcactcca

SEQ ID NO: 216975 - DNA, 189 bp, Homo sapiens
  chr16:56398931-56399120
  hypo
cagatgcagacctgcgctggccagggtcagcccattgcccgcttctaggctgtgacagaatggaggtgggtgcagctgagaggcaggctgttttacttcagagttcctgctggacctaccctcactttttcctgccttcagctaagctcgagagggaacttcaagagaaccattcgtatccccgagagt

SEQ ID NO: 216976 - DNA, 135 bp, Homo sapiens
  chr16:56782260-56782395
  hypo
ggagatccagcaggcgggagagcgcctgcgttcccgtaccctaacacgcacgtcccaggagacggcagatgtcaaggcgtgagtactggtagggagacagcattagtactgggtggcttgcgggcaggatctgtt

SEQ ID NO: 216977 - DNA, 114 bp, Homo sapiens
  chr16:56857028-56857142
  hypo
gaggaaagaacacccgctcctttcctgggaggcgtcttttgaagggagtgagtgggaaggaaaatgggaggctgtgacgctcaccaagtaacgtaagagcggtggcccctggag

SEQ ID NO: 216978 - DNA, 311 bp, Homo sapiens
  chr16:56857408-56857719
  hypo
gcaggggtgctcatcggtggatggaactctgaagtctggccagcagagacgcatcttctgcactgagcttaagcctagccgtcacagacagatgacattaacctcatcccccaccacattctgccccctttggaggtcagagtgccacaaagaactagataatttctctggccctgcagcattgtcacatgcagtttcatttatgtgcagagcatttccgacatgtggaccatggtaaaacaaatgacagacgtgttgttgacaccggcaacggatgccctgaagaaccgcagcagcgtggaagtgcgcat

SEQ ID NO: 216979 - DNA, 266 bp, Homo sapiens
  chr16:56928223-56928489
  hypo
tgtttatttaaatatgctgcacaagcacaaataaaccctaccccacagagcaccgtgtgcgacttgaattcagtcagccatgttcattatacagatgggtcgactggggtccagcgaggagaggaaggggtttgctaatggcagagcggggcaggaactcacatagtgctctgtcctgagtgtattcttgtcatgactcacggggactctccttgccaggcctcaccctcctcattccctatctccttggccgcaagaggaggtgg

SEQ ID NO: 216980 - DNA, 204 bp, Homo sapiens; identical to SEQ ID NO: 204224
  chr16:57318414-57318618
  hypo

SEQ ID NO: 216981 - DNA, 31 bp, Homo sapiens
  chr16:57326589-57326620
  hypo
gattacaggcgtgaaccacctacccagcaag

SEQ ID NO: 216982 - DNA, 287 bp, Homo sapiens
  chr16:57559708-57559995
  hypo
taaacactacctgtcatcttcgtgagtctaatgttctgtgattctgagggcgttgtagcacggcctggccctggccctgccccctcccgcctcccacgactcactctcgctccttgagcagcaccttctgggactcatccagccgtagccgcagggcggtcaacttggaggcctcctcctccgtggcagctgtgtcctcccagggtagccggctgcgctcctggcggcctgagctgccccgcgggcccccagcccccaggctgcgcgcctcccagcagtcctcagac

SEQ ID NO: 216983 - DNA, 101 bp, Homo sapiens
  chr16:57697546-57697647
  hypo
actgcctgtggcccccgagcccggcccagccccaggccagtcagccgcagactttggaaagcccaacgaccatggagagatgggccgttgccatggtggac

SEQ ID NO: 216984 - DNA, 224 bp, Homo sapiens
  chr16:57734046-57734270
  hypo
ctccttgcagaagttcgtgagcacaaccctccggcccacactgatgccctaccccgagctctacaactgggacagctgtgcccagtttgtctccgacttcctcaccatggtgcccctgcctgaccctctcaagccggtaagcaccactcacaggctgcatgcctgagcccaccaggactaagatggtgtgagaaacaaactcacccatccaaacccaaagaatg

SEQ ID NO: 216985 - DNA, 164 bp, Homo sapiens
  chr16:57759978-57760142
  hypo
gaaaatcacagagcggttcttccgcaacccagcgaagcccgcggaggaggacgtggcagagcgcgtgtttctggtcgcggaggagcgcatccagctgcgctaccactgccgtgaggaccacatcacggcctccaagcgcgagttcctgcggcgcaccgaggtgg

SEQ ID NO: 216986 - DNA, 1325 bp, Homo sapiens
  chr16:58030194-58031519
  hypo
atgggccacagcaatctggccgcccgcactgcccgctggtgccaggagtacgagcggcacaccctctccctgcctcatacccctgcgtcctcactcccgaggtctcagaacaccgagctgggtggggcccttggtgcaaggcagctgtgaggagctaggctgcgcgaggcctgctgggcccacggcgccgactcaggtcaggctggtaggggccacagccgcagagtcagggcaggcaggcggctacctggtaggcgccctccgctgccgcggcggcggcactgtgctgcgcgctgtgctcctgcaacaaggccacgtctaggaagcgctccccgcaccatacacacttgaactgctgctcgcgggcgtgcacgccctggtgcttgttgagatgctcccgctgcttgaaggccttgtcgcagttggggcacttgtagggcttctcgcctgtgtgtacccgccggtgccgctgcaggtctgacgcgtacttgaagcgtttctcgcagtctgggcacttgagtggcttctcgcgggccggatcgcagcggtgctgcacgaactcggaagaggagaagaagcggcgttcgcaaagcgtgcagcgcaggggcttctctgccgccgcacagtgggccagctggtgcttctgcagggccgacgcgcgcttgtaggccttgttgcacacagggcacttgaagggccgctcggccgcgccgggcaggcacttgtgccgcagcagctcggcagattggtcaaagcctttctggcacacggggcacttgaagagagtctcgagggtgtgcacgtgctggtggtagagcaggtggctgggctgcccaaagcccttctcacataggccgcatttgaagggctcctcggtcttgtgtgtgcgccggtggcgcatcagtgcgtactgctgcttgaagcccatggggcacaggtcgcacttgaagggccgctcggcgctgtgtgtgcgctcatgctgccgcaggtccgagggccgcttgaaggccttctggcactcgccgcagcggaagggccgctccccacttggcgtgcacgggtgctgcagcagctccgacgactccttgaaatgcaactcgcacacgttgcagcggaacaggtggtgctcgcccgagtgcgcgtacatgtggcgcaccaggtgagagcggtgcttgaaggtcttctcgcagactgcgcacttgtagggccgctcggagctgtgcgtgcgcttgtggtgcaccaggtgcgacgactggctgaagcttttgtcacacagcgtgcacttgtagggcttctcaccggtgtggatccgctcatgccgagag

SEQ ID NO: 216987 - DNA, 613 bp, Homo sapiens; identical to SEQ ID NO: 204227
  chr16:58059965-58060578
  hypo

SEQ ID NO: 216988 - DNA, 67 bp, Homo sapiens
  chr16:58076202-58076269
  hypo
ctggcgtggtctgcccggtgacatcagtgctgcctacgagcgccaagacggtcgttttgtctttttc

SEQ ID NO: 216989 - DNA, 124 bp, Homo sapiens; identical to SEQ ID NO: 204230
  chr16:58426260-58426384
  hypo

SEQ ID NO: 216990 - DNA, 101 bp, Homo sapiens
  chr16:58558294-58558395
  hypo
ctgcttgacattattcgtgtttgtgagtctgtcacagtgacacgtttctctaaaggctgccgtccttttattgccgagctcttggacgtgatggtattcaa

SEQ ID NO: 216991 - DNA, 133 bp, Homo sapiens
  chr16:61615418-61615551
  hypo
tttcatgctaaggggcgcctgcaggtccacctggagccacccttagccccgcctcgacctccttcccatgctcattggcacctaaagtccagagggggctgaggttgcagggggccatcgtgtcagcactgcc

SEQ ID NO: 216992 - DNA, 265 bp, Homo sapiens
  chr16:66420654-66420919
  hypo
cactcacacacagccactgccgcccattcccagctcacgtcacctcttcttttctagatcaagtcaagcgtgagtcgcaagaatgccaagtacctgctcaaaggagaatatgtgggcaaggtcttccgggtcgatgcagagacaggagacgtgttcgccattgagaggctggaccgggagaatatctcagagtaccacctcactgctgtcattgtggacaaggacactggcgaaaacctggagactccttccagcttcaccatca

SEQ ID NO: 216993 - DNA, 459 bp, Homo sapiens
  chr16:66600011-66600470
  hypo
aggaagagatttccgaagtctgcaccccgcgcagagcactactgtaacttccaagggagcgctgggagcagcgggatcgggttttccggcacccgggcctgggtggcagggaagaatgtgccgggatccgcctcagggatctttgaatctctttactgcctggctggccggcagctccgaggtgtggggttgcagagattttgagttctcgggctaggcggtggcattgcaccccctgtggcaatgagggtggctgaagggctcggcttgtcggtggggcagcgagagccgggtgcacgcgccggggaggtagccaacagccgttgggacgcgacgctggttcccaggggagagccagccgctgccgcggcactggttcagacggccaggccctagggacccaccatggatcctgaacacgccaaacctgagtcatccgaggcaccttcagggaacttg

SEQ ID NO: 216994 - DNA, 72 bp, Homo sapiens; identical to SEQ ID NO: 204240
  chr16:66638452-66638524
  hypo

SEQ ID NO: 216995 - DNA, 173 bp, Homo sapiens; identical to SEQ ID NO: 29297
  chr16:66652773-66652946
  hypo

SEQ ID NO: 216996 - DNA, 180 bp, Homo sapiens
  chr16:66781286-66781466
  hypo
cctctactaaacagctcttggagatggtagaattacggtgctggaaaggaccttggttcaactttgtcattttagcaataaggaaatgggggactagaggtggtaggatcagccctcattatataatcgcccatacatcgtaatctttactgtttaaatgagtaaaggcaaatataaaga

SEQ ID NO: 216997 - DNA, 259 bp, Homo sapiens
  chr16:66835306-66835565
  hypo
gggcctgacggggcggtaagacatcctggccggcccaacccgccttacacaggcgccaacatacagagtttccaagcgcggtaaggcaggacaacaacgcgcgggagcggaggccgtggcgtctaccctcaagcgggagcttccgccctttcttcatcaccgctcacctgccacgacgcacgacagggtttcccgcccagccgaccaggctcacgtccgtgggcgggacttccggccggcagccccgccgcccctgcaa

SEQ ID NO: 216998 - DNA, 81 bp, Homo sapiens
  chr16:66942966-66943047
  hypo
gtgcaatcatgtgaccgtagatgctactatcaatgatgatgacaatgactatgatcaaagggcaggcgcataatgactagg

SEQ ID NO: 216999 - DNA, 48 bp, Homo sapiens; identical to SEQ ID NO: 204241
  chr16:66959201-66959249
  hypo

SEQ ID NO: 217000 - DNA, 190 bp, Homo sapiens
  chr16:67006195-67006385
  hypo
tgccaaaggcagcatcgaatcaggccatgagtgcctaactcccatcccatcctttctctgtagattctggaagccctgtctttttctatgagttccagcatcgacccagttcttttgcgaagatcaaacctgcctgggtgaaggctgatcatggggccgagggtgcttttgtgttcggaggtcccttcct

SEQ ID NO: 217001 - DNA, 144 bp, Homo sapiens
  chr16:67175552-67175696
  hypo
ggtggggcaggcagctccaggcgccagcataggcaccagctccacgtaagggtgaggctagatcacgtgtaccgcaagcggcttccattgcgggcacccatgtctggacaaggagaatgcggtggcacccggaagcttggggac

SEQ ID NO: 217002 - DNA, 150 bp, Homo sapiens; identical to SEQ ID NO: 204242
  chr16:67189018-67189168
  hypo

SEQ ID NO: 217003 - DNA, 374 bp, Homo sapiens; identical to SEQ ID NO: 204243
  chr16:67189259-67189633
  hypo

SEQ ID NO: 217004 - DNA, 194 bp, Homo sapiens
  chr16:67221091-67221285
  hypo
tgatcccccatgtcccgctgccccaaaggcactgaccccaggtacacatgcagtgcccagtgcagcaaggcgaaggcatccgcagcttctagctcaggccctgcaaggaggttctgcaggctgcggcgcaaaccactatgcagcgtgtgggcccatagctggaccacgttgtactgtggcgggcagcaaggcgc

SEQ ID NO: 217005 - DNA, 231 bp, Homo sapiens
  chr16:67270958-67271189
  hypo
cgccgcccaccagcgcctggggcttcttcgatgtctccatcctccaatttcagggcgttctagcagaggcggaccaggatgtaagaaagtggttaacgtgtatgcaggtggggtggggcgctggggactgcgcttctctcttccctctttccaatccgcctcagagcgtaaggcccggcccacctcgtagagcacaagctgcgtgcgcaggtcgacgtcagtgcccgcagt

SEQ ID NO: 217006 - DNA, 215 bp, Homo sapiens; identical to SEQ ID NO: 204249
  chr16:67280008-67280223
  hypo

SEQ ID NO: 217007 - DNA, 457 bp, Homo sapiens; identical to SEQ ID NO: 204251
  chr16:67281140-67281597
  hypo

SEQ ID NO: 217008 - DNA, 368 bp, Homo sapiens
  chr16:67469689-67470057
  hypo
caggagacattagccgcgtgctagagttcaccaaggcccacaccaccagcaccggtcagtggcaagtgtccaccaggcaagggcgtggcaggggagtgggaaggacacggggactggaagtttgctgctgggctgacctaaggcttccctcctctgctctgtgaccccaggcctgtggggcctcgtcaacaacgcaggccacaatgaagtagttgctgatgcggagctgtctccagtggccactttccgtagctgcatggaggtgaatttctttggcgcgctcgagctgaccaagggcctcctgcccctgctgcgcagctcaaggggccgcatcgtgactgtggggagcccagcgggtgagtgccccc

SEQ ID NO: 217009 - DNA, 49 bp, Homo sapiens
  chr16:67470488-67470537
  hypo
agagtcagtgagaaacgtgggtcagtgggaaaagcgcaagcaattgctg

SEQ ID NO: 217010 - DNA, 122 bp, Homo sapiens
  chr16:67470863-67470985
  hypo
cccaaacctgagccccggcccttccccagcagtggctcggtgagccatgtgcacctatggcccagccactgcagcacaggaggctccgtgagcccttggttcctccccgaaaacccccagca

SEQ ID NO: 217011 - DNA, 79 bp, Homo sapiens
  chr16:67472275-67472354
  hypo
ggagaactgggcagccgctaggacagcgtactacaccccggacaggcaggtgagccacaggcttgtcacagaccacata

SEQ ID NO: 217012 - DNA, 79 bp, Homo sapiens
  chr16:67472414-67472493
  hypo
gccttgggccaggacgctagaagatagggatgtagttgtcgattttggcgcggtggcgctgggcgatacattcagcgat

SEQ ID NO: 217013 - DNA, 41 bp, Homo sapiens
  chr16:67511577-67511618
  hypo
gttttttttttttctttatacggagtcttgctctatagccc

SEQ ID NO: 217014 - DNA, 64 bp, Homo sapiens
  chr16:67518130-67518194
  hypo
aaagctttcaggccgcctgcctcattagcactaatggctgctcccttccgccctgtgtcgtcag

SEQ ID NO: 217015 - DNA, 272 bp, Homo sapiens; identical to SEQ ID NO: 204256
  chr16:67571731-67572003
  hypo

SEQ ID NO: 217016 - DNA, 132 bp, Homo sapiens; identical to SEQ ID NO: 204257
  chr16:67678786-67678918
  hypo

SEQ ID NO: 217017 - DNA, 289 bp, Homo sapiens
  chr16:67709089-67709378
  hypo
ggttctggttggtgtcgggctcctccgtcagcacctccacagcctcccactccccggatcggctcgacctcttgatggcatccaccacgctctgcatgtacagcccatcctcgaaggaggcggccatggagacaggggtgcggtcccaggtgcggcggtcgccctgcccctggaaggactggcgcaaggcctgcaccatgtagaccatgcccttcaggtacagcagcgggacatcctggggcccctgctcaggcagtcctgcgcccactgccagcgagtccctcaagag

SEQ ID NO: 217018 - DNA, 202 bp, Homo sapiens
  chr16:67920022-67920224
  hypo
atgttcgggagcgcggcacaggctccgaaaccaaccaggagacgctgcgggctacagcgcctgcactccccatggcccctgcgcccccactgctggcggctgctctggctctggcctacctcctgaggcctctggcctagcttgttgggttgggtagcagcgcccgtacctccagccctgctctggcggtggttgtccaggc

SEQ ID NO: 217019 - DNA, 140 bp, Homo sapiens
  chr16:67965742-67965882
  hypo
tgagcagcaacatcgtggcagatgtgaggttgggagctgggtctggctttatgggtcttctcgtccttgagctaaagctccaggcctgaggccaggccagctgtgtagactcagccccctcccacgctccaggcaagaca

SEQ ID NO: 217020 - DNA, 155 bp, Homo sapiens; identical to SEQ ID NO: 204261
  chr16:68118915-68119070
  hypo

SEQ ID NO: 217021 - DNA, 72 bp, Homo sapiens; identical to SEQ ID NO: 204262
  chr16:68269813-68269885
  hypo

SEQ ID NO: 217022 - DNA, 112 bp, Homo sapiens; identical to SEQ ID NO: 204263
  chr16:68269896-68270008
  hypo

SEQ ID NO: 217023 - DNA, 105 bp, Homo sapiens; identical to SEQ ID NO: 204264
  chr16:68270022-68270127
  hypo

SEQ ID NO: 217024 - DNA, 146 bp, Homo sapiens; identical to SEQ ID NO: 204265
  chr16:68270157-68270303
  hypo

SEQ ID NO: 217025 - DNA, 379 bp, Homo sapiens; identical to SEQ ID NO: 204266
  chr16:68270867-68271246
  hypo

SEQ ID NO: 217026 - DNA, 57 bp, Homo sapiens; identical to SEQ ID NO: 204267
  chr16:68298829-68298886
  hypo

SEQ ID NO: 217027 - DNA, 46 bp, Homo sapiens
  chr16:68386060-68386106
  hypo
actgagtggcctgttgcttccgtgttcctgttaacactcctggacc

SEQ ID NO: 217028 - DNA, 181 bp, Homo sapiens
  chr16:68386187-68386368
  hypo
gcctgctgccgtggcacaacctctacttctggtacgtgcggaccgctgtggaccagcacctggggccaggtgccatggtgatgccccaggcagcctcgctgcacgctgtggttgtggagttcagggtaggccacccaggggatgttggagaaaaaagcagaggaggcgggtggggaacctt

SEQ ID NO: 217029 - DNA, 810 bp, Homo sapiens; identical to SEQ ID NO: 53222
  chr16:68481955-68482765
  hypo

SEQ ID NO: 217030 - DNA, 191 bp, Homo sapiens
  chr16:68737004-68737195
  hypo
ccatgccttttccctcgtcactgacccaacgatctttttttcttcccaaagggactaaaggggctacagataggccctgtccccacagtgcgctttcccagtccctagagaggcctgaggagggtggcatgctctcattcctagacagttggtgaggagctggggccccgaattcccggccccccatttct

SEQ ID NO: 217031 - DNA, 34 bp, Homo sapiens
  chr16:68739594-68739628
  hypo
gattacaggcgtgagccgccgtgcccagccccaa

SEQ ID NO: 217032 - DNA, 120 bp, Homo sapiens
  chr16:68743256-68743376
  hypo
gagcccctgcacccggcgcagaagcactcttgtcaattagagtgctggcaagcaagagaggcaagctcaaaaggtgaccggagaagggttcatggaggtgcagtctacagtggggtgagc

SEQ ID NO: 217033 - DNA, 167 bp, Homo sapiens
  chr16:68849366-68849533
  hypo
taacacaaaatgtttcgttttgtttttaacttcattgtttctgctctctagggcttggattttgaggccaagcagcagtacattctacacgtagcagtgacgaatgtggtaccttttgaggtctctctcaccacctccacagccaccgtcaccgtggatgtgctgga

SEQ ID NO: 217034 - DNA, 202 bp, Homo sapiens
  chr16:68856757-68856959
  hypo
gtaaaaccctgggtgcgatggaagtcactctggccctggagaagaacctgaactggacccttttggatcttcatgccttgggttccacctgcacagacccccatatctgtgacttcctggagagccacttcctagatgaaaaagtaaaactcatcaagaagataggtgaccacctgaccaaccttcacaggccagccggcct

SEQ ID NO: 217035 - DNA, 82 bp, Homo sapiens
  chr16:68876700-68876782
  hypo
aaacagaacacagatcgaacttttactgggaactttactaagttcactgaaaaaaaaaatcatattacccataacaacattt

SEQ ID NO: 217036 - DNA, 77 bp, Homo sapiens
  chr16:68942210-68942287
  hypo
ttacctcccatgttcacacccgtccccgtgcccagcaatactctttctaaatcacgttccaaggggatgtgctctta

SEQ ID NO: 217037 - DNA, 134 bp, Homo sapiens
  chr16:69129258-69129392
  hypo
atggacagacactcttcttacgtgctctagagctcaccgcctgactggctggctcttgactggcctctcggtgccagaaatgcacttgtaagtctccgctgaggagaaccctcgggctgtgttctcaaccctgg

SEQ ID NO: 217038 - DNA, 45 bp, Homo sapiens
  chr16:69133540-69133585
  hypo
ttttaaagaaaacaacaacataaatgcaggtatgcatacataacg

SEQ ID NO: 217039 - DNA, 45 bp, Homo sapiens
  chr16:69133633-69133678
  hypo
tattcctccattgtcctcatgaacgtgtttttttagtagctgcac

SEQ ID NO: 217040 - DNA, 559 bp, Homo sapiens; identical to SEQ ID NO: 204273
  chr16:69139856-69140415
  hypo

SEQ ID NO: 217041 - DNA, 33 bp, Homo sapiens
  chr16:69352180-69352213
  hypo
tgtgagagccactgcaggtggcctcccagagta

SEQ ID NO: 217042 - DNA, 217 bp, Homo sapiens
  chr16:69352349-69352566
  hypo
tttgctgggggggtcctgaagtgagctgctgagagcattggcccaaatgtccctgaagtacttgcttgagtcacacggcactgttaagccaggaaggcttcgttccttaaccagtgtgcaggcagcggagcctggacttgctgggagcacctctgtgctccaggctgaagggccagcttgtgactttccgtctcccttcccagcagtgacagtgaca

SEQ ID NO: 217043 - DNA, 399 bp, Homo sapiens
  chr16:69352596-69352995
  hypo
tgcaagaacagctgatgggtaagtggctcgcggccctgtggcagcggcaggggatgagagtgggtccgctgctgggttggctcatgccccttggccgggcccgggcccgggccggcctccctctcgcaggtgccgtcgtgatggagaagcccaacatacggtggaacgacgtggccgggctggagggggccaaggaggccctcaaagaagctgtcattttgccaatcaaattcccacacttgttcacaggtgagagttgagccatttcaaaccccaatgtaaaaattccaggcttccgcagggctggcactccgaggcacccgggagtcagtggcgactcagcccccggggcctgcagagggccaggcctggctgctcgctggtgtccacaacactgct

SEQ ID NO: 217044 - DNA, 322 bp, Homo sapiens
  chr16:69354734-69355056
  hypo
tgctgctggcagcccgggtgcagcctggccccttttccctggagtcttcccgtctgcctgccaagcagagccctttgtgaggctggcttgttgaggatgtgccgccagcatcactggcccatgaaatgcgtccgtttcactcaaatcttcgtgcctccccttccgtgaataccattccatcatccgctgtcaactcctgccgtgtgctgggctctctaggtttgaaaaacgaatttatatccccttgccggaggaagctgcccgcgcccagatgttccggttgcatctcgggagcactccccacaacctcacggatgcaaac

SEQ ID NO: 217045 - DNA, 202 bp, Homo sapiens
  chr16:69355116-69355318
  hypo
cgggactctctcatgcagcccgtgaggaaggtgcagtcggccacacacttcaaaaaggtgagtgcccgcggccactgctgagaaaaatctcatagtaagagcgggatgttcggttttttttttcccagctcctggtcctgctccccggctgctcaggtgacacagtctctgaggcctcctggagagccgagggccagtgcca

SEQ ID NO: 217046 - DNA, 126 bp, Homo sapiens
  chr16:69358551-69358677
  hypo
ggaagtgtcaaggagtggggcggggtggcgggggagaagcagccgtgctgccaggtcacccagacctccagacagccggctagccccactgcccgttccttttacgcccaagttttgctccttgag

SEQ ID NO: 217047 - DNA, 89 bp, Homo sapiens; identical to SEQ ID NO: 204274
  chr16:69373055-69373144
  hypo

SEQ ID NO: 217048 - DNA, 185 bp, Homo sapiens
  chr16:69383486-69383671
  hypo
aatccctgtgggttatgtgccgtggcagcaacatgccggtcatgtgacatccccactgtccgctgaacctgccaagacacattaaataggtagcagaacccctgctacatcacgaggaagccagctgagtggtaagattgacgtcccacggtcatcagcacagcggtctctgtctggggtgggac

SEQ ID NO: 217049 - DNA, 36 bp, Homo sapiens
  chr16:69439224-69439260
  hypo
caggtgtgagccaccacgcccggcctactccctgaa

SEQ ID NO: 217050 - DNA, 84 bp, Homo sapiens
  chr16:69495121-69495205
  hypo
aagaaagaaagaaattttctccttcaatgttttctcaaggatcctacttttggattcttcagtctcttgcggttactcttcaag

SEQ ID NO: 217051 - DNA, 275 bp, Homo sapiens
  chr16:69557609-69557884
  hypo
gggcagatcaaagccggatttcccagcacaggtagcaagcatggcaggaatctgggagacctctcacccagtccccaacccacgctcacagatggaaagccacaccattattggtcacacctttgcgcattgccagcacgcaggcgtttgtgacaaatcttttatagtctagtatatagctctctcagataggcagctgtgatatgattgggccctgtgatttctggctaggccgcctgggttcagttcacagctgatgtcgggcccacttggca

SEQ ID NO: 217052 - DNA, 38 bp, Homo sapiens
  chr16:69642741-69642779
  hypo
tggccaggtgtggtggctcacgcctgtaattccagcac

SEQ ID NO: 217053 - DNA, 240 bp, Homo sapiens
  chr16:69757714-69757954
  hypo
acaaaaagatgcttgtgaataggcaatttaaaagttttctgggccctggagggttcattttcccttcctgccacttaactagctgagcaacatgacctgggaggagttagactattagagtttaccctgagagaggccacaagatgcacacacggataacctcttcagggtacaatggcattagtgtgttaggagaggtaagggacaaagttcaacagaaggctgggtgtggtggctcat

SEQ ID NO: 217054 - DNA, 240 bp, Homo sapiens
  chr16:69761437-69761677
  hypo
aagtgagactccgtctcaaaaaaaactctataaagtaaaagttactgtaaagaaggagatatactctcagtaggtgaaggaaaaagaactagagctttaaagtggtaattaaccatcagaagaatcacagatgggggaggtgaggatgacacagggcccttccgttgtccctccagtgcaaaagttaaggaggcaccagaaaactggtttccaactcccgacctcaggtgatcctaccgc

SEQ ID NO: 217055 - DNA, 182 bp, Homo sapiens
  chr16:69825950-69826132
  hypo
taaccatttaaatagcgtaggtggttctttttcccgtgcatttcatgaagaaagctgatagtgtaacctgtggggtgtgactgcgcggtttccagttcccttgtgcctgcccacagtgtgatcctggtgttttaaggtatatttttaaatgcatcgaggcccttaaacgtaggacagctatt

SEQ ID NO: 217056 - DNA, 439 bp, Homo sapiens
  chr16:69833662-69834101
  hypo
gccctgtgcttactcggcactcagtaaacatttactggatgttggaacgtgatggacgcgccatctgaattagccaacgtgcctctacgtcacggacatataaatcctcatctatttattgctgtttgtggtcagtggcatggcccatggcggtggtattggaccctccttcataaggcctctattcagagcagtaccatatgtggcgaatgaatggcatggaaagaaaggctcctttttctcttgatatctggaaagtattttctgaaagtggatgtagcttaagagagaggtgggggcggggagagttgcgtcccagcgagcgtgttacatgatttaagagtctttcttttctctccaagcctgtccttttaagcgatgggccacttgaaaggtctttgagcctcctctggtcttttcttttcggctgggcacatag

SEQ ID NO: 217057 - DNA, 124 bp, Homo sapiens
  chr16:69906918-69907042
  hypo
ggatgtagatgtttcgcttggatgaattgtaggtagaggaatgcaggtgttgaaatttggtaagtgacgctgagatagttttctagtgctcgtgacagcagaggtgtggcgtaaaggccaggag

SEQ ID NO: 217058 - DNA, 207 bp, Homo sapiens
  chr16:69921952-69922159
  hypo
cccacaacagccactgatcccgaagaaccttccgttgttggtgtgacgtccccacctgctgcacccttgagtgtgaccccgaatcccaacacgacttctctccctgccccagccacaccggctgaaggagaggaacccagcacttcgggtacacagcagctcccagcggctgcccaggcccccgacgctctgcctgctgggtgagta

SEQ ID NO: 217059 - DNA, 139 bp, Homo sapiens
  chr16:69922446-69922585
  hypo
cattggaggatgttcgcctagatcctgcctagaaaacagcttttctctcttgaattttatcgtatcagcccacggaggagttgggttttaggctgtgaatattgctgtatgttattctcataatcgggacttaagttaa

SEQ ID NO: 217060 - DNA, 120 bp, Homo sapiens
  chr16:69955562-69955682
  hypo
gtgtcgtgttcctgctgggacccactgaagatgcctggcacagccttgcacattgtgctgttgtgacgggactatcacacggccgacaatttctggggcatctctctctgcagtattgaa

SEQ ID NO: 217061 - DNA, 150 bp, Homo sapiens
  chr16:70151413-70151563
  hypo
ccatctcaaaaaaaataaataagatgtcaaagaggctgtgacctgaggagattacctgtatttgggggagaggtggcaggaaccatgccaggagggaacagcatgcacagaacctggagccgaatagaacactcacgcctcacctgatat

SEQ ID NO: 217062 - DNA, 289 bp, Homo sapiens
  chr16:70196488-70196777
  hypo
ccaccacaaagcataaacagcgtgcagaggagagtgtgtacctccctgtgtgtaccagtgtgagggaggatttggggacgggggtagagaagatgtaggtgtttatcttaccctccctgcagcgctggagtggctgggggtaaaagcttcccgcctcctgaaattccgaccggccttctgcctacagctgacctcaggaggaacctgccacctgatgttccacacgggcacgtgtgcactcaggtttgtgtggaaagcaaggggggtcgtgttctcaccctgtggaaac

SEQ ID NO: 217063 - DNA, 130 bp, Homo sapiens
  chr16:70286315-70286445
  hypo
tctgcagcaaaaacgattcctacttgctgacgcggaaagctcaggtctggagagccgttatctatagatgcgagcgtgacgatcaacagcaatgcggggttagtggttctagaccgatggcactgacgtg

SEQ ID NO: 217064 - DNA, 176 bp, Homo sapiens
  chr16:70328602-70328778
  hypo
agagttcctggggcgcgtgcccgagcgctgtaccgtcccctcagctgattggctgacaggatttccaggcctcagccaatgaggctccggcttggccagtgccaagagcagcggttgttggagtgtaactgccatgctcagccgcgatggctggggctgccgggcgcgtccaagat

SEQ ID NO: 217065 - DNA, 54 bp, Homo sapiens
  chr16:70399211-70399265
  hypo
ttaaaataagattttcggttgattaaaaaaaaaaatccacgcatggctcacaga

SEQ ID NO: 217066 - DNA, 376 bp, Homo sapiens; identical to SEQ ID NO: 204275
  chr16:70472227-70472603
  hypo

SEQ ID NO: 217067 - DNA, 50 bp, Homo sapiens
  chr16:70507080-70507130
  hypo
gccgtgcctggatcgggctgccacgctggcctctcgccgggacctgttct

SEQ ID NO: 217068 - DNA, 40 bp, Homo sapiens
  chr16:70508778-70508818
  hypo
atcggagccagggcacgccgcatcccggagcctgagctgt

SEQ ID NO: 217069 - DNA, 102 bp, Homo sapiens
  chr16:70595195-70595297
  hypo
ttacaggcatgagccaccgcacctggccttcattccatttaattcttgcagctgtccagccttgtggtactgttttcattttacacacgtggaagcaggctt

SEQ ID NO: 217070 - DNA, 216 bp, Homo sapiens
  chr16:70680609-70680825
  hypo
tgccatgggacttgcggccaccgccccccggctgtcctccacgctgccgggcagataagggcagctgctgcccttggggcacctgctcactcccgcagcccagccactcctccagggccagcccttccctgactgagtgaccacctctgctgccccgaggccatgtaggccgtgcttaggcctctgtggacacactgctggggacggcgcctgagc

SEQ ID NO: 217071 - DNA, 205 bp, Homo sapiens
  chr16:70727987-70728192
  hypo
tctaggatccaggcgactcagggctgggacggtgttgggcgagaccagggtgtgtctctcctgttaccctgccccagcaaagccctgggcttgaggagaaggtgcttggagttcctccagggtcagggagggagggcagtcatcctagggatgcttctggaatgccaagaatgtacaactggagagatgagtcaggacagaccag

SEQ ID NO: 217072 - DNA, 148 bp, Homo sapiens
  chr16:70783611-70783759
  hypo
gggcctggggtgtggggagccggctgatacccggcttctgtgcccctccagtccggctgctgcttcgctcccagttgctagcaaacctgactcagcccagggggtgaccttgaggctctggagcaccaatctcgatgcacaccttggc

SEQ ID NO: 217073 - DNA, 273 bp, Homo sapiens
  chr16:70808112-70808385
  hypo
actgtcttctttgtctcctccaatctgttgcagcccctcaatctgtgtgtctttcataaacttgacacttttgaagcgctggtcactctgcagaatgtctccccgtttgggttggtctcacgttttctcacgagtagggagttgcgcatcattggagggatgtcacggaagtgctgcgcctcagtgcaccctatcgggggaacgtgttgtctgttagcctcattactggtgacgttaacctcatcgcctgacgcacagtgtctgctgggtttc

SEQ ID NO: 217074 - DNA, 221 bp, Homo sapiens
  chr16:70811508-70811729
  hypo
aggccaagggggagtcggagcaagtgaagaggcacagatgaggggctgccctgactggaggtcctgtggttagaggaggagggagaagatgcggaggtggggcaggggtgcaaatatgcacacacacaaaggttcttgcccggaggtgtgccatgaggaacgtggtgctgtcggcggatcagcacaagtaaacaaagaaggccaggcatgaggtcctgtct

SEQ ID NO: 217075 - DNA, 45 bp, Homo sapiens
  chr16:71324585-71324630
  hypo
cacaccagcccgggcgacagtgcgagactccgtctcgggaaaaaa

SEQ ID NO: 217076 - DNA, 98 bp, Homo sapiens
  chr16:71715646-71715744
  hypo
cacatacttgtagagtgtatcgaggcctccgggtctttctaactgcatgaagttgtgtcgcaagttgaggtaggtaatatcttgactatagaagagat

SEQ ID NO: 217077 - DNA, 42 bp, Homo sapiens
  chr16:71716353-71716395
  hypo
gggattacaggcgtgagtcacagcacccggtcgcaagaagtt

SEQ ID NO: 217078 - DNA, 136 bp, Homo sapiens
  chr16:71748846-71748982
  hypo
tatcatgctcattcgtaataactcagataacttaattttctttactgctgtctgtgtttccatccatcatcttcgttgacctctcttttccttgtgttttcagaaacgtgtcaagaataacgaaacagcgggttgc

SEQ ID NO: 217079 - DNA, 137 bp, Homo sapiens
  chr16:71754750-71754887
  hypo
tccacctcggaaaaaaaaacaaaagacgaaaaaaaaaaaaacaatgtgaaatactcttaggtagaagatgtttctgcattcaaaactttaaaacaatatagactcatatctgggaatacacacgttattaaatattg

SEQ ID NO: 217080 - DNA, 45 bp, Homo sapiens
  chr16:71870744-71870789
  hypo
tccactgagacaaaaaaagtcgttctactttgtaggccgggtgcg

SEQ ID NO: 217081 - DNA, 205 bp, Homo sapiens
  chr16:71894119-71894324
  hypo
cgctctcggatgagccgggcctgccgcttttccggggtttcattggcccgcttcagcctcatggcctcccgatcccgctgcagccggcgtgcccgctgctcgtctgtctcctgcatgcgctgcaagcgcttggcttcacggtccctcatgcgcctcacctcccgctcctcgggggtctcattgtcccgccggctcttcttggccg

SEQ ID NO: 217082 - DNA, 54 bp, Homo sapiens; identical to SEQ ID NO: 29407
  chr16:72460075-72460129
  hypo

SEQ ID NO: 217083 - DNA, 333 bp, Homo sapiens
  chr16:72461254-72461587
  hypo
tgcaaaagggtttcagggaacggctggtacttacgttgtctgcgttgctgtggatcctgaaaggtgttctgttggcaccgggcgctgagccaggggcaggcgctggaaacaaaagggagagacaaaaaaataaagtgattcaatgggaatattaattgctgctcttgtggattttacaaaacacataaactgttttctttttctttcttaaaaaaaaatgtggattggcgcgtgtcccttttgcatggaatatacaagtagtatgggatttacagcccagttacgggactcaggattagctgcgctggcatcttttgggcatattcttccttt

SEQ ID NO: 217084 - DNA, 81 bp, Homo sapiens
  chr16:72461701-72461782
  hypo
attacaaaagacagcaataggaacgcagtacaaagggggggacctctcctgcagtgggagaagcaccgagatgggtgatgt

SEQ ID NO: 217085 - DNA, 208 bp, Homo sapiens; identical to SEQ ID NO: 204280
  chr16:72699010-72699218
  hypo

SEQ ID NO: 217086 - DNA, 115 bp, Homo sapiens
  chr16:72945691-72945806
  hypo
gaaagttctagtggacggtgctgaattctagaccaacaatcacatctagttacctggattaagtagaaagcagagggcagggggagagggatgcgggagacgtcacactgccact

SEQ ID NO: 217087 - DNA, 212 bp, Homo sapiens
  chr16:72949233-72949445
  hypo
cttccatcaacacctagactcgcagaacacatcaaacagaaggctctcgacacccagtgtccgggatcagcgtggcgggcctctgctccaacctgtccacccaactagatctcaagaggaaaacagaattgccacctctcaagactgaggctacgtgcagtggctcacacttgtaaccccggcactcctggatgccaaggctcaagaggagc

SEQ ID NO: 217088 - DNA, 118 bp, Homo sapiens
  chr16:72957814-72957932
  hypo
tacaatgcctggttcacaacacgattactcattacatgtcaaaataataattatcacagatggcgaattcacaagtgggttagccgtcggctgtaacgggctagctagcacttgcccc

SEQ ID NO: 217089 - DNA, 101 bp, Homo sapiens
  chr16:72984703-72984804
  hypo
catgtccaggttgtccgtcgtgaacttgttgcagacggcgcactggaagagcttcagcgacgggtcgttggtctggatgaagctctcgcccaggttcatca

SEQ ID NO: 217090 - DNA, 454 bp, Homo sapiens
  chr16:72991973-72992427
  hypo
tcatgtgtgcctccagggtctgctggtacttatagtgccagttgcacttggggcacttgagtgtcttacacgagttacgagaatgcatcatggtcatgtggccgcccagcgagcgggaggagcccaggaccgtgtcgcatttggggcactccacgccactccccgaggggcactccccaaccccaagctcgcagagggagccagcgtgctggtgatggggaacgaagcccccatcgtcaccctctgtgctttcatttggttctggtgctgtggcattgtctttattggcactttcgtcagcgaagtccagcctcctgccgccctctgccacattggccctgacgccctcactgttaaagcttaaacgattcctcctgttcgcaccatcaaagacaacaaaggaagaagcagaattagaactagtagaagctgtgcccctcgacagggtctggag

SEQ ID NO: 217091 - DNA, 660 bp, Homo sapiens
  chr16:72993552-72994212
  hypo
cccactgccactgccactcccacaggcgcccccgccctgggtcagctggctcaggctctccacaatgtacgcggagccgtccggctggtagacgatctccccggccaggttctccacgtcactctcctcgtccccctcctcaccggtgtcgctggcgctctcctctctcaggggtggcggggggcgcgcgctggggcagtggtgctccatgtaggtctggaggctggcaaaggaggccgaacattcgttgcaggtgacctccttgctggcgggctcggaggggggcccggccgacgcggtgctctccgcgaggcgctcattgaagggggccctcaggctgtccaagggcccgtggctctcgcctgtggactgctccatgctactgggtttgtcagggaggtgggtgctgttgagttcagtccattgctggtgctgagggataccgcacccattgtccttccccgagacgacgggcgagtcacagccttccatggtaaggcctgcgtggagctttcattgcacccagtacggaggctcggacctgaagggcagaggcaaggggggaggagggagagaggggaaagagagagagaaaggaaagaggttaggagggccgaggctgaggtcctaccgcacggagcgctctaagaggcttctgtc

SEQ ID NO: 217092 - DNA, 86 bp, Homo sapiens
  chr16:73007796-73007882
  hypo
gaaaaaatcaggtatgaactacatgcaagtgaacccctgggttcccgcttcctgggaagggctatcaaagccgggttcactagttt

SEQ ID NO: 217093 - DNA, 291 bp, Homo sapiens; identical to SEQ ID NO: 204281
  chr16:73091594-73091885
  hypo

SEQ ID NO: 217094 - DNA, 117 bp, Homo sapiens; identical to SEQ ID NO: 204282
  chr16:73091900-73092017
  hypo

SEQ ID NO: 217095 - DNA, 94 bp, Homo sapiens
  chr16:73208571-73208665
  hypo
tgccccattgcagtccgctcatcaatgagcgacccagagggatcctttaaaaacccaaatcagggccgagcacagtggcttatgcctataatcc

SEQ ID NO: 217096 - DNA, 89 bp, Homo sapiens
  chr16:74490377-74490466
  hypo
acttattgctagtctcacaataaggacaagaccagtgcgatatctaaaagaggctggacagccacagcgaggagagtggcatggccttt

SEQ ID NO: 217097 - DNA, 213 bp, Homo sapiens; identical to SEQ ID NO: 204285
  chr16:74659412-74659625
  hypo

SEQ ID NO: 217098 - DNA, 32 bp, Homo sapiens
  chr16:74694094-74694126
  hypo
tgaacaaagccctctctgagcggagatcgcac

SEQ ID NO: 217099 - DNA, 32 bp, Homo sapiens
  chr16:74694366-74694398
  hypo
aaccaaaaaacggacagggtataggcaattgt

SEQ ID NO: 217100 - DNA, 278 bp, Homo sapiens
  chr16:74752677-74752955
  hypo
agcttgatgctgcacacccacgctgtccccgcctggcttaggttcggatgcccaacccagttgccccgtgagtcacatcaaacgtcccgtccctcccaacccacagccagactcccaggaggctccgcagcacctgaagctgcggctggctgccgggccctctcgggctgcacatgctaggtccgggctgggaccccgccccgctcaccttgtggtgctggccgtgcatgacgaagtgcagcatgatgaggtaatagctgtcgctggggggcttcatg

SEQ ID NO: 217101 - DNA, 343 bp, Homo sapiens
  chr16:74782483-74782826
  hypo
ctctgggaggtccccaagcccccagcttcctccagggtcccagaccctgtcctccctagagagggtttgcttggacggcgcacgggggagagaacagagaagaacaacagaaagtctgcgctctgcaccacaaacaaacaagtccaccatagaggccgcgtgaaaggaggcagtgtgcggcgggcgggggctgggggcgggggcgccggcataaaggcatgttgttcgggaaagctggggctgggcaccgcgggacggacagatggccttttatcccatagcctggattttgcctgaaaaccctttttctgaaagggaatggttgcctcgggccttgggtcca

SEQ ID NO: 217102 - DNA, 215 bp, Homo sapiens
  chr16:74908900-74909115
  hypo
agggggcagctgcgtctgatgcctcttcccaccccgacggctggcagggcctggcacgcaggaggtgttgaacaggtatcagctgaaagaactgaatgactcagcagtaacacttcagcagagggcagactggctttaccaacgcctgctactgcccactcgccactggcccaagtcaggacaccgggatgccgctccaccgccgggcggggact

SEQ ID NO: 217103 - DNA, 127 bp, Homo sapiens
  chr16:74984548-74984675
  hypo
agagtggatcaaggaaaactcgaaaccaactggaagcctcgactgggaggcggctgtgcccttgggtaatgaactgtgacgcaggagctctgtaaccgctgctgccggagagaaagccaagggccac

SEQ ID NO: 217104 - DNA, 40 bp, Homo sapiens; identical to SEQ ID NO: 204287
  chr16:75018963-75019003
  hypo

SEQ ID NO: 217105 - DNA, 212 bp, Homo sapiens; identical to SEQ ID NO: 204289
  chr16:75033799-75034011
  hypo

SEQ ID NO: 217106 - DNA, 43 bp, Homo sapiens
  chr16:75057287-75057330
  hypo
aaagtcacaccaggccggacgcagtggctcacgcctgtaaacc

SEQ ID NO: 217107 - DNA, 44 bp, Homo sapiens
  chr16:75113037-75113081
  hypo
ttcatggtccttctcgttcgtgctttctgtctggagagtctcta

SEQ ID NO: 217108 - DNA, 44 bp, Homo sapiens
  chr16:75113381-75113425
  hypo
caaaaacaagaaacctccttttgacccatcggtcaggccctcac

SEQ ID NO: 217109 - DNA, 40 bp, Homo sapiens
  chr16:75113750-75113790
  hypo
cctgtagtgtagctgcgtgccaggaccccagcctgagttg

SEQ ID NO: 217110 - DNA, 195 bp, Homo sapiens
  chr16:75127914-75128109
  hypo
gccaggtgtcctccacggcttagcagaggggcccagagcaagcacccgccctccttggggaggtgggggctgtgtgctggtggcatgcatagagtgctgggaagctggtcgtctccttgtcacgttcgaactcggacgaacacctgatttagtcctatgagtccacaccagagagcttgacgggggactatgtgt

SEQ ID NO: 217111 - DNA, 379 bp, Homo sapiens
  chr16:75136326-75136705
  hypo
gtcattggcagtgttcgggacagttaagttcctttagtgacggagaagggatcctgccacaagctctgccttcttcacagctgagacactgctctcctgatatttctcctgtggcttggaggacttctgggtcgccttttgttcacgtcgcctcttttcacctgcccttcaaatattcatgtcggcctgggtttgtcttctgccttctttggattttggtctgaactttctccctggactgcctctttatcccacatccatgcctggcacccatgtctctgttccaaacctcagctctaggcttcagcagcctcctggaggtctccatcagctggccgggcctcctcccacccaactcagaatccgtcccttccttctc

SEQ ID NO: 217112 - DNA, 297 bp, Homo sapiens
  chr16:75138821-75139118
  hypo
cacctcccagaggggcggacccccatctccagccattctgtctcctttggttatgggatgacctctcccccgacctctggctccgagcgggtaagggcagaggccatcagacaggtgtccactgtgccggcgggaaggtgcgagcatcccaagtgcagagcagagtggagttgccagaggtgtgctctggtttgagggctcaggtggtgggagctgatggggagacccgtagagcctcacaggttggaggagcttcggatcccactgggaaggttggttctccgtctgtctccctgc

SEQ ID NO: 217113 - DNA, 56 bp, Homo sapiens
  chr16:75148497-75148553
  hypo
gtcccgcatggtgccgtagcggaccgcgttggtccccgacgccccggtggccgcca

SEQ ID NO: 217114 - DNA, 48 bp, Homo sapiens
  chr16:75149151-75149199
  hypo
gcacaccttggcgatagcacagggctgccagccggctgacctgctcca

SEQ ID NO: 217115 - DNA, 274 bp, Homo sapiens; identical to SEQ ID NO: 204292
  chr16:75299751-75300025
  hypo

SEQ ID NO: 217116 - DNA, 41 bp, Homo sapiens
  chr16:75458366-75458407
  hypo
aaggctgccagacgcggtggctcacgcctataatcccagca

SEQ ID NO: 217117 - DNA, 76 bp, Homo sapiens
  chr16:75495229-75495305
  hypo
gcgtgagccacggcaaccggccaatttagtcatttagatgtctacctaaccctccgtaggtaaatggctaaactgc

SEQ ID NO: 217118 - DNA, 199 bp, Homo sapiens
  chr16:75513119-75513318
  hypo
cgcgcaccaggtgcacgatgcgtaggttgagcgcggggtcgctgagcagcgggtagagcacctgcaggttgaagaagcgcacctccttgagcaccacgtggctgtaggagcggcaggcctcccgggccagggtgaaggactgccgcgcgcacagtggcttgcacacggcctcgctgctgatggcgcctcggggaaaggc

SEQ ID NO: 217119 - DNA, 165 bp, Homo sapiens; identical to SEQ ID NO: 204293
  chr16:75529727-75529892
  hypo

SEQ ID NO: 217120 - DNA, 138 bp, Homo sapiens
  chr16:75606235-75606373
  hypo
aggtccagtggaagcgcgtggactccaaagcagatgggtggccaggtgtgctcatcagcccagccaattcatgagtcggtgtagaccccacagcctccatgacctgcccttggttggggcgaacgtaggttctctagg

SEQ ID NO: 217121 - DNA, 88 bp, Homo sapiens
  chr16:75622685-75622773
  hypo
taggaatctggggggacacaaacattcagaccatagcagctctcatctttcatgaaggaggcacagagccgggcggcaccacctacct

SEQ ID NO: 217122 - DNA, 313 bp, Homo sapiens
  chr16:77227371-77227684
  hypo
ccagcccatcaccaccgccccagtcagaggccctgtcaagcacctctcggctctggagtcctgcagcccctgagaatagtcccacatgtagccctgagagtagctctggaggccagggcggggaccccagtgatgaggagtggcgcagccagcggaagcatgtgtttgtgctgagtgaggctggcaagcccatctactcgcggtatggtagtgtggaggcgctgtcggctaccatgggtgtaatgaccgccctggtgtcctttgtgcagagtgcgggagatgccatccgtgccatctacgctggtgagcaaac

SEQ ID NO: 217123 - DNA, 580 bp, Homo sapiens
  chr16:77228259-77228839
  hypo
gggcccactgttgctcgtggccatgtcacggacttctcagtcagcagcccagctgcggggggagctgctagctgtgcacgcacagatcgtgagcacacttacacgtgcaagtgtcgcccgcatcttcgcacacaagcagaactatgacctccgccgcctgctggctggttcagagcgcacactggaccgacttctggacagtatggagcaggacccaggagccctgctcctgggtgccgtgcgctgtgtgccccttgcccgcccgctgcgagacgcactaggtgcgctcctccgacgttgcacagcgcctggcctggcgctgtcagtgctggcagtaggcggtcgacttataacagcagcccaggagcgaaatgtgctggccgagtgccggctggacccagctgacctgcagttgctgctcgactgggtgggtgcaccagcctttgcggcgggtgaggcttgggcacctgtgtgcctgccccgcttcaaccctgatggttttttctacgcctacgtggcccgcctggatgctatgcctgtctgcctgctgctgcttggcacccaacgtgaagccttccat

SEQ ID NO: 217124 - DNA, 43 bp, Homo sapiens
  chr16:77229453-77229496
  hypo
agcagagaggaggagcggcagcggctgtcggacctgtaccacc

SEQ ID NO: 217125 - DNA, 215 bp, Homo sapiens
  chr16:77232998-77233213
  hypo
catagcacatgcacgtctgtcccagactttgacaacctgcacaagacaagcagcctaaagcaggagagacctccctagggttttgtgtgtgtgcacactaccctcactccccaactggccattaccctagttctgcccttgtttgtggagttacagcctcaaggttgtagcatgtgtgctggcaatcagggccgcagtgtgttctgcgcctgccc

SEQ ID NO: 217126 - DNA, 82 bp, Homo sapiens; identical to SEQ ID NO: 204296
  chr16:77246930-77247012
  hypo

SEQ ID NO: 217127 - DNA, 204 bp, Homo sapiens; identical to SEQ ID NO: 204297
  chr16:77247511-77247715
  hypo

SEQ ID NO: 217128 - DNA, 66 bp, Homo sapiens; identical to SEQ ID NO: 204298
  chr16:77469120-77469186
  hypo

SEQ ID NO: 217129 - DNA, 291 bp, Homo sapiens
  chr16:77752653-77752944
  hypo
acagtgtgtaaccaccggatattataaatattagagcgatatttctttaatatcacagcatgtaagccctgtgtgtaaacactggatattataaatatcacagcgatatttcgctgatatcacagtgtgtaaccactgggtattgtaaatatcacagtgatgtttcaccaatatcacaacgtgttactagtggatattggaaatatcacagcgatgttttgccaatatcacagtgtgtaaccactggaaattgtaaatatcacagtgatatttcgccgatatcacagtgtg

SEQ ID NO: 217130 - DNA, 567 bp, Homo sapiens
  chr16:77753304-77753871
  hypo
tataaatataacaccgatatttccttaatatcatgatgtgtaaacactagatattataaatattgcatcgatatttcattaatatcatggcgtgtaaacactatgtgtgaacactggatattagaaatatcacaacatttcattaatatcacggtgtgcaaacactgtgtgtaaacaatggatattatgaaaatcacagcgatatttcattaatgtcacagtgtgtaagcactgtgtgcaaacactggatattatgaatatcatagcgatattttattaatatcgcagtgtgtaagcactgtgtggaaacactggatattatgaatatcacagcgatatttcgttaatgtcacagtgcgtaagcactgtgtgtaaatactggatattatgaatatcacagtgatatttcattaacgtaacagcgtgtaagcactgtgtaaacactggatattatgagtgtcacagtgatatttcattaatttcacacgggatattataaaaatcacaacgatatttaacatcatagtgtgtaaacactttgtgtaaacatcgggtattataaatatc

SEQ ID NO: 217131 - DNA, 49 bp, Homo sapiens; identical to SEQ ID NO: 204300
  chr16:77822068-77822117
  hypo

SEQ ID NO: 217132 - DNA, 33 bp, Homo sapiens
  chr16:78159169-78159202
  hypo
catacaggtcttgggcggcgggtgcctgcagga

SEQ ID NO: 217133 - DNA, 103 bp, Homo sapiens; identical to SEQ ID NO: 204305
  chr16:79636191-79636294
  hypo

SEQ ID NO: 217134 - DNA, 76 bp, Homo sapiens
  chr16:80641602-80641678
  hypo
agctttctctagtcatcttccggatgggttcaatactttttatccttattggccgctgcttctcgtttctttgaaa

SEQ ID NO: 217135 - DNA, 38 bp, Homo sapiens
  chr16:80654697-80654735
  hypo
gtcgctggacaaccggccaattaggtaggaataatcca

SEQ ID NO: 217136 - DNA, 303 bp, Homo sapiens; identical to SEQ ID NO: 204308
  chr16:80837424-80837727
  hypo

SEQ ID NO: 217137 - DNA, 198 bp, Homo sapiens
  chr16:81315519-81315717
  hypo
cccagaatataagcccgtgaggcgagaattgtgttgctgtgctcacagcgtatcagcagcacatgacacaaaggctggcatagagaggtctgtgttccatacgccaaagtgcagaatgaatggacttgtccaaggagactcagctagagagtgggacagagtgcatttcaactgagcgcattggctgggcacggtggc

SEQ ID NO: 217138 - DNA, 201 bp, Homo sapiens
  chr16:81323324-81323525
  hypo
catcattcaggagatactctcggcaaccctgtggagtgtaggtgagattatcgcatctctacagatgaagagactgaggctccgagaggtcaagggactggcccagccaagggtagaaccaggttttctggtttgttcattcgtttgtttgttcgtttgttttgaggccgtgtttcactccgtcacccaggctggaatgca

SEQ ID NO: 217139 - DNA, 41 bp, Homo sapiens
  chr16:81453688-81453729
  hypo
tctcaccgttttggtcgaaggtgtgggcagggggctgggcg

SEQ ID NO: 217140 - DNA, 188 bp, Homo sapiens
  chr16:81492930-81493118
  hypo
cttcttgggtgtgcccgtggccctgtgctgtgaccctgcgctgtgaccccgtgccgtgaccctgctccgtgacctcgctccgtgacctcaggcaccattatttggaatgggctctcagcccctgtcctaaccccagccaccaagctcccaacccaagcaagatggaaacccgccgttgggaggattaa

SEQ ID NO: 217141 - DNA, 250 bp, Homo sapiens
  chr16:81505617-81505867
  hypo
caggtgcacacacagattcacggacatgtacatgcatatgcactcaatgtatatgccgtgtacacacacactcacgcacatgcacatgtgctctcagtatacacatgtatgcacgtgcacacaggtacatcctcacccgccatctttgaaatctcacttattgcatttgtgtttctgatgtatatgtaactttgggcaagttgtgtgacgtctctgcctcagtttcctcgtctataagatgagattagca

SEQ ID NO: 217142 - DNA, 254 bp, Homo sapiens
  chr16:81533315-81533569
  hypo
tggaggagactcagcttccccgtccagtcctttacccctcctttacccagcagcgccctctgaatctgaaacagttttgggggcggcagctccggtcctgcccagcaactcgcagttgttgcctgtggcattcagattcaagtctgggcttgtcagcccgggcgagactctcctattttggccctatgggaggcatccaaactcctctgcccttgccttccggggcgccccacgcactctgggcttcacctggc

SEQ ID NO: 217143 - DNA, 72 bp, Homo sapiens
  chr16:81557231-81557303
  hypo
aaacccccttcccgcgaaaagccatggtggcctagaacgaagtctggaaaagaaccaagaggacagcatctt

SEQ ID NO: 217144 - DNA, 253 bp, Homo sapiens
  chr16:81557355-81557608
  hypo
agcctccctcctcccccaggaagaaggtgagctgagtcaccaccaggtaaccctgaacctcgctcagacacagcttcctttagctaggagcctggatgtaacacccagctcatcccttggctccctccaaacgtcaaggcgtcttgaactaaaagccagcgcctgcacaccggcagaactttgcagctcctggctcctgagttgtaggtgtttttgccaggtgtgcctgtacgtgtgtatgtgtgcccatggg

SEQ ID NO: 217145 - DNA, 280 bp, Homo sapiens
  chr16:81563919-81564199
  hypo
aatcccagtaaaggtggatccggatccctcagggacctaggtgcagttcctgttcctcccgtctcgcctctgttgcgctgcaaggtggggtgtgtagtgagtatcactgtaacctgtacttttctaaagtcaaacagatttctcttggtgggaggacgtgtcttttgtgggatcggtgtagcccgtctgagtcagtgactcacctggcacccctggcagctgactttcctggcagttcactcgagtctcttgcctctgctcacaaaagcctgcgccttta

SEQ ID NO: 217146 - DNA, 162 bp, Homo sapiens
  chr16:81564229-81564391
  hypo
agcagagcctctcccgcccgcctcccacatctctcccttagctgggtgcccgcgtggctgctacctccgaggcttctgtgtcaccgggtagtggaaatgtcaccgagtgtcagagcttcgagcctcctccagatccatccaaggtggcatcactaagtggca

SEQ ID NO: 217147 - DNA, 261 bp, Homo sapiens
  chr16:81564541-81564802
  hypo
gaactgtcgaacgtagccaccagctagcctgagcttgttctgatgtcttctgggatcgtcattgttatgggttgaactgtagccttcaaaaggcacgtttacgctgtagtctctgtacctgtgagcatgaccttctttggaaatagggactttgcagatgcgaccaagttaagatcatgctggaggtcatgcgggaggtcatgctggaggagagtgggcccaaatccagtgactgtgtccgtaaaagatgagggaaactta

SEQ ID NO: 217148 - DNA, 640 bp, Homo sapiens
  chr16:81565569-81566209
  hypo
atacttctaaaactgtcctgcgatttgatagcttccatttcatggcgcttcttctggatgtcaggcactaagtcgggcgctttattctgtagttctcctagcaatctggtgagctccactctacagataaggaaatcgaggccaaggacagctaaagaagcgaggtgcgcaaggtgcccaggtccgaagtgtttccgctgctttcagactgcagtcccagggctcaggagtccatgctttctgcgtatcttcacgctggccacggatcacctcatcattagatgtcgaagttgaacaagtggtgttcacattcggacgtgtgttaggtagaagtgtgtgtgcacctgcgtgtgcgtgtatgttccacacgctgatgcaggaggtatacgcacagatataattgtcttttagaagattgactatcactaattttgaaaaatttcctgaatgacctttcctgccaggccaatacattgagcccaacagataaatccctgaacttattcgcagtctctaagtacctttagaatcccgggggtcgccctgagcctccccagggactagcgctgttgccctcgctcagtctcgccaccacaggaggcctcggcttgcccagcagctgagtcgggagaacctttcc

SEQ ID NO: 217149 - DNA, 158 bp, Homo sapiens
  chr16:81580487-81580645
  hypo
gctccgtagccacgcgtggcgaacagctcttgtactggagagtgccgatgtagaacattccctgcatcgcgagagctccctggatggtgctgggctgcaaaggccactcccccgggagtgcacagccttgcggtattaaagaccggcacatattctgt

SEQ ID NO: 217150 - DNA, 291 bp, Homo sapiens
  chr16:81626931-81627222
  hypo
gtaggcttggttgagattggcgagaggtggtgttgtgcctagcctggggggttggagggcggggggagtttctgctctgcagccctgtgatgcgcaggtgccatcgggtctctgaccccaggccatcaagagctgtgcgacctgcttgccatccatcatgtggagctggtcggtcaccccatgcaccaggccgactccaagccggagctttcctctccgctcttttcggagtaatccgtggatgatggaggagcttggcaagcatttcagcaaagctcttttttcttgttg

SEQ ID NO: 217151 - DNA, 97 bp, Homo sapiens
  chr16:81632815-81632912
  hypo
agtaataataacaacagccccggggcaaggagaggtcatattacctgagggaaaccaggggagggagagtgtgaacggcatttgagatttcttctgg

SEQ ID NO: 217152 - DNA, 142 bp, Homo sapiens
  chr16:81684997-81685139
  hypo
ccgctctctggcttcgacacagcgcccaagcaaaggtgagagcactcttgtcttcctcaccaggtggatgcggagggcagcgctggatttcccgggggagcattccaggtttagtccctacctggccggagtctaattcctg

SEQ ID NO: 217153 - DNA, 207 bp, Homo sapiens
  chr16:82172390-82172597
  hypo
atcacacagggtgccctgcacgtagttagcttacctccagcttcttcacgccaacagtccaatcagcacacctgagccttctcttccgtgggtcttaaagcttttgcattcctctgcctgcctttgagtctctgcgcaaacgctagtgatggtggccgactcctttgctatagcaagctcagaatcgatagcctttgcttttctcct

SEQ ID NO: 217154 - DNA, 453 bp, Homo sapiens
  chr16:83863590-83864043
  hypo
cattctgccctatggcagtccggccaagggggtggcaccgcagagccaggagggcaatcccagttcacggtcaccaggctcaaccgcaggcaacgggctggttgcattcgtgtggcaggtcctggctcccctgttgtgtagacaggagcgcgcggtgagcggagtgtcggccacaaactcttgccctgggcgtggccatgtgacttggttgatccaatgggataagagcggggatgacagagcccgccccatcctaggtccctgcctgagatgctggagctgagcgtcccagccacgtgcgcatgctggagcggaggggctgtgcctggccagtgctgcgtatgggggggcgcctccgtttcatgtctggtcagtttagggacgccgcatcattgcagcaaaagcctgactccataccgctgagaaatcaccgtggctaatgcagaagctgaa

SEQ ID NO: 217155 - DNA, 150 bp, Homo sapiens
  chr16:83941759-83941909
  hypo
ggatggacatgaagcgccgcgttgggccctacagaaggtgttacttcttttctcactgttcgacccctggggagcccctggtcgttttgcacgtggcactgactggtgacatctccagcaacatccaggtacctgcgatggtcaattcgg

SEQ ID NO: 217156 - DNA, 221 bp, Homo sapiens
  chr16:83945772-83945993
  hypo
ggctgcagagcggccaggccacccttagaaccatcgttggtgttttccaggcaatcgtgaaggaacatcctccatcagaaacagaagagaagaacaaaatcactgctgcgatcttttattccatcagcttgacccagcagggactccaaggggtggagctgggaacattcctcataaagcgagtcgtcaaggagttgcaggtaagcgacacgcagggagcc

SEQ ID NO: 217157 - DNA, 41 bp, Homo sapiens
  chr16:83999491-83999532
  hypo
ccaggagggcctgtacgccatggggccgctggccggggaca

SEQ ID NO: 217158 - DNA, 39 bp, Homo sapiens
  chr16:84004407-84004446
  hypo
tgctggtgggcagggcgccgtggctcacgcctgtaatcc

SEQ ID NO: 217159 - DNA, 319 bp, Homo sapiens
  chr16:84132512-84132831
  hypo
aaaattcctaccaggaaaatgttcacaattagcaaactagatggaaggatgcggatactcactgtactatttttcaactactctgcagtttgagattttcaaagtaaacagcagagagaaatttgcctacagtcacaatactcacattcagcatacttgagggaacgaaagacttttcgttggggcgtgacccgtttgatgtttggatgatcttcaagtgttagcagccccgctttctgtttttcttttatctgaatcacctcaaaatcactagggtagtcactggatggattgtttcgaggtataattctccaattgt

SEQ ID NO: 217160 - DNA, 113 bp, Homo sapiens
  chr16:84423862-84423975
  hypo
gagggaggctgttcgcccggaggtgccgctggctcccttgctctggagtgagctcacagctccaactcacctttcagcaagggccatacgtgcacttcgtggtcccctcggga

SEQ ID NO: 217161 - DNA, 84 bp, Homo sapiens
  chr16:84483358-84483442
  hypo
ctgcttttgtcatggttgatacgaccaagccattcagtagctccctgttcttgtcacatcacgcctctgctgacgaaatggctc

SEQ ID NO: 217162 - DNA, 272 bp, Homo sapiens
  chr16:84483472-84483744
  hypo
atcccacgtggcactggcctctaaatctgcacctggcacttgggccccacttgtgtgctgggcaccaggttaagtgcctgtgtgaggccacgccctgaatccccaccgggcagaggagccggcccaggtgacacagccctgcctagtgcagccagcgccttcgcccggatgtctgctgcggagcgtaatgacgcgttccagggacttgctccaggccttgcgggagagcgtaatgagaacgggtcagtggcggaggagcagtgagacctttt

SEQ ID NO: 217163 - DNA, 240 bp, Homo sapiens
  chr16:84535240-84535480
  hypo
cgccactttttcaagcaggagagaggaggttgcatgggaggccccagtaggaaccccagggctggtgccagtgaggtgggaaggtgggcagcccctaagaacacagcgctgtccacagcactgccattcttagtacctgcagagtgctggtgaagggacacgtctcagaacggctcaaggacagcccgtctcctttgagagccccgtgccaggcaagataaagaaatggcaatggtgtgg

SEQ ID NO: 217164 - DNA, 212 bp, Homo sapiens
  chr16:84535780-84535992
  hypo
tggtgctgacagcgcacatcaaggttgcttgtaccagtggagctcgactggagcagtttcgtcccccaggggcatttggcaatgactggaaaagtgtgtggttgccacaactgggggaggggagtgccgttggcatctagcaggcagaggccagggatactgctaaaaatcctacagtgcacaggatggccttacgacgaggaagtgtccgt

SEQ ID NO: 217165 - DNA, 139 bp, Homo sapiens
  chr16:84593079-84593218
  hypo
gactccctcagagacgattaaaagggtggaggactcagggtaacggggtcaagcagctgggttggaagagccagacaggtggacaggcgcacgggatagctgtcctccagggccagccctggggcagagccagaggcaa

SEQ ID NO: 217166 - DNA, 817 bp, Homo sapiens; identical to SEQ ID NO: 204321
  chr16:84650976-84651793
  hypo

SEQ ID NO: 217167 - DNA, 185 bp, Homo sapiens
  chr16:84749467-84749652
  hypo
ggctagtttcccccacgatggcggaatggccacagcagtttcaggcttcacatttgggcacagcctccgtcacaccagcctgaccaagagagtgagtgtgcatcccagaattttaggcagtgtcctgagcttcttgccctttgggtcgtccctcaaccagagcactgtggcgaggagggtggtat

SEQ ID NO: 217168 - DNA, 90 bp, Homo sapiens
  chr16:84780671-84780761
  hypo
agaatcttgtgggaccatcatacgtgcggctcattgttgaccgaaatgttacgccgcgcgtgactgtacgtacctaagaagcagaagctg

SEQ ID NO: 217169 - DNA, 63 bp, Homo sapiens
  chr16:84812705-84812768
  hypo
tgtgcgcccagtgcccgcttcgtaggacaccacctcacactcacttcccgcctctctttagtg

SEQ ID NO: 217170 - DNA, 362 bp, Homo sapiens; identical to SEQ ID NO: 29529
  chr16:84813521-84813883
  hypo

SEQ ID NO: 217171 - DNA, 182 bp, Homo sapiens
  chr16:84965070-84965252
  hypo
ctggcctcccagccccgggccacctccctctgtgctatcggagagaaacaagcatctatcttgtttaggatcgtgtactacagggcctctttttcaccacagcttacacagtgactagctcagacccttgggcctctgtgtctgagatgtgcctccggtgaactccccgggcctctgcctcc

SEQ ID NO: 217172 - DNA, 199 bp, Homo sapiens
  chr16:84987803-84988002
  hypo
ttgccatagggagggtaacccgggtcatccaggtggacctaatcgagtcacacgagtccttagaatcagagaacctttctgagctgcggtcggagggagccgtggtggaacctttctgagctgtggtcagagggagccgtgatagaacctttccgagggtgctgtgattaccgaagcagcagcagagatgcaacattgc

SEQ ID NO: 217173 - DNA, 314 bp, Homo sapiens
  chr16:84998380-84998694
  hypo
ttaggtgtggtgtggccacacggtgagggacaggaaaggatggagctccgtgactgttgatagggacagatctccaagacatgttgtgacgtgcaaaacagcaaagtgaatgtttgctaccattcgtgcacaaacacatccgtgagcaaacgtgtgtatgcacgcacacacacctgttggcttcaaacgtgtgtgtgcacgcacacgcacctgtcagcttgaaatgtgtgtatgcatgcacaggcacctgtcagcttgaacatgctcagagaccgtctaggccccgcgtgggtaccacccgctcaaaacatgaa

SEQ ID NO: 217174 - DNA, 102 bp, Homo sapiens
  chr16:85001517-85001619
  hypo
tactgggtggataacggcgatacaggcgcaaacacgtgatgctgtcgtgttctgccataaaaaggcatgaagtctggacacgcgctaccacatgggcagaac

SEQ ID NO: 217175 - DNA, 82 bp, Homo sapiens
  chr16:85001679-85001761
  hypo
cgtttctatgaaatgtccagaacagacagattcatagaaacagagtagacgagtcggggccaggggccgggggaggagacgg

SEQ ID NO: 217176 - DNA, 154 bp, Homo sapiens
  chr16:85007919-85008073
  hypo
gtcacttgtcatgggcacaaaagcatttagagtttctggaaactgtttgggagtgaccttaacagcctggggctgggcccacgaagcacggaaaggcaccccctgaaaacaccaccatccaggaagaacgggcgctttggaagccatttgagaa

SEQ ID NO: 217177 - DNA, 143 bp, Homo sapiens
  chr16:85008291-85008434
  hypo
atctcggaaactggcgtctccaggatcacccacactttgtccctctggctgtgacgcagctcttcccccaacggcgcacacgcttctgcggtgaccaagtccacttccaaaccccctgcaggtttgctcgcttggctaggacg

SEQ ID NO: 217178 - DNA, 190 bp, Homo sapiens
  chr16:85009949-85010139
  hypo
cacactgagaactccgggccaccttttctgggtctcgtgggcagtcgcctaaatcggaagcccacaaagggattcatccagaggagtgaggggggccccccaaagacggacttcatcccttcccatcgcagcctccgctcccatgtgggcttctcacttttcaatcgctcgatctcctggaagcagaaag

SEQ ID NO: 217179 - DNA, 254 bp, Homo sapiens
  chr16:85010169-85010423
  hypo
cggcagaccccaccaagcctcagaatcacaccgtgctcaagcacagtgtgggctcgatggagggtaggtgagtgaactctccttcccagctctgccccgatccagaccccgtggcctctgtgagcccagcccggctgcagccacgtggccagcccagactaccacaatggccctcccagccaggcaccaacatttgtcgctcgttagttactgtgtacagacatttactgagcgccactccaggcctgcagagc

SEQ ID NO: 217180 - DNA, 85 bp, Homo sapiens
  chr16:85033742-85033827
  hypo
tctaaaataaaataaaataaaattgtgcatttcactgtacattaatcatgcctcaattaaaaacatgagcaggagaaaaaatacc

SEQ ID NO: 217181 - DNA, 106 bp, Homo sapiens
  chr16:85033902-85034008
  hypo
cttttcttcctggataacccgcgttcctgagtccagaccctgtcttggatttacttgtatctgtaacttcaagcaagtgtcttaagctcttcgcctttactttttt

SEQ ID NO: 217182 - DNA, 46 bp, Homo sapiens
  chr16:85147115-85147161
  hypo
cccaggctggtggcggcttccctctgtgaccgatccccaggtgccc

SEQ ID NO: 217183 - DNA, 208 bp, Homo sapiens
  chr16:85196722-85196930
  hypo
tactactgagcaccgactgtatgccgggtgccttcgtggcacttctcggttgcacgctggttagtattgagcaccgactgcatgccgggtgccctcacggcacttctcggttgcacgctggttagtattgggcgccgactgcatgccgggtgccctcacggcacttctcggttgcacgctggttagtattgggcgccgactgcatgcc

SEQ ID NO: 217184 - DNA, 173 bp, Homo sapiens
  chr16:85214271-85214444
  hypo
acagtggggaagtgccggcgccgggatccgcacccaggctgcctggctccagcgtctgcactctgccatgctcatcacacccatcctgaatgggaaggcaggctgggagggagatgaaggtagatggggtcaggaagcctccctggagaaggggtatccgatgagttcttagg

SEQ ID NO: 217185 - DNA, 200 bp, Homo sapiens
  chr16:85245559-85245759
  hypo
catcacttgaaccatcgcccatcaaatggtttctgactgggggaggactcctgttacaggctgagccatgtccctcaactttgtgtgttgcagccctgacccccagttcctcggaatgtgcctgtgtctgtagatagggtcttcagaaaggtattaataattgggctagaagccgggcgcggtggctcatgcctggaatc

SEQ ID NO: 217186 - DNA, 207 bp, Homo sapiens
  chr16:85318228-85318435
  hypo
gaacctgctaactggatattaaacgcccgctgctgggagagtcgtggtccacagtaggatgtgatcgttcaggctggagggatcgtggggaaaatggtggctcatggaatactaaggggaaggctgtcaggtgcgggcggggctggcacacacagctcaccttcagctgaggaagctgcctgctccgctgccgtcctggcagtcagt

SEQ ID NO: 217187 - DNA, 84 bp, Homo sapiens
  chr16:85321496-85321580
  hypo
gcgcacagtaggcacggaagtatttgtggaaggaagaaatggagatcatcatgaaataagcgctattggccgggcacggtggct

SEQ ID NO: 217188 - DNA, 169 bp, Homo sapiens
  chr16:85327232-85327401
  hypo
gaatcagggtgtcagcgggacggcttccttctgctggagctagagtgggaatctgtccgggcctttcttccagtttctggcattgcccacagtccttggggttccttggctcctagaagccatctctccgatcactgaacttcatcgctgtgatcgctgcctctgccat

SEQ ID NO: 217189 - DNA, 44 bp, Homo sapiens
  chr16:85332745-85332789
  hypo
tccgtatgtttgcaccgtcttgtctttttcggggaaaatacatt

SEQ ID NO: 217190 - DNA, 95 bp, Homo sapiens
  chr16:85336635-85336730
  hypo
tgactggagccagtcctgtggcccccgcctgcagcgagggggtgaaaatgttgcttagccatgtgtccagagcgaggaaacgggtttagtgacca

SEQ ID NO: 217191 - DNA, 36 bp, Homo sapiens
  chr16:85399704-85399740
  hypo
gcttgggcctccaccgccgggaaggcgggactgcgc

SEQ ID NO: 217192 - DNA, 48 bp, Homo sapiens
  chr16:85399770-85399818
  hypo
cttggtaagccttgcctgtagcggctccgctgccgagtgctttgacac

SEQ ID NO: 217193 - DNA, 298 bp, Homo sapiens
  chr16:85407686-85407984
  hypo
tgtatgtgttggtgtgtgcacgcgtggccctcagtgtgtagtgtgtgtcagtgtgcatgtgcgtggttgcatgtggccctcggtgtgcagtgtgtgtcagtgtgcctctgtgtgttcacgcgtggccctcggtgtgcagtgtgtgtcattgtgcctgtgcatggtcgtgcgtggtcctcggtgtgcagtgtgtgtcagtgtgtatgtgcgtggttgtgtgtggccctcggtgtgcagtgtgtgtcagtgtgcctctgtgtggtcgcgcgtggccctcggtgtgcagtgtgtgtcattg

SEQ ID NO: 217194 - DNA, 161 bp, Homo sapiens
  chr16:85410442-85410603
  hypo
ctgggaaaagaggctgtgtccgtggtgccataggcctctctgcacacccctccgcacaccgcacaccgcacacccggccccgcgttacccgacggcccctcctgttgtgcaggttgcacgctgtgcagtcgcgggtggccgtttggccagagttgcccagt

SEQ ID NO: 217195 - DNA, 153 bp, Homo sapiens
  chr16:85417768-85417921
  hypo
gggaggtgctattgtgaacacggacaggtgactgcccagcccaggcttcctgatgggggccccgagaccctctccgagaggagcaagaaacacacgtgccttgctctgtgtgggtgcggccgggtggcgagcggcccatcctgggagggctgg

SEQ ID NO: 217196 - DNA, 116 bp, Homo sapiens
  chr16:85423785-85423901
  hypo
tccctgaaatctgggacagtcgctggcacacagtaggtgctccaaaatactcacggcctgtagctttgtgcggtcacaggcacggttctgctggcgttggggtgggggtcatcact

SEQ ID NO: 217197 - DNA, 171 bp, Homo sapiens
  chr16:85426317-85426488
  hypo
aaactgagagccagccgcatatcacagccaggacttgtggaagggactggaacccagaagtccagcctccttgacccttagggagcgttgcctcagtgaagatggagcctgaggctggagaggcggctggggccaggttggctgaccccgaatgtgcggggatgccctccg

SEQ ID NO: 217198 - DNA, 111 bp, Homo sapiens
  chr16:85428081-85428192
  hypo
ttgggtggttcctcggatgagcggcttgagggggctctgctttatgtaccctcccctgtgcccatttgtggggtcactggtttagtcctggatgggcggcagcccccgcgc

SEQ ID NO: 217199 - DNA, 94 bp, Homo sapiens
  chr16:85432465-85432559
  hypo
atgcatgtcgagtgcgcaccgacatgtgtggtatgtttgtgtagacatgtataatgcatgtcgagtgtgtatccacatgcgttgtatgtttgtg

SEQ ID NO: 217200 - DNA, 201 bp, Homo sapiens
  chr16:85465097-85465298
  hypo
cacttgcagagcgcgtctctgatccaacgcctgctgtccccagatctgatcctttgagcatcagggctggaaagtcgcctccggggtggtggccgtggcagcctcagaggtttctgcccgtgctccccgagacacttggccatggcacctgcctcccgccattggccttccgtcctccttcggagcgaagctccacccagc

SEQ ID NO: 217201 - DNA, 71 bp, Homo sapiens
  chr16:85485676-85485747
  hypo
tgaagatgcatctttgtccccgccagagagacccgtgtccggcgcgaataattggattttaatgaaacgaa

SEQ ID NO: 217202 - DNA, 112 bp, Homo sapiens
  chr16:85485855-85485967
  hypo
gatgtttgatggccctgccagcgcggttatttatttatttacccaaccctcatgagctgggacgtgccagtgggccccggtaattaacagcgggtgctgagcctgtgtgttc

SEQ ID NO: 217203 - DNA, 148 bp, Homo sapiens
  chr16:85497297-85497445
  hypo
aactcctggcatcaaggcctcgcatcactggcacagttaggcagcgagagggtaagagtcacagagcccgccgagggtggggagcgccatgagtcccatcggagagagggtgagcgggactctgaggcctggggcagtgccacaggtg

SEQ ID NO: 217204 - DNA, 130 bp, Homo sapiens
  chr16:85497475-85497605
  hypo
gtcctcaggctgaggggcggccagagtgagggatggagagaagccttccatgaacagcaactcaggctaccaaggtccctttggggtggctccagtgacagagaatgggcggggacgctggcctcaggac

SEQ ID NO: 217205 - DNA, 69 bp, Homo sapiens
  chr16:85517149-85517218
  hypo
ctcccttctcttccaccaggcgatgcccaggcccccggccactgtctccgccctcttggtaggccctgt

SEQ ID NO: 217206 - DNA, 158 bp, Homo sapiens
  chr16:85517620-85517778
  hypo
gatggggaaactgaggcagagctggggttaccccagaagaccctcagattcgcggtaggatgacgtcccacacttggtgactttatgtggctcccggaccagttatgccgtgcaggaatatgccccttcatagaaccgcagtgaggtttttccatcct

SEQ ID NO: 217207 - DNA, 41 bp, Homo sapiens
  chr16:85523184-85523225
  hypo
acccaccccacaagccgtgcttcattcgtgaagttgctacg

SEQ ID NO: 217208 - DNA, 267 bp, Homo sapiens
  chr16:85529540-85529807
  hypo
cctggggtgattcatcgagcatccctcggtctcagactcctcatttgtcaaaagccgcggggggacctgcctcagagcgtcacagggaacctcgggaatcgattgttctgcaagccagagctggatcccgggtgcagaatccatccgagcactctgtatgggggcacagctcggagcagggtctccggcttcatttccccagggcccgagcctgcggtgacagtgacttgacctcgctccccagaggtgagaggtgcccactttgca

SEQ ID NO: 217209 - DNA, 107 bp, Homo sapiens
  chr16:85535588-85535695
  hypo
cacaggaggctcagccggggagccagatgtccaccaagagctctctcttgcaggaagatcccgggaggaggggagtgggtgtcaggggcactcgatgggggtccgtg

SEQ ID NO: 217210 - DNA, 151 bp, Homo sapiens
  chr16:85537340-85537491
  hypo
acagaccctgtaattagaaactgtagtgtccccgagactggtctttaaaactgtcagaagccaagcggccgtcatttgatacaagactatcatcacccgtgaacccattagctgcaggtaaataacatattatgccagggacggaaagcag

SEQ ID NO: 217211 - DNA, 321 bp, Homo sapiens
  chr16:85541368-85541689
  hypo
tcacattctgaggcccgggggctgggatgtcagcgtgtcaattttcgcaggacacaaatcagcctataataggtgtcattttccctctttttcaatttgaaatggatgcgtcatattcatcagaagagttgcgagcacacgcctcgtgtgtttctatgggctgagctcaccatgtaatgggcccctgcatgacaaagagtgtgcccagtcccccagaagccccctgtggccccctgccgaggtggccagtgccccgacttctaactccgtcacttatttttttgtcttttgagatggagtcttgctgtgtcgctcaggctg

SEQ ID NO: 217212 - DNA, 196 bp, Homo sapiens
  chr16:85543126-85543322
  hypo
gctccgtttggccagcgacccctggccctcgctgtcatcagcttgcctggtgctttgcgggtgcctgatgactgtggagtgacgttgaatggaaaggccaggaggctccatctgaggatgtatgctggccctgaaggccagcgtggggaacaagagccgaatggccatgccgggtgggagacgtgtgtgctgttca

SEQ ID NO: 217213 - DNA, 920 bp, Homo sapiens; identical to SEQ ID NO: 204324
  chr16:85589833-85590753
  hypo

SEQ ID NO: 217214 - DNA, 441 bp, Homo sapiens
  chr16:85616219-85616660
  hypo
tgacacccagttcccccttacgcagccgcctggggtgcctggagctcagtcctccccgtgttgataaattgagcttctcttctccacggttcagggcgtcggggtggggacggggccatcctgcacaaccccccctcgcctcttaatgccttttcacccctgagagcctgtctgcacagcctgcggttggtcggccgccttgtcatttagctgttccgagccagtgatcgggaggcagcacaaactgtggcatttgctgagcgtaaaaattcaattaattccagaaggcagattaaatataagtgagttttaataatttgctgtaaagtcggaggattactgtgggcacggggagggaagccacacatgcgtgcttgagcaggctggcacagtctcggggatgccagccagggtggcttcctggagccactcattcctccc

SEQ ID NO: 217215 - DNA, 172 bp, Homo sapiens
  chr16:85618049-85618221
  hypo
taatttacactctccgggtactgatccatcaatagtgaatgtattacctgtctccgtgaggtttgggagatccaggatgctgctttgagaacgcctgcgaagcagtaggatcggggaggtggagcagtttcccccacccctccctctccccgcacgcgttctttctcagatg

SEQ ID NO: 217216 - DNA, 204 bp, Homo sapiens
  chr16:85661572-85661776
  hypo
ggctgggggcttcgtgccgaggcctcgggggcagcagccttgaagtgatccccaccaggcctggaggggcaggaggcacgtgggccctggaggctgtgtccattcacagcaggcccagggggacccctccaaggatctcggggttccccggctcttggcctcctgtcctggcctcaagggagctgcgcccggctgctgcggccc

SEQ ID NO: 217217 - DNA, 259 bp, Homo sapiens
  chr16:85671775-85672034
  hypo
ctctcctctcattgtgtctcaagggtgtagtttaaaaattcaattcagacgaagctgtggcatgcgctgccctgggagaaaggctgggaaggagaggaagaggaggccctcgctgggatttatttttctggaggcgctgagacgtcttctcttcttcaaagctcagtcacccgcccaccagcgcgggccagacacccttccccagggccagcctgaccctttaacctactcacctactcactgccgaggctggggcgct

SEQ ID NO: 217218 - DNA, 111 bp, Homo sapiens
  chr16:85672078-85672189
  hypo
cactttccttccttgctgtgtgatccgggcaggccgctttgcctctctgagcttccactttttcttgggtgaggagcaggtctctacctcatgaatcgtggggactgggtg

SEQ ID NO: 217219 - DNA, 164 bp, Homo sapiens
  chr16:85672904-85673068
  hypo
cctcctcggaatggcggcctggccaccgcctccctccctgcctctcctaccaggacctcttctgcacagacacccaaccacccccataggcatctgaaacctcagcctaggagtcccaagactggggggatgggtcccagccctgtgtcccaccccctgcgctg

SEQ ID NO: 217220 - DNA, 352 bp, Homo sapiens
  chr16:85673486-85673838
  hypo
cgggggcggaggtacggggagccttgcgtgtcctcagctgctccaggaggcacaggcagcacctgggaccaggcaccccctccctgggaaacagttgggggcgatcgtgctgcgggcctttgctctgggaggccggcgctttgggaacagggtggctccagagccttcccaggtgggctggagagccgccgtctggaggacagttctgagcaggtgctcctggctggcgaggaagccccacctcaccccagcaccacccatggtgcagggagctggggttgggcgcacaagagtctgagcccgttcccaccccgcctccttgtcaccagcccggtggccgggactcatggct

SEQ ID NO: 217221 - DNA, 237 bp, Homo sapiens
  chr16:85673886-85674123
  hypo
cctgccctggaagctgccagaggcctctccaagcaggtgttggccgctgtgttacctgcggcaggggtggcccagccacccatagcccggcttgggccacagggacggggccgacaggtggtggcagtggggctggaactgctctcttgtcatcgaggcccgcggggccctgtgccgccttcccctggtggtgtctgctggctgcctgcctcgtcttgtcactggctttgcaggcaa

SEQ ID NO: 217222 - DNA, 130 bp, Homo sapiens
  chr16:85674334-85674464
  hypo
caaagaaaacagcaaaacaaacacggaggaaggatcccgcctggcaggcgcgcctcgcgtgggtgtcagtctgcggcggcggcggctctgcaggcgtctggagcccgtctgtctcccgcgcaggtgtgag

SEQ ID NO: 217223 - DNA, 74 bp, Homo sapiens
  chr16:85678761-85678835
  hypo
gagttctcagggtgtgggcagtggttggctagtccatctgggggtctggggttgggtcacgcctcaggggcagc

SEQ ID NO: 217224 - DNA, 198 bp, Homo sapiens
  chr16:85682359-85682557
  hypo
gagtggggcggggcagggagcctagcgtcctctaagtggggaggctggattcaggcatccattgggggctctggagctttcgaggttgagtttacattccagacaccccctcccccaccctgagtttccgtctccttctctgcaacgtgagggtgacagcggcaccctcctggaggccctgtgcgggtgagtacatcg

SEQ ID NO: 217225 - DNA, 217 bp, Homo sapiens
  chr16:85682977-85683194
  hypo
aactgaacaaagaattgaggtaggaaagatcccagcccagacgctatcagaacaagacatctggtgggttttgtgtttctgtcttacttttggggctcccagcggaggcccctccccaagttttcggggctccttatgtctgtgggcccctcgctctgcactgactggggcctgcctgtgtggaaggagctggcactgggagctgctcttctgccgc

SEQ ID NO: 217226 - DNA, 88 bp, Homo sapiens
  chr16:85683224-85683312
  hypo
acctgcagctctcccggccccccacccctggcgcgcagcctggagtgggcccttcctaattaagagcgattctcaggggctgctgtca

SEQ ID NO: 217227 - DNA, 58 bp, Homo sapiens
  chr16:85683912-85683970
  hypo
ggccctgaatcacccgactcaaacagctgaggctccttgcgccccactggtggggcct

SEQ ID NO: 217228 - DNA, 82 bp, Homo sapiens
  chr16:85693857-85693939
  hypo
ctgtcccaggcctgagagggtctctgccttccctagcagcttaggctgggagcctccctatcctcttggagcagcctgcaca

SEQ ID NO: 217229 - DNA, 204 bp, Homo sapiens
  chr16:85699441-85699645
  hypo
tacttaaatgttccccgggtcttggttctttgcgctaggtctttgttaagtgtaagctctagagaccaggatctgcgtgctggacactcagcctgttaacttgcatttcttaatattttccttcactttgtctctaaaagaaccagccacgcagcaagcctctctggatgtggagaagccggttggtgttgctgcttccttgtc

SEQ ID NO: 217230 - DNA, 79 bp, Homo sapiens
  chr16:85704416-85704495
  hypo
cgtttatgtatttatcggtacaattcaaagggctgggagcattgtggtccacaggagaggccttcgctggctgcactgg

SEQ ID NO: 217231 - DNA, 178 bp, Homo sapiens; identical to SEQ ID NO: 204326
  chr16:85932120-85932298
  hypo

SEQ ID NO: 217232 - DNA, 330 bp, Homo sapiens
  chr16:85966491-85966821
  hypo
cctcactaacactcagtactttcagtcgtttatgttttagccatcctggtgggcggagcggtgctcattttggtttaaatttgcacttttccgatgaccggtggggttgggctccttgcctgtttcttggtgaagtgccgctttaggctgtccagcttctccactgcatttcatccttccctggtggacacatgggtgttcccggggatcagaaagggggcccacaccgtgctgcagagctggcatctgctcgagtggctgctgcctgcagctaagtattttgaatatccgcctgcctactctgtgtgcgtcctcttggtaaatagaagc

SEQ ID NO: 217233 - DNA, 163 bp, Homo sapiens
  chr16:86101896-86102059
  hypo
agggtcatgtcacacgtatttcatacggttattgtgggcattaggcacagtaaccgaagtttcaggagtggaacgttacgtgtgagtagacgttagcacagtctctcgtttgtggggtgggaacagggtcttgtcacaggtatttcatacagttattgtgggc

SEQ ID NO: 217234 - DNA, 266 bp, Homo sapiens
  chr16:86102114-86102380
  hypo
tagcacagtctctcgtttgtggggtgggaacagggtcatgtcacacgtatttcatacagttattgtggggattagacacaaataactgaagttttgggagtggaactgctacgtggaagtaggcgtgagcactgacatcgttaacattatgtcgtcgctctcaaaatgctaaatgtagttgctctcggagccaacaattccccttctgggtttctgggagatgcgaaaacaagaggaacgcaaatatccatcgtcccagaaactcg

SEQ ID NO: 217235 - DNA, 329 bp, Homo sapiens
  chr16:86560978-86561307
  hypo
tattccctttttaatggaaacgatggcctccgagtccctttgtgactcctgtatgaacatgtccaccacggctagcacgtgtctcaagatgctgatgttcggcagctccttgttgcctgctcgtatctgtagacgaggcccagactcctgccacaggtgtgtggagaagccctggctcagatgctgcctccgcagcccagggacgtcctcctgtcgtgtttctgaatgctggtgcggtcttgccttccacaccgggcttggctgtggcttgccaccgcctggtctccagaactctcgtcttactgctcacagattttctttctccctac

SEQ ID NO: 217236 - DNA, 40 bp, Homo sapiens
  chr16:86903435-86903475
  hypo
tgcgtagaggtgacggcggcgcaggcgcagtttagaactg

SEQ ID NO: 217237 - DNA, 103 bp, Homo sapiens
  chr16:87022725-87022828
  hypo
cccggcactgggggcaggtcttgatagaggcagagctgcgctgtgtaactggtggcctcgcaaagatgtcccaagagagggcggcccccaggttggctgtagg

SEQ ID NO: 217238 - DNA, 46 bp, Homo sapiens
  chr16:87092621-87092667
  hypo
gcctaatgtgaacctccaagtggacgatcattcagtactgactttg

SEQ ID NO: 217239 - DNA, 117 bp, Homo sapiens
  chr16:87219677-87219794
  hypo
cacctaggagggacggtggacctggaggccacagagccgaggcccaccgtcctgaccagccaggaggcatgggcacccgcctctcaccacggggctccctccgtgttgaagatgtcc

SEQ ID NO: 217240 - DNA, 37 bp, Homo sapiens
  chr16:87310542-87310579
  hypo
gagcaaaaacagctccgcaagtcgcctgcccaagcat

SEQ ID NO: 217241 - DNA, 104 bp, Homo sapiens
  chr16:87391987-87392091
  hypo
agaagccaaagctcgcaggaggtacatacggcaggtgtaaacgtctctgtacgccatgtgctcataatcagggagaattttcacaaaacgtcccgacttcacgc

SEQ ID NO: 217242 - DNA, 227 bp, Homo sapiens; identical to SEQ ID NO: 204329
  chr16:87417941-87418168
  hypo

SEQ ID NO: 217243 - DNA, 64 bp, Homo sapiens; identical to SEQ ID NO: 204330
  chr16:87418200-87418264
  hypo

SEQ ID NO: 217244 - DNA, 48 bp, Homo sapiens
  chr16:87443507-87443555
  hypo
agaactccaagctcggttctcgattcagaccacgtgtagctgccctgg

SEQ ID NO: 217245 - DNA, 214 bp, Homo sapiens
  chr16:87444919-87445133
  hypo
aaatcatcatggccgttttagacccaacagcagtccttctggggacctcacggcctatcatgaagatttccacgcgctttcaaagagcattcgaaaaattatttgctttacaaagaaagaagtttactcttcataaaaaccaagcatttgtgtgcactggtcctgcgggagcctggtgggcgcggccatggcgcgcgcttacctggccggttga

SEQ ID NO: 217246 - DNA, 47 bp, Homo sapiens
  chr16:87447846-87447893
  hypo
ggccctctctgtgtacgagtaacccacctgcccggcacacgggccct

SEQ ID NO: 217247 - DNA, 800 bp, Homo sapiens; identical to SEQ ID NO: 204331
  chr16:87525701-87526501
  hypo

SEQ ID NO: 217248 - DNA, 523 bp, Homo sapiens; identical to SEQ ID NO: 204332
  chr16:87526561-87527084
  hypo

SEQ ID NO: 217249 - DNA, 86 bp, Homo sapiens
  chr16:87594871-87594957
  hypo
agagcctggttttcacagggcgccttcatctttcgtcaacatctgtccaaatagtacctttaaaaatcattgccaaagcgtttgct

SEQ ID NO: 217250 - DNA, 149 bp, Homo sapiens; identical to SEQ ID NO: 204333
  chr16:87635591-87635740
  hypo

SEQ ID NO: 217251 - DNA, 124 bp, Homo sapiens; identical to SEQ ID NO: 204334
  chr16:87635827-87635951
  hypo

SEQ ID NO: 217252 - DNA, 179 bp, Homo sapiens
  chr16:87681106-87681285
  hypo
ccatgctccctggcaggttgcggcttgccttctgcactggcggagtccgagctgactccgtcccttcgcccgagcgggcgtcgcggggagggaggtggttcctgcttccgcatgcgcacaactggggtcttggatcgtagctcctttgtgagaaagggactggctcacccgccatgtcc

SEQ ID NO: 217253 - DNA, 101 bp, Homo sapiens
  chr16:87681315-87681416
  hypo
ctcacggcctcctcaccgctgtgcacagccagcacgtccatgcgcacctgtggagccagggtgtacggctgcacaggtgcgcctaggtggaggtctccagg

SEQ ID NO: 217254 - DNA, 437 bp, Homo sapiens
  chr16:87739314-87739751
  hypo
agcaggagggaagaaagaaccggccacacaatggcgtccatcttctggacaagggctggagccgcagagccgggcagggcctgggcgggggcgggggcgggggcgctgctgcctgcgctctggcttctcaaccctgtccgagcctcttccaaccagcttagctgagagtgtgaggaaaggaccttgattgcccagcactcagacaaagtgcccagaccggccgccaaagccggcgcaacgcaacacaagctgcagccctgtgcggggtcggtgcaacacaaacacaagctgcagctctcagggggttggcacaaggcaacacaacctgcagcctgaggggaggaggggtcggcggaacgcaaacacaagctgtagcccttgcggggggcgggcgggctgccggcgcaaaagcaaacacaagctgcagccctcgcggg

SEQ ID NO: 217255 - DNA, 341 bp, Homo sapiens
  chr16:87744671-87745012
  hypo
tccaagcctagtcacccaggacagtcagagacggaaccctcgcccctcttgagagagctcatgggctttgggggccccaataccaaaaggtgctggaggaaggcagtggtggcagggacccaagttagggctgcgcaccacggcgcatgctactcagaggttgcactaccttcagctgtccctcaaaccaacggttcctggtggcgtcgtagaagtacagatcgttgaagaactcgcccgacaggctctcctcctcttcctcgtcacagacacccccgaagaacagtgtctggtgattcggggccatggccacggaaaagccagaccgtggggtgggcttg

SEQ ID NO: 217256 - DNA, 221 bp, Homo sapiens
  chr16:87776440-87776661
  hypo
acggcccctccagacgagttgccctaacgccttcctatcagggaagggaagactcattctgcaaggcgccgcagctgtagtccagtgtctgccacaggtatgaagtgacgacgagcacggagaacacttgaggaaaactgtgaaacaggagcacctgcacaggcatcacgccaagagtcagccctccacacgccagcaccggcaccaactggaggcttttg

SEQ ID NO: 217257 - DNA, 97 bp, Homo sapiens
  chr16:87782716-87782813
  hypo
ttcaaacattaacaacggtgtggtgcaacctagcagtgttttccttttattaatatccacaataaagctgtctgcctgctctcgttaatccctctcc

SEQ ID NO: 217258 - DNA, 158 bp, Homo sapiens
  chr16:87864417-87864575
  hypo
ggcaagtgcgtgccgtcgagaggccgccggctccctgtatccttgaggcatgtccacgtcccagagcaggaggttggaacagaacggcatcccgaggacccctagccgaggcgggaaggtaagaggctgacgtcgtgcgtgggccccgccggccccag

SEQ ID NO: 217259 - DNA, 151 bp, Homo sapiens
  chr16:87895432-87895583
  hypo
tgtgagctccccctacggccttgccccgaatcccgtgatgcagcgtgacctgcctaggtgccggcggcactttcatgtgcggctgggaaagtcagatttcagcactaatcactggctgccgcctgcaatgagcccacggcttgagctctgg

SEQ ID NO: 217260 - DNA, 92 bp, Homo sapiens
  chr16:87916177-87916269
  hypo
ccccagaccaacggcgctgcgagcttctggggcgtgggctgggcccaacatgtcagtgcgacccacagcggggctggagctgctgaatgtgc

SEQ ID NO: 217261 - DNA, 79 bp, Homo sapiens
  chr16:87916329-87916408
  hypo
tcagcagactcctcttgatcgatggaatcgaagtcaggcgcagcagcttagagcagaacagaaacgtgcccatttcccc

SEQ ID NO: 217262 - DNA, 364 bp, Homo sapiens
  chr16:88037886-88038250
  hypo
cttttgttccctagcgtcgtcccccagactacagtaatactcaacaatgatcggcagaacgccattgtagccaagatggaagaccccttgagcaacagggcaccggattccctggaaaatgtcattagcaagtcagtagcacggcaccaaccccacctttccctgccactgtgcggagtcccatgagaataagtcaacgtccctaagccagggcacagtccagcacacgcttcatctctgtggtcacagggttgagcctggcaggcaccgccccagctctctgaggtcggggagggcaggctgggcgatgctgaatgctgagtccagccacaccaggggcagctgccgccggggacttctgtgt

SEQ ID NO: 217263 - DNA, 300 bp, Homo sapiens
  chr16:88049613-88049913
  hypo
gccagcatgggcctccgcagcctctgcttgccagccaccaggggccacaagcaaatctctgccccttgcccaggccccaaggcagaacatttttaaaaatcctcccttcagaaggacagacacagggaaggattcagccccttaggtttaatctgaccaggaaatctgtggcatggtttaaggtcagcacaagcggggactatgtctggggcctcccgtccatgcaggagaagcatgtggcgctgggaaatgcgtggtgcaggtgccaatgctccagagccgcctcggccactgtcctcc

SEQ ID NO: 217264 - DNA, 282 bp, Homo sapiens
  chr16:88073665-88073947
  hypo
acctcaaatcaaagacggcttcaggagaggccggtgctgccactcagggtagcgggcggaatcttggtacatggcccctgcttctcttgggaaggaaactgctgtgtgatttaaagaaaccgctgtgttcatctgaagctgccttttctggtgaatctgtgtagcgaaccccctcgttttccatttgtggaaatccttttttttttttttttccatcatttggccagttctcattcctgctgagctacaccctgctcatgcaggcttcgtcctccgggctgg

SEQ ID NO: 217265 - DNA, 49 bp, Homo sapiens
  chr16:88078972-88079021
  hypo
gtgcgtgcacttgagcgtttcttgcaggagaggccggggccaaaggaac

SEQ ID NO: 217266 - DNA, 206 bp, Homo sapiens
  chr16:88091519-88091725
  hypo
ttccgacaagccaggcgccgaggctcggtgtgggcccgtgggcctgattgaagtcacactcctgcccccttaaactatgaaacggcggagttacacgggaagaaagggttcaagcgtaatataatttcctacctttttttcactctgagagtgaaccgctgagtggctgttaaattcattgtgtatttacgaggaatctttcatct

SEQ ID NO: 217267 - DNA, 213 bp, Homo sapiens
  chr16:88096550-88096763
  hypo
gtagggaccctggcgtgacctcatttttgctgcttcacgtttaagatctgactgctgagttgtcctcatcaccaatttcaaatcaagcccaaatccacaaactatatctcagcctcctgtgtgttttaagaggctgcgccgtgcatggaggtgccctcagcctgcagcagcgcagccaagcggagggcgcaccgcggccttctgtgtgactgt

SEQ ID NO: 217268 - DNA, 190 bp, Homo sapiens
  chr16:88106132-88106322
  hypo
agcatgggggcccctttagccggagagctccctgccccactcgttgaaggtctcagctcggggcagagccagtacctcgggctgctgtggccctagcgtccacgaaaacaaagcgcagggctgctgtgctctgtggatggcccagcgggcccaggccagcatctccatacctcgcaggcagaagcccccg

SEQ ID NO: 217269 - DNA, 40 bp, Homo sapiens
  chr16:88106973-88107013
  hypo
gtgcccatgggcacggtggcccctgcagaggcacgccctg

SEQ ID NO: 217270 - DNA, 360 bp, Homo sapiens
  chr16:88110023-88110383
  hypo
gagccaggcgttgtgtaccaagtcgggtgagccttggggccgtcagggctccttcgcgctcctgtgtgcgtgtttctcattctgccttaaagtcactggctgttcatgacaccccctggccatgcagtgctgggtatttttctagaaagtccctcctttctcccttttgcagacggccgaagccctgcagcccacgctacagccggagatgcagctcgagcacggggccatccagattcagtgagcggtgcccatggcaccaggagcccctcgccggctccgcctacggcccggcccccacgcgccctgctctcacggcctcggcacaggcagcggctgcacgtgttctgctgaagtgcg

SEQ ID NO: 217271 - DNA, 335 bp, Homo sapiens
  chr16:88111278-88111613
  hypo
ttgaatccctggtgaccagccgggcctggactgcttcacctacaccgttgtggcagttgcgttaggggcttgggaagggcctacgtgaagccgtgttcgctgacttagagcggggcctctctgggctttctctgggaggagttccgcgttgccatccagacggtcgtagctccagcctgctccaccccgtcaggatcctgggctgggtccccttgggggtgagggtctgggatgagctgctctcgaaagggggatggcgctcatgggttctgcgtctccatcgtggtggggccgcctctgaagatggccaccacaaggagccgggccgaggcctc

SEQ ID NO: 217272 - DNA, 71 bp, Homo sapiens
  chr16:88260676-88260747
  hypo
acccgtgcctcctccgcgccggggcctgcgcgtttccacccgtccctcctccacgccggggcctccacact

SEQ ID NO: 217273 - DNA, 327 bp, Homo sapiens
  chr16:88338949-88339276
  hypo
acacatgcacacacatgctcacaggcacacgcatgcacaccctcacatgtgcacacacacgctcacaggcacacatgcacgccctcacacacgtgcacacatgctcatagacacacacgcacaccctcacacgtgcacacatggtcacaggcacacacgcacaccctcacacacatgcacacacacgctcacaggcacacatgtgtgcacaccctcacacgtgcacacacgctcacaggcacacacgcacaccctcacacatgcacacacaccctcacgtgcacacacattctcacaggcacacacgcatgcacaccttcacataca

SEQ ID NO: 217274 - DNA, 250 bp, Homo sapiens
  chr16:88368369-88368619
  hypo
tgggaagatgccgacgggaggacacacatgtgatggatacagatgagggagccgtgtgggaagatgccgacgggaggacacatgtgacagagacggacgtgggagccgtgaaggaagatgccgacggaacgacacatgtgtgacagagatggatgtgggagccgtgaaggaagatgccaacggaaggacacatgtgtgatggagatggagggggagccgtgtgggaagatgccaacgggaggacacatgt

SEQ ID NO: 217275 - DNA, 141 bp, Homo sapiens
  chr16:88480752-88480893
  hypo
aactttggtgtggggtggaggcatctggcctcgggggcacctggaggaggccacagtctcgttacctccaccccaaagagccctggggaccgcagactcgagttgttggaggcccagggatgctgtggcgccgggatttga

SEQ ID NO: 217276 - DNA, 746 bp, Homo sapiens
  chr16:88480934-88481680
  hypo
ccccaggcccggcagagctgccctggattgggagcaagctatggctgggagcgggccccacggcaggagggtccgagggagaggcaggccctgtggcctcaggttggcaccgtagaggcctcctctgtcctggctgtggcctcctgctctcgagaacaggccgaacccagaaggacgtcccagtggggggtaacttcccctgccccagggaacagggctcttcagtgcccgggcggcacagggccacccctcaccaggccactgtggccagaggtccacgcaggacagccccgcccagacgtccactgccacccggccctgccttcccagggccatgggtcagccagttagggcggggcagaggggagcacggccaggcctccagtttccagctgcccagagaccagctgaggccacacagcgagtgggaacagcagggtcagccgcgccagggcccaggtagcctcgaggaggcacctgcaacagggaagggcactgcctcggcctcgcagagactccggtcccgggtgccacttcccactgtgtggccttggaaaagtcccttcccctctctgagcctcggtttctcgtctgagcaatggggaggaacagaaccaccttgtggggccttgagaggattcatgaggcagtgctggcccggtgaccacccggaacatcagggaccctccgggatctcaggatctgtcaggccagtgccggtcacagctgagcgaggtcctggagag

SEQ ID NO: 217277 - DNA, 189 bp, Homo sapiens
  chr16:88493599-88493788
  hypo
catcccttctaagcgcggagcttctgtgatggctgcacgcagcctcttctgcttctggcccggccacacccgcatggagagcctagaagctccctgtctaggcgagggccacccagcccctctgccccactcacccctgacctttccttccaggctccactcaggaccatgagcgcaggcttccctggg

SEQ ID NO: 217278 - DNA, 32 bp, Homo sapiens
  chr16:88498087-88498119
  hypo
gccagggatgccccgccggccagcagctcctg

SEQ ID NO: 217279 - DNA, 205 bp, Homo sapiens
  chr16:88512691-88512896
  hypo
tggctctgcactggcgtgtcctctcctcgaggcggctgagtctgccgttcggggacctccctcgctcccctgcctggtgtcctctcctcgaggcggccgagtctgccgttcagggacctccctcgctcccctgcctggtgaaggtcatggggtcccgggcctcttcaccctctgtgttgtctccgcctccttccatctcatctca

SEQ ID NO: 217280 - DNA, 255 bp, Homo sapiens; identical to SEQ ID NO: 204336
  chr16:88519054-88519309
  hypo

SEQ ID NO: 217281 - DNA, 45 bp, Homo sapiens
  chr16:88537675-88537720
  hypo
gtgacctccaccctcgcgaaggccagcggccgcagggtctggctt

SEQ ID NO: 217282 - DNA, 394 bp, Homo sapiens
  chr16:88545423-88545817
  hypo
aggtgggtaggcacagaaggcgccgtctgctccgggctctcccaggctctgcgcccactccctcagctgccctagtgcctggaagtcagtctggctgcttgatggattgcgcgtgaggtactggccacttggtcctgagggtgtgggcggtgagtcccgagtcccaaccgcggggccgggctccccacgcaggtggtgctgggctggtgtcgccagcagaccccactttgatggcggggctgggctgctgctaccactgctctctgtgcttcggtttccctgcttggcgagattcacgggatgagagatgctcctagctgggccagggggtgtggacagcatcagccactcaccagggacctgggagggcgccgcttggctggaggtcatgctg

SEQ ID NO: 217283 - DNA, 360 bp, Homo sapiens
  chr16:88551040-88551400
  hypo
caggccttgtggagtatgggtgcagagggggcagtcgcagcacgcaggctgagtcagggcctggggacctggggagcagtcaaacaggatatggaagggcacctctgtcctctgttcacactggacaccatcacccatcaccagccccgccggcggatgtcagcacacacacctgcactcagcgccactccacagccactgtggggtccggagcagctgcccccgcacttgggccgcgtggccttgtctcagtctgccttgtcacctgtcaggtggactcctggagttcccccaccccgatgtgtgagtctctgagggacccaggccctgaggcactccacccccaggtgctgcagacac

SEQ ID NO: 217284 - DNA, 306 bp, Homo sapiens
  chr16:88551574-88551880
  hypo
cggcgaccctcagggcctggatggacgctgggcctacagtacagggagggcccactcgcagctccagggctgccagagcaggtgggggcctgtcccctggtgctggggggagcaggtgggaaagagacacggggtccgcggcccttctctggcaagagtggaatccgtgggcgtggtggaggccaagggtcacggcaggtaagggtgggcggaggcgaccctgcagctttggaaatgttgcagagggtgggggttcgtcaagaatcatcaggtcttttttttttttttttgaaacagaggtctcac

SEQ ID NO: 217285 - DNA, 44 bp, Homo sapiens
  chr16:88642725-88642769
  hypo
agatgcgagccaccgtacctggccagcctcgtcttttacatacg

SEQ ID NO: 217286 - DNA, 144 bp, Homo sapiens
  chr16:88645407-88645551
  hypo
ctccagtagcatgctggcgtgcgtgctctcaatgcacgtttggatatgactttccggccatcgctgctctctgtggcactgctcagtaatttatagggtttgaagtattgctcatgtgactttacgggacgtgtgtgcacctgc

SEQ ID NO: 217287 - DNA, 39 bp, Homo sapiens
  chr16:88647117-88647156
  hypo
gggagccctggggtgcgccgggtccgtgagcagtcagct

SEQ ID NO: 217288 - DNA, 185 bp, Homo sapiens
  chr16:88647913-88648098
  hypo
caagtatcttctggaagtgccgctggcctgcgtggtggggtggaaagtttccgtacagggctgggaccagcagtttgcagcacctggctcatttgtggtgtgggtgagggcgtccctgacaccagctgaccttcagtcaccggtctcttacctgttcaggaagcggcatggaagagagctgggtg

SEQ ID NO: 217289 - DNA, 198 bp, Homo sapiens
  chr16:88649040-88649238
  hypo
ttggaaaaagggccccgtagcatcagtagtaggctcagagaccttctgtgccccttagcgtggttagtgttccacatagccacatgaaaaagcgcaggccaccgtccttacagctctgaggcctcagaagctctgagaactgaaaccttttcctcacctggtggcagacctggcccaagctggcgtgaggctgctcat

SEQ ID NO: 217290 - DNA, 203 bp, Homo sapiens
  chr16:88683207-88683410
  hypo
ctaccaagcagaacacgaatgaggggctctgcagtgtccagcacggctgcaccagggctaggccttgcatgggggctacaccctagtgaagcgcagtcacttttgtttggtctgaagcgcggcccaggctcgttatagcaggcacttcaccaccccaagcttcacgagagggggcacagtcgtgcagcgggaggagcgagagt

SEQ ID NO: 217291 - DNA, 64 bp, Homo sapiens
  chr16:88689149-88689213
  hypo
ttgcccctccacctacggtcctggtctcagcacacaggagcccggctcccgagtgagggatgat

SEQ ID NO: 217292 - DNA, 38 bp, Homo sapiens
  chr16:88690944-88690982
  hypo
ggggatgtaggccagcggggccccgtccaccagccctg

SEQ ID NO: 217293 - DNA, 124 bp, Homo sapiens
  chr16:88698502-88698626
  hypo
cccccgggaggaccggctgtggagcagctcctgccttcagacccagcccaggagagcattgcgcctcagtttccccattcgtggggctgggttggggcttccttggtccgtgaggtggaggtac

SEQ ID NO: 217294 - DNA, 284 bp, Homo sapiens
  chr16:88702316-88702600
  hypo
ggtgctgcggcctgcgaccacctgagccaggcaggtgatgctaatgcgcctcagggcagccctggcactggagctgctatcatcccactgtacccatggggagagccgctctcctccctcctttttccattctgtgttatttacagagcaccctcctgtatgccctgcactactctcaaccctgggtacacagatggggctgccacagacgtggccctcaaggcgctcaggccgccttttggggagggccgtgaggggctggaatttttctgagacagccaagc

SEQ ID NO: 217295 - DNA, 325 bp, Homo sapiens
  chr16:88712141-88712466
  hypo
gtttaggtgagaaaagcctgataatgggacccaagcgcaggcacggtcttcggccggctgcgtgaccccaggccagtcacagcacctccctgagcctccgcatctttgtctgtaaagtggggaccccagtacccctcccagggctgtggtgcgggttaatgaggaaatgcaaggaaatgacccgacacactagacacgccaaaaatggcagcagcaaccgctgcgtccccgccgtgctgtgagcacacgcccaggctcacacttgctcccagccttggctcagcctacagagccggcttcaagggccatgcgtgtccgagggtgt

SEQ ID NO: 217296 - DNA, 113 bp, Homo sapiens
  chr16:88722817-88722930
  hypo
tccagatgacagggcttctgggccatcagcctttgaggccagcattcaccggcccagccgtctgtcccccacctccgctagttccactctcggacactctctgttcacggcct

SEQ ID NO: 217297 - DNA, 47 bp, Homo sapiens
  chr16:88722960-88723007
  hypo
aaaaggtacctgcggcagagcaggaagccccatggaaggcgggagaa

SEQ ID NO: 217298 - DNA, 317 bp, Homo sapiens
  chr16:88725339-88725656
  hypo
ggccagccaacctccgtccccgctccccattccttcatcgcttctactccagcatccgtgagtgcccaggtgcggatcgctcccaccgcggcctgcctcccctccaccttcccaaacaaaaggagcccagctctgagaactcctcacatctcactgctcatatgccccaggaacatccaggataaacccctttctgcccagcacggccatgggacagcacgtgaaatcaaacttccagaaagcccgaaaggaaacgtttgccctgggagcgctgcgtggtgcttcagctgaagtcttattccacggcggcttcgcta

SEQ ID NO: 217299 - DNA, 163 bp, Homo sapiens
  chr16:88725686-88725849
  hypo
ggaggtctctgaggatggcggacagttccaggggtgataaacgcggacacctggcagagaaccacgccctgcagctcgcgaggctctttcacgcacagcactgagcggccccccttgcaggcggacgccgctgccctgacaggccgggcgaacctctgctttc

SEQ ID NO: 217300 - DNA, 127 bp, Homo sapiens
  chr16:88738306-88738433
  hypo
ggagagtggacctcggtgtgtgcggggctgcgtgcactgccatcgctccctctacacgagccggcgtggacccagggctgagctgtgaccacgagggccatcccgacgagccgccatggacccaggg

SEQ ID NO: 217301 - DNA, 31 bp, Homo sapiens
  chr16:88757496-88757527
  hypo
cccttgggcctgcggcagatgaggtgagact

SEQ ID NO: 217302 - DNA, 45 bp, Homo sapiens
  chr16:88757686-88757731
  hypo
ggatctgtggggtccccggcatcgtcctgccgagttggatacctg

SEQ ID NO: 217303 - DNA, 101 bp, Homo sapiens
  chr16:88787977-88788078
  hypo
tgagctgcaccaggtcgtacttgatgtagccgtcagtcttctccaggcccaggatgcggggcgggaagtagggcttgttctcgtagcgccgcagcaccacg

SEQ ID NO: 217304 - DNA, 62 bp, Homo sapiens
  chr16:88788384-88788446
  hypo
cactggtacacggcccgcagcagccgcagcgcccggccctgcccctccgcaaacagctctgc

SEQ ID NO: 217305 - DNA, 192 bp, Homo sapiens
  chr16:88793083-88793275
  hypo
ggccccagggcggtgggtgcgggggggccggaggctcaccgacagcatgttcttggagatgatgacggtgacgttgtacagaatgaggcagtcccacagcacgaggcgggcccgtgtgtccctctgcagcagggccgtgccgaagagcagcaggtagaagcaggccagcaggtagcccagcccgaagatgct

SEQ ID NO: 217306 - DNA, 339 bp, Homo sapiens
  chr16:88793673-88794012
  hypo
tcccaccccaggcctgtcggcgtgcagccgctgggagcggacacacgtctgcctgggtgagtggccgggtgtccctgggggagccccggtgtgagggcatctgcacaagggctgccgtgcacacaggctgaggtctgcgtgcgtgcgtgcgaggtcagggcctgcaggccgccatgtgcctgaccacacctccgcccgtgcacgcctgtgtgcacacttgtgagcagatttgggggcgtgaatgtactctgagggtcctctgcagaggcgggggtggtggggggcactcactgatgaggttggtggagttgggggcccggaagaaatcaggcaggtaca

SEQ ID NO: 217307 - DNA, 279 bp, Homo sapiens
  chr16:88797397-88797676
  hypo
ccctgagccggccacgtgcacaaatgtgactccccatctcagaccgcagggtgctgtgtgccttgagcagacctgcagcaccaggacagccacgcaaatccagtctcacggcgtcagcaacgctaccggcctccctccggaacttcccaagagacaggagaggcgggggcggcttagacccaagacaagagactagagcaaacatcagaccagatcccgtctgaaaaccaaatggccacaaagaagggtgctgaggccggggctgtttgaatgcagagg

SEQ ID NO: 217308 - DNA, 322 bp, Homo sapiens
  chr16:88802685-88803007
  hypo
gtcatcccatacagcaggatgcagggcgagcacagcatggccagttggtggcggctgcgcaccgtccagatgaggcaggcccagagcagcagtacgaaggtcagccagctgtggtaggtgatgctccatacctgcgcggcagagagggctgcacagctgcccagcgcaccccacccaggcgatgccccacacctgcgcggcagagggggctgcacagctgcccagcgcaccccacccaggcgatgccccacacctgcgcggcagagggggctgcacagctgcccagcgcaccccacccaggcgatgccccacacctgcgcgg

SEQ ID NO: 217309 - DNA, 139 bp, Homo sapiens
  chr16:88803127-88803266
  hypo
ctcagcccgcttgggccgcactgcaggtggggacagcggtcagcttcggcaggttgatctgcaggcctccccaccctgactatgccctaaaatctgggccctgggcaagcacacagcaggagagacaggcccccggtgg

SEQ ID NO: 217310 - DNA, 45 bp, Homo sapiens
  chr16:88805797-88805842
  hypo
caggtgtggtggaaagaacacggctgtcgtcagatgccctggctc

SEQ ID NO: 217311 - DNA, 750 bp, Homo sapiens
  chr16:88805932-88806682
  hypo
ggctgtggggctggacgataggccccaccccagctctgacagtctccgtgctctgcaggccgaggcaagtcacagcctctcggagcctattccccttctgtcaaatgggatgggggcttgacgggacagatgaaccagaccagtcctgtcctcacaggcctccagggctgcaggggctgctgggaggctccgaggccagggtaacagggagatcagggcaggagaggcccaggccctgagcccacccctctcagagaccacacagcagctgggggcgaggctggatcagaacgcagggcgccatcgctcaccccacccacagcctggccctggccctggccctgggaaatcttctgagcagagccgtgaaaaatgagcatttctgggagtggaaagaacagaggcagctgctgtgagagaacaggtgtgaggccaccgaggggcaggcccggccctgacttggggtatgaggccaccgaggggcaggcccggccctgacttggggtgtgaggccaccgaggggcaggcccggccctgacttgggccccacgtgccgcagccatgctgcagacgcccctcaccctcctctagcggccagcacccctcgggctggctggcacactccgtcgcatgcctgcaaacacgtgtgtgtgttgcccatatgtgggagtgagggtcgcccgggggccctgccaggccgggtcatggggcttctagatctttcggaacggtatcctgcaggtgcctggt

SEQ ID NO: 217312 - DNA, 114 bp, Homo sapiens
  chr16:88826508-88826622
  hypo
gtcctgcctccagcgcccaccaccccacacgcccacctcggacctcgccggcggggcctccgtgccctcagtgacagtgaccccggccgtggctacagacggctgagccacggg

SEQ ID NO: 217313 - DNA, 59 bp, Homo sapiens
  chr16:88831171-88831230
  hypo
aaaagaaagaaaaaaggaatgcccctgccacggcctgcctttgactcccagcatcatgc

SEQ ID NO: 217314 - DNA, 142 bp, Homo sapiens
  chr16:88831297-88831439
  hypo
tggccccagcaactcaccccagagaggcaacaagggcttcctaagaagcctggccattgaaaacctcccggtagccgcctctcaggagcactgccttctcaacacagctacctggccctggcagacccggctgcccactgtg

SEQ ID NO: 217315 - DNA, 114 bp, Homo sapiens; identical to SEQ ID NO: 204339
  chr16:88851818-88851932
  hypo

SEQ ID NO: 217316 - DNA, 507 bp, Homo sapiens; identical to SEQ ID NO: 204340
  chr16:88878527-88879034
  hypo

SEQ ID NO: 217317 - DNA, 46 bp, Homo sapiens
  chr16:88897188-88897234
  hypo
tccgcaccccatgcggcagacagacaccaacggtctcgtgtcgggc

SEQ ID NO: 217318 - DNA, 221 bp, Homo sapiens
  chr16:88898119-88898340
  hypo
ggagagcggtgaggccgagcacggggtgcgtggggaggagagcggtgaggccgagcacggggtgcgtggggaggagagcggtgaggccgagcacggggagcgtggggaggagggtggtgaggctgagcatggggtgcgtggaggctgagcacagggtgcgtggggaggagagcggtgaggatgagcacggggtgcatgggggaggtggccagtgaggggcg

SEQ ID NO: 217319 - DNA, 239 bp, Homo sapiens
  chr16:88927321-88927560
  hypo
ggcctttgataacatggtgacgtcgatgatgatacaggtgtgctgagtgagctgtgctgccagccatcgcagaggagcccgcgcacgactgtggtggggccgtcggtctgttctggttgcctcttcctgaatgggacgcctggggctttcagggcaggcagctgtgcatgttctctcaactaaaggtcttgtgagaggagatttggctttttccttccgtgtcagccaaggatttaatt

SEQ ID NO: 217320 - DNA, 149 bp, Homo sapiens
  chr16:88933926-88934075
  hypo
cgcacctggtctgggtcatcttttaggtgggagccacttccatgaggccagaattattctgctgtggggcgggggctccgtggggagtgacggcgtgagttattgtggggcggggtctccgtggggagtgacggcgtgagttactgtgg

SEQ ID NO: 217321 - DNA, 52 bp, Homo sapiens
  chr16:88942321-88942373
  hypo
ggcacacggaccacgcacacgcggcggacgcaccaacgcctacgcagaagag

SEQ ID NO: 217322 - DNA, 210 bp, Homo sapiens
  chr16:88943232-88943442
  hypo
gcagcagtgactaattggtcggctcccccaggtcaggcggggcgcagtgtctggcaggccaggcatcggaggccaggcacagcatccggtgggcctggagctgggtggggttggcacggtgctgtgtccggcaggccaggggccagtggggtcagcggggcacggtgtccagtgggccaggtgggctgggggagccggggcgagaaggcc

SEQ ID NO: 217323 - DNA, 54 bp, Homo sapiens
  chr16:88945018-88945072
  hypo
tcacagctctcctggatcctcctgttctcacaggctagagaacacgggtttcag

SEQ ID NO: 217324 - DNA, 293 bp, Homo sapiens
  chr16:88946079-88946372
  hypo
tgcctgtgcagacaagtgcatgcaaataaacacaggcatcccaggcatgtgtgtgcaaagctgggtcacgtggtgtcacaagtcaaagcttgcactctaccgcagcggctccccaggcactgcacccctgcagggcaagggcgaggcccaccccagggcctggtcagccaggggcgcacccggaatctgcattcctaacgcgagccgggggagctgctgctgacctgaagcacttggataactctgccgttccgccttcacctctggccccacccagacgcagcccaggaagc

SEQ ID NO: 217325 - DNA, 381 bp, Homo sapiens; identical to SEQ ID NO: 204341
  chr16:88950011-88950392
  hypo

SEQ ID NO: 217326 - DNA, 140 bp, Homo sapiens
  chr16:88956712-88956852
  hypo
ctggcctcacccaggggccaacagctgctaagtggcaggctcgggctcaagccagggagcatctggtctggtctgtcctctggacccccgaggggaggcctggcccagcagagatggagcccacagcagtacgggcagtg

SEQ ID NO: 217327 - DNA, 42 bp, Homo sapiens
  chr16:88958253-88958295
  hypo
aggctcccgcagcacgggggacgggtttcgcattaccttcag

SEQ ID NO: 217328 - DNA, 216 bp, Homo sapiens
  chr16:88958479-88958695
  hypo
caggcagcccaggagctgggcacggcctgagagggtgcaggtggcatcgtgggagcgggtccacgcccggttgtcagcgtggagcccatgtaaggagtggccgtggctgcaacctcattaaacggagggaatatgcatgtcccaaggccccggctgtccctgcccaactcaccaccaggcccagcaccagtgtgcgcacgcgctccccaatctctg

SEQ ID NO: 217329 - DNA, 79 bp, Homo sapiens
  chr16:88970534-88970613
  hypo
tgctcgtgacactctggatcccgaagctagagcagacagtgccctgccggcgccctgagcagtcggggacttcatgtgg

SEQ ID NO: 217330 - DNA, 485 bp, Homo sapiens
  chr16:88978122-88978607
  hypo
gctgtcatgcttcgggctatctgtccggccacaacggccgcgtggagctggtgcaggtggggcttgtctttggcactgtgcccagagctggcccataggtgacactgagcatcagtgttggggaaggggacccatcggagagcctctggggcacagtgaagaccccccctcctgcctcgcagctgtgtgggggaagctctgttgcccagagttggctggcagggcccagactgcccaccggctgccatcaccaacacgaacaggtacccagggcatgccttcagccggcctgggtgcagaggtcccgtctgtcacagaagtgctgctgaaccgtagcagacgaaaatctcacaaactccctccgggccccggcccagggcttcccgttggaaggtgcacaggccggcctctgcctgcaggctgggcccacccgcgcctccccaacccactacgtggctccaggcggacctggccttgcctcttcc

SEQ ID NO: 217331 - DNA, 193 bp, Homo sapiens
  chr16:88994147-88994340
  hypo
gctggccgtccgcccgtgcggacacccgggagccaacactgacccgaagacaggtcagccagacttcccacctgctccctcaggaggtgggatccggtcccctcctgctgggctgcacgggccacgatggaaaggcgcctcgtgacacgctgcggtcagctcagaaaagccgcagatgctgacacgggcaacc

SEQ ID NO: 217332 - DNA, 272 bp, Homo sapiens; identical to SEQ ID NO: 204342
  chr16:89007036-89007308
  hypo

SEQ ID NO: 217333 - DNA, 91 bp, Homo sapiens; identical to SEQ ID NO: 204343
  chr16:89007789-89007880
  hypo

SEQ ID NO: 217334 - DNA, 373 bp, Homo sapiens; identical to SEQ ID NO: 204344
  chr16:89007995-89008368
  hypo

SEQ ID NO: 217335 - DNA, 120 bp, Homo sapiens
  chr16:89012336-89012456
  hypo
caggtgaatacataaaatactgtggcatatgtagacgatagagtgttatccatgacaaaagtagtgagctatcaagccatggaaagtgaacattgatggccgggcgtggtggctcacacc

SEQ ID NO: 217336 - DNA, 267 bp, Homo sapiens
  chr16:89016772-89017039
  hypo
tcagagtgttggcacctgtcttccgggtcagttcacccgtcccctggaccggcaccggcacagagggtcagagtgttggcacctgtcttccggatctgttcacccctcccccggaccggcaccgccacagagggtcaggagtgttggcacctgtcttccgggtcagttcacccgtcccctggaccggcaccgccacagagggtcaggagtgttggcacctgtcttccggatctgttcacccgtcccctggaccggcaccgccacaga

SEQ ID NO: 217337 - DNA, 209 bp, Homo sapiens
  chr16:89129270-89129479
  hypo
gtggtcacctttgacccctgcggcctggctgctcctgacagcatgagttgattcaaggacaaagccaggacccctggcttggagggacagtcccacaacccctgggtcccaggctggcacacgtgcctcctgggccacccccacctgccccccaccgctagcaccccactctctaccctcccaggccagcgcactgcctcctgggccag

SEQ ID NO: 217338 - DNA, 627 bp, Homo sapiens
  chr16:89130609-89131236
  hypo
cgagccccacaagatcagccctggcttggttctgtacgttgcttcctgcaggggaggggagggggaggggaatggccaacagctggtgttcagggtgccctgtgggatggcatggcccctcaggtatcagggagtcccgttagactaggctcctaaccaggacctgggcaggggagcatcacagcgctggggccccagactgctgcccaccggctgcctgggttcctctctgaacctcagtctcctcatcggcctggcgggaacagctgctcgctcctgttctttccccgtcaggcgtgtgagacgtgtctcctttctctccgccaagagtgaactccctttgaccaggcctcgtggtggttcagggagagatgttcgtgaagcaagggcgtcccgtgagcctggcccgtcacccgacctctaggcttcacaaaccttcagatctgagcaacacacagtcgtgaccctgtggctccagagctccctctccaagtggcttctccgggtcccgcagagcaggccctgcagatccaaggccaacctcctaggaccccggcctcccacccacaggagggttttccctcggtcctaagcggccctccttccagcacggcagggagacctggg

SEQ ID NO: 217339 - DNA, 39 bp, Homo sapiens
  chr16:89131266-89131305
  hypo
ccaccagcaccgtcctgcgaaggatgtagcctcaggcca

SEQ ID NO: 217340 - DNA, 198 bp, Homo sapiens
  chr16:89132090-89132288
  hypo
gggatgggtttccacctgggcttccaggttccccggaggcctcttgggggcatggctgccgtgggtagggtctggtggccagggcccctgttctcagcactccacgagtcttcactcagcaccctgagaggcagctgtcctttttactaacccctccccttttcaggacaggaaaccgaggcacagaggcagagtcag

SEQ ID NO: 217341 - DNA, 211 bp, Homo sapiens
  chr16:89139281-89139492
  hypo
gcccaaggctccgtgtggcccccccagtcagctgaagtcgtgaccctcaccgcagcctccgccccgcgccaagcctgactgtggtggcttccgatgggtgtcctcctgggcttcccaaagcaggaggtgaggtgcaggacaacgctggcgcaggctggctcagaggcacagcagagccgggtcctgcacggccaggcgcatcgggagtggc

SEQ ID NO: 217342 - DNA, 53 bp, Homo sapiens
  chr16:89139898-89139951
  hypo
agccgccgcacccggcctctcacatggttcttctcacgggcgctccccacatg

SEQ ID NO: 217343 - DNA, 312 bp, Homo sapiens
  chr16:89140055-89140367
  hypo
cagcgggtatgagagctgctgctgtggagaacggcagcaccatttccacacccacgtgtggcacttggtcacggcccatgcgggaaacaactacacccacctatttccctcccagaaaacctacgtttttcttcccaagacagacactgtgtgctcacaacaccctgttgctgcctttcctgagtagtatgtgtgcaggagtcctcacagcagccgtgtcgcagggagcaggcgccacggccttggaagccagcacagtcagcgaaattccgtagggagctgggactgacacggcccagtcatgtcatggat

SEQ ID NO: 217344 - DNA, 244 bp, Homo sapiens
  chr16:89140434-89140678
  hypo
tacatgcaccagttgagtgtggacctgtcatgtgtgaacttgtcacgtgaagacctgtcacatgtgaacctgtcacgaggacctgtcacgtgtggacctgtcacgtgtggacctgtcacgtgaggacctgtcacgtgtggacctgtcacgtgaggatctgtcgtgtggtcctgtcgtctgtgggcctgtcacgtgaggacctgtcatgtgtggactgtcacgtgtggacctgtcacgtgtggac

SEQ ID NO: 217345 - DNA, 137 bp, Homo sapiens
  chr16:89141786-89141923
  hypo
tcaccagtgcctgctgaacaaagaaggtctggcccagtgtggctgcagccaggaggccaaggagaccagtgagagcaccgccctcgccactgacgctcttgctgggctcattgttgtgctgggcccagtggagcaaa

SEQ ID NO: 217346 - DNA, 163 bp, Homo sapiens
  chr16:89141953-89142116
  hypo
caactctgcacccttgattgaaatgcaatgtctgcggctgacggccacgtgactgcaacccaccctcccggctgccgattaattttaccttttgtgctgccagctgcagtgggttcatggtgagagctgagttgatgcatgcgagtgcgagggtgtgttaatg

SEQ ID NO: 217347 - DNA, 327 bp, Homo sapiens
  chr16:89169088-89169415
  hypo
tggtgtggtcaacgcgctgctctgtcctctctgggtgggagccacctgtgtgatgatgcctgagttcagccctcagcaggtgagttggggtcagggctctcggttgcaccctcagactaggcgcctttcccctgtcggggccagggctctcagccgcgccctcagcctaagcgcctttcgctggttggggtcagggctctcggccgcgccctcagactaggcatcttttcctggtgtgcagtcgcccctatccacaggggacgtgccaatgccgagaccctgggtagcatggaaccctgtacctacgatgctttttgctatacatac

SEQ ID NO: 217348 - DNA, 626 bp, Homo sapiens
  chr16:89169475-89170101
  hypo
cagttataaccatgtactgtaatcaagttatgtgaaagtgctctctctcttcaaaataccttccggtactgtgctcgtctgttgtgagactgcagtgggccacgcgtcattgaaaccgtgaatagtgagactggatgagcggaggtgactgtacaggccctgctgcccgcgagctcctgcggctgcggcgaatgctcacgcgcttggtttaaaataatgcgagtttgttcttacatgcttggaggccaggattctgagacgagtcttgcggagctgatgctgggtgtggtagggctgctccgtcaggaggctccagggcaaagtccgttcctgcctcttgcagctctggaggccgcctgtgcccttggctccagctgcttcacgtccagctctgcttctgcaggcacacggccttctctccgtagtcagggctccctcggcttccctttgtgcagcctatgcggatattccaagatcatctcccatcttgaggtccttcgcttcatccacctgcagttcccaccactgcgagaggtgacacattcggggtgtagggcgtagggcgtgaccctttgagctatgatgtggccactgtggcagccctcggttactccagagtactggcc

SEQ ID NO: 217349 - DNA, 66 bp, Homo sapiens
  chr16:89172068-89172134
  hypo
aacctctgttgggggctgcccgggcgctgacggtggctggtctaccatggtcacttgggcagaggc

SEQ ID NO: 217350 - DNA, 274 bp, Homo sapiens; identical to SEQ ID NO: 204345
  chr16:89189485-89189759
  hypo

SEQ ID NO: 217351 - DNA, 363 bp, Homo sapiens
  chr16:89198318-89198681
  hypo
aggtgtttcacccccgtgggtggcgtcagcccctcctggaggagcccaggctggcgggttggcagccccgtcatcatgtggggcaggtgtttcacccccgtgggtggcgtcagcccctcctggaggagcccaggctggcgggttggcagcaggacgacacactcggcagaggctgccatggggcagtgttggccccacggcgtttgagcgccctttctccacatcagatcagtgtgttctgctatttcgcagctacttccctggcccctggttttctgaagtccattccagatggcaggtgatgagcctcagtgagactcttgtacgcatcccttgacctccggggtcacagccagtcacttt

SEQ ID NO: 217352 - DNA, 62 bp, Homo sapiens
  chr16:89202505-89202567
  hypo
gtaaaagctgaagacgttttcttctttgaaagcacaggaaccacagccctgtggattttgcg

SEQ ID NO: 217353 - DNA, 98 bp, Homo sapiens
  chr16:89203215-89203313
  hypo
agatggcaaaggtctgtttcaggtaactcctctgacggccacaacgatgtcttcagacgtcaaaggtctgtctcaggtaactcctctgacggccacaa

SEQ ID NO: 217354 - DNA, 63 bp, Homo sapiens
  chr16:89219255-89219318
  hypo
ctggcccaggcaacagtgagatcctgtcctagaaagaaaagagaaaaaaagaaaaatgcgatt

SEQ ID NO: 217355 - DNA, 225 bp, Homo sapiens
  chr16:89219372-89219597
  hypo
ctggagagcgagagactgggctgggccgactcccacctctgtcgcgagaggcctacgggcaggggcaggtgggcagggggactgtgctgggtctctggccgcgtctggacggcaggcgacactttctccacaaaaagcgtcaagaaaccacgacacttggtttctggacttttccgcggaacagtaaccagaacaatcgccatgaaggttcgtttctgtcatggc

SEQ ID NO: 217356 - DNA, 89 bp, Homo sapiens
  chr16:89220238-89220327
  hypo
gcccaaggcctgcacgcaccatggcttctgtggtaccagtgataacaccatgccgggcacctcctgcagtcaccacccctgggctgcta

SEQ ID NO: 217357 - DNA, 93 bp, Homo sapiens
  chr16:89254515-89254608
  hypo
ggaggccatagaggccgtcagcggagtggatgtgggacgcctggaagtggaggacagggacctgccaggctccccaaactgggtggccaggtt

SEQ ID NO: 217358 - DNA, 149 bp, Homo sapiens
  chr16:89254764-89254913
  hypo
gatgccggcacacacagatgcccacacacagatgccggcacacacacatgccggcacacacagatgcccacacacagatgccggcacacacacatgccggcacacacagatgcccacacacagatgccggcacacacagatgccggcac

SEQ ID NO: 217359 - DNA, 98 bp, Homo sapiens
  chr16:89255153-89255251
  hypo
acacacagatgcccacacacagatgcccacacacagatgcccacgcacaggtgcccacacacatgctggcacacagatgcccacgcacaggtgcccac

SEQ ID NO: 217360 - DNA, 377 bp, Homo sapiens
  chr16:89260393-89260770
  hypo
ctgcacatgcatgcaagaaccggcgcctgcatgcacttatgggccgtcccagagcaccgcagaggaagatggtgtgcgggcgggagtgtggaagccccgctgccaccgtccaaactgggccctcagcctccacccgcgacgcgggtctttgcacagatggagtggcgatggccacagacccatccactgccccgtgtccaccatggagggggtgggggagccccgggagcatcccctgggcttcggtggctgtcagcggaatcagggcctccatagaagaccctctggacacagcgttaatgattccctgccatccacaggatgaatgtgcacacggggaatctggggtgtggggcgcacagggaaccctcctctgt

SEQ ID NO: 217361 - DNA, 157 bp, Homo sapiens; identical to SEQ ID NO: 127778
  chr16:89267957-89268114
  hypo

SEQ ID NO: 217362 - DNA, 63 bp, Homo sapiens
  chr16:89354320-89354383
  hypo
accaggggctctccacggagctctgatgaagacatcagtgagacccgccgcatctccaggcag

SEQ ID NO: 217363 - DNA, 293 bp, Homo sapiens
  chr16:89357463-89357756
  hypo
ggccacctgctggcgctcggagagggggtagccggctcggattccagacagccccatgccaaacagcagcccggccttccgggtgacaggctccttcttaatcctcttccgctcagggccctgcttctctgtgaggcgggcgagggagagagggaggagagatttcatgccatggtgtcctccaaagctaggtccttacctaatgttacggagccccctgcgtccacctgacagctgacagagcagaaaggaaggtctgtgtatggggaaagcacagcggtgctgggagcatt

SEQ ID NO: 217364 - DNA, 314 bp, Homo sapiens
  chr16:89359017-89359331
  hypo
tcatgggcaaaaccccaagtactgcaggctgccatcgccaccaccagctagtctgtaaacagtcctcaacgcacagatctgagaaagcacttgagctttggccccagcccctcatagaacctggcaaacacggtggttggggaggcagcctcgccaccggccaatgagccccagcctacagccatcattggcgtagccacaccttagcagtgagcttgggtcacaggcgcttggctgtgggtctctgcgtgcgccccatgctttccctgcaccctccatgctgcccgggggccggccctccccaggcttgcttc

SEQ ID NO: 217365 - DNA, 415 bp, Homo sapiens
  chr16:89409898-89410313
  hypo
gtgtgagtgagtgagcgagcaaatgagacagagctcgaggtgggctggaggcatgtgagggtgcacgcgaaacacagtgcctcctcttggagttgccagaattcacctcgttcagaacctcaccccagtcagaaaacacaaggcagcaactggccggaacttggtcagtcacatccataaaccaccaattaccttcacagaccacgactaacaggtttattacagatgagtcacagctcatgttttcaaggaagggtctccaactgagcagtcaccagtgcagcctgcgtcagggcgcgcctccctccagcggtccccgcgtcgcccatgtctgacacagtttatgcttcgcaggcggtaaggctccgctcctcactcccatggaccaacagagtagggaaaacgaaggcacgtt

SEQ ID NO: 217366 - DNA, 121 bp, Homo sapiens
  chr16:89437423-89437544
  hypo
gtgtttggcaatgttatagctgccccgtctcatgacgaaggggacttgttcaggtgagaaacgttcaactgcgcgctcgcttactgaaaaccgccgagggggaagacgggacgagcgtctt

SEQ ID NO: 217367 - DNA, 45 bp, Homo sapiens
  chr16:89437574-89437619
  hypo
ccaccaaggaagtgccagaaaaagatgcaacgactctcactacct

SEQ ID NO: 217368 - DNA, 120 bp, Homo sapiens
  chr16:89442145-89442265
  hypo
gagccactgcacccagccgactccgtctcttaaaaaaaaaaaaaaaaaaaaagcctcttgcagttctcaagtctttttcattgtgtttactcaataccataaaccctaaatgacaccaca

SEQ ID NO: 217369 - DNA, 136 bp, Homo sapiens
  chr16:89442325-89442461
  hypo
agttgtgactttaggaaaagctaaacttgcgtgacacgccgcagcctgtgctctgctgtggatgcttttcaaaatcgataaatccagcagaagggccatcacaaaaaaagaacaggacatccgtgaagccatcacc

SEQ ID NO: 217370 - DNA, 295 bp, Homo sapiens
  chr16:89445365-89445660
  hypo
tttttgggtcaaggttctgacggcacactggggagcgtcaagacgcctcctgcagtcgtagacaagccgggctgaggcattcactgtcgcttagaactgaaaacttagggtcgtccatgcccagaacgtcggcagtgcggaccagccccaggaaggcctttctcactggcttctagaaggtggggccggcccccatgcctgccccggcacacggccattctgggagctgctggcagccggcgggctagaaggggtgcacaccgtctgtatgtgcgtcacaggctcatgctttttt

SEQ ID NO: 217371 - DNA, 84 bp, Homo sapiens
  chr16:89446069-89446153
  hypo
aggtgactgggacgcgagcgccccaagcagcacggaagagctccgtgcagtgcacggatttgcgaagaacgtgttggttcttgt

SEQ ID NO: 217372 - DNA, 241 bp, Homo sapiens
  chr16:89500005-89500246
  hypo
ccagagtaagagagaaggaacgggcttggacgcagcagggctgggcacgccaccttcacgagagtaagagagaaggaacgggcttggacgcagcagggctgggcacgccaccttcacgagagtaagagagaaggaacgggcttggacgcagcagggctgggcacgccaccttcacgagagtaagagagaagcaacgggcttggacgcggggactgggcacgccaccttctccagccccaga

SEQ ID NO: 217373 - DNA, 76 bp, Homo sapiens
  chr16:89504486-89504562
  hypo
ggccaggagggcaccgcaagcttggacacagcaggggcactggagatgggtccacgaaccgcgtgcgcagcccagg

SEQ ID NO: 217374 - DNA, 37 bp, Homo sapiens
  chr16:89545055-89545092
  hypo
tctcctccagcagccggctacgcgcagctctccggca

SEQ ID NO: 217375 - DNA, 99 bp, Homo sapiens
  chr16:89548161-89548260
  hypo
ttggatgggctttcgtgttcagacacgtctggctgacattctcacgttacatgcggccttcccagcctttgtccccagccttcccgaagtcgaagatgc

SEQ ID NO: 217376 - DNA, 100 bp, Homo sapiens
  chr16:89577032-89577132
  hypo
gactgcacacttaccgcctcagctacttgggaggctgatctttttttattttagagacgggatctcgccctgttgcacgggctggagtgcagtacaatgg

SEQ ID NO: 217377 - DNA, 263 bp, Homo sapiens; identical to SEQ ID NO: 204348
  chr16:89614907-89615170
  hypo

SEQ ID NO: 217378 - DNA, 153 bp, Homo sapiens; identical to SEQ ID NO: 204349
  chr16:89627717-89627870
  hypo

SEQ ID NO: 217379 - DNA, 117 bp, Homo sapiens
  chr16:89647543-89647660
  hypo
acccatcacatggaacatcccgtcacccgtcacacggaacattccgtctcccgctgacacggaatatctgatcacccatcacatggaacatcccatcacccactcacacggaacatc

SEQ ID NO: 217380 - DNA, 300 bp, Homo sapiens
  chr16:89647764-89648064
  hypo
catcacacggaacatcccgtcacccgcagctgcccctgcccctttgtggccagctccccgcctggttcgtctcttctggaattccacgtccatgaatcacagcgcgtgttctccctgctgtggaattcttttacccaacataatgtctgcgtgactcatccccctgcagcctcggtcggagctggcgtgccatcgatcctgttgtcctccccattttttagataaggaaactgagagttagggagggcacagatggaagaggatggcacggacacagaaatatggacatgctttttttgt

SEQ ID NO: 217381 - DNA, 56 bp, Homo sapiens
  chr16:89649562-89649618
  hypo
gctccttggcaccttcgaagaggagtgggcggtggggtcctgggccggcacctcgc

SEQ ID NO: 217382 - DNA, 175 bp, Homo sapiens
  chr16:89649648-89649823
  hypo
ggacatgctgggcgtgagggtccggggccgtttgagctgcctcgcctctgcttctgcgggttctcacctgggcctggagagggtcagggcagccctgcttacctgtggaggggcgtccgccacacctgtgcaggtgcaggccagctgggctgtgagctgcttcctggcttccacc

SEQ ID NO: 217383 - DNA, 146 bp, Homo sapiens
  chr16:89697117-89697263
  hypo
cggggctgggggtgccggggctgggggtgccggggctgggggagtttggcctggggagttggggctgggggagctgggggtgagactcgtgtgtgcttggcttggggctcagtttctctgggggtgagactcgtgtgcccttgggt

SEQ ID NO: 217384 - DNA, 224 bp, Homo sapiens
  chr16:89713325-89713549
  hypo
atgcctgctgccgcgggtggacatctttccacacctctgcatgcttgtctgccatccgagcctccccacaaggagccaggtgcctgcaggaggcccccgccgccctgcccaccctacctgtcagggtcctggcagggacccagcacagaggatgcttggtgacgtcagggagcaaccacaggtatgcagagacagcacgtcagcctgtgagccacccctcccga

SEQ ID NO: 217385 - DNA, 31 bp, Homo sapiens
  chr16:89713636-89713667
  hypo
cctgctgctcgaacctgtccatcactgagga

SEQ ID NO: 217386 - DNA, 47 bp, Homo sapiens
  chr16:89715825-89715872
  hypo
cagttcacaccttcgttcttcttgcggatggcgttctcggcatacac

SEQ ID NO: 217387 - DNA, 65 bp, Homo sapiens
  chr16:89755908-89755973
  hypo
ccatttctgggtaaacgtaagcatccggttgctaatgcccataatccaaacgtgtcactgcagag

SEQ ID NO: 217388 - DNA, 42 bp, Homo sapiens
  chr16:89763793-89763835
  hypo
tgtagccacaagcgccgctgggcgtcgccaagcagcacacgc

SEQ ID NO: 217389 - DNA, 837 bp, Homo sapiens
  chr16:89763872-89764709
  hypo
agtgggcagcatgcagctggcgacaggtgtcgcagcagagggtgggcagggcgccaggggacaggcagctgtgtgcctggtagcctgggggctccgagacagacctataggctgaggctggtaccccctctgcccgaatacgcctcgggctggccgctgcagagctttcaggggtggccaggtccccaggcctactcagctcacggcgcagagagaggaaggagaaggcggaaggttcaggttccagcccctcctccaaggccccatatggtgggctgctggcctgcggcagctcctcagctgggggctcccaggcccggcccccagtgccccacagtttggcactctgctcccagagtggtggcctgtaggccagctccgccgggggcgagtcagggcctggtgacggctccccatacaggctggcgtcctccgacccctcgtcttcctgcaagtcccggtataagtccagtggggccctgtaagcagcaggggagcctcgggggggcaggggtggcggctcctcatcctgggccagccgctgctgcagccaggccacacaggaggccacgtccccgctggcacgccgtgcctgcagcagctcctcagctggcagcacactggtgcccagctgggccagcacctcacccaggatctcacactccagccggagggcgaagcagcccagggccacctgcaccagctggcaggcggggggcagggcggtcaccatgagccgatggctgtctctgcgtacgtagcccatcttctggaagctcttcaggaggaggtcgtctgagagcacacccttcagcacgtgcacgtagcccccagaga

SEQ ID NO: 217390 - DNA, 75 bp, Homo sapiens
  chr16:89800299-89800374
  hypo
gagggtctctcaccgagtctctccttcagaagcacatcaaggagcaccacgaggaggtccgggagcggccctgcc

SEQ ID NO: 217391 - DNA, 85 bp, Homo sapiens
  chr16:89807744-89807829
  hypo
ctacacaagaaacctgaagacgtactcagaagaacccctgcagggtggttataatcaccaaaaccctgggcgctgctgtcgatcc

SEQ ID NO: 217392 - DNA, 102 bp, Homo sapiens
  chr16:89815125-89815227
  hypo
cctggaagctgctgccgcagaggacagacgaaggcaggcggaggaggatcctggaaagaaggggctgtattggtggcgacagcacagcgtacactctgctcc

SEQ ID NO: 217393 - DNA, 38 bp, Homo sapiens
  chr16:89830047-89830085
  hypo
taaaacaagttcccaggggccgagcgcagtggctcaca

SEQ ID NO: 217394 - DNA, 208 bp, Homo sapiens; identical to SEQ ID NO: 204350
  chr16:89894364-89894572
  hypo

SEQ ID NO: 217395 - DNA, 44 bp, Homo sapiens
  chr16:89899919-89899963
  hypo
caggttcagctcagcccctacgccctgctgggctcaggggcagg

SEQ ID NO: 217396 - DNA, 162 bp, Homo sapiens
  chr16:89900815-89900977
  hypo
acctgcccgcactcgcggttggccatcgtagaagcctggataagcatagcccgtgtgaatctgtgaacctgcccgcactcgcggttggccatcgtagaagtgtggataagcatagcccatgtgaatctgtgaacctgcccgcattcgcggttggccgtcgta

SEQ ID NO: 217397 - DNA, 213 bp, Homo sapiens
  chr16:89947431-89947644
  hypo
ggggctctgtttacataacacgtctatactgccatggattttctcaacgggcgtaagttgctcctgacttgtctcagcgggcgtttaagatgctcctgaatcgtatccttgtcatgtgggagcctccattggagagaaagccgactgaccggcaagcacagacctgccctgtgctttcttctcttcagcaaccgcagccggggtgtctgtctt

SEQ ID NO: 217398 - DNA, 208 bp, Homo sapiens
  chr16:89960587-89960795
  hypo
ggctcagtgcaggcgagcagctcagattcccggcccccgtgcagcccccggacggcccccacacggccccggacggcccccgcgcagccccagacagccccggacctggacagtccccgtacagccccggtgcaaccctggacagccctcatgcagcccctggacagctccccttgcagccccggacggcccccgcgcagccccagac

SEQ ID NO: 217399 - DNA, 310 bp, Homo sapiens
  chr16:89966590-89966900
  hypo
aaaggcaagagaaactggcacggtggtagactgctcggaaactcgcgtggcgggctgctctcggaaactcgcgcggcagtgggctgctctcacagactcgcgcgggggtgggctgctctcgtctgtaaattttccacattgagagcaccaactgctcagcttcagagaggagcctgggcggcaggtgggaccctcactccccacggtgtcctcgctccggctcagtctacttctcaggccctcccacgtcctctgtatcttctgcatgcggaaagccccccaggtggacgttttaagttatctttatgct

SEQ ID NO: 217400 - DNA, 398 bp, Homo sapiens
  chr16:89971726-89972124
  hypo
gttcccgggtgcctcgggctggagtggtgccttcgggtcttgcagtgtttccacatgagctgtgagatgatgacgagtctctcacagcagcatcttgggagtaaagaaatctggcagagacgagaaagagtctcctgtcctgtgtgtgaacacttcggaggctcatgccctaatatgctgcaactgacaggcatccccttgctgttcttgtctcgtttgtctgcgcccttggccctgtgctagttctgtgcatcagcaccgtggctctgtgcagtggtgtggccaggctcaggaccgcctgggagtggtgcccatttgcatctccacagtgaagtctgtgtgccgcggacatgaggtgtgcccgggggtgcccaagaggcgctggtgcccccagccgc

SEQ ID NO: 217401 - DNA, 440 bp, Homo sapiens
  chr16:89972235-89972675
  hypo
accagtgcctgtgcctgtagccgtagcagtgacgatggtgacacacccaggtgtcccttcatggagatgaactcagtgacttcccacaagaagccactggctacggctctcatcgttcttgttctttggatgaagaggctgagtcactggccatgtggctgggattggtccccagaggctccccagccgcaggccagggaccagccatggtgcctctgctcgagagtaaagtgtacagtttttgcagccaccagagatgcagcgagatgcctcgtgctgggtgggggtgggggccgaggctccatggcggttaccatttcatttgctgtgctttatctgctgtgccttgtttctccccggccctaggcggaaggtgctctaccagcgtgcacccaggaatatccaccgccatgtgatcctctctgagatcaaggaagccg

SEQ ID NO: 217402 - DNA, 496 bp, Homo sapiens
  chr16:89972802-89973298
  hypo
cccagccccgccacggcaggggcagggtctagtgcagagggctcctcctttcctggcagcccgggttcggatgcttgttgttttgagagagaaatcctttggggctcagagcacaagctgagtcgtcaccgtggtgagctgctccatccgtggtcttgtgagcgcgtggtgcggctgctgggggattctctgtagtcgtggggtgtagtcctgctctgacgcctcctgtgctggaggtgccgtttctgtctcaaaacctaaggagtttgtactgttgttaagggataagatagaacgagtgagaaaaccagcaagtcagagggtcgcaggaccgtggaccgtccactggggacagcttagtgcctcctggtttaacttcagctgctctgcgggcccttatgaccggcatggctggctttgtctggggctgtgagcttctgactctcctcagtagagtggcagcacgtggcactgtgcaacccgagggcagctcagg

SEQ ID NO: 217403 - DNA, 341 bp, Homo sapiens
  chr16:89985819-89986160
  hypo
agcttggtggagaacgcgctggtggtggccaccatcgccaagaaccggaacctgcactcacccatgtactgcttcatctgctgcctggccttgtcggacctgctggtgagcgggagcaacgtgctggagacggccgtcatcctcctgctggaggccggtgcactggtggcccgggctgcggtgctgcagcagctggacaatgtcattgacgtgatcacctgcagctccatgctgtccagcctctgcttcctgggcgccatcgccgtggaccgctacatctccatcttctacgcactgcgctaccacagcatcgtgaccctgccgcgggcgcggcgagccgt

SEQ ID NO: 217404 - DNA, 102 bp, Homo sapiens
  chr16:90044787-90044889
  hypo
aggagggaaaactggcgtctctctcactttctctatatcgtcttgacagtacggttgcttttcttggtgtgattctgtcttctaaaatattagaaccaggct

SEQ ID NO: 217405 - DNA, 95 bp, Homo sapiens
  chr16:90053009-90053104
  hypo
caccgcccccggccgacacttggtcattctaagcttccagtggctctcatattatcttggatttccgctgcatcgtatgttcttaaagtaattat

SEQ ID NO: 217406 - DNA, 189 bp, Homo sapiens
  chr16:90053307-90053496
  hypo
gtaaaaattggaatcgtagtggtgtgggcggtttctttgagacgtatgtttaagcacagagtaggggctgcagtggggtgagagaaggtgaggcaggtagaattctggagattctctctcagattctagtggcagggcccgaagtgcctgtggtctcctgctggatggagctcccggatgtcatctggg

SEQ ID NO: 217407 - DNA, 135 bp, Homo sapiens
  chr16:90059132-90059267
  hypo
caactctgccaccaacgtcgtggtgttggctggcaccaaccgccctgacgtcctggacccggccctcatgcggcctggccggtttcatcgccagatttacactggtgagtacccctttctcggggttgggccttt

SEQ ID NO: 217408 - DNA, 78 bp, Homo sapiens
  chr16:90066540-90066618
  hypo
ggccaggtgtccttcgacttttcccgacacggcaagaccctggtggagaagctgtacggcgaggcaagcgcccagctc

SEQ ID NO: 217409 - DNA, 64 bp, Homo sapiens
  chr16:90066981-90067045
  hypo
ggaggacacatcccttcccgaggggctgaagggttggaaccgcggacaggaggaggaagatgtg

SEQ ID NO: 217410 - DNA, 202 bp, Homo sapiens
  chr16:90068205-90068407
  hypo
ggtgggtggatgcgtgtctaggtcacctgggatgagacctggggaagacgcccatttgcatatgtcctgggtgagcggccggaggaggaggccctgcttgtgggtcagctgggatgggacctgggaagatgcccgtttgcagatgtcctgggtgaacagcgggaggaggaggccctgcttgctgccccgggcactgtttgtt

SEQ ID NO: 217411 - DNA, 200 bp, Homo sapiens
  chr16:90072510-90072710
  hypo
gccccgtgtgtcccccaggaaagccggctggtctccaagtgaggcgaagacccgtgcccagcagacaaggccggtctcggggctggcagagagctgcccccagggtgtgtgtcaggaggtgacggctggagcctcgtgggcgggtgaagtgtgtctgctgggtcagcactgcccagatctgccatcgtgttcggacccca

SEQ ID NO: 217412 - DNA, 152 bp, Homo sapiens
  chr17:512963-513115
  hypo
taattccactagtgtcgtaagaaaatcatctcactgctttgggtaagagacagcgaagaggagagaagagagaagagaagagaggaaaaaaacaatctcaaatgcatataaaattagtagacaaggccgggtgcggtggctcacgcctgtaa

SEQ ID NO: 217413 - DNA, 383 bp, Homo sapiens; identical to SEQ ID NO: 204356
  chr17:523544-523927
  hypo

SEQ ID NO: 217414 - DNA, 114 bp, Homo sapiens
  chr17:536283-536397
  hypo
ggccagtactcaacagtggccgtgagtgtactaggagctcaagaactgtgcgtgtacttgaatgcaagggcagaaaggagaagcggctaggatggaaagcggctatggatcata

SEQ ID NO: 217415 - DNA, 74 bp, Homo sapiens
  chr17:536432-536506
  hypo
cccgcaatcacgtcccgcaatcgatcacgccccacaatcgatcgcatgctgtgcatcccccacgagctgcctga

SEQ ID NO: 217416 - DNA, 464 bp, Homo sapiens; identical to SEQ ID NO: 204357
  chr17:576379-576843
  hypo

SEQ ID NO: 217417 - DNA, 49 bp, Homo sapiens
  chr17:591791-591840
  hypo
ttgttaaacagttaacggacattttatgagtccccgcctcaactacaac

SEQ ID NO: 217418 - DNA, 152 bp, Homo sapiens
  chr17:597509-597661
  hypo
gacctgctctgctgcggcaacctgtaacctattaatacgggatgggggagaacgccgacattcctgcagactgtcgaattctgggtctgactctgtaataccgctagtttgcaagagtccagaaccacaggttgaaacgtaaataactgaaa

SEQ ID NO: 217419 - DNA, 263 bp, Homo sapiens
  chr17:634276-634539
  hypo
gttcctacatcactaactgccgtgttaaagtaatttaactggcacctaacagaaatcatctgccactttgtaaaagtcatagactcataagaatctagagctggaagaccgttaaagagctagtgatccagcctccctctcatttcacggaccagcaaatcgtggcccagagagccgagcccagctgttccgaagtcctcatacgggattttggtcagcattttgcatgacggtgatctgaggagacccgtcatacctttcat

SEQ ID NO: 217420 - DNA, 138 bp, Homo sapiens; identical to SEQ ID NO: 204358
  chr17:635798-635936
  hypo

SEQ ID NO: 217421 - DNA, 171 bp, Homo sapiens; identical to SEQ ID NO: 204359
  chr17:635959-636130
  hypo

SEQ ID NO: 217422 - DNA, 257 bp, Homo sapiens
  chr17:662966-663223
  hypo
aagacaatagaagagcgtatcgtcaggcgctgggaatggcaccacgacaaggcattaatgtggattcacttgcacagctgctctcataaaagctacacgattcagaggtaaccctaactatccgcaatcccaaccaaagtcatgttcatgccgctgtcctagtctggacaatcatctgtcactcatccaacacagttatatacagaatgcgcagtcccagcaacagtgtagattacagcaggcgttctctacctgga

SEQ ID NO: 217423 - DNA, 137 bp, Homo sapiens
  chr17:663955-664092
  hypo
aatgattcctttttcgtaagtctcctcccggcctactcttctgatgttggttctgtttagtttgggcatcttaattaaaaaggaagccttaagccgtgcccagtggtcacacctatagtcacagccacttggaggct

SEQ ID NO: 217424 - DNA, 84 bp, Homo sapiens
  chr17:692538-692622
  hypo
gaatcctatgaaaggaatgacgtcagcagctctgaatcctaatgtcattgtgatccgtttcccttagattcccttagcctcagc

SEQ ID NO: 217425 - DNA, 327 bp, Homo sapiens
  chr17:692652-692979
  hypo
ctcattacatttctgtctcttctcatcagaaatagggattaataggcttggctctaaacagactttcctcacagttggagcacgcctaaaatgtctcttacaccttgggaggtggaggggacagagagtaccattcatcagaaacaccccagccaccattaaaagtaaactaatagtggcacccgttgttgagacttgcctaaattgctgctcgcagctctttctcagtcacgccttgctagaatacgtttctgtgccagtgtgagagctacgtgctggggttctgtgatcagtacccgcttactcgccccattatttagtgctctg

SEQ ID NO: 217426 - DNA, 464 bp, Homo sapiens
  chr17:693367-693831
  hypo
acttgcgctaacaagctgtgcgggggagggtgggaggccatgcagtcactgcgaggccccaccctcggccactctcccagcccgcccgtggtgaggagccgcccctgggaaaggccaggcgtcgcaggctgctgccggggttgcctcttgcctcattgcctcatctctagagtgttccctgctccggtgcagactgaacgttgaagcccaatgggtcttgatgaaactatagatctgattctgtcactgctttgcttaagatccctcaatggcatgatactgtcttctgataaaatgccaaactcctcagcttcccataggaggcctcctccgtgttggcctgcccacctcccacctcctgtgccactacagccccagcgctgattgaccggctcactgcctgtgccaccacacccccacccgctgattggctggctcacctcctgtgccgccacagcgccacc

SEQ ID NO: 217427 - DNA, 92 bp, Homo sapiens
  chr17:835941-836033
  hypo
gtgggcagcgagtgggctgtgtggtccccggacaagcagctgagtgggtggggagtgccttgttgtggccggcttcgcataagtcatctgcg

SEQ ID NO: 217428 - DNA, 150 bp, Homo sapiens
  chr17:836153-836303
  hypo
ctgggattccaggcgtgagccaccgcgcccagcccagcccgtcctcttgaacctgctcagtttcagtcgtcatgaccacttgtaatatcccttcccactaacatcaaaggctgtggcccgaagctcccaagtgggcgaaaaagtcccgag

SEQ ID NO: 217429 - DNA, 79 bp, Homo sapiens
  chr17:851784-851863
  hypo
cgctggggacctagcggtgaacaagcagcctgggaaaggaatgtttaaaagctcccgggcgactgaagatcagccaggg

SEQ ID NO: 217430 - DNA, 136 bp, Homo sapiens
  chr17:851893-852029
  hypo
caaacgcttgaggcaaaacctaagacagctgggtcccaacgcggggcctcaccccggcccgtcccgccccagcgctcggaggctgagagcagcattctcagatggtactaaatccacatcccgggacacgaggaaa

SEQ ID NO: 217431 - DNA, 32 bp, Homo sapiens
  chr17:864608-864640
  hypo
agtgagactccgtctcaagaaaaaaaaaaaag

SEQ ID NO: 217432 - DNA, 64 bp, Homo sapiens
  chr17:916258-916322
  hypo
gcagccacagggccgggctgcccacctgctgcacagacgttccacctcccggctcacgccactg

SEQ ID NO: 217433 - DNA, 94 bp, Homo sapiens
  chr17:1244961-1245055
  hypo
ctcacctgattattattgagcgcttacgtgtgagattccagacattgcttagtaacgagcacagtgcctggtgcaaagctggtacgcaatgtta

SEQ ID NO: 217434 - DNA, 208 bp, Homo sapiens
  chr17:1375239-1375447
  hypo
ccggctctgcgcacgcgcaggttttccaacagccccaggtacttcacctggtggcggatcagcacctcgtcaaagcggcctggggtagggggagcgccgtggtcagcgggctggcgctgacggcctgtctcctgcaggggaggcccggccccgaagtcccccgtgggaggggcctaccgggctgtttggcatcattgggtttgatgca

SEQ ID NO: 217435 - DNA, 81 bp, Homo sapiens
  chr17:1376039-1376120
  hypo
gggggcaccaggtgacgtcttctggaaatgacgctctgctgagctttaaaggataaggaggaggggcgggtgaagtggcta

SEQ ID NO: 217436 - DNA, 135 bp, Homo sapiens
  chr17:1386690-1386825
  hypo
gtcatgggtgtgagtcggggtagggactgagtcccacccacatggagctgagttgcgacattcatctctggtcactggggggcaagagactgtgggattcctcacagatgtggcgcgggacgccaggatcatttc

SEQ ID NO: 217437 - DNA, 116 bp, Homo sapiens
  chr17:1387481-1387597
  hypo
atgaaggcggcctcgctggtgaagttctccagcagcacgaaatcctgcacccccacccggtcacgggcggtgagcgcactctccatggtcacccgaaccccgtcactgcccagggc

SEQ ID NO: 217438 - DNA, 207 bp, Homo sapiens
  chr17:1407972-1408179
  hypo
ataacactgtttacctaacgaggacatggtaggaactgatacaggcaaagccttggcgcacacctgcacgccaatcacaatgagctgttatttggaaataggtgcgtgcctcctccttagcgggagtctgccttcctcaccgtgccatcctttttcctcttgctggcaaggatgaccatgaatcctgaggtacgatgggcttgagga

SEQ ID NO: 217439 - DNA, 164 bp, Homo sapiens
  chr17:1410272-1410436
  hypo
cctggtgtcatagtcgttggagttcctatcaaacttgtaggtgggcgggaagagtaggcggccctcctggaactcccggagcagcgggtcatgtttcttggcaatgctgagctgcagacaaagtcatagtccccgtctcccagtagtctcgacccagtggccca

SEQ ID NO: 217440 - DNA, 142 bp, Homo sapiens
  chr17:1412248-1412390
  hypo
gcgtggggcagagggcggggaacagtctgcagacccaggctcactcgtggcggtcagcgtggggcagagggcggggaacagtctgcagacccaggctcactcgtgggggtcagcgtggggcagagggcggggagcggtctgc

SEQ ID NO: 217441 - DNA, 98 bp, Homo sapiens
  chr17:1412463-1412561
  hypo
aggctcactcgtggtccaggatgtttgggatgtctcgcccctcacaattctgcatctccaggatccggtcaaagtgctccagccgctggtaattgttg

SEQ ID NO: 217442 - DNA, 65 bp, Homo sapiens
  chr17:1451501-1451566
  hypo
ttccctggcctaatccggaacacgcaggtgggacccacagctctgctgcccgcccctgcctggcc

SEQ ID NO: 217443 - DNA, 324 bp, Homo sapiens
  chr17:1454051-1454375
  hypo
ataagttatgtcagacagcacggacttcgtcctgaaggcaaagggaagccgtcagcagttttggcgctgggagtgacagaccatccagactgaacacttgaagcggtgcggagaactgaaaggcagggagactcgttagaagctgctgtagtaatccaggcaagaggtggcaaggaagggacatgttggagacgctgaggagatggagtcagcaggacctgatgggacacgaagggcaagtgagagtgttgcggggcggagtcagcgggacctgatgggacacgaagggcgagtgagagtattgcggggcggagtcagcgggac

SEQ ID NO: 217444 - DNA, 202 bp, Homo sapiens
  chr17:1462651-1462853
  hypo
ggcaaagtctccgccagggccagaaccccacagaggtgccagggctagcagcacttctccaggtgccgtgcatgtgaaatgcagaccaagagccacccccagttcaaagctgtgaggcgggagagctaagacaaaaactcttggttttacccatacaagtccagccagtttccaagcttagacgttcggtccccagaccctt

SEQ ID NO: 217445 - DNA, 183 bp, Homo sapiens; identical to SEQ ID NO: 204364
  chr17:1588082-1588265
  hypo

SEQ ID NO: 217446 - DNA, 156 bp, Homo sapiens
  chr17:1694900-1695056
  hypo
accttgctggtgggcgcgtcagtggaactttcctggagggcaattttgcaagctgtatcaagtgccttaaaaatgttcatagaaaagtactcttatcatttgaattatctttattattaaaaaaactaactgaggctgggcgcagtggctcacgcc

SEQ ID NO: 217447 - DNA, 120 bp, Homo sapiens
  chr17:1695176-1695296
  hypo
tctcaaaaacaaacaaaaaaccactaattgaaattacaaaaggaatacgtggtagtcagaaaaaaatttaaaaattgaacattacagagaaaatgacagttgcttgtaatgccatcaggc

SEQ ID NO: 217448 - DNA, 204 bp, Homo sapiens
  chr17:1756126-1756330
  hypo
aatctaaattcttaccatgtcggttggctccttgaagatacggtgcgtagcgagaacactgcattttaattaaggaactagttgggaactgaaaaccctgcaatcacttgataatgatgcggcgaaagatgaagagaaatatttatgtaaacagatgacaaatggaaaatagttcatcacaatgatcatcggggaaagcatttt

SEQ ID NO: 217449 - DNA, 297 bp, Homo sapiens
  chr17:1775556-1775853
  hypo
ccctagcaaattcaccgagtgccatggaatgcctcagcacgaattctaatccatgggagtctttgacaaaataaaaaatttacactttcccagagcattccttctacccaagtttaaatctcttaacccaaatcctttgcactaaaacggggtttcccttttgatcttcaggactcgggcagccgcaagtagctcctccagcgccagcagccagcccagcagcaagcagcaggccccagccgcagaatggaagctcgggaatgggtgagatgcctcacggggcgtgcgctgaccagg

SEQ ID NO: 217450 - DNA, 402 bp, Homo sapiens
  chr17:1783887-1784289
  hypo
cgagtctctgatttcggtggacggagcctctccgtgctgtcttcaagcactatcattgcgaatcctgacatcccagaggcctataagcttcgtggatggtaggttttgtggggctaaacaaagggttacttgaggctgggctttgagaaaagctggttacaatcagcatgggagctttctgccaagcagaagccttcgtccctgagtggtgcagcttccgtgtttcttgaaggcattatgccttctgtgaggagggctttaaagcccttaaacggacaaacctgtaatcccaggacaaacctagagagtcggaggaggcaattagcatgtaagtgctgcctgctgacctcgatcctgccaaaggaggggacggccaggcttcagcagcggtgtgctgaaggc

SEQ ID NO: 217451 - DNA, 119 bp, Homo sapiens
  chr17:1784821-1784940
  hypo
ccacacgtatctgccgaactgcagggcccgttcatagtctgaccagaactagccacagatttgcttttttcttattgcttgattttcttttaggctctggagttcgactccaggttaat

SEQ ID NO: 217452 - DNA, 161 bp, Homo sapiens
  chr17:1792141-1792302
  hypo
gtcagtaagtagcctcggtagatgagaaccacggttgtgttcacggaggccctcccgtgtgccaggcactgtggtcacaacagtagagacaaagcattcctggtaggaagcccgcagatgagtaggtgtggaagagcttatccatccgctttttcatgcca

SEQ ID NO: 217453 - DNA, 466 bp, Homo sapiens
  chr17:1801623-1802089
  hypo
ctaacaccaaccacgctttgaaatgtgtacagacagtgagctggtaagaaaacagtaattatgctagtgggcctttcagtcagcaaaagcatgctcgctctgtgtgttcctaatcatattaattatctatccggtggctgcaacacaccgcctgccattggccgcacatctcgccgtcgtaccccggcagtgcggcggtcactctgcagccagaggacctgctgttcatcactgcacatgccgcctgcggaggcttttggatatggggagtgatggtgtcctgtctgtctcccccctcggtgtctgccgttgacataggggccagccagccctagacgggatgacttccgttcctgaggacagacacagagggactcctgctcagcctcactaattgtttagacacattccttcctacccttctctagtctcaggagatggtaactgggtcgcatttcagtctctg

SEQ ID NO: 217454 - DNA, 52 bp, Homo sapiens
  chr17:1837750-1837802
  hypo
atcatgatctgtgcgggcaagggaagtgccacgaaacggagcaccagggtgt

SEQ ID NO: 217455 - DNA, 174 bp, Homo sapiens
  chr17:1938562-1938736
  hypo
tggcagcagttcccacggcagtgttctggccagagcctcctcttcctgatgcaggaggcgtgtaggtggtgccatgtgctatgggggagctgtgcctgggtccccccatcctgggcaccaagggccctgcctgcggtggggaggtagtgggggtccggacgagagggccctgcc

SEQ ID NO: 217456 - DNA, 53 bp, Homo sapiens
  chr17:1940206-1940259
  hypo
ggctgcacatccccccgactgtccaaagaggtggaggccgttgtgtaagttaa

SEQ ID NO: 217457 - DNA, 31 bp, Homo sapiens
  chr17:2015469-2015500
  hypo
ctgattaaatttcctattaccgcttccctct

SEQ ID NO: 217458 - DNA, 148 bp, Homo sapiens
  chr17:2146555-2146703
  hypo
aagcacactttctagtccaccgcccgtggagcagagtttcttccagtggaaccaagcctttccgcttctcaaaaaagttaactacaacggtatgtggaaactgacatagcccctacctccactaagagagccttctaggccgggcgtg

SEQ ID NO: 217459 - DNA, 156 bp, Homo sapiens
  chr17:2182384-2182540
  hypo
tggttattacaaaggcgaaatggccagtctcagggatcaggaaacgcttccttgaaaacgtgacatttaggctgagacctgaagggtaagaaagaaagtgactgataaaggcagaaataccagtgagaggtaagagcggtgcgggcagagagatga

SEQ ID NO: 217460 - DNA, 376 bp, Homo sapiens
  chr17:2291796-2292172
  hypo
ctcgccccatctcatctccaggactcgcctccctcctggctgctggtctgcacctgctccccgaccccctaggcgactctccactgtgcccgcctgtgacgcttctcgacgaggctccatttacatgctgctccccatcaccctgcccactcccctccagactccctgggctgaacaacccccaagcctaggaacgtgccccctgtacttgggctaaaccgatccatgagaaatggctgttgcgtcccatgacccagctcccctccacactcagtctttcccgtgctccaacccgacacttcatcaatcccaccctttcaagtctcacagacctccctgctggcagcttttcgcccaggcacgtcatgaccaatgt

SEQ ID NO: 217461 - DNA, 50 bp, Homo sapiens; identical to SEQ ID NO: 204369
  chr17:2302239-2302289
  hypo

SEQ ID NO: 217462 - DNA, 202 bp, Homo sapiens
  chr17:2326291-2326493
  hypo
aaaaggataaaaaagaaaaaacaccaagtcaggtttgaagatctttttctgctaaaaggaatctgacgactgctactgatcattccagtcgtacctggccacactgacagcgcacacgcacacatgcagacaccacaggttctgattactgggggacgtcttctaataagaactaaccagcggcctcacactgcatacatac

SEQ ID NO: 217463 - DNA, 39 bp, Homo sapiens
  chr17:2326810-2326849
  hypo
agctggggaagaagcgtattaagccggtgtgtgggagga

SEQ ID NO: 217464 - DNA, 120 bp, Homo sapiens
  chr17:2388546-2388666
  hypo
tgtctcccatcacccccatatgggaccgtctagctgaggggaaacaagctgcgggaaaacaagctgattctacactatggtgagttgtataattatttcattacatgaaataatacaacg

SEQ ID NO: 217465 - DNA, 203 bp, Homo sapiens
  chr17:2595624-2595827
  hypo
gccttggcgtttggacgggcggcccctcacctgagggccaccttgagggccttgggcccgtggtacttggtgctgacggccagcgcgttctccaggaagcgcagcgacaggtcgtactccatcaccccgtgcagcaccagcccgatgttgttctgggggcaggcggtggggggccctggtcagctcccggtcccctgggatgg

SEQ ID NO: 217466 - DNA, 207 bp, Homo sapiens
  chr17:2599066-2599273
  hypo
cttgacccccagccccgtgtcctgaggcttggaggccacggtgttgggggagcacccagcatcctggaaccagacacagagcctgcgggaggaggaggaggatgggcagcccccactgagctctggccccgtcccccagccatgccaccatccagggctcagaagactggattaccagctgccagcccacacggtgggctcagcagg

SEQ ID NO: 217467 - DNA, 85 bp, Homo sapiens
  chr17:2603725-2603810
  hypo
gcagctccctcgtcgtctgcagctcctcattccagtctcgggtctgcagagagatcagggagggaaaaacgagctcagcctgtgc

SEQ ID NO: 217468 - DNA, 34 bp, Homo sapiens
  chr17:2616132-2616166
  hypo
ttctcggccgggcggtgcagcggctcacgcctgt

SEQ ID NO: 217469 - DNA, 77 bp, Homo sapiens; identical to SEQ ID NO: 204370
  chr17:2627362-2627439
  hypo

SEQ ID NO: 217470 - DNA, 44 bp, Homo sapiens
  chr17:2684790-2684834
  hypo
gcacacccctgtgtgtgcaccgtgtgagcacgtctctgtgtgag

SEQ ID NO: 217471 - DNA, 240 bp, Homo sapiens
  chr17:2684894-2685134
  hypo
tgtgcaggtctctgtgtgagcacgtctctgtgtgagcacgtctctgtgtgtgcaggtctctgtgtgggcacgtctctgtgtgtgcaggtctctgtgtgtgcacgtctctgtgtgagcacgtctctgtgtgtgcacgtctctgtgtgagtacgtctctgtgtgtgcacgtctgtgtgtgcacgtttctgtgtgtgcacgtctgtgtgtgcacgtctctgtgtgtgcaggtctctgtgtggg

SEQ ID NO: 217472 - DNA, 44 bp, Homo sapiens
  chr17:2685194-2685238
  hypo
tgtgcaggtctctgtgtgggcacgtctctgtgtgggcaggtctc

SEQ ID NO: 217473 - DNA, 780 bp, Homo sapiens; identical to SEQ ID NO: 204371
  chr17:2756656-2757436
  hypo

SEQ ID NO: 217474 - DNA, 287 bp, Homo sapiens
  chr17:2908449-2908736
  hypo
cagatgagaggctgcggatggccccacaccgtccggccccacttctaggaacagggtcagggcctgtgctggcgatgctcacaggagtattttgtttgtgttctgggaagaggaggagggagaaggtgagtagctttgtaaggagcgtggctcccgtaggggcagcgctcgtctcttccctccaggtccgtaccatgactctgtttcactcaggtctctgtcactgcgcgggaagatgtgcccacctttggtccacctctgcccagtccccccgttttccagaaggt

SEQ ID NO: 217475 - DNA, 35 bp, Homo sapiens
  chr17:3375581-3375616
  hypo
gaaggcggagagccgtcagcgaggcagcgccgggg

SEQ ID NO: 217476 - DNA, 72 bp, Homo sapiens
  chr17:3500360-3500432
  hypo
cactagcaggagtcgctgtggacgcccttcggcactcaaggaaaaaacgcttccagcgatgcaagcagctgc

SEQ ID NO: 217477 - DNA, 43 bp, Homo sapiens
  chr17:3577299-3577342
  hypo
cccatttaaaagccagtttccggccaggcgcggtggctcatgc

SEQ ID NO: 217478 - DNA, 120 bp, Homo sapiens; identical to SEQ ID NO: 204374
  chr17:3599053-3599173
  hypo

SEQ ID NO: 217479 - DNA, 169 bp, Homo sapiens; identical to SEQ ID NO: 204375
  chr17:3599244-3599413
  hypo

SEQ ID NO: 217480 - DNA, 67 bp, Homo sapiens
  chr17:3664936-3665003
  hypo
tggcccacccctcaccgggtgtaggagtcagtgttggcatcaaggccgaggccgacacctgcaggag

SEQ ID NO: 217481 - DNA, 609 bp, Homo sapiens
  chr17:3716185-3716794
  hypo
ttaagatgtcttgccgaagtagcaagagcggagggtgactgtgtgagcaggagcgagagggcgccagctcctgcgggggaggttcctactgcgcgccccaccctgtgcaagaatgtcaggctttagggcagctgccataggccccaggggcatcaggactctgcctctgaaccagagctgctttcccgactaacttcaatctggagagatggtaagttatctaaccggctcttcttttggcgagactgctctttctccttaatcagagccccccatgccctttgcagctcagagtcgtcttcctcagcgccaggcgccctgtgatccactttcttcgtattcttttctttggtcttgggtgcagatcctaggcgagtccataaattacctgtttggatgagatggcatttcactttcgcagtcagcgctaagaaccagggtagcactgagggggcagcagcactgccaacacctgctgtgcaggaaacgccagcagtctgtggagcctgccaccacagtgcagccttgggcaggcaaaatctcatttcccgggccgcagcccctgcccgcaaacggaagggtctggacccagcacgggattctcaccgt

SEQ ID NO: 217482 - DNA, 73 bp, Homo sapiens
  chr17:3721569-3721642
  hypo
actgagattccacttcgtcagcatacatagtcattttcatgcttttctttggtgaaggcgtggaaatcatttt

SEQ ID NO: 217483 - DNA, 175 bp, Homo sapiens
  chr17:3844263-3844438
  hypo
ccatagcagtgatctcgttaaaggactgcaggttctccacgatgcgggacttgtgtgcgggctccacgcgggcgaagcagcgggcggtgcggcaggcctggcgctgctgctcggggctgaggtcatcaaactcgcggcccgtgtaggccttgcccgccacgtcttccgtgtcccc

SEQ ID NO: 217484 - DNA, 135 bp, Homo sapiens
  chr17:3844806-3844941
  hypo
ccaggcagcgcagcgtgtctgagcctgagccccaatcccggatctttgccaggatctgctccctggaggtgggggtcaggggtgctgtgcggctccccacgcggactgagctacagcgctcgatcacactctcag

SEQ ID NO: 217485 - DNA, 184 bp, Homo sapiens; identical to SEQ ID NO: 204376
  chr17:3867210-3867394
  hypo

SEQ ID NO: 217486 - DNA, 91 bp, Homo sapiens
  chr17:3884835-3884926
  hypo
tgctgtgtggcttcgcgggccgaggcgctcagcactgagcccagggcctgttggtgaaaaacgcgtcgctccaggcgtcctaagcgccagt

SEQ ID NO: 217487 - DNA, 399 bp, Homo sapiens
  chr17:3980396-3980795
  hypo
cgaagaccacaaggccagcaagtgccgtcctaatgcattcctcctggaggaagaagcagtgcgaatttcagtacaagactcacttttaaagggatttttttttgtcttttgatgaagtagaggagcacttgtagaagtgaaattccatgcctgactaacccagctgtcagcctctccttttccttctgtttacaatgagcccgtgcattaggtgtaccaatctaacaggccaagctctaggtggcaggacccaatataagtgttttcgtcacagctgctgggaccaagtttgatggaactacattttccacgtataatttgtcagcacccgttgggtttcatataattttctgtgagtttacagaacatgaatctaattattctcggtaatcagcaatg

SEQ ID NO: 217488 - DNA, 31 bp, Homo sapiens
  chr17:4039291-4039322
  hypo
ttttttttttttttttgagacggtgtctcgc

SEQ ID NO: 217489 - DNA, 31 bp, Homo sapiens
  chr17:4039622-4039653
  hypo
gtgagactccgtctcaaaaaaaaaaaaacaa

SEQ ID NO: 217490 - DNA, 85 bp, Homo sapiens
  chr17:4076474-4076559
  hypo
ttaaaacaaaaataccggtaccaaaagtaccaaaataaagtacccgaagctggtgaggtgccccagcggccggttttgcagctcc

SEQ ID NO: 217491 - DNA, 45 bp, Homo sapiens
  chr17:4161526-4161571
  hypo
tttcagaagtagggccgggcgcggtggctcacgcctgtaatccca

SEQ ID NO: 217492 - DNA, 141 bp, Homo sapiens
  chr17:4215641-4215782
  hypo
taaactgcaggggatgtaaccgaatgaattctagaaaatattaacaactgagaaacaaaaaacaggaggcggcacaaggtaaactgagaaaggtaagccagtgaaatagggaggccgaggcaggcggatcacgaggtcaag

SEQ ID NO: 217493 - DNA, 74 bp, Homo sapiens
  chr17:4236551-4236625
  hypo
actgaaatgaccttcgttcacatcaaaagtaatgtaaagaatgtgtgtatctcagccatcattttaaaagaaga

SEQ ID NO: 217494 - DNA, 36 bp, Homo sapiens
  chr17:4273440-4273476
  hypo
gcttactggctttagcgttcacgccacacagctctt

SEQ ID NO: 217495 - DNA, 377 bp, Homo sapiens
  chr17:4392108-4392485
  hypo
ctccaagttccagggaaccacgcagaggaacccacgcctatacagacacgggcgcagcggccccagaaccctgctgaggacttgagtggccgtgcagggatcctcctggcctgcccagttctgtagccccggtcttccctgggtccacgctctgaccccagcacagcgtatggggagggctggctctgcggggcccacgcttgccactgggttcagagcagctgggctcagcgggccctgtgggagatcgacagcttccaggcgggcagcagtggggaggcttgttctcatgttctttccgcctcccctggtgcccagccaggcgatcacttgctcactcaccgatggccaccttcgctgtgccaggctgtgcctgt

SEQ ID NO: 217496 - DNA, 87 bp, Homo sapiens
  chr17:4461986-4462073
  hypo
ggtctgaggtgggagcgagggctgcgctgcgaagcacagctgccagttgtgggttggtggctcgggccccagcgcccaggggtgtcc

SEQ ID NO: 217497 - DNA, 561 bp, Homo sapiens
  chr17:4500076-4500637
  hypo
agcctcccctgccccagacccgcactgggagatggcagctggaggggcccccgcagcaggcctgccgtctctccgcagggggaaaggcgaggcccgggccaggctgaagcggtcgcagagcttcggcgtggccagcgccagcagcatcaagcagatcctgctcgagtggtgccgcagcaagacgctgggctaccaggtgagccccggctcccctccggctgctgggacgccccagctaaaagcttgaccaagcgtcgcccctgtccttgttctcccgcctgggcaggagcccgctgaggctggggttaaggggtaggaaccacggtaattatgccttccgagtgggtgcccagctgccctcccgcactgaccccactcaccctgttgcagcacgtggacctgcagaacttctcctccagctggagcgacggcatggccttctgcgccctggtacactccttcttccccgatgcctttgactacaactccctgagccccacgcagaggcagaagaacttcgagctggctttcaccatggccgagtgagtatggtggctcctg

SEQ ID NO: 217498 - DNA, 541 bp, Homo sapiens
  chr17:4795536-4796077
  hypo
ctgggtagggcaacgcctgggtgaggtctgagggcagcctagggagtagggggggcacagggactttaccagcctacccgcctgggggtgggaaagccccagccccatcacctcagcgcccccccgccgccccctcggcacccctgtgctcccttcacagacctcgcagcaactccgcctggcaaatctatctgcaaaggcgggcagagcggggcaccccaaagcctccagggccccctgctcagccccctggcccgcccaacgcctctaggtaatagagttgtcccccaactcactctcacctctcacttctgccacccgcttccctggtgatggctccctctgcagtgcagctcagcaccccagagaagggagcaccgtgcctccctgaccctgactctgcccccccaacagtaaccccgacctcaggaggagcgaccctggctgggaacgctcggacagcgtccttccagcctctcacgggcacctcccccaggctggctcactggagcggaaccgcgtgggaggtatgtgagccagg

SEQ ID NO: 217499 - DNA, 499 bp, Homo sapiens; identical to SEQ ID NO: 204380
  chr17:4853393-4853892
  hypo

SEQ ID NO: 217500 - DNA, 358 bp, Homo sapiens; identical to SEQ ID NO: 204381
  chr17:4890353-4890711
  hypo

SEQ ID NO: 217501 - DNA, 118 bp, Homo sapiens; identical to SEQ ID NO: 204382
  chr17:4901561-4901679
  hypo

SEQ ID NO: 217502 - DNA, 157 bp, Homo sapiens
  chr17:4916076-4916233
  hypo
tgggggtacagaggcagcgtcgcctgtacgccatccagagtactgcccagcaagggcagggctgttataatggaaacaagtcaggagaaggtgctgtgggagaagggaatgggccgggttttcagcacagagcagcgtaacaatcactcaggtgttc

SEQ ID NO: 217503 - DNA, 55 bp, Homo sapiens; identical to SEQ ID NO: 204383
  chr17:4981985-4982040
  hypo

SEQ ID NO: 217504 - DNA, 247 bp, Homo sapiens
  chr17:5269054-5269301
  hypo
ctttagaaaatgaagccatacgttctgtgttcttttgcgtctgtgttcctccgttcaacagtgtactattcctactcgtgatgcacggagtgtttgttcattttcattgttgaatagtcatatcattatacggatataccgcaatttatccagactaatgttgatggatatttcagttgtttccagttctgggatattatgaataatgttcctttgaaatttttgtatagggcgtggtggacatgtt

SEQ ID NO: 217505 - DNA, 164 bp, Homo sapiens
  chr17:5392214-5392378
  hypo
gttctttggcttcacgccacaaacgtgcatgcttcggatctacattgcatttcaagactacctatttgaagtgatgcaggccgttgaacaggttattctgaagaagctggatggcatcccagactgtgacattagcccagtgcagattcgcaaatgcacagaga

SEQ ID NO: 217506 - DNA, 171 bp, Homo sapiens
  chr17:5405104-5405275
  hypo
tcattggtactgccgcaggctgctgggcactagtatctcctggcgtctctgttgcacctgaggttccacggctggctggtgttccttcctggaatggagggagaacaatcacttggatttatttgagtcccagtagattggagaggtccactggccggctttgttagttgc

SEQ ID NO: 217507 - DNA, 147 bp, Homo sapiens
  chr17:6023533-6023680
  hypo
ccctgcccacttccctctcccgagcagccccccggggaccggcagccctggcagggccagcccccgactctgcatctctcctgtcctcactctagagtggccggactttgtcaacagctacgcctcgtggtggtcctcgcacgtcct

SEQ ID NO: 217508 - DNA, 157 bp, Homo sapiens
  chr17:6023875-6024032
  hypo
caccccggagatgaaagacttgatcaatggctacatccggacggtggaccaagccctgcgtgaccacaactggacggggctgcccagggagtatgtgcccagatgataggcctggcccacgccgccgcccccgctgagtgacgcaatcgcaccacgg

SEQ ID NO: 217509 - DNA, 42 bp, Homo sapiens
  chr17:6470126-6470168
  hypo
cctgctgtacagcagcagcacgctaagaaaaataacaaccgg

SEQ ID NO: 217510 - DNA, 64 bp, Homo sapiens
  chr17:7077090-7077154
  hypo
agtcctcgcctcctccgagcccgtggccgtaccagtcgtccggctgctccggcctccagttcct

SEQ ID NO: 217511 - DNA, 160 bp, Homo sapiens; identical to SEQ ID NO: 204391
  chr17:7146355-7146515
  hypo

SEQ ID NO: 217512 - DNA, 67 bp, Homo sapiens; identical to SEQ ID NO: 204392
  chr17:7146588-7146655
  hypo

SEQ ID NO: 217513 - DNA, 114 bp, Homo sapiens
  chr17:7188331-7188445
  hypo
gttgccctcacccacgcggcccctcctacttcccgtgcccaaaaggctggggtcaagctccgactctccccgcaggtgttgttggtggagcgggcggggcgccggacgctccat

SEQ ID NO: 217514 - DNA, 572 bp, Homo sapiens
  chr17:7224753-7225325
  hypo
gacgaacacccacacggctccccacctaggaccgaggtaggacaaggacggacgatgttcagcccacctctccctgccacctccactcccaacccctcccctgtccctggagccagccacttcacccccagcctctctaggttccggccatagttcatcctctggagctgcccatcacgcctcacttcacagctggataccatccaagtggtcttcgtccggagctctggcagggaaggaggcagccctgggccaccaccgcctgccccgggtcccatctcccccggtgctagtgtggtcagccccagccgcagggaacctgcccacttctcatctagctcttccactttcacctacgagacagagaaaacataagctggccctgtcgtgatgggcctcgcagcccctctgtcacatcactacggcctacctcaaagacttcctcagccctcagctccttggtactgaagacaaggccatgagcatagccagcggcacgcactgccctcgtgccatcctcctctagagtgacgttcttgccgcaagtactgtggaatcggtgagccacgcca

SEQ ID NO: 217515 - DNA, 271 bp, Homo sapiens
  chr17:7227167-7227438
  hypo
gcgacagttgtggcggagggcggtgcggcccccgttagtgatgactgcgttactgccgtgcagctgatggaagcgcaggtcagagcccccggcccctgaggacggagagcttggagacacctggttgttcccctcagggagtggttcaggaactggagccacctctgtaaaagtggacatcacccatcaggtctctaggtgtctctcagacctcccaaggccaccctaacccccagccccagcccagcccggccctcacccacgtcgtcca

SEQ ID NO: 217516 - DNA, 259 bp, Homo sapiens; identical to SEQ ID NO: 204395
  chr17:7254485-7254744
  hypo

SEQ ID NO: 217517 - DNA, 1038 bp, Homo sapiens; identical to SEQ ID NO: 204396
  chr17:7254804-7255842
  hypo

SEQ ID NO: 217518 - DNA, 160 bp, Homo sapiens
  chr17:7367404-7367564
  hypo
ctcagctattccatctgggacgcagcctaactcacggagccttcttctcaagcccaaatggcagaatggggaaacgacttacgaacagggacaccacgtggaaacacaaggccctgctcggaatagtgtaatgactcccggacatgcctgtgctgccaca

SEQ ID NO: 217519 - DNA, 72 bp, Homo sapiens
  chr17:7368875-7368947
  hypo
tcccacctcagctaaccacagtgctgggattactgcagctagcctagtttcaggataactttctaggcccca

SEQ ID NO: 217520 - DNA, 177 bp, Homo sapiens
  chr17:7369222-7369399
  hypo
ccacgtgctcggggccccctcggaagcccactggtggaggcagggctgaggcgtccacccctgcaggaccaccagggccagcgcccccagctcccagccctgtagacccccgcgtgctggcccctcgtcggcactgggcctcatgggtctgcagccgtttgggatggatgaagcttt

SEQ ID NO: 217521 - DNA, 185 bp, Homo sapiens
  chr17:7460284-7460469
  hypo
ggggacaagctacagggctgggagggtgagttggggtttgggtgggatgggatgcctgcgtcgctgaggaaattggaaattgaggcgagggcaggcagaggcctggactcggcctgttgtccccaccccaggtgcactttgatgaggggaaggctgtctacctgaagctggacttgctggtggat

SEQ ID NO: 217522 - DNA, 101 bp, Homo sapiens
  chr17:7480063-7480164
  hypo
tccagtctttcagcgtaagccagagtcattcccaaggatgctggtttctctctgggggaagagctgctctgtgatggagcccatgcgtgtcatctgagcct

SEQ ID NO: 217523 - DNA, 619 bp, Homo sapiens
  chr17:7491960-7492579
  hypo
gccctggctacccagcccgctgggcgcagcaggcatggaagccgaccccgggatggagagcccgcggccctgttggggcacgctcgggagcgggcttgcgtgctgcacggctgttttcctcttggggagtcaggccaggaaagggcagaatgagctcggcctctccttgccctgggggctgggagaggaagctgggtcacacacaggccagaagcaggggggaaacggggcatctaactaggacacagtcgcatccaggggtcagtcacctgaccctacagggcccaccaccttcagactgagatggaaacgccctctgggagaaccctgatccgccccaccctacacaggccccggaggtactgggcctgcgcccgccacaccttggccgcgagtggcctctgcttgggtgggctcccgtcctccggcatccgcccccaccaaggctccagaagaggggcgcatgggcctccgtcttcggcccgcttcccaggcactcacccatagctgccaggcaggtaggctgtcgagtagctggggggtctgtacccaaagcctctgctcggttgggtggtcgcgtaccccggcccccagagcgggccgccgctggccaggttgc

SEQ ID NO: 217524 - DNA, 269 bp, Homo sapiens
  chr17:7493897-7494166
  hypo
aaacttaagccctcccaactccagtccctaaacctatatttctccactgctattgaattatggcaagttttagcttcagtcgtccaagtcatgaggggggagccaggaaacccaggacaactccccaagttaagaggtctgtgatgcgcatgccggagaaaaagcctggagccagaacagaacaccaccaagaaggccggaccccgggctccagaggctgctgtgagggaaccctgctccccactctgcccaacggcccagcccaagcc

SEQ ID NO: 217525 - DNA, 41 bp, Homo sapiens
  chr17:7536911-7536952
  hypo
aacatggagactggccgggcgtggtggctcacgcctgtaat

SEQ ID NO: 217526 - DNA, 165 bp, Homo sapiens; identical to SEQ ID NO: 204402
  chr17:7571719-7571884
  hypo

SEQ ID NO: 217527 - DNA, 773 bp, Homo sapiens; identical to SEQ ID NO: 204403
  chr17:7572184-7572957
  hypo

SEQ ID NO: 217528 - DNA, 46 bp, Homo sapiens; identical to SEQ ID NO: 204404
  chr17:7573922-7573968
  hypo

SEQ ID NO: 217529 - DNA, 301 bp, Homo sapiens; identical to SEQ ID NO: 204405
  chr17:7576546-7576847
  hypo

SEQ ID NO: 217530 - DNA, 163 bp, Homo sapiens; identical to SEQ ID NO: 204406
  chr17:7578570-7578733
  hypo

SEQ ID NO: 217531 - DNA, 36 bp, Homo sapiens; identical to SEQ ID NO: 204407
  chr17:7579249-7579285
  hypo

SEQ ID NO: 217532 - DNA, 60 bp, Homo sapiens; identical to SEQ ID NO: 204408
  chr17:7579880-7579940
  hypo

SEQ ID NO: 217533 - DNA, 329 bp, Homo sapiens; identical to SEQ ID NO: 204409
  chr17:7590625-7590954
  hypo

SEQ ID NO: 217534 - DNA, 197 bp, Homo sapiens
  chr17:7690145-7690342
  hypo
cgaggagcgtgagcggagggtgcaaggtgagcggctccccggtttcctcatcacccaccatctactcagatgagaaacccgacgagaagtggatcctgttcgatggccccgtggacacactgtggatcgagaacatgaactccgtcatggacgataacaaggtgttgaccctcatcaacggcgagcgcatcgcgatg

SEQ ID NO: 217535 - DNA, 95 bp, Homo sapiens
  chr17:7769321-7769416
  hypo
ttaatgggagactcacggaagtttgtgattctcttaatttgtcatcctgcttccttatttacacagtagccatggggaacttttttttttttttt

SEQ ID NO: 217536 - DNA, 35 bp, Homo sapiens
  chr17:7769716-7769751
  hypo
cgcccggccgccacggggaacttttaaagttccca

SEQ ID NO: 217537 - DNA, 184 bp, Homo sapiens
  chr17:7798625-7798809
  hypo
ttcctcctccttgtacgtgtccatcccaaagtgccccgtgctgaagggtcgagtgcagaagatcctacattggcggtggggggagccacctgtagcagtgccagcccctcaacaggcagatggaaatccagatgtcccacccccccgtcctcttcaaggcagatcagagcgagagttctttgtc

SEQ ID NO: 217538 - DNA, 101 bp, Homo sapiens
  chr17:7800249-7800350
  hypo
tacaggcatgagccaccgtgcctgggccaatccatcctttttcatagctccctttccctgtcccattcctcctgccggcctcttcccggttccttgttgtc

SEQ ID NO: 217539 - DNA, 212 bp, Homo sapiens
  chr17:7806524-7806736
  hypo
ctctatgggcagcttctccccggccactcccctgacccacccgccactttctcttgcccctgcaggcctttagccgggctcatcggattggccaggccaacaaagtgatgatttaccggtttgtgactcgcgcgtcagtggaagagcgaatcacacaagtggccaagagaaagatgatgctgacacacctggttgtgcggcctgggctgggc

SEQ ID NO: 217540 - DNA, 125 bp, Homo sapiens
  chr17:7807180-7807305
  hypo
gacaatgaggccatcgctcggctgttggaccggaaccaggatgcaactgaggacactgacgtgcagaacatgaatgagtatctcagctccttcaaggtggcacagtacgtcgtgcgggaagaaga

SEQ ID NO: 217541 - DNA, 329 bp, Homo sapiens
  chr17:7809934-7810263
  hypo
gccgatggggtccctcgggagggactgagtcgccagcaggtgttgacccgcattggagtcatgtctctcgtcaaaaagaaggtatcagtcttcctgtcacccaaagaatcaagctggctgcctagtctctgtccttcctctgcctctgtccctgagttgtaagcttgcgctggtgtgagacggaggagactggagcttcctgtctgtaagcgcctggagctgacacctaaccctcccaccctgccaccccaggtgcaggagtttgagcacatcaatgggcgttggtcaatgccggaactgatgcctgaccccagcgccgattctaagcg

SEQ ID NO: 217542 - DNA, 49 bp, Homo sapiens
  chr17:7811072-7811121
  hypo
tggagtctggggaaccgaatgcttgggtcctgggcgggtagctgtttga

SEQ ID NO: 217543 - DNA, 79 bp, Homo sapiens
  chr17:7813720-7813799
  hypo
tctttctctgtggcccgggccccagttctgaaccagctggaggagttgctgagcgacatgaaggcggacgtgacccgcc

SEQ ID NO: 217544 - DNA, 120 bp, Homo sapiens
  chr17:7892730-7892850
  hypo
tcattgatttctggtttcaaggattgtaccccacaattgtctcttttctccccacacgtcatggaaatgatcagaaagaagtaattgtatgacagtttaaaaaatgaactgttccgacct

SEQ ID NO: 217545 - DNA, 272 bp, Homo sapiens
  chr17:8104639-8104911
  hypo
ctgtccaccacttagaggggcatttttggtgatatctatagaccgtttacctgcgtgtacccagcattaccacgtctttctctagatgctggtactctccattgccatgtctttcttcagatgtcccctagaggacaactagagaccatcacaaaggtgcacaggaggcactcaaaagacactggccacagtgcaaagcattggaaataatctgcatgtgcatccagtagaagagctttaaaaaaaaccctagggatatccttattaaaaat

SEQ ID NO: 217546 - DNA, 472 bp, Homo sapiens
  chr17:8138410-8138882
  hypo
agaggggaagtcctaactgacgttcccacaccagctgctcgtacagggaggccccgtaggcttgacgggatgagtgagccccaggcttctgacgagagaagctttgaagcagaacggcgccacggaggcagggggcgagcactggccttcttgtcccccctcccactgactggagcaggtgaacatcctggagctgggggaaagcagagaaaatgaaaaagcagagatgaagaccccaactcaatgaacccaggcagagttaaccgcactttgccactgcctgggttccaggaagacggaaagcaatttctcccacgtgggctggcctcactttccattacaacccactcccgctgcggtcagccttcatctcccatgagctccactcagtcttgctgtgggctgggtggctcctggatgaacagacatggctgaggcttctcaccgggtcgcctgagatcaccccagcccc

SEQ ID NO: 217547 - DNA, 420 bp, Homo sapiens
  chr17:8197551-8197971
  hypo
tcaatacattcaatcgtgtccatcagatgggtgtgtatagggcagatcagaagactccgaagcctaccagcactttcctgatgcctttccctgcttgcagtggggcagcactctgccacctatgcccttgggaaagaacagctcctatcctacaacgaggatctgccctgaaggtcccaggcaagagccctcttcttaccatgtagatggggctccccaagtaggctcccatgaccccagccatggccccagctgctgcgctgcgggcaggactgtgggtgccttcggctgtgtgcaggtagcccccagcctcagccagcccataggtgcccagtcggatgccattcatcaggaactggtacaagagggcgggggccaggcctttctgcagggcagcaaggccatccaccttgccgatgg

SEQ ID NO: 217548 - DNA, 86 bp, Homo sapiens
  chr17:8296056-8296142
  hypo
cgtgggcctcctgtcccaccccaggccacggctagcccggcggcctccctgaggtgcggctcacgcctgcttcctcaccagcagca

SEQ ID NO: 217549 - DNA, 258 bp, Homo sapiens
  chr17:8311456-8311714
  hypo
tgtctcaattaattcatgaaacggtacaaactttaattaattaatgcaaacttctaagtataaaaaggttcacttgtgtaccatctgaagtgccactcatgcggactctggcacgagtgggtgagagctggcgcccacgcaggggacagaaacttgggatcccagagctagaaacaggcgactctagaactttccgtggctgagcccaaggcccgggtgaaatgcttgacccgagagccctttcgatgggaaaccact

SEQ ID NO: 217550 - DNA, 83 bp, Homo sapiens
  chr17:8325971-8326054
  hypo
gtgaagaagtcccgtcgcctaattttcaacggaaaatgttttccatgtaaaggccataaaaccaccttgtaattttctttttt

SEQ ID NO: 217551 - DNA, 59 bp, Homo sapiens
  chr17:8365227-8365286
  hypo
gcgtgtggaagccctgaagaacagtcacgaggagggaaggataacactgtctgttcagg

SEQ ID NO: 217552 - DNA, 76 bp, Homo sapiens
  chr17:8384437-8384513
  hypo
cccgttagtgcacaccacggctcccacctgcggtgtgcagggctcggcaggactggcacggggtaccatggctgag

SEQ ID NO: 217553 - DNA, 158 bp, Homo sapiens
  chr17:8438422-8438580
  hypo
gtggcctaagtcatacgtgtacgtctttgtggctccgggcctagaatgtttctgtactcctacaacatctgaccaagaaggtagctgtctctgtattcatttcttaacccaagtattgttaaaacggataaattccgatataacggcagccctgctct

SEQ ID NO: 217554 - DNA, 126 bp, Homo sapiens
  chr17:8700777-8700903
  hypo
gagtacttgattttccgctctcggggcagcctccgctgtatggacaggagcaaggccaaccagagcaacagggccacacagcaggcctggtagagcacagccaggctgaagcgcatcaccacgaag

SEQ ID NO: 217555 - DNA, 227 bp, Homo sapiens
  chr17:8731954-8732181
  hypo
gtgcagccgggacacgccgggcagcatttccccatccccactgggccggcctgtcctccggtgcagccctgggggcccgtcccagctgccaggcatcaagaagtccaggggccatgcacgcttcttgatgccccctttgcgctgcagcccggctcgctccatctcagggctgccgggtgcaggcagctcatcagcccccgtgggaaggtcccgctcaatgccgctgt

SEQ ID NO: 217556 - DNA, 147 bp, Homo sapiens
  chr17:9054227-9054374
  hypo
ggctgtgctttttggagagccgagcccgtgaccccggtatccttaatcctgcccgtggtcctgatcccaaaccccacgaaatgccctctccggtctgtttgccgccagcctctttgcagggaccacgtccatcagttggtcccccct

SEQ ID NO: 217557 - DNA, 198 bp, Homo sapiens
  chr17:9124886-9125084
  hypo
gtctgcatcatactgcggggatttgacccgagtccacgtggctcaaagggaagctctctgggcatcagacaagggctgggagctccccggtgcatttccagtgttccgccaggctgtagcggggccgggagtctgcgctgtaaacggctcaccactcattcccatgcaccggaagttccgctgcccagacccatggag

SEQ ID NO: 217558 - DNA, 204 bp, Homo sapiens
  chr17:9127008-9127212
  hypo
cctcttgtgagatgacgacttgagcaggacgcccaaggctcttgtagctttcctaggctttggacctgggcaccgcagcactgtcctcctagcaaagcggtgggcccagaggagttaatgggtcgcagagggaaagccctgtgcttctcctctccccatccttccctgcacaaggcctaggggtaacctcggcaaggaggtagg

SEQ ID NO: 217559 - DNA, 191 bp, Homo sapiens
  chr17:9150998-9151189
  hypo
gttgccggggctccgtgctgagcaagtcgagaggaggtgagaaagtcaaacagactgtcaatgccgcctcccccgagccccaaagtggggggctccctccaaggagacactgtttgtagagatttggggtttcgcacaagactggaagatgaggctctgcagattcttgatcgtccgttggatgatccgtt

SEQ ID NO: 217560 - DNA, 215 bp, Homo sapiens
  chr17:9233914-9234129
  hypo
ccctcaggaatgcccgtgcactggcttcggctttctgtttgggacgtgggttcacgtttacgaacaacaagggatggcccctggcagagcctcgttcgcactcgctcctgcctccagtttggcaacacaacacaaaggcggtatggcttgtatacactttccaggctgagcccctattcagagggggctgcagcttgcgcgtaatgggcccccta

SEQ ID NO: 217561 - DNA, 31 bp, Homo sapiens
  chr17:9393283-9393314
  hypo
aatgagccaccgtgcccggcctataaagctt

SEQ ID NO: 217562 - DNA, 926 bp, Homo sapiens; identical to SEQ ID NO: 204427
  chr17:9548585-9549511
  hypo

SEQ ID NO: 217563 - DNA, 225 bp, Homo sapiens
  chr17:9631365-9631590
  hypo
aagaccatgcctctgcggtggtcctttggatccaaggagaaaccaccaggtgcctccgtcgagttggtggagtacttggaatccagacgaagacctcggtccacgagccagtccattgtgtcgctgttgacgggcactgcgggtgaggatgagaagtcagcatcgccgaggtccaacgtcgcccttcctgctaacagcgaagatggtgggcgggccattgaaaga

SEQ ID NO: 217564 - DNA, 99 bp, Homo sapiens
  chr17:9893605-9893704
  hypo
gaaagctcgccctacggatgctggcaggagccaaagttccttgccacgggctctgcacaatatggctgctgacttcgcccagagcgagcgagccagggg

SEQ ID NO: 217565 - DNA, 187 bp, Homo sapiens; identical to SEQ ID NO: 204429
  chr17:10632700-10632887
  hypo

SEQ ID NO: 217566 - DNA, 295 bp, Homo sapiens; identical to SEQ ID NO: 204430
  chr17:10633350-10633645
  hypo

SEQ ID NO: 217567 - DNA, 203 bp, Homo sapiens
  chr17:12517842-12518045
  hypo
gccaactgatcaacccgttgttttgccaggcagagcgaaacatttatgaaaacagtcaactggtttgaggagaaaattcaccaaaagcaatatagctagaagtctaacatcttaatgaggaacagtgctcttcgtccagactttatcgctttaggtacaagatgcccaaaacacaagtttgtaccttacgagcaaaattgtga

SEQ ID NO: 217568 - DNA, 44 bp, Homo sapiens
  chr17:12744163-12744207
  hypo
ccacaaaccccactgatgaccgcgatgtgaacacaccatcctgt

SEQ ID NO: 217569 - DNA, 135 bp, Homo sapiens; identical to SEQ ID NO: 204432
  chr17:12877185-12877320
  hypo

SEQ ID NO: 217570 - DNA, 48 bp, Homo sapiens; identical to SEQ ID NO: 204433
  chr17:12877650-12877698
  hypo

SEQ ID NO: 217571 - DNA, 242 bp, Homo sapiens
  chr17:12905698-12905940
  hypo
atggagagaaagagaggggacgagagctgggccgacaaggggccggtctgagacactaccttacagcggaaactggtgagcagggggaagatgtccgggtggatgaggttgagctgggtttgaatcttgtggctgcgaaggttgtgaactgaggcacagttctcattcaggaccaagtgctgggtgtcaggcccaaacctgtgaagaaacagacccggcatttgcagcgtctgttaggaggc

SEQ ID NO: 217572 - DNA, 260 bp, Homo sapiens; identical to SEQ ID NO: 204436
  chr17:14204242-14204502
  hypo

SEQ ID NO: 217573 - DNA, 168 bp, Homo sapiens; identical to SEQ ID NO: 204437
  chr17:14204834-14205002
  hypo

SEQ ID NO: 217574 - DNA, 44 bp, Homo sapiens
  chr17:14236462-14236506
  hypo
cagagccatagtagtcaaagcggtataaaaacagattttaggcc

SEQ ID NO: 217575 - DNA, 89 bp, Homo sapiens
  chr17:15411143-15411232
  hypo
ctccatctcaaaaaaaagaaaagaaaaaactaaataacaaaaaaaagaaagtctatagcctcttatgcctccatcgtatctgtaaagtg

SEQ ID NO: 217576 - DNA, 211 bp, Homo sapiens
  chr17:15952498-15952709
  hypo
ttactgccacttgacccatgcgcgccccgtggatccaggagtcacgtcatcagacagtgctgcccgggcagcagcagtggcagaagctgcgtccttgaggctccgcatgtccttcaacatcagacaccatctcacccttggctccttagtccaggtgaaacctcaagggttttcctacctattttgagtcgactgaccagttctttcatcg

SEQ ID NO: 217577 - DNA, 35 bp, Homo sapiens; identical to SEQ ID NO: 204444
  chr17:16256906-16256941
  hypo

SEQ ID NO: 217578 - DNA, 80 bp, Homo sapiens; identical to SEQ ID NO: 204445
  chr17:16257038-16257118
  hypo

SEQ ID NO: 217579 - DNA, 118 bp, Homo sapiens
  chr17:16282523-16282641
  hypo
gacaatgcaactaagagcactctgactacagaagcatgatttaaagctccacaaccctgcaataaccacgaagaaaaataaaaagcggctagtccgccaggcacggtggttcatgcct

SEQ ID NO: 217580 - DNA, 674 bp, Homo sapiens; identical to SEQ ID NO: 204447
  chr17:16283956-16284630
  hypo

SEQ ID NO: 217581 - DNA, 53 bp, Homo sapiens; identical to SEQ ID NO: 204448
  chr17:16285065-16285118
  hypo

SEQ ID NO: 217582 - DNA, 121 bp, Homo sapiens
  chr17:16385291-16385412
  hypo
ggtactgccaggtgcgcggtgtctactgggcggtctaggtccagggcaggaattctgactgttacgcttggtgtggggcaggacctcctgggcccttacctgcccccggtgccaatggaga

SEQ ID NO: 217583 - DNA, 273 bp, Homo sapiens
  chr17:16391199-16391472
  hypo
tgcttaagaggtgtgcgccacacttcgagtaaaccaaccccatcagcctcttctcatgggaaagctggggtgctggtgaacacgaagacaggggctacctcagctgggtgtatcccagggaaacagacgcctttttctgctgctccatgacgcaggccgacagctcagtctaaaattttgaggactcagggaaactgctggggtgaagagatgacagctcaccctcaaggtggcctggcacttgccctctctcaatggcggaaggttatttct

SEQ ID NO: 217584 - DNA, 180 bp, Homo sapiens
  chr17:16927737-16927917
  hypo
ccctttttatgagggcacgggtcatgctggataagggctcacactactgacgtcagtttaacttgatgacctctgtaaagagcccatctccacatagagagagataattattgctcctgttgctgtggctactgatgccatttgggggattcgtggcaagaaggatgaactgagagcgtc

SEQ ID NO: 217585 - DNA, 300 bp, Homo sapiens
  chr17:17062274-17062574
  hypo
cggctctccacacacgagctgacctctctgctcgagaaggaggtaatagcctgggaccagatccccaccctgctcccagcagcctttccagagcatcagctgtgcccagctgtggcctgaggggttcatctagacagtcctacccgcgagggacttgcagacccctaggggagacagacgcatagatgagtcctcatagttgaggcagacctgagagctgtgggagcgtgccagtgcatgcagggcagggaaaggggccttccaggcacagaggaattcttccgatggtgggggcccctg

SEQ ID NO: 217586 - DNA, 296 bp, Homo sapiens
  chr17:17062763-17063059
  hypo
ccaggggcatccagcaggagatgacagctgggtcctaggtcatgaggatatgaagcagaagacagtggtgaggcagggtaggctgtggatgaaggctgccctgtgactgtcactcctccacgaggccttcagtgcacctaggtacatagatgaacaagctggcccccgaactataaaataagatgttctttcatggaaatgtatgcagaaatccagtctgcagaacttcagtggtagattgacatgtctgggcagggagtctcgtagctggggaggtgtagcgttacagtttttgt

SEQ ID NO: 217587 - DNA, 351 bp, Homo sapiens
  chr17:17080460-17080811
  hypo
agcaagcctccctaccgtgttcagtccccaggaagacaggccatgttgtatgtgctcctctttcctggatgtaactaccattctctgtcatttcactcccaaggacaagaagtacgcaagtgacaagtacaaagacatctacacagagctcagcatcgcgaaggctaaggctgactgtgacatcagcaggttgaaggagcagctcaaggctgcaacggaagcactgggggagaagtcccctgacagtgccacggtgtccggatatggtgcgtcctcgggtcatgccctctcggttattgctggggggcttatgggggtttggtcgtagaggtttcccggtgcttgacttga

SEQ ID NO: 217588 - DNA, 210 bp, Homo sapiens
  chr17:17104698-17104908
  hypo
aacttcagatgtcatcggagctatctgtatatgacacacacattataaacaaataacctggaacatttcacagtgtacgacacctgttctacctgggaatgcaaaccctgagctgcaaataagaacacagacgtgggagacaccacggcctgaagctgctctcctcttccccgctctcctctcctccggtcccgtgatgggttacgctga

SEQ ID NO: 217589 - DNA, 220 bp, Homo sapiens
  chr17:17124507-17124727
  hypo
aaggagcaaagaccgtcgaccaggccaagcacttggctatcacaaaatcgggacgagaagcctttaatcagccagttctctctacagacagcccacctgtgaattttccccacctagctggggaacagattctttcacatggcggtcaaggcaaacgagacaggaaatcacaacaatcacaacaatcacaccgagatcggagggtgagcttcccgaaggc

SEQ ID NO: 217590 - DNA, 311 bp, Homo sapiens
  chr17:17251122-17251433
  hypo
agtggtggtctcctcgggccacccacccactctcgttggtgagacttaggaggtgggtcttagtggtggtctcctcgggccacccacccactctcattggtgaggtttaggagatgggctccagacactcggttgctctctcaagtgcctccttcccgcacctgccccagtgcttcagagcagggtcccccgtccccctctcctccgctcttctcccaaggccaagtttctgtgggatcgcaggagccctgtggggaaggctggtgttagagtctcagcttctgttccttttgacccgctgggaagtgaca

SEQ ID NO: 217591 - DNA, 77 bp, Homo sapiens
  chr17:17330586-17330663
  hypo
caattcctccaagatcgccatgatagatcagggattagatgagaatcccactgccttccggaaaggctaagaggggc

SEQ ID NO: 217592 - DNA, 276 bp, Homo sapiens; identical to SEQ ID NO: 204452
  chr17:17399572-17399848
  hypo

SEQ ID NO: 217593 - DNA, 52 bp, Homo sapiens
  chr17:17402429-17402481
  hypo
tcccagcactcccgccgcctgggccctgtcagccatcgcggcatttgatgtc

SEQ ID NO: 217594 - DNA, 132 bp, Homo sapiens
  chr17:17447945-17448077
  hypo
tgtcctcaagtgtgacgggcaggggctggcacaggtgctcatgaacatctgaaccagctctggcttcctttagtcctccgaacagaaaagacgtttcaaaatggaggcagaacagggcggctttctccactt

SEQ ID NO: 217595 - DNA, 92 bp, Homo sapiens
  chr17:17618837-17618929
  hypo
gggatgacaccagaccgggaggagaagtgcgaggagtggtgtggtcattggcgtctttcctctgcctctgcctcccccggccccttccattc

SEQ ID NO: 217596 - DNA, 240 bp, Homo sapiens
  chr17:17637949-17638189
  hypo
cactgcagaggtgtcagggacggacctggtgcagaccagtgggcccacacctgctttcctatgtgcgggtcagagcgtgtaggtgtattacatgcctgcctgtgtgtctgcgtgtgagctccttggacacacacaggggcacatatctgtgcttgcatgtttgtacatctaagtgtgtgcgtatctgtgtgttctgacaccagctcgcgacaccagctcgccctccacaaagctatttcc

SEQ ID NO: 217597 - DNA, 89 bp, Homo sapiens
  chr17:17717880-17717969
  hypo
ggaaggctgagcccgggaccaggcaggaggaacctgccgtgcactcactcagactcctgcagcacccggggcaggtgctccaccagcgg

SEQ ID NO: 217598 - DNA, 90 bp, Homo sapiens
  chr17:17910221-17910311
  hypo
cagccagaatttccgagctcgccttgggcccttaaagtctgtctcccgccgtctgagagcatcagggacgcgccgggcctgctcctcccg

SEQ ID NO: 217599 - DNA, 135 bp, Homo sapiens
  chr17:17910351-17910486
  hypo
gggacctggagaatcaccaccacgagaagctcctggagatctctatcagcaccctggagaagattgtcgagggcgacctggacgaggacctgcctaacgacctgcgcgcggtaggcggggcgggctgctcggagc

SEQ ID NO: 217600 - DNA, 260 bp, Homo sapiens
  chr17:18024622-18024882
  hypo
ggctcgccgctgccgggctcacccaggccgccctcgccgcccctggggctctgccacagcccgcggcgcagctccctgaatctgccctcgcgcctcccgcacacgtggcggcgcctcagcgagccacccactcgggctgtgaagccgcaagtgcgcctgcccttccaccgaccgcccagggccggggcctggcgggcgcccctggaacaccgggagagcccgcgagaacccgaggactcagagacgccctggactgtgcc

SEQ ID NO: 217601 - DNA, 188 bp, Homo sapiens
  chr17:18139366-18139554
  hypo
ctgggctttcaccaccgcctggggccctgcttggactctgcagctgtgtcccaaggctgcgccctagatttgtctactccttcccctgccccctccctgctttctcccggcctctgtagtcttcctgctcctccacctacgtggctgccttgggccccatgcagctcctcccccgggatgccccatgc

SEQ ID NO: 217602 - DNA, 401 bp, Homo sapiens
  chr17:18854648-18855049
  hypo
gccttcaatggctgcgtaatggcggatggccatttccttgactaggatgagacattgcctactctgcgtggctgctgtgagcgtgaaatgggatcatgtgcggaacagccacgcatggtccgtgaaatgggatcatgtgcagaacagccacgcatggtccttggtgtgtgacagatattgggtccctctgtggtcccaggcagacattgcccggggtgggggccgaatgcatggtcaagttgaggggcctgggactgtttcacgggtctagaaaaagaaagcagaaacgctggaagcaggactttattgtccgacatggggctgcctctgagcctgggctgtgttggctggacgtgagccataatgcaggtgtccccctcccaagccctgctcagtccact

SEQ ID NO: 217603 - DNA, 190 bp, Homo sapiens
  chr17:18918297-18918487
  hypo
cgggaggggttcccggggctgtctcaaggccggacagggtcacacatcccccgtcccaccccaggtctgcgggggctgatgatcgcagtgatgctggcggcgctcatgtcgtcgctgacctccatcttcaacagcagcagcaccctcttcactatggacatctggaggcggctgcgtccccgctccggcg

SEQ ID NO: 217604 - DNA, 328 bp, Homo sapiens; identical to SEQ ID NO: 204459
  chr17:19140730-19141058
  hypo

SEQ ID NO: 217605 - DNA, 79 bp, Homo sapiens
  chr17:19211655-19211734
  hypo
ggattacaggcataagccgccatgcccggcacaattagaacattttaaaatgacccgttaaccatgaaattgaattctg

SEQ ID NO: 217606 - DNA, 102 bp, Homo sapiens
  chr17:19233948-19234050
  hypo
ccttgactcctgctccgtgcctcagtgagaaggcagcgtggccattgttacatgtcagcttttgaaacatttatcccctgccggtgcagtggctcacacctg

SEQ ID NO: 217607 - DNA, 392 bp, Homo sapiens; identical to SEQ ID NO: 204462
  chr17:19282073-19282465
  hypo

SEQ ID NO: 217608 - DNA, 120 bp, Homo sapiens
  chr17:19513141-19513261
  hypo
aactcgttttatagcaaatagtacaatgaacaaattgacatatataaaaaggaacaaacgatacatgtcataacatgtgaatctcaaacttttttttttttttgtgacggagtctcgctc

SEQ ID NO: 217609 - DNA, 224 bp, Homo sapiens
  chr17:19606651-19606875
  hypo
tagacagtcttgtaggaagggcagtgtggaaaatgcttccactccagtggttctcagagtgggcggcacgctggcgcagcagcattagcatcacgtgggaacttgttagaaacagattctcagaccctgcctccgacctgctgaaccaaagcctgctggtgaggcccagcaatctgtgaccagccctccaaggggattccagcgcaggctacagcctaagaacc

SEQ ID NO: 217610 - DNA, 77 bp, Homo sapiens
  chr17:19618657-19618734
  hypo
gccagggctggaggtcggatgacctagcccagctcccattctgcgttctgcagctgcagtcacgcctggcctccacg

SEQ ID NO: 217611 - DNA, 65 bp, Homo sapiens
  chr17:19641468-19641533
  hypo
ccagtgagggtggtccgcactccgatgggacacagtatggccaggccaggcggagcaacccctcc

SEQ ID NO: 217612 - DNA, 104 bp, Homo sapiens
  chr17:19687003-19687107
  hypo
ttctacctccatcagcgtctcctccggcagttcaggggcttcaaaggtgatgagcccctctaggctggggggtgaagcaccgtaaggcacgtatctcaggctgg

SEQ ID NO: 217613 - DNA, 116 bp, Homo sapiens
  chr17:19771712-19771828
  hypo
ttctgcaccttttgggggtcccttgactgcgagaagctggtgacagctcagggccctcttcgcagagaatcgtttctgcacaccgactcagaatcgcacacgttttcaaggttctc

SEQ ID NO: 217614 - DNA, 89 bp, Homo sapiens
  chr17:19842322-19842411
  hypo
gagtgagccaccgtgcccgaccacgaattactttttttacagagtaagaaaagttaaatgaaaagaataccatacgttacagagctggc

SEQ ID NO: 217615 - DNA, 172 bp, Homo sapiens
  chr17:20013842-20014014
  hypo
agctcacggagagccgcctgaggagcggcacaggtaggagggaccgggcaggtgggctcggcaggccatcagtcctggccgcatggaagcacttcagtgacccatgacccatccattccttccctcgtgaaatatttcttgaccacttaccctgggccggaactgttttagg

SEQ ID NO: 217616 - DNA, 246 bp, Homo sapiens; identical to SEQ ID NO: 204463
  chr17:20059180-20059426
  hypo

SEQ ID NO: 217617 - DNA, 83 bp, Homo sapiens
  chr17:20087136-20087219
  hypo
aacccagaaatatggaaggccgactatatcattcttatgaaattttattaaataagaatgatgtcaaccgggcgtggtggctc

SEQ ID NO: 217618 - DNA, 76 bp, Homo sapiens
  chr17:20170298-20170374
  hypo
tgggaagtgagcatcgcagccagacccacctgccgagctccgggccaactgcctgacatctcgagtggcccaggat

SEQ ID NO: 217619 - DNA, 133 bp, Homo sapiens
  chr17:20905669-20905802
  hypo
ttgtggaaaaaggagcgggagagggataagaaaatgcctgtttctagaaaaccgcgagatgcttccacgtgcagcttgatgctgttacctgcagaacagacacgcttgaaaacgcgacgtagtgtccgtactt

SEQ ID NO: 217620 - DNA, 195 bp, Homo sapiens
  chr17:20914087-20914282
  hypo
taatcatgtgcagagaaggccgtggaccatggggagaggcccgggcgcatctcagctcacactccggggtaggtgattagtgcaagggctaagggagcagccagtttggctctgggttcatttacatgcggaggttggagtagcagctgctgacactgacacctggtgctgtgcgaagctgggggacagaaatat

SEQ ID NO: 217621 - DNA, 185 bp, Homo sapiens
  chr17:20919060-20919245
  hypo
ccacctttgcagtgtcggtggagcacgtccagggccgcgatgaggaactcgtgggcgtcctgctgctcgtagcctgctaggtgcctcgcgtgggtccacaccaggtgcagcaacttatacgggatgtgaggggaccggtgtccagagtaaaactgccagagggcggggaaggaaaccttgtcagg

SEQ ID NO: 217622 - DNA, 83 bp, Homo sapiens
  chr17:21160808-21160891
  hypo
cccaaagtgcttacacgcttgagccaccgcgcctcctgaaatttcttgaaccggccatactcgttccctcctctgggcctatg

SEQ ID NO: 217623 - DNA, 47 bp, Homo sapiens
  chr17:21221775-21221822
  hypo
cgtgccgggggttagcgtcccggctgcgctcccgctcccatgccctc

SEQ ID NO: 217624 - DNA, 181 bp, Homo sapiens
  chr17:21793592-21793773
  hypo
tgtggatcatgaatccgcagtgaattcggaggctggctgagaccggcctgggtcaaaatcacctccactgcaaaaaaaaaaaaaaaaaaaaaaaaaaaaaaagatgttcttctagaaagaacaggagcacaccacacccaagaaaggacatctcccagtgttttaccgtcttgcgtccaag

SEQ ID NO: 217625 - DNA, 137 bp, Homo sapiens
  chr17:25620436-25620573
  hypo
ttatcagtctgatgtgtggacaactaggtgcctcccagaggccttcaggtaaggtggaggaagggccaattctgagctgacacagtgggatccatcttggccaggacagtgggatccatcttggccaggacaaaggc

SEQ ID NO: 217626 - DNA, 63 bp, Homo sapiens
  chr17:25878954-25879017
  hypo
gtttccttcaggataaacgccagatgccttccttgatctggcctctctcgcctctgtttgctc

SEQ ID NO: 217627 - DNA, 327 bp, Homo sapiens
  chr17:25879047-25879374
  hypo
tttgcacttgctccccacttccctggagtgctctgcccatgactcatcccttgaatatttttctggtgttgagtgttgtcaccgcctccaggcagtcgtccctggtgatgtgatctaaagatcatcccctgcccatcattctcgcctgcgcacctgagtttattttctcaatgacactgaccactttctggagtgacctaaccgatttgttgtctgtggtctgtctgctccccctgggatgcgagcaccatgagacacggccttgctgtttgggtttgtttgccacaaaatccccattgagtgtcgggcccaatatggcagttgctt

SEQ ID NO: 217628 - DNA, 173 bp, Homo sapiens
  chr17:25904461-25904634
  hypo
gctcccggcccagccgactgctcaccgcctctctgcctgtccctctgtccccttaggagatcccccgagacctcacgctggatgccctgctggagatgaatgaggccaaggtgaaggagacgctgcggcgctgtggggccagcggggatgagtgtggccgtctgcagtatgcc

SEQ ID NO: 217629 - DNA, 74 bp, Homo sapiens
  chr17:25907636-25907710
  hypo
tttcttagctctctggccttgggcagtgtctgtggcctccctgagtcacagtgacctccactgtacactgggga

SEQ ID NO: 217630 - DNA, 60 bp, Homo sapiens
  chr17:25931232-25931292
  hypo
gagcacttgactcacattcccgcatctcaccctcagcgcggtggtaggtatcaaagtagg

SEQ ID NO: 217631 - DNA, 83 bp, Homo sapiens
  chr17:25931759-25931842
  hypo
ggtgacacacacgtgtccacagatggccccccctcttttttcccttccccatctcagaatgcgcagggggcttgagggtgagt

SEQ ID NO: 217632 - DNA, 34 bp, Homo sapiens
  chr17:25933867-25933901
  hypo
tgataaactagacagggtctcgctctgtcaccca

SEQ ID NO: 217633 - DNA, 228 bp, Homo sapiens
  chr17:25934804-25935032
  hypo
atttggctcacagtcgaggggctggagagagtccttgcaggcagacgggcacagttctccccatgggctccaccagggttggggtcaggccgcaccagccccagacttgtgcttgacccccaccaccctcgacagcttctgcaaggggcggacgttgcactcgtttgtgagggaccccaagacgtctctggacatcaacaagacgaggcaaatcgctcaggagatcat

SEQ ID NO: 217634 - DNA, 97 bp, Homo sapiens
  chr17:25948172-25948269
  hypo
ctgcgctcttcccacgcctggtggaatggtcgctgggcactcccagtcgctggaggagccgctactatggaaaaggacgctacggccaccctgactt

SEQ ID NO: 217635 - DNA, 80 bp, Homo sapiens
  chr17:26263499-26263579
  hypo
acaaacaaaaaagaagcgtcggagtattcagaagaagcaaggggagtgtgacattgcccgtctgtaaaggtgctcatgac

SEQ ID NO: 217636 - DNA, 101 bp, Homo sapiens
  chr17:26864424-26864525
  hypo
cccagctccaagcccgtggccctggcatgagctgtgcccagcttcgtcagctccagcgtttgcctggtctggaagtcctggccggccgcccacatcgggct

SEQ ID NO: 217637 - DNA, 332 bp, Homo sapiens; identical to SEQ ID NO: 204469
  chr17:26925694-26926026
  hypo

SEQ ID NO: 217638 - DNA, 342 bp, Homo sapiens; identical to SEQ ID NO: 11045
  chr17:26926083-26926425
  hypo

SEQ ID NO: 217639 - DNA, 135 bp, Homo sapiens
  chr17:26959955-26960090
  hypo
tcacttccactgtgccgagtcagatccatcttgatggagagattgaggttctccgagcgaaaggcccggtaggagtcatgaagctggcccaagggcacctcaggcaggaactctggggcccgcagagtgacacta

SEQ ID NO: 217640 - DNA, 238 bp, Homo sapiens
  chr17:26960859-26961097
  hypo
ttcacccatcacaaacgtccctcagccaaaccaactgcctcatctctactcacagtgaaagtcatggtagaatttgagtgggggcatgttcctctccactgccacgttaccccacggaagccccaagtgcaagatctgacgccgacgggagcaaggctgaccactctgctcggtgcccacaagtcgacccattagccgccagtcacggatctcaaacaggtaccgtggatagtccctg

SEQ ID NO: 217641 - DNA, 68 bp, Homo sapiens
  chr17:26961702-26961770
  hypo
agctccaagtaagcagtgcccggcgcatgggtgtgttgccatagagacgacgggaacgctggatgtag

SEQ ID NO: 217642 - DNA, 191 bp, Homo sapiens
  chr17:26962146-26962337
  hypo
agaggagccaaacacggttccggagggtctgcagcgcagggaaggggttccggtggaggatcatctcttccagctcaggtagcagctgcacctccacctccttgaagttgaagatactattgccatcaaagccagcagccagctctggacagtatgcctgcagggaacctccatgccggctcagtgacaca

SEQ ID NO: 217643 - DNA, 129 bp, Homo sapiens
  chr17:27011597-27011726
  hypo
cctcaggcctgtagtcgaaagctctacaattggttgagagtggcaccctaccgaccagatcagcaggtggaagaagatgacgactttatggacgagaaccaagggaagggcattcgagtcctcggcatt

SEQ ID NO: 217644 - DNA, 163 bp, Homo sapiens
  chr17:27056869-27057032
  hypo
gagatttaaggccaagacttgaggaatgaggaccagtagtctgcaggtgaagggagaacttttcaggcaaaggaaatagcgtatgtgaaatgtctcacatgggaaaacagagcattcaagaaaccgagaaagactagtaatagttggaatgtagtgggcaagg

SEQ ID NO: 217645 - DNA, 35 bp, Homo sapiens
  chr17:27138132-27138167
  hypo
agataaacctgctccaaacacgtttcgttgaaaat

SEQ ID NO: 217646 - DNA, 206 bp, Homo sapiens
  chr17:27207673-27207879
  hypo
ctgggccagtccgacgggctacctgggcaaccccaccgcagctaggcaggcacataccttagacaggtccacgcctgtgagggcatgcacagaggcaggcagctcggccagcagtcggttcacttctgatgtgaccttactgttgtctccactgaggaccacaatctcatcgaccttggtaagtggggcagcgattttggcagcaa

SEQ ID NO: 217647 - DNA, 532 bp, Homo sapiens
  chr17:27406521-27407053
  hypo
ctatgacatcaccagcgagttcagctgacagggctcagggctcaggatgactgaccagcttgggtggcccctgctcatcaaggcagccaggaggctctccgaggccaggcatgcccgagaggagtgcgggtgggccctaaggtggcggcctgaggggcagggaggacgttagttcacaccgggtgggacacaccatgctgaacccaggccaggtgccacctactgcactagtcgctctcgggccggtacaggtaccgcatcatcaggctgtccacctctttcttgcgcttcttttcctccttcctcgacggccggtgcgtctgcccagtttcttcactttctgcagctgggcccttcttcacactggagcagctgtggctggagacggtcgagccgctggatgacgacgaggaggactcagactccgtctccgttctctttcttctcgacttggacttcttgctcttccgagagcgccccttcttccgcctcttgtgctctgaggaagcttcggagccggagctggagctgg

SEQ ID NO: 217648 - DNA, 69 bp, Homo sapiens
  chr17:27407262-27407331
  hypo
tagctcaagacctcgttgacggcagcctccaggtctgggtccaggtaggagtgacggctgacggagcgg

SEQ ID NO: 217649 - DNA, 66 bp, Homo sapiens
  chr17:27407717-27407783
  hypo
gtcggagccccaccgcttctgcggcccccggccagcgcgccccccggtccccgagcggacggagcc

SEQ ID NO: 217650 - DNA, 165 bp, Homo sapiens
  chr17:27411026-27411191
  hypo
tatctctaagtaaatcgaaacattatttctctgcctgccttactgcgctgggctcaataacttggagctggggcccagagctgctgaggaaggagccacaccacctctctgccatcagccggaacctggttagagctgcacgtccccatgcgtctatgtgagcac

SEQ ID NO: 217651 - DNA, 130 bp, Homo sapiens
  chr17:27411533-27411663
  hypo
atggttggaattaaacctcacgtcaaatacaatttatgtccgggctcatgtgctattagttaacggggagccgaatcacgggggaacaaacaaacggagacagaacggcgggggatattaattgtgtgtg

SEQ ID NO: 217652 - DNA, 305 bp, Homo sapiens
  chr17:27411693-27411998
  hypo
gttacacactattacatttatcattagctctcactgagtcctgtgcgctgccaccagcccatcctggccaggggagggggtccatcaggcgagagagagtgggggaagaaacccaatgccatgctaaaaaaaaaagacctctaaaaaacaaccctgtcgaacttgatggaggatcagcccgctctgcctgaaggcctgcgcatctgcatccgctgtccagctcccacccagaaagcgggaaaagagagggctggatttcctgggcttcctgccacctgacagtaccagcacaagcgcccgctggg

SEQ ID NO: 217653 - DNA, 108 bp, Homo sapiens
  chr17:27421468-27421576
  hypo
ttgtggaaagttccacgagcgcgtcttcacactgtggctggcacagatcaggtgctcactccacattttgtgagtaggtgagtgagtgaatacgcgaatgaatggagg

SEQ ID NO: 217654 - DNA, 54 bp, Homo sapiens; identical to SEQ ID NO: 204475
  chr17:27893141-27893195
  hypo

SEQ ID NO: 217655 - DNA, 402 bp, Homo sapiens; identical to SEQ ID NO: 53841
  chr17:27893344-27893746
  hypo

SEQ ID NO: 217656 - DNA, 133 bp, Homo sapiens
  chr17:27902814-27902947
  hypo
gcatggaaacattaccgtgtggcggcttccctcctgggagcaggacagcagcggggaggagggagtgaagggcacagctgaggcagacacccctttccggatctgaaacccagggcagcgctggatggagtca

SEQ ID NO: 217657 - DNA, 199 bp, Homo sapiens
  chr17:27903154-27903353
  hypo
gatgttagcacagcgagcgtcatggtggaccctgcggcagccccacccatctccccacaccttgagacccataggtgactcacagtgctgtggaaaggctgcagccgcgtagtgagctcgtccccaggggggcccccaaagggcttcagggcagagccaggttcatacatggaaaaggcctggcgatccctgcggtgtg

SEQ ID NO: 217658 - DNA, 392 bp, Homo sapiens
  chr17:27934686-27935078
  hypo
agggctgtctggctccggagggctgcctccgacgtgactggggctttatcttccactcctcctcctcctccaggtggacatcgagcagctggatccccgcggccggactcccctgcacctggccaccacgctggggcaccttgagtgtgcccgtgtgctcctggcgcacggcgcagacgtgggcagggagaatcgcagcggctggacaggtgggcagccctgctcaccccagccccacagccggggcctccccagcatcatagacctatggttggctgaagggtcctgccctgtgaccttgcctcgccctcccccagtgctccaggaggctgtgagtacccgggacctggagctggtgcagctggtgcttcggtaccgggactaccagcggg

SEQ ID NO: 217659 - DNA, 95 bp, Homo sapiens
  chr17:27939247-27939342
  hypo
cttcatcaccctgcgtctgcctcctggcttcccagttaagattggtgagaccgcacggccatttctcctgagcccgtggcgggccgaccggggtt

SEQ ID NO: 217660 - DNA, 811 bp, Homo sapiens; identical to SEQ ID NO: 204478
  chr17:27942604-27943415
  hypo

SEQ ID NO: 217661 - DNA, 243 bp, Homo sapiens
  chr17:28299376-28299619
  hypo
ttaaatggattcctggctccttttaaaatggggatcactcacttgtgagctaggagtgctcataaatattgtgtagtcattgtttctaggcccttcaggactaaaacatataatttttagagtcaatgacccgtgaccagacatcacctgcagcctcttcaggcgtgccaccgctgccgggcctgctgtacgacccgcgggctctgggccatgcctgctcttgcgcccggctcaggaggaccc

SEQ ID NO: 217662 - DNA, 242 bp, Homo sapiens; identical to SEQ ID NO: 204481
  chr17:28563016-28563258
  hypo

SEQ ID NO: 217663 - DNA, 33 bp, Homo sapiens
  chr17:29247879-29247912
  hypo
acgtgtgtgcttgcgcccgcatgtatgttgaat

SEQ ID NO: 217664 - DNA, 488 bp, Homo sapiens; identical to SEQ ID NO: 128356
  chr17:29421899-29422387
  hypo

SEQ ID NO: 217665 - DNA, 144 bp, Homo sapiens; identical to SEQ ID NO: 204486
  chr17:29483000-29483144
  hypo

SEQ ID NO: 217666 - DNA, 91 bp, Homo sapiens; identical to SEQ ID NO: 204487
  chr17:29486027-29486118
  hypo

SEQ ID NO: 217667 - DNA, 191 bp, Homo sapiens; identical to SEQ ID NO: 204488
  chr17:29490203-29490394
  hypo

SEQ ID NO: 217668 - DNA, 109 bp, Homo sapiens; identical to SEQ ID NO: 204489
  chr17:29496908-29497017
  hypo

SEQ ID NO: 217669 - DNA, 68 bp, Homo sapiens; identical to SEQ ID NO: 204490
  chr17:29508439-29508507
  hypo

SEQ ID NO: 217670 - DNA, 46 bp, Homo sapiens; identical to SEQ ID NO: 204491
  chr17:29508715-29508761
  hypo

SEQ ID NO: 217671 - DNA, 163 bp, Homo sapiens; identical to SEQ ID NO: 204492
  chr17:29509520-29509683
  hypo

SEQ ID NO: 217672 - DNA, 174 bp, Homo sapiens; identical to SEQ ID NO: 204493
  chr17:29527439-29527613
  hypo

SEQ ID NO: 217673 - DNA, 123 bp, Homo sapiens; identical to SEQ ID NO: 204494
  chr17:29528054-29528177
  hypo

SEQ ID NO: 217674 - DNA, 75 bp, Homo sapiens; identical to SEQ ID NO: 204495
  chr17:29528428-29528503
  hypo

SEQ ID NO: 217675 - DNA, 140 bp, Homo sapiens; identical to SEQ ID NO: 204496
  chr17:29533249-29533389
  hypo

SEQ ID NO: 217676 - DNA, 59 bp, Homo sapiens; identical to SEQ ID NO: 204497
  chr17:29541468-29541527
  hypo

SEQ ID NO: 217677 - DNA, 47 bp, Homo sapiens; identical to SEQ ID NO: 204498
  chr17:29541556-29541603
  hypo

SEQ ID NO: 217678 - DNA, 136 bp, Homo sapiens; identical to SEQ ID NO: 204499
  chr17:29546009-29546145
  hypo

SEQ ID NO: 217679 - DNA, 80 bp, Homo sapiens; identical to SEQ ID NO: 204500
  chr17:29548867-29548947
  hypo

SEQ ID NO: 217680 - DNA, 124 bp, Homo sapiens; identical to SEQ ID NO: 204501
  chr17:29550461-29550585
  hypo

SEQ ID NO: 217681 - DNA, 156 bp, Homo sapiens; identical to SEQ ID NO: 204502
  chr17:29552112-29552268
  hypo

SEQ ID NO: 217682 - DNA, 250 bp, Homo sapiens; identical to SEQ ID NO: 204503
  chr17:29553452-29553702
  hypo

SEQ ID NO: 217683 - DNA, 74 bp, Homo sapiens; identical to SEQ ID NO: 204504
  chr17:29554235-29554309
  hypo

SEQ ID NO: 217684 - DNA, 84 bp, Homo sapiens; identical to SEQ ID NO: 204505
  chr17:29554540-29554624
  hypo

SEQ ID NO: 217685 - DNA, 441 bp, Homo sapiens; identical to SEQ ID NO: 204506
  chr17:29556042-29556483
  hypo

SEQ ID NO: 217686 - DNA, 140 bp, Homo sapiens; identical to SEQ ID NO: 204507
  chr17:29556852-29556992
  hypo

SEQ ID NO: 217687 - DNA, 123 bp, Homo sapiens; identical to SEQ ID NO: 204508
  chr17:29557277-29557400
  hypo

SEQ ID NO: 217688 - DNA, 84 bp, Homo sapiens; identical to SEQ ID NO: 204509
  chr17:29557859-29557943
  hypo

SEQ ID NO: 217689 - DNA, 117 bp, Homo sapiens; identical to SEQ ID NO: 204510
  chr17:29559090-29559207
  hypo

SEQ ID NO: 217690 - DNA, 514 bp, Homo sapiens; identical to SEQ ID NO: 204511
  chr17:29559717-29560231
  hypo

SEQ ID NO: 217691 - DNA, 104 bp, Homo sapiens; identical to SEQ ID NO: 204512
  chr17:29562628-29562732
  hypo

SEQ ID NO: 217692 - DNA, 278 bp, Homo sapiens; identical to SEQ ID NO: 204513
  chr17:29562761-29563039
  hypo

SEQ ID NO: 217693 - DNA, 136 bp, Homo sapiens; identical to SEQ ID NO: 204514
  chr17:29576001-29576137
  hypo

SEQ ID NO: 217694 - DNA, 63 bp, Homo sapiens; identical to SEQ ID NO: 204515
  chr17:29579955-29580018
  hypo

SEQ ID NO: 217695 - DNA, 159 bp, Homo sapiens; identical to SEQ ID NO: 204516
  chr17:29585361-29585520
  hypo

SEQ ID NO: 217696 - DNA, 98 bp, Homo sapiens; identical to SEQ ID NO: 204517
  chr17:29586049-29586147
  hypo

SEQ ID NO: 217697 - DNA, 147 bp, Homo sapiens; identical to SEQ ID NO: 204518
  chr17:29587386-29587533
  hypo

SEQ ID NO: 217698 - DNA, 147 bp, Homo sapiens; identical to SEQ ID NO: 204519
  chr17:29588728-29588875
  hypo

SEQ ID NO: 217699 - DNA, 111 bp, Homo sapiens; identical to SEQ ID NO: 204520
  chr17:29592246-29592357
  hypo

SEQ ID NO: 217700 - DNA, 433 bp, Homo sapiens; identical to SEQ ID NO: 204521
  chr17:29652837-29653270
  hypo

SEQ ID NO: 217701 - DNA, 341 bp, Homo sapiens; identical to SEQ ID NO: 204522
  chr17:29654516-29654857
  hypo

SEQ ID NO: 217702 - DNA, 203 bp, Homo sapiens; identical to SEQ ID NO: 204523
  chr17:29657313-29657516
  hypo

SEQ ID NO: 217703 - DNA, 194 bp, Homo sapiens; identical to SEQ ID NO: 204524
  chr17:29661855-29662049
  hypo

SEQ ID NO: 217704 - DNA, 582 bp, Homo sapiens; identical to SEQ ID NO: 204525
  chr17:29663350-29663932
  hypo

SEQ ID NO: 217705 - DNA, 215 bp, Homo sapiens; identical to SEQ ID NO: 204526
  chr17:29664385-29664600
  hypo

SEQ ID NO: 217706 - DNA, 321 bp, Homo sapiens; identical to SEQ ID NO: 204527
  chr17:29664836-29665157
  hypo

SEQ ID NO: 217707 - DNA, 102 bp, Homo sapiens; identical to SEQ ID NO: 204528
  chr17:29665721-29665823
  hypo

SEQ ID NO: 217708 - DNA, 141 bp, Homo sapiens; identical to SEQ ID NO: 204529
  chr17:29667522-29667663
  hypo

SEQ ID NO: 217709 - DNA, 127 bp, Homo sapiens; identical to SEQ ID NO: 204530
  chr17:29670026-29670153
  hypo

SEQ ID NO: 217710 - DNA, 141 bp, Homo sapiens; identical to SEQ ID NO: 204531
  chr17:29676130-29676271
  hypo

SEQ ID NO: 217711 - DNA, 142 bp, Homo sapiens; identical to SEQ ID NO: 204532
  chr17:29677200-29677342
  hypo

SEQ ID NO: 217712 - DNA, 158 bp, Homo sapiens; identical to SEQ ID NO: 204533
  chr17:29679274-29679432
  hypo

SEQ ID NO: 217713 - DNA, 123 bp, Homo sapiens; identical to SEQ ID NO: 204534
  chr17:29683477-29683600
  hypo

SEQ ID NO: 217714 - DNA, 410 bp, Homo sapiens; identical to SEQ ID NO: 204535
  chr17:29683977-29684387
  hypo

SEQ ID NO: 217715 - DNA, 143 bp, Homo sapiens; identical to SEQ ID NO: 204536
  chr17:29685497-29685640
  hypo

SEQ ID NO: 217716 - DNA, 47 bp, Homo sapiens; identical to SEQ ID NO: 204537
  chr17:29685986-29686033
  hypo

SEQ ID NO: 217717 - DNA, 217 bp, Homo sapiens; identical to SEQ ID NO: 204538
  chr17:29687504-29687721
  hypo

SEQ ID NO: 217718 - DNA, 3665 bp, Homo sapiens; identical to SEQ ID NO: 204539
  chr17:29701030-29704695
  hypo

SEQ ID NO: 217719 - DNA, 71 bp, Homo sapiens
  chr17:30333041-30333112
  hypo
gcatgagctatcgcgcccggccaagtatttttgtttaaattactttttggttgtcacttatctcaataaat

SEQ ID NO: 217720 - DNA, 149 bp, Homo sapiens
  chr17:30529221-30529370
  hypo
cccggctctaagaaggtctctttacctcaggaagggatgcttgctgtccctatgatacagcattgttttctggcatgcctcttttacagtttacatttgaaaggacggctaaccccaaagtgtgtgtccctttccgttttatggatcca

SEQ ID NO: 217721 - DNA, 360 bp, Homo sapiens; identical to SEQ ID NO: 204541
  chr17:30592744-30593104
  hypo

SEQ ID NO: 217722 - DNA, 154 bp, Homo sapiens
  chr17:30804369-30804523
  hypo
gtattcagtacttgcggctcttcttcccgggcgtctgaagaagaacgatggtggggcgggttcttccttttggcagaagttgtgtggacacagcatactgcttatgagacttgggtaaatgttagtgtgcagaataaatcgctttcatggtttg

SEQ ID NO: 217723 - DNA, 89 bp, Homo sapiens; identical to SEQ ID NO: 204542
  chr17:30813422-30813511
  hypo

SEQ ID NO: 217724 - DNA, 199 bp, Homo sapiens
  chr17:30844875-30845074
  hypo
gtgcctgtgaaggagcggctgagcccccaagggtcacagagctcagaggaggatgtggagatgggcacccctcctgccaccccggctctccctctggacagcacctggcccgccactctgccatcaccctctggacagcacctggcccgccactctgccatcaccctctggacagcacctggcccgccactctgccatc

SEQ ID NO: 217725 - DNA, 330 bp, Homo sapiens
  chr17:30954335-30954665
  hypo
gctgactgtatccattgaggttaccatggaaaccccttcctttgggacactgccatgagggtagggtgctttagaaatggtgatggggcacagaccggcgggcggatggatttcagcagggttcaccctgtacgcattacaaggacaatccatcttccaaacgaaatgatatctttctagcaagtcacgtcaaatagagcaataaagcatgaagtctggcataattacagtccatttacctttacaaaacagtcacatcggttcagataattgtctcttttctctcccctgcttgctttgtattctccacagaacgaaaggaggtatttg

SEQ ID NO: 217726 - DNA, 108 bp, Homo sapiens; identical to SEQ ID NO: 204545
  chr17:31203740-31203848
  hypo

SEQ ID NO: 217727 - DNA, 274 bp, Homo sapiens
  chr17:33344314-33344588
  hypo
ccatgaggcttctccgtctccactgtgacctcacaactccttataaatacactgaccgcttcactagttaacctggaacactaacactaaaccctaccccaaaaatataatttcggaagcactatcatcacacatttattctctctccactcgactctgctaagaggttccgaagaacaccagtgaaagaggaaaggtgaagacacagacccaagcagaggccccacctgggtctcatcctcagcaggtactctggccacgctctccaggtaga

SEQ ID NO: 217728 - DNA, 66 bp, Homo sapiens
  chr17:33351140-33351206
  hypo
atcacagaactggccgtggcgcctcaggccgacaccacccttcaaggatgccgtgtgcagggttct

SEQ ID NO: 217729 - DNA, 98 bp, Homo sapiens
  chr17:33568807-33568905
  hypo
agtaagacttccagcgccccggcccagactgcgacgacccagactgcgacgacccagtctgcgcctggcgcaggctccatagacggcttttcttcagc

SEQ ID NO: 217730 - DNA, 300 bp, Homo sapiens; identical to SEQ ID NO: 204555
  chr17:33814447-33814747
  hypo

SEQ ID NO: 217731 - DNA, 208 bp, Homo sapiens
  chr17:35336168-35336376
  hypo
cagtggagccttcacgcaattctttgttgaagaagttagggcctaaatgttaaggcttattgttattctgagttgataatctctgccttgctttaataatttttcctcatgcctgggtagcccgcgagttgcacaataatcactcacacagctttgtaatcaatgcccaaagtaataggattcctctggccaccggcaattaataaat

SEQ ID NO: 217732 - DNA, 35 bp, Homo sapiens
  chr17:35414066-35414101
  hypo
cctggaaagatgctgcgttccgaacctgtgcctaa

SEQ ID NO: 217733 - DNA, 38 bp, Homo sapiens
  chr17:35802039-35802077
  hypo
tacaggtgtgagccaccgtgcctggttgatacctccta

SEQ ID NO: 217734 - DNA, 31 bp, Homo sapiens
  chr17:35845347-35845378
  hypo
ttgatgaagattaaatgagccgggtgtggtg

SEQ ID NO: 217735 - DNA, 162 bp, Homo sapiens
  chr17:35872861-35873023
  hypo
gccagctctttgggaagtcgacagttaaaatggtacagacaccttatggcatagttcccgacgtctatgagaaggagtcccgacacctgatgccttactgggggatttagtgccactgaagcctgcgtcagcagcccgagcggggccggcatctgctccccg

SEQ ID NO: 217736 - DNA, 46 bp, Homo sapiens; identical to SEQ ID NO: 11164
  chr17:36762362-36762408
  hypo

SEQ ID NO: 217737 - DNA, 310 bp, Homo sapiens
  chr17:36876379-36876689
  hypo
gcaacttccgcccttctctcctgacccgtgtggcctcgaccccagcctcaggctccgccccaggtcttcacacctgtggctccccaagtcccgcctctcttctcagagctcacctgtgtccctccttaggatggcgccgccttttcaagggctgagcactggctcccctccaggccccgcccccggtcccctggccccgcctccgccccctcgcccctccctcaggttcctcgctctctccgcagtcgtggagatgctgaaggcgctgcacgcgctgcagaaggagaaccagcggctgcaagagcagatc

SEQ ID NO: 217738 - DNA, 222 bp, Homo sapiens; identical to SEQ ID NO: 204568
  chr17:36886754-36886976
  hypo

SEQ ID NO: 217739 - DNA, 37 bp, Homo sapiens; identical to SEQ ID NO: 204569
  chr17:36904350-36904387
  hypo

SEQ ID NO: 217740 - DNA, 450 bp, Homo sapiens; identical to SEQ ID NO: 204570
  chr17:36905017-36905467
  hypo

SEQ ID NO: 217741 - DNA, 61 bp, Homo sapiens
  chr17:36927315-36927376
  hypo
aggaccaaagaaccgaggaaagctgaggaggttgccagggctgtccggaggtgtgccatag

SEQ ID NO: 217742 - DNA, 42 bp, Homo sapiens
  chr17:36967822-36967864
  hypo
agacccctatcagtctcctttgaggggcgtggctcatgcaca

SEQ ID NO: 217743 - DNA, 195 bp, Homo sapiens
  chr17:37074888-37075083
  hypo
ccgccgacgaggacgaggtctccttccaggacggggacaccatcgtcaacgtgcagcagatcgacgacggctggatgtacgggacggtggagcgcaccggcgacacggggatgctgccggccaactacgtggaggccatctgaacccgcagcgcccccatctgtcttcagcacattccacggcatcgcatccgtc

SEQ ID NO: 217744 - DNA, 39 bp, Homo sapiens
  chr17:37445220-37445259
  hypo
gctgggattacaggcgtgagccaccgtgcctggcagaag

SEQ ID NO: 217745 - DNA, 34 bp, Homo sapiens
  chr17:37452478-37452512
  hypo
atctctcacagtaaacgtttccaaatcaatctat

SEQ ID NO: 217746 - DNA, 31 bp, Homo sapiens
  chr17:37455741-37455772
  hypo
agctggtcaggggccaggcacggtggcccac

SEQ ID NO: 217747 - DNA, 85 bp, Homo sapiens
  chr17:37483846-37483931
  hypo
cataagatgtacacacgcaccccccaaaaaccatatatttattaaagtacatccacaaggagactttaaaaaaaatacatctaca

SEQ ID NO: 217748 - DNA, 39 bp, Homo sapiens
  chr17:37694844-37694883
  hypo
aatgaataaatggcaaaccccggctacctgggagcggtg

SEQ ID NO: 217749 - DNA, 33 bp, Homo sapiens
  chr17:37701201-37701234
  hypo
gtttcttattccgaaagatctccagaggagttt

SEQ ID NO: 217750 - DNA, 71 bp, Homo sapiens; identical to SEQ ID NO: 204581
  chr17:37762839-37762910
  hypo

SEQ ID NO: 217751 - DNA, 339 bp, Homo sapiens; identical to SEQ ID NO: 204583
  chr17:37774745-37775084
  hypo

SEQ ID NO: 217752 - DNA, 336 bp, Homo sapiens; identical to SEQ ID NO: 204584
  chr17:37782849-37783185
  hypo

SEQ ID NO: 217753 - DNA, 76 bp, Homo sapiens; identical to SEQ ID NO: 204585
  chr17:37783775-37783851
  hypo

SEQ ID NO: 217754 - DNA, 220 bp, Homo sapiens
  chr17:37819039-37819259
  hypo
tgcctgccttcccccagggccgcctgccccggtacctcatccaccagagcctcgcggccaccatgtttgaatttgcctttcacctgcgacagcgcatcagcgagctgggggcccgggcgtgactgtgccccctcccaccctgcgggccagggtcctgtcgccaccacttccagagccagaaagggtgccagttgggctcgcactgcccacatgggacctg

SEQ ID NO: 217755 - DNA, 52 bp, Homo sapiens; identical to SEQ ID NO: 204587
  chr17:37823746-37823798
  hypo

SEQ ID NO: 217756 - DNA, 493 bp, Homo sapiens; identical to SEQ ID NO: 204588
  chr17:37823945-37824438
  hypo

SEQ ID NO: 217757 - DNA, 99 bp, Homo sapiens
  chr17:37881018-37881117
  hypo
cccgccttctgggcatctgcctgacatccacggtgcagctggtgacacagcttatgccctatggctgcctcttagaccatgtccgggaaaaccgcggac

SEQ ID NO: 217758 - DNA, 120 bp, Homo sapiens
  chr17:38105714-38105834
  hypo
ctaccaccacacacgcatatgtgagcacacacacacgtatctgcctcgggcccctgtaatgcagttgatcttccccaatcataatatatatttcagccgggcacagtggctcacgcctgt

SEQ ID NO: 217759 - DNA, 86 bp, Homo sapiens
  chr17:38179311-38179397
  hypo
gcagaccaggccaggtgtggggagccaggggacaggacccatgtcggcccacagccactccagcccaagtaccttaatcaggttgt

SEQ ID NO: 217760 - DNA, 147 bp, Homo sapiens
  chr17:38179430-38179577
  hypo
gggtgtcaaagatgtggatggagcggctgtccacccagcccttctccagcaccttggcaaaaatgtccgtcagcacctctttgatgggccgcttggggggcagcaggttccagtagggcattgtgtccaccccggtggagggaaact

SEQ ID NO: 217761 - DNA, 39 bp, Homo sapiens; identical to SEQ ID NO: 204593
  chr17:38228513-38228552
  hypo

SEQ ID NO: 217762 - DNA, 46 bp, Homo sapiens
  chr17:38244541-38244587
  hypo
gatcatgtccctgcgggcggctgtccgctacgaccctgagagcgac

SEQ ID NO: 217763 - DNA, 504 bp, Homo sapiens
  chr17:38249240-38249744
  hypo
tctggtttgcttttccttttcgtctcgtaaaggagagagaagtgcagagttcgattctgtacaagggggcagcggcagaaggccggccgggcgggtcactgggcgtccacccggaaggacagcagcttctcggaatgcatgttgttcagggtccgcaggtccggcagcttgagcagcagcttggtgaagcgggaagtctccaagggccggttcttcagcaccagagcccgaagagcccgcagcagcgtctcctggagctgctccaccgaagcggaattctccatgcccgagcggtctgtggggaagacgacagcagtgaggcggactccccgagctcctctgaggaggaaccggaggtctgcgaggacctggcaggcaatgcagcctctccctgaagccccccagaaggccgatggggaaggagaaggagtgccataccttctcccaggcctctgccccaagagcaggaggtgcctgaaagctgggagcgtgggctcagcaggg

SEQ ID NO: 217764 - DNA, 124 bp, Homo sapiens
  chr17:38251853-38251977
  hypo
gaggagggagcctggcgcagaccatttagggcctcgttatgacgctgggcagccaaggtgttgttgtcattgggggcaggtgggcagccctgattttcccagcgatgtggggtggtggctggag

SEQ ID NO: 217765 - DNA, 37 bp, Homo sapiens
  chr17:38380418-38380455
  hypo
ggaggctcggtgctcctgggcggacttttggtacagc

SEQ ID NO: 217766 - DNA, 436 bp, Homo sapiens; identical to SEQ ID NO: 204598
  chr17:38498112-38498548
  hypo

SEQ ID NO: 217767 - DNA, 493 bp, Homo sapiens; identical to SEQ ID NO: 204599
  chr17:38498596-38499089
  hypo

SEQ ID NO: 217768 - DNA, 78 bp, Homo sapiens
  chr17:38511651-38511729
  hypo
ctgcgaagcatcagcgccaagggtgaggctcacagacctggaggggtaccggcccccgacacctggcccaggccccca

SEQ ID NO: 217769 - DNA, 91 bp, Homo sapiens
  chr17:38513565-38513656
  hypo
caccacacacatgcgcgtgcgcacacacacaaacacacacacactggacagtagatgggccgacacacacttggcccgagttcctccattt

SEQ ID NO: 217770 - DNA, 321 bp, Homo sapiens
  chr17:38668670-38668991
  hypo
tggacttggtccccaggcctcggtgtggattcaggcctcggtgtggattcaggcttgccactcgggtcatggggtcttgggtggtcacgtctgtggctaaccacgctcacctggccactctggcctttggaccaactcgggcaaggagctgagcttgacggggagggaagccacggattggggtggacggaggcggtgagtgagagtagagtgttctggtctccaggctctgcaggctgagcaggggaggcacccagcacttgttacccagggaaaggaaactatgtcgataatgatttgtcagctatgggtcaaggactg

SEQ ID NO: 217771 - DNA, 240 bp, Homo sapiens
  chr17:38774319-38774559
  hypo
cattttgatggcagcctgggtttgttatccttcaaagatcgtctcttggaaggacaccagcctctgattacatttccgagcctgcctggaggcagctaagctaatccgacacgatttgggtggattcccttctggcctcatgttctgacacaacctctggcagcagtagggtgggaagatggacaaaataattacgccctatgagttgaaaggagaattaaaattaattccctcgtgcaa

SEQ ID NO: 217772 - DNA, 551 bp, Homo sapiens
  chr17:39658615-39659166
  hypo
gaggacctacttggcgtcctggccctcgagcaggctgcggtaggtggcgatctcctgctccagacgtgtcttgatgtccagcagcatcttgtactcttggttctggcactccatctcactgcggagctcgctcagctgggcctcgatgctgctgatgagtccctggatctgctgcagctgcagggcatagcggcactccgtctctgccaccgtgttctccagccccgctttctggtggagcgacagacaagaagttacagagggagccaggccagagggaaacctagaggtggtcgccaccgggcaggaggctgcaggcataccatgctcagctgggactgcagctcaatctccaggccttggagcgtgcgcctgagctccgtgatctctgtcttgctggtctgaatcatggcagtgttggtagacacctccttgttcagctctgcactctgaaatgcaagcaggaagaaggtggtggggaagctcagctcgagcagcctgaccaagaggctgtgtccgcccggcccccctggctatatgggatgggctat

SEQ ID NO: 217773 - DNA, 145 bp, Homo sapiens
  chr17:39659196-39659341
  hypo
ggaaccattcctcagcatcccggcggttcctctctgccatggcctcgtactgctccctcatctctgccagcacgcgggtcaggtcaatgcctggggtggcatccatctccacgttgacctggccgaccacctggttgctaaattc

SEQ ID NO: 217774 - DNA, 229 bp, Homo sapiens
  chr17:39659565-39659794
  hypo
tagctcttcattcaggctctcgatctgcatctccaggtcagtcttagacagagtgagctcatccagcacccggcgcaggccgttgatgtcggcctccacgctctggcgcagggccagctcattctcatacctaaaatagtaaaaaaatgaaatgttttttgaaaaagcaagacataaatgatatgagacattctccctacccctgcacgagactccagtacttccagac

SEQ ID NO: 217775 - DNA, 459 bp, Homo sapiens
  chr17:39672184-39672643
  hypo
tctcaggtctgtgatctccgtcttgctggtctggatcatttctgtgttggaggccacctctttgttcagctcctcagtctgtaggtcatgcacaacagaagtgagccccggggcctcctcggagactcagggacctggggcaggaagggcagggcaggatataaggcccaccttgctgaagaaccaggcctcgacatcccggcggttcttctccgccatggcctcgtactgctccctcatctctgccagcacacgggtcaggtccacacccggtgctgcgtccatctccacattgacctggccggccagctggctgctgaactccttcatctcctgcaggatgggagggacccacttagagacggagagcagaagagagacctgagagtctggcgtcacacatgccaatcctggctctgcccgtaacacaccccaaccgctgttccccattgcacatga

SEQ ID NO: 217776 - DNA, 118 bp, Homo sapiens
  chr17:39676657-39676775
  hypo
atgaccggcacctgcgcctgagtgccctcaccaggaggggctttgtcgttgggcatcagaacatgccctgtgagcctgagcatgttcttaggctcaacggcatcgaccttccatagcc

SEQ ID NO: 217777 - DNA, 452 bp, Homo sapiens
  chr17:39680350-39680802
  hypo
gtgtgaattgcacagggaagcggcggcggtggggggacacataccatgctcagctgtgactgcagctcaatctcaagaccctgaagggtgcgccgcaggtcagtaacctcggacctgctcatctggagctgctccgtgtggccagcgacctcccggttcaattcttcagtctgcagagagaggaagaagagggaataagcattgagtcagaccttcgcgtagggaacacaaagccctccccttcctaacccccaaagggtgcctgcttccctctacctacccggctggtgaaccaggcttcagcatccttccggttctgctcggccatgacctcatattggcttcgcatgtcactcaggatcttggcgagatcggtgcccggagcggaatccacctccacactgacctggcctcccacttggcccctcagcgtactgatttcctgtaaagat

SEQ ID NO: 217778 - DNA, 142 bp, Homo sapiens
  chr17:39681121-39681263
  hypo
cagctcttccttcaggccttcgatctgcatctccaggtcggtcctggccagggtcagctcatccagcaccctgcgcaggccgttgatgtcggcctccacgctcatgcgcagagcctgttccgtctcaaacctttcaaaggaa

SEQ ID NO: 217779 - DNA, 293 bp, Homo sapiens; identical to SEQ ID NO: 204601
  chr17:39683516-39683809
  hypo

SEQ ID NO: 217780 - DNA, 786 bp, Homo sapiens; identical to SEQ ID NO: 204602
  chr17:39683839-39684625
  hypo

SEQ ID NO: 217781 - DNA, 212 bp, Homo sapiens
  chr17:39788236-39788448
  hypo
cagcccccatctccttgctcgggaggctttgggggcacagcgagggtcggctgtgaaaacacggagagaatgcgtgtagggtgactcgaggcacagccctggtgcgtgctgcgcggcggggttggtgatgaggtgctggctgatcccgaagatcaggagcactgactcaccagggctcccctgggttccccgctgccagaaccaaccccaat

SEQ ID NO: 217782 - DNA, 118 bp, Homo sapiens
  chr17:40337520-40337638
  hypo
tgacaggcacttgcgtccacacccaggccagacaaaggcaagtctaagattagcctgctgcaggggggccgtctccaggctgggcccaaggaatggccgctgcggcgttcagaggcca

SEQ ID NO: 217783 - DNA, 105 bp, Homo sapiens
  chr17:40353736-40353841
  hypo
agatggagaggtcgcggggtcacgattgtgcgtgcgggatccactgactgtccattggccggcccaggagctcctccacacgccgcgctacgtccattgtgtcct

SEQ ID NO: 217784 - DNA, 138 bp, Homo sapiens
  chr17:40370156-40370294
  hypo
ctgcacaattacttgcgggtgttctcgttcttgagcagagacttggcctgctgctcactgatgatggtggccttcacctggggggggttcatgtgcacgttcagcttcccgcccaccagcaggcgcacagtggctgca

SEQ ID NO: 217785 - DNA, 662 bp, Homo sapiens
  chr17:40371745-40372407
  hypo
agtgtctgtgcctcacgctgcaaccaggcctccagagacacctgcttctgctggagggccgtctcccggctcagacgctcctgggggctcagctgggccagcgggccaaactgagctagaggaggggagaggaaaccatgaccatcacctcccagtgtccaacaggaggcccagagaagcccactcacccgttctggagcgagaccctcctgggctcagatactgcattaagggcaagtcggggttcctgacagccaggggggccaagatgaatgggtgccccaggaggcgcctctgggccctgctcgccagcctcctgactctgagccgtcccctctgggggcacacgggtgctggggcagctggggaggaggcctgcctgcctcctgcccgcctgcctcacagggctgccagccctcttctcgcggcccagcatgggtccaggctgtctggggtgtaagtgtgcccatgcccttgactgcaggtgaacctgggcaaatcgctttcctttcctgtgccttggcttccccacgtgtaaaacgggagattctcggcacctgcctcagtggggtgcattaagattaaatacatgaggacatggaagatgccagaaagctgcctgacatgggtgagctctgtgtgaggttcgtgcttcttggtta

SEQ ID NO: 217786 - DNA, 399 bp, Homo sapiens
  chr17:40375287-40375686
  hypo
aaggtcgctgcctccgaatggaaagtgtgctttctcccaaccccaccagagctgctttccagtccccaggcccaatcctcaagttgcacaatgtgcctccaccgcgcctcaccttggatcctcaggctctcctggtactggatgatgaagtactcctgagtctgctgcagcttttttaactcattctctgtgtcctgcgtgaccagtcgcagctcctcaaacgtctggttgatctggaggtgtttctgggacatggcatcagcaaggcttccagctggagagctaccctgggaacatatggggggcagtgcaaggcagtgcgaatgggaggaagactgaggccttaatccccaggaaaagccagctcctacaaccagggtaagaccccaaaaggtaaat

SEQ ID NO: 217787 - DNA, 81 bp, Homo sapiens
  chr17:40387769-40387850
  hypo
aggcgtgagccaccacgctcggccaggagcacatcttattcacgactgtgtccccagtgtctagtacggtggcttgcctat

SEQ ID NO: 217788 - DNA, 77 bp, Homo sapiens; identical to SEQ ID NO: 204604
  chr17:40427488-40427565
  hypo

SEQ ID NO: 217789 - DNA, 378 bp, Homo sapiens; identical to SEQ ID NO: 204605
  chr17:40428884-40429262
  hypo

SEQ ID NO: 217790 - DNA, 147 bp, Homo sapiens
  chr17:40447592-40447739
  hypo
ccatcctctcttccccgagttatttccattccatctgtctccagtgcagctctccggctgggatcctggttgacgccatgtcccagaagcaccttcagatcaaccagacatttgaggagctgcgactggtcacgcaggacacagaga

SEQ ID NO: 217791 - DNA, 36 bp, Homo sapiens
  chr17:40453899-40453935
  hypo
tgctaggctagatgccgtggcttacccctgtaatcc

SEQ ID NO: 217792 - DNA, 269 bp, Homo sapiens
  chr17:40456254-40456523
  hypo
tgctggcagggctgacctgagcgaagaccccagcccgaggtgtggacaggaccatgctcctggcctggggcccatgtggagctgggacccccctctcctttgcagcgagtgcagtggtgagatcctgaacaactgctgcgtgatggagtaccaccaagccacgggcaccctcagtgcccacttcaggaacatggtgaggacggggcccaccctcggagggcaggtctgcccagagctgagtccttgtaagcagccgccatctccctgtt

SEQ ID NO: 217793 - DNA, 330 bp, Homo sapiens; identical to SEQ ID NO: 204607
  chr17:40575109-40575439
  hypo

SEQ ID NO: 217794 - DNA, 76 bp, Homo sapiens
  chr17:40616719-40616795
  hypo
caatgtgcttgtatgtttctatgtgtgtatgcatataatatatatacacacatacgtgattaagctaataaattgt

SEQ ID NO: 217795 - DNA, 93 bp, Homo sapiens
  chr17:40705245-40705338
  hypo
agggactcaaaatccgtggccgctgcccgggaacgcgtgactgagggccgcgtggacgtgctgggtgagcctcctggaagcatatgggctcct

SEQ ID NO: 217796 - DNA, 40 bp, Homo sapiens
  chr17:40804385-40804425
  hypo
cggcctcccgaagtgcatgagccaccgcacccggccaaat

SEQ ID NO: 217797 - DNA, 108 bp, Homo sapiens
  chr17:40847766-40847874
  hypo
ggcctgtctacaacgttacgggagaggaggtctccttcagcttcagcaccagctccgcccctgctgtcctgctctacgtcagttcctttgttcgtgactacatggctg

SEQ ID NO: 217798 - DNA, 58 bp, Homo sapiens
  chr17:41131474-41131532
  hypo
gaagctgaggagatgcggaatactccgtgtggggacattaggaaaggggtagattcct

SEQ ID NO: 217799 - DNA, 147 bp, Homo sapiens
  chr17:41389669-41389816
  hypo
cagacagcaacagctcgtcatggaaagtgtggctgaagacaaagagatgaaaaaggcttcaagaaatttccactttgagtctcaaaaggcaacatagcaagacactgtttctttctttttttttttttttgagacggagtctcgctc

SEQ ID NO: 217800 - DNA, 43 bp, Homo sapiens
  chr17:41399427-41399470
  hypo
ccgagatcgcgccattcgactccaacacgcgaatcaagagcaa

SEQ ID NO: 217801 - DNA, 42 bp, Homo sapiens
  chr17:41570142-41570184
  hypo
cggagacaccgatcccgctctcgatcacgttccaggacccgg

SEQ ID NO: 217802 - DNA, 41 bp, Homo sapiens
  chr17:41692630-41692671
  hypo
atcccagacctgtgtcgccgcatgatcgcaagggctctctg

SEQ ID NO: 217803 - DNA, 90 bp, Homo sapiens; identical to SEQ ID NO: 204613
  chr17:41723688-41723778
  hypo

SEQ ID NO: 217804 - DNA, 41 bp, Homo sapiens
  chr17:41895347-41895388
  hypo
gcctgaatcctccctcgccctaaccccgggccctccctgga

SEQ ID NO: 217805 - DNA, 57 bp, Homo sapiens
  chr17:42019594-42019651
  hypo
gagtgtgcacacacacgtgcagtcagcagacggctcttctagcgtgacaggtctgtc

SEQ ID NO: 217806 - DNA, 84 bp, Homo sapiens; identical to SEQ ID NO: 204621
  chr17:42030245-42030329
  hypo

SEQ ID NO: 217807 - DNA, 191 bp, Homo sapiens; identical to SEQ ID NO: 204626
  chr17:42092357-42092548
  hypo

SEQ ID NO: 217808 - DNA, 355 bp, Homo sapiens
  chr17:42254322-42254677
  hypo
caccaggctgcggcgcgccggctcctggaggctggagctgatgcccgggcggccgggcgcaagcgccacacgccgctgcacaacgcttgtgccaacggctgcgggggcctggccgagctgctgctgcgttacggggcccgcgctgaggtccccaatggggcgggccacacgcccatggactgtgcgctgcaggccgtccaggactcccccaactgggagcctgaagtccttttcgccgcactgctggactacggggcgcagccagtgcgccctgaggtgcgctgggaggccctgacataggaggctcctgtgtgggggagcccgcggctggaactgctccgcttctggggaagac

SEQ ID NO: 217809 - DNA, 117 bp, Homo sapiens
  chr17:42289050-42289167
  hypo
gctctgtgctgggcacgtccttcatgttggccatgagctctgcgcagtacagcgagtagctgttcctatcagagccgcggggagagaggtgcagcccgtaagcgagcagggcagcag

SEQ ID NO: 217810 - DNA, 198 bp, Homo sapiens
  chr17:42292502-42292700
  hypo
gcagtaacagcactggactgggactctggggcactaaatcctgctctagcatcaatagttgtgtcacccgggacacttaaccctcctgcacctcagttccttgcccacaaaactgggataaccttttcctagggttacctttataaagacattgcaagtatcaaatgagaccatgacgggaaacgtcatagagggtga

SEQ ID NO: 217811 - DNA, 60 bp, Homo sapiens
  chr17:42395460-42395520
  hypo
cagggaaggaccccacgccctccatgctgggcctctgcggctccctggcctccattccca

SEQ ID NO: 217812 - DNA, 40 bp, Homo sapiens
  chr17:42395550-42395590
  hypo
acgagtgcctggtgagcgacagtcccgagggcagcccagc

SEQ ID NO: 217813 - DNA, 62 bp, Homo sapiens; identical to SEQ ID NO: 204629
  chr17:42402710-42402772
  hypo

SEQ ID NO: 217814 - DNA, 195 bp, Homo sapiens; identical to SEQ ID NO: 204630
  chr17:42402917-42403112
  hypo

SEQ ID NO: 217815 - DNA, 388 bp, Homo sapiens
  chr17:42427764-42428152
  hypo
ccaggggcagggggtgaagacggagtcaggaccattttttctcaggcttcctgctgtgaagacagggtgcactgctgtccgcacggtgccttctgcgacctggttcacacccgctgcatcacacccacgggcacccaccccctggcaaagaagctccctgcccagaggactaacagggcaggtgaggaggtgggagagcatcaggccaggggctggggcggggcctcattgactccaagtgtaggaaaaagtttcctccatcctggctgcccctcacgtttgctcctcttccagtggccttgtccagctcggtcatgtgtccggacgcacggtcccggtgccctgatggttctacctgctgtgagctgcccagtgggaagtatggctg

SEQ ID NO: 217816 - DNA, 152 bp, Homo sapiens; identical to SEQ ID NO: 204631
  chr17:42441042-42441194
  hypo

SEQ ID NO: 217817 - DNA, 75 bp, Homo sapiens; identical to SEQ ID NO: 204634
  chr17:42635073-42635148
  hypo

SEQ ID NO: 217818 - DNA, 87 bp, Homo sapiens; identical to SEQ ID NO: 204636
  chr17:42906495-42906582
  hypo

SEQ ID NO: 217819 - DNA, 159 bp, Homo sapiens
  chr17:42942200-42942359
  hypo
atttctgacctccatcgctgggtgagaaaaaattgctgtgatacctgtggcagggcacgaggatgacagagttaaggggccacgagcacattattacctgtgaactcgccaaagaactttttgcagaccagcctgagcaaggggcggatgttcagcttc

SEQ ID NO: 217820 - DNA, 63 bp, Homo sapiens
  chr17:42981556-42981619
  hypo
aggcctgtacttctgcggcacccgcaagggggactacttttacgcctacgatgtggacatcca

SEQ ID NO: 217821 - DNA, 207 bp, Homo sapiens
  chr17:42992858-42993065
  hypo
ctctggctctgctcgctcctgggatgcgagggctttatgaaggagtgggctagactggcgatgcccgggtgcccctggcaacaccccctggcatagcctgagggggtggggttgggccgcagcccagctatggggagagctcccctcaccccactgaggtcactgtgcccagaggcagagcttcctgggcacgccaactcctgcatg

SEQ ID NO: 217822 - DNA, 43 bp, Homo sapiens; identical to SEQ ID NO: 204639
  chr17:43045529-43045572
  hypo

SEQ ID NO: 217823 - DNA, 309 bp, Homo sapiens
  chr17:43121047-43121356
  hypo
cgctcacctactcacgaagctggacttgtccgaatcattctttggtctctcggctccctccggatttgggggaatgtttttctatacaattctgggtttttctcataactccatttccctaaacagtacctccctcctccctccttccacttgtataggccaaaagcctcggaatcctcctggcctctctcacaccctccatccaacccgcagtgcccggccagcgctacctcccacctgcacagcccacaaggagcccccggtgcatgagcgccaccatgtcgctgcggaagccctgcagcagcctct

SEQ ID NO: 217824 - DNA, 139 bp, Homo sapiens
  chr17:43121666-43121805
  hypo
cactcccttctctgcccaatcgtccccccatcagagactgtcaggtcctgtcccgctgaacccaacccccgtctggaactggctggaatcaccttaaaagctgtggcaagcggatgggtgcggtggctgacgcctgtaa

SEQ ID NO: 217825 - DNA, 85 bp, Homo sapiens
  chr17:43124006-43124091
  hypo
gcagctctatgtttgcccacggtagtgccaggtggcctacacacaggagaatgagaacacttaggtgatgcgtgaagattttctg

SEQ ID NO: 217826 - DNA, 33 bp, Homo sapiens
  chr17:43173433-43173466
  hypo
atttgtgagactccacgtcgtttttggtagttt

SEQ ID NO: 217827 - DNA, 185 bp, Homo sapiens
  chr17:43179707-43179892
  hypo
tttctagcaaaagcagctgccgggtgggacgctgactggggataaaatcctgggagtatgctgcttttcttctgaatgtaacccacagccgtgtctctctgggaagtactggtgtaatagtgtctgggtgggcagaccctggctgggccctggggtctgtccgcgaagtgctctaagtctagcag

SEQ ID NO: 217828 - DNA, 258 bp, Homo sapiens
  chr17:43180325-43180583
  hypo
agacagctgggctgcgaccaatggaaacaaaggacattccagtagtgcaccagctcctcaccaggtacttgaagcaatttcaccttacgcccgtcatgagccaggaggaggtggagcactggttctacccccaggagaatatcatcgacactttcgtggtggaggtgagtcagggagtggtgttccaggtctctaacacgttcccagagaggcacccccctgagtggccgggttcccagggctcgagtgttggcacct

SEQ ID NO: 217829 - DNA, 88 bp, Homo sapiens
  chr17:43181005-43181093
  hypo
aaacattttgttcccgggccgcagtgccactgtgcatgcttgacattgcctctttattgccttcccttcagaacgcaaacggagaggt

SEQ ID NO: 217830 - DNA, 53 bp, Homo sapiens
  chr17:43196206-43196259
  hypo
aatgagctgctgggcgcgggccagtgtggcgccctcctcgccctggtcctcca

SEQ ID NO: 217831 - DNA, 98 bp, Homo sapiens
  chr17:43211171-43211269
  hypo
acaggcgtgagccaccgcgcccggccctgaattttcttcttgattatcgtattcgcctttgtgcttttgatcctgccgttccttcctccagaaacaac

SEQ ID NO: 217832 - DNA, 436 bp, Homo sapiens
  chr17:43246869-43247305
  hypo
cggtgagttccagcggaaggacttctctgagacttacgaacgcttccacaccgagagcctgcagggccgcagcaagcaggagctggtgcgagactacctggagctggagaagcggctgtcgcaggcggaggaggagactaggaggctgcagcagctgcaggcgtgcaccggccagcagtcctgccgccaggtggaggagctggctgccgaggtccagaggctccggaccgaaaaccagcggcttcgtcaggagaaccagatgtggaaccgagagggctgccgctgtgatgaggagccgggtacctaggggtgcctcccagcctggtggacccaaggagaaggtcccatttcgtgcacactcaggccagctgggtctcaaggaggcaggtggcagatgaaaaccaccgtcaacaccctgtgcgccctgagaacagct

SEQ ID NO: 217833 - DNA, 113 bp, Homo sapiens
  chr17:43321183-43321296
  hypo
acttcctggagctgctgatgcgcttcctgcccacagagtatgagcgcagcctcatcacccgctttgagcgggagcagcggccaatggaggagctgtcagaggaggaccgcttc

SEQ ID NO: 217834 - DNA, 88 bp, Homo sapiens
  chr17:43321347-43321435
  hypo
accttcctgggcaacttcccggacacagcccagctgctcatgccggtgtgggcggagcgggcagggcggtgtgacttgggaggggatg

SEQ ID NO: 217835 - DNA, 876 bp, Homo sapiens; identical to SEQ ID NO: 54190
  chr17:43324795-43325671
  hypo

SEQ ID NO: 217836 - DNA, 99 bp, Homo sapiens
  chr17:44799504-44799603
  hypo
ttcacgatcttggcgctcgaactgaacatggctttctcctgggagaacttgcagcgcctgcttaggaagagacccaaatctcgcgagagcacgtcaaaa

SEQ ID NO: 217837 - DNA, 571 bp, Homo sapiens
  chr17:44845576-44846147
  hypo
gcttagaaacagaagggggtcgtcaagaagacgagatgggcaaacaaccccattccctgcgcccaggctcccagcctcccccctgcttcccggagccctacctggtgccctacttgcaggtgtgcacgtcgtagatgcgaatacactcctggcagctgacgtagcagcaccagtggaagatgcagtggcatttttccttccgcttctccgtcctcgtgttgtggccccggccacagcagagcagatcgcagccatcgatgccgtgggaggtgacattgcaagtccggtcccttgtgccaaaggaacccgtctctgggttgggctcacaaaagttgggggagttctcgtagtagaccaggtccctctccgtgggtggcttgaagagcgagtacttggcccggagggtctccacccagcctcgggactcacggtgcttctctactaccatctccgaggcgctgtcatacttgtccttgaggaagtcaccgatggcacggaagtcaggctgcgcccaccagcaggtcttcacctcacagctgcccgacagcccgtggcacttgcatttgaggtg

SEQ ID NO: 217838 - DNA, 81 bp, Homo sapiens
  chr17:45599273-45599354
  hypo
tttttttggatttgacgtcaaggcaaacatcattgcaaactcaattccagcatgccagctccagagcactgtaacctttaa

SEQ ID NO: 217839 - DNA, 228 bp, Homo sapiens
  chr17:45885682-45885910
  hypo
tcccatagcctggctcggcccgcagcctccagtaggtattgttggtcacccaccactctttcccgctgctatccgtctgccgcctggtgggagaaggcggtggcagtgaggggtgaacatctagaaggcaggctagggtcctaaggtgctgcctcccacacctgccctgctccaagcagggctcatggggagacccagggcggagggcgaggccgaggcacctgaaga

SEQ ID NO: 217840 - DNA, 165 bp, Homo sapiens
  chr17:45894355-45894520
  hypo
agcacagaggatgcggccgctcaggcagggcgacagagacaactgacatcccagtggaagatgacagccaccctggcagaggcatgggcatggaggaacagagacaatcttgatacagtttggacatgggtaaggggtggggaggaaaccaggcgatgcatggct

SEQ ID NO: 217841 - DNA, 37 bp, Homo sapiens
  chr17:45970935-45970972
  hypo
tcacaccctgtcctccgccccgtgtgcgcacactttt

SEQ ID NO: 217842 - DNA, 33 bp, Homo sapiens
  chr17:46123911-46123944
  hypo
agccactgcgccgggcccagttctatgtttaaa

SEQ ID NO: 217843 - DNA, 233 bp, Homo sapiens; identical to SEQ ID NO: 204656
  chr17:46124668-46124901
  hypo

SEQ ID NO: 217844 - DNA, 165 bp, Homo sapiens; identical to SEQ ID NO: 204657
  chr17:46125148-46125313
  hypo

SEQ ID NO: 217845 - DNA, 152 bp, Homo sapiens
  chr17:46152422-46152574
  hypo
ccggctccaaacctcgagcaaagcctcgtggcttttctgactgtaaaaacaagatgggtagaacaattttatctatatgggactattatccagactggaaccattcctgtgtctctgattaatgtaatcacaaactcttttttttttttttt

SEQ ID NO: 217846 - DNA, 152 bp, Homo sapiens
  chr17:46152814-46152966
  hypo
aaggggctgggattacaggtgtgagccaccgtgcccggcccaatcacaaactcttttgccaatatttcaccaataccttggctcaagtaagagagctgttagaatcctttggagtgattattcatcaatgtctgaagcgcatgagattttcc

SEQ ID NO: 217847 - DNA, 189 bp, Homo sapiens; identical to SEQ ID NO: 204660
  chr17:46659085-46659274
  hypo

SEQ ID NO: 217848 - DNA, 45 bp, Homo sapiens; identical to SEQ ID NO: 204661
  chr17:46659384-46659429
  hypo

SEQ ID NO: 217849 - DNA, 83 bp, Homo sapiens; identical to SEQ ID NO: 204666
  chr17:46687507-46687590
  hypo

SEQ ID NO: 217850 - DNA, 162 bp, Homo sapiens; identical to SEQ ID NO: 204670
  chr17:46696376-46696538
  hypo

SEQ ID NO: 217851 - DNA, 171 bp, Homo sapiens; identical to SEQ ID NO: 204675
  chr17:46724200-46724371
  hypo

SEQ ID NO: 217852 - DNA, 88 bp, Homo sapiens; identical to SEQ ID NO: 204677
  chr17:46805484-46805572
  hypo

SEQ ID NO: 217853 - DNA, 57 bp, Homo sapiens; identical to SEQ ID NO: 204678
  chr17:46806111-46806168
  hypo

SEQ ID NO: 217854 - DNA, 239 bp, Homo sapiens; identical to SEQ ID NO: 204687
  chr17:47073560-47073799
  hypo

SEQ ID NO: 217855 - DNA, 152 bp, Homo sapiens; identical to SEQ ID NO: 204688
  chr17:47074409-47074561
  hypo

SEQ ID NO: 217856 - DNA, 39 bp, Homo sapiens
  chr17:47442684-47442723
  hypo
gttacaggcgtgagccatcgcatccggacttatgtccat

SEQ ID NO: 217857 - DNA, 95 bp, Homo sapiens
  chr17:47583840-47583935
  hypo
cgggctcgggcctcgtgttctcctgccaggacaagcagaacaccgtgtgcgaggagtgccccgacggcacgtattccgacgaggccaaccacgtg

SEQ ID NO: 217858 - DNA, 92 bp, Homo sapiens
  chr17:47895284-47895376
  hypo
ctgaagaatatgcacggctgggacgtctctatatgtgtgaattctgtttaaaatatatgaagagccaaacgatactccgccggcacatggtg

SEQ ID NO: 217859 - DNA, 162 bp, Homo sapiens
  chr17:47911774-47911936
  hypo
gggattacaggcatgagccgctgcgcccaaccttcttctgctgtcgagatactgctcatcacctgcctgctccagaattcatgtggcttctcattgctcaatggattaagttcatgtttatcctggctttcaagtctttccgtaagctgactcaacctacat

SEQ ID NO: 217860 - DNA, 63 bp, Homo sapiens
  chr17:47998383-47998446
  hypo
gtaggctggccaagcgggcaccccaggtccgggcttttctctcccttccgctcacctggaaag

SEQ ID NO: 217861 - DNA, 212 bp, Homo sapiens; identical to SEQ ID NO: 204700
  chr17:48072403-48072615
  hypo

SEQ ID NO: 217862 - DNA, 42 bp, Homo sapiens
  chr17:48139110-48139152
  hypo
ttcctgggtccagccaggcacggtggctcacgcttgtaatcc

SEQ ID NO: 217863 - DNA, 140 bp, Homo sapiens
  chr17:48243308-48243448
  hypo
ggacccagctgccccgagccacctccctccttccctcctctcctccctgccccctgtctctgtcactcaccgggcgggccaggccgggcagccatggctgagacactcttctggactcctctcctcgtgggcaagttggg

SEQ ID NO: 217864 - DNA, 33 bp, Homo sapiens
  chr17:48268219-48268252
  hypo
gccagtcagaccacggacgccatctttgccagg

SEQ ID NO: 217865 - DNA, 40 bp, Homo sapiens
  chr17:48555662-48555702
  hypo
ctgaggcaggaggatcgcttgaggccgaggagttcaagac

SEQ ID NO: 217866 - DNA, 325 bp, Homo sapiens
  chr17:48565118-48565443
  hypo
gggcagcctgtggggtcacccgtgctgctcggggagctgtttcctgagacttcccctgatcttgacattcaagaagcgagcacggggccgaggcaggtgcgccatcagataacctgggaccactcaggtttctcccagctgccagggctcgtgccacttgagacatccgggcgctccctgccaggacacctcataaggcccgtgcagaggagctgggtaggagccagggccaagtcggggtggcacagatcaccttctgtgactcagtctggtctttccttcaccagatgaatcagaagctcccggaggtggagccccagaatct

SEQ ID NO: 217867 - DNA, 144 bp, Homo sapiens
  chr17:48687014-48687158
  hypo
gtgcctccctgccccgtgaccctgaccagctagccacattgcttgtcttcctcaagtgccctgtgcccccagcttcgggctggacattcagagccagccacccaatgggctcagcgcaccccacccataggcagagtgaggtgg

SEQ ID NO: 217868 - DNA, 92 bp, Homo sapiens
  chr17:48687246-48687338
  hypo
aatgctggacgatgtaattgcttccggcagctcagccagcgctgcgtcaggtactgcgtctggggtgtgggctcatgcgtgtggggacatgc

SEQ ID NO: 217869 - DNA, 156 bp, Homo sapiens
  chr17:48763550-48763706
  hypo
tctcaagaaaaaaaactttacatttgcccagcacttaacaatattcaaagcactctggcctccactttctcctttaatctttaccatggtcctgtgggccagaaacgagcctccacggtttgaaatgatttcctcgcagcagttcagctggtaagg

SEQ ID NO: 217870 - DNA, 231 bp, Homo sapiens
  chr17:48776791-48777022
  hypo
aaaaatggctggaatgctggcgctggtcctgcatacgtcccattttgaggctccagagacattggtggcttggacgggacagaagaaaacagggagcggctctgactcactggtggctgacaaacaggacccggttttgtgctttctggtgttctgagtatggcagagggggccgacacatcaccattctgaactagtgccaaagaggtgtggtcccggggaaaggtccct

SEQ ID NO: 217871 - DNA, 140 bp, Homo sapiens
  chr17:48844995-48845135
  hypo
gaacccagatgttcgggtaacgctcacatttcatttaaccctccaatgacaaaagacgggcaaacagacggggcatcagggtgggcctcagcatcaaaaaactggagggagctggctgggtgcggtggctcacgcctgta

SEQ ID NO: 217872 - DNA, 105 bp, Homo sapiens
  chr17:48881298-48881403
  hypo
tgtgttctacatcctcgagatttataatgatgataatggggatgataatgactcatgtattttattgttcctacttttcaggcacagttttttgtttgtttgttt

SEQ ID NO: 217873 - DNA, 60 bp, Homo sapiens
  chr17:48911127-48911187
  hypo
agcagctggaacacgggctgatgaaattacggggaattcaaagcagccggcgtcgcccgc

SEQ ID NO: 217874 - DNA, 98 bp, Homo sapiens
  chr17:48911230-48911328
  hypo
tccaataatttagaggattaggatctgacacccttcattagcgatttgacataagcagaaaagacagatcctgcagaatggccgcacaacgggaaggg

SEQ ID NO: 217875 - DNA, 115 bp, Homo sapiens; identical to SEQ ID NO: 204711
  chr17:49028000-49028115
  hypo

SEQ ID NO: 217876 - DNA, 36 bp, Homo sapiens
  chr17:49129052-49129088
  hypo
cctgggcaacacaacgagactccctcttaaaaaaaa

SEQ ID NO: 217877 - DNA, 34 bp, Homo sapiens
  chr17:49229605-49229639
  hypo
tacttatttattttatttattttttatttttttg

SEQ ID NO: 217878 - DNA, 163 bp, Homo sapiens
  chr17:49281027-49281190
  hypo
gattacaggtgtgagcggccatgcccggcctttaatttccatattactctaacattactatgtgtaaaatagcattaaagtacacatataaaaaaattacggtaagggtaaataaactacttacttctaggaggaacaagaggttttccgctggctgcacacc

SEQ ID NO: 217879 - DNA, 78 bp, Homo sapiens
  chr17:52832078-52832156
  hypo
ctcttacagagggcacggcggtcggccagctgggagcaagcctcgtggcccaggctgcccccccgctcactgcctggc

SEQ ID NO: 217880 - DNA, 36 bp, Homo sapiens
  chr17:53314420-53314456
  hypo
tgagcaaccgctcccggcctcccaaagctttagatg

SEQ ID NO: 217881 - DNA, 76 bp, Homo sapiens
  chr17:53409743-53409819
  hypo
ttagcactaggaaacatatccgagtcacgcagcaccaaagtatgttagcagcagcgaatccttatgggtctgcagc

SEQ ID NO: 217882 - DNA, 353 bp, Homo sapiens; identical to SEQ ID NO: 204717
  chr17:54910847-54911200
  hypo

SEQ ID NO: 217883 - DNA, 295 bp, Homo sapiens; identical to SEQ ID NO: 204718
  chr17:54911484-54911779
  hypo

SEQ ID NO: 217884 - DNA, 527 bp, Homo sapiens; identical to SEQ ID NO: 204719
  chr17:54911874-54912401
  hypo

SEQ ID NO: 217885 - DNA, 271 bp, Homo sapiens
  chr17:54976882-54977153
  hypo
atcaaggtcatgtagcggaggctgggtcaacacttgttcctttcccactattctttctctcccctcctcccacataccagccacctatagctttgcccccacgcagcacttccacaatggggctgcaccgccaccgatttcagaagcccttctgcaaggacactcggcaggccaagctgagattcaagcccaatcttggactacacaacagagatttactatgggccaggctctgtgctaggcactagggaaatagcgttgaagaaaaatc

SEQ ID NO: 217886 - DNA, 93 bp, Homo sapiens
  chr17:55037155-55037248
  hypo
tgcctagctaagcgcggatgtgctaaatcaaggctgaaagaaagcctggccctgcccttaggcatcagggattttccaagtttgattctcctg

SEQ ID NO: 217887 - DNA, 58 bp, Homo sapiens
  chr17:55378749-55378807
  hypo
cacatataaaatatcgcatacatacaaaaacatgtgagatctccgtgtaaataggaat

SEQ ID NO: 217888 - DNA, 66 bp, Homo sapiens
  chr17:55379076-55379142
  hypo
gacatttgagttgccgagtttaatttttggctagctcaaaccgtgctgcagcgaatattcttggtt

SEQ ID NO: 217889 - DNA, 34 bp, Homo sapiens
  chr17:55426663-55426697
  hypo
ttgtgtgtgtgtgcacgtgcgcttccatccctga

SEQ ID NO: 217890 - DNA, 44 bp, Homo sapiens
  chr17:55519664-55519708
  hypo
ggattacaggcgtgagccactgcgcctggccaacacagctgatt

SEQ ID NO: 217891 - DNA, 207 bp, Homo sapiens
  chr17:55644759-55644966
  hypo
gaaattataatgcaattaaattgtgtgtggatgttctggcatagcgagtgtgaaagccaggggcttggcaggccgccatgttgtaccttgactgtaatgagtccctgggctggcagcttgcgagtgtcattcataatattgtccatgctgggttactgtaaagtgcagctgccttaaccggcagttaaccggcgactgccagtctct

SEQ ID NO: 217892 - DNA, 182 bp, Homo sapiens
  chr17:55752305-55752487
  hypo
attttggcgcgcccgcttccccggcaggctccaacccggcgcggcccggaggcttcccgggggccaacagcccaggacctgtcgccgatctctacggccctgccagccaggactccggagtggggaattacataagtgcggccagcccacagccgggctcgggcttcggccacggcatagct

SEQ ID NO: 217893 - DNA, 382 bp, Homo sapiens
  chr17:55753392-55753774
  hypo
gttttgagctaagatgggtgcgtctgcagtcccaggccacgttcctgtcagactccgcttctgagtgacagctggcaagccctgacttgggggccacgctgcggagaacaaaacatgtgcagacagtctagggcaccaaggtggcctcattcatgccccctggcattgggagctcctccctcatacacacactcacacgcacgcatgcatgcacacacgcacacagacatgcacgcacacgcacgcacacacgcacacacaggcgcacacacgcctgccagccctacttgtgcaggatgggtccttgttcagctccgctcccaagccagtatcacttaagtcagtagtctgatgaatctaatcccttcggatcaactgtggt

SEQ ID NO: 217894 - DNA, 70 bp, Homo sapiens
  chr17:55828323-55828393
  hypo
tgcaactccgcaactcggattggagccatccatcagaggccctgccagcccagggcggcactttaattaa

SEQ ID NO: 217895 - DNA, 269 bp, Homo sapiens
  chr17:55917219-55917488
  hypo
tcgttttcttccaacgcagtctgtggtctgacactcaagtgttcggatttccgggaaacgtgactacctccgtgttgcttaaaagaccagatttaagtatcacagagatgttatcattttcactcaattaattcgctaaagatatataactaggcacattctgtcactgagtgaaaaatttagcactaatatcttagatccaattctactataacaaatagtaaacatgattttaaaaagtctatagggccgggcgtggtggctcacgc

SEQ ID NO: 217896 - DNA, 420 bp, Homo sapiens; identical to SEQ ID NO: 204721
  chr17:56032083-56032503
  hypo

SEQ ID NO: 217897 - DNA, 610 bp, Homo sapiens; identical to SEQ ID NO: 204722
  chr17:56401719-56402329
  hypo

SEQ ID NO: 217898 - DNA, 1162 bp, Homo sapiens; identical to SEQ ID NO: 204724
  chr17:56429044-56430206
  hypo

SEQ ID NO: 217899 - DNA, 32 bp, Homo sapiens
  chr17:56471400-56471432
  hypo
agcgaaactccgtctccaaaagaaacagaatt

SEQ ID NO: 217900 - DNA, 150 bp, Homo sapiens
  chr17:56569817-56569967
  hypo
ctgcgcctggcctgccctgttttttgtcatactaaatcatacaaaacatcttacctgcaatggtgtcttcgtttggccaaccagaattcacagtcacagttatagcagtgtgatgccatatggtctggaacccagcgagtcacctaatag

SEQ ID NO: 217901 - DNA, 209 bp, Homo sapiens
  chr17:57185658-57185867
  hypo
gggattcagagtaatgagaagtggcccttgctctcaaggagcagtacagaagacaaataagacaaattgcaatacttacatgataaatagttaagattcttgtatgtttgccgaagaacctaagaatgtcgaaggacttattgcaccaattcataatagcgaacaattagaaacctgtacagctgattagaggccgttggttgcaagca

SEQ ID NO: 217902 - DNA, 39 bp, Homo sapiens
  chr17:57244237-57244276
  hypo
tataggaccgggcgcggtggcttatgcctgtaatcccag

SEQ ID NO: 217903 - DNA, 62 bp, Homo sapiens
  chr17:57297129-57297191
  hypo
tcagtcctgggtgatttatttcttttgcattgaagtgtgtggcttttcgtgtgttagcagtt

SEQ ID NO: 217904 - DNA, 180 bp, Homo sapiens
  chr17:57476111-57476291
  hypo
ctcctccaagtaggccgaccttctcggaaaattcaccctaaaagtctcacaaaagaatgagttcatggggagattctgtaaagtgatgaactgagatgaaagcagccaacagcccaggagcttttcagaatagcgtctgcagcagaaccagtttccattcagagcgcgtccttggtggaa

SEQ ID NO: 217905 - DNA, 76 bp, Homo sapiens
  chr17:57591255-57591331
  hypo
ccgccttggcctcccaaagtgctgggattagaggcgttatccaccctgtccagccggctttcaggcttttaaaaag

SEQ ID NO: 217906 - DNA, 159 bp, Homo sapiens
  chr17:57787136-57787295
  hypo
tgatcctttttggtcgtcatgtattgtcacttcagaacttccaagtgcagaaaaagctgaagttttttgcctacgtatagttaactaaagagtagaagtagtcctatcttacttacattaaataagaaaccttattattgggccgggcgcggtggttca

SEQ ID NO: 217907 - DNA, 31 bp, Homo sapiens
  chr17:57832470-57832501
  hypo
ctttttcttttttttttagacggagactcac

SEQ ID NO: 217908 - DNA, 77 bp, Homo sapiens
  chr17:57937325-57937402
  hypo
actcagcattctacgtggttactttaacagaatggaactttgaaaacatttttttttttttttttttttgagacgga

SEQ ID NO: 217909 - DNA, 59 bp, Homo sapiens
  chr17:58512811-58512870
  hypo
gatggcattgagacgtaggcactgggcgcaggatgcagcggcgcgcgggctttgctcgg

SEQ ID NO: 217910 - DNA, 36 bp, Homo sapiens
  chr17:58590466-58590502
  hypo
gcgcctgaaacccagcgagctcggaaggtgtccaga

SEQ ID NO: 217911 - DNA, 801 bp, Homo sapiens; identical to SEQ ID NO: 204729
  chr17:58677543-58678344
  hypo

SEQ ID NO: 217912 - DNA, 77 bp, Homo sapiens
  chr17:58690758-58690835
  hypo
agagttgtactgcctaggttcgaattccagcttctccacttactgagagttgacagcgtgctggcagccctcgctgg

SEQ ID NO: 217913 - DNA, 242 bp, Homo sapiens; identical to SEQ ID NO: 204730
  chr17:58700868-58701110
  hypo

SEQ ID NO: 217914 - DNA, 125 bp, Homo sapiens; identical to SEQ ID NO: 204731
  chr17:58711213-58711338
  hypo

SEQ ID NO: 217915 - DNA, 191 bp, Homo sapiens; identical to SEQ ID NO: 204732
  chr17:58725252-58725443
  hypo

SEQ ID NO: 217916 - DNA, 250 bp, Homo sapiens; identical to SEQ ID NO: 204733
  chr17:58733952-58734202
  hypo

SEQ ID NO: 217917 - DNA, 1530 bp, Homo sapiens; identical to SEQ ID NO: 204734
  chr17:58740342-58741872
  hypo

SEQ ID NO: 217918 - DNA, 749 bp, Homo sapiens; identical to SEQ ID NO: 204735
  chr17:58742892-58743641
  hypo

SEQ ID NO: 217919 - DNA, 258 bp, Homo sapiens
  chr17:59239010-59239268
  hypo
atctggaaaggtgatgtcaacggagggtagggtggttgctggtggaggggagtagccagcgcccctcccctcagcacacataccagcccccgcaattccagtttcatggtgcctgagttgctgtctggttggttgaactcattctcctcagcttatatttaactcgtcgcttgttctggaaaagtagtagtactgccttctctggcctttataaacatgattgctggacaaagatgagcagcacggatttgctgcgat

SEQ ID NO: 217920 - DNA, 41 bp, Homo sapiens
  chr17:59395455-59395496
  hypo
ctacatgccgctcctcggctcctccccgccaccatcacacc

SEQ ID NO: 217921 - DNA, 162 bp, Homo sapiens
  chr17:59434280-59434442
  hypo
aggctcacctgcccccggctgagtcaggaccgagcacaggacttgacagaggaggcatcgcagcaaggtcaggtgcctcccgtgcttcttatgggcccacctggtcccagcatgagtgcttctcccaggaggcatttttttgtctctcgactttttctttct

SEQ ID NO: 217922 - DNA, 180 bp, Homo sapiens
  chr17:60014065-60014245
  hypo
gtaataataataataaataaaataagagattgattccagttactctcttttaggtatgtactgcattgttattcatagcactttagaggacttgtcgaactaattatgttcatacaagtgtgtttccaaatatactgaaggcttaaggtcagaggtttgtatctctcttttttttttttt

SEQ ID NO: 217923 - DNA, 32 bp, Homo sapiens
  chr17:60084915-60084947
  hypo
gagttagaccttggccgggcgtggtggttcac

SEQ ID NO: 217924 - DNA, 167 bp, Homo sapiens
  chr17:60525979-60526146
  hypo
cagaacctggtggatcgccgactgcaggtgaaccgaggaaagcaactgacaatgtaccgggtttggattcagtgcaaatactgcaagccccttctgtccagcaccagctgagaggcacctgctgccaacacgatgcaagcccattgtgtttccgggcttttttaaaa

SEQ ID NO: 217925 - DNA, 38 bp, Homo sapiens
  chr17:60564359-60564397
  hypo
aaatatgattgcaggctgggcgcagtggcttacgcctg

SEQ ID NO: 217926 - DNA, 87 bp, Homo sapiens
  chr17:60564888-60564975
  hypo
aaaaaaaagtaagtcagcaaggagatatctgtaaaaatttatgatattcttttaatctgcaggaattctttacttaaatccttggca

SEQ ID NO: 217927 - DNA, 36 bp, Homo sapiens
  chr17:60565575-60565611
  hypo
tcagccaccgtgcccgggccaaggaactctttttct

SEQ ID NO: 217928 - DNA, 150 bp, Homo sapiens
  chr17:60753744-60753894
  hypo
ttcgagcaggccttcgtcagcagcctcatctacaactgggagggcgagtacttctggacggccctgcaggacctcaacagcaccggctccttcttctggctcagtggggatgaagtcatgtacacccactggaaccgggaccagcccggt

SEQ ID NO: 217929 - DNA, 235 bp, Homo sapiens
  chr17:60754652-60754887
  hypo
gcgctggccactggcagcgccatggggctgtgggaggtgaagaactgtacctcgttccgggcccgctacatctgccggcagagcctgggcactccagtgacgccggagctgccggggccagatcccacgcccagcctcactggctcctgtccccagggctgggcctcggacaccaaactccggtattgctataaggtagggcagcctgttggccgggtagggggcagggggagga

SEQ ID NO: 217930 - DNA, 49 bp, Homo sapiens
  chr17:60758441-60758490
  hypo
agcactggtggatcggcctgcacacctctgagagcgatgggcgcttcag

SEQ ID NO: 217931 - DNA, 217 bp, Homo sapiens
  chr17:60766571-60766788
  hypo
gctggcacgtgtggcgtcaaggaccctgaggttccaggtccaagacacctccagctccatgcgtaggtggcctctgcgccgggttccttgggtaggaggaggtcaaggccctcacctccctgtccatttgttagcaaacatgtattattaataacaacagggctgacacctaccaagccttggtctgggccaagcgccgagtctggtggagaccggg

SEQ ID NO: 217932 - DNA, 116 bp, Homo sapiens
  chr17:60766818-60766934
  hypo
cttgtgcctgggaacggggtgagggaagcagagcccagcctgaaccctgaccccttccctgtagacccctccctgagcccgtccccagcagcgctgccccccgccccgggcactga

SEQ ID NO: 217933 - DNA, 229 bp, Homo sapiens
  chr17:60767107-60767336
  hypo
tggctggcgaggaggtgggctcccgacacttttgccctgggccccagccttgcccgggttcccctccctgccccttcctgcccccgccttatccgcaccctatcctgactattcccttcctcccaccccatggccccccatgcccagggctctcggcggtactcctgggtctcagaggagccgctgaactacgtgggctggcaggacggggagccgcagcagccggggg

SEQ ID NO: 217934 - DNA, 46 bp, Homo sapiens; identical to SEQ ID NO: 204741
  chr17:60885402-60885448
  hypo

SEQ ID NO: 217935 - DNA, 178 bp, Homo sapiens; identical to SEQ ID NO: 204742
  chr17:60885548-60885726
  hypo

SEQ ID NO: 217936 - DNA, 34 bp, Homo sapiens
  chr17:61000668-61000702
  hypo
agccaccgtgcacggcctgtcatcttgttcttaa

SEQ ID NO: 217937 - DNA, 118 bp, Homo sapiens; identical to SEQ ID NO: 204745
  chr17:61553820-61553938
  hypo

SEQ ID NO: 217938 - DNA, 48 bp, Homo sapiens; identical to SEQ ID NO: 204746
  chr17:61553939-61553987
  hypo

SEQ ID NO: 217939 - DNA, 60 bp, Homo sapiens; identical to SEQ ID NO: 204747
  chr17:61554094-61554154
  hypo

SEQ ID NO: 217940 - DNA, 103 bp, Homo sapiens
  chr17:61637142-61637245
  hypo
acagagtgggactccgtctcaaagaaaaaaaaaccttgtaccagaattccagataaatggaagaatgtaaacatataactgtaaaacacgggagaatcttggt

SEQ ID NO: 217941 - DNA, 147 bp, Homo sapiens
  chr17:61817226-61817373
  hypo
cgggacggctgctccgacgaaggcccgggcctggggagatggaatcggtggcagagcgaggagtgactggctccggcagtgcaccaggcaccccgccaggcaggtacctgttcctggtttcaaactccggagctcaagcaatcctac

SEQ ID NO: 217942 - DNA, 92 bp, Homo sapiens
  chr17:61864835-61864927
  hypo
cctttactcattcagtgttacgtcctactgggctgttgctcactgtgggattagaagccattgaaacaggctgggcgtggtagctgggcgtg

SEQ ID NO: 217943 - DNA, 240 bp, Homo sapiens; identical to SEQ ID NO: 204750
  chr17:61921000-61921240
  hypo

SEQ ID NO: 217944 - DNA, 148 bp, Homo sapiens
  chr17:62010938-62011086
  hypo
ttagatcttggcctaggcctcggacctgataaggtgggggccactctcaaggggtgcaggccaggacctgagccacggaagtcaggggcaggagggttaaggtttcatccgaggaacagcccgttccgggcagccccagatgttcttt

SEQ ID NO: 217945 - DNA, 37 bp, Homo sapiens
  chr17:62209843-62209880
  hypo
gaatttcttatgcatcgtccacatgcttcatgcactt

SEQ ID NO: 217946 - DNA, 197 bp, Homo sapiens
  chr17:62782877-62783074
  hypo
gtctgcgatctgcggagggctggtaaactgaggccccaggcctttcaagcagctgcactgagtcgccatggcaccctgcctagagaacttctacccccagtttccatgcgggcaagaaaagaaaacctccctgaatcaggctgagtagtggcagcatccagcccgtgggtactgaggtcactcggggcttatgggat

SEQ ID NO: 217947 - DNA, 62 bp, Homo sapiens; identical to SEQ ID NO: 204753
  chr17:62915906-62915968
  hypo

SEQ ID NO: 217948 - DNA, 350 bp, Homo sapiens
  chr17:63534022-63534372
  hypo
cattcggctccctacgcaggagcacgcacacccgtgtgcacgcccacagccacgcccatgcgcacacgcacaggcccgcctacacaagcacatatccacacgcatatgcacacccacacgcaacccatgcacatgcgcacacagcccacgcccaggcacacacccacacgcagcccacgcgcatgcgcatgcaacccacgcacatgcgcacaccctaacgcaccccatgcacatgcgcatacacatacgagcgctcacgccgtggacggaagcaggaagaaggcctaggccgcattacctctcggatctgctgcaggcgctcctccaggctgtggcggctctccaactcc

SEQ ID NO: 217949 - DNA, 1700 bp, Homo sapiens; identical to SEQ ID NO: 204754
  chr17:63555694-63557394
  hypo

SEQ ID NO: 217950 - DNA, 121 bp, Homo sapiens; identical to SEQ ID NO: 204755
  chr17:64257870-64257991
  hypo

SEQ ID NO: 217951 - DNA, 297 bp, Homo sapiens
  chr17:64672028-64672325
  hypo
gcctgcatggttttagaggttccaagtcagagcccctaaaccccttgccttattgctagacagcttgaccgcccccggaacatcacgtgggaagggcgctcggtaaatcctgttctggaggcaatctgtcactccaccagtttcccaatcaacatttgccgaggagttctggctcccggtgcagaactgacttgtggcgacgtgagggaactggcagcttcttagacccaagttctccctcgcagcatcgtcagaagaggcccaaagtagagacgcaaacaaaccctgagaacagcg

SEQ ID NO: 217952 - DNA, 73 bp, Homo sapiens
  chr17:64672597-64672670
  hypo
cttgtggcccagcgctactgcgcacatgttcctttaagatccctatttccgaggcagccgtggcataattaaa

SEQ ID NO: 217953 - DNA, 437 bp, Homo sapiens
  chr17:64751203-64751640
  hypo
tcagctagccttaccgaagagctaaaaagagattcatcccaaacaagagcttccttggaagcattccatgaagacttgaaacggtgctgcctcccaccacctgacccagtattgtcagtgcctcctctgaggatcgcagaaaatcgcaccccacgcccccccagtgcacattccagacttggagaagcgcggcatggggtggcggtggggagaacacctttctgccagatcaaaagcccagcactttattcagagttttatttatggctccttcagaaggttagtccagtcacgcctccttaataaccgcctcatcacacatgattcaggtgtcctggggccacttcacgctcctggcttcctggcccaaagcccaggagaccgctgaaccccactgcctggcattatttgcgggcgagacaccactggtgaagtgt

SEQ ID NO: 217954 - DNA, 73 bp, Homo sapiens
  chr17:64752172-64752245
  hypo
ctgagaatcagtcacgggggctccacgcgttttggagttttccctcaggaagcgctgccgggtcctcacagtg

SEQ ID NO: 217955 - DNA, 37 bp, Homo sapiens
  chr17:65109642-65109679
  hypo
tgggattacaggcgtgagcaaccgccaagtagagatt

SEQ ID NO: 217956 - DNA, 41 bp, Homo sapiens; identical to SEQ ID NO: 204758
  chr17:65352419-65352460
  hypo

SEQ ID NO: 217957 - DNA, 37 bp, Homo sapiens
  chr17:65711559-65711596
  hypo
aaatgtgaagtggccgggcgcggtggctcaggcctgt

SEQ ID NO: 217958 - DNA, 39 bp, Homo sapiens
  chr17:65712253-65712292
  hypo
gaatctccctgttggtgccccaggcgcacttgctactga

SEQ ID NO: 217959 - DNA, 199 bp, Homo sapiens
  chr17:66416571-66416770
  hypo
taccaaattgcctgccgctgtcaagccgcataacagaccaatttttattccacgaggaggagtacctggaaattaggcaagtttgcttccaaatttcatttttaccctctttacaaacacacgctttagtttagtcttggagtttagttttggagttagccttgcatatcccttctgtatcctgtccctcctccacgcc

SEQ ID NO: 217960 - DNA, 156 bp, Homo sapiens
  chr17:66420562-66420718
  hypo
aagccagacctgcactccatccttttacaattggaagctcaatggacacaaaacaatgatcaggagaagtttccataacaaagcctaatggacattgtttcagtgcccaagtggcagctcctctctggctctaggagctgatgctccaagtcttgg

SEQ ID NO: 217961 - DNA, 32 bp, Homo sapiens
  chr17:66421685-66421717
  hypo
aactgctggggaggtgcgggtctgccggccag

SEQ ID NO: 217962 - DNA, 43 bp, Homo sapiens; identical to SEQ ID NO: 204760
  chr17:66434420-66434463
  hypo

SEQ ID NO: 217963 - DNA, 225 bp, Homo sapiens
  chr17:66440110-66440335
  hypo
aatagtgttaaatcccgagaattcagtaaggtttaatatcctagcatatcgtcgaagtagagagatttctttgtcatgtaataaaacatattctttatggttcagattgtctttttgctggccatgcagacacgccaagttgaaacctgcttctaattatcacgcctactctgtactgaacgaaccacaaaaaacaattaggggtaaacacttttcaacagcaga

SEQ ID NO: 217964 - DNA, 165 bp, Homo sapiens
  chr17:66440395-66440560
  hypo
cagacaaagggtgttgttattcttggactgcaatgaagggcacacagcccccctgcaggacacacagcctgacataatttgaatctgccgccattaagacaaagcttcgagataaacctcactaagactcaaaaagcaaacactgcttcacgttcgcaatttgga

SEQ ID NO: 217965 - DNA, 308 bp, Homo sapiens
  chr17:66538786-66539094
  hypo
gcttacgatctactcagacccggaatatcactcgggccagtactctacctggagagacaaagaaaacactctgcaggatttcattcttggtgacctctaggatttccttggtgacatttactatcctccccactgttggcggcacccgtcggaagtccagaatcctgcaagagaggaagctctgttccatctgagggatgatcagggagtgaggaggaggggttttgtcccccggccagtgcacattaggaattggctggtgtacccaggagggtggccggtgaggcgtgactctgcactgttgagct

SEQ ID NO: 217966 - DNA, 344 bp, Homo sapiens
  chr17:66539462-66539806
  hypo
aggagtgggtgcattctcctcgctctcagatcaggaaactagagcaactgccccaagcagcatggcgggaagcgtgttctttgtaaattgttcttttcgttacattcgttaaaaggccttgtgtttttcaatctggggggttgcatgggacattttgagttcaaagacaccacgatgaggcacgaagaagatagaaagccagaaggaagaaatgccagggagttcccaccttgagggtctgtctagccacccctcccagaggattggtccttataggcaatgccatctccatggggccagaccctacctgtccagatggaaagctgcgatctcagcattgtgtc

SEQ ID NO: 217967 - DNA, 146 bp, Homo sapiens; identical to SEQ ID NO: 204761
  chr17:66596140-66596286
  hypo

SEQ ID NO: 217968 - DNA, 79 bp, Homo sapiens
  chr17:66913061-66913140
  hypo
taactaggtagacacaaatacgtgtacatgtttgtacaaacacctgtgtataataatacaaattcttggccgggcgcgg

SEQ ID NO: 217969 - DNA, 204 bp, Homo sapiens; identical to SEQ ID NO: 204763
  chr17:68164928-68165132
  hypo

SEQ ID NO: 217970 - DNA, 174 bp, Homo sapiens
  chr17:70220136-70220310
  hypo
agagctcaccacagctctgacgacggcaaagagaggttgccggaaggaaacaaaagtccatcaagggctggcaaaatattaatccggagctcacggatgggcagtgatgcgcaccctctgatggcgagcattcccttcatgttcatgctgcccgtgggctgacaaaagcccacc

SEQ ID NO: 217971 - DNA, 51 bp, Homo sapiens; identical to SEQ ID NO: 204765
  chr17:70270193-70270244
  hypo

SEQ ID NO: 217972 - DNA, 93 bp, Homo sapiens
  chr17:70380740-70380833
  hypo
catctgagaagtttttaaatctccttgcccaggctgcaacctagaccaatcaaaccagaagctctgcgagtaagacaccgccaggcatcacta

SEQ ID NO: 217973 - DNA, 321 bp, Homo sapiens
  chr17:70441837-70442158
  hypo
gccggcggacacacggcctcgtgcttttcatgcgatgacacacctgactggccaggcacacctggacgtcggggcaggccaagctttccaacagtcactcactgttccttgagtggagaggcctggcagccacgctcctcacagacaggggggtttttctccttcttggtaggccacgcctcccccgggcacatactgcctctgtccgagggtttcgtccaagccctgggctctgaccacaaaaagcgcccttttctttggcgggctcacctcagacgtgaggtaccagagagccaaaccgtctgctaaaaggacatcccc

SEQ ID NO: 217974 - DNA, 222 bp, Homo sapiens
  chr17:71201650-71201872
  hypo
tcctctctcttcatgggtggggactgggaattcatttgcagaaagaaggtgcatttccagtcacccagaaccgggcgctgcagctgctttatgatctgcgttacctcaacattgttctgacagccaagggtgacgaggtgaagagtggccggagcaagccagactccaggtgtcgtatcctctagggagctatgtcaaggcggtctcttccaaaagcaaata

SEQ ID NO: 217975 - DNA, 46 bp, Homo sapiens
  chr17:71202331-71202377
  hypo
tccatttgacctggacgttttcacgccacacctcaacagcaacctt

SEQ ID NO: 217976 - DNA, 134 bp, Homo sapiens
  chr17:71202407-71202541
  hypo
caaatcaaaaacatgcttagtgcgaacgaagcgatacaggctcaaataacaaaattaacctgctcaagcacgtaatactccaggatgcagcatagggaggggaataagacacaaatagccgagtgtagttataa

SEQ ID NO: 217977 - DNA, 149 bp, Homo sapiens
  chr17:71202870-71203019
  hypo
acagagaatcagctcgccccccggagcagtacgttcaactcccaagaaccccataacatcctgccactggcatccagtcagatcaggtaaaggctgccaagaggcttctgcggggcacttcgggaggccaaggtggacggatcacgtca

SEQ ID NO: 217978 - DNA, 209 bp, Homo sapiens
  chr17:71269220-71269429
  hypo
ccccactcactccccgcctggataaactgccctgaccctggagggggtgctggagggagactcagtagagcatggcagaccaaggccaccccaccaccaacatcctgaccttccctccggtcgggggctcatcagactcggcgctgtcttttttaaatttatttattttttttattgagacggagtctctgtctgtcacccgggctgga

SEQ ID NO: 217979 - DNA, 87 bp, Homo sapiens
  chr17:71272524-71272611
  hypo
gccaccatgcccggccctgaaaacacttttatttgtcttaaattggtctttatattttgccattacttttaacgacaaaaaatgcaa

SEQ ID NO: 217980 - DNA, 166 bp, Homo sapiens
  chr17:71280549-71280715
  hypo
tagctatgggaggtgcgtagggaaaacacacacaccagacacccaccccatgtcattctaaataaagttgggaagcactaaagttgagctggtgtctttgccacggatgtccccagactccagtccgctaatcgccaccagactccagtccgctaatcgccactgt

SEQ ID NO: 217981 - DNA, 324 bp, Homo sapiens
  chr17:71281745-71282069
  hypo
gctgcgggctgagccggggctgggggccgctgctgcccacccctcatcctccagagcatgggaggggagggagggcaagtctgggccagccttgccttcctgccttgccaggggaggggccgccacggcgtacgggggagcctgggtgatggtgccagcggcgccctcatcgccatggtaaccaccctccccctcctcggggtcccactcctccttgtccatgatgctgaggacgtcacccagcatggagggccccaggtcgatgtggaaggacatgatggactccgcatgcttcagcccgtacgtggccttgggcacgacagg

SEQ ID NO: 217982 - DNA, 1220 bp, Homo sapiens; identical to SEQ ID NO: 204770
  chr17:71306967-71308187
  hypo

SEQ ID NO: 217983 - DNA, 102 bp, Homo sapiens
  chr17:71312422-71312524
  hypo
cctatttccttggaggggctggaagttccactcattccagtctggtgtttgtcctaaagtatgactctgggcaggtcatttctcttcgtgaaataagctatc

SEQ ID NO: 217984 - DNA, 180 bp, Homo sapiens
  chr17:71325320-71325500
  hypo
aggactgtaggcgtgagccgctgcgcccagtcccccgtcaaagacttcttaccttctacaacacactagaaaatcccaccctttgtggtagaagcgctcagcaaacctctttggatccaatttcactcactctttatgggcgttaagaaaagagtatatgagacgtgcatatgatgggcc

SEQ ID NO: 217985 - DNA, 204 bp, Homo sapiens
  chr17:71354224-71354428
  hypo
tctggcctcgatgacgtagcgggtgatgggccctttgcccgggtctccgctggaccagtgaatggcgatggcagagctgtaccgcacgatgatgggcacgccaggcggtcctggggcacctgcagacagcacacagaggcgagggatgtatggaacccagaacagccacccagcccgtcaccctgggctcgaggaggaacactg

SEQ ID NO: 217986 - DNA, 137 bp, Homo sapiens
  chr17:71364486-71364623
  hypo
cctcttgcaaccccccgtggccgacctacccctcccctcctcagggccccctctcccacctgcttgctgggtctggccttgggtgggggtgctccgaggcccatccccagcggcgttgaaggcggccacgctgacca

SEQ ID NO: 217987 - DNA, 297 bp, Homo sapiens
  chr17:71431601-71431898
  hypo
gtaggtggaagtttgcacctcgccggctgcattgcgggcgaagcactggaacatgccggtatcatcgggcaccaggccgctgatctgcaggcccccgtcgttgcgctgccggaagcgggtcaacttctccacctccaccacggctgcgtccttgtaccaggtgatggagggcggcggcacacctgtgggcaagacgtgggcccaccgtcaacctgcctcctgcctcctctccgcctaggaggggtgcttgggaggaggccgggcccggaaatctgcgagggggtccctggtgaatct

SEQ ID NO: 217988 - DNA, 170 bp, Homo sapiens
  chr17:71492642-71492812
  hypo
gttctgcccattagcgaagggagttagtgagagaggaggctggacagatggacaggacccggtgatacagggtcttgtactccctcgaccaaaatcctttcgagactgtccactgcctgctggatatatccgagaagattcttcctggcgttccaggtcctacctctgcc

SEQ ID NO: 217989 - DNA, 343 bp, Homo sapiens
  chr17:71548539-71548882
  hypo
ttaaggcagcttggcgaggacgcatgacatctgtgtcacgcattgaaactggagtggcgcaggggaccctcctgagggggtggccgtccacattgccagctgatggccgagcggtcagtggtcgaggcgcaggtctgagtgtactcggccggagtacccatcatgagccacttagattagcttctcggcactcaagaagtacgtacgagcatcacgcccacttgagctatgagaaactgaggcataaatgggttaagtcacttggcaggatacgggggaacaggatttgagcccggccaggctgactgcagagcttgaggacggtgctactaccctgccaatg

SEQ ID NO: 217990 - DNA, 432 bp, Homo sapiens
  chr17:71744648-71745080
  hypo
gctccaagatgggccccagacgtggaagatggctctgccgggacagctgtaaactctttaaccttgtgtggggcttcgtccttcagcagcccggtgagggatcagtggcaggtgtgatggcgggggaggtggaggtggcggcggaggcggccctgcactcactcactcacggcagaacagactctggataaacaattatagtctatttacctcagaccatatggtgttggggaacaggtgtgcgggtaatgaagagcccagctccaattaagcgtcggggaacccggccggattcccactgaatcttgcgcttgggttgaggcccacttacaaatgagagctaaaaggactgaggctcggggaggcaggagcgggagcctgaggggtgcgtggcagggccagccagcggcccccacccgctgctctgtacct

SEQ ID NO: 217991 - DNA, 130 bp, Homo sapiens
  chr17:72277885-72278015
  hypo
gtggagatagggaaggggccggtggggtccctcaccccacaccctccctctgccccccagcagccggcaccatggagattgtgtacgtgtacgtcaagaagcgcagcgagttcgggaagcagtgcaattt

SEQ ID NO: 217992 - DNA, 61 bp, Homo sapiens
  chr17:72278143-72278204
  hypo
gtccctgccccaagggccctggcctgtcaggtgtggccaggcagggcggccagctggggcc

SEQ ID NO: 217993 - DNA, 34 bp, Homo sapiens
  chr17:72290214-72290248
  hypo
cccagcttggatcgtggttttttccttttaatct

SEQ ID NO: 217994 - DNA, 181 bp, Homo sapiens
  chr17:72367882-72368063
  hypo
cagtggccctggcgcgccttgccaccaggaccaggaggccctcctactactaccttctggcgctcacagcctcggatatcatcatccaggtggtcatcgtgttcgcgggcttcctcctgcagggagcagtgctggcccgccaggtgccccaggctgtggtgcgcacggccaacatcctgga

SEQ ID NO: 217995 - DNA, 262 bp, Homo sapiens
  chr17:72368130-72368392
  hypo
tgccaccccctgcaccatcgggccgcctcgtccccaggccggacccgccgggccattgctgctgtcctgagtgctgccctgttgaccggcatccccttctactggtggctggacatgtggagagacaccgactcacccagaacactggacgaggtcctcaagtgggctcactgtctcactgtctatttcatcccttgtggcgtgttcctggtcaccaactcggccatcatccaccggctacggaggaggggccggagtgggc

SEQ ID NO: 217996 - DNA, 374 bp, Homo sapiens; identical to SEQ ID NO: 204778
  chr17:72449939-72450313
  hypo

SEQ ID NO: 217997 - DNA, 303 bp, Homo sapiens; identical to SEQ ID NO: 204779
  chr17:72450330-72450633
  hypo

SEQ ID NO: 217998 - DNA, 269 bp, Homo sapiens
  chr17:72811189-72811458
  hypo
ttgaaaatttgaggacggggtgtcagagagggggaccttctccctctgccgctttctggctgtgtcactgaacctctccagccccccagtttcctcatcagtaagatgagggcatcgtcacctgcaccagtgaccttgcagcgggccatgagcatgaaatgaaaccatgtgtgttagcgcttggcagagtgtggaggggctgcagcttgggcagtgatgttatcacagggcagttttgatagcacagggcagggcggatcaaaggacca

SEQ ID NO: 217999 - DNA, 96 bp, Homo sapiens
  chr17:72823372-72823468
  hypo
aggttttaccagcacggcactgccctgtctcactccaacccttcagcgtccctacagtcatctccttttttttttttttttagacagagtctcgct

SEQ ID NO: 218000 - DNA, 36 bp, Homo sapiens
  chr17:72823708-72823744
  hypo
acaggcatgaaccaccgtgcccggccgcatctgcat

SEQ ID NO: 218001 - DNA, 521 bp, Homo sapiens
  chr17:72824033-72824554
  hypo
gcacccaccccttccgaggcccagctaaagccaagagagccctgcagcccggcaccttccaagggctaagtggtggtgaaggagggagctggcgccaagtcctcccctagtcctgttccccgcctggagtgccggtgcctgagctggtgatgggcacactgccggccatttgttatcattagccctggcatgttgattctctgcttggaaaagagagtgccgctcccagacagccaccgtgacggatggcctccacctcacagtgtcagagccagagccacacatggggagcagggaatggcacggggcttggggcgccctgacctcagggacatctggagccaggttcagaggtcagagagttgtgggagcagctctccaggaagcagccctgccaaggcacagctcagcactggcgtgtggaaaaggcctgggggcccatgcctggaggaagacccttcacccttggccctcagggtcatggctctgagtgtgtgtgcacaactcggacacccaaaggg

SEQ ID NO: 218002 - DNA, 258 bp, Homo sapiens; identical to SEQ ID NO: 204780
  chr17:72920292-72920550
  hypo

SEQ ID NO: 218003 - DNA, 752 bp, Homo sapiens; identical to SEQ ID NO: 204783
  chr17:72983758-72984510
  hypo

SEQ ID NO: 218004 - DNA, 223 bp, Homo sapiens
  chr17:73016927-73017150
  hypo
ggcttcccgttgagctcccaactcctctcaccactttgaaaagcactgattgggcatctggggctaattgcagtctttttgttttcaggatagaaaacatgaatcgggaaaggctgagacaaaagagaattcattctgctgtaaagacaagcaggagggtcgacatggactgaaatcaccctctgcagctgggagggctcttctgggcgtccgggcagctgca

SEQ ID NO: 218005 - DNA, 86 bp, Homo sapiens; identical to SEQ ID NO: 11496
  chr17:73073967-73074053
  hypo

SEQ ID NO: 218006 - DNA, 360 bp, Homo sapiens
  chr17:73075272-73075632
  hypo
atcacggggctggcaaggacaggggcttcctcgccaagtcctccccgctctgaaagacacttggtggcaggatggtgcgtgacaccctcaggcacacatccaaatgtcccggggatgatacttgctctcaaacagctgttccttatttgggggagtcctgggcccccataggtccgcaatggtggtcctgagggtcctgaaactcttttcagtatttccacgagccagatggcaagcaggcctgtgctttcaaggaggcaggttagcaaaccgaatgtcagggtgtctggtctctgcctggcctgttcctggagaaattagtgacccaggtttcagcctgtgcttcatgggggaaaacat

SEQ ID NO: 218007 - DNA, 104 bp, Homo sapiens
  chr17:73090971-73091075
  hypo
ctgcctcaccctgaccccagcgttgggagcagggcagagggagggttctctgcagtcgccgtggacacagggacctgccctcagctcctgggagctctccaggg

SEQ ID NO: 218008 - DNA, 176 bp, Homo sapiens
  chr17:73091180-73091356
  hypo
ccccggctacctcctggctactccctccacttgccaccagcagcctgcctattattccaggtcctgccctcaaactgggagggaggtgaggctcggagaaagcgccaccctcctgggtgagctctgaatctgccacatggcctctggcctgcagggttggggcagggagtgggaat

SEQ ID NO: 218009 - DNA, 43 bp, Homo sapiens
  chr17:73095832-73095875
  hypo
ccaatttgggtttttaaaagataactctcgtgctacacctagg

SEQ ID NO: 218010 - DNA, 54 bp, Homo sapiens
  chr17:73124828-73124882
  hypo
gaggtgtcccactcatcatcaactgcctatccagccccaatgaggagacggtgc

SEQ ID NO: 218011 - DNA, 180 bp, Homo sapiens
  chr17:73124912-73125092
  hypo
gcccgccgggccgcagctttctcccagagctgaccgccacgcccgtggtgcagtgcatgcttcgcttctccctctcggccagcgccaggctccggaacctggcacagatcttcctggaggacttctgctccccccgccaggtggccgaggcccgcagccggcaggcgcactctgccctgg

SEQ ID NO: 218012 - DNA, 161 bp, Homo sapiens
  chr17:73132152-73132313
  hypo
catggaggaaacagacagaacgacagcgttcaggacagtcagagctaacccaagacgaggctggacttgccgccagggggatttcttctggatggcactggggccggggccaccgggctgggcacaggcgcagcaggcacgggcttctcttcactctgccc

SEQ ID NO: 218013 - DNA, 34 bp, Homo sapiens
  chr17:73136019-73136053
  hypo
ttcagaaactttgatttattttttcagatggagt

SEQ ID NO: 218014 - DNA, 32 bp, Homo sapiens
  chr17:73148048-73148080
  hypo
agcaaaactgcgtctcaaaaaaaaaaaaaaaa

SEQ ID NO: 218015 - DNA, 120 bp, Homo sapiens
  chr17:73154765-73154885
  hypo
ttattcaagatggagttgctctggttcaaacgtctctgacacctgttctgagttgtgagggctggaatgagataaatataagaatgtacatgctggccaggcaaggtggctcacgcctgt

SEQ ID NO: 218016 - DNA, 180 bp, Homo sapiens
  chr17:73209661-73209841
  hypo
acaggtgtaagccaccgtgctggccctgaatgttccgttcttatggaacatatatgtcctgaccaaattgtgttgaggggttgtcacctgaaatggagaagtaatcttgtgagatcactgctcggtctcataaacactcctcacttcttgaactcaacattttttttttgaaagacaggg

SEQ ID NO: 218017 - DNA, 63 bp, Homo sapiens
  chr17:73215386-73215449
  hypo
ttagagacagggtttcgctttgcggcctgggcgggagtgcagtgatgcgatcatggcacaatg

SEQ ID NO: 218018 - DNA, 151 bp, Homo sapiens
  chr17:73241507-73241658
  hypo
ggaggacccccaccccgatgtgtgacaactaaaaatgtttccagacactgccaaatgttccctggagggccctgttgagaatcactgggttttgttacgttttttttttgttttttgacacagaatctcgctatgttggtcaggctagagt

SEQ ID NO: 218019 - DNA, 31 bp, Homo sapiens
  chr17:73241838-73241869
  hypo
cgatcctcccggcctaggccccacagggtgc

SEQ ID NO: 218020 - DNA, 182 bp, Homo sapiens
  chr17:73242494-73242676
  hypo
ttggcaggagccctaagaaccgctatggggacacgaggaatggcgtgggcaggtgaagggctgcggtttccacctccggagagtgaaggacctaccgtcagggcctggagcgcctcccattcctgtggggactggatcttgtgggccagcagtcggacggcgatctgtggcctgggggacaa

SEQ ID NO: 218021 - DNA, 78 bp, Homo sapiens
  chr17:73245039-73245117
  hypo
cctgcttcccaggtcggggctcggcctccccggcagtgtttctgttgtggctgcaaggggaagattctgatggtttag

SEQ ID NO: 218022 - DNA, 197 bp, Homo sapiens
  chr17:73274193-73274390
  hypo
ggggtgggagggctccctctcgtgtgagggctgcctcaccatttttctttccttcggctggtatggcccacttgtacaggtgcttcaaggagctgtagcaagagaactgcagcccggcgtaggggaagatggcgatcaaggtgggagccaagcctttgtagaaaacctgggggccttcgctcctatacatggtcccc

SEQ ID NO: 218023 - DNA, 397 bp, Homo sapiens
  chr17:73311549-73311946
  hypo
tctgtctcaaaaaaaaaaaaaagaaaaaaaaagtatttccaagacgcataaaacaggtccactgtcattttttccagttatccaggaacttccataaagcgaacgttttgggctgaaggtcacccaccccatgaacagtcaggtggaactagtgcccagggaaggcaggcagcctgcgccatcatggcctttggctcagaggccacctaagcagccccgcgctgtgggtcaccatctcctccacactcaagtctgaaggtgagcctgtcaggggctcccagctcactgggtggagggaagcgtgtcagggaggggtggggggggcgtgccctgaagagcgaggccatgcgcctacctccagcttttcccctgacacactgagcgactcccggctgca

SEQ ID NO: 218024 - DNA, 83 bp, Homo sapiens; identical to SEQ ID NO: 204789
  chr17:73422368-73422451
  hypo

SEQ ID NO: 218025 - DNA, 142 bp, Homo sapiens
  chr17:73498113-73498255
  hypo
gcactggccactccgaaggccagcagtgcggtctgcagtggctctctctcccggcacttgggcctccgcttaacagtgtctgattccgtgaggttgaaatcgaggccggggggcacgggtgtctctcggggcggggggccag

SEQ ID NO: 218026 - DNA, 391 bp, Homo sapiens; identical to SEQ ID NO: 204791
  chr17:73511094-73511485
  hypo

SEQ ID NO: 218027 - DNA, 145 bp, Homo sapiens
  chr17:73518078-73518223
  hypo
tggcttcagacagccgccacacccttctgcgcgccccagccccagagctgctcccggccaacgtggctgggcgggagacagacgctgagtcctggtgccagaagctgaaccagcgcaaggagaagctctccaggcgggaacggga

SEQ ID NO: 218028 - DNA, 117 bp, Homo sapiens
  chr17:73518286-73518403
  hypo
ctccagctggcgggagtacaaggagctgctgcagcggcggcaggtgcagaggagccagcgccgggcccctcacctgtggggccagcccgtcaccccgctgctgagtcctggccaggc

SEQ ID NO: 218029 - DNA, 109 bp, Homo sapiens; identical to SEQ ID NO: 204794
  chr17:73585796-73585905
  hypo

SEQ ID NO: 218030 - DNA, 248 bp, Homo sapiens
  chr17:73606132-73606380
  hypo
tctctggtccaaagtcagtttttacatgaatgtcaggcttaagggattccagtgccaggcaggaagcataagtttggactcttcatttcgcccccgctctttcccggcctccaggaagcggtacctccggcggcgggcagctttgggacagctgaacaccatcctgctggtggcccagcccctgctccagaggcggcagagactgcaggtgcaggggcttgggtggggcggttcagggtagaagccag

SEQ ID NO: 218031 - DNA, 71 bp, Homo sapiens
  chr17:73606459-73606530
  hypo
gacacagtgctccttgaactcatcccttttccctccggccggggtaggccggggcccttgggaggtgctgt

SEQ ID NO: 218032 - DNA, 511 bp, Homo sapiens
  chr17:73612851-73613362
  hypo
gtgcagccatccaggtgggcccccacggggaggtggccagggctgtcccgctcctcggggaatcaccctatgaacttagtgacctcttgcttctcccacgaggcctcccaaagctttcctgaggaaaatcgaccccaaggacgaggctctggccaagctgggtatcaacggtgcccactcgtccccgccggtgagcaccccagcctgtctcccccagagtgtgtgctgctgcactggggagctcaaggctctctggggcgaacttggccttgtgctgtgactcagcccgtgtactttctccgtatccccccagatgctgtcccccagcccaggaaagggccccccgccagctgtggctcctcgacccaaggccccgctacagcttgggccctctagctccatcaaggaaaagcaggggccccttctggacctgtttggccagaagctgcctattgcccacacacccccacctccaccagcgccaccactgcctctgcccgaggacccaggg

SEQ ID NO: 218033 - DNA, 541 bp, Homo sapiens
  chr17:73613424-73613965
  hypo
ggcagaggcagggttcgcacagactctcggtgcccagggctgaaggcatttctgcgtggctgaggccagctgttcgggcttctggactttggagccatacgtagctggggagtcccagcttccgcgttcccacccagggcagggcctgggcatctttggggctgtcatcgagaggctgtcacacacagggtgttgtccctgacacatacccgacagctctgtgaggaagttagtggccctggctgacatggtcatagaagacccacgagcctcacggacgccagggaaagtttagggcccaaaatggaggcaggagatggtgccatggaaggagtaaggcagctggaggttgggagagccgggcccttggaaggctcgtggggatgaaggtcttccctcccgtgcccccatcactctggctctgcagcccctcactgaggctcctcaccccctcctctctgccaggcttgacacagcccgtggaggaccagggggtctccacccagctactcgcgccctctggcagcgtgtgcttctccta

SEQ ID NO: 218034 - DNA, 135 bp, Homo sapiens
  chr17:73615794-73615929
  hypo
tgtcccaccgtgggctgcgactgctcaaggtgacccaaggccccggcctccgccccgaccagctgaagattctctgctcatacaggtgcgctagcccacgaccctgggctagaggtgggggcaggtggcaaggtg

SEQ ID NO: 218035 - DNA, 190 bp, Homo sapiens
  chr17:73635125-73635315
  hypo
cacatggcctcaaggatggccgcaggccaattgcagggtggagggccccgttcgatgaccttcacggtggttctaaaccagctctgccaaggcagcggcaccgggagtgactggcctcactgacgtagccatctcagcgagaaccggctgagacctgggacaaggcaacgataattacagccaaaggtct

SEQ ID NO: 218036 - DNA, 47 bp, Homo sapiens
  chr17:73639435-73639482
  hypo
agccctgggcacagacaggccgaatggccgctctagggcaggcggtg

SEQ ID NO: 218037 - DNA, 157 bp, Homo sapiens
  chr17:73639512-73639669
  hypo
ccctgccctcacaggactcactcctccctgctccttggccaactggcacacaccaggcccggctgtcgggccaactccttcacaggcttcaaacccactgagattaacaaaccagacctgctctccgacagcagcctggcccgctcctttaagaggc

SEQ ID NO: 218038 - DNA, 156 bp, Homo sapiens
  chr17:73680637-73680793
  hypo
attgagaatgcccaagcctacgtagcattcggcacttccctgcgctcaacacgatggatggtcttctttaggcttttcctcaacaacactagggttgccttgcacagctgggagacatggaatttccagaagctcgtggagtggctgtgctgggaa

SEQ ID NO: 218039 - DNA, 300 bp, Homo sapiens
  chr17:73692027-73692327
  hypo
tccaccgtcccctggggccccccagctcgctcactccctgccatcccataagcccgtccaactagctgttcctgcacagatccctccctggcagctgtgggtactctgggtgttttctgacttgggcacgcaccagggcaagtcacgctgacagctggcttctcaagtcctaagtgcggctgcctctgagaacacacccatcagacccaggcagcagccacagacccagcgctgcttccaagagactgtggacacatcgctttactggcttgaggctctgtctgcttacaagaaatgtgg

SEQ ID NO: 218040 - DNA, 36 bp, Homo sapiens
  chr17:73800544-73800580
  hypo
aataaaaaatccattaatctgcgcaactgagtttat

SEQ ID NO: 218041 - DNA, 31 bp, Homo sapiens
  chr17:73811153-73811184
  hypo
agatgactaagccagcgcactcatgctggag

SEQ ID NO: 218042 - DNA, 215 bp, Homo sapiens
  chr17:73811214-73811429
  hypo
gcctgagcctgacttgcctgtgctctgccctccagatctacaagtccaccaagtgcaacgacatgcagcagtcgggcagctgtccccgaggacccttctgcgcctttgcccacgtagaacgtatgctgttcccattgccccggggcagtgccctctcccacccctccctcgcctggctagctcaggcttaggccggggatggcccctggcagtat

SEQ ID NO: 218043 - DNA, 44 bp, Homo sapiens
  chr17:73822058-73822102
  hypo
agttcaagtgctctccgacctaggcctagcggttgatgacacag

SEQ ID NO: 218044 - DNA, 165 bp, Homo sapiens
  chr17:73830728-73830893
  hypo
gcctgaagagagctcgcgggcccgggcctttataaggctgcagtacaccagggccaggcgacaggtgtcctagggtggggttggacagagggaactgatccatgggtggggcatccaggaagggcaggtgggagggcatgggaatttcagcgacttgggggattt

SEQ ID NO: 218045 - DNA, 65 bp, Homo sapiens
  chr17:73887194-73887259
  hypo
accgtggcagttgcgggtaggagacgcccagtgtcaccgagtggtctgacgcgcgcacctcccag

SEQ ID NO: 218046 - DNA, 160 bp, Homo sapiens
  chr17:73890917-73891077
  hypo
gctgcggggggtccggccccctcctgctcctggcggcagcacccacttgaggaggtgaccctcactcatggtgcacaagctgcaaacacaacagcccttggtctggcagaagagctccagcagctgcccggggcggggtcagcgcgcggcagggctgggg

SEQ ID NO: 218047 - DNA, 31 bp, Homo sapiens
  chr17:73904785-73904816
  hypo
ttgttgttttttttttgagacggagtcttgc

SEQ ID NO: 218048 - DNA, 110 bp, Homo sapiens
  chr17:73910328-73910438
  hypo
cttctcctcggcccggagctcgctggccctgatcttcagctcagcctgctcctggagacagcggaggccctgctgcattctcctcccaggaattgcgctgcactctgtgc

SEQ ID NO: 218049 - DNA, 169 bp, Homo sapiens
  chr17:74005497-74005666
  hypo
ctcctctcatgcctcaccacctcctgggtcacctccttgtactccaccgtgggcttctgggcccgcaggacctccaggtcgggcagcagcttctccacctccttctccacaccgctcctcttgcccgccatctcctgcagcttggccttgagccgagtgatctcctgct

SEQ ID NO: 218050 - DNA, 223 bp, Homo sapiens
  chr17:74013674-74013897
  hypo
cagcttgtctgagcccgggtctgtccacacccttctccatctccatcccagccaccgctcctgcacttgcctcacctccctcaagtgtgagcaccagggccgggccgcttctcatcccagccgccccttcccgctgctcacccacctcatggctgtggatgcggccctccaagtcctccaagggtgtggggcggctcagcggggcccgcgcccaggccagcac

SEQ ID NO: 218051 - DNA, 155 bp, Homo sapiens
  chr17:74019375-74019530
  hypo
tttctgctccagcacgcgtgcccagtcgaccctgggtcccacgtcggggggcagcaccatcttctcgtacagggcacggtactccgcacactcctgggtcacccgctcgtgcagctgcttgatgctgtcaagaaggtggccggcaggtcagggct

SEQ ID NO: 218052 - DNA, 226 bp, Homo sapiens
  chr17:74042043-74042269
  hypo
aagttaagtcactttgtgtccgacacaggcaaaggaaaaccacaggcccttgccttcccggtcctcaagggtcacctgtaagatgatgtcatagagtcggatcaggtcctggggccggggtgagcgcttgctgtcatcctctggctgctgctgcagcagagccctctgcagacctttggccatgttctcattacgcttgattgccgttgatagcttgatgtaagtc

SEQ ID NO: 218053 - DNA, 44 bp, Homo sapiens
  chr17:74049485-74049529
  hypo
gttggagcaaccggcgttcaagaaaagagcgaacttcgtcttac

SEQ ID NO: 218054 - DNA, 40 bp, Homo sapiens
  chr17:74050637-74050677
  hypo
atcaccaagcctgagctgggcgctgtggctcacgcctgta

SEQ ID NO: 218055 - DNA, 39 bp, Homo sapiens
  chr17:74050857-74050896
  hypo
cacaccattgcacaacgcgttaataaaaacaggatacag

SEQ ID NO: 218056 - DNA, 131 bp, Homo sapiens; identical to SEQ ID NO: 204799
  chr17:74072580-74072711
  hypo

SEQ ID NO: 218057 - DNA, 113 bp, Homo sapiens
  chr17:74275071-74275184
  hypo
agagccctggccccggacccatatgtcccatatgctgtcccatagcatacttgcggctatgctgccggacctgctccagttcaaacaccgtgtaggggcggatggaatggtgc

SEQ ID NO: 218058 - DNA, 291 bp, Homo sapiens
  chr17:74387385-74387676
  hypo
ctgggggctctggcgagctgctggccttgggcaccccgttgggcagtgcctgggccttctccagcagggcatgggtttccagccaggactcgatacggttcaccagccgccagccaccagtgctaaagtgttgcctgatctcctgctcaaagacctcggggggccgccgcaccagctgggtcatggactgcaccacgcggatcagcgccatctcattgtaacagcgactgttttcatagccttcctgcaggcctcggtcactgtcgaagccggcttcgttgtagtatggtt

SEQ ID NO: 218059 - DNA, 132 bp, Homo sapiens
  chr17:74390231-74390363
  hypo
tctcaacagcatcccgcttggctgctctcaggatcgcttggctgctctcaggatccctgctctttcttttcttactcccttccttccaggacagggccagaactggggcctcagactcagattcagagtcta

SEQ ID NO: 218060 - DNA, 193 bp, Homo sapiens
  chr17:74390459-74390652
  hypo
agcgctgcctcagtaaacatgactcagagacactaggccccgtccacgaacagaggagtgggaaaatggaatgtggtgtggccacatgctgtcatcctattttgcaggtaaaaaggaagaaactagatcattatgaatcaacacaggttggtcttaagcaaattagagatgatgtgtacgacgacatattctg

SEQ ID NO: 218061 - DNA, 151 bp, Homo sapiens
  chr17:74391568-74391719
  hypo
ggccgagaaagtaattttttaaaggagggaggaaagaaagaaccatctggcctggacacacggctgagtcagccctcacctgactgagcctgtgaccgcccctgtaaaaggtgggtgggtgagtgtcctcgcaggtgccagtcagccccgg

SEQ ID NO: 218062 - DNA, 368 bp, Homo sapiens
  chr17:74392144-74392512
  hypo
ggtgacacaaacaggagccccgagaaggcgggggaaggcgaagaccaggcaagggctgactcacagggtgcaaactccagtacggagaagacctcgcccttggcgctggtgaaggtgacgccaggcttgccgccacactgctggcacagcaccggggtttcgctgggccactcagccttcacaggtgactgcccctcgggcttgtcctccttgcgctctacgtcgggcactgcttccatcttctcctcctctacaatggccacattgtccagggtcttcttgaggttttcctgtagcttcttgatgtcatccagaaacttcttctcccgagttggcttctcaggctccacagtcggagaggtgggcga

SEQ ID NO: 218063 - DNA, 118 bp, Homo sapiens
  chr17:74415734-74415852
  hypo
tgctgacaagaacaaggccccgggccagttgctgtcacagtggcaaagagcagatcccgccagcacgcatccttgggaacctggtggacatggtttcgccaccttgaagacttccagg

SEQ ID NO: 218064 - DNA, 34 bp, Homo sapiens
  chr17:74427555-74427589
  hypo
ctccagcctgggcgacagggtgctctgtctcaaa

SEQ ID NO: 218065 - DNA, 156 bp, Homo sapiens
  chr17:74435187-74435343
  hypo
tccaggggcagctgacggcgtggtttggaggcgcttgcctggctttagcccaagcctttctgctcactgccttaacctctcctcctctgtgaagtaagaacacctacttcacggggttctccagtgactgtgcctagaacgcggcaggtgccaaca

SEQ ID NO: 218066 - DNA, 76 bp, Homo sapiens
  chr17:74475341-74475417
  hypo
aaccactgggctgcgcccctgcggaagcagacaagggacaggtgggcatacgcttgtctacgcctgtgcacctgag

SEQ ID NO: 218067 - DNA, 194 bp, Homo sapiens
  chr17:74531809-74532003
  hypo
acatggccctggcctcggtgtttcgtttctcccttggcatctgccctaccctggtccccttcctggggaggttcaatggtgttccatgatgtggacggtgagcacttcctccacgtatccgcacaggtacctggcaggggttgggacacaaaacctccaaggtcctgaggaccctgcctcgcttcttcatggtg

SEQ ID NO: 218068 - DNA, 68 bp, Homo sapiens
  chr17:74533185-74533253
  hypo
tctggggtggctggccgagcaaggagttctgaggccggggagaggagggggaccgaggtgctctcctg

SEQ ID NO: 218069 - DNA, 93 bp, Homo sapiens
  chr17:74551787-74551880
  hypo
cccagctcctattcaagatggagttttctggttccaatgcctctgacagtagtacttcatcgcattgtgaggattaaacgagttcatacatgt

SEQ ID NO: 218070 - DNA, 34 bp, Homo sapiens
  chr17:74579152-74579186
  hypo
tttttaaaaaatgtattactcggggctgggcgcg

SEQ ID NO: 218071 - DNA, 285 bp, Homo sapiens
  chr17:74621443-74621728
  hypo
gacgctggtacagccggattatcccttcatcgtgtagccgcttccagacttctctctccagcttgaagtcatggtttatgtaaaagatcagccgcttccatgatgtatcatagtagtgatcagaaaagcgctcatggccctcagtgatgaagccataagcactcacctacatcacggttggaggagaaacacggcctgtagttgctgttgcccaggcttcttctcatggctaattctgtgttgaggggtgggggttcttttccctggctccgtccctaggggtct

SEQ ID NO: 218072 - DNA, 120 bp, Homo sapiens
  chr17:74623781-74623901
  hypo
ctcttccattctgttctcagggtctgcttaccctccccttcccattgtctgggctcattgtggtcctgagggttctgggaaatgggtgttctcggccatcgaggcaaatgcacctaggcc

SEQ ID NO: 218073 - DNA, 148 bp, Homo sapiens
  chr17:74625059-74625207
  hypo
gagccagagggaaggcgtggtggcaaaaactcaccgtctgaaggcctcctatttcgaagctgtatttttcctcaaaatcccaccgaggctcagatttgaagttggcggccttcagtctttggtttctctgcgtcgtggggctctggaa

SEQ ID NO: 218074 - DNA, 250 bp, Homo sapiens
  chr17:74667047-74667297
  hypo
aaaagggagattttcaaaaacgctgattgcagactgagttatttaacacggttcagcaaccgtggtctgaggaattttcacttgtagaggactcaggccgccatcaggcccgaagagtccaggttggtggggccactccccgcggtgtggagcctgcagggggccacgactgggtgcagaaaaggaatgtgatcattcagccgagtggtaagtccaacccatttcacgcgcactcagcctgcactctacg

SEQ ID NO: 218075 - DNA, 224 bp, Homo sapiens; identical to SEQ ID NO: 204804
  chr17:74732259-74732483
  hypo

SEQ ID NO: 218076 - DNA, 232 bp, Homo sapiens; identical to SEQ ID NO: 204805
  chr17:74732973-74733205
  hypo

SEQ ID NO: 218077 - DNA, 253 bp, Homo sapiens
  chr17:74771040-74771293
  hypo
ggcaacattagtgacgtttctgccatcttgacttataggtggaagcctcttcggcctgctgagcaagaacaatcgttttggtagaaatccagttgtgctgttgggcatcctggtgcacttcatagctttttatctaatatttctcaacatgcctggagatgccccgattgctcctgttaaaggaactgacagcagtgcttacatcaaatccaggtatagtggctgtcatttctctagtcgcttgagtacgggt

SEQ ID NO: 218078 - DNA, 87 bp, Homo sapiens
  chr17:74771572-74771659
  hypo
agaacaaagaggagcgagggagaacctggcaaccggggaggccattcagtccttccagagcagtttatataacgtttgaggatatcg

SEQ ID NO: 218079 - DNA, 88 bp, Homo sapiens; identical to SEQ ID NO: 204806
  chr17:74864229-74864317
  hypo

SEQ ID NO: 218080 - DNA, 101 bp, Homo sapiens
  chr17:74908629-74908730
  hypo
cagatgttcacggcagatgtcctggccactgatggagcaacaaggctggacggatgagccggtcccgctctgctcctcgggtctcggtgtttcaattaact

SEQ ID NO: 218081 - DNA, 131 bp, Homo sapiens
  chr17:74908814-74908945
  hypo
ggcacgagggagccgtgcgctctgtgatgagactgcagcaaggtgatgtcagccagtccccgcccgcgccccgccgtgtgcggagggaagaagccaaaccctagtgcctgcccagccgctgcatcctgaga

SEQ ID NO: 218082 - DNA, 37 bp, Homo sapiens
  chr17:75196310-75196347
  hypo
atgtgatctcggctcgctgcagcctccacctcccagg

SEQ ID NO: 218083 - DNA, 216 bp, Homo sapiens
  chr17:75196527-75196743
  hypo
ttttaacattgcttagaaatgtctttttctcttaatagattccaaaagatgagcatattcttcggttcctccgtgcacgggattttaatattgacaaagccagagagatcatgtgtcagtctttgacgtggagaaagcagcatcaggtagactacattcttgaaacctggacccctcctcaggtccttcaggattactacgcgggaggctggcatc

SEQ ID NO: 218084 - DNA, 671 bp, Homo sapiens
  chr17:75206843-75207514
  hypo
ttgttaggcactatcgctcttgtccatgtttcaagaacttggggtgcagtgtgtttcgtgtgaatcgggggcatctgtagacatccacatggtaaaaacctccgttctgctttgggtattaaataaagcacagatccgagatggcaacaaactgaaaggaaggctgaagcggaggcccccactgtgaatgcaggaaagaggttccgtcagcacagggggccgaggcctcaggatggagctgcctggggagccactttgctgaagagggggccgtgccacgtggtgccgcctgctgttcttagacaggacccttgtacctcactgaatctgctgtggaaggacattctgaagtggcgtttcagtggtgaggtggcagtggtgggattaaaggggcccggctcgtagagcagccacgcgctgaagggcacagcagacagcgtgcatgggctgagaggggccgtgggcctggctctgctgcttccttaggtggagttttcagtgactgcagaactctgcacagctgcttttcattctcacgtccgcccccgcccaatctttgaaactaactttgattattccctcctgggtagctctgtcggtgctgtgtaagtttggttttcaattggttctcagcacccagggggtgaccacctcaaccccatctctactat

SEQ ID NO: 218085 - DNA, 193 bp, Homo sapiens
  chr17:75207630-75207823
  hypo
cccctgcctgctctttctttagctttcaccttctccagggccttctgttctgtccagcccagggcagtcctctgaaccactcatgtacgagctcacagtgtttggtgtttctaagacctggcctcttagagtgtgtgtgaagatggtgtatgggagatcttggacctctaggtgcaggtcacaaagaacacag

SEQ ID NO: 218086 - DNA, 336 bp, Homo sapiens
  chr17:75207987-75208323
  hypo
tggtgctcgtggatcgtggctgcctaacgctgcctctttttcagattctcattcagattgtggatgcctcgtcagtcatcacttgggatttcgacgtgtgcaaaggggacattgtgtttaacatctatcactccaagaggtcgccacaaccacccaaaaaggactccctgggagcccacagcatcacctctccgggtgggaacaatgtgcagctcatagacaaagtctggcagctgggccgcgactacagcatggtggagtcgcctctgatctgcaaagaaggagaaagcgtgcaggtaaaatcacacacaggtcaaatcgcgcatccgtgactcc

SEQ ID NO: 218087 - DNA, 349 bp, Homo sapiens
  chr17:75209343-75209692
  hypo
ccaggggtcggaagcgagtcgccctcagctgccactgccctacttgttctagggttcccatgtgaccaggtggccgggcttctacatcctgcagtggaaattccacagcatgcctgcgtgcgccgccagcagccttccccgggtggacgacgtgcttgcgtccctgcaggtctcttcgcacaagtgtaaagtgatgtactacaccgaggtgatcggctcggaggatttcaggtgcggccaccctcgccacagcaggtgctgcggacagctgggcatggttggagggagcctgcagtcccacgccgtgtgcaggatcagcagtggcggcgggtgtcaggaatgcttggag

SEQ ID NO: 218088 - DNA, 723 bp, Homo sapiens
  chr17:75213327-75214050
  hypo
gggagtgtttcacaggtgagcggtccggcctcagaagagctttagctcatgtgggagtgtttcacaggtgagtggtcgttcaagaagagctttagctcctgtgggattgtttcacaggtgagcggtccggcctcaggtcacagccgtatgtttgctgatgcagaagcgaacccagtgtttgtcctcgcttctgtaagaagacatgatgtggtttttcttaaacgcagccagatctaacatcactgtgatggggcgatccctgctgtgatgtttccgttgtgataaaaaggattgctttcatcaggcgcctccaagaaaataaaagaggcaggtgtggacctttagaagcctggattaccttatctccactcccctgccaatcagtgggtcttcggggggtcataaaccagtgggcagagcaggctgctggctcggtgaagctcagggcaggccagaaggcggctcagggcagcgtgccagggtgcagaagccagtgcctccctaactgggaaccgcaggatcattggcattcctagtagtccgtatctgtccttggtgggacacagccaaggggtctggctggcacctgggtgggaagcaggggagaccgagggtgccctgcacgtccatgctgggcctgggccgtcagtgtgtccacaggcagtcaggaccttagccgtgccaaaatctgatgatttagtcaacctgcgatggaaggaagag

SEQ ID NO: 218089 - DNA, 343 bp, Homo sapiens
  chr17:75398288-75398631
  hypo
ccgccatgtggactccctaagccaacgctcccccaaggcgtccctgcggagggtggagctctcgggccccaaggcggccgagccggtgtcccggcgcactgagctgtccattgacatctcgtccaagcaggtggagaacgccggggccatcggcccgtcccggttcgggctcaagagggccgaggtgttgggccacaagacgccagaaccggcccctcggaggacggagatcaccatcgtcaaaccccaggagtcagcccaccggaggatggagccccctgcctccaaggtccccgaggtgcccactgcccctgccaccgacgcagcccccaagagggtggag

SEQ ID NO: 218090 - DNA, 57 bp, Homo sapiens
  chr17:75411759-75411816
  hypo
cccggcaccgaagccgagggaaggcagcattagtatgagctcccagcccaccgggct

SEQ ID NO: 218091 - DNA, 110 bp, Homo sapiens
  chr17:75411846-75411956
  hypo
cacgagggaagcatggcgaggtggacggtgcggaggcataaggagcaaaataaggcagatgcagtggctcagtggctcctggtggctgcgaggagcgtgggcaggacagc

SEQ ID NO: 218092 - DNA, 334 bp, Homo sapiens
  chr17:75413812-75414146
  hypo
tatccgcattcatgtgagggcactcataggtccaccgtccagccccatgctttgtttgctaccaaaaaatttcttaagaattcctcagctgcaaatcctcctaccggagggggggttccaggaacccagccttgctcggggttggggcacctcagcacctgctgcacaggcgttggtcattaaaggtcatgtgccgtatccgtgggccctcggggtctggtggcacctgggcacacagtccagtggcggcctcctacctgccagacactgggagtggggggctcctcattcctgttccctggcggtggggggagtgccccgagctgtcacacat

SEQ ID NO: 218093 - DNA, 278 bp, Homo sapiens
  chr17:75434081-75434359
  hypo
gggtgagcagcccacgacacatctgcttccagcatcgtgtgggccggggctttcagaggggctgagggcttggatggccctgcaggggggtgctcctggccttgtgaccgaaaggagctgaaggtttggagaagccgttgggccgaggtcagttcttatagatttggcgaggagggaacagatgctcacggagctgctccaggcactgcacacactgcctcactctgcgctgacagccaagaggctggttccccgccgacccccattttacagataat

SEQ ID NO: 218094 - DNA, 147 bp, Homo sapiens
  chr17:75452754-75452901
  hypo
ctcagggaccagcaccgggtacccacagccagggacgggcccccatggccagtaccagatctcagggaccagcaccgggtacccacagccagggacgggtccccatggccagtaccaggtctcagggaccagcgctgggtccccaca

SEQ ID NO: 218095 - DNA, 183 bp, Homo sapiens
  chr17:75473918-75474101
  hypo
aacctttctgagagtcgacgtgggtactgctgataattagtctggatacccgaaagaatggaaagcagggacccagacagatccttgcacaaccgtgttcgtagcagggcgaggcctggaggtgcgatggggatctcaacggggcagctgccgtcttgctggagcccacggtctttggggggg

SEQ ID NO: 218096 - DNA, 515 bp, Homo sapiens
  chr17:75476867-75477382
  hypo
ttagcgcaggatgcctgaggccagatcctccctgggaggcaggatggggcaaaagtctccccgcaggcagagcagggcctggatgggcccaagcagggacgggggcacagaacagcagccgcccagcctgcgtgggagctgagggccaccaagggcagctccagcctgtggggactagcagaggcaccacctctgtgaccagcgagttgtctgcacctgcatgcgcatgcaccagtgagtgtggcgagtctgaggtgtgctgggacctggcccgtgtaccagccagccctgatgggaaccagccccatcctgggtacccctggaaccccactgtgtgggagcacctgggtcctcagcaggcgtcttccgggcgtccgcccccagccccaggcctctgacccgtgtgtggtgtcttaacagcagccaggagcagggccatcgaagggacctacagacagaagaggctttagtgatttcgggaagttcagctccacgtgccccacatacccaagagt

SEQ ID NO: 218097 - DNA, 122 bp, Homo sapiens
  chr17:75490716-75490838
  hypo
tggctagacatgggttatctcgtttcatgtccgaagctccccgcacccaccctccttgcagagttgaagaggtgctgtgagcagaaaacctgccaagggacccagaacgggaggcggctcta

SEQ ID NO: 218098 - DNA, 275 bp, Homo sapiens
  chr17:75848773-75849048
  hypo
ctgctgctggagcacgcagccctgcagtgaccccgtcgcatatgcttgaacaatattctagagcaccatgaaagactcaggagggtaaagcactagcgcatgtgccgactgagctcccggctggtggaggcagagaggcggcagggcagagccgcggcgtgggcaggagctggggtggaggggggccctgcaccgcgggcagcctggctcctgccctggtcacacagagggagtgcctcacctccgtgcccccaagcccagagtgctgctgccaa

SEQ ID NO: 218099 - DNA, 182 bp, Homo sapiens
  chr17:76034963-76035145
  hypo
tctcaagaccctgtaatcaccgcaggcgaccagcgagagtgtgggaaaaggcgacgctggtgtgctgttggtcggaatgtaaggaggcatgtggcaggatttatcaaaatgttgggtaatatgacgtagtacatcctgcagacacctagagcacagctctttactgacgactgaatgctctg

SEQ ID NO: 218100 - DNA, 96 bp, Homo sapiens
  chr17:76100941-76101037
  hypo
gcaccaggagagccgacccctcccgggacccctcccggctgggcggccccacagacccgctggaacccagcagcggccgcccttttgagtacctct

SEQ ID NO: 218101 - DNA, 133 bp, Homo sapiens
  chr17:76114990-76115123
  hypo
tcctgcccccactgccggccaccctgccagcccagccctccccaggccttggcagcctcaccttcttgacatagaagacgagcagcagcttgatgatctgcacggcggggaggaggggcgagaagagcacccc

SEQ ID NO: 218102 - DNA, 117 bp, Homo sapiens
  chr17:76121808-76121925
  hypo
tcctcctccagggccgtggggtccagctccaggtcgtacaggcggaggctgggccaggcggagcggacaaagttcccgagcaggggccggctgctcctgcaccgaagctgcaccgtg

SEQ ID NO: 218103 - DNA, 189 bp, Homo sapiens
  chr17:76129456-76129645
  hypo
cgggctgggtatcttcgtcgctgtccccaggccttcaccaacacctatctcttctacggtgcgtaccgagtggggccggagagcagctccgtgtacagcatccgcctggcctacctcctcagcccgctggcctgcctgctcctctgcttctgtgggactctgcggcggtgagagcgaggtccacacctt

SEQ ID NO: 218104 - DNA, 240 bp, Homo sapiens
  chr17:76145402-76145642
  hypo
actctgcctcaaaaaaaaaaaaaaaaaaaaaaaaaaaaaaggcgccagtccttggcccatctggaaggactggctaaataaagtgcagcctggagatggcatattatgcagctgaaacagcttcagtgggagtggaaagctgggtacacgtgaaggacctgagggatcaggatattcgaaagatgatctctgcgtaggttggctttttgttttgttccattttgcttttagacacagggt

SEQ ID NO: 218105 - DNA, 197 bp, Homo sapiens
  chr17:76152520-76152717
  hypo
aacagagaagtcactcgcaagcagaaagcagatacctggcgtaggtgggtgaaggcctgctggaatgcgctgacgggctggttttgatctgggtctagggagaagagcactttgggtgccgtgagcaggctggtctcctgcaggagcctcgcattcttcaaaagtccttttaattaattaatttttttagaaacagg

SEQ ID NO: 218106 - DNA, 95 bp, Homo sapiens
  chr17:76153510-76153605
  hypo
agatgatttggacttcgagacaggagatgcagggcctcagcgaccttcccaatgcagtcctcagcattgtgtaaaaatgactttgtaggccgggc

SEQ ID NO: 218107 - DNA, 94 bp, Homo sapiens
  chr17:76153905-76153999
  hypo
gaatggctttgtggtactcaaaggccggccacgtaagatcgtcgagatgtctacttcgatgactggcaagcacggccatgccaaggtccacctg

SEQ ID NO: 218108 - DNA, 301 bp, Homo sapiens
  chr17:76167732-76168033
  hypo
aggatggccaggggccggttcttgggtcaagggtggtggagggtggggtcccccacccacctgtaccctgctgtgctccccctgcagggtgtgctggcctccctggcctaccagcgctacaaggctggcgtggacgacttcatccagaattacgttgaccccactccggaccccaacactgcctacgcctcctacccaggtgcatctgtggacaactaccaacagccacccttcacccagaacgcggagaccaccgagggctaccagccgccccctgtgtactgagcggcggttagcgtgg

SEQ ID NO: 218109 - DNA, 80 bp, Homo sapiens
  chr17:76176965-76177045
  hypo
aggtaacattagagagatggcggccttcctctgagcaaaaacacaatgaccagcgctgctacttttcaaagcaacaagat

SEQ ID NO: 218110 - DNA, 249 bp, Homo sapiens
  chr17:76187158-76187407
  hypo
ccgtggccgcattgggtgtccttaagcatgtggcagtgattcagaatgctgggggttgggggggctgtgctgcaccacctgggcctcgaggggcatttcccaaacaccaggcactttataaacctccctgctcaggggcaggtgcccaggaccccttgctgcagggactactggaggcaggagaggtccgggggaggtccacggctcagtcgaccatgcctggcctttcttgctcagccatccataccc

SEQ ID NO: 218111 - DNA, 195 bp, Homo sapiens
  chr17:76232494-76232689
  hypo
cacccatccactgacgcggctccagctctgactacatgccgagtgctggccaagtgctcctccgaaggctcctccgagggccccccagtcccagctgcaggtgagaaatctgaggcctggagagggccgagggcctgggctccccttcacccccactggtgctgtctcctcagtttccaccgactgcccagcact

SEQ ID NO: 218112 - DNA, 166 bp, Homo sapiens; identical to SEQ ID NO: 204813
  chr17:76349231-76349397
  hypo

SEQ ID NO: 218113 - DNA, 316 bp, Homo sapiens
  chr17:76395086-76395402
  hypo
aaggtgggtagggtcgtcttcacccagagcagaaatgctgcgagtgggtggggtagtgccccaggagaaggttgggtgcagttaccaggagaagggtgaatgggtgctgtgtggcaagaagagcaggcgtctgccacgctgaggacttcaggcctgagacatggccagcatgcaggacagaggttggcctggaagtcctctggctaggagtagccccagctggtgtgactgattcaggtggacggcacaggtgaaggcgaggccacgtggaggtggctcctcattgggggcaggacgccttcctgttgtgagtcag

SEQ ID NO: 218114 - DNA, 139 bp, Homo sapiens
  chr17:76397569-76397708
  hypo
cctgtgattcctgcggctgtggctcccccatggcctttagagagctgctgctggatttgcagcagtgtctgaacttggggaggaggagctgaagttggaacttgttgggagaagagctctctgcgtcttgtggacctag

SEQ ID NO: 218115 - DNA, 100 bp, Homo sapiens
  chr17:76404659-76404759
  hypo
agattggcagaagggagtggggtgggggccttggatcccttggtgccgtgtctctggccttgctccctgtagttctgttgcgctgattcggtcgtgaagg

SEQ ID NO: 218116 - DNA, 292 bp, Homo sapiens
  chr17:76404803-76405095
  hypo
aggtggggctgagtgggcatctgggttggatctcaggcaggtggcagttcctctgattcatggttgtcagtttcctgttgcctggccctcgctcctcgcccagtaggtgtggtgggacaaggttctgggagctggggtagaatttggactcttaacgggaagtgcctcgtgctgccgcagacacatctggatgggtgctgagctttccttcccaagcctggtcctgatcgggggtggggtacaggcaggagcagcccggccttgtcagccgttgaaagtgtggtatctgctg

SEQ ID NO: 218117 - DNA, 48 bp, Homo sapiens
  chr17:76405130-76405178
  hypo
cagtgcaggggaggctgagtatgaaccgtgtcaagccagttcttatgt

SEQ ID NO: 218118 - DNA, 211 bp, Homo sapiens
  chr17:76425213-76425424
  hypo
gttgggggggatctgaaagccgggggccagcaggacgtctccctccagcatctccgtccggatgtattcagccaggtaggtcctgcacagccgacggtcccagtcatctgtgatgtggccgccatacatgatttcaccaaaaaggtagcggagatcgtcccagggcacctgaggaaggatgacagcgggtaggggaaagtgcccctgtgcc

SEQ ID NO: 218119 - DNA, 111 bp, Homo sapiens
  chr17:76455189-76455300
  hypo
agaagcggacgatgttgatgcaccaggagcacaggccggcggcggccgtggacttggagcggatgaactcggggtcgaacgtcgggttgccttggtagggcctagcgaggg

SEQ ID NO: 218120 - DNA, 41 bp, Homo sapiens
  chr17:76456117-76456158
  hypo
tttggaccgggtcctcggtgatgccccgaagaagccgccat

SEQ ID NO: 218121 - DNA, 306 bp, Homo sapiens
  chr17:76526260-76526566
  hypo
cctttctgctcacgcttggtggggtagttggccttgaagcccagcctccaccccctgctaccccagaggaggcacctgacaaatgccacccactcaagtggaaggccactccctggtgctctgcacattccttgggctccccgagtacatggctggggacccacctgttggtgacgtggttgctcaggtgccgcttgaacatgaagccccagcgccggattgtgctgagcagggcctgcttgaaggggcggcagtcgcactgcagccagccgtggaacaccttggtgttctcgcacttggacacct

SEQ ID NO: 218122 - DNA, 39 bp, Homo sapiens
  chr17:76526629-76526668
  hypo
tgcaagcctagggggggcgtcagcacagggcctcagtcc

SEQ ID NO: 218123 - DNA, 137 bp, Homo sapiens
  chr17:76670818-76670955
  hypo
ccacctgctctgcctggactggcatgctggccctggcggagtggcaggagctgccctgagagtccctgagagaacggcaggaaaatgctgcgtgtcacggctcccttcatactgtaatgaggaggggcagggccagc

SEQ ID NO: 218124 - DNA, 188 bp, Homo sapiens
  chr17:76722780-76722968
  hypo
ctttgaatttgacaccgagacaggtggattctattctgctgttgagttgggcgagagataaagaagctcttctggaagagcaagaagcggcagccaggcgccatgagaaagaaaagggactggaagctttgcgtagtcttcactgcaccgcggtctgcactcctgttcagaagcggtagcaaagaaat

SEQ ID NO: 218125 - DNA, 44 bp, Homo sapiens
  chr17:76766753-76766797
  hypo
ctgggattacaggtgtgagccacagagcccgactgaaaataggt

SEQ ID NO: 218126 - DNA, 321 bp, Homo sapiens
  chr17:76818618-76818939
  hypo
acagcggagtcagacgtgggcttcggggtcaggagccctgccctcattcatgtcccccgcaccgctcactaactgggatctgaggcactctgagctctggggcctcttctcacccggacccggggctgcctggcgcctcccacgcctacgtatccatatggtagctactcacgctggaaggttctgaaacaatacaccacatccagtctctgctcctggttctacttgcaacccactgcatctggtcctgactcactgctctggaactgccttcctcagagtcgcctaaggcctccaggcatgaggccagctgggtctgca

SEQ ID NO: 218127 - DNA, 272 bp, Homo sapiens
  chr17:76851773-76852045
  hypo
tcctgcttggggggcgccgcgccgcggtaccacgcacaggagccgtcacttctcttgatgcaggcgaagaacttggcctggtgcccgttgatgttcttctctgtgacccagtccatccagaggcactcgtccggggaggagatgtagcacgggatcatggggcagcgcgtgatctggggaggggcacacggagggggacggagtcagggacccaggaaggggtgggcagaggctgctctgggggcatgtccagaacccggcaatgtgcctac

SEQ ID NO: 218128 - DNA, 130 bp, Homo sapiens; identical to SEQ ID NO: 54663
  chr17:76921422-76921552
  hypo

SEQ ID NO: 218129 - DNA, 72 bp, Homo sapiens
  chr17:76977964-76978036
  hypo
taccccaaacctctccgcaaattgaggaacgctccctataatagctaatatggatttcgccaggcattacta

SEQ ID NO: 218130 - DNA, 195 bp, Homo sapiens
  chr17:76987632-76987827
  hypo
gctcttggagcgccttgagatagtgggacaaggcggactggaggacgcagtttccagatgggatgccctggcgggcgactcccgtgcgcatgcccagcatcctgcgcaggcgctctcgtggccaggcctctgcaaacagtcagcacagaccgggagacagaaaactacactccctcagacgctttattgtttaca

SEQ ID NO: 218131 - DNA, 59 bp, Homo sapiens
  chr17:76991463-76991522
  hypo
ccggccggctgccctcccctcagctcctgaaggttcagtgaccactctcaagtctcctc

SEQ ID NO: 218132 - DNA, 651 bp, Homo sapiens
  chr17:76992707-76993358
  hypo
tcctggtaggcacatcctagcgtggtcttgagaacctttgaaggtgtaaaaagggcgtgttcccagaggctccgagagcagcagcggatacagccgaaaacatcttggagagattccccacgtctcccacaggcctctagcgataagctcttcctcctagaaactgctcagtgtgaagtgacagtaggctatgctcctggctaagggtaagggggccgcaggtcagagcaagagggagacgtgctccctcaccacatccctggcttctaggtgtgtgaattctttaccatgtgcctgtgtttgccagccaggccctgagctcccactccccacccacacctccataaaacctcagggtccagttacctttctccacggtgccgtcgccgtcggacagaatcacccagggcacggctttgctgccttcgatctggtagacgacccccgtccggtcatccacggagtagagtttcccattgaaaacaatcaggtcggatagctccatgcctctccccttctccgccaggtgggactccaggaccccatggtctttgtcccattccacggccaccttgtccccactgtctgacagggtcaggtagccctttttcaggtaactgaaccaggtgttttcctcttgggcccttgact

SEQ ID NO: 218133 - DNA, 478 bp, Homo sapiens
  chr17:76993419-76993897
  hypo
gggagacagggggtaggtgtcattgtaccagttggcgggcgcctggccgagcctccagttgtgtgcattgtgggtggggggcctgccgggggccgggcggtgggagcagagcagccagaggatggcagcacccacaaagaacgtcaggatcaccttccagcgggggcggaagcgggggtccgcggccttggtcatggacgccagcacaggaaggccccccacactgatccggagggagtgcatagactcattccattccgggtgctcagacagctgcacgggcatcagcgtgacagacaggcgggacctgcacagccagggagggaggagaggagtcagcgcctccgcaagcccagtcacatcttagttccggaagctgcaggcgctggaggctgacttttccagaagaaacagtatttcactactctgtggccattcttactcccttggcttaatgaattcccgactctagattccc

SEQ ID NO: 218134 - DNA, 306 bp, Homo sapiens
  chr17:76996176-76996482
  hypo
cttacctgcatttctgacatgcgtcttagacatttcaagacacgagtcctgtgcagcttttccctcaagcctacttgctcctcgtctccccttgggaagggtagtggtgacgggtggccaccgtgtccacagtggtctggttcaagctctctcaggatcctgggagatgtgcttttctgtgtgaatatacacttcgataaaaacataaggcactgccaccacgaaaaacctgactggcctcatcctccgtcttccttcctcagcattgactccgtggacaggttctgtcctcttccatggcccttc

SEQ ID NO: 218135 - DNA, 412 bp, Homo sapiens
  chr17:76996567-76996979
  hypo
ctgccagctgccccccaccaacatcccctgacactccctcgccacctgccatgaagtagcatccatcagatggcacactcccagcttcagcggcttcctcaggtcctggggtgaacccactctgctcccgctcagccctcacactgtaccatctcctctgcctgccggctggctacatagacctccttctgtcccctgaccacactggccctggcagagcctgcagttccccctgcctggaacagtcgggcctgctcttcgcaccagcagctcggtctctcctacggggcatcagctccctgggaagacttgcccactcgccctccctcccatgccgctccggctctcccaccgtccctgcctggctaggtgattatttctgctcctggggcagggatctggccactgtcac

SEQ ID NO: 218136 - DNA, 530 bp, Homo sapiens
  chr17:76997041-76997571
  hypo
gaaagagatgccaggtgagccattagccacttcttcaacagcccctctgcactctaccgggggccccaccttaggcatattatgaacccacaacctggatcaagcaccccaaagatcgagctgctcagctgccacatctgagctgcaggcccgggaagacggtgcttgccagcacagaacaacggtgcctgcatagactgctgtcagacatcgtgaggtgtcgtcgtcaccagcccctggaacccccatgttcttccctgttcaactccctcagcactccggagagccactgtcctcaccttcaccattcctgtcaaatctccggcccacttctcccaggagaccactctgtggccaacttcagcagccgaggcccctgggtggggctcacacctgccactcaggtcagtccccccagccgccgggcacctgctcttctggttcctcccttccatccacaggctgccccaagtcgcccaccttgtcaccattttacctccagaccccacactcccacagacactcaactg

SEQ ID NO: 218137 - DNA, 38 bp, Homo sapiens
  chr17:76997601-76997639
  hypo
aggaaaacccttccctgagtccccggcacctctgtccc

SEQ ID NO: 218138 - DNA, 289 bp, Homo sapiens
  chr17:76998488-76998777
  hypo
tgcaaactaccacccgtgggccaaatgcagtctcccgcctagtgtgtagatgcggcctgtgtggcctggtatgtggttgcagcttggtgtgtagactctgcctggtgtgtagacgcggcctgcgtagacgcggcctgctgtgtagtcacgtcctggtgtgtagatgtggctgattaaagccagctaggactcctccctggcatgctgagtctggctgcaccgttgagtggtcgcaacagactgtggaggctgaaaatactgactccctgtccctcgacagatccctggt

SEQ ID NO: 218139 - DNA, 194 bp, Homo sapiens
  chr17:76998994-76999188
  hypo
cctggcatctacaccgtggcacacgctccccacccgggaggctcatgtcctctgaccacatggaaccagaggtgtctgagtcccggcgtctctgcccctctggggaatcagtgtgacggaggcaggggcctttcctccaggagctcagcacagttggggagacagactttgaacagtcccgtgtggtcagtgtt

SEQ ID NO: 218140 - DNA, 145 bp, Homo sapiens
  chr17:76999462-76999607
  hypo
tgcctggctgccggcgcctgctgcaggcaagagtttgcatgttctttaaaaagctgggttctttttcgggggtggggggtgggggggctcttttgtttgttgccagccagaaacaacagaaatgaaccggcgagggtaagacaca

SEQ ID NO: 218141 - DNA, 60 bp, Homo sapiens
  chr17:77043872-77043932
  hypo
caagttctactgctacgtgcccggcctctacttcttcagcctcaacgtgcacacctggaa

SEQ ID NO: 218142 - DNA, 90 bp, Homo sapiens
  chr17:77069647-77069737
  hypo
ggatccactgccctcgctcactgtaagcttcccaggactgaagccccaaagaggagccctctgccttctctgtcctccccatgggtcagc

SEQ ID NO: 218143 - DNA, 151 bp, Homo sapiens
  chr17:77070099-77070250
  hypo
actccaggccctgcacgcttaggggtagagcaactactactgttgggcacaggcgtggggctgtagaaagaaatccgtgtttcactggaaaactatgcatcctacataggacaccagcttccacatggcccgatactaacctactaacctt

SEQ ID NO: 218144 - DNA, 263 bp, Homo sapiens; identical to SEQ ID NO: 204820
  chr17:77071240-77071503
  hypo

SEQ ID NO: 218145 - DNA, 202 bp, Homo sapiens
  chr17:77074838-77075040
  hypo
gtgaaaccttgggcgcagctcacagggctttcaaccccgaccttcgagttccgggagactctgttctgagggactgcctacccctccaaatagagtgggaagccagagacgggactttgacacgagacttcctgcttcccctcctttctctcccttgttcattggctcacagggggtagcagtgctcggtccattagatgca

SEQ ID NO: 218146 - DNA, 281 bp, Homo sapiens
  chr17:77076446-77076727
  hypo
gtgagtgcccagccctcacccacctccccgccccttgctgtgttgccgcccacctccacctctttcctgccttggcctcacctcgccccacgcctgggctgcaggttgcagcagtaagagccacttctcgcctcccaggcagtgccaactctgaaatcttagttacacgcagtgagacagaatctcctccgactgtttccagcaagcgtgcttggccggctcccacgtttcccgcccctgcctgtgagcacacctttccttttccgcgctctgctctgggc

SEQ ID NO: 218147 - DNA, 304 bp, Homo sapiens
  chr17:77113252-77113556
  hypo
cccccaggagtctgcggtgaggaggccccactgcctggaaggacagatgccgcctctgcctggagcagcccagtgtgttaggacccctgctcagatgtggatgggtctgacgctcagccaccctggcagggacaggcaggagtccgcgtccttgctgaaggtgggctttgcggtggggaggaggagcgcccagcagggaagtggctgctcacctccctcacctgcgcctccaccccacgctcccatcacccggggccacgcacgctttgttcacaccacacacgttagttcagtgagcacctac

SEQ ID NO: 218148 - DNA, 171 bp, Homo sapiens
  chr17:77126953-77127124
  hypo
gcacaaattcctcatcagtgaagatccagagccgccgtggtgctaggacacggtgcgcgggaatcagccccgcacctgcaaggcagcgtgctctgcgtgccctgcgtgtgccccatgtgtactgtgtgccccgtgtgtgagcatgtgtgccccatgtgtgctgtgccccca

SEQ ID NO: 218149 - DNA, 294 bp, Homo sapiens
  chr17:77127177-77127471
  hypo
ccccgtgtgtgcacatgtgcgccccgtgtgtgctgtgtgacccgtgtgcttgtgtgtaccgtgtgtgagccatgtgctgcgtgtgctgtatgctgtgtgctccgtgtgttctgtgcactgtgtgtgccctgcgtgtactgtgtgctctgtgcccatgtgtgctccgctcagtctccatgtgccctccgtgtgtattccatgtgccctccgtgtgctgtgctctgtgcacgctgggaacagcgctagagcgtctgtgcttctggacaggaaaacaagcccctcgtctaccttcac

SEQ ID NO: 218150 - DNA, 215 bp, Homo sapiens
  chr17:77127501-77127716
  hypo
cacccacagacgcggctgcaaaccccacggcgtgagcccacctgacgcagcacccaccaccacccgcaggagcctcaggccttcctgttaagcgtcgccactccgctatctgctgaccttcacgctcactccaactccaaacctgggcctggtctctcacacgttaggaagccacggatcatgttttcatgcacgggtattttcttttggtaact

SEQ ID NO: 218151 - DNA, 194 bp, Homo sapiens
  chr17:77769051-77769245
  hypo
tctgctggtaccccgctctcgttccctctcacgttcccgctccctctctcgctccctctccctttctcgatcccgctcccggtccctatcccggtctcggtcccggtcccgaggggcctctgcgcggcaggtgctgctggtgctggtgctgctcgctggcggggacaaacccatgtttcgaaggccctcccggg

SEQ ID NO: 218152 - DNA, 174 bp, Homo sapiens; identical to SEQ ID NO: 204822
  chr17:77771456-77771630
  hypo

SEQ ID NO: 218153 - DNA, 301 bp, Homo sapiens; identical to SEQ ID NO: 204823
  chr17:77774854-77775155
  hypo

SEQ ID NO: 218154 - DNA, 233 bp, Homo sapiens; identical to SEQ ID NO: 204826
  chr17:77788400-77788633
  hypo

SEQ ID NO: 218155 - DNA, 281 bp, Homo sapiens; identical to SEQ ID NO: 204827
  chr17:77813600-77813881
  hypo

SEQ ID NO: 218156 - DNA, 211 bp, Homo sapiens
  chr17:77824717-77824928
  hypo
agaggtccagatccacggggactgacctgacagaactcttggccatggccagttaggactgttgagacaagtaggagctggggcgctgcacacctgctgactgtccctctgccatgtggaagcaggagcatggtgtggtaagagccagacggacccaggcttctccccgctctcccgccggccaccggcgtgactccgagcaccagtgtat

SEQ ID NO: 218157 - DNA, 193 bp, Homo sapiens
  chr17:77912319-77912512
  hypo
agcggttcaaaggcacgaggtatctagtgaaatgctaggaccagggacgctattcccctggagcaggcgggtggggaaggagtgctccaaagcaggcattattaggacacagactctccagagtcccagttgtttagccctccaaattctcagcctactgccacccgactgtgcagagcggacaataaagtgg

SEQ ID NO: 218158 - DNA, 153 bp, Homo sapiens
  chr17:77913051-77913204
  hypo
gatggggctccaggacggtctcctcaaaaggctcttaggcagacagacctgggaacttggaagtacctgctggacgacctgggttcatggagaaaagagaagccgagaaggtggaggaggccggtaagtggtgacctccgctttcctgctgag

SEQ ID NO: 218159 - DNA, 600 bp, Homo sapiens
  chr17:77914423-77915023
  hypo
ccactgcagcgtttcaggagctgactttcctctgggtggctgtagatctgacttctgtcacttccagactctaattttgtcattaatatgaaaaggttcctctcatgttgcccaaaagcattttccttaggtttctaccgtcccctgtccccttcacgcccagccccaccccctcccgtgcccagggcctctgaggaggtcccctcaacccctgtccggtgtcgggggcccgacctatctgcggaagccgaagccgtcctgcggcgtctttgggcccttcttgccttccctcagggacttgggggaaggcatctccaccgtgcccccgtagggacagctctccgagccgggatggtggccggtgcactccaccgcgggcatggagccgctgtcccacatgcctgacccgcacagcttacacagatcgtgcaggctgcaggggatccggggcaggaggcggaactggtacagcaaactcctcgcctgcagacagaggacggggggtgaggaggggccgggggacagcctggcagcctagggtccccatgggagtggccaaagacagcaacagcagcaacaacggcctgcacctcgggggct

SEQ ID NO: 218160 - DNA, 188 bp, Homo sapiens
  chr17:77917679-77917867
  hypo
cgattttttttaattcgggagtggtgggaatgaagcctctcagaccgtccatgccgtgcttcccttcgttaatgcagatcgtccaccctgcacgtccacgtccagcaggctgagccaggagggaaacctagacccgggccaggggcgagccgatgaccgcatgcaaaggcggcgtgtggtaccggcac

SEQ ID NO: 218161 - DNA, 520 bp, Homo sapiens
  chr17:77918540-77919060
  hypo
gtctgaagccagccacgtgggacgggaaggcagtcgccgtatggggggctaatgtgtggctgtgggtggggggcggcgaggcggacaggggcagcaggcagggtggccacggtggttcaggggccatggtcccaacctccccagccctggcccctgccctggtcacctggtagtgggcccagcaggcctcccagatccgcagcgcttcggcctcggggaactcccgcttgaagcacagaaggagccagcggtggcagaagagcatctgcaggccgtcctcgcccagcgagaccaggtgctggtagaagcgcacgtgcgtcagccgcagcagctcgcgcaggtacagctgggggtgaggccgtcacgcgttagttagctccggtcccatgcggcctgctgcccaggaagcccactcccactggggcccttccctgggccaccccagcctggaaaagcacacccaggggcctctacctgctgcatgtgcctgcccccccaacgctccattccgccgctggaa

SEQ ID NO: 218162 - DNA, 697 bp, Homo sapiens
  chr17:77921127-77921824
  hypo
ggctgggtgtgatggtgccacgtcttccttgccagccagggagcttgggccaggttgtcacgtgcaggggtggaaggccaccagagcggcccacacaacgcggcctctggacctgcagggagtcagagggccatccccggaggccgagataggctaagccgcccatatcccacgggcaagtcctatcctggcgttcccactgcccactgacctacagcagccaagccacgcatcaccacggcaaccccggctacaacgggagaggcaacacgggccctcacatgcccttggacgcacccatccccctgagcctcaccagttgtttctccatgtcctcgtcccggggtgagctgacgaagatcgtgttctgcatcaaacccacaaagcaccagaaggtgtctgactcatccaggacctcggccaagatgggcgccaccaggtccgacatcccttgggaatagccgacggcagggttgtacacggcgtagttcagcaggatcctcctgggaggcggtggagacagcagtgggtggggatgaccctcaccgcggcacactgcccagcctgcagaaccctgggccgtggaccctgccttccctcgcttgccttcacctcagtggaaggcagctgtgccaccatctcagagcccaagcttagcttccagacacacagacccttgctttgcaaaaggtaatgg

SEQ ID NO: 218163 - DNA, 255 bp, Homo sapiens
  chr17:77923435-77923690
  hypo
attgcacctcaaattgccttttcaaatgacattttcctccgcggctcggcggggtgggccgggctggccccggcggttaccttttctgctggatctcagagtactcctttcgcttctgcagccgcagcgcctcccgctcctccgacgtggactcgtggctgtaatagcgcagcaggaagggccagacctccccgcggattgacacatcaataccgccaaagaaaatggcctggaggaagcggcaaaagttgggga

SEQ ID NO: 218164 - DNA, 171 bp, Homo sapiens
  chr17:77923950-77924121
  hypo
cccttctatgcaggctgacacggtatccccccaaaccctcgagggaggtgttgtgttttgtttttttttttcaacgcagcagctttgattgctttatcggtgtgttcacagagagcctcacacaagaaaacggggccctcacgaggaggtggcccgtgggtgcgggcgggc

SEQ ID NO: 218165 - DNA, 204 bp, Homo sapiens
  chr17:77928737-77928941
  hypo
tcgctttggcagtcacggatggagggccccctccctgctgccgtggccacagaagactggtcccctggagggccggagccgatttcaaaccaggcaagagtccaggacacaggggccaccacacacctcccccagcaacgtgcctccaggcaggagttggcttaaaccctctcgcaaccccttaggggcaaattatttgcatta

SEQ ID NO: 218166 - DNA, 87 bp, Homo sapiens
  chr17:77930345-77930432
  hypo
ctgggcccggtggtcgctttaagttgctgagtttgagggcggtttgtttcacagcaacggatcactgacacacgcaggacaagccag

SEQ ID NO: 218167 - DNA, 83 bp, Homo sapiens
  chr17:77946278-77946361
  hypo
taaaaaggaaggagattctgacacaggctacagcatgaatgacacctgacgttacgctaagtgaaagacgccagacacagaag

SEQ ID NO: 218168 - DNA, 33 bp, Homo sapiens
  chr17:77951521-77951554
  hypo
acacacatgtgcacacggcggtactggactcat

SEQ ID NO: 218169 - DNA, 181 bp, Homo sapiens
  chr17:77976565-77976746
  hypo
catctgctgcatttctagggcgtggtggccacacacagtggggcacaggcacaggaccgcgtgcactgcaggacgctctgctgacggcgctggcccaggcactgggaggaccctgtgaggaagcacccgggaacggtggcgcacgtagggaacaccacgcggccttgataggagctctcca

SEQ ID NO: 218170 - DNA, 305 bp, Homo sapiens
  chr17:77980905-77981210
  hypo
gctgcaactcgccacgttcagcgagcctcccctggaccgggctgacacaggcctgaggtgcgagccacaccgagcccgcggccatgtggccaagaggcattttctgagccttcatcaggagcagggccgggctgtggtaagcaccccccagcacggtctccgggtggggacgagtcccaggccaggctcgctgaccccataccccaggctggtgctcaaccctcacgccgactctgccctacaagggggttcttggccgcacttcacacccgtgaggcatctgcgttttggatgtgggaggtaat

SEQ ID NO: 218171 - DNA, 516 bp, Homo sapiens
  chr17:77983907-77984423
  hypo
gtcaggccttgggggcctcccgagagcccacgcccagaaccaggaactcacctgctgtcactttccagaaacacggagccgcggctctcggccagcgccgcgctgatgggcgagaggcagaagggcgaggagaaggtgtctgagtctgagtcaaaggagctgtctctgctcacgccctcggctgacagttccaaagagccatcctcctccccggcctcgggccgcggctcccgcccctcctcggtgacatcctgcggactgaccgtcgacaagatcccggaggggctgcaagcaggctgcgaggctggctgggcaccatccacccccaagccctgcgccagcttctcctcatcctctggcgcagggctggcgagcatgcggtctggaacactctgggccaccaccaggatgtcctcatctttgggggtcagggtaggccgcagctccgtcggggagggctggtgggaggctcctgagctccgggtgcgccggccccgagggcggggtgccttgcga

SEQ ID NO: 218172 - DNA, 222 bp, Homo sapiens
  chr17:77987281-77987503
  hypo
ggggtgagggtcaggaggtccgaggctttggaggaggccctgcgaaggaggcggcccagagacattgccgggcaagtgtttccatcctccgcatgcgtcggcccgggcagggctcgtcaagacctgcctgggggaggaagagagaggagatggtcaaggttgtggacttgcgttctgtctcacagcagtacgtgtcgcctcggcacccggtgggttctggtt

SEQ ID NO: 218173 - DNA, 31 bp, Homo sapiens
  chr17:77991173-77991204
  hypo
aacccccttaaaaaacgtaaaaaccggccag

SEQ ID NO: 218174 - DNA, 100 bp, Homo sapiens; identical to SEQ ID NO: 204832
  chr17:78009418-78009518
  hypo

SEQ ID NO: 218175 - DNA, 579 bp, Homo sapiens; identical to SEQ ID NO: 204833
  chr17:78009924-78010503
  hypo

SEQ ID NO: 218176 - DNA, 172 bp, Homo sapiens
  chr17:78023956-78024128
  hypo
tggagaagagtcacgaccgccacgcaatggcctcgagcgagcgcaggcagaaggaggaggagctgcaggccgcccgcgctctctacaccaagacctgcgcagccgccaacgaggagcgcaaaaagtgtaaggcaacccggcagccccacacgccatccggtcctggagggtt

SEQ ID NO: 218177 - DNA, 328 bp, Homo sapiens
  chr17:78041138-78041466
  hypo
tcccaagacaagcaaaggcacctggttttctgggatcccctgcctaacttgtgtgcaattgcaagaaagcatatgcgttcacccggagtcttccttccctctcttgctccgtgggagcacaccacactcactgttctgcacctctttgctttttccatttaacagcgtgtccctagagcgcttcccaagtcaaaatataaacaccgctcgttcccgcctttctaccacatggcattccgctgggatacttctacggggaagcttcctgcccggggcatcgagggcgttcgcgtccgtctgttatggcggtgctgctgtagataaccgg

SEQ ID NO: 218178 - DNA, 182 bp, Homo sapiens
  chr17:78041496-78041678
  hypo
tatatagccttttttatattgcctatcaagcccggaatgtctgggtctagcgggtattgctaagtaggattgtgacagtcacgcccccggcagcggtgtttcaaagtcccctgacagctcagcatgttgtcacacttcaggactgtgccaatccgattgatgaagaaaatagataatcttgt

SEQ ID NO: 218179 - DNA, 112 bp, Homo sapiens
  chr17:78086406-78086518
  hypo
atttgtgatctcccgctcgacctttgctggccacggccgatacgccggccactggacgggggacgtgtggagctcctgggagcagctcgcctcctccgtgccaggtgagctc

SEQ ID NO: 218180 - DNA, 172 bp, Homo sapiens
  chr17:78158229-78158401
  hypo
gtgtagcctgcatggcgacgaggtgtgccttgtccagtagctgcccgtggcctggctggcttgtctgtgaactgcccatcctgctgacgcctgggcaggtctggacacactctgggctgcatatttgtagggccgcctacgtcccactgcccagctgcggcagtgacatggg

SEQ ID NO: 218181 - DNA, 410 bp, Homo sapiens
  chr17:78163403-78163813
  hypo
ggcttctctcctgcccggtgtagagtggcaagactgcatccgtccacacacctgaccgtgcagttgccgccatcttctcgggattctgcttgcctagggcaggcctctggggaagccagcaccccaggctgacctctctctgccccaggcggagaaggacattctggagcagagcctggacgaggcgcgggggagccgacaggagctggtggagcgcatccactcgctgcgggagcgggccgtggctgccgagaggcagcgagagcaggtgccgtgtgagcccttcctcccttgtgactctcctggggcttgtctcaggggtgcggacaggtctgtggggaagccagattccttcatccacgccgagctcacataattttgctgaacgaatctgtcggcctgttcatctg

SEQ ID NO: 218182 - DNA, 200 bp, Homo sapiens
  chr17:78165107-78165307
  hypo
gtcgtggcccacaggcgtactccgcgagggacagtgctcagagggagatttcccagagcctggtggagaaggactccctccgcaggcaggtgttcgagctgacggaccaggtctgcgagctgcgcacacagcttcgccagctgcaggcagagcctccgggtgtggtgagtgttcccggctgacccgagctggaggccagg

SEQ ID NO: 218183 - DNA, 129 bp, Homo sapiens
  chr17:78195404-78195533
  hypo
cccgggatggccccgagcgcctgctgctgctcccctgcggccctgcagaggaggctgcccatcctggcgtggctgcccagctactccctgcagtggctgaagatggatttcgtcgccggcctctcagtt

SEQ ID NO: 218184 - DNA, 561 bp, Homo sapiens
  chr17:78271717-78272278
  hypo
gccttgatgacagagtgagactctgtctctaaacaatgaaaataaattttacaagttgctttatatttagatttactgttgccagatggcctgggttcaaaccccagctctgtcagtcaggaccctgcgttgactacttagccaggacccctgcttctgagatccctcccctgtcctgggagtttgttgtggggattcggtgagggcctgcaaaggagctgacgccctaggctgggggctgagggaagccctgtctcctgcgtgagttaaactctgctcagccacgcgcggtgctcctcttgctctgtgtgcacggtgcttgcttcctgttgggactccagactcccagggagatgactccctggccagctcagctcactgcgggatctttattcccttccagctggcggctgtacctggtgaacctgtgccaaagatgcatggacacaaggacgtacacctggctgggcgccctgcctgtcctgcactgctgtatggagctggccccgcggcacaaggatgcctggagacagcctgaggacacctgggccgctctggagg

SEQ ID NO: 218185 - DNA, 91 bp, Homo sapiens
  chr17:78272313-78272404
  hypo
gatacgtaagtcgtagagttgtgcttatctacatgaatctgggaagactgactcctacattgtgcacccggagtcccggtgggctctgcag

SEQ ID NO: 218186 - DNA, 194 bp, Homo sapiens
  chr17:78326748-78326942
  hypo
agtctgtccacatcgatgacctccggagatccaccctcatggtttctgatgtgaccaggctgcagcatgtcaccatcagccagctgttcgcgcccggagacttgcctgagcgtgagtcacgaggcggagcccctgggggagcaggtggtggaagggcagatggcaggtgtggagcgtggcgtgcacatggcact

SEQ ID NO: 218187 - DNA, 59 bp, Homo sapiens
  chr17:78330433-78330492
  hypo
gaaccaggctcagcggctccagatagggcggaaccaggctcggcggctcccgcctctcc

SEQ ID NO: 218188 - DNA, 277 bp, Homo sapiens
  chr17:78354368-78354645
  hypo
ttaacaccctgcccggggatcagcatcaataccacacagcgcagccacctgacgctgagaatgcggtcgggtctggtccaccggaaaggcgagtctatcatgagagagactcttaggaacatggtccaggctttgtggaacagcaagtactcttcacataactctcttctcagccgtaagcctcactccaagtgctgagaaagtgcagcgtgccaaagcggccagcctcagcctctgtcttgtgttctctcgttctttccagagacaaggcagacag

SEQ ID NO: 218189 - DNA, 178 bp, Homo sapiens; identical to SEQ ID NO: 204835
  chr17:78388504-78388682
  hypo

SEQ ID NO: 218190 - DNA, 278 bp, Homo sapiens; identical to SEQ ID NO: 204836
  chr17:78428377-78428655
  hypo

SEQ ID NO: 218191 - DNA, 267 bp, Homo sapiens
  chr17:78590518-78590785
  hypo
aagcaataggcttcactttgtatcttgaactgggaaggagtggagaaaaaaaaaatattagagccctttgctatacttactttacgaagaccaattatttgttggtttttaaggaccagagttcccaggagtaagtgaaacacgactcgatctcttaagtgtgcccaatactgccagcacaacattcctcacaccggtccagcttgctagttaccttggatactcgcccaagcttcagctgactgcgcaggttattttctatatctt

SEQ ID NO: 218192 - DNA, 338 bp, Homo sapiens
  chr17:78598706-78599044
  hypo
aggacaggtgtgatcgcagcgttccccagctggctccaccccgatggggagtgtggaaggtgtgttgaggggtatccagagaaggcctccccaagaaattgatctttaaactgagatctgaagagagagtcagagccggccaggtgacccgggggaggggaactcccagcagagggaactgtggatttgagggccgagaggtgagtgtggccaggccgcagtgtaagtacgaggaatgagtagtgagtagatggtccacggagagtgaacaacgcaggcagtgaaggcactctaggagaaccaggcagcatcactgatgtgaacgaatgtaaactaaa

SEQ ID NO: 218193 - DNA, 203 bp, Homo sapiens
  chr17:78611391-78611594
  hypo
agagctgcgcgtgccccactcttggggaactctgctgtggcagcagagtgcggatgagctgcatgctgagcagggagtgtcatttagcggaaatggttttgtgtgccagctaatggtagctgtgtatcagaagaggtgagaatgcaaaggtttgtcagatgtgtggaaattctgtcatcccaagggaacgtttgggaggtctt

SEQ ID NO: 218194 - DNA, 250 bp, Homo sapiens
  chr17:78667554-78667804
  hypo
tgctgtgggaaacagcgttttgccaggggccagagagctgactcagatagtgacctggaaaacagactgtggatcaggtgggcacgggcctggaacagggtccctgaaacacccagcaagaggctggggaatgtctggagagcccggcatggtccggagcgtccacgcagccagcagctcacatcctcttgctcctggcggccgatgctctgcgcagaaacgggcttggtctgaacggagagggacattg

SEQ ID NO: 218195 - DNA, 146 bp, Homo sapiens
  chr17:78668243-78668389
  hypo
tggagtgagagtgtcttccatatgtggggccgtggtgctgaaggcttgtgcgttgagtgcctcctttcccgtgaatgtgttggttctggtgaccagggtggagcctccctgcgccccttccttccatccagcatcaggttcccagt

SEQ ID NO: 218196 - DNA, 208 bp, Homo sapiens
  chr17:78759715-78759923
  hypo
acactccagcacatcgtgtgttcaccttctaaccgggaagctctccttgttcaggagttttcatagagcgtctgtccatggggagaggagtggctaggtggggtgggtggtggtgtcccggaaccagtcccccagggatacccagggatgactgtatatgcccggaccaagtcctgaaggtcatagcagaggccgcttctgcacagtg

SEQ ID NO: 218197 - DNA, 45 bp, Homo sapiens
  chr17:78760396-78760441
  hypo
aacgaaagtgactccggagaatggaagagccgcagcagctggatt

SEQ ID NO: 218198 - DNA, 53 bp, Homo sapiens
  chr17:78760830-78760883
  hypo
cccaccacgcagggcgcccttgatgcacacgcacctgccgcccccgccctgtg

SEQ ID NO: 218199 - DNA, 518 bp, Homo sapiens
  chr17:78775495-78776013
  hypo
gaaaatcagtaattcattaacgtctgccagtcactgctgagatgagtaacgaggcactagacgctgatttagaaatgaagaggtggaagcaaaacccgagagatcgccgagcgagggggaggtgagtgattggcggaaacgggggaccgccgccacctagcagatcacccctgcctgcccgagcacagccacctcagcgttcccgtgcgcgccacgccagggcgcacggtgctgcacgggggtccttatgcccgggcgcctctcattaaggtccccccacgggcagagggaagacgggcaccgggtccccttcgtgttcgatgtgcaccccagcaaggcctccttagctcatccggattggtaggggtggaggaggcttggttctgagatgaaattgcagacgtgcagccaagggggaatgtgagaggttcagaggccaccccagggaacctgcacacagcacggagatcttccgtttccttcacagtggtacccaaaccctggtatttgtcatcaaa

SEQ ID NO: 218200 - DNA, 115 bp, Homo sapiens
  chr17:78789606-78789721
  hypo
tcctcccgactggcgaggtggcttccacgtgccccgtcaatcagggctggacagtccgtcacgtgcagagcatcctcccgactggcgaggtggcttccacgtgccccgtcaatca

SEQ ID NO: 218201 - DNA, 36 bp, Homo sapiens
  chr17:78796145-78796181
  hypo
gtgcgcggggagccgactctcggacatgagaggagt

SEQ ID NO: 218202 - DNA, 141 bp, Homo sapiens
  chr17:78811169-78811310
  hypo
cagggaggggcctgacggcaccatcacagcgcagagctcagccctgaccgccaggactcctttccctgactgcatgccgacccctcctgatgaggcactttgggcctggccctggtgtctctcccgcgtccctccaggacg

SEQ ID NO: 218203 - DNA, 200 bp, Homo sapiens
  chr17:78812302-78812502
  hypo
tcgcggcagctccctaggaccccctcgtggtttcttaatgagcttttgccttacgtgaggcgccaagtctgaaaatagataaataagacggaggccctgccctccagaaacccgtgaggaaagaggagcctctcacatctgtgcagaatgcaagggagcaatcggcaagagggcgcggcagacacggggaggccagggat

SEQ ID NO: 218204 - DNA, 153 bp, Homo sapiens
  chr17:78872485-78872638
  hypo
gccccgactccccccgccccggctccccccgcacctgctcacccaacccctgctcaccccgcccctgctcaccccgccgtctccgtctagtgagttttgatgatgggcttttcacttgtgttcagcttcaagctttctttctacttccattgt

SEQ ID NO: 218205 - DNA, 137 bp, Homo sapiens
  chr17:78872734-78872871
  hypo
caccgggcaaccctgtgggtgtgctcccagccttggccagctgctgccttgagcacctctggatagaacgagtccagagcttgcaccatgccctccagggtatggagaactgaaaggttcactacacaacaacccag

SEQ ID NO: 218206 - DNA, 183 bp, Homo sapiens
  chr17:78873841-78874024
  hypo
gaagccagtaccatcggctctgggcatctcccacccctccctgcagaagtgggcgtcctccctctgcagccaaggggaccggcgtttactcaggttgactcctggccaggagtcggggactcctctttgtgccccaacacatccttctctcagccgggcatctgtggccgtctcctccccgcc

SEQ ID NO: 218207 - DNA, 449 bp, Homo sapiens
  chr17:78876642-78877091
  hypo
ccgccttccctcccgaaaccctgcgtctcggccagagtccaagcacacccgtgctgagaggcgaggcgggagttaattctgctcgggactctggtggcctgagaaggctcttcccgcagaaacagcctcatcccgagagcgctggcaggaacgcagatcagaggcctgggctagatgggaccagttttcacgactctgctagatacggtgacattttttacggttttgaaaatgagttaccatagaaatggatccaggatggactaatgcaagggaggggagggcgagaaaggaacacagccctgcggagcctggagccggccctggtgcagctgtggcaagcgccctgctcacccagaggaggagctgggggccctggccagcggcagagccagaagccccgcaggccgcctgtgctctccacacctgaacacgggattctgcgggag

SEQ ID NO: 218208 - DNA, 109 bp, Homo sapiens
  chr17:78877957-78878066
  hypo
agcggctggtcagcgtgattctcgtaacagccacaccgagttgtgggtgcagcccctgaggggtcaggaggggtcacaggaaaggggccgctgcggaagccctcggcct

SEQ ID NO: 218209 - DNA, 320 bp, Homo sapiens
  chr17:78935153-78935473
  hypo
tcagggaagccccacgctgagcgtgccccctcccctacagccgcgtcatgacgtaccgggagcacacagcctgggtggtgaaggcctccctgcagaagcgtcccgacggccacatcgtgagtgtgaggtgaggagcgccgatatttagcagccgttctgctgtaaaaacattattttcccctccatttaaaatacgtccttggtatttaaacagctggaaggggatggcatttcgggcagtaattaactcctgccctggaactggccagaaagatcaggcgcagcccgtaggggcccaggggccacagctgctcccctgc

SEQ ID NO: 218210 - DNA, 185 bp, Homo sapiens
  chr17:78968280-78968465
  hypo
actcacggagggccgcccggcctccatgcctggcgctcagtagcgtggccagggctcccagtgtgggctcggtgacgccaggccctctctctcttggcagcaactgaagcagcagcgggacaagctgaggcagtaccagaagaggatcgcccagcagctggagcgcgagcgcgccctggcccggc

SEQ ID NO: 218211 - DNA, 384 bp, Homo sapiens; identical to SEQ ID NO: 204837
  chr17:79008158-79008542
  hypo

SEQ ID NO: 218212 - DNA, 754 bp, Homo sapiens; identical to SEQ ID NO: 204838
  chr17:79008841-79009595
  hypo

SEQ ID NO: 218213 - DNA, 208 bp, Homo sapiens
  chr17:79027370-79027578
  hypo
ggtgcctgctctgggttttctcctctgtgttcggacccttcggagtcaccagggtgacctctgccagtaatgctgtttcttctctgctttcttccagaccatcatggagcagttcaaccctagcctccggaacttcatcgccatggggaagaattacgagaaggcactggcaggtggaactgcgcccgggccccgtggggtgggagct

SEQ ID NO: 218214 - DNA, 182 bp, Homo sapiens
  chr17:79042375-79042557
  hypo
cccgcagtcagcagccgcacagacggagccagcactggagcccgtctcaggtggctccgctcttgtgtcccctgtccccgcttccctgccctggggagggtgcccccaagcctggtactgcagagaaggccacctcggtggctccttggttgtgacatgaagtcctgcgggagggcctgggg

SEQ ID NO: 218215 - DNA, 236 bp, Homo sapiens
  chr17:79045480-79045716
  hypo
gcctctgtttgagggactcacgtccagctcccggcagactcagcgcgggggtcggatgccttctccgcaccatcccgcaccgccacgagctgctgtggctcacattctgccatccgagctctgtccaggaggcagccgagaattggagcagttcccacgccaagtagggccttgtgggtggccggtcccctcctccagcgtggcacggaggcgccggagcatgcaggtctatgcct

SEQ ID NO: 218216 - DNA, 694 bp, Homo sapiens
  chr17:79051339-79052033
  hypo
cctgggtgacagagactctgtctcaaaaaaaaaaaaaagtaaaaatggtgaattttatgttatgtgaatttttctcaattttaaaaaaagagcctaatgctgggaggacggatgcttgggcttcccgcccgtcctgaggctggtggtgctgagtatgcgggtggctgtgggagcgggtgccgtctcaggtgcgagccagacaccgtgggtgcgggtgcaggtgtgggtaccgttttgggtgggagccgggcgctgtgggtgcaggttccacctcggagctgggtgctgtgggcacaggtgcgggtgccatcttgggtgggagccaggcactgtgggtgccagtgccatcttagatctgggcactctgggtgcaggtgccatctcggagctggatgctgtgggtgcgggtgccgtattgggtgggagccggacgctgtgggtgcaggttccacctcggagctgggtgctgtgggcacaggtgcgggtgccatcttgggtgggagccaggcactgtgggtgccagtgccatcttagatctgggcactctgggtgccggtgcgggtgtcgtcttgggtgggagccgggcactgtgggtgcaggtgccatctcggagctggatgctgtgggtgcgggtgccgtattgggtgggagccggatgctgtgggtgcaggttccacctcggagctgggtgctg

SEQ ID NO: 218217 - DNA, 86 bp, Homo sapiens
  chr17:79060175-79060261
  hypo
ctgccagtggtccgcgctgcgttgggttcatgggccttggttttgtgttttattgtttgaatctcaggctgcgctgaagaaatacc

SEQ ID NO: 218218 - DNA, 237 bp, Homo sapiens
  chr17:79060660-79060897
  hypo
ctgttctccccatccctgcccgggagtccggtcccagtttgttcctctaagcggtcgtggcctccgcctgcagggctggccactcgagggaaggtggtacttcaggttcctcgagggagcggcttcggtgttgtttctctcaccgtcccgccggcgtcaccggtgctgcgtgctgagtgggctgggacgtaggaaggcctggccgatgacaggcacggcctgatgtgtgtacaccag

SEQ ID NO: 218219 - DNA, 363 bp, Homo sapiens
  chr17:79062265-79062628
  hypo
gtccatcactcagtccgttttagagcatttttcaatcagcagtcactcctgggcccctggccccaccagtcaccagcctgccattggcctccgtagacttgcctgttatggacattctgcgtagctggaatcccacagtgtccggcctttggtgcctggtggctcacgtggcacggagggttcttaaagctcatcgtgccgtagcctgcgccagcctcctcccctcttactgtcgggggtcagcctttcttccttttcatggctaaatcgtgttccatcgtgtgggtaccggaggctccatcctgctcagggccagggccgtctccctggcacggccggtactgccctgtggctgagctcgct

SEQ ID NO: 218220 - DNA, 226 bp, Homo sapiens
  chr17:79062658-79062884
  hypo
gggccggacaaaggcagaggctgggggctgtcggagccactccccctccctcctgcaggctggagccagaggcctgaggcccccacgcagtcactgtggccctgccgcaccagctccctggttttcaggtgccctgcctcccactgccaggcctcttcaggagggccctgaccgcacacctggcctctgcctgccctccgcgctgctctgccgtgggccccgggtg

SEQ ID NO: 218221 - DNA, 97 bp, Homo sapiens
  chr17:79065509-79065606
  hypo
gtggaagtgaccccacgcaagggtggcctgaagccagtgtccagccaggggcgtgagtagcagagaagcagatgcctccctgcggttcccaagctgc

SEQ ID NO: 218222 - DNA, 74 bp, Homo sapiens
  chr17:79072579-79072653
  hypo
agccagggccacagacgcaagggctgccgagcggctgaccgccgggtcagggtggggaccgcctgctggctgcc

SEQ ID NO: 218223 - DNA, 305 bp, Homo sapiens
  chr17:79072864-79073169
  hypo
ctacttctcattcctggttccgtgctggcccctcacctgggcacaccctgttccgaaaggcgtgacctgtggatctgatcttgctgtccccgtggacgctggtcttgctttctgggctcccagtctccgctcggtgacctcttgtctgatcctccccacgaacttccttctcacgttctcccttggtgcacgcttatccggaaaccaggcagccaggtgtcttagcgtcccgctccccgtcattcagagccggagccgggtgggagaggagatgaggtgcgcccggagtcccctctgcagcagag

SEQ ID NO: 218224 - DNA, 286 bp, Homo sapiens
  chr17:79074739-79075025
  hypo
acatgctgctgccctcgtgacctctgagagacccctctgcccgtcatctgttgagggcccctccttgggccggtagactcttggccctgtgtttcccgctaggcgtcccccggcacagtcctgcggccctgtgtctcccgctaggtgtcccccggcacagtcctgcggccctgtgtctcccgctaggcgtcccccagcacagtcctgcagccctgtgtttccggcatccccagccttgtcgttccttgtgggggaatcccgccctgggatccgccatgtcccagga

SEQ ID NO: 218225 - DNA, 280 bp, Homo sapiens
  chr17:79077361-79077641
  hypo
aagatcccggagcgcgcggtgcagctcatgcagcaggtggccagcaacggcgccaccctccccagcgccctgtcggcctccaagtccaacctggtcatttccgaccccattccgggggccaagcccctgccggtgccccccgagctggcaccgttcgtgggggtgagtctgtggcctctggaaagcttcacgggtgtgggtgggagggcagcttgttgtcagggcggggggccgccagggtgcagagtccaggggcccctgctgagggggcggagggttc

SEQ ID NO: 218226 - DNA, 220 bp, Homo sapiens
  chr17:79077821-79078041
  hypo
cgcagtctcagagcaagctcagcgactcctactccaacacactccccgtgcgcaagagcgtgaccccaaaaaacagctatgccaccagtaagggctccgctggggtgttgggctggggtccctggacgtgcctcctcagaccctacagtcatgccacaaccctcaataggggcctgggagaccctgaggctcacaattatgtgaccgtgtgtacctacat

SEQ ID NO: 218227 - DNA, 36 bp, Homo sapiens
  chr17:79078512-79078548
  hypo
gatgtgagtgtttctcgggggcgggctccaggcagc

SEQ ID NO: 218228 - DNA, 205 bp, Homo sapiens
  chr17:79079546-79079751
  hypo
aatcttggtgccatccgtggcttagcgtgacactggggctgcgaggcaggagcaactgctctgcccgggctctggggccttgcagttgggtctggtggggccggcagctcccaccaggttgaggacagcccgggccaccttgcccttgaggctgagcacacagtgggagcgggctgcggtctttgtctccctggagcactgtctc

SEQ ID NO: 218229 - DNA, 537 bp, Homo sapiens
  chr17:79082610-79083147
  hypo
ccccaatctgtgctccgcccttgtcctgggtcttcctggagggtcaggaggccaacgggagctgctgaaaggggcattgctcggtgctggcggactcgccgcctgtggctgggcagcgtcgtgcagccaggcagccgtcctgtgctttgtttcacagtggcagcggcacgctggtgtccacagtgtgaggacgctgaccccgggcagccgctgctctgaagagcttccgcgccttccccctggtctcgtccgttttcctcctcagctctcgctggtttgttcttgggttgtttttcttttccacctgccccatgccttttggttggtgaccccagactctgtgatcccccagggtccatggtgctgctccatccgccccccctcccctgtgtttacgcgccccatcctgtgtgtcccagccttttgagcagaaactgccaggcaggacctgctgggccgtgcggggcaccctcggcctcaccctgcagtgtctgtggcactcactgcttttctaaggctcgccgtgagccaggtcta

SEQ ID NO: 218230 - DNA, 123 bp, Homo sapiens
  chr17:79083370-79083493
  hypo
cagagaaagggggctcgtgccaagctcgaggggcctcctgaggaagccggccgctcctgtgagggaggccgggcccgggcacctgagggcttctccctctggacactgcgggccaggtgtaca

SEQ ID NO: 218231 - DNA, 49 bp, Homo sapiens
  chr17:79084399-79084448
  hypo
tctcggcactcagtcgcctgctagataacctgggcttgcacacggtgct

SEQ ID NO: 218232 - DNA, 250 bp, Homo sapiens
  chr17:79084478-79084728
  hypo
ggctctgcggggggccgtctgcagctgaggcaggctcctggctccctccaggcccgcaagtgaggcaggctccgcaggcgccgtccagggagagccagagccccagctgtgtgccgactccgagtgctccagggttctaggtctcctggcagctcgcccgtggtcccccctcctctgcacccccgagtcctcagaccccatgctgcctccaactgagccttgtgtttccttgcagcgccgatgtggaagt

SEQ ID NO: 218233 - DNA, 163 bp, Homo sapiens
  chr17:79086357-79086520
  hypo
aggcccaagcgcccacgctggacccgattccagaagggcccaccttctgaagacacgaagaaacagctgacgcgagaagacagaaaacaggtgctgtccgcccggctctgggtctggagtcacccaactggtcgaaatgcatttgtgacggctccgtttcttc

SEQ ID NO: 218234 - DNA, 175 bp, Homo sapiens
  chr17:79086875-79087050
  hypo
aattagaaaagccaccggtctcccctgcggccttgcttaggggcctctgaggggaggctctctgtgaggagacagagcccaggcctctgcattctgaggccagcgccctgcccgcccaacagctcccccacacatgacgcaggccctcctcagggtcctccgctcttggacacgt

SEQ ID NO: 218235 - DNA, 196 bp, Homo sapiens
  chr17:79097959-79098155
  hypo
gggagtggtgggggcggttggggaagcagcagaggtgaggcagggaggggcgcccaccccggggcggaccactcccctggcggctcggccctgccccttccgagtctacaccaggtgtgaatgaacgctccgggctaggcactcaggataggggcttccaggctgcggccgtgggagatcccagcaccaccgtcag

SEQ ID NO: 218236 - DNA, 255 bp, Homo sapiens
  chr17:79099929-79100184
  hypo
gtgtggggttggcgcggggctgcagggtgctggctgactgcctcggggacagagaacaggccagcttgacagtacgcatctcttcgtctaaacctgcaaagtgggtgtcaaaccattgtcttcccaatttttcaaaaacgtcataaaatccctctgcatagtggttgtctgatgctgcatgagatgaacctggccggtcctcgcaagccccctgaggcaggacccgccctatgcccttccttcaggggaggggcc

SEQ ID NO: 218237 - DNA, 93 bp, Homo sapiens
  chr17:79100259-79100352
  hypo
acgccacaggccacctcacaggccatgcgctgcagggtccgggggtcgggagccatggactccgccacccggcagctccgcaggtagcccttg

SEQ ID NO: 218238 - DNA, 356 bp, Homo sapiens
  chr17:79102634-79102990
  hypo
cagggcccggagctcgacccgtcacatgggctgcaccaggcaggcagtgtggctgagcaagaggctggggccacggcacagagagggcactggagcggcccacccccaccctgccgcaggctggcatcccacgccgggcgcaccaaaggctcctttgttgggggctgcttggcacggccccgcacggagcacactggcccattctccccgagggccaggccgggtgaggtcagcgggaggaagggtcagtgaggcccgggacgaaggggccagcgctggcagagcccactcatgcctgcccacgccccgagggattccccgaattctgctcccacgtcaactgcccagagggctga

SEQ ID NO: 218239 - DNA, 39 bp, Homo sapiens
  chr17:79104768-79104807
  hypo
gagctgagtcttccggtctccccagatcacacccaacgc

SEQ ID NO: 218240 - DNA, 197 bp, Homo sapiens
  chr17:79108114-79108311
  hypo
acaggccttgcctgcgggatcccacgacagctcccgcggcccccaggcctcaccttgaacccgataccgcccttcttacagcacaggcaggccagcatgaggacgatgacggcgaagagcccggagaaagacacagccaccacggcgagggaggatggccaggacagctcgctgagcggggcgccgtctgcgggaga

SEQ ID NO: 218241 - DNA, 312 bp, Homo sapiens
  chr17:79166571-79166883
  hypo
gccacctcactgtacagccgctgccgttgctgctgcagcgcccactgctcctgctccaggtgctgctggaacctgcgggacggtcaggactggctctcgggggccgggacgggcggtcccaggacccacccaccgcaggggcacgggccgaccacaggcctgactcacagctggagagcagccctccggggccctgcccctccccctcggcagtcaaggcccctcaaagccaccgcccgggggcaggcaaggccacgaggaacttgcccatcagccaagcgcagcaattccctgagctccaggccctcgtgg

SEQ ID NO: 218242 - DNA, 33 bp, Homo sapiens
  chr17:79183372-79183405
  hypo
gcgctcggagaagcggacgctaagcgaggatca

SEQ ID NO: 218243 - DNA, 70 bp, Homo sapiens
  chr17:79216891-79216961
  hypo
gtccctgggccagcgtgctgcgcaagtctgttcccgcgcagaagtacacaccggcgacgggacagcgcta

SEQ ID NO: 218244 - DNA, 41 bp, Homo sapiens
  chr17:79226334-79226375
  hypo
ctggacccctggagcctttccgcccgcgtgtctggatggag

SEQ ID NO: 218245 - DNA, 125 bp, Homo sapiens
  chr17:79230308-79230433
  hypo
cagtcacatcagacggcccccagacgaagtgacttttaaacacactcccggcatcccacggacggagtgcctcatccactcaagtgccgccccaagttcaggaggaggctcgggatcccagggcg

SEQ ID NO: 218246 - DNA, 177 bp, Homo sapiens
  chr17:79234793-79234970
  hypo
caccatgcatgggcacgggggacagaaatggccttcgcctctccttagctgtggtgtggtgcccactggggtcaccctgtgagctgacctccaggcactctttgccgaaggctctccctgtgtgacctagtcctccctccttcccccgctccccggccaatcgtaagcatcacacgt

SEQ ID NO: 218247 - DNA, 96 bp, Homo sapiens
  chr17:79294051-79294147
  hypo
cgcagtctgggtgcccggcgtgtggcagcccccgcagtctgggtgccccgcgtgtggcagcccccgcagtctgggagccccgcgtgtggcagcccc

SEQ ID NO: 218248 - DNA, 336 bp, Homo sapiens
  chr17:79296202-79296538
  hypo
gcctcgcttctgcccgtcgctctcaccacaaccctccccgccccggtgtctcactcatgcctcacacctggactctccagtggcgcacaccttagagggtctcacatgggaagccccatggtgggcccagccgggttcagcacgtgggcctcctgggagccgccccacacctgcgcttctcaggggcgcccgctgtgggtcctgctgtgggtctgcagaccacactttgagagcaggctccccgggtggtggccgacgcctgtcacctgtggccccgcttaacccacccttcaccggcactgagtccccccgcacagaccccgggatccaaccccc

SEQ ID NO: 218249 - DNA, 180 bp, Homo sapiens; identical to SEQ ID NO: 204843
  chr17:79319124-79319304
  hypo

SEQ ID NO: 218250 - DNA, 203 bp, Homo sapiens
  chr17:79609053-79609256
  hypo
ggagctgatggagcggctgctgaccctgcagagctgaagtccgcatggggggctgcagtgagagccacaaggctggcacccaaacatgcctgcctgagtcacacctgcgctgagcttaggggacccacagagccagggctggggagaaatatatctccacaagcagaggcctccttaagctctaaaatgtgattcttcacatg

SEQ ID NO: 218251 - DNA, 418 bp, Homo sapiens
  chr17:79612346-79612764
  hypo
ggggctggcactgggagggctggtggtcagcgcagtgagcctggctggctacctgggcgccctctgtgagaacacctgcctgttacgtggcttctctgggggcatccttgccttcctggtgcttgaggccgtggcgggggccctggtggtggccctctggggcccgctgcaagacagcctggagcacaccctgcgtgtggccatcgcccactaccaggacgacccagacctgcgcttcctcctcgaccaagtccagctcgggctgaggtgctgcggagctgcctcctaccaggactggcagcagaacctgtgagtcttggagtgggcgagggacagggccaccacagggtcgcagaggccacacacccttgtgcgtgtacacacagtcactcacacgtacatactcattcgtgcatgc

SEQ ID NO: 218252 - DNA, 40 bp, Homo sapiens
  chr17:79612812-79612852
  hypo
gcacgtctcgtgctcacaggtttcacgtgtgtggacacac

SEQ ID NO: 218253 - DNA, 38 bp, Homo sapiens
  chr17:79634636-79634674
  hypo
gtgagccaccaagcccggccagcccgtgtagattctat

SEQ ID NO: 218254 - DNA, 84 bp, Homo sapiens
  chr17:79634756-79634840
  hypo
agcaaagagaagaagaaagtgaactgcaagcccaagaaccaggacgaacaggagattcctttccggctccgggagattatgagg

SEQ ID NO: 218255 - DNA, 124 bp, Homo sapiens
  chr17:79635130-79635254
  hypo
tccatgctaaggagcggcgtttttttctccccaaaagtagcgaagattcatcagagtttttagcagggcacggccaattcatgtttactctaagcaaaaaaagggtcaccgagcgatgatggag

SEQ ID NO: 218256 - DNA, 342 bp, Homo sapiens
  chr17:79648940-79649282
  hypo
tggcagccacacacctgccccggacccccagctgcaccacctccctaccgagccatgcttccggctgtaacccgagggagcccccgcccccgctgtgctccctctcagctcagggacgcgtacattttattgaagagtatcagcaccgatgcttctgcaagttgttctgcagaaaggagacctaagagctgcacacaggatgcagagagctgggtggggtcagaggcgtccatcacaaactggggaaaaagaaaaagacagcagcaatgccccgctgccaaacttcctcccctgggcctcacagacctggcactgggagagcaaaactgcattttttaatta

SEQ ID NO: 218257 - DNA, 60 bp, Homo sapiens
  chr17:79653803-79653863
  hypo
cccaccggccactgacgggcctgtcgaagggctctgctgtcccaccgggttcccctccgg

SEQ ID NO: 218258 - DNA, 643 bp, Homo sapiens
  chr17:79655115-79655758
  hypo
aggctgaggtgcaagtgccccggagcctgcttgcagcagcctctgatcgcacgccgtcctgcacgtcacaccgggacggcgtccccgagagggccgtagacgcgaggccaggctgcgctctaaccgggggagaggatggctgcagggggtctggagcccgctctgaatttggaggcatttctggagcggctgccccccgcgtctccccggctgtgactggaaggaggggcgtggccagagccccgcagtacccctgtgttctcagccccaacaccacgctgccaccgtcaggcctgccgggtcctgcctgttggaggctgacgggaaccggggatcctggggtgggcaggtcccgtggggaaagggagagacagatggtcaggggcacagagacgcggcgttgtttggctccagcaagtagaggcaggcgtgaggtttgaactcagggtctgggaacaggttggtgcatggcccccacgccccactcggggggccctccctggcctctgtgtcagccccatctgctcagaggctgaggtctgccagctgcttcctcacaccgaggcctctggcgcctggagtgtcctgcgaccctcacccccttctccctgcctgcagagacaagtggaggtaaacgtccgta

SEQ ID NO: 218259 - DNA, 40 bp, Homo sapiens
  chr17:79658810-79658850
  hypo
cggctccagggaccgaggctgccccgacaaacctgttgct

SEQ ID NO: 218260 - DNA, 153 bp, Homo sapiens
  chr17:79682601-79682754
  hypo
tgttgctgggctccgtcagcggtgagctgccgggcgggagggggaggggcgcggggtggtcaggtcggccgaggacgccgtgtgtcagcacggctcatctctggggtttgtgtcaccgcaggtttagctggaggcttcgtggggacgcccgca

SEQ ID NO: 218261 - DNA, 102 bp, Homo sapiens
  chr17:79705356-79705458
  hypo
atgcctgctcttctacggcactgagtgtcgggtgatttgttacgggcagtagacagctaatacctgccccttaggacaccaagtcctcgcctcctggaggcc

SEQ ID NO: 218262 - DNA, 102 bp, Homo sapiens
  chr17:79803003-79803105
  hypo
ctgtgaccccactcacgtcatcatcccctgccccatcctggccaccgctctccaggaatttcttaaaaccatccagcgtgcgttccccgttgtaatcaatga

SEQ ID NO: 218263 - DNA, 177 bp, Homo sapiens
  chr17:79844241-79844418
  hypo
tctgtagtgacatctgtgaccgacagcgaaagaaccacccttagtcacactcccttgcccatgactcagccaggcccatcccagcgtggaagcaagcttagcctgggatgtgtgcccgcaggagccgctggtgcagggaaaggtttctgcagacacggcatgcattcctgtctgtct

SEQ ID NO: 218264 - DNA, 309 bp, Homo sapiens
  chr17:79846191-79846500
  hypo
tctgcctcttccacgggcgcctccgcgggtgcctctccgggtgcctccaccaccaccaaaacctccagcgccacggtttctagtcatgccacctctgtttacgctagcaaggaagacgaaaccgttcacacacccggaaggaccctaagagcgacgcagcctcaccctcggccaatccccttccccagaggccccggaagtcacctctgtgcaggcctccgctgtgcgtcaatctgtgacgtgacaagctgaatgttcatggggcggcctgcggcaaagaatacgagaaggcacgttctattgagaggc

SEQ ID NO: 218265 - DNA, 120 bp, Homo sapiens
  chr17:79851770-79851890
  hypo
tgctgctggggcttgctgttctcccgtagctcccctgcagccctgaccctctgggcccagagccctttacttgttatttgttttaatagaaacggggctcatagcagggcataggggttc

SEQ ID NO: 218266 - DNA, 31 bp, Homo sapiens
  chr17:79863961-79863992
  hypo
tggcccccactcacccggcaggccagcacgc

SEQ ID NO: 218267 - DNA, 216 bp, Homo sapiens
  chr17:79871391-79871607
  hypo
tggagcaggagcacgcgggcagaatccctctccccgcggggattgtgtgtgccacatcagccagggcaggagtggcacacgcagggtctccgccaaccaccgaggtcaggccctctggagaccaccacgcttcagtcatgcctcaggcaccactgcaaacacctcagagcttcctccacactcagctcacgagagaagacagacaaggcccagcac

SEQ ID NO: 218268 - DNA, 187 bp, Homo sapiens; identical to SEQ ID NO: 204844
  chr17:79885890-79886077
  hypo

SEQ ID NO: 218269 - DNA, 59 bp, Homo sapiens
  chr17:79887849-79887908
  hypo
ccaggctgcaccttctgtgggactgagccccgcaggcacttccccggcatcctcccgcc

SEQ ID NO: 218270 - DNA, 83 bp, Homo sapiens
  chr17:79892730-79892813
  hypo
ggagcagggacagatgtgcccggtggtcccgggaagtgcccgccgccgccagcttcccccgcagtccttacgtaggcggggcc

SEQ ID NO: 218271 - DNA, 396 bp, Homo sapiens
  chr17:79892890-79893286
  hypo
gctccatgagcctcccgtcctccacctgggcgtgcgtgcctgtggcatacacggtggccccctcccgcaccacgactggagtgttggtcatgcagcggatgaccctgggggctggccgaaacgctgacagcttctggaagagaaaccagcgtgtccgtctggccatggacgcagtgcctagatgcactcaccccaccaagcagtgcccgagctctcccagtgggccgggacgctgcaacccttttgcagatgaaaactgaagtactgagggcccgggctctagacagcccctctccacaccccactgggcctgcggtgctaccttctcaatggagctgatggtgacgccggccgcgcaggacaccacaatgtgtctgtcctcaatgtcggcgccta

SEQ ID NO: 218272 - DNA, 213 bp, Homo sapiens
  chr17:79899061-79899274
  hypo
tgtcatggaccagcgccccgaagatgatgcaggccacgaaggcctggacgatcttgaggagccccgacaccgtggccatatagctgctcacctggccgggccgggcccgcgtcagggccacctccacagcgtaggccaggaagaggagcccggcgaagacactggctgccaggcggaagtccctggcagcacagccggcgggctcgggggaac

SEQ ID NO: 218273 - DNA, 274 bp, Homo sapiens
  chr17:79913170-79913444
  hypo
ttttttttgttctggtttttcttcttttgttttctcaggacctctatttttaaataaggagggagctacccggcgtggggctcccggggcccacacactcacggcacgtccttgagtgtgtggcgcagctcgcggccgaggttctggatgtacagccgcaggccctcctgcaccggctgccccgtcaggtgcacgttgtccaccgtcagctgtgcctcgtcaaacagccactgcaccacgaacacagggcctgcgggcggcggggctcagttcg

SEQ ID NO: 218274 - DNA, 69 bp, Homo sapiens
  chr17:79914600-79914669
  hypo
gctccgggaccaccccgttccagtacctggagccacagccacaggttaggctgccgtgggtctcgtccc

SEQ ID NO: 218275 - DNA, 84 bp, Homo sapiens
  chr17:79942955-79943039
  hypo
acacctacacatctgcgcacatacccgcacacacctgcatgtaaacatgcacacacacgcacatctgcacgcacatgcgcacac

SEQ ID NO: 218276 - DNA, 77 bp, Homo sapiens
  chr17:79946358-79946435
  hypo
ggggcagctctttcgagacaccagggacagcaggaggtggtggggccgttggtggtaaagcccggagcccccagcct

SEQ ID NO: 218277 - DNA, 382 bp, Homo sapiens
  chr17:79951969-79952351
  hypo
tggggctggatgtgacggcatgtgcccgtctcccgggctgccatgcacatcaggcatgtgtgggaggcgtgctgcatatacctgcccacccatgcacgggtccagctgtgcctcctgcggggcgaggctcagaaagacactggtggcagagtccgacatggacttataagcacggcctccccggccacaggcaagcgggcgtgagcggagtgcagcgcccctccctccatgcttcggtgacatcaggcgtcggctttgaaggaggacatcaggcggtggagacaggggcacctcctcttagtgggcggcttaagatgaaagcccagacgtcggtaccctgactctcaggctcctgagtacaggtgtccgtgagccgcattcc

SEQ ID NO: 218278 - DNA, 41 bp, Homo sapiens
  chr17:79952381-79952422
  hypo
gtccctgggccctgccggcagctccacgtcctgccagcggc

SEQ ID NO: 218279 - DNA, 260 bp, Homo sapiens
  chr17:79977156-79977416
  hypo
acgctcacgcaccagctgcggaagcaccttctccagctggtccacgtccacacggagcgcgtcttctgcctgggcctgccgcacgccgcggactgctgcttctgcggtgagaaacgcgagaggtgggggatgctggggggatcttaaacccgagcccagtgagggcctcagcctgggccggtgccccccccaacacccacgggcagcccccagaaccaggccacagcacctgacaaacaggctcaggagacccaagttta

SEQ ID NO: 218280 - DNA, 70 bp, Homo sapiens
  chr17:79977446-79977516
  hypo
tggttttcccgctggaaaaacgcaaaattccggatgctgtgcccggagggagcgtgggccctgggctcac

SEQ ID NO: 218281 - DNA, 521 bp, Homo sapiens; identical to SEQ ID NO: 204846
  chr17:79989097-79989618
  hypo

SEQ ID NO: 218282 - DNA, 40 bp, Homo sapiens; identical to SEQ ID NO: 204847
  chr17:79989900-79989940
  hypo

SEQ ID NO: 218283 - DNA, 373 bp, Homo sapiens
  chr17:80005250-80005623
  hypo
acaaatgagacagaaaccagcgaactccacgcgcgttatgtgggtgcctcctctttgccctccacacacccacgcacaagtgcacacacccacgcacgcagacactgccacgcacacacccactgatgcacacagacgcacacacgggtggatactcacctacatgcacgtacacacccactctcaatgtgtccactgagcttcgtgtacacgcccacgcacacccaccctcatacacacccacgtgcacctggctccacacaacacacgggaggaggcaagcacgatgctcaggaaggcggcctctcagggcagcgtccagtgtccgtccctcccggcgggaccctcgcacgccacctctgctggagatttt

SEQ ID NO: 218284 - DNA, 267 bp, Homo sapiens
  chr17:80018605-80018872
  hypo
gtggaagggcaagtcgccggtgggcttcgctccctcctgcctggatatctcctcctgcaaaagcccaaggccctggtcatggccccagcccctcaccccctgcaaggccgggctcccaccagccccagcacctgcctgacaccgcagcttcagctcctggctcacagcagcgatgccctccagggtcttcaccttggccagctcctctcgcagctcctggtgcacctgcagcctgagacagaggccctgtcacgcaggctgggctcc

SEQ ID NO: 218285 - DNA, 336 bp, Homo sapiens
  chr17:80019100-80019436
  hypo
tgaagaggtgggcccggacgtaggacagggggcaggggtgctcccgcacgatgtccagatactcctcggccagctcccacacggcagggctccggccctcgaacagggcggggttgtgcaggttgccctctgtgggaggaggagcggggaaggacacctcgtgggttgctccaggtggacggcacaggaaagcctgggacactcaggacacccttctgtgccacctcacaagggacaaggccagctcaggcccatcagagcagactgggattgatgaacaccatctgtgaacagcaccatggggagggcagtaggcagtgggaggcaccgacctgg

SEQ ID NO: 218286 - DNA, 276 bp, Homo sapiens
  chr17:80019616-80019892
  hypo
tgtttccacccgcccggaacagcacccaggtgatgctgcccccagccacggccccctgggtggtcacgggcgtcaggcgtgccgagcaccctgaggtgtggagctgggacccccagcaaagccccaaggactgagggctgtgtcacccacacccactcaccgcacagccttgatatgctcccaggacgctgcacccgacaggggccccttctgctccttggtgcgtccgtgcaccgtcagcaactaggacagagcagtggtcgcttgacccctcca

SEQ ID NO: 218287 - DNA, 137 bp, Homo sapiens
  chr17:80030812-80030949
  hypo
gtttccttgagccctcggtgacatacatttccttgttccttgttgacgtatattttacagctacaagagttacaaaggccaccctacaaaactttttttgtacagtggtgcagtcatggttcaccgcagccttgacc

SEQ ID NO: 218288 - DNA, 64 bp, Homo sapiens
  chr17:80038872-80038936
  hypo
gcacgcaggtccccacggtgctacgtcaggtgggagtcggggtgggaacgctcagaatggcacc

SEQ ID NO: 218289 - DNA, 87 bp, Homo sapiens
  chr17:80040622-80040709
  hypo
gaagtggggagcagccgcagagccccatccagcaagccccccacaagatggagggggacagaccccaggcaccgtgacagcccacaa

SEQ ID NO: 218290 - DNA, 231 bp, Homo sapiens
  chr17:80042509-80042740
  hypo
ggagcagacccagcggatggaggacaggtccccccgggtgagggtgctcacaaaggcatgtgccgtcggctcctcaggcttgtctagggaaacagggaggtggggctgctgcggggccttcgggtgcagtctcccgggaggggcagggcagtgtcgggggctcaccctcctccagcaggaagtggcggaaagccccccaggccccgtcgcggtagacgttcatcaccaggt

SEQ ID NO: 218291 - DNA, 198 bp, Homo sapiens
  chr17:80045801-80045999
  hypo
cagctcccgtgccaccggccctgcttaccactcactaccaggttgccgttctctgacacctcgaaggcacgggaggcctccaggagccgtacctccagggacactgtccctgcagagcgggagagttggagatcagagggcagcacccgccccccagctacccccgccttggtcctggggtacccctcaccagtcttg

SEQ ID NO: 218292 - DNA, 317 bp, Homo sapiens
  chr17:80046359-80046676
  hypo
gagtggggagatgaggggagttcctcggggagctgggaactccacaggtgggaacaaggcattggggttggcgtcgatgctacggagaagggaggcatgggtagcacacccgtcaccggggtccaggggctctgggttcagcccacccactgcctgcggtggaccatccagggctgctgccaccggcctgggtcagtgaggggcccgcagccccgctcacccaccccacgccgtccccgactccgggagacgagacccgggctgggaagggacccaccctgagaggtgcagcctgccgatgccggccaggaagaact

SEQ ID NO: 218293 - DNA, 59 bp, Homo sapiens
  chr17:80047423-80047482
  hypo
cgtagaccgtggccgcgtgtccctgccagacttgcaatggcaggcgcaggggacagagg

SEQ ID NO: 218294 - DNA, 203 bp, Homo sapiens
  chr17:80051490-80051693
  hypo
aaggagagccggttggccatcatcgctcgctggcagcccaccatgctgtagcccacgagtgtctcggggtctcggctcagggcctccgaggtctcagagccgctcacgcccacccagacgccagtgtgtgttcctcggagtgaatctgggttgatgcctgccacaaacagtggtcaaggtgccacggccgggccccacagcgc

SEQ ID NO: 218295 - DNA, 114 bp, Homo sapiens
  chr17:80085172-80085286
  hypo
ccccaggagcagggccgtctaaagtgcaccaatgcccacgcgtctcacctgggctccattctaagtcagcctgcgcccgggtgtacagtgctccattctaagtcagcctgcgcc

SEQ ID NO: 218296 - DNA, 167 bp, Homo sapiens; identical to SEQ ID NO: 31053
  chr17:80085323-80085490
  hypo

SEQ ID NO: 218297 - DNA, 71 bp, Homo sapiens
  chr17:80139084-80139155
  hypo
gagaagccaacaccggctgggccaagagcaactcgtgggaacgaagcagccagcacggggctccacgtgcg

SEQ ID NO: 218298 - DNA, 160 bp, Homo sapiens
  chr17:80144203-80144363
  hypo
agcttaagactgcaacggggggccaaggttaggcgcacaggagtggtgacgcccagtcacctcggccgcactacatggaaaatggaagcacctgcggcccctctcaccccgtataccgaccacagaggtcgccccgcacaccgaccgcagaggctttagg

SEQ ID NO: 218299 - DNA, 256 bp, Homo sapiens
  chr17:80201685-80201941
  hypo
acaaacactacagtaaccacctctcggttcacagtcctctcccaagggaccagaaacgcatcttccaccttgaatcctgggactcccaattgtcctgctagggtctcaaagcctctgcttccaagctctcagctgcctgcccacctcctggggaagaagcgcgcagtgctttgcctggtaacacccactgcacccctgccccgcggcagcctgcggtccctaactgctctccgagggcctcaagagttcctgacag

SEQ ID NO: 218300 - DNA, 112 bp, Homo sapiens
  chr17:80201971-80202083
  hypo
tgagacgccaaaatcaggttgaagaggtcccaccacacacgggcacacacacacaccacggacttttgatgagaaatctcctctccaaagcggacaataaaacactgcaaaa

SEQ ID NO: 218301 - DNA, 88 bp, Homo sapiens
  chr17:80239662-80239750
  hypo
tgcatgtgtgcatgggtgtccatgtgcacgtgttcacgtgtgtgcatgcatgcatacatgtgtgtgcgtgtgtgtgttgggcaaacct

SEQ ID NO: 218302 - DNA, 62 bp, Homo sapiens
  chr17:80252004-80252066
  hypo
cactggaaatacctggttttgctgttggaggggggcttgcaggtgctcgttatattattacg

SEQ ID NO: 218303 - DNA, 98 bp, Homo sapiens
  chr17:80257491-80257589
  hypo
cgaggtccccgacacggtgaggggcacgcctgagtcccggcctctgcatctcctcaggcacctcccacttttctggtgggttgctattttccttttct

SEQ ID NO: 218304 - DNA, 48 bp, Homo sapiens
  chr17:80260760-80260808
  hypo
ggcggggcgtcctccgtctgggtgaccctctcccggcctgcattatgg

SEQ ID NO: 218305 - DNA, 188 bp, Homo sapiens
  chr17:80285255-80285443
  hypo
ggctgggggtccccgagctcttccccgacctgctctggatgctggagcccctgccctccttcccttccctgtgcctgtagagggtgtgcaatgctgacctcacgaaacaaagaagacacgcgggggcgggagacagagttgcccgcagcacagcggggaccccatctgccttgcgggtcagccctttt

SEQ ID NO: 218306 - DNA, 89 bp, Homo sapiens
  chr17:80303790-80303879
  hypo
agataactgttttcccgaaattaatataattcctaagataatttttcatgaaattggaaaaactggttctaaaattcatacgaaggccg

SEQ ID NO: 218307 - DNA, 227 bp, Homo sapiens
  chr17:80394873-80395100
  hypo
actgggacccgggccggccgcatacactctggagtctcctacactgagacccgggcctggctgtctcaggcggctcccatgttggctctgggtacagccccgggaggcgtgtccagggccgtgttggccgcctcccctggagccactcacctgtttgctttctcacccagtcctcctcatgcagaagtaccggcggtgcggctttccgcagctgtgggcagccagtg

SEQ ID NO: 218308 - DNA, 103 bp, Homo sapiens
  chr17:80395146-80395249
  hypo
gcaccacctcaggaaccacgtgcagtggctgcaggtggcgggcagcgggcccacggactcactgcagggcatcatcctgaccggctggcagaggtaagtcctg

SEQ ID NO: 218309 - DNA, 480 bp, Homo sapiens
  chr17:80445792-80446272
  hypo
atgcttaaatggcagaggccaagcccagactccagacggacatgcggataaggccctgctgcggcagatggaaggcatttacgctgacatccctgtgcggcgtccggagtccagtgcacacgtgcaggagctgtaccaggagtggctggaggggatcaactcccccaaggcccgagaggtgctgcataccacgtaccagagccaggagcgtggcacacacagcctggacatcaagtggtgaagtcaggccagggccttccagctgctcttggggccagagccaagagcctctcagtagagggaggggctgccctgagtggagtattaaagacacttaagaaaaccgctcaatggattactttggtttctccgagttccctgctaccccgtttattggaggcccctcaggcagtttcatgtggtgctatcttcataataggtgtgggattggaactttttttttctttttttttttttgag

SEQ ID NO: 218310 - DNA, 216 bp, Homo sapiens; identical to SEQ ID NO: 204848
  chr17:80503130-80503346
  hypo

SEQ ID NO: 218311 - DNA, 180 bp, Homo sapiens
  chr17:80519708-80519888
  hypo
atggcgtagcctccgacctccacaggctggaggtgcccctagggcagggtggtggacagagtcttcctctgttggggggggggggtgcccgcactgggcgcacagatgtgagccgggctgagtcccgcgccgggtgcgcggatgtgtgctgggctgagtgtggccggccacttgtttgcg

SEQ ID NO: 218312 - DNA, 120 bp, Homo sapiens
  chr17:80562718-80562838
  hypo
tacttggagattgtggctgccactatttcttctgcagactttctctccaacctgagaatgaagatcactgcaaagcatcttgagggacattttctcagaaaatgaaaaagcagctcttgg

SEQ ID NO: 218313 - DNA, 396 bp, Homo sapiens
  chr17:80563138-80563534
  hypo
tcttctgaagaggtacttgggtattcaagttcccacacaggaacactttgatcttcaggccctgaaaatctggtgtggatcgctaatgtctggaatcgtgatgacattatcagtactcaccccagggtagcagagggaagaaaccgtgctgaaaatgacacagaggcctttgggagctaaatgatgttcacggacagagagttcataacggagtgtttgttttattccttacactgatcccctaatttaaaacagttcatactggcataaaagaactgtttatcacgccctgcgagactgcctcttccagcaaagtgaagcagtcatttgtaatttgtttctgccaggtctgcgtctgcagtgcacccgggctgcgttgatgggtgctgggaaatt

SEQ ID NO: 218314 - DNA, 263 bp, Homo sapiens
  chr17:80571117-80571380
  hypo
agaaggctgcagatggccagcgcccccgactacagtggtgggagcgggaggtggccaggggttcacacaggcatcaacgccaaacacagggtgggtatgggtcagggctgcgttccacagggcacaagccgcctgtccccgcaagacatcccagggccacaggggagggaggacagaccagaaacgcagccggagtcatccatgcccacgcacctgtacgatcagacaggaaagctgctgagtaggcaccgtctgaggcagtc

SEQ ID NO: 218315 - DNA, 138 bp, Homo sapiens
  chr17:80571776-80571914
  hypo
acccagagtcagatctcaagtgttagacaagccagggtgacgccggctcacttgaagctgccacttcaacatgcagggacattgctgctgccagccaccctccacctccacaggccagcaggagcctcagacctccca

SEQ ID NO: 218316 - DNA, 120 bp, Homo sapiens
  chr17:80593584-80593704
  hypo
cactgtgcgcagccgtcttttcaagttctaaaagcaacaagtcattcccttagcaagatgtgattctagctaatggttaagtaaagaaatgttggctgggtgcaggggctgacacctata

SEQ ID NO: 218317 - DNA, 139 bp, Homo sapiens
  chr17:80604378-80604517
  hypo
aaaaaaaaaacccaaaacaaaaaaacagctagaaacaaaaataagtacaaaaataaagtacagaagtaggcaaaactaatctatgatgtcacaagtcaggtagggagcatttattggaatcaagcgtggccaggtatat

SEQ ID NO: 218318 - DNA, 111 bp, Homo sapiens
  chr17:80614273-80614384
  hypo
ctggaggtctttgcggtcagccctgctctgaggcagtcggggtcaggggctacatcttcatgcggaattcctgacagcccctcggagctcctcaccgaggctcaggagcac

SEQ ID NO: 218319 - DNA, 80 bp, Homo sapiens
  chr17:80645605-80645685
  hypo
cagccctcctgactggctgccgatcatgcagggcaggtgccttcaagactttacgcccccagccaggcgcggtggctcat

SEQ ID NO: 218320 - DNA, 94 bp, Homo sapiens
  chr17:80654632-80654726
  hypo
gtcctccaggcgctcaatctccagccctgtcctccaggcgctcaatctccagggcagcgctggccctcggactttgccacagcgacatccgaac

SEQ ID NO: 218321 - DNA, 943 bp, Homo sapiens; identical to SEQ ID NO: 204849
  chr17:80655727-80656670
  hypo

SEQ ID NO: 218322 - DNA, 334 bp, Homo sapiens; identical to SEQ ID NO: 204850
  chr17:80656713-80657047
  hypo

SEQ ID NO: 218323 - DNA, 74 bp, Homo sapiens
  chr17:80678256-80678330
  hypo
ccacgggtgctcccgcctagaggaggacgttcagccggtgtgggctcagagcgggggccgtgcagcagccgtgg

SEQ ID NO: 218324 - DNA, 35 bp, Homo sapiens; identical to SEQ ID NO: 204852
  chr17:80693282-80693317
  hypo

SEQ ID NO: 218325 - DNA, 88 bp, Homo sapiens; identical to SEQ ID NO: 204853
  chr17:80693554-80693642
  hypo

SEQ ID NO: 218326 - DNA, 218 bp, Homo sapiens
  chr17:80720832-80721050
  hypo
atgtatgaagacttgcagcccagcgtatggtctgttttgttgaacattccgcgtgcacttgagaaaaatgtctgttctgttgttgggtagattgttctctaaatgtcacgtaagtaaggtgggtgatagtgctgtttaggtttcagcgattttctcttacttgttctatcagttcctgaaacaggagtgtcgaagttttcaaccgtgtctcctttcat

SEQ ID NO: 218327 - DNA, 72 bp, Homo sapiens
  chr17:80747254-80747326
  hypo
cgtgtgctcacaggcagcccgtcgcggggtcatgtgctagacggggagggggcttggcgggtcaccagcctc

SEQ ID NO: 218328 - DNA, 76 bp, Homo sapiens
  chr17:80747740-80747816
  hypo
ctggcctgtttacccgggagcccagcaacaaatgggagcttctgtgctgctgtccgtgcatacggcccaggagccg

SEQ ID NO: 218329 - DNA, 109 bp, Homo sapiens
  chr17:80747890-80747999
  hypo
tctccttcctggttcattgctcatctgttctcatgtggctgcgccgccaccctgtcctgggggtccttgtcccagcacgtggctctgtgcttcacgtcatcctgagtct

SEQ ID NO: 218330 - DNA, 127 bp, Homo sapiens
  chr17:80767312-80767439
  hypo
cctgcagcgtccgcgttacagtggtacatggtgacctaccctgtgccgcgtgtgctcactcgtcccctttgaatctggctgcaggctcctttaccctgcagcgtgttttagcgcgggggctccaagc

SEQ ID NO: 218331 - DNA, 80 bp, Homo sapiens
  chr17:80772792-80772872
  hypo
cgtctcgactcgtggatggtgagtagctgaggcacggtcaggggggatgtctggcgctggcggagctgggcaggagaggc

SEQ ID NO: 218332 - DNA, 151 bp, Homo sapiens
  chr17:80772941-80773092
  hypo
cgtggcaggctgcagcccttcgtctgaacccatctccgcggtgtggccctgccgcgggcacgcccagaagagcttgagaacaaggtctgtctacctttttctcgcattggcctttgtaatttcctaattgcctcttttgtctgctgtggaa

SEQ ID NO: 218333 - DNA, 316 bp, Homo sapiens
  chr17:80773152-80773468
  hypo
tctgattttcttactccccaaaaccggttttcattcttgagggacattgtcgccccttaaggacacatgcagtggcacctgcttcagttgtagaaccaggtacccctggcagcatcctgggtcacctggagtgacgtggtgctccctggagatgaggctcacgccagcgtgaaaccagggtgggaactggggtggagggccaggggagctctgcagtggccagcagtggggtggggacagagggcacagcatggcagatgcaggggcactgccccagaccagctcttgtgccgtggccacacgcagccctgtctgt

SEQ ID NO: 218334 - DNA, 52 bp, Homo sapiens
  chr17:80797612-80797664
  hypo
ctcattagaagttttgtaatcgtggtctgcatcccagccatgcacctgctgg

SEQ ID NO: 218335 - DNA, 217 bp, Homo sapiens
  chr17:80819087-80819304
  hypo
acccacccagtcctgccaggcgttgggcttgggatgtgcggccggctgggggcacacattcatgccgcaggtccccgtgagtctgggccgtgtgcctggcgagccctgaattccacctcacgtcagccgctggttcacgtcagccgctggttcacgtcagctgctggttcacgtcagctgctggtgttgagtgttcgcatgatgcttttctttcttg

SEQ ID NO: 218336 - DNA, 78 bp, Homo sapiens
  chr17:80830876-80830954
  hypo
cttctgagccaggcccgtctgggcagcagctcccaggccctggcccggggctcagcgctgcctcgtggctgagaagct

SEQ ID NO: 218337 - DNA, 84 bp, Homo sapiens
  chr17:80832119-80832203
  hypo
tgaaggactgtaggacgcactgtgggctgcaggcttgaagaaggatgtgagtttctggagtagcctggactgcacagccagggc

SEQ ID NO: 218338 - DNA, 87 bp, Homo sapiens
  chr17:80832796-80832883
  hypo
cagtgggtgcttgggatcagagcatcagagtggaattttcgcagggaaatggaaatgcctgatcgagctgggcggtggcagcagccg

SEQ ID NO: 218339 - DNA, 328 bp, Homo sapiens
  chr17:80839229-80839557
  hypo
cattcggtcaggccgcttgccgccgatgaggggtgcagagcttctgcagcatcctggggaggtcccggaacgtgggtctgggctgtgctgatgctggagcagccagcggggagagctgccaggccactcctgacagccccgcacccgctctggatggaagcttctcgctcccagccgatacgggcctgctgcctgctgctggggctggaggggcccctctgcttgagccttggggtaccccgtgcctacgtgccctcctggctttgcccatggttggtggccgtgttttgggctgcgttgatgtcgttgtggagcccgctctgggcct

SEQ ID NO: 218340 - DNA, 139 bp, Homo sapiens
  chr17:80847894-80848033
  hypo
gcctcatcccacacagagcaggagctggctctgttgacgtcagcttgtgcctcatccagaccatagacgggcccagaagtcagctcccagaagctacggaccccatgaccccacgaccccacatcatgctggggctgct

SEQ ID NO: 218341 - DNA, 349 bp, Homo sapiens
  chr17:80879334-80879683
  hypo
tgtttttgattgcctgggtacgctaacttgattttttgacagatggttggcaatggctgataaatgacactttgagacatctccatctcatctcaagtcactcccgccagcagatgaaggtacagtgagcatgggcgttcccggccggcgctgtggcggtgttagtgtgttagtcacggatggtgtttgtgttggcgactgtgcatcatgaggctgtccctgcagtagcctgataactgacaaatgggggcataattctatttggaatcccggatggtagcgtctacacggtttataaccagaaaatccaatacagccattggaatccgaatgtttaattttttattgc

SEQ ID NO: 218342 - DNA, 152 bp, Homo sapiens
  chr17:80882754-80882906
  hypo
gtgtggctgtacacgatgggcagcagagggcctctcttcacactcgttgcttcctttcagaggagctgatcacgcagtacctggctgagcttcggaaccccgaggagatgactcgctgtggcttctcgttggccttgggcgcccttccaggc

SEQ ID NO: 218343 - DNA, 54 bp, Homo sapiens
  chr17:80894204-80894258
  hypo
tcgcgtgtttccacgtctgcttgtagcgctttccgcttcgccgttccctgcggc

SEQ ID NO: 218344 - DNA, 126 bp, Homo sapiens
  chr17:80895933-80896059
  hypo
gatggtgcagttccccggcgacgtgaggaggcaggccctcctgcagctgtgtctgctcctctgccaccgtttcccgctggtgagtgcctgcccctgctcacgtgtgtttgccgtgtggacacaagc

SEQ ID NO: 218345 - DNA, 114 bp, Homo sapiens
  chr17:80917377-80917491
  hypo
cctgcagacggctgcggggacttccccaccaggtgacgcagcctcgccgggttttggcatcttgtccttagcagcccgggtgtgttgggtgtctcggggcggggggacgagcct

SEQ ID NO: 218346 - DNA, 272 bp, Homo sapiens
  chr17:80918442-80918714
  hypo
ccagacccgggcccacgtggccgctcctcacagtgacacgggagagggaggcggaccccgcagcactgggcgcgtcctcactgggtgctgcgattccctggccgtgcctctgccaccctccacggcagctgcgccccccaggcctgtggtccccgccggaccccactcatgagactcccgtcgggttaaagggagcacagggtttcagaaggacccggcgcgtggtcattttacctctgggaactagggaaggacgttcggccttcaccctg

SEQ ID NO: 218347 - DNA, 201 bp, Homo sapiens
  chr17:80935245-80935446
  hypo
gagtgactgaggtcgggtctggggttgcttcgaaagactccgggtgctcagtgttgggaggggggtgagtaccgttatgtgacagtggtctctaccccttggtgtacttaacattttcaacaaaaaaaaacttttctttgtttaaaagcactcatgggtatctggaacgcagctacagtggggagcgagcaacgccccaat

SEQ ID NO: 218348 - DNA, 164 bp, Homo sapiens
  chr17:80964419-80964583
  hypo
atgtcccagggcacgagcacccgaggcgccccttacagccactggcagcccctcaacggcagccgctgtgctatcccgacgccgtggctgtgctatcccgacgccgtggctgtgctctccagagcatgatccgggaacgtgcaggaggcggccttctgtgcccg

SEQ ID NO: 218349 - DNA, 195 bp, Homo sapiens
  chr17:80965439-80965634
  hypo
gaggcagctgtgggcgacaggtgagtacacgccagcccactcctgagagcctggatcccgctggggcatgagaggcgcctctcggacgggggctgattgacgcctgcttccactgcgcatgcccgacccctccccatgactcccccagcttcatgcttccctggaaaggtaaagccacaccgggtctctcaccaa

SEQ ID NO: 218350 - DNA, 181 bp, Homo sapiens
  chr17:80965953-80966134
  hypo
gaggaggcgcagggaagaggtgcgctatgcgcttaatcctgcaccgagacgtcagattctcagggcaggagcttttgtgggcaccgcacctagcacagggcctggacccagtgagcagatgtgaatgagaggcctgtgcgctggcctgagaggctggctaactttctccaggttcctagaa

SEQ ID NO: 218351 - DNA, 127 bp, Homo sapiens
  chr17:81021377-81021504
  hypo
gagcgccatggctgcgtagctttgctgtgcaccgtgcagggcggcggccagcacagcttggtgcccaggaactgctgacggaccgaaggaggagcgcctgagacagtgccagcgaataggcccctgc

SEQ ID NO: 218352 - DNA, 392 bp, Homo sapiens; identical to SEQ ID NO: 204855
  chr17:81038995-81039387
  hypo

SEQ ID NO: 218353 - DNA, 215 bp, Homo sapiens
  chr17:81042811-81043026
  hypo
agcgggctgacgcacgaggcacacaggaaggaggtggagcaggtgtatctgcgctgtgcggcgggtgccgtggagtggatgtacccaacaggtgctctcatcgttaacctgcggcccaacaccttctcgcctgcccggcacctgaccgtgtgcatcaggtccttcacggactcctcgggggccaatatttatttggaaaaaactggagaactgag

SEQ ID NO: 218354 - DNA, 71 bp, Homo sapiens
  chr17:81043193-81043264
  hypo
tgtctggtgagtgtcctgcctggggcgggggcggcgggcctcgtcatcacggggctggtgatgtggcaggt

SEQ ID NO: 218355 - DNA, 55 bp, Homo sapiens
  chr17:81049939-81049994
  hypo
tcaggggcttcagagggggttctgtgagcagggcttggcttgaaagccatttggg

SEQ ID NO: 218356 - DNA, 113 bp, Homo sapiens
  chr17:81068540-81068653
  hypo
acagccccgtccagcgctgacctgtgggaaaacggcctcttggcaggtcagtccaggcggtggtttccctggagccaggggctgggttccagagcccggccttccacccctac

SEQ ID NO: 218357 - DNA, 176 bp, Homo sapiens
  chr17:81068791-81068967
  hypo
tttgagagatttattgactttctttttcttttgaaagggctgtggccaggcagaatattgaagcgaaggagcccgacagtagccgctctctcagggtctaaggcaacagagagctcccaggtgtgtatagagcggggcgggagtcgggtctgcaggacggccggtggggaaaggcc

SEQ ID NO: 218358 - DNA, 141 bp, Homo sapiens
  chr17:81080731-81080872
  hypo
gtgggccgcagagccgtgggctcggaagaagcacagcccaccatgccgtggatctccacgcgtggctcctctccacgcctgtgggttgctccaaagctgcagcgtcacgcgcagatgccaggtagccgtgatggaggctcg

SEQ ID NO: 218359 - DNA, 92 bp, Homo sapiens
  chr18:196512-196604
  hypo
gactccatctcaaaaaaaaaaaaaattaagtaagtttttgtttgtattaattaaaattaatttacagtcgcgtgtattaaatatgtgactgt

SEQ ID NO: 218360 - DNA, 250 bp, Homo sapiens
  chr18:196807-197057
  hypo
cttaggtttcctacatttaccgtacttactggaacatagttcgaaatataaacatcagtcttctctagttcatgccacggctgtctcttgcctggagccgcacagtagtcttaactgatatctggcttctgcctttgcccctttgcagtttctctacacagcccgcaatgtcctttttaaaatgacgataggattatgttggccccttgttcagtactccctagtgattttctaccgcagtcctaaatcc

SEQ ID NO: 218361 - DNA, 757 bp, Homo sapiens
  chr18:580159-580916
  hypo
gctgttcttgccagctcaggcgtcaactcgtggaaaccggttaatgacccgaggggacagcggattctcgcctaagcaagatcccgcagatgggagggcgtaggaagaggttccccgggccggctccaggccccagcgggcgtgggcgttggcagtgagcgaggggtggtcccgcgccgcgccggcggggggcgcccgaatgagagcgcggggcggtgccgttgggaccacggcggccagagcggcaggatggcttccggcttcaagaagcccagcgctgcctccaccggccaaaagagaaaggtggcacctaagcccgagctcactgaggatcagaagcaagaagttcgggaagcatttgacctcttcgacgtggacggaagtgggaccatcgacgcgaaggagctgaaggtggccatgagagcgctgggcttcgaacccaggaaggaagagatgaagaaaatgatctccgaggtggacagggaaggcacggggaagatcagcttcaatgacttcctggccgtgatgacgcagaagatgtccgagaaggacaccaaagaagaaatcctgaaggccttcaggctctttgatgacgatgagaccgggaagatctcgttcaaaaacctgaagcgtgtggccaacgagctgggggagaacctcacggatgaggagctgcaggagatgatcgacgaagctgatcgggatggggacggcgaagtgaacgaggaggagttccttcggatcatgaagaagacca

SEQ ID NO: 218362 - DNA, 97 bp, Homo sapiens
  chr18:635705-635802
  hypo
gtgagcaagttgcaacaaatcgcgccgttcagagaaaagggaggatggaattgttacaaccgtttctgtcgcccaggctggagtgcagtggcgcgat

SEQ ID NO: 218363 - DNA, 37 bp, Homo sapiens
  chr18:698119-698156
  hypo
gaaatatcacacaagtagaacacgtgttaatccatat

SEQ ID NO: 218364 - DNA, 215 bp, Homo sapiens; identical to SEQ ID NO: 204856
  chr18:712223-712438
  hypo

SEQ ID NO: 218365 - DNA, 1313 bp, Homo sapiens; identical to SEQ ID NO: 204857
  chr18:811503-812816
  hypo

SEQ ID NO: 218366 - DNA, 205 bp, Homo sapiens; identical to SEQ ID NO: 204858
  chr18:812869-813074
  hypo

SEQ ID NO: 218367 - DNA, 145 bp, Homo sapiens; identical to SEQ ID NO: 204859
  chr18:2571378-2571523
  hypo

SEQ ID NO: 218368 - DNA, 366 bp, Homo sapiens; identical to SEQ ID NO: 204860
  chr18:2906430-2906796
  hypo

SEQ ID NO: 218369 - DNA, 136 bp, Homo sapiens; identical to SEQ ID NO: 204861
  chr18:2907034-2907170
  hypo

SEQ ID NO: 218370 - DNA, 127 bp, Homo sapiens
  chr18:2910112-2910239
  hypo
ttatgagggctgtgccggcacagcccgccatgccctggccacctctgatagccaccattgcacccctctctcaggctccgacagtcatcctgacaacctgggccaggacaagcgggaggctccctca

SEQ ID NO: 218371 - DNA, 165 bp, Homo sapiens
  chr18:3011266-3011431
  hypo
agcttctcttaagcataatgcgtgcctattgactctcgactgtgccatcaaacgttaaaacagaacctgtcgtttcatttctagctttctatggctacctctatcaaaagttgggcatggagataccttaagtctggctggggcggttgctcacgcctgtaatcc

SEQ ID NO: 218372 - DNA, 206 bp, Homo sapiens
  chr18:3061467-3061673
  hypo
ttctcttctttctctgcacagtcttcactttcatgaagccaaatgcctccttgcaattcagctcctggttttgagtgtgtaaggaagacacacgcttctcgtgaaattctggagaatgtctccggactgcgtgggaagcttatgaaccagaggtgcctgtactgacagaagcctgtgagcaaagagggttccgagaactggttagc

SEQ ID NO: 218373 - DNA, 135 bp, Homo sapiens
  chr18:3119810-3119945
  hypo
ggttctcttggaggaaattccgaggtgcggtgtggaggcaggtgtctgtggtttacctgggacggcgatggtccactcttcacatttgaagcattcgcttactgcggagggcgcgcccagcccagccatgttcat

SEQ ID NO: 218374 - DNA, 188 bp, Homo sapiens
  chr18:3214253-3214441
  hypo
ctaggcagaaacattctgagcgcaaggaaacccgctgtgaatactgaaatgatcttttctcgccctgctgctgctaaagtaacctgtggcaaaatttgcctgctcttagaaatagcaaattggcaacacaagcaagactcgcccgtgagaacaccaggctcttagtgaagctaaaagagacaataaag

SEQ ID NO: 218375 - DNA, 218 bp, Homo sapiens
  chr18:3214824-3215042
  hypo
aaaaaaccaaaaccgaaccgaaacaaagcgagaagtaactgggagggttactcagagcacacgcctcttcctgaggttggaaggttggaggagggcgtccgacatacccatgggaggagccataatcgtaggctgaggctgccttccgactgacttcagagctcagggcgtgctgcgaggcctgctgctgggaggaggaggcggacgcccgacggaag

SEQ ID NO: 218376 - DNA, 168 bp, Homo sapiens
  chr18:3215256-3215424
  hypo
aaaacaacactttttgagtgacttattaaggaacaaattccatagaccaagtcatctaaatcaatgtgtaaaaatcaatactcttggctgggtgcggtggttcatgcttgaaatcccaacgaggatctctcgaggccgggagctcaaaatcaacctggccaacacagt

SEQ ID NO: 218377 - DNA, 329 bp, Homo sapiens
  chr18:3360375-3360704
  hypo
caaagcttgccttgtctcaccgacccctgctgtggaagagccctgcgtccttcagcagcaaagtagggccacgcccctcgggcccggcctctggcctccgtcacgctcccttctcactgccgctccaggcctcccggacccaggtcaccttcgcttggattataagaaccaatgccccttttaggcttccggggcaggctgacttccattgctctttatccccggaaatgaccgcacatcagccttcccagctctaagctgggaaagaaaatccttaagtgatttccccagtagaggctcttagccgggactgccgatctacagctggc

SEQ ID NO: 218378 - DNA, 86 bp, Homo sapiens
  chr18:3443525-3443611
  hypo
tacaggtgtataccacgaagcccagccaatataatatgaaaataataataatgagaactttttttttgagatgtaatttcgttctg

SEQ ID NO: 218379 - DNA, 120 bp, Homo sapiens
  chr18:3443851-3443971
  hypo
tttaagtagtaaataaaataaaagaaggaaagtatttgcatactgcctggcatgctgtatacaataaatgattgtattctttcttttttttttttttttgagacggagtctagctctttc

SEQ ID NO: 218380 - DNA, 94 bp, Homo sapiens
  chr18:3445349-3445443
  hypo
gggcagttaccaggtcggccatgtctcacttagtatattctctcttgcttgaattttcagaactttttttgtagttaaaaaatgagaagaaggc

SEQ ID NO: 218381 - DNA, 631 bp, Homo sapiens; identical to SEQ ID NO: 204865
  chr18:3447898-3448529
  hypo

SEQ ID NO: 218382 - DNA, 2120 bp, Homo sapiens; identical to SEQ ID NO: 204866
  chr18:3449165-3451285
  hypo

SEQ ID NO: 218383 - DNA, 919 bp, Homo sapiens; identical to SEQ ID NO: 204867
  chr18:3451345-3452264
  hypo

SEQ ID NO: 218384 - DNA, 42 bp, Homo sapiens
  chr18:3534580-3534622
  hypo
gtcacactgttggatcgagtgaacctgcggaagcttgggaga

SEQ ID NO: 218385 - DNA, 38 bp, Homo sapiens
  chr18:3535411-3535449
  hypo
atagggaaaaagggccgggcgtggtggctcacgcccgt

SEQ ID NO: 218386 - DNA, 262 bp, Homo sapiens
  chr18:3581880-3582142
  hypo
cgatagacaggcatcgatttttcttaaagtggtccttcttcctgtcctccgtggtgacggtggctatggtagtcgtggtggtgacggtggcagtgttattgcccatgtgttgactggcagggccatggatctgggcgtttgcagcttcgatggcggctgtcagagccttcatactgtccaggctctcggtggagttgctgagtccagactggctgataatatctcctcgctggccctgtccgtccatgtaggcatcctgggc

SEQ ID NO: 218387 - DNA, 36 bp, Homo sapiens
  chr18:3600255-3600291
  hypo
tgtttttttatgagacggagtttctctcttgtcacc

SEQ ID NO: 218388 - DNA, 35 bp, Homo sapiens
  chr18:3600531-3600566
  hypo
ccagaaacattctttttattcgtttttattataat

SEQ ID NO: 218389 - DNA, 154 bp, Homo sapiens
  chr18:3637284-3637438
  hypo
taatataaaatgatacgtgcaaatccctagaaaagtctccatctgaggctctcctcttgtttgccttctagaaacacgtttagtttatttggtaaaggagacacacttcgctcctggtagcactttcctatatctacgattttgctcttttaaa

SEQ ID NO: 218390 - DNA, 79 bp, Homo sapiens
  chr18:3669445-3669524
  hypo
ccctagtaaggaaagagacacaagcggctggacgtgttgggaaacacatcggcagaagaagacacgagtggttatgtgt

SEQ ID NO: 218391 - DNA, 263 bp, Homo sapiens
  chr18:3729121-3729384
  hypo
cccgcgcactcacccgtgctgctctggatggtcctaacggtggtggtggtgcgcggcggcgaggacgacctcagggacacgcactcgtcgtcctgggagcagcctttctcaatggcccgcacatagctgtggctccgcatgcggaagcagccgggcatgggcaggtccagcgcttccacggcctgcgactccagctcgctgaacacggactcgcacacggactcgaactgcccgttcacttccatctcgctcacctgcgggca

SEQ ID NO: 218392 - DNA, 1036 bp, Homo sapiens; identical to SEQ ID NO: 204869
  chr18:3879110-3880146
  hypo

SEQ ID NO: 218393 - DNA, 76 bp, Homo sapiens
  chr18:4009176-4009252
  hypo
acaggtgtgagccactgcacctggccgccaccgagtctctttagactccacttgcgctccatgctcctcttgactt

SEQ ID NO: 218394 - DNA, 180 bp, Homo sapiens; identical to SEQ ID NO: 204874
  chr18:6414233-6414413
  hypo

SEQ ID NO: 218395 - DNA, 383 bp, Homo sapiens
  chr18:6929367-6929750
  hypo
ggagagccctgtagagtccccgcccagcgtgcccacccagggtttccacccagtgtccccgcccaggtcctcaaccaggtccccgcccagcgtccccgcccagcctcccggggtctacaccaggccacctgcgctcgctggttgacagcacagccccttccggctagcttgacggcctccgcccgatccaccctgcgtgaatacaattatttccctctgccttccactcggagagagcggccaggatgccaactggcttcactggaaacaccccggccccccagccctcctggggcatctctaggtgacaccccacaaggcctgaggcctctacgccttctctcccatccgcagtgaccctgcctcgcacctgccacgtgggt

SEQ ID NO: 218396 - DNA, 159 bp, Homo sapiens
  chr18:6929787-6929946
  hypo
ctcgggctggacttactgcttccaaaagcgctgggcacagccttatatgactgaccccgcccccgagtcccaggccgccccatgcaaccgcccaaccgcccaaccgccactccaaaggtcaccaaccactgctccaggccacgggctgcctctccccac

SEQ ID NO: 218397 - DNA, 69 bp, Homo sapiens
  chr18:6953009-6953078
  hypo
tgtccagtggatccacgccatgggagccatgtctgcctgtgtccggcggatccacgccatgggagccat

SEQ ID NO: 218398 - DNA, 134 bp, Homo sapiens; identical to SEQ ID NO: 204879
  chr18:7116637-7116771
  hypo

SEQ ID NO: 218399 - DNA, 80 bp, Homo sapiens
  chr18:7351750-7351830
  hypo
gagtgctgaggtttgaacggacatgttcttccaacattcttaggttggaacttaaacccgaaggtgatggtgttaagagg

SEQ ID NO: 218400 - DNA, 184 bp, Homo sapiens; identical to SEQ ID NO: 204881
  chr18:7566825-7567009
  hypo

SEQ ID NO: 218401 - DNA, 415 bp, Homo sapiens; identical to SEQ ID NO: 204882
  chr18:7567335-7567750
  hypo

SEQ ID NO: 218402 - DNA, 325 bp, Homo sapiens
  chr18:8348210-8348535
  hypo
cacagacttgctgccgattcattaaggcagagctggggacctgcttccccccattttgccctgaagcgctctgcattaggcggccctaattgctggtgttggagccgccaggagacctttcctgtcgcagcacctggtgcagaagacatagatgctgcacttccctccagcggggtccccggtacatctgacaggacctgtcattatctaagacttccttgtcaccaccatgcctccccttttagcccacgtgttctgggaagagacccttgtcagttttcctggcacctgccaccggctgcacacctggcattgaaatggcgct

SEQ ID NO: 218403 - DNA, 167 bp, Homo sapiens
  chr18:8612037-8612204
  hypo
tccactcatcagatcgtttgttgagcacctactgtgtgttgggtgttatgctacccagtggggattcagtggtaaacaggacatcgactctgtccagaagtggatcggagcttctgggagctgcgtgaccgcttgtcagggcagtgacagatgtgtatgggtatttg

SEQ ID NO: 218404 - DNA, 51 bp, Homo sapiens
  chr18:8612504-8612555
  hypo
gtcagggctgctcgcgacagccgtctgggaaagaccgtgagcctcacagca

SEQ ID NO: 218405 - DNA, 442 bp, Homo sapiens
  chr18:8625542-8625984
  hypo
tttctcaaatcacaattggaatgagagactcaaccagctgtgttataactgcactcagcactaagagctttctgttagctattaacctgttaacagcccgcaggtgctagcgacctgtctgtggaagaagggataagatctggtctggtggtctggcggtggcttaaaagtagccccattgaggtgctctgagaatgccgttttgttttgaatgctacagctgcggtgtactcagcttactaactcctcttggcaggtcaccctcagctctgattgtttgtccaccatgtgtgtgtttgctttcatctgcgttaattgctgcttcatctgtggcatcatcggtcacctaatgcttgaatgttagtgccatgtcttcattcttcatccgtgtccctgtctgggccgcagctgcagccaagccgcagtgcctgccttctggagg

SEQ ID NO: 218406 - DNA, 570 bp, Homo sapiens
  chr18:8659297-8659867
  hypo
cgcgcagaacgcccgtgcctgggaagaggcctgcactccagcagacttccatgttcgctggaagcctcccttcctgactgtgaattgggacaatgcgcagacttccatgttcgttggaagcctcccttcctgactgtgaattgggacgatgcgcgggattttctgaaacctcagttcctccgtctgtaagatgagattgtggggaggagggcggacctgtaagtgcccagccacgagggctgagagattcgaactcctttgctgccgcgaagaagggcctgttccccggaggccaggtgggctccaggccaagctcgcagaggggccaggtgtgctctggcggtgagagggccgcgcgtcccggcacacaccccgcccatttcagcaccctctccaccctcctcagatgaccagagaaatccaagcaggcccttggctttcaagattcagcttcagccatgcataagtccttcactgaagtggcagaggaaggacgagcggctttgttggattggggctggagccccgtgcccggctgtgggtgctcgtgggagagcctcgcccggccct

SEQ ID NO: 218407 - DNA, 63 bp, Homo sapiens
  chr18:8662986-8663049
  hypo
taacttgtccctggcgtcctcactcgctgtctggcctggcaagcccgcggtgagctcccatct

SEQ ID NO: 218408 - DNA, 145 bp, Homo sapiens
  chr18:8733060-8733205
  hypo
agaccgttgccagttgttttcgcatcacacgtggctcatctctcctggcaggggggaggaaggtgagagctgaggacgcagtgcctgggagccagggcgcagggcagccctcgggactgtcagaccacctcgggggctgaggtga

SEQ ID NO: 218409 - DNA, 43 bp, Homo sapiens; identical to SEQ ID NO: 204885
  chr18:8748272-8748315
  hypo

SEQ ID NO: 218410 - DNA, 198 bp, Homo sapiens
  chr18:8783992-8784190
  hypo
atcgaagaccacaaccggcaactgacccacgagctcagcaagtttaagtttgagcctccccgggagccgggctggctaggagagggtgcaagtcctggtgccgggggtggggcccccctgcaggaggagctgaagtcagccaggctgcagatcagcgagctcagcggcaaggtgctcaaactgcagcacgagaaccac

SEQ ID NO: 218411 - DNA, 564 bp, Homo sapiens
  chr18:8799966-8800530
  hypo
gtgtgatagaagcacgtggcggggtggggtccagacactcagacccaggtctgccaagtgggccagtgttcacagtagtgagtaaggagctcactaacgcatgcacaaccctctgtctgtccaaggacggaagatggacgagctctactgtaacgacagctggttctctgggagggaacattcccggttagaggatttgcctctctgtgactggcatgagtattagccaggcagctgggatgcaagagccagggtacgtgtctcacagagctgcacagagccgggccgttcccgaaacgccgagcacctcgcaaggcgattagtagcatgggaaacctagccaagccgttttcccaaggacaagttctcagtcacagtattcctcaggccttggtctttgctttgtgacatatggaacgttctcacaattgaactcaagtagatggcaacatttatcacgtccacagaggtttaaaaaaaactgcatataccgatcaaccttgggatggctcataacaaatcatcaggttggcaaacatttggctccgcagacattccctgttt

SEQ ID NO: 218412 - DNA, 149 bp, Homo sapiens
  chr18:8800560-8800709
  hypo
atgacctgggcgctttagagccacagtgaatgctttcagtttccccagccatcctgaagagcagaggctgcgcacacgcaagagggaatcttacagttttccttgagctccaagactcacgccactgcgttaagcatttgaggccagca

SEQ ID NO: 218413 - DNA, 177 bp, Homo sapiens
  chr18:8829963-8830140
  hypo
tcagcaccagccaggcggaacgggatacggtggtgtcagataaacctatgacagcagcttcaccaacacacaacacacacagaacagatacacaatacacaacacacacactacttctataacaaggggagcgcagacacaaaacacacagatttcccaaaccgtgtgtcccagtca

SEQ ID NO: 218414 - DNA, 31 bp, Homo sapiens
  chr18:9101197-9101228
  hypo
tttattttttatttttgagacggagtctcgc

SEQ ID NO: 218415 - DNA, 31 bp, Homo sapiens
  chr18:9101468-9101499
  hypo
acaggcgtgagccacgcgcccggccaggtgt

SEQ ID NO: 218416 - DNA, 93 bp, Homo sapiens
  chr18:9285997-9286090
  hypo
tgtttcatttctcttcggtacataccatggagtacaaacactaggtcatagagtaggtgcatgtttcactttattagaaactgacagttatcg

SEQ ID NO: 218417 - DNA, 240 bp, Homo sapiens
  chr18:9417537-9417777
  hypo
tgttcagcaattctgaagacaaaattcagacagcagagctgctgccttctctggcagatggaggagtgtccgtgaaggagggcccttcgcaccccatggagctcctgatgtccgtgcctttatcagagactctcctcctcctctctttgattgctcttttttttttttccttttttcccttttttaagagacagagtctcgctctgtcgcccaagcagctggactgccctggcctgatct

SEQ ID NO: 218418 - DNA, 360 bp, Homo sapiens
  chr18:9478474-9478834
  hypo
caaaaggacagcagaccgcgcttcagaacggaaccgccttctccatgtaaacttttgacgtaaactgtgtgcttcagggtggcctcttcttctccgagatcctctcctgcgtcccgagtttgggaatggcccggccgtgctcaggcccaggcggtggaggcctcggtgtagtagtgccgtgcttgtcgacgttcccaggagtccgggttcagaagccccctctccggtggattggcagcttcgcggtagctgggctagtcttcctctggaaactcagtaaaaagagtcggcgctgtccgcctgagcgcgggtttcctaccgagctagaggccagcctgcctcaggcgcagaagggtttgc

SEQ ID NO: 218419 - DNA, 78 bp, Homo sapiens; identical to SEQ ID NO: 31213
  chr18:9535962-9536040
  hypo

SEQ ID NO: 218420 - DNA, 79 bp, Homo sapiens
  chr18:9547707-9547786
  hypo
tcccaggtcacatgcgtggcgaatgcccactgaacctcggctctcatggaagcaggaaagacaccgagattcaagcctt

SEQ ID NO: 218421 - DNA, 161 bp, Homo sapiens
  chr18:9547816-9547977
  hypo
atcttcggagattttggtactggcagggtggatgcttgcaaaatacttgacatcgctgtcacggtccatctgaagagccatgatggtctgctccacagcctcctggtggcagctggcagaggccaagaaatagtctggaaatgacatgtgcataggacaga

SEQ ID NO: 218422 - DNA, 173 bp, Homo sapiens
  chr18:9615460-9615633
  hypo
atgattcgctttgtcttctaaatacttttggcagcacttgaggtgttaaagtctgtatcccagactttattagtcttgttgttttacgtgacttaagcgattagctcaaacgcccaagtacaaaatggggctaaacccaggttttccgacacgattctacctccatggctcta

SEQ ID NO: 218423 - DNA, 159 bp, Homo sapiens
  chr18:9688382-9688541
  hypo
aagcagctttcatgcgcatgcgccatcgctcatgcgggatgtgggtgtggtcatcacagaccttcccacctctatgaaatggggaaatggaagcgacactgagctctcctggattgacttggatatatcaattctttctctcctcggtgtgcactcttt

SEQ ID NO: 218424 - DNA, 162 bp, Homo sapiens
  chr18:9797400-9797562
  hypo
tgctgtgttccatgtactgttctgagtgcctgtgtgtactgatgcattcagccctcctcgcaaaagcactttgaggttgaaactgtcgttattcccatttgcaggtgaggtcactgagacagagacattaagtaacttgcacaatgtcgcagagctaataag

SEQ ID NO: 218425 - DNA, 191 bp, Homo sapiens
  chr18:10474225-10474416
  hypo
atctttcaaatgatctcaggtaacgggaggaaggtgtgaatgtcatgaattaaaacggcccacagataatccagaaacctggggttagccaggagcatccccgcaacccgccgttccctcggggcctttgtgaaggtctgctgaataggaaaagcctgcccactttctagcagagacaccaaagagcctca

SEQ ID NO: 218426 - DNA, 243 bp, Homo sapiens
  chr18:10474462-10474705
  hypo
gaggcaggtgcggctggggaacttgctgggcgggcgtgggccgggctgtgggctccgaacccgaccttggactagtcctttgcacccactcaggttctggttccttttcctcaccttcatgcgcctgcacgggctctgatctcttctgctctttttagtactgggggaaaaattaaccatcatcacgtttattttcttacctgcctctctaccccgttgcactcctgggtgtggctccgcaga

SEQ ID NO: 218427 - DNA, 265 bp, Homo sapiens
  chr18:10485483-10485748
  hypo
gtcggatcatctatcggtcagacgagcaccaccctcccatcctgcccccaaaggcagacctgaccatcggcctgcacggggagtgggtgagccagcgctgtgaggtgcgccccgaagtcctcttcctcacccgccacttcatcttccatgacaacaacaacacctgggagggccactactaccactactcagacccggtgtgcaagcaccccaccttctccatctacgcccggggccgctacagccgcggcgtcctctcgtccag

SEQ ID NO: 218428 - DNA, 87 bp, Homo sapiens
  chr18:11877623-11877710
  hypo
agggcgatgttcccggtagtactccaagtgcacttaacacgtgtggacaagatcttagtccaggtagcagtagggctgatcctcggc

SEQ ID NO: 218429 - DNA, 42 bp, Homo sapiens
  chr18:11877747-11877789
  hypo
gcctttcaccacccttttcccggcacacccctgtgggatgac

SEQ ID NO: 218430 - DNA, 220 bp, Homo sapiens
  chr18:11992149-11992369
  hypo
gtctgaccaagtatctgcgctccacgtagctcagtcaagttgacacataaaattaaccatcacaacacattcacttgtgttgcagtaaatctggaagcataaacatggggcgtgtcgtcaggtgcacacctccagtggccacatcttcctgacctgacagagggaaagacacatctcctattgaaactgcactctggcaaggctccggcgtgctgctctg

SEQ ID NO: 218431 - DNA, 194 bp, Homo sapiens
  chr18:11992751-11992945
  hypo
taagactgagggaaaatagccgtggtaaaggggttcagcgggaccttacctggcaaccccatgtgctccctcgccctgtggacgtgatcctggctaaagggcagggctgtttgagtctcgcttactgattttagaaatacagcacttttcctcactttttctcttagcataggacaattcgtgaattaaacttt

SEQ ID NO: 218432 - DNA, 213 bp, Homo sapiens
  chr18:12093611-12093824
  hypo
gctcgcgagagtgcgcagctcccgcgaagggcctcgcgggcaggctgaggtgcgcatgtgccctggtgcctaagggttctggccggggaggcggggggcggtgggaggtggggggagggcgggtgcgccaccacgtggcgcccgcgaatggagggcgcgaggctcagggctgtttctccgcggatggcctcgtgggccggctgaggtgcacat

SEQ ID NO: 218433 - DNA, 163 bp, Homo sapiens; identical to SEQ ID NO: 204894
  chr18:12253892-12254055
  hypo

SEQ ID NO: 218434 - DNA, 696 bp, Homo sapiens
  chr18:12279587-12280283
  hypo
gctgcggccaccgccgccctgtctcctgtgcccatgattcacggagtggcccgggacagagcagcctcttcgcagaaccctcagggaggctccaggcctcagggaggaggcagcaaaggttggttttgctattgtcaaagtcttcagtgggcccttggccaggagactggtggaattgaaacccactcccttaggggaagggtcccagcaggcgtggctgtcttgtctctggttcggattaggtgacaggcactccaaatgtgacactttctcgttctcatcttagtttctctatcatctgcatttagcccgctagctcagaccaggatgtgccccatgcaggtgagggtgggtggggagagccaaggcactccagcgggctcagggcctggaccctgtgaggcctggatgccgcctccacctaagccttcagctgaacccccagggtggcgtgtgtgtcccttcaggggctgagtgttcgtctgtgtgtctttgatggggccaagcagaagagctcgaattggaaattattcacttctagaatcacaattcagaaaaaaagaaatggttcccatgagcccaggtttcatgctcctgcagtcactacatggacctggacgtcactcctatgacctctttttcaggcgcacaaacacaggtagctgccatgagcatcccacgcgcatgcgtcctggt

SEQ ID NO: 218435 - DNA, 688 bp, Homo sapiens; identical to SEQ ID NO: 204895
  chr18:12308209-12308897
  hypo

SEQ ID NO: 218436 - DNA, 129 bp, Homo sapiens; identical to SEQ ID NO: 204896
  chr18:12308927-12309056
  hypo

SEQ ID NO: 218437 - DNA, 210 bp, Homo sapiens
  chr18:12375057-12375267
  hypo
aaaaaaaaaaaaagaaaagaaaagaaaagggatcagagcttggtaaaacagggaaatggatacaggaaaccgaaaaaggacctaccacacggcagcgtggcgtgaccatggcgaagaaattgatttaagactggcaagggagcctcaaggagtaaaaatcatgaatgcaggcactattattccccctccccacccccgctcttttttttt

SEQ ID NO: 218438 - DNA, 60 bp, Homo sapiens
  chr18:12375294-12375354
  hypo
tggagtacagcaatgcaatcaaaactcactggagcctcaacctcccgcgccaagcaaccc

SEQ ID NO: 218439 - DNA, 120 bp, Homo sapiens
  chr18:12375777-12375897
  hypo
tcgtgatccacccgcctgctgggattacagccgtgagctaccgcgcctggcctctccagaaactttttaaaaatcaaccacggtgctgtagtcccagatactccggaggctgaggcggga

SEQ ID NO: 218440 - DNA, 313 bp, Homo sapiens; identical to SEQ ID NO: 204897
  chr18:12407708-12408021
  hypo

SEQ ID NO: 218441 - DNA, 206 bp, Homo sapiens; identical to SEQ ID NO: 204898
  chr18:12408117-12408323
  hypo

SEQ ID NO: 218442 - DNA, 42 bp, Homo sapiens; identical to SEQ ID NO: 11652
  chr18:12408339-12408381
  hypo

SEQ ID NO: 218443 - DNA, 98 bp, Homo sapiens
  chr18:12431471-12431569
  hypo
ccgcccgcccgcccacgctgtcctccacttaggctcctccacaaacgctggcgggtgtgccgccctccagcctctccgcccccgtcccctcggtcctg

SEQ ID NO: 218444 - DNA, 317 bp, Homo sapiens
  chr18:12432919-12433236
  hypo
aggccgccctgccccgccggccagaagcggactcggtgcagacatgcagctctctccgtggaatgtgcatgtgcacggaggtgagtgtggtctgataaggccgcaggcagctcgtttgggaaaactgcgcagggctcggcctcagtggccaagcagtgtttgtggggcaccggaagcggcgccgcacccgtgctggccggcccgccactgggaagaaacgccccctcgggcggcctactgctcccatcgaagcccacaggccgtggccctgagggcacccagtgctgctcgtgcgcagggtccgggactttcgccag

SEQ ID NO: 218445 - DNA, 35 bp, Homo sapiens
  chr18:12849993-12850028
  hypo
cttgtttgattgatcgtgctcgatcttgacagagt

SEQ ID NO: 218446 - DNA, 37 bp, Homo sapiens
  chr18:12949141-12949178
  hypo
aggcgtgagccaccgcgcccggcctacaagcagaatt

SEQ ID NO: 218447 - DNA, 193 bp, Homo sapiens
  chr18:13033466-13033659
  hypo
tccattcttggcaccgcgtctacctataatgacattgcagcatctagcaaagttacgcatgtactatcctgtaaccgagcagttctgcttctgggaatttattcttcagatacacttgcataaatgatacatggtgtatgtgcaggctcattacttgcagcattgtctgtgataacaacgttagaagcaatgt

SEQ ID NO: 218448 - DNA, 344 bp, Homo sapiens
  chr18:13131736-13132080
  hypo
acctaggaatgcgacggtgcctaattgatacatacaaatcaatagtcttcctatacataaggaaataatgaacgaccagaaaacagcggaagacaaaacagcagaaataagtttagaaatgtgtgaagtgtatacaaaggaaactgtcaggttcctctggagcacatcggagacttgagtaggagtaacttaccggactgcactgggggccttcttccgtagcatgaacagcacccatgagtggggatggggctggggccgcaccagtccaggcagcatttcccccagtggagggggagctctgcaggtgcccagcctcccacgctgtttcagtagcttgttag

SEQ ID NO: 218449 - DNA, 124 bp, Homo sapiens
  chr18:13135194-13135318
  hypo
agggctgccagcaccctgtcatctctcaggttttagctcagggctgctgtccagcacccgctcttgcttggatactttcggtggtgtggctgctggttactgtattgcacgacaaatgtttttc

SEQ ID NO: 218450 - DNA, 221 bp, Homo sapiens
  chr18:13212918-13213139
  hypo
agttcagtgcaaaccgagcgagtacctcttcccatgcttgttggctacttaagtatcttcttccgtaagggaccttttcaaggaattcgcccttttcttatggagcacgttccggtaaggaaagccacattgctatgttctctacaaacgacccctcaccagcgggacagggagatgcagaggcacacaatcctgcctccgtcagtgtttgatgaaaaagc

SEQ ID NO: 218451 - DNA, 360 bp, Homo sapiens; identical to SEQ ID NO: 204903
  chr18:13217280-13217640
  hypo

SEQ ID NO: 218452 - DNA, 420 bp, Homo sapiens; identical to SEQ ID NO: 204904
  chr18:13217700-13218120
  hypo

SEQ ID NO: 218453 - DNA, 102 bp, Homo sapiens
  chr18:13233040-13233142
  hypo
tgatcaatgaggactctagacgatggcagaggatctgcttgtcgccacacacagtgcgttagggatggagcttgccaccagtggcgccacctctttgcaggc

SEQ ID NO: 218454 - DNA, 79 bp, Homo sapiens
  chr18:13233182-13233261
  hypo
tctgcttggacacgggtcactggccgctaagaaggcaaatgccatgccgttcagatacgttctctgctactggatgatg

SEQ ID NO: 218455 - DNA, 236 bp, Homo sapiens
  chr18:13292802-13293038
  hypo
tgatacaagtttttcattggcgatcccgttactgaattgcctcaataattccagggcacaaaggccactggagagagatctaggagttttccaaccccggggatgcccggaaatgagacgatgacggaggccatgcggattccacgagttcagcgaggtcttggagagaatgccctggaggcaggcgagctttggttctggggctcgagcaccacgtcccaggaatgctgtgaacc

SEQ ID NO: 218456 - DNA, 55 bp, Homo sapiens
  chr18:13425935-13425990
  hypo
agagggaggctgagattccccgagggcaggacggtggaccacagtgaccctgtgg

SEQ ID NO: 218457 - DNA, 364 bp, Homo sapiens
  chr18:13442501-13442865
  hypo
gcccgcgtggggcacggctgagaaagtgggttgggcctagagagacagaagccaatgtataaggctgcacctcctgccctggtcctaggacgggccacctgctggccggccggctgcggggagcctgaggctggcatcccacttggtggacctgccacctcattgttcctgcccagccaagcacgtcctgtggtgctgtgtttccaaagccccttggccacatcttagtgggggacagcagcgttccttcgaccgtccagaagcgataattgagtggtctgtgcagcctggcaagtgccacgccctccgaaagccttggtgagcacagacccccgaagccagcgctgctgagggattctcacca

SEQ ID NO: 218458 - DNA, 240 bp, Homo sapiens
  chr18:13491221-13491461
  hypo
cacctgcagggtagctgggacgatgaaagcatcccaagacctcccttttccatctgtggctgatcacctctggaacccacagctagccggctgctcctccactatcagatggcggctgtcagtcatgggcttgtcaccgagtgcatccgtcatgctcgggccatgggccggcacctgtgtgtgtgtgtccagcttaacgacagagatttttggaaagacgccctaagatagacatacttg

SEQ ID NO: 218459 - DNA, 120 bp, Homo sapiens
  chr18:13498452-13498572
  hypo
ctggagaatccttttccacacacacgtcccgccgtggacactggagaatccttcttgacacacgtgtcccactgtggacactggagaatccttctcgccacacacgtcccactgtggaca

SEQ ID NO: 218460 - DNA, 84 bp, Homo sapiens
  chr18:13498973-13499057
  hypo
ggagaatccatctccacacacgtcccgccgtggacactggagaatccttcttgccacacacgtcctgccgtggacaccggagaa

SEQ ID NO: 218461 - DNA, 240 bp, Homo sapiens
  chr18:13499117-13499357
  hypo
ccgccgtggactctggagaatccttctactcacacacacgtcgcgccgtggacactggagaatccttctactcacacacatcccgctgtggatactggagaatccttctcgccacacacttcccaccgtggacactggagaatccttctcgccacacacgtcctttcgtggacactggagaatccttctactcacacacgtcccgccatggatactggagaatccttgccacacacgtcc

SEQ ID NO: 218462 - DNA, 83 bp, Homo sapiens
  chr18:13499657-13499740
  hypo
ccttctcgccgcacacgtcctgccatggacaccggagaatccatctccacacatgtcccgccgtggacactggagaatccttt

SEQ ID NO: 218463 - DNA, 202 bp, Homo sapiens
  chr18:13525325-13525527
  hypo
cacagtgagcatcatccccacgccctgagtccattctgcaaatctcacatttaaacacgctaaagtcaacctctgcctttcagaccacagagctgcttccagatcctggccatcctggacacctggagaactaccagtcgggatctgcaggaaaacgtgggcattcccataaacgtcattcgttttgcagaaatctgaccaa

SEQ ID NO: 218464 - DNA, 269 bp, Homo sapiens
  chr18:13532099-13532368
  hypo
ggagcagggctggggacagccgatgcagcctcagagctgcagaggcagctgccgggctgttaaagtcacccggagggatgcaccccgccgtgcatgcggtggacggctcctgcaattgccttcagagggtaagagcgattgggaggggcagcgaagcagccgacttctggagtatgtattattcctccctctgagaaatacgtgactatacattcaagattgcggctgaaacttcggtggtagtattcggcctggatgacctgtggcat

SEQ ID NO: 218465 - DNA, 120 bp, Homo sapiens
  chr18:19064405-19064525
  hypo
cttattacattttttaaagctgccttatttcctttatgagttggagagcacttaaataaaaatgtcaacacataataaataacaaaagtgggccaggcgcagtagcttacgcctgtaatc

SEQ ID NO: 218466 - DNA, 32 bp, Homo sapiens
  chr18:19253263-19253295
  hypo
tattttttgagatggagtttcgctcttgttgc

SEQ ID NO: 218467 - DNA, 460 bp, Homo sapiens; identical to SEQ ID NO: 204912
  chr18:19750806-19751266
  hypo

SEQ ID NO: 218468 - DNA, 34 bp, Homo sapiens
  chr18:19778302-19778336
  hypo
gattaaaggcacgagccaccgtgcccagcctgct

SEQ ID NO: 218469 - DNA, 210 bp, Homo sapiens; identical to SEQ ID NO: 204913
  chr18:20512628-20512838
  hypo

SEQ ID NO: 218470 - DNA, 1246 bp, Homo sapiens; identical to SEQ ID NO: 11673
  chr18:20512902-20514148
  hypo

SEQ ID NO: 218471 - DNA, 180 bp, Homo sapiens
  chr18:20696270-20696450
  hypo
acgggtgtgagccaccgtgcccggccgctacgtttaactcttaacctctaagattcattgcccctgggagtagttgctcttcaaggataacacatggctcagggactgcctgtcacaccccaacctgagaatcagcagagactaccacggggcccatcaggccactaggcaggtgccact

SEQ ID NO: 218472 - DNA, 211 bp, Homo sapiens; identical to SEQ ID NO: 204915
  chr18:20715426-20715637
  hypo

SEQ ID NO: 218473 - DNA, 201 bp, Homo sapiens; identical to SEQ ID NO: 204916
  chr18:20716371-20716572
  hypo

SEQ ID NO: 218474 - DNA, 41 bp, Homo sapiens; identical to SEQ ID NO: 204917
  chr18:20716690-20716731
  hypo

SEQ ID NO: 218475 - DNA, 219 bp, Homo sapiens
  chr18:20790547-20790766
  hypo
aggttctaaacataacggttgatcacatgggacctgttatcagaaccatactgttcaaggtttcccagtgtaagaagccaagaagacgggagccatcacttgctgctacttgcctgctgtggttcacgcctgcagtccctcccagatgccagaactacttcaggaaacacgtatgatgtgttcttggaagctccattggcaaaccgtctgcagagcctc

SEQ ID NO: 218476 - DNA, 260 bp, Homo sapiens
  chr18:20800425-20800685
  hypo
gtgggggcaggcagtgtggccgcagatctgccctgttgtgtttgctgctgtggagccggttcagcccgggaagctggaatgcacacttgagaaccaagtgtgtttcccttcatgatcgcgcctttggggctgggtgtgctggctcgggaccagtacaggcaggcagcactggctgactggtatgcattttggtgaagatggagctcggaggtcacagctctcataggtgtgccacacacgggctgccctctggggacacc

SEQ ID NO: 218477 - DNA, 193 bp, Homo sapiens
  chr18:20846712-20846905
  hypo
ctctccagtgatgacaaggtcgcctggccaactcacctggacagctgccctcaaacgtggcccttggagccccctcagcggcacccgccctgcagagcagcttgttggattctctcactctcctcccccagagaggctccctcgccgaagctcagggagtgactcctggttcgctgatgaggggctggtgggc

SEQ ID NO: 218478 - DNA, 42 bp, Homo sapiens
  chr18:20910923-20910965
  hypo
gcctgggcaactagcgagaccccatctctacaaaaaaattga

SEQ ID NO: 218479 - DNA, 319 bp, Homo sapiens
  chr18:20911025-20911344
  hypo
cagcaggagcgttcagcgagaggcagagccccggaacagcggtgttcactcagttaaacctcatggtctgagagagtggcaggtgtgccgttttccataattagtcacagcccctgaaggaaaagcgcgcccgtgtggggcaggaccaaaggaagaaacgcttctgcaatgctaccgggaagtctgagctcaccttctttaccttggcaccgagctgaagatctgttagaaaccctctccaaccaggactttcaggagaaacggtggccaccgcccagaataacaaggccccagcagcaaggtgtccttttcccagcaa

SEQ ID NO: 218480 - DNA, 48 bp, Homo sapiens
  chr18:21164538-21164586
  hypo
taatgtgaagcctggctgggcgaggtggctcacacctgtaatccccaa

SEQ ID NO: 218481 - DNA, 575 bp, Homo sapiens; identical to SEQ ID NO: 204919
  chr18:21242241-21242816
  hypo

SEQ ID NO: 218482 - DNA, 116 bp, Homo sapiens
  chr18:21849311-21849427
  hypo
tttcccttccattccggtcttaacgatttgctaaaatttaccctcttctgttgcttctgggtatgttgcaccttctgtaagaatttatttagtcacctgacgccggtataagtcag

SEQ ID NO: 218483 - DNA, 147 bp, Homo sapiens; identical to SEQ ID NO: 204928
  chr18:22653839-22653986
  hypo

SEQ ID NO: 218484 - DNA, 44 bp, Homo sapiens
  chr18:22658458-22658502
  hypo
gagccaattacacgcgaggcagaattatgcgtgggtgctgctgt

SEQ ID NO: 218485 - DNA, 260 bp, Homo sapiens
  chr18:22756673-22756933
  hypo
ctccgagggatcgcagcgtagtgcaacagattacaccagcttgcccaagtcggccgccccggtgttgctttccttacagaataaatgacaaagatgaaactgctcccggaaaattctagacactcacacatgctcaccagcacacgtgcgcgtgcacgcacacactcataagcacacgctccctggctggctccaacattcggcgctggcgtggaacctggtgtttactcccaatactcgctgtgacctgagcacttacc

SEQ ID NO: 218486 - DNA, 154 bp, Homo sapiens
  chr18:23652341-23652495
  hypo
tcctactcataatatcgttatctctaacacaagaaaacagaaaggaggataataccatgcaaacaccaaagaaagcttatttagctatgctaatatcagataaagtagactttaaaagcattactaaagataagaagggataattcacaatgat

SEQ ID NO: 218487 - DNA, 130 bp, Homo sapiens
  chr18:23988507-23988637
  hypo
catcaggccctgagtgtagacgcaatgtgcggtaattggtacattcagcgttgatcctcgtgttccttgggtgccgtgaggagctttcccataacctctcctatttcgcggcttgtctttggccctaacc

SEQ ID NO: 218488 - DNA, 181 bp, Homo sapiens; identical to SEQ ID NO: 204932
  chr18:25757006-25757187
  hypo

SEQ ID NO: 218489 - DNA, 150 bp, Homo sapiens
  chr18:28934936-28935086
  hypo
aatccaaccaacttccggcatgataggtagtctgagtatgcaccccgagttagccaatgcccacaatgtcattgtgacagagagggttgtttctggtgctggcgtaactggaattagtggcaccactgggatcagcggtggcataggcag

SEQ ID NO: 218490 - DNA, 172 bp, Homo sapiens
  chr18:29199777-29199949
  hypo
ttcatcatcacaaaacgttctgttggacactattaaaagtgagtattgatagaaagggcgagtggaaggcagaggaaggaccttccaaggaaactgcagatatgtgtgaaaagccaaacccaaaagccaaggttggagagagagagagcagggactccggcacatcggggat

SEQ ID NO: 218491 - DNA, 36 bp, Homo sapiens; identical to SEQ ID NO: 204939
  chr18:29265160-29265196
  hypo

SEQ ID NO: 218492 - DNA, 45 bp, Homo sapiens
  chr18:29269413-29269458
  hypo
tagaagaggctgggccgggcgcaatggttcatgcctgtaatccca

SEQ ID NO: 218493 - DNA, 54 bp, Homo sapiens
  chr18:29293795-29293849
  hypo
accgctgacaagctcgagttaattggtgcgtcacagcatcgttggcccggcgtt

SEQ ID NO: 218494 - DNA, 170 bp, Homo sapiens; identical to SEQ ID NO: 204940
  chr18:29598282-29598452
  hypo

SEQ ID NO: 218495 - DNA, 1283 bp, Homo sapiens; identical to SEQ ID NO: 204942
  chr18:30050221-30051504
  hypo

SEQ ID NO: 218496 - DNA, 166 bp, Homo sapiens; identical to SEQ ID NO: 204943
  chr18:30349896-30350062
  hypo

SEQ ID NO: 218497 - DNA, 200 bp, Homo sapiens; identical to SEQ ID NO: 204951
  chr18:31803102-31803302
  hypo

SEQ ID NO: 218498 - DNA, 1227 bp, Homo sapiens; identical to SEQ ID NO: 204954
  chr18:32556605-32557832
  hypo

SEQ ID NO: 218499 - DNA, 45 bp, Homo sapiens; identical to SEQ ID NO: 204955
  chr18:32557883-32557928
  hypo

SEQ ID NO: 218500 - DNA, 72 bp, Homo sapiens
  chr18:33078662-33078734
  hypo
taatctcttaggattcacagactcttgagcatggaatctgtgcttcctatccctgccgcacacccccacctc

SEQ ID NO: 218501 - DNA, 556 bp, Homo sapiens; identical to SEQ ID NO: 204957
  chr18:33766769-33767325
  hypo

SEQ ID NO: 218502 - DNA, 411 bp, Homo sapiens; identical to SEQ ID NO: 204961
  chr18:35146241-35146652
  hypo

SEQ ID NO: 218503 - DNA, 436 bp, Homo sapiens
  chr18:35249614-35250050
  hypo
acggcttaacctcagcaaagcgtcagcaggcctttgcaggggtagggaatgcaggaccccgcagtacctacagacggagaggcaggcgctactcctggcacgtttcccgtgtgcgcaggtggcccaggggaaggggtgactgctcgccgttgctccgagcttgtctctgggccccggagggcagtgggaatgccaccctgagcagacgtgagactcacagggcatccccaggcgcactctaggcttcagtcgtgcacacgtacacatttactgagcctgtaccgtgtgccaagtgctggggattccgcaagcaagaaaacattcggagtctctgacttcacagagctaaaattcacacgggaggaggcggtcggcacataacagacaactagagaatgacgcgagttgagatggcgtttttgacagctcccttcca

SEQ ID NO: 218504 - DNA, 120 bp, Homo sapiens
  chr18:36298627-36298747
  hypo
ggcgggctgatcccagtgccggccggcggagcccacgcccacccggaacttgcgctggcccacagcgcatgtgcagcgccggttcccgcccacgcttatccctccacacttacccgcaag

SEQ ID NO: 218505 - DNA, 120 bp, Homo sapiens
  chr18:36889351-36889471
  hypo
ctcccacgttgctcgagcctccccgatgggagccaccccctgctccgtggggctggtccaatcaaccgcccaagggctgacaagtgcgggcgcgtggcgcggaactggtgggcagctccg

SEQ ID NO: 218506 - DNA, 120 bp, Homo sapiens
  chr18:36939330-36939450
  hypo
agaagccagcggacaccctaccgaaccctgaggggtggaagtcagcacgggtctgcgatggcagcgatcagcagtggtgggcagcgagtgaaagctcagctccagccggttcaaacacgg

SEQ ID NO: 218507 - DNA, 100 bp, Homo sapiens
  chr18:37198432-37198532
  hypo
tgggaactggggcaacgcgcagcgctcatgggccagcacaagttccaggtgggtgtgggctcggcgggaccgcaatcagagcgtccggtctgagctgccg

SEQ ID NO: 218508 - DNA, 759 bp, Homo sapiens; identical to SEQ ID NO: 204966
  chr18:42258979-42259738
  hypo

SEQ ID NO: 218509 - DNA, 120 bp, Homo sapiens; identical to SEQ ID NO: 204967
  chr18:42259821-42259941
  hypo

SEQ ID NO: 218510 - DNA, 727 bp, Homo sapiens; identical to SEQ ID NO: 204968
  chr18:42260083-42260810
  hypo

SEQ ID NO: 218511 - DNA, 67 bp, Homo sapiens; identical to SEQ ID NO: 204969
  chr18:42531892-42531959
  hypo

SEQ ID NO: 218512 - DNA, 32 bp, Homo sapiens
  chr18:43599472-43599504
  hypo
tgtccatattgaggccgggtgcagtggctcac

SEQ ID NO: 218513 - DNA, 120 bp, Homo sapiens
  chr18:43767225-43767345
  hypo
tgacagagcgagactctgtctcatgaaaaaacgaacaaacaaaaaatcagcagtagatgccaactataatgttttatatgataactgtctttttttttttgagacggagtcttgctctgt

SEQ ID NO: 218514 - DNA, 59 bp, Homo sapiens; identical to SEQ ID NO: 204971
  chr18:43914608-43914667
  hypo

SEQ ID NO: 218515 - DNA, 44 bp, Homo sapiens
  chr18:44010836-44010880
  hypo
attaactctgttcctcgagttcattgtttaaaaattattcttta

SEQ ID NO: 218516 - DNA, 122 bp, Homo sapiens
  chr18:44260343-44260465
  hypo
cacgtacttgacgcggatggacacgtcggtgttgcgcgtgttgtagaaggcaggcagcagcaccgacgcgttctcgtacacctgcagcacgcgatagaacggccgccgccacttctccagct

SEQ ID NO: 218517 - DNA, 44 bp, Homo sapiens
  chr18:44700791-44700835
  hypo
tcttccttgggaggccgaggtgggcagatcacgaggtcaggagt

SEQ ID NO: 218518 - DNA, 104 bp, Homo sapiens
  chr18:44701015-44701119
  hypo
ggggacagggtgagactccgtctcaaaaaaaaaaaaaaatgggtcttcccacatccactgctttcccttccaatctttcctccgtattgtagcctcaaggatct

SEQ ID NO: 218519 - DNA, 78 bp, Homo sapiens
  chr18:45353784-45353862
  hypo
ttattacttggtggcaataacggttagaaaaaaagcacatccctctccctctcccgtctccccccgtctcccactttc

SEQ ID NO: 218520 - DNA, 540 bp, Homo sapiens; identical to SEQ ID NO: 204976
  chr18:45687833-45688373
  hypo

SEQ ID NO: 218521 - DNA, 154 bp, Homo sapiens
  chr18:45917050-45917204
  hypo
taaaatgagatgctgcgtcccagcatcgccaaggtgtggttccagccccagcgggccacagttctgccatccacatgcctatctcaaaagagattgcatgctaatccctccaggggcactaagagcctggtccccgtggcggctggagagggct

SEQ ID NO: 218522 - DNA, 164 bp, Homo sapiens; identical to SEQ ID NO: 204977
  chr18:45934609-45934773
  hypo

SEQ ID NO: 218523 - DNA, 221 bp, Homo sapiens; identical to SEQ ID NO: 204978
  chr18:45934810-45935031
  hypo

SEQ ID NO: 218524 - DNA, 1885 bp, Homo sapiens; identical to SEQ ID NO: 204979
  chr18:45935196-45937081
  hypo

SEQ ID NO: 218525 - DNA, 420 bp, Homo sapiens; identical to SEQ ID NO: 204982
  chr18:46065981-46066401
  hypo

SEQ ID NO: 218526 - DNA, 480 bp, Homo sapiens; identical to SEQ ID NO: 204984
  chr18:46067301-46067781
  hypo

SEQ ID NO: 218527 - DNA, 104 bp, Homo sapiens; identical to SEQ ID NO: 204986
  chr18:46501913-46502017
  hypo

SEQ ID NO: 218528 - DNA, 231 bp, Homo sapiens
  chr18:46578116-46578347
  hypo
ggctgaggttccaggcgctgcccccgtccgtgctggctagtgaaggcctggtcccctccacagactgggttcccaaactgctgtctcccaagtgtgcactactggtcatggggggactgaaagagcgggtagagagagcagcgtgaacacacagccgttattggaaaacctgaacatgcagacagcactgcgcattccccgaaccatagcgccagctcctctcccacagtg

SEQ ID NO: 218529 - DNA, 151 bp, Homo sapiens
  chr18:47285297-47285448
  hypo
cggccagtggtatttgtttttaatcaccacacagagctattgtgaggaccaaataaagaaatggatgtgaaggcgtgctgcgaactgcgccatgtggggtgttttctcattgttcaggtagcattcagcgtgaggccggtgttttcacagc

SEQ ID NO: 218530 - DNA, 592 bp, Homo sapiens; identical to SEQ ID NO: 204992
  chr18:47720908-47721500
  hypo

SEQ ID NO: 218531 - DNA, 88 bp, Homo sapiens
  chr18:47812104-47812192
  hypo
ctgtccatgctcacccgggcccgcagctggcactggcgcagccggcacttctgccggatcttgttggggcccccgaacttcttcatgt

SEQ ID NO: 218532 - DNA, 270 bp, Homo sapiens
  chr18:48190331-48190601
  hypo
gctgagaagggtgactgcatcgccagtgtctatgggtatgacctcggtgggcgctttgttgacttccaacccctgggcttcggtgtcaatggtttggtgctgtcggccgtggacagccgggcctgccggaaggtcgctgtgaagaagattgccctgagcgatgcccgcagcatgaagcacgcgctccgagagatcaagatcattcggcgcctggaccacgacaacatcgtcaaagtgtacgaggtgctcggtcccaagggcactgacctg

SEQ ID NO: 218533 - DNA, 228 bp, Homo sapiens; identical to SEQ ID NO: 204993
  chr18:48494204-48494432
  hypo

SEQ ID NO: 218534 - DNA, 85 bp, Homo sapiens
  chr18:48664888-48664973
  hypo
gattacaggcgtgagccactgcacccggccctggaagaatgatttaagaatcatttgtgatggcggtcaaatgtttattttgaaa

SEQ ID NO: 218535 - DNA, 120 bp, Homo sapiens
  chr18:48725413-48725533
  hypo
taagaaaatgaatccccgtttcctcctccctagacactcttcccacagtattgctcaggtgatctcacgcagtggctatcttttctagaggttattatttctgtttttgttgagacaaga

SEQ ID NO: 218536 - DNA, 31 bp, Homo sapiens
  chr18:53106926-53106957
  hypo
gttattcaaggccacttaaacgatcattttt

SEQ ID NO: 218537 - DNA, 74 bp, Homo sapiens; identical to SEQ ID NO: 205003
  chr18:53257322-53257396
  hypo

SEQ ID NO: 218538 - DNA, 40 bp, Homo sapiens; identical to SEQ ID NO: 205004
  chr18:53257761-53257801
  hypo

SEQ ID NO: 218539 - DNA, 163 bp, Homo sapiens
  chr18:54398593-54398756
  hypo
tgaatatatttttctcgcaggtgcattggatcgttgtgtgatggggataacagcagttgagattctaaacgcttgtgatgaagctgttcctgctgctgttgattcacttagtcatccagcagtcaacctaaaacaagctatgacgagacgtagtcttgctgct

SEQ ID NO: 218540 - DNA, 105 bp, Homo sapiens
  chr18:54483312-54483417
  hypo
cagggcctgaagcaaaagtccaggaggaagagcatgaccttgttgacgatgacatcaccactggtaagcacagacatctttaacgtctgattggagctttgtttg

SEQ ID NO: 218541 - DNA, 53 bp, Homo sapiens
  chr18:55315834-55315887
  hypo
tggtgcgagaaggcgtaggccgagcgccgcgttgacacgccccggcggaacac

SEQ ID NO: 218542 - DNA, 133 bp, Homo sapiens
  chr18:55329689-55329822
  hypo
gcacagatacactaatgatacgtaccaaccaagaaccagtgatgattaaggcacggtttccaccgggtggaaaaaaagattcctgcacaggaggtgcaaactttgcgtagacgccacctctattcctctggtt

SEQ ID NO: 218543 - DNA, 44 bp, Homo sapiens
  chr18:55427027-55427071
  hypo
gagacagagcgagactccgtctcgggaaagaaaaaaaaaaaaaa

SEQ ID NO: 218544 - DNA, 129 bp, Homo sapiens
  chr18:55850987-55851116
  hypo
aagactttttgttatcctgaacattgcaggtggaaacatgattaattttgaattatttttgtttaacttctaccctctttcctatttacagcctattttgtttattttaacttccgctgttaagacttc

SEQ ID NO: 218545 - DNA, 136 bp, Homo sapiens
  chr18:56483782-56483918
  hypo
gccggttcctaacaggccacagaccggtaccttcacagaagaaacaacctgggccccttgcctattgttagtgtgtcccttcccacagtcacaccctcttgtacctgtccctgggaggaaaacacaaggtatcagt

SEQ ID NO: 218546 - DNA, 498 bp, Homo sapiens
  chr18:59483204-59483702
  hypo
ggagcttttcaccacgccccgcctgtcctgctcctcctccaccgcctcctggggagccccaccttgcagaggctgctgttcagcagggatggtcaccacggtgacggacttctgctggctcccgggcagcaggcggcagcccatgtctccgggcagcagcgcacgctccttggagatgggcaggggcagcatgtagcacccattgctgggaagtttgatgaagaccggggtgtgttcggaagtgtgtggaatggcgatgacagccaggacctccgggtcgtccgggagctgcgacacggagaagccgggaggcagcttggtgacaccgcggcaccaggggcaccgcacatccttctggctggtcctcatctgctgcaggcacactgaacagcaggtgtgcttgcagtccagcaacttgggcctgcgccgggggctgtagtaattgaaacagatctgacattccagcagagagtcctgggacagcgtctccatggtgga

SEQ ID NO: 218547 - DNA, 39 bp, Homo sapiens
  chr18:59975663-59975702
  hypo
gagctttggactgtgcgctgtggctcacgcctgtaatct

SEQ ID NO: 218548 - DNA, 39 bp, Homo sapiens; identical to SEQ ID NO: 205026
  chr18:59992691-59992730
  hypo

SEQ ID NO: 218549 - DNA, 120 bp, Homo sapiens
  chr18:60110134-60110254
  hypo
tctggcggcaccaccgtgtaccctggcatcgccgacaggatgcaggagatcaccggcctggctccaagcacgatgaagatcaagatcattgctccttctgagcgcaaatactccatgtgg

SEQ ID NO: 218550 - DNA, 41 bp, Homo sapiens
  chr18:60110314-60110355
  hypo
gagtatgacgagtccagcccctccatcgtccaccacaaatg

SEQ ID NO: 218551 - DNA, 164 bp, Homo sapiens
  chr18:60117014-60117178
  hypo
gagaacctaagatggcgatgcttttatccaaggaggacttgggtttgcttctcctgagagccgggagcactatcccagccgaacgagagtctccctttctcttccccactctgtttcactgcagcccatggcttagcccaatcaatgcacggctaatcctggca

SEQ ID NO: 218552 - DNA, 193 bp, Homo sapiens
  chr18:60120642-60120835
  hypo
tgcttcttatttcaccgagaaaatagatggcatccgaaaagaacttgcctgtcccacctccccgtctactatcctcctgtgtctgtcccgaaatactgtctgtttgctccatcactgtagtgaactgttcctcctccatgtacaaatggtgcatcccttcccacttactcaaaaatgtcgctcctgtgatcat

SEQ ID NO: 218553 - DNA, 205 bp, Homo sapiens; identical to SEQ ID NO: 205027
  chr18:60189547-60189752
  hypo

SEQ ID NO: 218554 - DNA, 1224 bp, Homo sapiens; identical to SEQ ID NO: 205028
  chr18:60190472-60191696
  hypo

SEQ ID NO: 218555 - DNA, 97 bp, Homo sapiens; identical to SEQ ID NO: 205029
  chr18:60194122-60194219
  hypo

SEQ ID NO: 218556 - DNA, 83 bp, Homo sapiens
  chr18:60216459-60216542
  hypo
aaaaaagaagggtagattcagacctggtggtcagagggcatgattcccacagcgggtgtgtagaatgccgacagagtcttcta

SEQ ID NO: 218557 - DNA, 87 bp, Homo sapiens
  chr18:60229135-60229222
  hypo
caaatatttcttctccgcttttctcttgctccgtcttccaagactccaaatccttgtatgttagatttttcaccatgtcccgtggtt

SEQ ID NO: 218558 - DNA, 136 bp, Homo sapiens
  chr18:60234752-60234888
  hypo
tggctcctgccaggacgcagtcagcgccgtcagctgtctgtgttgttggagtgtcttttctgttaaaacccaagctttctgaaagtctgtcttctgaagaggtgcatattacctcatatagagcgttaagaatgct

SEQ ID NO: 218559 - DNA, 70 bp, Homo sapiens
  chr18:60273154-60273224
  hypo
ggcctggcgttcctgcgctactcagtccctatttagggctcataaaggtgcaccccgctgccccacacag

SEQ ID NO: 218560 - DNA, 1435 bp, Homo sapiens; identical to SEQ ID NO: 205030
  chr18:60382939-60384374
  hypo

SEQ ID NO: 218561 - DNA, 186 bp, Homo sapiens
  chr18:60523278-60523464
  hypo
aggcccttcttactgcgagtttcccattttcagattcaactaaccggggatcaaaacctgccaacacggagggctgagtgtactatggcattttatgtcagggacttgagcatccgtggattttgatacctgctggggtccaggagctaatccccagtggatatggagcgccgaccatatgttggt

SEQ ID NO: 218562 - DNA, 37 bp, Homo sapiens
  chr18:60549764-60549801
  hypo
tacaggcatgagccaccgcgcccggccattcacttaa

SEQ ID NO: 218563 - DNA, 169 bp, Homo sapiens
  chr18:60609801-60609970
  hypo
ttactttaatttctaattttcggtgagcggtgacattatatctagctttgagtgaatctgcgtgctgagcctgccgtgaggatttaccgtgtttccatttcattggcttttatccatctaacaagttagggcttgaacacacacccacgcatcaaagaaacaaacacta

SEQ ID NO: 218564 - DNA, 202 bp, Homo sapiens
  chr18:60645390-60645592
  hypo
ctgtggtcctacagtcgagacagtcgagggacccgcagggaacctgcacagttgccgcaggtgctctgtattaactgtctgtctgcaaacccttgttcttccaggatggcaaggtgaacggagtgactgagtccacgcgcatcctgggctacaccttcctccatcccagtgtggtgcctcgcccccacgtgcagtccgtgct

SEQ ID NO: 218565 - DNA, 210 bp, Homo sapiens
  chr18:60645979-60646189
  hypo
ggggtcaacagcctccgatgagcccccgcccggagccctaagcgagaacagccctgcctaccccagtgagcagcgctgcatgctccaccccatctgtctgtccaactccttccagcgccagctatccagcgccacgttctctagcgccttctccgacaacggccttgacagtgacgatgaggagcccatcgagggcgtcttcaccaacgg

SEQ ID NO: 218566 - DNA, 338 bp, Homo sapiens; identical to SEQ ID NO: 205034
  chr18:63417398-63417736
  hypo

SEQ ID NO: 218567 - DNA, 111 bp, Homo sapiens
  chr18:66360549-66360660
  hypo
acctgctaccaagttcgtggggtgggagccccacgctcccgggtatagctgaagctgctcaggagtggttctggaccctggcatccctgagctctccggggcctggaaagc

SEQ ID NO: 218568 - DNA, 353 bp, Homo sapiens; identical to SEQ ID NO: 205037
  chr18:67956670-67957023
  hypo

SEQ ID NO: 218569 - DNA, 266 bp, Homo sapiens
  chr18:67991029-67991295
  hypo
gttattgcagttctatggaacgcctttactgtcgtgccaggacacaggctgggacatggcaggcagcggaggagcagtcggagtcagtgctgaaggagtgcacaggtctagctagagtccagctgggaaggatgtggacactggcccacacgttagagtttataccaaaaagcaaggtgccaaaagaacaaaaggtagatgcaggcttgttctttataaacatcatcgggcggggcatggtagctcagcctgtaatcccagcactt

SEQ ID NO: 218570 - DNA, 370 bp, Homo sapiens
  chr18:67991980-67992350
  hypo
tagtacaacaaccatcgctagccagtgactttggaaaagatgattccttatttggtagctgctatggtaaagatatggccagctgcgatatcaacggtgaagatgaaaaaggcggaaaaaacagatcaaaaagcgagagcctgatgggtacgctaaaaaggcggctttctgcaaaacagaagtcaaaaggcaaggcgggcacaccctctgggagctctgccgacgaggacaccttctcctcctcctcagcacccatagtctttaaagacgtgagagctcagaggccgataaggtccacgtcgctccgcagccatcactacagtcccgcgccgtggcctctgcggcccacaaactccgaggagacctgcat

SEQ ID NO: 218571 - DNA, 271 bp, Homo sapiens
  chr18:67992600-67992871
  hypo
cctttggaaggatcacggagctattgtctggacagctcttctcccatggaagtctctgcggttcctcctcaagtgggagggcgcgctttccccgaggatgagagtcaggtagaccaggacctagttgtcgccccagagatcttcgtggatcagtccgtgaatggcttgttgattggcaccacgggagtcatgttgcagagcccgagagcgggtcacgatgatgtccctccactctcaccattgctacctccaatgcagaataatcaaatcc

SEQ ID NO: 218572 - DNA, 40 bp, Homo sapiens
  chr18:68042712-68042752
  hypo
gctgggattacaggtgtgagccaccgcgtctgacctctgg

SEQ ID NO: 218573 - DNA, 45 bp, Homo sapiens
  chr18:68053094-68053139
  hypo
ttaggtgagataatacgattcacttaaagttattttattattatt

SEQ ID NO: 218574 - DNA, 52 bp, Homo sapiens
  chr18:71844279-71844331
  hypo
gagcccccgctgcacggccgctctccctcgcagcctcgcctctcaggggtgc

SEQ ID NO: 218575 - DNA, 99 bp, Homo sapiens
  chr18:71844361-71844460
  hypo
tttaataaacgtgggcacacagaaggcggctccgctttgggaagacatttaacctgctgcagaggtaaattatttgactctacccggtgagagcgaaga

SEQ ID NO: 218576 - DNA, 99 bp, Homo sapiens
  chr18:71879693-71879792
  hypo
ccagggtcatcctggcgacccaatcaactcctaggatccaattcactctcccacccacacatagctcccatcgccacaacatggcgggctgccccatgc

SEQ ID NO: 218577 - DNA, 171 bp, Homo sapiens
  chr18:71889077-71889248
  hypo
gactggttgtgaagacgggaattcagcgcgccatgcaggggactcactaggccccaggtgggaaccccatcccctcctcaggcgtttttgcttcatgcttatatccgtgtcatcatcgggcctcttatgctggcattttgtttgtgtgttctctctcgcttaacaaactca

SEQ ID NO: 218578 - DNA, 48 bp, Homo sapiens
  chr18:71904650-71904698
  hypo
tgaaatggcagtccccgctcttctcgtccactgcgcacctcctggcct

SEQ ID NO: 218579 - DNA, 61 bp, Homo sapiens
  chr18:71983206-71983267
  hypo
ttgaaggaggcagagcggaagcgagggagactgctggaggccctgccgcccacccgccctt

SEQ ID NO: 218580 - DNA, 258 bp, Homo sapiens
  chr18:72189976-72190234
  hypo
cattgtaaattacctagtcttgggcattgtgttacagcagcaaaaagcagcctacggcagtcaccgtgctaacacctgcagcagcctgcggcggtcaccgtgctaacacgtgcagcagcctgtgtggctcaggccagtcagcttcccctggaagcaagtgtgaggtcgtcgcctctggaagtgctagcggagggtgatctcccggaggaaatcagagtggtgttctactagaaggccgatgactcctgggtaaagtgc

SEQ ID NO: 218581 - DNA, 252 bp, Homo sapiens
  chr18:72226538-72226790
  hypo
tgcttgctcttcctcctagacgctgaaggagtgggtggccatcgagagcgactctgtccagcctgtgcctcgcttcagacaagagctcttcagaatgatggccgtggctgcggacacgctgcagcgcctgggggcccgtgtggcctcggtggacatgggtcctcagcaggtgctgtacgattccctcccactgagggaggtgctacttctagacgtcagtcatgccttcccgggggtggcaagggagaggct

SEQ ID NO: 218582 - DNA, 62 bp, Homo sapiens
  chr18:72344372-72344434
  hypo
acagatgaaaacacacgatgcagaatcagtgctgaaacacctggaagcgtgcagcagtgtgc

SEQ ID NO: 218583 - DNA, 141 bp, Homo sapiens
  chr18:72347358-72347499
  hypo
catctggctagtgccggccacatgagaaatgagcaggccagtgtggaggagcttccggagggaggggccacctttaaatgtgtcaagtgcacagagccctttgattctgaacagaatttatttttacatattaaaggacag

SEQ ID NO: 218584 - DNA, 126 bp, Homo sapiens
  chr18:72741505-72741631
  hypo
caccttcattcagggcggagtgtgtgtgcgtgcgtgtgtgtgcgtatgtgtgcatgggtgtgtgtgcctgggtgtgcgtgggtgtgcgtgcgtgtgcatgcgcagggcatgcgcaggggcaggaag

SEQ ID NO: 218585 - DNA, 262 bp, Homo sapiens
  chr18:72764593-72764855
  hypo
caagtggactcaggcgtcagccgcctgatagagctcgtttcttaggtacctgagtttggattacacataatgaattcagttttccacttgttcacgtcaccattcccacacaaagtgccttctgggggtgcctgtgcggcacccggtacacagctttgctactgctttcctgcacgtgcacccgggtggaaggacacatgtgcgtggatgtcactccctgatcagcgttcggacccataccgcatgcttgttgctatgtgtg

SEQ ID NO: 218586 - DNA, 174 bp, Homo sapiens
  chr18:72896045-72896219
  hypo
gaacgagttaaagcacgagcaaagtcacacagaacggtcgccatgtgagtgctcatggcgcgatgcccagctctgccgcagaagcaggtctagcggttctgggccattggcttctcctggggctgccctccccatcgtcactggaaggctggaggactctccattatggagccc

SEQ ID NO: 218587 - DNA, 209 bp, Homo sapiens; identical to SEQ ID NO: 205042
  chr18:72921091-72921300
  hypo

SEQ ID NO: 218588 - DNA, 300 bp, Homo sapiens
  chr18:72960761-72961061
  hypo
tttaattaccctctgtggtgtctgcacgctctgctaagtcttgtgtgggggaacggttagaaatagccgcagaggcaaggatttagaagctggtgtgccgtgaagccatagggtcacccaccagcagcagtaccaggcgagccacctccgcgtgggaggaggcccaggtgtctgcttcctaacgcggggcctgagccgggcaccctggggtggagaggcttggatgggagccccagatctgggccactgtggtccctgggctactgggggaaagccaggtccttcaccgccctcctgcct

SEQ ID NO: 218589 - DNA, 224 bp, Homo sapiens
  chr18:74062315-74062539
  hypo
gccccacaggtggccccagaattgcaaagccaatggcagcttcctaagtggtcaccgaaacgcactttcagtgtggacccgccggcctgtgtgtattcagcaatcccagccatccaacctgacctcgggctgcaaagacgatcgtggccggagccggctggctctttgcgaaagcggcgggacccggggacagcaggctgcctgcgccgcttccctccgggtgg

SEQ ID NO: 218590 - DNA, 180 bp, Homo sapiens
  chr18:74069254-74069434
  hypo
aacagcattttcaccgcagagtggcgcacccagcgcagagtggcgtccccagcgcagagtggcgtccccagcgcagagtggcgcacccagcgcagagtggcgtacccagcggagagtggcgtacccagcggagagtggcgtacccagcggagagtggcgtacccagcggagagtggtgta

SEQ ID NO: 218591 - DNA, 71 bp, Homo sapiens
  chr18:74069464-74069535
  hypo
gtggcgtacccaaggctagacgctccggttgggggaaggacgcccagtgctgttcagagttccatttcctg

SEQ ID NO: 218592 - DNA, 449 bp, Homo sapiens
  chr18:74083558-74084007
  hypo
cgtggtggggttggcgtggaggtgaggaggcaggagagcgagggggaagcgagaggaaaacatcattagtctgtctaatgtgtcatcatgtgaggctcccttcaggccctggtgacaactgtcagccttcatctcggctctgctgacaggccaggcactctcaggactgcaaggatgcataaattacagcgaattaaaaaccactccctgggacaggaggtgcccgccaggcagcacgtcgggctgtgcagctccgagcaactgcaggctgggcacagccatcacccggctctgtcaagcagcacatccagcaaatcagagtgacaccggcgtgacagagacgaggctcatggaaaataggaagtgagcgggaccagagcccaccgtgacccggccgcgatcctgggagacccacgcagagtgagtgcggccacagggtggccccacct

SEQ ID NO: 218593 - DNA, 1062 bp, Homo sapiens
  chr18:74090916-74091978
  hypo
tgcccctcggccaccggctcctgtttgatggagtgtaggacgggggggcgccccagccacgccgggctgggcctgcaaggccgcgtcgcccctggaccccgcagcacaggtggccagagtcctcagctcctgggctgccttcgaggggggctcgcggggaggtagaggaggagcgcccccttcgccctttgcaggaggtggaccctgaggctgagcactgaatttggctttcagggagtccggggcactgtgcttatttgtgggggcaaagccagcccccgctggggggaccccaaacttctccacaggcttgctattggccgagggctgcgcgccagcccgggcgatgacggtgggcgtaggggtggcgctcctgctgaagcccccgccacccggggcaggcaccggtttggagctagcctcctgcctgggcttggccaggggcccctgtgtggccgcgccatgtggctcctggccgtgacaaggtttggtctgtcgatacccgtcagggccgggcgcccacagagcgcagggacctccggaatggctctccttattcttaggcatgctagcggcttttgtgaccactcccaggggagaagagccacttttggaccccggcatcccccctggcacctgagtgcgggtgaaccgagcaaggagcaaaggctggcattctttgccaccgagggcaggcggggggcccgtgcgtccgctccgggaaaggaaaaccaaattgcttctgatgcttttgtaaccattgggctgaatccacgggggagccacggagttgcagctgacgcggtgccagatgcgtttgtgcatccacaggacctcggggtagtaggtcttgtggctgcagtaaggacacgggtgaacgactaaagccgcctgcagggaggaggccgtctccttattgctggggtcatcccgcgtcgacctcgcacttaaatctagcggcatgaggtctggggccagcgcccgcttccctcccccagagtgttccttgttgtgcaaatcggacagcttttctgcagggtgacccgtctggccctccgctcc

SEQ ID NO: 218594 - DNA, 191 bp, Homo sapiens
  chr18:74092158-74092349
  hypo
tctttccgaggcgttatctcccatcttgtgactctggtctccactggagagctcggtcgaagtcacctcttcggaaaagcagcagcggcgcggctgtccccctagaggaggcaaaatatgaaacgggaagttaccatttctcatcagaacacagcaagacacacggtgcgtacagctacagcatgttccaa

SEQ ID NO: 218595 - DNA, 52 bp, Homo sapiens
  chr18:74094279-74094331
  hypo
aatggtgctcagtacgttcgactcatttctaaatattcgaaaaaggcaacat

SEQ ID NO: 218596 - DNA, 894 bp, Homo sapiens
  chr18:74096593-74097487
  hypo
ggcttttgatgtttcggtggccctgatcctgaaacggaagaactcggctagagaagtgtccggggagggggctccagctccctggttgaggaaatgcctggttccgtggctcccatgccacacagggagaaagtctgcaagaaaaagcacttctgctcctcagtccccaccaatctgacagcccctgggtggcagtgctcaccgggcactttattagaattgaaggaaagagaacggtgctgatttgagcatggcgtggccctgcatagatggctgcctctaaccctgaccgcagtgccgagggcacacaccagagagggaaggctggctcagaaaggcctggcagcggccctgtgcagagggagcaggatctccaacactcaccccatgctctccgggtgcacggaagcacgtgccaggaggaggcagccgggtccgagcagccctagagaaggcgcacgtcgctcccaaccccacgagtgtgcacacgcgtgccacagacggtgactatggctgctctgtcctcggctcaaacacaccaggggctcccgggttcctttctaagcaggaccttcctagatgtgtcttggaaacacaaacatggattaggtcttgggtgacttcactgcgtcccaagctggccctggcctggctggtgccgcacaccgccgacaagcatgtttcacacggggcccagggagtggcagacttgcactgtctgaagtccctgaggcaacatcttcaacacacacaaccgccctcaaaagcacagaaatgcggtgagggcactttgtataaagttactcccctttcacttaaaatattttttattactgtagtaaaatatacataacaaaaaagtctgcagccacgcagccacgctgaggcgctccc

SEQ ID NO: 218597 - DNA, 34 bp, Homo sapiens
  chr18:74113520-74113554
  hypo
tccgaggccatctccgaaacgccctgcagctgct

SEQ ID NO: 218598 - DNA, 145 bp, Homo sapiens
  chr18:74113767-74113912
  hypo
ccaaccacacccccgcgctccatctctccaccaaccacacccccgcgccgcacccctccactactgtttataggctctcaagagggacagggaaaaccagtattgtttgagtgccaactctgcataaacaatttccacagaatga

SEQ ID NO: 218599 - DNA, 60 bp, Homo sapiens
  chr18:74113942-74114002
  hypo
gtgtgtacgcgcgtgtgtacacgtttgtgtgtacacgtgcgcgcatgtgtgcacgtgaac

SEQ ID NO: 218600 - DNA, 273 bp, Homo sapiens
  chr18:74120285-74120558
  hypo
ctggtgtggacagcaagctccgaggggctgcggcgtgcgtctctcctgacagcgacacacttgagaccctccgggagttccagccggggtgaaaccagtcacaagggaaaatagcaaaaattaagaagaagtgcatggctctggtatagctcggaaagtacactgtgaggtttaagggatggtttaaaaggaaccaggaggtgaaaaacgtctaaaggcggaaggtgtcaatgtttgtcatccaactaggaaactgagggcacatggctccca

SEQ ID NO: 218601 - DNA, 259 bp, Homo sapiens
  chr18:74133243-74133502
  hypo
gagcagggcagctgaggctccgaggctgctgtcctggctgccagaggtatggcgggctaggccttaggtgatggagacgctgtgctggcagttgctccagggcttcgagctttaaggaacaagtcccacgtcctaactggtatcctggtccagtccgtgaggccagactttgtctcagagctggaaagcagagcccgggctgagcccccgtgagttctgtgtttgcaaagctgccaccgggtccctccccctgctctcc

SEQ ID NO: 218602 - DNA, 480 bp, Homo sapiens
  chr18:74144966-74145446
  hypo
acatcctgagtccacacatcctgagtggcaacgacactgaaatccacacatgcggcactttccattgaagactctgtaggcttctgagatgctcccattaaatactaactgtaaggccagcctctgctgcgactgctgttcatcgctgtttctgttatcagacaggaagatctctagagtctagacatccagtaaaaagcaccactgaccgctgagtactcccgtgcaaaactacccactcccgaatacaacatttctccatggagttcgctgtcaactctgaagaacagaattcatcaaggtgcagctccagccactgttctcagcgtgagtcctgcggggccctcaagaaaaagcaggtctggcccctgtcttcaatgagatggcaatttgaggatgcctgacgcaaggcggatgctggggacagagagggtcatcctgcctgaaaagaatgtgtccacgcaacagggaggaatgggg

SEQ ID NO: 218603 - DNA, 448 bp, Homo sapiens
  chr18:74145686-74146134
  hypo
gcaaacgcctagtgaagaatcgagaaaggatgggcttagtcgcagcacatcacggatacaggagggcgacaacacaaccaacacaggcaggtgcagaatcatcagtcggaatgactagaatctcccaaaaagctcagcagcaaggcatcatctcacagtgccacgtccccagctccacaggggtgcacaccgctccatggcatcacacctctcctggccgggaaaccccaccgcgaccgccagcaccttttctcacaggtgcaccaagccctcggcaacgccttacccaacccagcacctgctgctctggccgttgctgtccgttcttccagctggtcaggaactgacggctcggagtggaatcagacctccctctttaccaggagcgatcctgcctggtccatgagatgccctatctcacgggaacggggtgcaagaaccaaattca

SEQ ID NO: 218604 - DNA, 281 bp, Homo sapiens
  chr18:74148372-74148653
  hypo
tcgttttgagcctctcgtgggacccatgatgaacactgtgtgaggacaagcgctcctcccaacccatgacttggcttcagagagagctttgcccgtgttgcgtccaagccaggacaccgctgagtccccgagagactcagcatcgcgagtggattcagctgcaaggtcagtgcgcgaaggtattgtgagagctcctcctgctctaccttgaagaaacgcttagaagaagtaccatataaaggttgcccacacccagcaggcttggccgcacaggcagacac

SEQ ID NO: 218605 - DNA, 985 bp, Homo sapiens
  chr18:74154058-74155043
  hypo
tggtggcgatggggtccagctcactcttgggcctgttcttgctgcccgtcttggggccgtgcgccttcatgtggttcttgaggaaccagggctccttgaacctacggccgcagatgtggcagccgtggtcgaaggagccccggtgcttcttcatgtgcgccttcaggaaccaggtctggctgaaggcctggccacacacctcgcacgggaactccccggggctcagctcgggcttgccgttctccacgcaggcctcgccgctgccgggcccctgcgcggtgatgtggtccctctcgatgtggctcagcagcgactcctcccgcagcgtcgcgtagctgcacagcctgcacttgaacggcttgtgcgcctggtgcacgtgcagctccaggtccttcttacgctcgaactggctcttgcagaaggagcactggaccgctgccttggcctcccccggggcgcatgcggacccctctgcccccttcttgctgctccgcagcaggactctgccgctgtcggcctgcgaggccccgttcaggaccctggcgccgtcggcctgcgaggccccgttcagcagccggttgcaggccgaggcgctcttggtggggctggcgcaggcgtccaggccctcggaggcgcgcatctcacccagcggcgcctcgcccgcctccggctcgtgtccctgaatcagagtccccgtgcggtggctccggatgtgaatcttcaggttgcccttctgggaagcccggtggtcgcagtagggacacttgtagggcttctcgcccgtgtgcttgcgcatgtgctgcgaaagcgagctctggaaggggaagctcttgccgcagatgcagcaggtgtggcaggtagccttgtccccatccacctcgtggccccggccggccctggtggggctggggcctcgcctcagctccatctcggcctctctgttgcgatccatccgaaggacgggcgcggccggtggtggcggcac

SEQ ID NO: 218606 - DNA, 483 bp, Homo sapiens
  chr18:74159158-74159641
  hypo
gagcttccaacttcaaaacacgccatgggcggccgccccaattaggaggattattgggacgtcagcggccctgctggcacgacgggctgtgctttaaatcccgccaacccctgtaagccaggagggtttcgatgggatgcctcctccacctttatcctggtccctagtggggcgtgcctcacgtaggagcagcgccgtgtgataaagtgctacctacctcagttccagccgcagacatttccgtcctgggctgctctattccactttctcaaacgcacgccaaatacaagttgttccaactctccctgtaacacacgggcctggagataaccagccttataaaacttgtgcatgtgagcctgccacccaaaccacagggaatacggaaaggttctgcaacaacacagatgctcagagccaaggtggagggtacagcatgtgtccagctgacatgcaatatggcgcccacgcacctcggacggc

SEQ ID NO: 218607 - DNA, 280 bp, Homo sapiens
  chr18:74170508-74170788
  hypo
ccaagggcacaggagtagtgctcgggaccctcaggacggggcatgcactgtgggcaacgccaggcctcaccgtcgtgcgtgtgcatgcctcaccgtcgtgcgtgtgcgtgcctcaccgtcgtgtgtgcgtgcctcaccgtcgtgtgtgcgtgcctcaccgtcgtgcgtgtgcatgcctgtaggcaatgccaggcctcaccgtcgtgcgtgtgtgtgcctcgtgtgcgtgcctcaccgtcgtgcgtgtgcgtgcctcaccgtcgtgcgtgtgcgtgcctca

SEQ ID NO: 218608 - DNA, 220 bp, Homo sapiens
  chr18:74171263-74171483
  hypo
tgggccggtgacagccctgacccgtggccaccatccactcaacatcattgagccctcccacaggcacccaagctctctgaggacagccgtcctagcttccttcgtgggagaaaactctggccctccactgccggccagggaggcctcgcgtgccaagctggccctgagctcagcccaggatttgtgccattcaggacgtggcggccgtgtgcaccccatc

SEQ ID NO: 218609 - DNA, 143 bp, Homo sapiens; identical to SEQ ID NO: 95125
  chr18:74171505-74171648
  hypo

SEQ ID NO: 218610 - DNA, 192 bp, Homo sapiens
  chr18:74175494-74175686
  hypo
gcgcatcacactgccgaccgccagaaatgccaggcccctgggtggctctcgctcttcttggggatgggtctgtggggcgccacctactcacctcctccgcagcatctgcgtttacaaaacacactagggtactagggagccagtctgtgaccgcaacgcagacgtgcccactgaaatcggtgtcccacttat

SEQ ID NO: 218611 - DNA, 188 bp, Homo sapiens
  chr18:74183548-74183736
  hypo
tggtggaaacactccacacacgacagctgggcctcagccaggcaccagtcggggcctcactagatcccgtcacgctagatcctgtcacatcgctgaacgggagatcccagaattggagccgacttcccccaggagccgggtccagcatgcagtcatgctgccagtccgtggaggctaaacaccctaag

SEQ ID NO: 218612 - DNA, 202 bp, Homo sapiens
  chr18:74195359-74195561
  hypo
atgatccactctgtctctgccgcctccctgcccactcctgtgggaagctccctctcggcatctgtccgtcatcagcatctgtccgtcatcggcatctgtctgtcacgggtcatctgccgcaccacactgagaacccatgagtgccaaatgtcccccgtcagctggcccacccgcatttcatcttcctggcttaagaaggtga

SEQ ID NO: 218613 - DNA, 35 bp, Homo sapiens
  chr18:74195591-74195626
  hypo
acctggtcttctccgacccctttccctatgatttt

SEQ ID NO: 218614 - DNA, 441 bp, Homo sapiens
  chr18:74323520-74323961
  hypo
tgcggtggagggggcgatgtgcctgcgtgtgtgcctgcgtgtgtgtgtgtgcctgcgtgtgtacctgcgtgtctgcctgcgtgtgtgcttgcggtggcgggggcggtgtgcctgcgtgtgtgtgtgtgtgcctgcgtgtgtacctgcgtgtctgcctgcgtgtgtgcctgcggtggcgggggcggtgtgcctgcgtgtgtgcctgcgtgtgtgtgtgcgtgcgtgtctgcctgcgtgtgtgcctgcggtggagggggcgatgtgcctgcgtgtgtgcgtgtgtgcgtgtctgcctgcgtgtgtgcctgcggtggagggggcgatgtgcctgcgtgtgtacctgcgtgtctgcctgcgtgtgtgcctgcggtggagggggcgatgtgcctgcgtgtgtacctgcgtgtgtgtgtgtgcctgcgtgtgtgcctgcggtggagg

SEQ ID NO: 218615 - DNA, 242 bp, Homo sapiens
  chr18:74325506-74325748
  hypo
tctcgtgcaagccccgcctctcccttactagcaaagttgtgaggacagcgcctgcacgcaacacttgcttactaacttgtaactgttattacagaaagcgtggagccaaacagatggcagaggcccaaggaagagcgcgctaaacccgaagtagatctgatttcacatcttgacttggcgattgtttagctgggtcagggtaaatgcctcactgttcctcgtctgtaaatgaacacgggtgc

SEQ ID NO: 218616 - DNA, 194 bp, Homo sapiens
  chr18:74325938-74326132
  hypo
gacaggggacactggaacaggggagacgacatggaagaaatctgggggagccaaaagccgccatgccgagaagggggtcggaggaggcgcgggagagaaaagcccagggctgtacactcgcatccctctgctgccggcccttcgggtacattcaaatactgggcatgagtcccgcagacaaggctttgaaagga

SEQ ID NO: 218617 - DNA, 47 bp, Homo sapiens
  chr18:74500998-74501045
  hypo
aggcaccgagagtgagcgagggctgccagggctgccagcacacctgg

SEQ ID NO: 218618 - DNA, 31 bp, Homo sapiens
  chr18:74501267-74501298
  hypo
taggccgggtgaggtggctcacgcctgtaat

SEQ ID NO: 218619 - DNA, 282 bp, Homo sapiens
  chr18:74569915-74570197
  hypo
ctttttacgtttcttaagtattttaagattctaatgatattgtgtagggaggtcttttggccatatgttgtgttacgtgcctgtaggaaagcgatgcatttgtgtgtgttagttttccctgccatcctccctgattctctatgcagcctcatctacacataataatcgggtagtaagtttttggttctgtgttgttgcaactagcatatgcgcagtttttaaaaaaaaatcacccttatatcatttattcgttttcatagtatgtagcgatggcatattcac

SEQ ID NO: 218620 - DNA, 187 bp, Homo sapiens
  chr18:74592528-74592715
  hypo
aagaacaggcttttccgaagttgtatctatttatgttgacagaggtggaaaaagcgttttattctttcttgaggttctggtttatgatttggagacagtcatgggtgttgacaattctgagagcgttcatactgcctggccttctctcgtgggtgtgtgggcagcacctgcacgtgtgggagaggag

SEQ ID NO: 218621 - DNA, 209 bp, Homo sapiens
  chr18:74625650-74625859
  hypo
gtaattgtgctatgaattaacgtggtctgagttctgtatgtttgctttgtaggtgtgactattgcaacaaaggctttaagaagtccagccacctgaagcagcatgtgcggtcgcacaccggggaaaagccctacaagtgcaagctctgtggacgcggctttgtttcctctggggtcctcaagtcccacgagaagacacacacaggtcac

SEQ ID NO: 218622 - DNA, 331 bp, Homo sapiens
  chr18:74631683-74632014
  hypo
aggttttcttcattacgattttgatcccttttccttgattttgtgtagacatttgtatggaggaagaggaagaacattctgacagaaatgcatcacggaagtctcgtcctgaggtcatcactttcacggaggaggagacagcccagttagccaagatccggccgcaggagagcgccacggtgtcagagaaggtcctggtgcagtccgcggcagaaaaggaccgcatcagtgagctgagggacaagcaggcggagctgcaggacgagcccaagcacgccaactgctgcacatactgccccaagagcttcaagaaacctagcgacctggtgag

SEQ ID NO: 218623 - DNA, 79 bp, Homo sapiens
  chr18:74633615-74633694
  hypo
aaaatgctaccaaggcgacataaagtgctaaacatgtctccatcgactgtacctgaagaccagaagagtgggatgttct

SEQ ID NO: 218624 - DNA, 732 bp, Homo sapiens
  chr18:74728303-74729035
  hypo
tcaaaagtcttcctcgacctcaatcctatgattgtcgcagagcaacatgaagctagcagcactgactccaggaaaaaacgagcataacccagtgttgaaccccagcgtgtgggctgcagaggcaacatcagtcatcaagtccgcaagcacacaccaccagagaccctgagaatgtggctctctttctgcaacgcccatgtccaggcacccttagagatccagaattcagcatgtccttacattcctgagccacaccccggccaccatcccttgtgaggaaaagagggggtgagttaaacgaaaacgtcctaagcagccactcaggcccacactcttgggctcatatgcattctccagcacggaacgagaccttagacagcaagaggctacgtgccagttcttcctctaatggctgagttcacctactgatttctcctttgctttttccatttaaactaaaactcctctactcctcagagctcaccttgccagagccccgcttgggcgcacccctgtcaccgccaaagaagcgcccgatggagtcaaggatgcccgtgtctctgtgccttgggaggaagccatgcctggcatggtccatggtacttgctgtggccaggtacttggatccgtgcctctgggagggtctcttctgtgacgccatcacatccaggctctcggaggtggctgcactgtcttcttggatggtctggagctcgtcggactcagagggcc

SEQ ID NO: 218625 - DNA, 99 bp, Homo sapiens
  chr18:74729467-74729566
  hypo
cacccaggcttcccgatgaagtcatctgagcatgcagagcagccacatcagcgtttcttcccgggtgctgccatggctgctcccggagagcccagatgt

SEQ ID NO: 218626 - DNA, 146 bp, Homo sapiens
  chr18:74733725-74733871
  hypo
accgtgcccagcctctacttttaagccatcatgagcacttggactccaatgcagctcctttctttatttctcagtgtatttcccggggtctttggccaactgcagcgggtggccttttttgaatctgagaacgcacggtgacacag

SEQ ID NO: 218627 - DNA, 1803 bp, Homo sapiens
  chr18:74736587-74738390
  hypo
tcaaagcatgtgggcgacggagaatcggccgtcgtggcagcgccagggcctgcagtcgccagggtggggctgaggccagggccggaggtctgggcagaaccacagggaaggaccttggaggccgacctcagtcccaacactgaccagccgatgtgctccagcaagtcgctgagcccagatgtgcctgtttctgtgtttatgagatgggagcattcatttctattcttacctgaaataaccccaggctcctttccgcagcagcacactgacctgggtgacgtgtcctccccatgccaccctcccacaaacgctgccttccacccacagcacccgcagagagtggcagagagggcattcctgagcagattgcaggagttttgggaggtgcatgtgtgcattctcgtaactctccgaggcgggtggttttagtagcccttttattcataccagaaactgagacttagcaaagttaaggtgggattgatggaggagctgccgttcactcctgcctaaactccctccgtatgttctagaaacgcaggcgatcccccacctctagctgtctgacaccagcccttctccagcccaaagtggctttcactgcagccaggcttttcctctcagggtaaaattgaactgcagataatcgatggctgacgcatctgtggctagcagctgcttcacggagggctgaccaggagagacccagaggctttctgatctgtcgggagccaagagctgagccagggcccccgcctgcagccacagggacctcgagtgcactcagcggtcttggtgcaccatagccacctggacatcgatacgttaatgactgttaaacatgaacaaaagccgagtcccacactccaggacattcaacacccacccgacagtctgtccgagtgttacctccaacagtatgaagctcaccgtgcaacggctccaggcttgtttaggaaactgtcccactctcatcttgctctaatcagaacatggcaggaatcaaatatccatacctgactgtctccagtagaatggtgatgacagagcggacactgtcctctattgaaatacttttttttttttttttttttacctagagcatgtttctcgtgctccattcccctgcatccgtggaaatcacatcgcacaagtaacttccatcaaaaccagcacgtgtgagagacaaacatctgggttcccaggcacaccccacaccctgagtaaaccaggacggacaggccgaggttccgctgctgcctttctggcacacgcaggggagcagtgggcagcgggttactccctctccgaaaaaccgtccttctccccatgccctgcggcaccgtgagtgcatcgctcatcccgctcgctgtgctcccagcctgtgccatggaacctgctcaactgcggagcctgggatgaggctgagcctgttgctcttcctgttgagtttggtttcgaccaccctgcatgaatctttgtgcttccaatgcttctggtcagggggccctgccgcctcgtttcagggacggtgcctgcaggccgctgtctgtgcctgaactcagcgcttttcacgctggcttgacccacggagggcggctgtcagccgcaaccggaggcagagcgcgggcgttctgaggctattggatgaggctcgctggtgataccttctgggtttgcaactttgttctaaagccaggggttttcaggccaacagaaatgcatttagttagtaatccagagcatgccataggaaaacataacgaataaaactagaataaaacataacgcagaaatcacctt

SEQ ID NO: 218628 - DNA, 67 bp, Homo sapiens
  chr18:74755405-74755472
  hypo
tatttctgagtgctggttatcgtggcatctgaaaatgtaaataagtgatgtaccctgtggggtagct

SEQ ID NO: 218629 - DNA, 389 bp, Homo sapiens
  chr18:74755590-74755979
  hypo
tatgaaatgtcatccctagaaatggcttcatttgggataaagctttgaacttgcgtgcgtgccccgcaccccgtggcggactgagtcactgctttgctgttgcggcgtggtgagtaaaactttcccaggggagccggagttgagtgagaaagggatgcaggacacgcaggagctgacacatctctatggatttaagtcgctgtttccacaaatgctactcacatgcccacacgtgtagggcaggactgtcacgcgtccactctgctcagctttccaggccggatctggtcccagccattctacctgacccagactccccgcacccctgccattcccccagctgccgtcctgtgtctcctgatttctgcgtttttgatcctgaggctctc

SEQ ID NO: 218630 - DNA, 185 bp, Homo sapiens
  chr18:74763242-74763427
  hypo
ctttcacttgcgggcgaatgacgcgagcatctctcagttgctttgtagctctctaatgataaaattaacctacttaaatggtcacatccactgtttattttaaaatccacccaccactgtcggcctggctcacagtgaattaaccgttcaacagttaaggagagactgcccgacagagcccacct

SEQ ID NO: 218631 - DNA, 564 bp, Homo sapiens
  chr18:74763720-74764284
  hypo
ggttcagtttgatgcgtgaagaccaggggtaggagcgtgagtgggggtgcactttgctaaacctgcatgtaacagtgggcttaattttccctttttttaacaccttgtttcttcaaattacacaatgttgatgctaaaatgttctttgtagaagcgaggcccagctcctgaaggattcatctgagaaacccagggacatgcccttctctcattggaacaagtgggaaaaaaggcatcttaaaaaaaggttatggtgaagccgtgcggcagcactggaagaggatgaggaggctggagaaggcgtgtgagtgcaagctgccctcccgagactgtgccctctgagccagagtcttcctccgatgtgcccaagtccacccgaccaggaacgggggaaggagcggggcgatccaacagccacacaacagagtcccaagttccaatcacaaattcaggctgtgaggtgaaatcacaaatgtgaactttacttatggaaaccaaatagaagtgctttcaaattggggatccaagacccaacagacataagtgatcagcagcatcccgatc

SEQ ID NO: 218632 - DNA, 456 bp, Homo sapiens
  chr18:74770085-74770541
  hypo
ttaagttcggcagaggacacccagggctgcaccggctcttcagggaccctccggggagaagaggcatcccctccccagccctggacgtccacctcaggggcggtggggatgcggggatgcggggatgccgagcgctcccaggctgggtcacagcaggcagtggctccgctctggcttcgactctcaggacccacctgggacccctgctccacgctgcggggaggccaaacctggagaacccagggcaccagttcaggctgacagcccggccggacccagccaacgccccgcacagctcgccagccacgggagggagcggcctccggcagaccccagccccaggcacgaccccaggcccgggcacgaccccagcccccaccggctgatgcgacgcccacaggggacgagctgttccagcaccacccccgcccccgcgtgcagaatcctgagcaacag

SEQ ID NO: 218633 - DNA, 232 bp, Homo sapiens
  chr18:74782716-74782948
  hypo
ctgaattgtggaagcgcaattcagttttcttcatcagaaccgagtggagaagcaaaggatggcatggagtcaaacttcccaaagccagtcacagccaggacgtcggcgggcggaatcctggttggttttgaggaccccgctcaggtgcttgttcccgcgtagctggagtgtccagccaagtgtgagagatctcctacctggtacagctattcatgtacgtgcacacatggca

SEQ ID NO: 218634 - DNA, 100 bp, Homo sapiens
  chr18:74805146-74805246
  hypo
ctgggccggctctccgggagcatcagggatccggttggagagaggctcatacggcggtcccaggggccacctcgagggggttgaccggagctgggtctgg

SEQ ID NO: 218635 - DNA, 117 bp, Homo sapiens
  chr18:74806769-74806886
  hypo
acttccatctaaatcgcttaaaaatatgacattaaaaacacagttgttcagttataagggtctcgtttcgtgtgctgtgggccacatgtgtctagaggctaacgtgtcaccaggcag

SEQ ID NO: 218636 - DNA, 429 bp, Homo sapiens
  chr18:74832019-74832448
  hypo
caatttaggaagagcacagccgtgctcagcccacgaagcatgaatcccgccttgtctcgggtgaggtatgctaaagggttcgctctcgcttggtgcgagcattcttctgtgaatccattacgggtctcaaagtcctaatgcagggaacacacgctcccgtaggcttctcccaacgctggcaaaatagaaacctctaaaatctggtcagccctcgcggcatctggtgcagctgtgaccggcacggccaggtgacctcagacgcgctgcacacacctgggaggctgcagaggggcagctgtgaagtggggctgtgacgcccagaggcactcaggcattcagacctgcactgacccgggacaaagacctcagcgtggggtgtttttcttcctttcaggaagccccccaggcgctgatttgggcctgagctag

SEQ ID NO: 218637 - DNA, 37 bp, Homo sapiens
  chr18:74841696-74841733
  hypo
aattagaggccaggcgcggtggctcatgcctgtaatc

SEQ ID NO: 218638 - DNA, 40 bp, Homo sapiens
  chr18:74847361-74847401
  hypo
gattacaggcctgagccaccacgcccggccaggactgaat

SEQ ID NO: 218639 - DNA, 156 bp, Homo sapiens
  chr18:75339359-75339515
  hypo
tgggacagagagcagcccggatgcgcggagcagacttggacttcagagcaccttcgctgaagccgagtgctgctgtgccaggtttgtggcggtcatggtggaaagtggtgagtgcctcgggatgggtgctcctgcggtcagaatcctgtggtcaga

SEQ ID NO: 218640 - DNA, 282 bp, Homo sapiens
  chr18:75873524-75873806
  hypo
taacagaagttaatttcactcgtacatgtggaagtctccgattctctgacagcgctgtctaccagggatcagctgccgagcttgagtgacatggtgctgtcaccacggcagccatcccaccggcaggcgccagccttaccgtaccgtgtattgaagtgacacacaaatatgtatctggacgtgggtatgtggtgaggccgcagttgtgggaaaggtggagaagtccgatgagctggaggatctggcaggggagggatgtacgagctagccaggcaggtaggg

SEQ ID NO: 218641 - DNA, 250 bp, Homo sapiens
  chr18:75999434-75999684
  hypo
gtcagaaccacgggacagccacgggcattcttaaggctgccagcctgtgggtgtcacctggttcagccactttcggaggaagtcggtgggggacaagacccacttttgcagatttagaaaaggaaggcagaagtgtctgggcacgcggggaaacgcaaagacctgctgaaccagttcatttctaatcaaaaggagcgctggtgtggggtatgaagggcacgtcttcatgccgtgtcggcatctgctgtta

SEQ ID NO: 218642 - DNA, 126 bp, Homo sapiens
  chr18:76123568-76123694
  hypo
aagagcaattggggcttatccgtgatccacagaaatgattgctacgttccctgcagaacggacggcagtcgctggacagggccccagagcgcctgggtgcggtcagctccgcggactccccccggg

SEQ ID NO: 218643 - DNA, 52 bp, Homo sapiens
  chr18:76123894-76123946
  hypo
ctgtgggcccgagcgccgagggtcccatttcgcacacagcatggagtgggtg

SEQ ID NO: 218644 - DNA, 163 bp, Homo sapiens
  chr18:76129257-76129420
  hypo
gtctacatttccctgtatttcgcagtaacacacggcacagaccgcgtgcctttcctccatctgcttaccgagtcggcgcggccacttaccacccatggcagcacattgcaaggtttgtccgtataaaagaaagtgccggcagatcgtgacgtggaggcctcgg

SEQ ID NO: 218645 - DNA, 184 bp, Homo sapiens
  chr18:76129450-76129634
  hypo
ggccaggctttgctgcgatcactaaaacctggttcgaaatgagccactttagccctccgcatggtggcctcctaggcatccaggcagagggaccctccccgacagcgctctgggggcagcccaggaaggctcagtgctgcggtaattcggggcctccaggtccaccttacgctcatccacggcc

SEQ ID NO: 218646 - DNA, 463 bp, Homo sapiens
  chr18:76151088-76151551
  hypo
ccgtccacacagtgcgcaggtcaacactaggagtcggtggcttctgcggcctggcacggtccacggtgctgcgggttccaaaacgccaggcgagccccacggcctgcgggtgcccgggaggtgcagactgaagggcaagaccttgtcagagagagaaagaagcaataacgcatccgatttcacctgctcgcggagagagctacacagcccaccccgacacttttacacgacgaaaggggcttcgcggtccggcaagcctgagctgaaacgcaggtccatcgcttaccctgcagcagttcttcaagcttcggggcttcggtttcttcctccaccccagggggacggctgtgcagggccgtggtgtggcctgagccgggctgcgtttgtggcttccttcccggcacctgctgtgtcctcggggtcttcggtggccgctcccatcgtggacagaggccaacagagg

SEQ ID NO: 218647 - DNA, 134 bp, Homo sapiens
  chr18:76189659-76189793
  hypo
gcactggggtcagggatgctcgtgggacccatgacgcagagaggcaggtccctacccaccgggccgtgggccgctgagcacagagcgtggagccctgcggcggggtcgttcctgggccccgcgtgccatcctgg

SEQ ID NO: 218648 - DNA, 294 bp, Homo sapiens
  chr18:76189872-76190166
  hypo
gctccctgtctgcgggccccttgctttccgcagcagccggcctgtcggtcctcggcgggagcctctcgttccccagccacggggccttcccggggtgcggccgagtcaggcggagaccccctggggtgggtggcgggagcggggccgcagcaacagggcggcgtggagggggagaaacaccttacccagccggcggccccctccagcgtgcagctggaacgggaagctgtctgctcagccgtcagaaggatgcgagaaattacctagctccccgcagaggcctccagcagccct

SEQ ID NO: 218649 - DNA, 370 bp, Homo sapiens
  chr18:76436053-76436423
  hypo
actcatcccctgtgcggtgatgcttctgatcccacagcaatgcctgcttctgcgaggctggtccagggctggaacggagccctgtgccgtgatgcttccgatcccacagcaatgccacgctcctccagagctggagcagattccgatcccacagcaatgccacgctcctccagggctggagcagattctgatcccacagcaaggccgcgcttctccaaggctggagcagattctgatcccaccgcaatgccgcgcttctccaagactggagcacattctgatcccaccgcaatgccgcatttctccaaggctggagcagattccgatcccaccgcaatgccgcatttctccagggctggagcagattcca

SEQ ID NO: 218650 - DNA, 50 bp, Homo sapiens
  chr18:76436455-76436505
  hypo
ggagcagattctgatcccaccgcaatgccgcacttctccaaggctggagc

SEQ ID NO: 218651 - DNA, 165 bp, Homo sapiens
  chr18:76477630-76477795
  hypo
cacagtgggtctccacctcccgagcccatgaccgacaccgcgggtctgcacctcccgagcctatgactgacaccgtgggtctccacctcccaggcccatgaccaacaccgtgggtctctacctcctgagcccatgactgaccccgcagttctccacctcccaacc

SEQ ID NO: 218652 - DNA, 506 bp, Homo sapiens
  chr18:76486293-76486799
  hypo
taataacagggactcaaagccgagtgatggcgcaaagcaggccggtgaagcctcggcgctgggcccggcctggcactgcgcatccttggccttcgggacccgggctcccgcccccgtgcccagcctcacggagcccgcccaggcctgctgtcccccgagctccaggcccactgcccgccagaaccttctggtcttgcctcgcttcccgcctgcacttttctttcccggcctggcagagacatctataccagtgggaaaggcgagccactccggcagcgctgccaggttgcactccagcacctcacactcgcttctcccgggacttaaatttaaactcctcgagcgtcatgtccccatggctgtctggggccatcattgccacctcgtactcctctcttcactgccacaagaccaagagacagatgcgtcccggggtccttccacagcgttcccaggggaggaggagggcgcctggagccctggggaaggcgagcccgagccagcgc

SEQ ID NO: 218653 - DNA, 47 bp, Homo sapiens
  chr18:76486873-76486920
  hypo
accccagtgcacatggagacttccacgcactggtctctccaaggaat

SEQ ID NO: 218654 - DNA, 212 bp, Homo sapiens
  chr18:76552755-76552967
  hypo
gcaaggtggtgtgagagcagcgggtggcgtgagactggcgggtggtgtgagattggcgggtggcttgaggatggcgagtggtgtgaggacagcgggtggcatgtggatggtgcgtggcctgtggacggcgggtggcatgaggacggcaagtggcgtgaagatggtgggtggcctgtggatggtgcatggcctgtggacggtgggtggcatga

SEQ ID NO: 218655 - DNA, 75 bp, Homo sapiens
  chr18:76653367-76653442
  hypo
aaggcagtcacaaaagcctacgcaccacatgactctatctacgggaaacacccagcagccagtcaccgaaggcta

SEQ ID NO: 218656 - DNA, 157 bp, Homo sapiens
  chr18:76685333-76685490
  hypo
ccccacagggttagcaaagacgcaagagggcgtgaagccacgcggtcgcacacctggtaccgcgcacagtgagaaaggagggcaagtgcgctgagacccaggagggagggcagccctcccctgcgctgctgaggctcgtttctttcaatgtgtccct

SEQ ID NO: 218657 - DNA, 298 bp, Homo sapiens
  chr18:76685836-76686134
  hypo
ccagcactcccacccctcgatgtgtgcccaggtcgaaggaaggcttgccacccgaaggcctgcacgggaaagctcacagcagcgttctccaaacagccaaaacgcggaagcaaccccgatgtgcgtgggctggtgaatgcaggcccagcgcggagtgcgcacagcccggaacggcattcagccaagaaaagacccacagccgggaacagcatattcagccaagaaaagaaagggcggcctggggcgctctgcaccgcgggtgagccgtgagaacacggcgctccgggagagaagccag

SEQ ID NO: 218658 - DNA, 90 bp, Homo sapiens
  chr18:76686279-76686369
  hypo
gccatgagaaggttctagaattagatggtggcgatggttgctccacgctgccatgggggcagctgagggaaaggaggtgggatcggggct

SEQ ID NO: 218659 - DNA, 312 bp, Homo sapiens
  chr18:76999756-77000068
  hypo
ttctcaccttgctgttttctcgagagcattgttttgtgagggcggttgatcatcagttaattattacacggaggcgttactgaagaggcatctgaatgtggctgggagagcatggttcctgagggctaagcgttcccaaaggatgagcggagaggcttgctctgcctgcgtccccatcagcggtgaccagcagatcaccacgcctcaggggccccacacccgcggtctcttcctagagctgcagtcccaagcttgcctgcgctctctggaaccctccagagtgttctcagcgcagcccactttggtagcaca

SEQ ID NO: 218660 - DNA, 161 bp, Homo sapiens
  chr18:77050733-77050894
  hypo
gctgttcctattcggctgtcttggctgccccccttccatttcttgtaaggtctaagtaagtttgtgttttgatacatccgctgattatgtatgtgtcttactttgtttaactagaatcttcacaagaaagtttattgctctaggtgcgtggcatatctcag

SEQ ID NO: 218661 - DNA, 188 bp, Homo sapiens
  chr18:77076163-77076351
  hypo
atcaagtgatgacatcggaaacaggattattagagagctcctgactgagtaaagaaaaatctaaatgacaaatggccggtcgtgcaggtggagattgcgttctgtggttgcctgcgccatccctgagagcatccagagaaaacagggaaaaatgtccactgcaaccttccacccgccgcctgaatgtg

SEQ ID NO: 218662 - DNA, 142 bp, Homo sapiens; identical to SEQ ID NO: 205047
  chr18:77160022-77160164
  hypo

SEQ ID NO: 218663 - DNA, 379 bp, Homo sapiens
  chr18:77166684-77167063
  hypo
agagtaatgaacaggtggctcggcgtggcacctcaacgggaaccccccaggagccgcaggcctgcgctcgacaaaaccccctcgtgggtcccccaccgcgccttccttctgtccaccgttggactgcgtccctgtgcttcccccgagacccccagccgcagagccagccacggctccgcgggtcttccgcagcgctccatgcggggcagacgtcagggctggcctggcacggtcacccaggcgtgtggggcgtggggcacagggcgacctgcctgtgtggcctgttgtccagcgggtctgatgcagccggctcaggggctttgcacgggccacggaggggccaccgtgacgcccaggcggagctctcagagggctacag

SEQ ID NO: 218664 - DNA, 358 bp, Homo sapiens
  chr18:77174745-77175103
  hypo
gaaaggagtggttttcttcccgccttgcttctttccaggggtaatgacggtgatcatagcaagtggcctcccagggcacctttccgtgtgctgttgagggtgcaacaggaggcgttgccgggctgcgtctggaggaggccagggcgagagtgcacgttgaaggctgtgcgggttatttataaatagtggttctcaaatggtagcttttaaagatttcatattgaccgacaggaactaaagtctacgtgattgcttcctcattccttcatcgttcggcctcctccacctgggcacctgccacaggccatgtgcgtccatgtccaggtctgtctgtgccgacatctgctctttgggcatc

SEQ ID NO: 218665 - DNA, 254 bp, Homo sapiens; identical to SEQ ID NO: 205048
  chr18:77193428-77193682
  hypo

SEQ ID NO: 218666 - DNA, 340 bp, Homo sapiens
  chr18:77194273-77194613
  hypo
cctgcagccgcgtccctgctggggtgggcctgactcccccgggctgtggtgtggcttcctcaccttcctcacaccttgcgggaaagccacgtggagttaggctgtcgagggaggggtgtaatgaccgcgccagggacgggcagcgtctgcacagagccatgctccctctgcaccccaggtgttgatgtggatcccgggtagccgtgggtgttggcattttcttcgttccacctgttacctcgtcagctataggccccaggccctagatctgctgctttggcagccacagagcagcaagtgtgtccagccccagggctccaggctacgcggcagcacagag

SEQ ID NO: 218667 - DNA, 116 bp, Homo sapiens
  chr18:77194820-77194936
  hypo
gcgctggggtgaggcgttttcgccagcacttgcagatgatgttaatgtgatgtttgtggcctgtgtgcttgatgccaattagtacctccctcgttggtgcttgaagcaaggaaatg

SEQ ID NO: 218668 - DNA, 169 bp, Homo sapiens
  chr18:77194978-77195147
  hypo
gtctccaccctcccaggtgggaaaggtcagacagcgctgcaccacgctccgtcactgcaggcctgcacctccccatccctgcctcggtttttactgaccgaaagcttgttattgctcagtgggaaggatattagataggacaagaaacgaggctgtgaaaggaggagtg

SEQ ID NO: 218669 - DNA, 1761 bp, Homo sapiens
  chr18:77196527-77198288
  hypo
ccgcacccggcgtccgcgtcctcccacgcccgctgtctccgtcctccccatccccatgtgtttcgcagttgggaagtgaagcacgtgagcagaacgcagcaccttctctccaggaagcattcggagcatggactctgggttaggaaagggtgtttgctcctctggataggtgctcgctcttacttgtgggtgctgaggggcgtgagggggtccggcatccgggtacctgtgggcgctgaggggcgtgagggggtccggcatccggggcttctcccatttagggcctttccttcagagggaaggaggccagccccctccagtgagcactgagcgtgccccctgccgtctctgtggggatgtcattgttcccacgccggggagagaccaccccaggccagcccctattcttctggccacattgccatgatcacaccgtccgcaccctgaggccacccccattacggctgccacggcgctaaaaacaccagcatcaaagcaacagggccgtggtttagcctggaagagcggggccctggagccgtctgcgagggggtctgggtggttcaggatggccggcagcccctggtggacgtggtccctgcggggtctggcgggacctcggccatggtgatgggtgcgccccctctgcagggtggggcctgcgggtaaggacagtcccgccccctgtgcgtgtgaggggatagtggagagaggggtctggcgtgggcctcactgctcctgggaaaccaaagatgaagacgcctgcttaggactcaccttgccctggtagaacaagtgactcagacagagcctcccagaggcttctggccaggcagggagtgaccagcagcgcagccagcctcagctcctgcccacacagcccccttgtcaccggctcctcctgcccctgctccagcaccttggccaccagttctcggtgggccggtctggatctgccgatgccgggacctcgccaggccgctggttgcaggggaggctgagggggcgtccgcctgctgtctgcttctcaccagcatttccagtgaggcatgaaagtgatgcgtggcggatgtttccctctggcctcagctttcccccaaatcccagctcacactgagtgtcctgatggtggcacctcgggcagccgccaccctctgccctccaccctctgccctgacggcaggctctgcctgagggggagggtctctctgtacacacagtctcctcaccctggagggcctgctctgctctcaacggagctggaaccaggagttcgcgagtgctctgggtggctgctggcttttctccttgtctcacctcctcatccgcacacagcctctgccctcagcgctgctcacctcggtatgtaggcagccggcatcaggatggtctggggtgagacaggcagtgttcttccccttctctggccagggagggtggagaagcacccgggcacagccattgaggccttttcgtgcaactcattgcctttctgggcgtgaaggtggaggctggtcctccacctgcgtgttctccatctgggggactgtggtcccggaggagacctggagtccggctccccgctccgtccgaggaggagctgagcggcgtgagcagtgcccgccctggtcactctgccttgctttcctcctctctgtttctggttgtgcctccttccttccctcctgctctctttgccgtggactgcagccccctcgccagatgtgttcctcacatgagtcaacccgtccttggcctgcg

SEQ ID NO: 218670 - DNA, 1042 bp, Homo sapiens
  chr18:77199644-77200686
  hypo
gggagagcacacatggttgccgtcgggctgtgtctgttttcccaggagcaagaactctcagaagtgcagtgttgaagcccgagccttccccgtgtcagcttttatgatgaacgaggattcaccatttatttctcccctaaagcaaagcccacgggctctgttttgagcgatggggacagatgctcggtgctgctgggaaggtgttcacggggcagattcgctgtgtcaggagaccaacgtggaatgaggtcggcccagccagtcactgcttaaaaacagtaatgacaatatttgagaaaatgggtggaattttgtggagatttactggcacggggaaggcgtgtggcctctggcaggtctgcgacactgatttctaactacctgttccacagctccactgcctggaaaaactggcaaaaatgtggcctgggtctcctgacaggcctggccattggagtgggggtgtgcagctgagacaggaaatacgaggcgcatgagtgtccccaagcccagatcctcagcctccaaaatcttctattagtaatttcagagctttggcttcttggtgctttgggaaaatttaagatgacgcgtgggctctggcacggccgttgctagtgacctctcctaatagcgcagaagggcctcccaggaggctttcctaggtagagaggggtctgcacgcccactggaacatgctctatcccagcctcagaaaacccacatttggtgcaggtgggacaggaggagtggacacgtcacctggagaccacatgagaagcggccatctgcagcagcaatcaccccgtggggaggcggcgccctggcagctctcatgtggggcctggtccttcctcgctgcctgagcaatgggccctgcttccccgcagacaccgtggtgcccctgggccacacccagcaggtgtccagtgaccgagggtggtgttggccatggcaggtccctgcccgtttctccgaggacctggggctgtgacccagctgggttctcccgggaaggagcggccactgtctgcactgtcca

SEQ ID NO: 218671 - DNA, 1262 bp, Homo sapiens
  chr18:77204185-77205447
  hypo
acatgtggtgtgtgtgtgtgcgtgtgtgtgtgcacgctctgggggggtgtgcacatttcccagtgtggctgtgcgtgtgtgtgtgcccacgtgtgttcacagaacaccaggctttgccccgactcctggctcaggcctgagtctccagccatggcgtccccgttcctcccgttccttctctgcactgcacactgggaaccaggacaagaggtgtgcggcgtcaggctgtgtccttcccccacccaccccgagcccacgctgctctggagggagaccccagcttcccccgcctaccccgagccctcgctgctctggagggagaccccaggcccctcaggccctttcccgcatctgaaggggccagggcagggcgtccggcagatgaagctgccccttaaagccaggtctgggccggtttacagggaagcactgctcacgtacaacctggcagaccacaccagcgccgcacacacaggcacccctgtgggcacccacgtgcccgaccccgcagaccacaccggcactgcacacacaggcacccccgtgggcacacacgtgcccgaccccacagaccacaccggcgctgcacacacaggcacccccgtggccacacacatgcctgcacacgcacacttctggtgcacacgcccacactcacggaggcttctgcacaccacacagccagcaggtgaggaagtggacgctgcgtggctgtctcttggtggcttcacctggaatgtcaccgtggaccccagagcccgaagccccggcaagcacagaaatcacaccggcagcctgtcccacttcgggcaggtgaggcctggctgagaaaagggggaaggagagggaggatgcgggggtgtgtcctggtcctccacccgtttcgggtttggggtgctcccttcgactactggctccatttttgatgtcttttacttttgtttcgatttttcctggtatcttgagtaaagtctccctggagcatcaaattggatttttcttacaagtaccgtgtgctgttgactcatctgctttggtgtgccgtgggtcacgtgggcctgggctgtgggtaaggtgggcctcgttcctgcaggaacacctggctctgcagcagtggctgccgtatcatcctggccaggcccctgtaccgagggtggagccacggggtctctgatgccttccttctcgtgctttggtggagaatgtggctggacgtcctcccatgacagatgcactctcctgcctggttccctggccccggg

SEQ ID NO: 218672 - DNA, 927 bp, Homo sapiens
  chr18:77210976-77211903
  hypo
aactcagaaactccgacattgaacttcggaaaggagagacggacatcgggaggaagaacacacgggtacggctggtgttccgcgttcacgtcccgcaacccagcggccgcacgctgtccctgcaggtggcctccaaccccatcgaatgctgtaagtggacgtccacgcgcccacaggggaggaaaccgtcccgtcacatgcgcttcactgtctcacccgctctcagcttttcgttcgtgtagacttgggactgaacggttcccaccaaacccaccacagtgtgtggccacgaggggtctgagttgatcatggctgagttattgcctgtggcctcccgggggcccctggcgctggctcctctgatggctgagcatggccagggaaagcggtgtgggccggggcttcccctcacgctgcgctgacctttgcgtatttgtgcgatgactgtgatttgagtgaaattggctgagtcttaggaagatattttgatgacttcttcagaacgaggtggagaccatcaggatgaagtgtgcacggcttctcccctagaagtagtggcatccgcaggggtcggcccgcaggtcgtggcggtgcttgctctgggtgggtcggctcacgtgtgacctgctgggtgccacacgtgtgccccaggccgcccactcaggacaggccctcactgcccctctccttctgatgcagcccagcgctcagctcaggagctgcctctggtggagaagcagagcacggacagctatccggtcgtgggcgggaagaagatggtcctgtctggccacaacttcctgcaggactccaaggtcattttcgtggagaaagccccaggtatgctcttcaccaggggccatctgcggcctgggcttcggcgctggtgggaaccggttcccagtcggtggagcaggacccacctgt

SEQ ID NO: 218673 - DNA, 376 bp, Homo sapiens
  chr18:77212145-77212521
  hypo
ctccatctgcagagagtggacgcttcgggggtcagttagcagcagggcaggagggagctcccctccggggccttcccctcccgccagcattcctggggtcggaggcagggatggggtgggtgccgcagacggcgggagctggggtggtctttaatgccacagccgtggtgtgtgtgaggctcttgtgccccaagggcacaggtcacccctgcctccaggtgttgcgctggcccagcctggaggctccggggctgaacttggaagggcagcaggggtgtcctcggagtgatgttcctcctggggccgtcacgcctgtggttctgtgctgcccacgggagactgtcctgcggggattgggctcacagagtggctccca

SEQ ID NO: 218674 - DNA, 458 bp, Homo sapiens
  chr18:77212957-77213415
  hypo
ttaagtgcttcaatcaaaatcggctttagaggtctttgactctaacttggcttcctatagaatcagggcttaattggaaaacatgttttaaattacagagaaaaccaactaagggcagtgaccgggaaggcatttgcattgcccgtgccttctcgggaggaggctaattttgaaataattttcccttcagagctttcggtgtgtgtccacgcgttggcggagaaacacttcgcccacagtgtagggcctcgcttgggccaagactggccagaaccgtggctcccagcttctgcttttcaaagcccagacctgagcagcctccttgctttttcttctgcccagagaggcctgggcaccttggcagagcctccccccgaatgcagtccgcagaggtgccccagctcctgccctagccaagttactgtgctgagttggtgccacggcgccatgggtaaggg

SEQ ID NO: 218675 - DNA, 175 bp, Homo sapiens
  chr18:77215331-77215506
  hypo
tcgtttctgtggccgccgtgactggcaggccagctggggcctggacggccggcgtctccttctccaggtaatcagggcccctctacgtggcctcccggggcccctctggggaggcagcctggcatctcacaggcggccggggctcccgggaagcagagacgggctgtgccagggc

SEQ ID NO: 218676 - DNA, 100 bp, Homo sapiens
  chr18:77235939-77236039
  hypo
tccagacttctgtgaaagagccacagggctcagcatccgacgggcgcacctggggctgggcgagtctggctccagaaggggggtggggccgggagcctga

SEQ ID NO: 218677 - DNA, 88 bp, Homo sapiens
  chr18:77255660-77255748
  hypo
accaagccctgatgttcagccgcgactgcgcgtctgggcagtgtggggcgtgtgtgcgatgcctttgtcatcttgtgtaggcaagccg

SEQ ID NO: 218678 - DNA, 322 bp, Homo sapiens
  chr18:77255784-77256106
  hypo
taggcaggccgtgaacagtactaaggcgttcatgggtgtgtcactgtaacacaggcaagctgtgaaccgtagtaaggtgtccgcaagtgtcactgtaacacaggcaagccgtgaacagtagtaaggcgcccgcgggtgtgtcgctgtgacgcgggcaagccgtgaacagtagtaaggcgtccgcaagtgtcactgtaacgcaggcaagccgtgaacagtagtaaggcgtccgcgggtgtgtcgctgtgacgcgggtaagccgtgaacagtagtaaggcattcgcaagtgtgtcattgtaacgctgtgtttttctggtgtaga

SEQ ID NO: 218679 - DNA, 123 bp, Homo sapiens
  chr18:77270877-77271000
  hypo
ccgccggggcatcctccgccgggacatcctccaccgggggctcctccgccggggcatcctgctccggggcatcgttcgccggtcttgtcgctgcggtggaagtgtcgtgttcccagccaggct

SEQ ID NO: 218680 - DNA, 268 bp, Homo sapiens
  chr18:77271089-77271357
  hypo
gagagtccaccaacggcaattacaggaacctaatggccttcctgccgcaccgctccgtggcacccggctcgctgtgatgaattgctcattatgtgcagtgttggaatagcctccacaagattaataattggataatcaatacagaaattcaatcttggggtgtttttttcactccggggtcaatatgtcctgaagattacaaggcccgactctgcctcccccctccccgctgcttccgcgttgggagtttggccagcacctcgccaca

SEQ ID NO: 218681 - DNA, 139 bp, Homo sapiens
  chr18:77288439-77288578
  hypo
ccctgtcagcaataaccggcatccgttttggaacctgcgtctggggctccagtcgctgctcttgctggcgtccatcgccgcctcggacggccgtgcattttctcgtctcacgcagttcgaggaggaccctagaaagcca

SEQ ID NO: 218682 - DNA, 515 bp, Homo sapiens
  chr18:77307812-77308327
  hypo
gtgtggctgcagctgtgtttggagcatgcaggagaagcccctccagatgcccacgagcccccaccactttggtgcccgtcctgccagccgtgctgcgggcgccctgggctcgctcttgtcaccccatcccccgaaggcctccagggccctctgttggctgctgacccagggccttctctagagcacctgactcgggcacacggaggctgctggaggagtgagagagtgagtggggggaggaattgcaaccaaattcagaatccgcccggccctgaggccgccccttgcctgccacccacccgggtgggggctttatttcgactcaggcacaggcgcacctgccggacccccggtgtctctgcgactccttctccgcactggcctgggcccgggctcccagccctccgctctgtctcgctggggcaaggcgtccctcactggccagttctgacattggtcccgggggagccgccttccacctgctggccctgctggccctgagtgtgactcagccg

SEQ ID NO: 218683 - DNA, 139 bp, Homo sapiens
  chr18:77312927-77313066
  hypo
ggacttgacttggccgtcaggcgtcgcgggagcccctgctgcgggctgagaagagcagccatcctggtcacacccctcggagcagcttctcaaggcttttggagggaggagctttcacagccttaatgccaccgtggga

SEQ ID NO: 218684 - DNA, 66 bp, Homo sapiens
  chr18:77313806-77313872
  hypo
ggctgcactgtgaagaaggacgggacttcagcagcacgcggagcctgaggctaaatgctgcaaaac

SEQ ID NO: 218685 - DNA, 99 bp, Homo sapiens
  chr18:77314021-77314120
  hypo
tgacgttttggcgatgttggtgctggaacttcaaacctcggtgtggaaggaagggacgccgaggcccctggcctgcccgaggtcatgcctccctcttgc

SEQ ID NO: 218686 - DNA, 213 bp, Homo sapiens
  chr18:77315293-77315506
  hypo
agccagagacaggctgcaagcggggctgggggccaccagaccattcctcaaacaccaagggcgcaggaggctggcagtgggagccctgggtgccccgggggcgacttctggacccgctgggctgtttccgcacccggcttccctccctcaagcttgcggccgggtgtggctccctcaacctcagcgccgacctccgtgtctgcgcgctctctc

SEQ ID NO: 218687 - DNA, 89 bp, Homo sapiens
  chr18:77315538-77315627
  hypo
cacggcaccgtcgcctgggtctccgagcagggagagtcgagtgctgactctgccagaaggctggaaacgttaccttaggtggaaaagta

SEQ ID NO: 218688 - DNA, 41 bp, Homo sapiens
  chr18:77315948-77315989
  hypo
tagcggcgcctttcgggatggggccccgacgcatgtgtggg

SEQ ID NO: 218689 - DNA, 61 bp, Homo sapiens
  chr18:77320767-77320828
  hypo
cctgcaggagggagcggaagaggctcgcaggcttgtgcaggggagtcgggaggcgggcaga

SEQ ID NO: 218690 - DNA, 216 bp, Homo sapiens
  chr18:77336014-77336230
  hypo
gttggggaatagctcgggggaagcgctttcagatgaactgcagggaacaggtgaagagtgtggacaccggagcatggggcggtgagaagacacaatacgaggcctgccgtccgaacgcggaccctgcagcccctgcggcgggaagccgtgaacacaaggctgagtttgcgcctctgatttgcgccacgtgatgggacttgccggggcctccctgcc

SEQ ID NO: 218691 - DNA, 88 bp, Homo sapiens
  chr18:77339003-77339091
  hypo
cacacggctccatgtcctgtgcacaggccaggggttcgagtgggcatcagcaatgctcacttcagagcccctccgccacgacgtggcc

SEQ ID NO: 218692 - DNA, 280 bp, Homo sapiens
  chr18:77339121-77339401
  hypo
aaactgcgtctcctgcctccagctgcgttacttggagaagcaggaacctctccatcctcactttccatccgcacatccagggccgcccacgtgcacccacaccgtgcgctcactgtgtggcctgtcgagaacacagtgtcctctgcccctgatttcccaggagagtcgcacgtctgtgatggtggtctcccaggcacgcatggccatggagcacgggaacgtgtgcgcctgctgggagcacatgggaagactgcacgccgggtgctgaggcttcctgtga

SEQ ID NO: 218693 - DNA, 84 bp, Homo sapiens
  chr18:77356569-77356653
  hypo
gtttagcagtgaaactgctccgggggacaccacagggcagatgcctgcgatcacacgtttgtccaaacccacggagtgagtggc

SEQ ID NO: 218694 - DNA, 74 bp, Homo sapiens
  chr18:77356683-77356757
  hypo
gatccggaccatcggatgcgtccgtgcgggttcatcgcccggcacaaatgcacgtctccagcctgggaggttgg

SEQ ID NO: 218695 - DNA, 276 bp, Homo sapiens
  chr18:77358203-77358479
  hypo
cagggtgaaagccacagcaccggccctggtttgggatgacaccgcggctgtgatctcggcagccacaggcttccccgtccgactcggccgagaagcctctcctgccacctctgagctctaggcttggactctggagtggttgctggagtcacttcccaccgtgccgggcaagggctgcaggagggcacagcgtgcgggacgctggcaactcacagctgcctcccagccacaccccccacctcctgcaggctccagggccctttgtctctgagaacg

SEQ ID NO: 218696 - DNA, 59 bp, Homo sapiens
  chr18:77456032-77456091
  hypo
tggtgcacagcgtgccggagttgatggtgagctccgaggtgagccgggcatcagtggcg

SEQ ID NO: 218697 - DNA, 83 bp, Homo sapiens
  chr18:77457661-77457744
  hypo
aattgtggtcacaagcgaggttgccgtgaccaggttggtgacccagccctgcctctcggcctgtacggcgcagtccatggagc

SEQ ID NO: 218698 - DNA, 316 bp, Homo sapiens
  chr18:77463264-77463580
  hypo
cttcttcatgagggtcgtaactaacttagaactagaaaaatgtaactgagcttaagtcatctacctttttttaaagccattaagagtaaatattttactgagaaaataacaggatttaaaggatcgaagtttagcttcctaaggaaagcagactcatttgcatgtcgatcatatgtaagcgagtcggtgttgctcatttcactgtctactaaatatgacttagaatactttcagcttttatgttgtatatgtagatgaaagaaactgtctgaaaatcacccatgcgttataccaggttacccgggaatgttgattt

SEQ ID NO: 218699 - DNA, 221 bp, Homo sapiens
  chr18:77493433-77493654
  hypo
ctgagggttgaggtggggcccgtctcctgtacacccctgcggaaaagcctgctgggccccagagccggcgtccgctgcctctgcagctgcgttacctcgttcctgcctgttctgctgggccccaaagccggcgtccgctgcctctccagctgcgttacctcgtttctgcgtgttctgctgggccccaaagctggcgtccgctgcctctccagctgcgttac

SEQ ID NO: 218700 - DNA, 422 bp, Homo sapiens
  chr18:77497994-77498416
  hypo
cccccggcctcccccgcaggtccccgcctccccccgcccgccctgctcaccgcccccgggagttgccttccccactctctggggtgttctctgtctctgcattttggtggagtacatctcccagaagcttcctgagaaagcgtctgtcctgtccatacgtccgcagtcagcgggctgcgtaaccccaggtggcagcatctccttgaggatttagaagcacggctcccgtcttcagctccggggctgctccgaggccgtccgaggtaacctcggaggctttgtcttgcccgcctgttagacaggatgtggccctccaggtcctgccgacatcctcagtacagacttgtgtcccgaggatttgccctgagaacttggtctccagagccttcttgcatctgctgcggggccgtgggccggtattt

SEQ ID NO: 218701 - DNA, 227 bp, Homo sapiens
  chr18:77509117-77509344
  hypo
gagagtcacagctggcatttcccattctttgccatcctcttgctgccattagaactctgccacggatggcttcctcgcttgattttagaaagaaaagaattgttggaactggttcttgcacctctcgccctccccctcctctccctgcttgccccagggtcccgcctggctctcgtctgccccgtcttcactttcggtcggggcccctgcccctgcccctgctctgc

SEQ ID NO: 218702 - DNA, 130 bp, Homo sapiens
  chr18:77509679-77509809
  hypo
tcccgtccacctgccagtgggttgagctcttccaggggttcgggacacccctcacggcagcaccttcacgtttacgagaactgtctctgtcttgttttgtttcaagttctcaaaacggagtgaggtggag

SEQ ID NO: 218703 - DNA, 120 bp, Homo sapiens
  chr18:77512096-77512216
  hypo
ttcagggctctggggatctcctgggtgtgccccgatcaagtcggctcacgtcacagaaaccaggtgcacctgcagcggctcctaaggaaaacctagtggcactggctggttatgcagagg

SEQ ID NO: 218704 - DNA, 263 bp, Homo sapiens
  chr18:77542642-77542905
  hypo
ccgactctgcagcccggcgactgcttcccaggtgactgtttccagagtcaggtgttggccgtggtcaggttgacctgcctgtttgttttctataagctgtgtgtgttgtgcccgggtgtagatgccctgaggtttcacggccccccagcaagcagccccaggcccggcaccggatgggcccttcatacccattcactgtaacagacaagcagacggatgaggccatcgtggtccctctgaataaacgatgcttcacagaagtc

SEQ ID NO: 218705 - DNA, 270 bp, Homo sapiens
  chr18:77542951-77543221
  hypo
ccctggggtgccgtcggctggtgggtgatggagcggctctgcctggctcctctcggctctggcgcggcaggtcttcctgctttccaagcccgtgtccctggtgccagcacagaactgaactccgcccttgagtcgtgcgggacgagaccccgtgctgcgggcgcagtgccctctgtgggcggcgcgtggtggctgtcctccgtttcccacccggcgtctactgggccttgtccagtatcactgggagctgcaggctcggctagcaggtgg

SEQ ID NO: 218706 - DNA, 155 bp, Homo sapiens
  chr18:77609431-77609586
  hypo
gccctgtgctggggcaggtgcgtccgacctcatccggggcaaggtcgtccgcgtgcaggagccgcatctggacaggccgcacctgccttccctccccgccttgctctgcgtcagcctaggagcctcctgtcctggccgcgggttacaccaagcgc

SEQ ID NO: 218707 - DNA, 495 bp, Homo sapiens
  chr18:77609678-77610173
  hypo
tcggctggaggcagagcggaggctggggccaccggaagccttgttcttgcgtggctgggggctgatgctggctgccggccgccctgggtggcgtgggagcaggagcgcgtggaagacccagcctctctgagagccccccacgtaatcacacagtgagaggtccgctgtggtttagtgggaggaacccgagactccacccaggctgagtgggagggaggcgagaccccacctggccgtgggaggaacccgagaccccacccaggctcagtgggagggaacggagaccccacctggccgtaggaggagtgtcccgcgcacctaaagggctgacagggccgtgtgaaaacccgccggggtcgctggtcctggctctcctgaccttctgcctccccgctaccctcatccatgtacccagcacacacgtgcacacatacgtggataaatggaataaacataaacttcacccagacagccgaagcccctccctctgtctaa

SEQ ID NO: 218708 - DNA, 148 bp, Homo sapiens
  chr18:77616284-77616432
  hypo
ctggaggggtggggcgtcagagccacgatgctccgcagtaataacgcaggtgactctctgtcccttagggtgaaactggatgttcattttccaggtcgaagccgctggtctcagctgtgttttcaccggttccctgaaagagaatacc

SEQ ID NO: 218709 - DNA, 142 bp, Homo sapiens
  chr18:77627461-77627603
  hypo
gaccgtgagcccggcgttgtgtcgtgtctgggggggggatcgtgagcccggcgtgtgtcgtgtctggggggggaccgtgagctcgtcgtgtgtcgtgtctgggagggaccgtgagctcagtgtgtgtcgtgtctgggggggg

SEQ ID NO: 218710 - DNA, 297 bp, Homo sapiens
  chr18:77628037-77628334
  hypo
ccaggtcctgatcgtgcttccaaaaggtgctggagtgtttggctgtcctcggtcgaatatccaggagggaaaattcatttgtgtcacgttagagaataggagaagtttgggctgccccagctacagaagtcaccccaggaacaccagccctaacccttactgtggaccccaaaaccccagatcctctcagggacaaccctgggctccgtggcacccagcccttcacactcctggcacgcacccctaaattgcttgtccagttaagaagcagtcgccctccgcgtggggcctggtgac

SEQ ID NO: 218711 - DNA, 125 bp, Homo sapiens
  chr18:77628470-77628595
  hypo
tgactgaccgaaggtctttttcggaagcgattcagttgtgtgggtgaagagccaagaaaaggtggttctcactcctgtcctaagagaatatttcaaagcatgagaattggcgtgttggtgacgta

SEQ ID NO: 218712 - DNA, 367 bp, Homo sapiens
  chr18:77638243-77638610
  hypo
acatggcagtgtgcagagggcgcctgatgcccacgtggcagtgtgcggagggcacctgatgccacgtggcagtgtgcggagggcgcctgatgcccacgtggcagtgtgcggagggcgcctgatgcccatgtggcagtgtgcggagggcgcctgatgccacgtggcagtgtgcggagggcgcctgatgccacgtggcagtgtgcggagggcgcctgatgcccacgtggcagtgtgcggagggcgcctgatgccacgtggcagtgtgcggagggcgcctgatgccccaaatcttccccaagggcagccctcctcgcagctgtgctgcattcctccccttggcagttccgtaatttattcagcctgctct

SEQ ID NO: 218713 - DNA, 60 bp, Homo sapiens
  chr18:77644881-77644941
  hypo
cagccaagacaccatccctgaaactgtgataatgagagcgtcctgacaccagggctggga

SEQ ID NO: 218714 - DNA, 199 bp, Homo sapiens
  chr18:77675215-77675414
  hypo
taaaagcgcagaccggatgaactgggcctggggagggctgaagctcccggcagcacgggcggggccagccccaccccctccgcatccccccagggcccgccctgtcccctccccatccccccggggccaggccagggcctcagtgcacagactctccggggcgctcattaccgtaactacaaccacacactccatcact

SEQ ID NO: 218715 - DNA, 158 bp, Homo sapiens; identical to SEQ ID NO: 205049
  chr18:77710773-77710931
  hypo

SEQ ID NO: 218716 - DNA, 31 bp, Homo sapiens; identical to SEQ ID NO: 205051
  chr18:77867028-77867059
  hypo

SEQ ID NO: 218717 - DNA, 168 bp, Homo sapiens
  chr18:77939058-77939226
  hypo
cacagacaagccctgcgtacactgaccgtagactggtgtgtgcaccaagcatgccagggaccccaggtcacacgcccctgggggataggagaggtggtgtctgtcccctggtccctcagccaagtcagccgatgtccccagctgggatgtctgcggaagctgtggtcc

SEQ ID NO: 218718 - DNA, 193 bp, Homo sapiens
  chr18:77942205-77942398
  hypo
ttgtatgtgagcattcgcagcggcatcattcacagtggccaggaggtggaaacaaccccgatgtccatcaactgatgaaccaaccgatgaacacagggtgacctgtccatacagtggggtctcagccacagagggagcaaggccgtgaaacctgcagcgggagcaaggcggtgaaacccgcagagggagcaag

SEQ ID NO: 218719 - DNA, 480 bp, Homo sapiens
  chr18:77943672-77944152
  hypo
accctcacacacgcatataccctgacatgctcgcacaccctcacacacgcatgcacccacacaggcaccctctcgcatatactgtcacatatgcttgcacaccctcacacacgcacccacacatgcatacaccctcacgcgggcttgcacaccctcacgcacgcatgcacccacacatgcaccctcacacacgcatataccctcagacatgctcgcacaccctcacacacgcatataccctgacatgctcgcacaccctcacacgcatgcacccacacaggcaccctcacactcgcatatacagtcacatatgcttgcacaccctcacacgcacccacacatgcgtataccctcacgcgggcttgcacaccctcacgcacgcatgcacccacacatgcaccctcacacacgcatataccctcacatatgcttgcacaccctcacgcatgcatgcatcctcacacacatgcacccacacat

SEQ ID NO: 218720 - DNA, 75 bp, Homo sapiens
  chr19:403809-403884
  hypo
ccgtcccaggccctgactggggctcaccaggccgcggtcaggaggccgggctacgctgaaccccaattcccaaaa

SEQ ID NO: 218721 - DNA, 227 bp, Homo sapiens
  chr19:407832-408059
  hypo
ccacctgggccagagccccgtgctcactgtggaacagagactccttgcgcctcgtgtgggggctctcagccagcatggcgaagccgtaggacgtctgggccttgggcaccgagggcagggacatggcaccctgggcctgggggtcggcgtcagtggcctcctcggacagccagtcctcggcactctcgatctggatcacgtgccgggtggctgccttcagcaggctc

SEQ ID NO: 218722 - DNA, 721 bp, Homo sapiens
  chr19:418255-418976
  hypo
ctcctctgggaaggaggcctggacacccagcacgccgcaggggtccacaaagaccaggtgacgcccaccacagccgaccgcagtgtcacggtcatggctgcacgctgccaccctcgggcacatatccacccacgggcagtgacgcgtgtccacacacaacctgcacacaaaggctcacggcggccaaaaggcggaagcagccccagcgtccatcagcggatgaacacacaaaacgtggtcccctcacacagcgggacattatccagccgagaacaggagccaggctctggcccgggccacggcgcaatgcccctggaggacgtcacgctcagtgagagacgccagacacagaaggacacacagcgtggaatcccattgctatgaaatgtccaggacaggcccatccacagagacaggaggcggatgtgtggggttggagctggggaggggacagggagtgacggctggtggggacagggcttctttcggggctgacagaatgttctggaattcgacagagatggttgcacggctcggatgctgaacacccctgagtcgtgccctctagagggaaaggcacggcacgtgaaccgggtctcaattttcaaatcagaaaagaatctggcaaaggaggcaaggccagcgacccacggcggcagccacacacctggctcagggctcccgtgagaccacgccacgcaggtgcagctcactctcggcg

SEQ ID NO: 218723 - DNA, 37 bp, Homo sapiens
  chr19:434176-434213
  hypo
aggaggccgggcagatacacggcgccccattgtgagc

SEQ ID NO: 218724 - DNA, 509 bp, Homo sapiens
  chr19:453563-454072
  hypo
cccggccagaacccagatctttagggatgctgtcgagccatgggattcatccaccgtgtcaactggccacacctgacccctcgccttcaaggaaaagctgcatttggagctgaaccatctccagcaccctctcacaactccccgcacctcccagcttaagggacccgcgatgcaggaaggatgaagtgtcattttgccgaccgtgtcccagtttgcgtccatcccccaccgggcctgggctccacgcacctggagcagagccagacacgcacaggaaactctccctgaagtgctcacgaggtgaggtgcgtgagggcaccgcagagagcaggacggcctgactcacgggacttctgtgtatggacgagcccagcgccaaaatggtacgtgtgggagaacacggggtcggtgtccacagaccttggcacgaactctggcctctccaggagacaagctctgtgtctttctcaacagagacatcttgctcagatctacgccttcgggtgaag

SEQ ID NO: 218725 - DNA, 77 bp, Homo sapiens
  chr19:491540-491617
  hypo
gagcctggagatgcccccgggagcaccaaggcgtcagagcagctgaccagggccccaggcctcgccgcttccccagg

SEQ ID NO: 218726 - DNA, 41 bp, Homo sapiens; identical to SEQ ID NO: 205062
  chr19:507106-507147
  hypo

SEQ ID NO: 218727 - DNA, 81 bp, Homo sapiens
  chr19:536230-536311
  hypo
cttcttgtgcagacgggggacgtgtgtatctccatcctccacccgccggtggacgacccccagagcggggagctgccctca

SEQ ID NO: 218728 - DNA, 202 bp, Homo sapiens
  chr19:541839-542041
  hypo
gtcccccagcttccggactggccgcaccccggaggagccacgggggcgctgctgggaacgtgggcggggggccgtttcctgacactaccagcctgggaggcccaggtgtagcggtccgaggggcccggtcctgcctgtcagctccaggtcctggagccacgtccagcacagagtggacggattcaccgtggccgactctttt

SEQ ID NO: 218729 - DNA, 420 bp, Homo sapiens
  chr19:581413-581833
  hypo
cagtaccggtgcaacggcaccagctccaagggctccgaccaggccatcatcacgctccgcgtgcgcagccacctggccgccctctggcccttcctgggcatcgtggctgaggtgctggtgctggtcaccatcatcttcatctacgagaagcgccggaagcccgaggacgtcctggatggtgagccgtctgccctcctgcccacatgccctgctctcggggtggcccagggccactcctggtccgtccctgccagccccaccgctgacccagagcttggaactgaggagccccaggcagggagttgatgggaccccgaaagaaagtgtgggatggagggtctagccccgggcagctgcggctcagtgggcagcgggaccccgggaggaggaggcggcacctccgccccacagcctcacccg

SEQ ID NO: 218730 - DNA, 220 bp, Homo sapiens
  chr19:581953-582173
  hypo
tgcctgcctcctcgcggagcccttctgccccttgggctgcgtgtgccggggcgaggcctgtgtggggcctgtgatggcagctcctggaaaacgctgtggggcaggggtgaggcccacgaggccatggggacagctcaccatggggagcacacctgcaggtggggagggctgcctttccccacagcactcagaagatgcacgtggccggggctgatgagct

SEQ ID NO: 218731 - DNA, 408 bp, Homo sapiens; identical to SEQ ID NO: 205064
  chr19:603408-603816
  hypo

SEQ ID NO: 218732 - DNA, 173 bp, Homo sapiens; identical to SEQ ID NO: 205065
  chr19:603846-604019
  hypo

SEQ ID NO: 218733 - DNA, 990 bp, Homo sapiens
  chr19:617872-618862
  hypo
gaagggaggggagctcacagggccacccagtgaccagcatcctggccctgcgctcagccccctccacttgaggtccagggaagcccaccctcctgcaggcctcgccccacccctcgccccgcccctccccaaacatcctgggttaggtatcagtacagggggaggaaatgttcccagaagcctcctcgccccacccctgccgccccccacgctgctgtgggagcctcagctccgagggcggctacgaggtcccctcctgccagggccaccaccccgcatcctgagcattcccagctcccgtggccggtagattctgctggaacgacctccacgtgctccagatctaaccacacatcgcggtgccaagaaatgcccagcaggaaggggcagcgcccatgctcggctctccctgtcgggccacaggaggggagctgccaggaccacctacattcggggcacacagcctcagggcctctacacaggccccacagacacagcagatccactctgcccagtccctgcccccagctagacccagccttgccagctgtgccctgctagccagaagacgcccctgggaggcgagcggcacccacgccgtccggagacgcccacctgtagcagtgcagggcggtgagcatcatgtgggaggagtccagcgagtggatgaagttgggcgggaagccgttcttctgcttacgtgtgttgggctttctgaggacggaacaggtgccggtgggggcggcccagggacacccctaactggccgctgtctccaccgtggctgctctccagacccccggccaggccccagcccgggccccccactcaccggctgatgtctccgttgtgggtgtaggtgatgctctgaattccacctcctatttgctaaaaaggggaaggggccggtgagtcccacccgaggcccagcacggtggtggtacattgaggtggtggtacactggggtagtggcacgctaggatggtggc

SEQ ID NO: 218734 - DNA, 620 bp, Homo sapiens
  chr19:619067-619687
  hypo
agcccatgtgggagatgaggcgggcactctcggtcagccagtgctgtgggacacaggccgtctcagggcagggggctcaggccggggatcccgtccacttgcttagggagtcctggccgagcggggacaggacaggacgtacctggatggcccgggtccccgagaacatctcctgtagactcttgaagacctggcgtacgagatagtgagaggcctcccacacgaactcctgcagagggcgggcagcaggtgcaggtcctcaggggctggcccgttcacgccctactcccccctatttcagagccactgaggcccaaggcctagggcctagcaggggggcaggggaatggggcctggcgcccacgcagtcagcaagaaacgcccaagccctaacaggcagccagtggtctgggggagcagccagggctcctgctgggaggctgggtcgggggcacacccgtctgagttttaaatggcagtgaaaccaacgtgttcgcagcgcgacatgcctggcgcacctggggaaagtcgctcagctcccggaggcgcttctcaatctgcaggcgcccgccatagcgcgtgaccccgtacaccaccgtcatcaccgtctgcttcaccac

SEQ ID NO: 218735 - DNA, 63 bp, Homo sapiens
  chr19:623406-623469
  hypo
ccggctcagcccctgcggcggacacgggaccccggctcagcccctaccgcgtgcttgacctcc

SEQ ID NO: 218736 - DNA, 127 bp, Homo sapiens
  chr19:638476-638603
  hypo
gggaagacctgggctcctgctggcgagaaggcggtggacatttcttcagtgtctggtgccgcgccctctgcccagcgtgctccgtggagggtctcattgtcttcctccagacgtctctttactggcc

SEQ ID NO: 218737 - DNA, 128 bp, Homo sapiens
  chr19:640785-640913
  hypo
gagtcggtgtccccgccgggcggggggcactgggaagggggcccgggcccgctggctgccgcctgaatcaccaccatcagggcaggtaatcaccccctgtccttcccaccgctttcatctgggcgcca

SEQ ID NO: 218738 - DNA, 100 bp, Homo sapiens
  chr19:641007-641107
  hypo
ccggggcagaggcctggctccgctgcctgacctggaacagtctctgcctctctccaagcctcggtttccccagctggacggtgatgggggtgagggctag

SEQ ID NO: 218739 - DNA, 298 bp, Homo sapiens; identical to SEQ ID NO: 95427
  chr19:647140-647438
  hypo

SEQ ID NO: 218740 - DNA, 52 bp, Homo sapiens
  chr19:647728-647780
  hypo
ggagccgctgaaccccgtgcttcagcgctgggggagccgctgggccccgtct

SEQ ID NO: 218741 - DNA, 130 bp, Homo sapiens
  chr19:651271-651401
  hypo
agtggggccctgcgacggctcccccaggctctgttctgggcccaaggcctggacagcgtttgacgacacgcgtgtggacagcagtctccagagcacgtgggcctggcaggcacacggtgccccactctgt

SEQ ID NO: 218742 - DNA, 172 bp, Homo sapiens
  chr19:731146-731318
  hypo
gccaaggagaacgcggcggccccgagcccagtccgggccccagccccgagtccagccaaggaggagcgcaagacagaggtggtgatgaattcacagcaggtaagggggtgactggggggagcggatccccaggcacccactcccgctggccccagagcgaggccccagccct

SEQ ID NO: 218743 - DNA, 720 bp, Homo sapiens
  chr19:736072-736792
  hypo
aggcaggtgggttggcccccaggctctgggccccagatccagccgctgtcagggaccaagtctcggtccggggggccgggtggggcgggggcgacaccgacctgctctccgcagcgtctgacggggccgtggttatgggggtggcagctggaccgaggccgaggctccgagcctggggtgggggccccctctgctttgttgccctggtcccacgccggcccacgcttccccgagaagacgggccccacgcatggcggctctaaccgacgcgacctcacggctttcattccaccctaatctcacggctccctcctggggcccgctgggggtggcgctcacgcctgaacatgctcgctgcaaatcttacctgctccagtcctcgggcagtaggactggctgccccgggagaaagtgggtgccccgtccctggaggcaaccaagccaggtccccagcaccgctgcgcttccgagaagcaggggaaggtgggggttgacgctgagtgccacacggtgctcaagtcaggctcgaacccctggtctgccgccttgaatttctccgcctgccagaggggtgggacctcagtacgccatcctggggcccggcacaggacaggagcccaataatgagaaatcgtcgcagtgggcaaaaccactgctatgtgagtgagctggaacagcacagaaagaaggcagagggccgggcgtggtggctcacacctg

SEQ ID NO: 218744 - DNA, 37 bp, Homo sapiens
  chr19:737032-737069
  hypo
acaagagcaagactccgtctcagaaaaggcagcaagg

SEQ ID NO: 218745 - DNA, 90 bp, Homo sapiens
  chr19:748210-748300
  hypo
gagccgcgagccttcgctgaagtgcccttgctataaccccctctgcttctggtgtgtgacgaggcccccgatgttcttgattttcccaga

SEQ ID NO: 218746 - DNA, 94 bp, Homo sapiens
  chr19:758091-758185
  hypo
ggagggtccccagcccggactccggagagccctcagctcagattccatcctcagcccggccccagatgcccgtgcggccgacccagctccagaa

SEQ ID NO: 218747 - DNA, 167 bp, Homo sapiens; identical to SEQ ID NO: 205067
  chr19:813529-813696
  hypo

SEQ ID NO: 218748 - DNA, 119 bp, Homo sapiens; identical to SEQ ID NO: 205068
  chr19:813830-813949
  hypo

SEQ ID NO: 218749 - DNA, 38 bp, Homo sapiens; identical to SEQ ID NO: 205069
  chr19:814391-814429
  hypo

SEQ ID NO: 218750 - DNA, 218 bp, Homo sapiens
  chr19:869002-869220
  hypo
gcaggggcatctgtccacaggcgggggtggagggaatggccggcctcacaccatctgccaggtgggcccagatgtctgtgaacagtgaggtgggaggtgcgggaccacctgagacaggcccagtaaagggggcgggaccccccacacggaggagggttggtctcccaggtgcctggggagcttgaggcttagagacccagtaaaggggacggggccca

SEQ ID NO: 218751 - DNA, 71 bp, Homo sapiens
  chr19:869266-869337
  hypo
gcagggaaggtgcttgtgacgctcccatttgaggctggacagaagcaggtacatggggacttccacaccac

SEQ ID NO: 218752 - DNA, 180 bp, Homo sapiens
  chr19:874508-874688
  hypo
gtgagcctgggcaagctgcttagcctttctgcctcagtccccttacggcaaaacggaaggaggagcagacctgcctgcacaggacccgggtgccgggtgtcggcctgggagcgtctcagcccccaggagtagagagaggtgaaaggatcgcttgagctcaggtggtcaagaccagcctgg

SEQ ID NO: 218753 - DNA, 120 bp, Homo sapiens
  chr19:874808-874928
  hypo
gcgctgagctgggactgcgtcaccgtgctgcaacctggatgacacagtgagaccgtctctaaaagcctgggtgtggtgtaatcccagcctttaggctatatcccagcactttaggaggcc

SEQ ID NO: 218754 - DNA, 125 bp, Homo sapiens
  chr19:883457-883582
  hypo
gggaccaaagcctggcatggtgggcacgtggggcggtagggggagagatgggggagagatgggtgcggtggggactgtcccagtgacccccagctgccagggatgtgagacctgagaaaggctgt

SEQ ID NO: 218755 - DNA, 286 bp, Homo sapiens
  chr19:884311-884597
  hypo
attttgtgccggaggtggggatgacgggcttggctccgtgggtgcggggggcccatcgggcggatagagatgggaatgggggccccagaagaggctgctggagaggtggggtggggtggggggcgtgttctcagcagcctcagctgacccgctgagccttggcttcctctccctgaaccaggttccggaggattccgtgcaccgcccctgcccggtctggcctgtcccctgctgcccgacggccccacccacagacccacgctccacagccgcccacacgcctgca

SEQ ID NO: 218756 - DNA, 754 bp, Homo sapiens
  chr19:885557-886311
  hypo
gaggaaggcgccccgaaccgagggattgggcgcctccagatgctgggaaaggcagaaaatgggttctcccctggagcccccgggagggaccggccctgcccacaccacggtttagcccgtggaggcccgcgcgggtctccacccccaggaccctgagaagcagtgcttcattccaagcctgccagcccacgtgatggcctgcgcccgttcacctgctccgacatgtcccgggccaggaacttgaggtgggtgatggcgggaaacttgtccttgcggttgaggtcggtggtgcagcgcatgaacagggagggcaggatctccgtgtcgatacggcacttctcgctcaccacgctcacgcacaccttgtagaactgcacgggcgacgcgctgctgccgtccgccgtggccaccacgatgttgccgccgccggtgaaggcgatgtcggccagggccacgcggccgcgcagccggcacaggctctcggtggacgtcagcacctgcccgctgggcttcagcagggacacggtgaccaggccgctgaccgtcaccgcgatccagccctccatgggcttgccgccgaacagcgtgagcgacggtgagaacttgactcgggagaacttctccccgaagctggaggcgcccgactgtggagaagggagggagggaggaggggccgctcaggctcatgggggctgccccatgacccccagaaacacgcgcacagaagaaccacgcagaagccaggagtgtgtgc

SEQ ID NO: 218757 - DNA, 328 bp, Homo sapiens
  chr19:898792-899120
  hypo
atgttctgagcagaggcaggcatgggggctgcgtctcccacagagggaacagagggaggcatcgtccggttgccatggaaactgtcacctcggcaactccaggcggggcggcagagacaggtgtgagaggctcaggaccagatggggtgcctggggccggcggcgcctgcacagacgttcactacgggggtgagttctgagactgcgccccgttggaaaagtggagcgcaggggccagtagggggtctcgcctgaggtcccacgtgtggtatgtgggaggccttagagttaaatgcaaaccttccagacactgcgtccccccatctta

SEQ ID NO: 218758 - DNA, 300 bp, Homo sapiens
  chr19:899653-899953
  hypo
aagcagccgctcctcccaggtctccagcgtttcctggggagagcggcccggtggtcagggaactgcgggacctgtgggtggggggccagggaggtccagggcccccaggagcccacagcgctgggctcaaacatgacctctgacccaccacgtgaggctgcttaagtgtctctgaggccaccatgccacctcctgcctgtgccttccgtggaggaaactcctacacaccctgcagtgcccgccttcgttgcccccgccctcctactcagggccctggtgccgctgtctgtatcctgccct

SEQ ID NO: 218759 - DNA, 188 bp, Homo sapiens
  chr19:901066-901254
  hypo
ctctgtccactgaggggccgctgcttgtgtcgggccctgagctgagcgcagggaagcggggaaccggggtgggcccagctgtctcggggtgggggggattgaggtgaaacactcctgcaatcgttggagggttcccaaacgtgttgggcaggtgaatccaggagctcgaaggttccaggggtggggtg

SEQ ID NO: 218760 - DNA, 329 bp, Homo sapiens
  chr19:932112-932441
  hypo
ggcctcccagagtgctgccgggattataggtgtgcgccaccgtggctgcctgcgtgatgcttttcaaggccccaaaattcacgctgtagggacggcttgtgctgttctgggctaattggaaacaaagtgggcgtcacgggtgccccacgctgtgctcatgagcgctctctgcagtctgagctggcggcggccggctcttcctatttccagagagggaaactgaggctgggcggggagtgggtctttccttgggctgggacgagccagcaccttctcccctgactcctgccctctgctcaccccaggaagcccaaatgggaggaggagga

SEQ ID NO: 218761 - DNA, 71 bp, Homo sapiens
  chr19:932471-932542
  hypo
ggaggaggaggaggattacgaggatgaggaggaggaggaggacgaggaggggctgggccccccaggccctg

SEQ ID NO: 218762 - DNA, 383 bp, Homo sapiens
  chr19:938483-938866
  hypo
tggaatttgacccccgggatgcacctgccagagaggacccagcggtgtgtggatggatggcccagggagctgctggtgggacggttttggggaagctcagctgcccctccgtttttctttttgtctggaatgaaagtggttagaccaggccagacctcagtgctgtcctcatatccaggcctccgggcctgacagctgggcgtgtgtgggcactggggcagggacggccaccagcagcctctcaggctcaaggccagacacacctcgctgggcccagccccagagaccgctgggtcctcaccacggtgcctgccaggcagctctcgggagtgaagcgagaccccagcaagaaacgggcatccggtttttggtctttttttggt

SEQ ID NO: 218763 - DNA, 777 bp, Homo sapiens; identical to SEQ ID NO: 205070
  chr19:941804-942581
  hypo

SEQ ID NO: 218764 - DNA, 204 bp, Homo sapiens; identical to SEQ ID NO: 205071
  chr19:942807-943011
  hypo

SEQ ID NO: 218765 - DNA, 197 bp, Homo sapiens
  chr19:944444-944641
  hypo
cacggcctcagccccgttgcttcggtcgatgcccccaaaccttgacccatctcaggggcaccacgctcactgctacaaatgtgggtcttccgggcaagtgagcgtcccccacccaggacccccgaccccggccctgggagggcccgactgccagcctggctgaacctccttcattgtctggttttcgggggtggatt

SEQ ID NO: 218766 - DNA, 77 bp, Homo sapiens
  chr19:944821-944898
  hypo
tgctgcgttgcccaggctgaactcctgagctcttaggggagccgggatgtccctgggtcctgcggtcgctctctgtc

SEQ ID NO: 218767 - DNA, 89 bp, Homo sapiens
  chr19:956638-956727
  hypo
tggccagtctggcgctggccgggttggggcggagacaaagaccaggcagctggacctcgggcagcctcgaccacccagggcagaggtca

SEQ ID NO: 218768 - DNA, 81 bp, Homo sapiens
  chr19:994442-994523
  hypo
tcctcagttctgtgtcgtgttcgggtttttcctctgtgactgggccgtcttggtgtctcgtggcacgcgtcacagtggtgc

SEQ ID NO: 218769 - DNA, 75 bp, Homo sapiens
  chr19:1004700-1004775
  hypo
gcctctgcacggcccccgcccccacagggtgcccaggtctggcccaagctgcgtgtggtaacgctgttggaacac

SEQ ID NO: 218770 - DNA, 279 bp, Homo sapiens
  chr19:1005441-1005720
  hypo
ctctgggccatcttctgcctgctggtgctgtccagctacacggccaacctggctgccgtcatggtcggggacaagaccttcgaggagctgtcggggatccacgaccccaaggtgggcggcctcggggggctgcgggtggccttggggggctagcggtggccccgggctgggctgtgtggggcaggggtggtcagctggacgtggaggacgtccactaggccaactctggtcccaagagacatttattcaattaatttatttatttaaagaaaaatagcc

SEQ ID NO: 218771 - DNA, 335 bp, Homo sapiens
  chr19:1009784-1010119
  hypo
gggactggaccacggccctggctgctgccactgatgttggcgcctgcaccccacgtccctatgcccgaggcgcaagctctgctctcccggggaccccaagcctggcgcacacgcggggagggcggggccatggagaaggcactgcagggagcaccaggcagagccgggctgaggccggccggcactagggcgcgaggccccaccccaagccggcctctcctccacacctccgccttgctcagagacctgcaccatgggaccccactccatcctcaggacggttcactgcagacctaccaagacccctccagaaccttccgcggaaccccaccccc

SEQ ID NO: 218772 - DNA, 143 bp, Homo sapiens
  chr19:1030225-1030368
  hypo
ctggaatggccgggtgcagaaaggtggcagggaatcggtggcaaggagccaggtgcgtgactagaggcggtcagcctcgggggcagctccttcgggagttgctaagaagcaggatgggggccgggcgcggtggctcacacctg

SEQ ID NO: 218773 - DNA, 123 bp, Homo sapiens
  chr19:1032230-1032353
  hypo
ctcaaaaaaaaaaaaaaaaagagtggaaactgaggcccagagagaggccgtgagtttgcccaggaaggcgtgagcttggctgagatcagcatcgggtcttcacggttcctcgctgctcacaga

SEQ ID NO: 218774 - DNA, 113 bp, Homo sapiens
  chr19:1032383-1032496
  hypo
cctccagactcatgaacaagctacagccgggctccgtccccaagatcaaccgctccatgcagaactggcaccaggtgaggggctggtggagcggagcagggatggtgctgggg

SEQ ID NO: 218775 - DNA, 35 bp, Homo sapiens
  chr19:1035214-1035249
  hypo
ccgggagcgtgggtgggacacggtgtctggtgtag

SEQ ID NO: 218776 - DNA, 257 bp, Homo sapiens
  chr19:1047460-1047717
  hypo
tcgcccgtggccttcggcttcggctgcgagagcctggctctgctggaggagcagggcgagggcgcgcagtggcacaacgtgggcacccggcctacggcagacgtcttcagcctggcccaggtctctggccttctgctgctggacgcggcgctctacggcctcgccacctggtacctggaagctgtgtgcccaggtgggccgtagggggcggggctccgggccgggtcgcacctgctttgcgggaggctgagctaggg

SEQ ID NO: 218777 - DNA, 89 bp, Homo sapiens
  chr19:1047747-1047836
  hypo
ggtggcttattcccttggagagaaggcggggcttcttggcacacgcatgcaggtggctgcattggaggggcggggcctgaggcaggtgg

SEQ ID NO: 218778 - DNA, 181 bp, Homo sapiens
  chr19:1048856-1049037
  hypo
gggtgggctaagcaataacccgcgcccctccccgcaggccagtacgggatccctgaaccatggaattttccttttcggaggagctactggtgcggacctcggccccccaagagtccagccccttgccccaccccgctggacccaaagggtgaggcactacgaggcttaatagctggttgtc

SEQ ID NO: 218779 - DNA, 221 bp, Homo sapiens
  chr19:1055085-1055306
  hypo
ttgtctgcaggttctcggcaccagaagttcctgctgaagtggccaaggtcttggccagtggcaactggaccccagagtctccatccccagcctgccagtgtagccggcccggtgcccggcgcctgctgcccgactgcccggctgcagctggtggtccccctccgccccaggcagtgaccggctctggggaagtggttcagaacctgacaggccggaacctg

SEQ ID NO: 218780 - DNA, 120 bp, Homo sapiens
  chr19:1078029-1078149
  hypo
gaggccaagaacaaggtgagggcgggtggaggcagggctggaggtccctggaggaggagatccaatgcttggtgtgacatttactacctccagacctttgtttttgtttttttgtttttt

SEQ ID NO: 218781 - DNA, 525 bp, Homo sapiens
  chr19:1079728-1080253
  hypo
acctgcgtggccgacgcgaagacgcagaagcaggagctggaggataccaaggtgacggcgctgcggcagatccaggaggtcatccggcagagcgaccaaaccatcaagtcggtgcgtggggtgctccggccgcccgggcggggatggtggaccgggcggcctcctcctgacccctccgctctccggtgccgcccgcaggccacgatctcctactaccagatgatgcatatgcagacggcgccgctgcccgtgcacttccagatgctgtgtgagagcagcaagctgtatgacccaggccagcagtacgcctcccacgtgcgccagctgcagcgggaccaggagcccgatgtgcactacgactttgagccccacgtctccgccaacgcctggtaccgccacccagctgccctgtccccggcgcacaaggccctgcctgggagccgggcttccctctgtcgggggcatgaagatgaagctgtcttgccccccatcacctcccctccttttcccggtttcttccactag

SEQ ID NO: 218782 - DNA, 286 bp, Homo sapiens
  chr19:1083028-1083314
  hypo
gggcctcgctgcagtacctgctgcgtcacctacgcaggtgagtcccggcatatggagtggagggcgcggggtcccgggagccgctcagcacctggcccctgcccaccccgcaggatcgtggaggtggagcaggacaacaagatgacccccgggaacctgggcatcgtgttcgggcccacgctgcttcggccacggcccaccgaggccaccgtgtccctctcctccctggtggattatccccatcaggcccgcgtcatcgagactctcatcgtccactacggcctgg

SEQ ID NO: 218783 - DNA, 1061 bp, Homo sapiens
  chr19:1108599-1109660
  hypo
ggcggggcagcccagggcgggcgcctgcctgcgcttcacgtccgcatccatcagccgcagctcctgcagcacccggcgcacgcagccctcggggatcttgatgcctgcgggcagagcgtcggggtcagggccggcgctgggggctcgggccttcccggggcgcccgccgcccactcacccacttgcttcttcctgtccttggtcttcagccgcacgatctgcaggtagctgctgctgctgacgtcggccatgacggcggcgatgcggccccacacgcgcagcagcgcgccgcacagcatgtagtggtgccgcagccgcagcccctgcaggcagtccttaccctcctgcgccagccggcagtgccggttcctgcggacgagacgggtcgtctcggctcaggcgggtcccaggggcccgcaggctccccaggtgccctgagatctcccgcctcctctcagggtctcgggagcccccgatccccgcctgggtcgccgccatctgccggtttccccctggtccccggcccgccctcaccaggcgctgtggctgcagtgcgtcagcgacaaagcgtagccactctcccagggctccttggcctcctccgcggtgacctagggacacagggccgcatgagcctgggcggggtcagggccggcaacccgagcgaaagctgcgcccggcggccgcctacccggtggaacttgcggcggaggctgtccagggcctccagctggctctgccggccgatgttgggcttgtacaccgtgaagaactggccgcggttctgctccgccagcaggcagctgggcttgttaccgcggacctgcggaggggggcgttgaggccgcgccccggtccgccccccgcgggccctcctctgggggggtaaccccgcccgaccccaccttgtaggagaggtagaagccgtcataggggcccgtcagcgccagcgacttggcaaaggcgtcctcccacttcaggccgcggtccacgctgatctgccacggcacggggtgggggggtgtgagtgtggtgggggcggggtgggcagagtgtgaggg

SEQ ID NO: 218784 - DNA, 168 bp, Homo sapiens
  chr19:1112085-1112253
  hypo
catcagttggtcacctggggtctggcctctagcaccccacaaagctttggagagccttcctgggcctgtccctggttctcagccccacccccacctgctcaccagactctccaggcgcttggccacgatggaggcgaaccggcgctccccggccagctccgagatgag

SEQ ID NO: 218785 - DNA, 311 bp, Homo sapiens
  chr19:1117275-1117586
  hypo
ctgcaggcccggccgccctcagccctcgaaggccgcagccgctcaccttgtctcgcgccagctcctctcgggccagctccaccagccggcgcaccttggctgcgatgcacagatacttgaagaagcgctggtgtgccgaccagaactggccccacagggacttgcgcgactccaggccgatccagtcggccgcctgctggaacacgttcagggcctcggcccactgcaatgacacgtcacaaggcgcccctgagctgtggctcctggctcccgacccgggccccggcccacctgccgccagccctgggcaa

SEQ ID NO: 218786 - DNA, 335 bp, Homo sapiens
  chr19:1128101-1128436
  hypo
accatgtgacagagcgagagagtgagactccgtctcaaaaaagaaaaaaataaacaagcaatgggtgagaaacaccaaccctcagggccacgcaggacggcgtctgacttctgcagcacctgaagggcagcaatgctgcaggaactctgagcagctcgggtctggggtgagcctggtgccatgccctgtgccggaggcaggggcgggggcagccacgcccagaggtggggctcgccatggggatgacacacacacacgcgctgcccagtgaaggagatgtatgtacatcatttcatttttttttttttgagacggattcttacactgtcgcccgg

SEQ ID NO: 218787 - DNA, 83 bp, Homo sapiens
  chr19:1156441-1156524
  hypo
ggcggatcctcacacacggctgcttggcagtctgggattcctcaagaggctaacgctggagtcaccacaccaccgagcaattc

SEQ ID NO: 218788 - DNA, 131 bp, Homo sapiens
  chr19:1156628-1156759
  hypo
gtggcgtggcccatccacgtgccagaacacgacacagccatgaacagcagcgaggccgacctaggccacagcgcagacgcaccttgaggacgtcacgctctgtgagagacgccaggcacagatgtgtgtga

SEQ ID NO: 218789 - DNA, 358 bp, Homo sapiens
  chr19:1166850-1167208
  hypo
ctgtcactgcctcacatcagcggcctcaggccacaaggtctccccacctggctccttggggagtgccaagcgttgccagcagccgggctatgctgatcccagacaagtggctcgaccggtcaccactgtccttgagcttaagtccagccttggtgacaaaaatgtcacaaggacctgcatccgagccctgagggcatcaggtcctggaggaggaggaagagtcccttctggcttcgggctgggcttgaggacggcagctccaagaccgcttagagcgagacttcagcgctgactgctggagctacgcaccctgtcctgacaatggccgcacagttaggcgctgctccacgcctggagg

SEQ ID NO: 218790 - DNA, 566 bp, Homo sapiens
  chr19:1169619-1170185
  hypo
ctacgggttgagacaggacagctgcccatcaccccttgatgcaagctggctgcaggctgcctgaccagttcccggggacaccgtgctcaaccctgtggtgacaactggggattccgaaggacagggaggtcttactttctgttaaacacttttattttccctgagatacaatccacaccaggaggggcacctgtccggagcatatgactcaacggtttcaacgtattctaaggcagaccaccacagcttctaattccaaaacattccgctcccccaaaacacagccgtgtccccaacagcagtcactcccccgcctctacagcccctgcaaccacacgcccacttctcttctgtggactggcctgctctggacacgtgaccacacgtctaccccccatctgtggactgccctgctctgcacacgtcacatgaacggagtcacgtgccgtggccttttgcgtctggcgtctctccgcaagcacgtctccgcagagcatccatgccgggcgcacagacgacagatctaatctccgcctcctcacggggcccaggaggcccagggcgag

SEQ ID NO: 218791 - DNA, 33 bp, Homo sapiens
  chr19:1170230-1170263
  hypo
cccaggtttgccttcgcccgcagggctgagccc

SEQ ID NO: 218792 - DNA, 103 bp, Homo sapiens
  chr19:1170965-1171068
  hypo
aaatacacacacacaacatacgaggacaggcacacaggcacgggcaacacacaaaatacagacacacataaccgactcatgaacatgggtacacacaggcaca

SEQ ID NO: 218793 - DNA, 442 bp, Homo sapiens
  chr19:1171422-1171864
  hypo
gcagagtccccagggcagcgctggcgtcatggggggctgcctccacaccgcctccaggagtgtttacagctgtggattacatgataccgcccccttcccagagctgatcccaccccccagcatgggggccccctgggagggggcctctgggagccggactggttctgtcgacacagtcgcctctttgttcggggcagagctcactctggcggtgttggcgtttccgcatgggccctgccggaggggcatccgtgactccgctggagccgggttgggccaagcccaagctggtcacacccctcacacccctggggttgggggaggccttaggcagcaagtgggtggggggtctaggggtggctggcgcaacctctctccacctcggtttccccgccaggtgagagggcagtgactgcccatggtcacgcggctggagaacatg

SEQ ID NO: 218794 - DNA, 272 bp, Homo sapiens; identical to SEQ ID NO: 205072
  chr19:1173129-1173401
  hypo

SEQ ID NO: 218795 - DNA, 267 bp, Homo sapiens
  chr19:1178810-1179077
  hypo
ggaaattcttgattttcctcggcccagtccatggcgtcactgaagtggatgttcaatgagaaaataataaggatgaatgctgcagttggagttcaagagaggaggcatttttgacgccacagatgggcagagatggggtgagggccctggccggcaccagctctcctggctcagactttggaagccgccccccaggggagacgctcaactggtcagaggtgtggatagccccgtcccccagtagtcccaccccgcagagagctctca

SEQ ID NO: 218796 - DNA, 103 bp, Homo sapiens
  chr19:1179315-1179418
  hypo
ttaaaattcaactgtaggtacgtgacgagtactttttgttgctgctgctgttgttgttcttgttgtttttgagacggagtctcgctccgttgacaagaaggct

SEQ ID NO: 218797 - DNA, 76 bp, Homo sapiens
  chr19:1213519-1213595
  hypo
accgcgtggccttttgcgtccggcttgtctcacggagtgtgctgtcctcaaggggcatccgcgccgtggcctgggt

SEQ ID NO: 218798 - DNA, 217 bp, Homo sapiens
  chr19:1226470-1226687
  hypo
aggccagtcacaatggacagcgccggggcctccccaaggccgtgtgtatgaacggcacagaggcggcgcagctgagcaccaaatccagggcggagggccgggcccccaaccctgcccgcaaggcctgctccgccagcagcaagatccgccggctgtcggcctgcaagcagcagtgaggctggccgcctgcaggtggggcgcggcggggcccgggtgg

SEQ ID NO: 218799 - DNA, 328 bp, Homo sapiens
  chr19:1226828-1227156
  hypo
gtgccgtctcggggcctggtgtctggccagcgtgctggtcatggaggcctacgtgtggcggggctctgggggggcgtgccgtcctcacagccacctctcagagtgggtgcattccgaggaccctgccctgggcctggcgccccctccccatgcccgcgccgcttccaggaaaggcttatgctgggctcagcccagaggcttttgagcaccagtgggtggtgggtggtggggaggggccgcggcctccatggctctgccggggtgccgcaggctctgagccagctgccaagtatggctgaggctgagtcgtgccggacgctgccctgtc

SEQ ID NO: 218800 - DNA, 232 bp, Homo sapiens
  chr19:1227659-1227891
  hypo
tcccggagaggtggccgccatgcttctgtgccgaccacgccccaggacctccggagcgccctgcagggccgggcagggggacagcagggaccgggcgcagccctcccccctcggccgcccggcagtgcacgcggcttgttgacttcgcagccccgggcggagccttcccgggcgggcgtgggaggagggaggcggcctccatgcactttatgtggagactactggccccgcc

SEQ ID NO: 218801 - DNA, 360 bp, Homo sapiens
  chr19:1229032-1229392
  hypo
cgcctccgtcgcccggcgcgtgcgcgaagggcccgcggtccccgcgcattcgcgtcggggcgtcgcgcccccacgtctctcccgccgccgaggccccgtgcggcgccggagaagctgccagagagatgggcccaggacgcgggacttaggccgggctgtggtcgggggacgtgggggcggcggcgaccaacgcgggagtcgccacgacgggctcggcgaggcgcggcggaaagagtctctcgtcgaggccagccgccagcttgtccagcaccgacccggatggtaggacgcacaggcccgagccggggcaccccccgccgcccggctcctcctcgatgacggggatggcggggtcgtcgc

SEQ ID NO: 218802 - DNA, 170 bp, Homo sapiens
  chr19:1234735-1234905
  hypo
gtgtacctgcgacagcatctggccatcagagcccgcccacctcccatgcccgatgccccagctgccgtgctctgccatccaccctgccggcctgggcaggggcaggcgaaaggggggcaactggccaaggccgccccaccccacggtcccagtccaggagcctctgcctt

SEQ ID NO: 218803 - DNA, 104 bp, Homo sapiens
  chr19:1235389-1235493
  hypo
ctggtgggggagacagacagacacagacggtcaggcagcccgagggggcggcgggtggccgaggggcggatggacaggcgagcgcacagccaggctggccagca

SEQ ID NO: 218804 - DNA, 480 bp, Homo sapiens
  chr19:1255221-1255701
  hypo
ggccctgcccggggggccgcgggtcaccaggcgcctgcatactggggacgtgtcccgctcccgccccgtggtccctcgtgcacatcagcccacatgtccacgccattgcctgagctcatgagctcacacccgtggacgcccgtcctggacatgcgggactgtgcccgtgccgggcactcacggccacctctgcccgcaggcacgctacaccccaactgccaagacagcagcgggcggccgcggcgtgacatcggcaccatcctgcagatcctgaacgacctcctgagcgccacccggcactaccagggcatgcccccttcgctggcccagctccgctgccacgcccagtgctccccggcctcaccggcccccgacctggcccccagaactacctcctgcgagaagctcacggctgccccctcagcctccctgctgcagggccagagccagatccgcatgtgcaagcccccgggtgagtgg

SEQ ID NO: 218805 - DNA, 51 bp, Homo sapiens
  chr19:1296939-1296990
  hypo
ctacgaaaggccaacggcaggtggggaacacagcagcgccagccggagtcc

SEQ ID NO: 218806 - DNA, 218 bp, Homo sapiens
  chr19:1297597-1297815
  hypo
gacccacccctgttcgattgtccacacgtgtgcacaccccagcggccccggcttcaggcgtccttttcctcctctcttgatccttgcagacgcccccactgcactccaggatgcttctgggggcccgaaagcaggggcggtgatgctggaattttgggcgtaagaaccagttggaaataatctttcccagccaggcgtggcggtggctcacgcctgta

SEQ ID NO: 218807 - DNA, 64 bp, Homo sapiens
  chr19:1308081-1308145
  hypo
aaaccaccgccagcggctccccgtctatttgtctgtgcacattcctgggctcagacggtggctt

SEQ ID NO: 218808 - DNA, 414 bp, Homo sapiens
  chr19:1312701-1313115
  hypo
cgtgtcatcagcaacggccaaatgccgttcccagcactggatgggggtggagggcctgaggggtgtgggtgggggggagctccaggcgcccctgccccccgcccagccgtcagtcaggctggccgggcccccttcaagtcgtcacggcccagcagcggccacgggagggattattccggcctgtccagggtggactgaagtggaaccaaggctgacgagcggaacgcgcccccatggacccagcccgcccgcctttgtccgccgccagccccccacccgcctgccgtcacagaccccgcctcccgtgcctgagccccatttctctgggggccgggctgcctcgcgtggcccccgcctgactaaagccatgcagcttctcggccggctccatccgctggctgcctcagtttcccc

SEQ ID NO: 218809 - DNA, 268 bp, Homo sapiens
  chr19:1360025-1360293
  hypo
gtatgaaactagccgtcagaatgagacaagcgagcttctaaagcgatgccgtgaccgcagtgcctgtgcagtgaacgtaaccggcattgtgtatgttcggtccttgcagcctcacagaatgaggttcctgcggcacccctggaagaactggcctacagacggtcgcttcgcgtggctctggacgttctgagcgagggctcgatttggagtcaagaaagctctgcagggacaggtagagctgaccggtctctgcgagggaagcccatgg

SEQ ID NO: 218810 - DNA, 730 bp, Homo sapiens
  chr19:1370778-1371508
  hypo
gctcgcgggccgcccgggaccgggccaaccagaagctggtggagtacattgtgaaggccaagggcgcggagagccacctgcgggccatcctaaagagcaggaagccatctcgctggctgcagaccttcctgagctccagccagtacgtgacctgtgtggagacctacctggaggatgaggggcagctggacctggtggtgaagtacctgcagggcgtctaccaggaggtgggggccaaggtgctccagcgcaccaacggcgaccggatccggttcattctggacgtgcttctgcccgaggtgagccgcggaccggcgtgtcacgtgggcagggaggggcctgcgctgggattttgcaactccgcacgaggaggctgccacggtcctcgcccctgctccctggccgttcggcggccaacggagcgtggaggcctcctgtgtttacatcctgtcagtgctgggaaatgcgagtgcgtgcgcttgaccctgtgcggagacggagccgcttacttgacccctgtgcagagatggagctgcttagaagctgtcagcaccagggggtgcgaactccctccctactgcgggcgcacagatgcttcccagcctcggtgggtcagtcctgggaaacccactgcgagttggaaattcccaagtcagaatcgcatttagtacccagataaacccactgtaagttgaaaaactgtaagtggataatgcgcctcatactctga

SEQ ID NO: 218811 - DNA, 81 bp, Homo sapiens
  chr19:1403906-1403987
  hypo
ggtccctggagtcctccgatccacagagacagaacgtaggatggcggggggggggggtgccaggggctggggaggggacag

SEQ ID NO: 218812 - DNA, 223 bp, Homo sapiens
  chr19:1424764-1424987
  hypo
ctcttcccatgtccatctttgttctgtgaggtcttgggcagctgtctgccgggcacttccatctggggaggggctggtgccgcctgggccccgcctcgggaggacggtgtgctttgcggtgtcacgctccacctagccggggaggcctggagagcccggcgcactcctgcgcctagaggaggagacccgccccgttagccgggggccgcgcccaccccagacc

SEQ ID NO: 218813 - DNA, 197 bp, Homo sapiens
  chr19:1432593-1432790
  hypo
cagcacctctggctttcccaccgcctccgtctcaggctgccccggacatgagcaagcccccgacagctcagccagacttcccctatggtcagtatggtaagtggtctcctgccatgccgcgtccccgctggccccaggaccctgggcacggcctgccttcttctgcttcctcccctgctggacgctccccagccttt

SEQ ID NO: 218814 - DNA, 133 bp, Homo sapiens; identical to SEQ ID NO: 205075
  chr19:1449908-1450041
  hypo

SEQ ID NO: 218815 - DNA, 264 bp, Homo sapiens; identical to SEQ ID NO: 205080
  chr19:1491116-1491380
  hypo

SEQ ID NO: 218816 - DNA, 154 bp, Homo sapiens
  chr19:1495400-1495554
  hypo
ggctgcccacgcggggggttctgggggctccctggcagcccctgaccctgctgcaccctccctgcagaatcaaagctatcgagagcccaagcaaggacgacgacactgtgtggctcacctactgggtggtgtacgccctgtttgggctggccga

SEQ ID NO: 218817 - DNA, 58 bp, Homo sapiens
  chr19:1496674-1496732
  hypo
gtaaccgctgtggggagataggagctgtgtgtgtgtgtgtgtgcgcgcgcgcgcgcgt

SEQ ID NO: 218818 - DNA, 183 bp, Homo sapiens; identical to SEQ ID NO: 205082
  chr19:1546217-1546400
  hypo

SEQ ID NO: 218819 - DNA, 33 bp, Homo sapiens
  chr19:1555127-1555160
  hypo
tgcggcctgagaccggccggcgagaaaagtcaa

SEQ ID NO: 218820 - DNA, 199 bp, Homo sapiens
  chr19:1578646-1578845
  hypo
gcacccccccaggaccagccctggcccgtgccacccctcccttcacaatccacgcagagaatgaccggctgccgctggccatcgccagcgtccgccaccctcccagatggcccccctgccacctctactgggaccaagggaggggcctgacccttcagtccccagacttggccctgagcctccccggggctcagctgtg

SEQ ID NO: 218821 - DNA, 68 bp, Homo sapiens
  chr19:1579338-1579406
  hypo
aagaatccacaccctcgtctcaacccaccaccagggatggggggcctcctcctcggggcctacaagct

SEQ ID NO: 218822 - DNA, 170 bp, Homo sapiens
  chr19:1612624-1612794
  hypo
agcagtgtgggtacacggctggtgttggtgtgggcagcagtgcaggtacacggctggtgttggtgtgggcagcagtgcgggtacacggctggtgtgggtgtgggcagcagtgcgggtacacggcttacgttggtggacacagcagtgtgggtacacggctggtgttggtg

SEQ ID NO: 218823 - DNA, 262 bp, Homo sapiens
  chr19:1617230-1617492
  hypo
tcagcaggttggcaggaaagcgtgatgttggaatgacctacagccccacgcccgggccagggccaacggcacactcacaatgggaccccagccgctcacaccacacatgtaccccacacacaacataagccagcaaaccagcgtgtaaagaacacgctagtgggacgccgtgttcatgaagctcaagaacaataattgcaaaacatgtggcttaagggtacacagtgccccaaatgaatgcggccactctgcattcagcagg

SEQ ID NO: 218824 - DNA, 280 bp, Homo sapiens; identical to SEQ ID NO: 205085
  chr19:1748599-1748879
  hypo

SEQ ID NO: 218825 - DNA, 59 bp, Homo sapiens; identical to SEQ ID NO: 205086
  chr19:1748939-1748998
  hypo

SEQ ID NO: 218826 - DNA, 227 bp, Homo sapiens; identical to SEQ ID NO: 205087
  chr19:1754950-1755177
  hypo

SEQ ID NO: 218827 - DNA, 287 bp, Homo sapiens; identical to SEQ ID NO: 205088
  chr19:1755227-1755514
  hypo

SEQ ID NO: 218828 - DNA, 342 bp, Homo sapiens
  chr19:1785337-1785679
  hypo
cttgcaccaggacaccagcccctggggtccaggaagggcacctggcaatgcccccaaagcaggggtccccaggggaggaggcctccataggccatgtccaaggccccggggaggtgaggaccttgcccacctccatggtgatggacagcaggcaagacagggccaccacgaccgcaaaggactggtggtcgctgaagctggcgggtcccgccgtgtcgcggctgatccacagtgtcatgaagaagttgaccagagaggtggtcacaccatgggcgatggcttggacgaagacccagtagttgaagagctcgtccttctgccccaccacgtacagctccggct

SEQ ID NO: 218829 - DNA, 439 bp, Homo sapiens
  chr19:1815903-1816342
  hypo
gggctgggctgggcgttctctggccgccagctcatcccgctgctctgggctgcctcggccaggtggacgggttaccggagatttattgcactgttttggaagaggcatggggctaaggaccagcgggacggcaggagaggcgggtgggaggcgggcaggcgtcatcgcttggtcttggcgtcttctcgaaccttccagatcaccaggtgcatgcaggcgccggcgtcctcgctggagctgtgcccatccactgcggggcagatgcggtgagcacccggcccctgcgcagggacggccccagggcaggcaccggcactcaccattgtcctggatgatctgtctgaggtagtcggccatgaggttccgcagggaccgcttgtaggggaggcccaggcggtgggggaagagcacagacgtgtccaccacggtgctgtggatg

SEQ ID NO: 218830 - DNA, 363 bp, Homo sapiens
  chr19:1818538-1818901
  hypo
gcctgaagaggacacgaggtactcggtgccacagcggcagcaggtcctgcaggaagctgtgggtggggacccaggtggaagctgaggctcacgctggggcccgcatgcccggccttgcccacatcccgcacctgcccacctaggccgtcgcaggccagcgactcacagtccttgggcctcttctcctcagctgtgaagatgattgcgcccccgggccgctctgggtgcgggaaggggtagccgttctccttgagctggtcctgggtgagcaggtactccctgaggcggctgtacagggcagcccctgtggacaggcacagtggtcagcccctgcctgggatggcccacggggcggtagacacc

SEQ ID NO: 218831 - DNA, 175 bp, Homo sapiens
  chr19:1822372-1822547
  hypo
ccaggctggcacgcgcctcttgcagtggagggtttgctcttcaggaacggacagagaacctccagactccctcggctgcacgctgggggcgagcccaggcagccacaggagtcctccaagccagatgagcccgccctgcggcactgccagcacttgggacgccagactcccttca

SEQ ID NO: 218832 - DNA, 300 bp, Homo sapiens
  chr19:1827348-1827648
  hypo
ggcagctggagggggcggggtgggcctctgccggccgccggtcgggagtccccgcttgtggggctcggccgccgcgctggccggtcaggcctccctttccctgaggtggccacaggagtggccgaagatggcttcttcttggtcccttccggccgctctgccttgcgccgggggctgctggcctgcgggcccttcttgtccgcacggggcttctccacaggccgccctcggcccttgtccttggtcttgtccttcccctgggccccgtctttgcagctgggggcaggtggggccccggtt

SEQ ID NO: 218833 - DNA, 57 bp, Homo sapiens
  chr19:1882112-1882169
  hypo
cacccccgaaacgcccggctccagcaccagggaaaccccatgcgccaggactcggtc

SEQ ID NO: 218834 - DNA, 205 bp, Homo sapiens
  chr19:1907661-1907866
  hypo
tgcctggagctatgccggttcccagcccaggctggcggccgtgttctgctgggacctgggacctgggctgcctgccctcctgaggggtcccagtggtcggtcgcctgccttctgggtgggtgtggtagagggagggtcaggtggccccctgctgttggggggcagtcgctgtgggagtgagtcgtccccccgggccatagcaggt

SEQ ID NO: 218835 - DNA, 300 bp, Homo sapiens
  chr19:1912446-1912746
  hypo
gcggcctggggcaacccttcctggtgcccgtgcccgcccggccgcctctgaccaggggccagttcgaggaggcccgggcccactggcccacgtccttccacgaggacaagcaggtgaccagcgccctggctgggcggctcttctccacgcaggagcgcgccgccatgcagagccacatggagcgggcggtgtgggcggcccggcgggcagcagcgcggggcttgcgggccgtgggggccgtggtagtggacccggcctcggaccgcgtgctggccaccggccacgactgcagctgcgcgg

SEQ ID NO: 218836 - DNA, 609 bp, Homo sapiens
  chr19:1913964-1914573
  hypo
accactgctggccaggagcccgccaggcctgcagtgggggagtccgtgcctgggggtgggactgaggtgggctggagggtcccggatggggccagagccacagcgtggagtgaggaggtgggagccgcagaggcgtgcccagttgagtggtagaggcagcatttgggcctccttcatgctcaggtgctcagctccttcccctgaggggcaggaagtcagggaggagggagtgagaggtgggaggtggcaggcgggcggaggggaagatgtcctgtcccaagagccaggggtgccccaccccacggtgacatgttcctgaacgggttgtgagtggagggctcagttcctgggaactgcctcacctggactgtgggcgggaggcagctcctggccccgtgcccgccccctcgggcctgttcccctgccaggatctgggatggttcacaccccactggtctgtgatgcccagtgggcagcaggcatgcccctgctgggctggcccacctcccgatggcaggtccgcccccaggatcacggaagcagctagatccactcagtcgtgggtggatgtcaggccaggtggggctgctctggtgggtgagctcatgg

SEQ ID NO: 218837 - DNA, 116 bp, Homo sapiens
  chr19:1914603-1914719
  hypo
gcggatgcgatggggtcttaggccctgcagcgttcaccttgtggcgcccaccccttgtgggctgaagccgggatttgggggacgcaggggcctaggacagcggggaaggggcatcc

SEQ ID NO: 218838 - DNA, 88 bp, Homo sapiens
  chr19:1918818-1918906
  hypo
gttcctctctaggcgcgtctgggagaagccagggctgtggtaaccgtcgtgttttctgtccctccccagagccgacagctcctttaat

SEQ ID NO: 218839 - DNA, 92 bp, Homo sapiens
  chr19:1920122-1920214
  hypo
tttaaataggctttttattttggaataatttgtaattctcagttgcagagagtgactgttctcgcccacgtccccgacgtgtctcccttgtc

SEQ ID NO: 218840 - DNA, 720 bp, Homo sapiens
  chr19:1920951-1921671
  hypo
ctcccgcaggtcacgggagaagctgagcatgcggtccctgcccgaggtggacagaaggtgaacgctcttgagaaagaaacccagcgggtcttaggagagcccggccccccttgtaatgagagaaatcaaaccacagcgcacagcgacttcatgtccaccgttggcttagtgaggccccacgctcagtgcgctgctgtggggcgagaggggacagccccgctctccctgtcctgggcggcttcaccagcgccacctccccacacactctgtgcactgctgtggggcaagaggcgacagccccgctctccctgccccgggcagcttcaccagcgtcacctccccaggggtgacgcatgcccgaggccatgagccacggcagcatctgtggtggcagaggactggaaactccagagaaatgacccccagcggggcctagctgtgtagatggtgagggtggccacatggcggcagccaggtactgaggacacggtgcagcaggggcccccggtgggccccgccaggaatcggacatcagcgggcgccgcagcctctaagcggagcatgcagcccactgacagtgtgctgggtgcctccctagacctgacacttgcatgcgggggcgtgcgatgctggccagtgggaagctgcgggggcggcggcaggagtcctcaaatgcctttgccgcttttcataaatctaaaattacatccaaacagaggt

SEQ ID NO: 218841 - DNA, 480 bp, Homo sapiens
  chr19:1961005-1961485
  hypo
gtgcggcggggcgtgggcagaggagaggcttcgggctccggtttcctctcctgtggatgcgtcgcccccgcatggtggtcctctgcggaagtccccctgtccgtcccgttggcagccgcagtggaaagacggatggacgggctgtgacagggacagcccagtgtgaccccagccctggccgtcgcggttgtggcattctcgctgtcagggggctgttcccgtggctctcatggctgtggaggggcgtggagggggcggtccccatggccagaacctggccgtggcgggtggaggacttgaggccggctcagtggtcagcgctgctgcttgttcccctacacagaggcgttgggtggagctgcctcaggtatccctcctggctggggtgtgtgcgtcaccctgagtctccagcccatgctgaggagcctcgcaggcagggcccagcagcctatactccaggccattgctgtccgtttctcc

SEQ ID NO: 218842 - DNA, 318 bp, Homo sapiens
  chr19:1977028-1977346
  hypo
tgcccggccacagaggcctcattctgcagcgtatgctactcgggcaaaggcagctgactgcagacccaacacggtgacccagctggatggtgcctgagagacggggctgccccacatggtgccctgtcatgccgcgggacaggtcgcccagcagatggtagctatggccccagtgccatcctgggctggagacacatgggtgccagacacgttcatgcctgtcgtctggcccagctgccgtggggagccctccagggccgtgtgcctgcagggaccggcctgttcacctctaggctcacccctcgggtgctgagtcac

SEQ ID NO: 218843 - DNA, 246 bp, Homo sapiens
  chr19:1978009-1978255
  hypo
gacctccccagtgccgcttctgtcctgggctagggaggtgggggggcgggggaggaggagtggcagacactgaggcggtgaccacacgggcagggtgcaggtgtcgggatgacttggcaggccatggtgcagtgctctggcaggctgggcccaggccctgctgctgggcagtggtgtcatttggagggtggtccttcagggaccccctcctgcctcctgcctcgggggtgggctggggaggtcggg

SEQ ID NO: 218844 - DNA, 119 bp, Homo sapiens; identical to SEQ ID NO: 205097
  chr19:1979018-1979137
  hypo

SEQ ID NO: 218845 - DNA, 329 bp, Homo sapiens
  chr19:1985877-1986206
  hypo
atccggcaggggccgtccccacactgaatcctgcgtgcgcagaactcaagccggcatccaggcagtgggaacgccccgcaggctgggcttgggtggcctcgggcacgtgacaggtggggcccgtgtcctgataaacggacaggaacaaaaggaacgcaaggtctgggacccacggctctgggagcagcgccacccaggctggctcctagcagagaaatgggaatcgcaaatgcattgcaatgtgcagtgaagagacgcgagggacgcccgcggcgcaccgccggcagacgacgtgggcaggcgccctgagctgcgggtccgtgggccct

SEQ ID NO: 218846 - DNA, 268 bp, Homo sapiens
  chr19:1999991-2000259
  hypo
aaaaaagaaacagagtgggcggccgcatgaagcagggactggagcgatgcggccacaggccaaggacgtctggagtccccagaagctgggtggggcaggaggatcctcccttgagcctccagagggagcgccgccctcggacgccttgatccatggtcctgggctccgggactggcagaggatgaacccactgagtttgacccccccagtgtgtgggcattgggactgccgcccgcccgtctgccctcctggccgcgtcctcaagggc

SEQ ID NO: 218847 - DNA, 374 bp, Homo sapiens
  chr19:2000538-2000912
  hypo
ggcaggggctcctccaacaccgagcccctccctggagacacctgcatgggccttcaggattcgacccctgggcaccgctactgcctcctctgcccaccgtgagtccccagccccactcccggctgttccccccttcatgtatctgtaaccccttccccttccaaacaaatcgagaacacacggccacacaaaaacacatccacaattgctcacagcagcacgattcccaactccgaacgggggaaacaaccagcgtccattgacagacacggtgcgaccacccacgcactggaacacgacccagccacaaacaggaacgaggctctgatgcaggacccggtgcagatgcgccttgaagacgtcgtgctctatga

SEQ ID NO: 218848 - DNA, 90 bp, Homo sapiens
  chr19:2038525-2038615
  hypo
ccgaggccgcagccgttttcctgaaggtggcagaccaaaaacactgccctgggggtgaggattcggccagaccccggggtctgggctcag

SEQ ID NO: 218849 - DNA, 214 bp, Homo sapiens
  chr19:2046071-2046285
  hypo
acacgggtcttcccggctgtaggacggacagccggaatgccacacactgtttccacccccgctcaacaccgatcccaaggcgctgggttccccagggcgcggcgcgggcccaccttgacggcgtactcctggctggtgatcaggttgatgcaggtctgcactcgggcatgagcgccctcccccagcacatcttcctgcagctggtagacgtctg

SEQ ID NO: 218850 - DNA, 40 bp, Homo sapiens
  chr19:2088265-2088305
  hypo
tgcgagtggcaaggccggggatctaactgttcttgtttgc

SEQ ID NO: 218851 - DNA, 49 bp, Homo sapiens
  chr19:2120004-2120053
  hypo
ggctggggaccctttcgggatcccagaagtcaggcgccttcctgagccg

SEQ ID NO: 218852 - DNA, 31 bp, Homo sapiens
  chr19:2136920-2136951
  hypo
gcccacaggaagacgcgtgtgggaaccagac

SEQ ID NO: 218853 - DNA, 273 bp, Homo sapiens
  chr19:2140169-2140442
  hypo
aacaaaaagaccatcccaggcgtggagaggtcagaccctcacgagggcaaaggggatgtcaaacggcgcggctgctgtggaaagcagcctggggttcctccacggttccatgtggagttaccgccccagcaattccacttctgggcgtgcacccgaggggatggaaaacaggtgtccaaacaaaaacaagcacacgaacacacagggcagcaccatttctagtggcctgaaacaggaacagcccccacgctcgccgctgatgaatggatacac

SEQ ID NO: 218854 - DNA, 200 bp, Homo sapiens
  chr19:2148550-2148750
  hypo
actagacaacctcagcgctctggcgcttccagaaaaccgcgtgtcactgcagcatcctccgcatcatccagcaaggagggaggtgactgtcatccccatttacaagggaggagacagagcagggggctctagatgggccgccccatgaagtcagccagtcagcccaagcacctggactcggatctcccaaacctcatgcg

SEQ ID NO: 218855 - DNA, 31 bp, Homo sapiens
  chr19:2160536-2160567
  hypo
aaaaaaaaaagtgggcggagatacaggttgc

SEQ ID NO: 218856 - DNA, 737 bp, Homo sapiens; identical to SEQ ID NO: 205098
  chr19:2164936-2165673
  hypo

SEQ ID NO: 218857 - DNA, 443 bp, Homo sapiens; identical to SEQ ID NO: 205099
  chr19:2168903-2169346
  hypo

SEQ ID NO: 218858 - DNA, 405 bp, Homo sapiens
  chr19:2182517-2182922
  hypo
tgtctcaagaaacaaaacccaaacaagaaagagtgctccagggctgtggcttcccggggctgtgactgtgcaggttctgccagtgctgcccagacgtggtctctctgggttaggatctcggtgcagcaggggtggaagcccctctctgaccaggcgcttgctagtgtgtctggaggtgctcagcagcaggggagctgcacctgctccccatgggaaggggcctgcacagacttctggggtcagaggagaccccaggcccccggatctcaggcagtggcggtgagagtgcctctctggctgcatgctcgccttctgcagggctcggagctgactgtcttgtttgaaccttgtgtgttttctggggagcgcatctggagtctggagcttaagcgttgtagggagcag

SEQ ID NO: 218859 - DNA, 230 bp, Homo sapiens
  chr19:2213811-2214041
  hypo
caccagcatgacctctcccccgccccatgtccccagctgggtgtgaaggcgctgacctacaacgacctgattcaagcgcagaaggagatctccgcccataaccagcagctgcgggagcagtcggagcagctggagcaggacaaccgcgcgctccgcggccagagcttgcagctggtgggtgccgcggcgcaaggacagggacgtggaaccagaggggccctgcctgggcg

SEQ ID NO: 218860 - DNA, 139 bp, Homo sapiens
  chr19:2215593-2215732
  hypo
gctgtccccggaggcgggctctcacgggcggctgacggacgtcgggaagcaccactcacgtgctcccgagctgctccctcacgtgtgtggcccaggcgagcctcaccagcgtacattagagaaacggaggtcgccgacc

SEQ ID NO: 218861 - DNA, 576 bp, Homo sapiens
  chr19:2216069-2216645
  hypo
agcaaaaaccatcctcggccctccacatgactttatttgacgcccccagcttcccgaccccgcctctatgtggtcggcagctttggtttttccatcccacacaagcagcgggggtcctggccacccctccgggtgtccatctgtggcagtcttggttccctggagtggtcccccggtggggcgggcctgacaccatctctcctcctgcagatcagcattgtggagctagagaagagccagcggcagcaggagctcctgcagctcaagtcctgtgtgccgcctgacgacgccctgtccctgcacctgcgtgggaagggcgccctgggccgcgagctggagcctgacgccagccggctgcacctggagctggactgcaccaagttctcgctgcctcacttgagcagcatgagcccggagctctccatgaacggccaggctgctggctatgagctctgcggtgtgctgagccggccttcgtcgaagcagaacacgccccagtacctggcctcacccctggaccaggaggtggtgccctgtacccctagccacgtcggccggccgcgcctggagaagctg

SEQ ID NO: 218862 - DNA, 44 bp, Homo sapiens; identical to SEQ ID NO: 31774
  chr19:2222843-2222887
  hypo

SEQ ID NO: 218863 - DNA, 144 bp, Homo sapiens
  chr19:2224700-2224844
  hypo
aagccttctgcctcccagtgcctcccagcgtgcgccatcacagccggccctaagtgtgcttttggtggtgttctgtgttagttcgttctgctccttgcccacgtgtgcgtgcacgtgttacacgagaaacattgtagcacctgg

SEQ ID NO: 218864 - DNA, 80 bp, Homo sapiens
  chr19:2243435-2243515
  hypo
cccgggggcaagaccgggagcgggggcgtggcctcctcctccgagagcaaccgtgaccgcagggagcgcctccggcagct

SEQ ID NO: 218865 - DNA, 484 bp, Homo sapiens
  chr19:2243571-2244055
  hypo
ggtgggtgctgggctttccagggcagccctggagagggtgccagaggctcttcttgggcctccgcccaggctgggcgatgcagccccgtgtccagacgctcccctgttgcccccgagcagccacagctcccatctgtccaccccagagagcagaccctctgtggctctgagtcccatgtggacatgttttgttctgtccacagccttctgttttgcattatttaattttctgggagtggggagagctgatgtcagtccagccagatgtggtgaagggcagcctttgattttagcttgtgcagaggcaggggtgagccgagtcccctcagcaccgtggacatcggggctggagcactctttgtgtaccctgacatgccccacgggcctggcctatggcaagggctctgttaccgtccccgtcttccagatgaggtcatgggtagagggggtgccacagccgcagatggtggagttagactttgaa

SEQ ID NO: 218866 - DNA, 121 bp, Homo sapiens
  chr19:2244085-2244206
  hypo
cggctgccccagcttagggcctgcagatgggcgggtctttgggtcttcagtgtagcccatttgcttttcttgtgcctgtgtctgccttgtgcctactgctggcgtggtggcgtgggcagtg

SEQ ID NO: 218867 - DNA, 624 bp, Homo sapiens
  chr19:2244236-2244860
  hypo
gtgctgtcctggctgtgcctccctctgactcagaaccaccaggaaggtggtgtcgggggctccctgggaacccccactgctcgaagcctggcccacagccccaggtggtgacacccgtgctcacgaaggcctcccgctggatcccccgttttcagaaatgcttgaccactgtcagcggtagccatgcctctacagaaggggggttctgcctccatgcctctacagaaaggggatcccgcctctgagggccttgacggcagcaggccgcgatcttctgtctaacgggcccctgttcttcccctccaggacccgtacttcatgaagaaccacctgggctcctatgaatgcaaactctgcctgacacttcacaacaatgaggtgcggcctctgcctggctccgggcggctcgcggcgggctgagtggctgacgtcagggggacctgcctgtgtctgtccgcccggcctcgagtcatgcgtgtttcctttccactccaggggagctacctggcacatacgcaggggaagaagcaccagaccaacctgtgagtacctcatgtccctttgatgcctggtgctccagcagccgttggctcaagtctctgtgagcctcgcgggccactgctc

SEQ ID NO: 218868 - DNA, 224 bp, Homo sapiens
  chr19:2255405-2255629
  hypo
cctggaggttctgcggacaccaactaacaggccccgtcctcccacccctcctcactcggcaaattcatactcatgccaggcatggcccggcgcccactccaggcatctctctgaccccgcatgcctgccctgggacccctccctaccgcccagcctcactggggtccagtatccatcagtacagtagcccaggctgctctggcccagagagggcgggagcccct

SEQ ID NO: 218869 - DNA, 83 bp, Homo sapiens
  chr19:2275595-2275678
  hypo
tggctatcatggagacgctgacctcagccccagccctgcctcctgggcaggcctggaccaggtgtgttcgccctgggttgggg

SEQ ID NO: 218870 - DNA, 397 bp, Homo sapiens
  chr19:2275940-2276337
  hypo
gagggccgcaagcgggtcagctgtgctgccaggagctccaggcccgcggccaaaggcgtggtcgagggcgcagcaaggctgagcagcgctcggaggaggctgcccagctgcggcgcgtgggggcccggggatcccgggggtccagggggctgcagacagacgcggccaaagtcagtgaggagcaggcgtgggggccccgtcgtcgcacagccccgaggtgccaccagcagcaagttctccggccgcaactcgactagggccgcgccccacgcctccaggaacttcagggccgcgctcagctgcagcagcagcagggccacagcccacacgaactcctccggcggctgcgtgcaggcctccgccagccactgcgccaccgtgcgctctggaacctcgg

SEQ ID NO: 218871 - DNA, 157 bp, Homo sapiens
  chr19:2321612-2321769
  hypo
gcagccaagtccgcgggaaaccgagctgctcgggcctgccctgcaccccccgcgcccccggccaggctaggcgtcctgctgctggatgaaggggttggggatggcctccatgccgtcctgcgggcagattagcaccacggacgtgccccggcacacc

SEQ ID NO: 218872 - DNA, 258 bp, Homo sapiens; identical to SEQ ID NO: 205101
  chr19:2328984-2329242
  hypo

SEQ ID NO: 218873 - DNA, 63 bp, Homo sapiens
  chr19:2330407-2330470
  hypo
ccggccccgaggcaggtgttctgaatgatgagtaggagtttgccgggtcggcaggaggggaag

SEQ ID NO: 218874 - DNA, 161 bp, Homo sapiens
  chr19:2339592-2339753
  hypo
cggcctagtggccaccccagctcaacccagggacgcgggccctgccaccctctgctgtgtggtctcctctgccctggggacgttcggggcggttccttgcacttcagtcccccccgggtcccctcctgctcccgggttttctgccccgttcccccgggtgg

SEQ ID NO: 218875 - DNA, 92 bp, Homo sapiens
  chr19:2434913-2435005
  hypo
gtggggagacgggcgggtgagtgcgggcgcggggcggggcggggttcccaccggccgcccccgcccacccgcctgccggccacaccttggcc

SEQ ID NO: 218876 - DNA, 173 bp, Homo sapiens
  chr19:2441909-2442082
  hypo
gagatcggggaatccgggaagctcctcagcaactcggtctaaaccacagggttccgcaggactgcagggcacacccagaaggcagggtgcgggctcccagggctcagacccgtttcctaagcgccaggtgctgagttagaatcttcagctgggtgcccggggttttgtggcag

SEQ ID NO: 218877 - DNA, 347 bp, Homo sapiens; identical to SEQ ID NO: 205104
  chr19:2488689-2489036
  hypo

SEQ ID NO: 218878 - DNA, 210 bp, Homo sapiens
  chr19:2511280-2511490
  hypo
ttaaaacactgcgagaaagtgggtgcggcacacctggaattttaaaaaagtcagaaataaaaacaaccagacatcccaatgcagatggcatagaacctgctagaaccacaggcggcggctggaaacaggagacaggtctttacgaaggttagatgggcagcggttccgtggacagaggaggaggcgcggctggccggcatatggcttctg

SEQ ID NO: 218879 - DNA, 100 bp, Homo sapiens
  chr19:2513506-2513606
  hypo
gaagcctccccccgaccccatgacatcttcgatttccacttgccgctgggaggagtggcccatcctgcgtctaaggcatctcccggcctcagacagccgt

SEQ ID NO: 218880 - DNA, 54 bp, Homo sapiens
  chr19:2518575-2518629
  hypo
gtgccacctggccagcagggacgactctgtccgcctccccgctgggagcaaagc

SEQ ID NO: 218881 - DNA, 111 bp, Homo sapiens
  chr19:2524628-2524739
  hypo
tgagtgcatgtacacatctacgtgtgtgcgtctgcatatgagtgtgtgcataggtgcatttgcatacgtgcatgtgtgtggacatgcatgccagtgtgcacgtgtgtatgt

SEQ ID NO: 218882 - DNA, 34 bp, Homo sapiens
  chr19:2682927-2682961
  hypo
gctcactgaataaggactcccggcaggacacggt

SEQ ID NO: 218883 - DNA, 58 bp, Homo sapiens
  chr19:2683833-2683891
  hypo
tgccgggaggtacccgtgcagaaacaagaaaggagctcctgcaggggctggctaggga

SEQ ID NO: 218884 - DNA, 215 bp, Homo sapiens
  chr19:2753323-2753538
  hypo
agtggctgaacctgaaacttcgcccctgcagatctcggttcttcctgctattgcaggggtggagaaggtgggtgcttgagccagggtcctgagccagagtccctgccagggctccgccaggttcagacgctcacgggtggggtgacctcgggcctgatagccaggcctcggtttctctgtctctagcatgagggtgccggtgcccaaccttggct

SEQ ID NO: 218885 - DNA, 360 bp, Homo sapiens
  chr19:2754495-2754855
  hypo
gggacggaggcggagggaagggagacagcagagggtagaggctgactgtccgaaacctcccatgacccgtgacccgtgacccaagaagtgcggctccggcgtcgcggggattcactcacaagcagcccagctgatccacaaactccgcgtcgggggttttctcgaggtttggggttggagggtatcggtggcgccaaggtcaacacgaagacagacagaggtcacaacgcctatttattccccacacgtcacgccctgcaccccgggtgggcttggcacacacctcaccgccatgagcggctgcagggccgcggcggcccccgttcctactgctacctacgatacacggtactgcgccta

SEQ ID NO: 218886 - DNA, 360 bp, Homo sapiens
  chr19:2795261-2795621
  hypo
atgtgcactttcatttcctttcctggccatcctagtgtgacccaaacaccccatccccacatggcgtgagctggcagggcctggcggcatggctgcgtgggctcctgctcccccggatgctcctcgcagtatgcagtggggcctttgctgttgatgtcacatgatcaggagagacccagagaccctcctgctgctgttcatcctcttaggcgaggacccctgggaatgtgctgatgtgtcccacagtctcaggatcatgcagccctagtgctttggtaaatccagatcagggtgacccatgatagccgtggattgttatttctttttatttaaatacagacagggtctcacaacgttgcc

SEQ ID NO: 218887 - DNA, 599 bp, Homo sapiens
  chr19:2796368-2796967
  hypo
gagtgctgcgtcccggggagtgctggactcagggagtgcttgggcacagggagtgctgggtgccgggagtgctgggtgtgaggagtgctcggtcccagggagcactgggcatggggagtactgagctcagggagtgcttgggcttggggagtgctgggtggggggagtgctcggtcccagggagtactgggtgtggggagtgctcagtctggggagtactcggcatggggagtactgggcacggggagtgctcagtcctggggagtgctcagttgcggggagtgctgggctcagggagtactgggtgcggggagtgctgggcgtggccagtggagcttctgtggccccctgcccctgcctcctcgggagcgtccccccttcagggctgacccccggcctgatgtccatctttcttctgcctgaggacctgaactctggcaaggcaggtccacacagacatggggcgcagaggctcggtaacgaggggagcccctccacccactgcccggtgtgcctgatgtgggcgtctcaggggtgacatgagttagttggtgcagagctgggagcgcagcgctgaagtcaagcgtagtgtgttagca

SEQ ID NO: 218888 - DNA, 187 bp, Homo sapiens
  chr19:2812073-2812260
  hypo
ccgtgtcttcccatacgagtccttccgggatctgcgtgatcggcctcagagccatgggctgagacagacccttctctggagaaggcttggcgtttgccattcatttgctcctccaacctccagtttcctcactatgaagtgcggccgttacgccatgtgagcctgtgcctcccgctgacttggtgtg

SEQ ID NO: 218889 - DNA, 37 bp, Homo sapiens
  chr19:2908411-2908448
  hypo
gtacagccatttaacgtgcacatttcattgttgttgt

SEQ ID NO: 218890 - DNA, 146 bp, Homo sapiens
  chr19:2919931-2920077
  hypo
accttatttttatactaaacattttcttttgttctcttagtactgcttatggttctgtgtgcagacacaaccatgacagcctatgcaccagccaaaaagcgcgcacacacacgtttgatcgtgtacagcatcgctgaatgactact

SEQ ID NO: 218891 - DNA, 88 bp, Homo sapiens
  chr19:2934502-2934590
  hypo
tgctgagacttttcacgtatgtcacagatgctgtccttgagtcctggcaattacagggtttctctacagtctgcgttttcataggagg

SEQ ID NO: 218892 - DNA, 37 bp, Homo sapiens
  chr19:2938054-2938091
  hypo
aggggtttgtacttctaacccacgatgccaaacggaa

SEQ ID NO: 218893 - DNA, 77 bp, Homo sapiens
  chr19:2938994-2939071
  hypo
gctctccaggacgcagtgagggaatgatgccacccttacccaaggaggcagtgagggaatgacgccatccttaccca

SEQ ID NO: 218894 - DNA, 69 bp, Homo sapiens
  chr19:2941878-2941947
  hypo
atggggctgtgtgtgcgcctttcccctcatcctaatggaagatgcaacgtcttccgagtttgagagttt

SEQ ID NO: 218895 - DNA, 835 bp, Homo sapiens; identical to SEQ ID NO: 205108
  chr19:2944614-2945449
  hypo

SEQ ID NO: 218896 - DNA, 632 bp, Homo sapiens; identical to SEQ ID NO: 205109
  chr19:2950418-2951050
  hypo

SEQ ID NO: 218897 - DNA, 141 bp, Homo sapiens; identical to SEQ ID NO: 205110
  chr19:2977372-2977513
  hypo

SEQ ID NO: 218898 - DNA, 61 bp, Homo sapiens
  chr19:2996848-2996909
  hypo
gggtaaccaccaggccgagttccccttgcctctgagatatcgcatccgccattctcctctt

SEQ ID NO: 218899 - DNA, 360 bp, Homo sapiens
  chr19:3055708-3056068
  hypo
ttttgacgatctcagcctggaacacacagatgaagccggcttcagtcctgggcgggtggcaggtgcaggctagccacaggaggcctgcgcggggcccggcccagccctgccacttgcggcttctaagaggggctaggtctggccagggtgggatgagcaaagccgtgttcgggcccgagggcagccagtcagtggcaaaggtggggctggacaccggctgtcgcctgcagcttagagtgaggtaagtgcaggatgaggccagactgcacattcctcgggggtcggccactcaggcccctggcaggtagtaagcgcttgtgcgaatgtagggagggctgggggccgtaggctgtggggaag

SEQ ID NO: 218900 - DNA, 87 bp, Homo sapiens; identical to SEQ ID NO: 205112
  chr19:3094304-3094391
  hypo

SEQ ID NO: 218901 - DNA, 174 bp, Homo sapiens; identical to SEQ ID NO: 205113
  chr19:3094777-3094951
  hypo

SEQ ID NO: 218902 - DNA, 814 bp, Homo sapiens
  chr19:3105564-3106378
  hypo
ccaagagctccgtggcggaagaagctgatcccgcctcccaacaccactgtcttaggggtgagaattttaacataggaatttggggggatcacagacattcattgctatgggtgggaccacttggtgcgttgcccttggggtggcggtgtggtcagtggtccattcctgcccagcgccgagcagcggtctgtgcgtggggtctttgcacccgtgcacctgctgaagggtctctggagctttggctttttggcttttacgagtaaagctgccgtggtgcttggtgtgcggtgaggagtggacagaaggctctgtcctggcaggtgccctgcagtggcctgagaccgggagatgagggccggcaaggggctgtggacgagtccagagtgaggcggcatctcggaggggctcacacattgtctcaggaggagtgggctggcatttctttccagtgggcagctgttgaagattttggagccaaaagagcgttccagctcagatgtctttcaggtggagtgtggctgcaggtggggcaggctgggtcagggtggagccatgtgggctgaggcccgagttggggctgtggctttggggccacatggctgccggtcgggtgggagcgagtctctgctgaccagggccctggatgttgagccccagccgcggggtgtgaggtctcaggcaggacccaggcattcagacattgggtccactgtgtgtggacccctgcgtcccagctccaagacgctgtgtgacgggaggcggcagcagctgagttggcgcggggagacagggcgatttgaaaagcaggctggga

SEQ ID NO: 218903 - DNA, 111 bp, Homo sapiens
  chr19:3109616-3109727
  hypo
agggggcagtgtggccgtggccgctgagcaaagctctggggaagggggcgcccagcccttggggtggtctgtgcagagatgccgttggggtgagtccgtctgtcagggcac

SEQ ID NO: 218904 - DNA, 340 bp, Homo sapiens
  chr19:3113301-3113641
  hypo
gacgtctcccctgcccgccctcgcaggccaatgcgctcctgatccgggaggtggacgtggagaaggtgaccaccttcgagcatcagtacgtcagtgccatcaagaccctgtgggaggacccgggcatccaggaatgctacgaccgcaggcgcgagtaccagctctccgactctgccaagtagtaagtgcggccgcaccgctggcggcctggggacggcagctgcgggccggtgcctgggacccttcgggaaggcctccgcggcgtctgtggtgccccctgcctgctcgccgggggcagggatgcggtgggcccgggccacctggccggatggagggacca

SEQ ID NO: 218905 - DNA, 252 bp, Homo sapiens
  chr19:3114746-3114998
  hypo
gaggctcgtatcccgaccccagggtctccattggcccgagccctccgggctgcttcagacactgccgtaggtggcgcagtgcgcggtccaccccctcctggtggctttccgtcctcccgctggtttgggtgctgtgtccctgtcctgcccccccacccccggcagccggcctgagcacccaccgctgtgttgcagctacctgaccgacgttgaccgcatcgccaccttgggctacctgcccacccagcagga

SEQ ID NO: 218906 - DNA, 37 bp, Homo sapiens
  chr19:3118890-3118927
  hypo
gtggctgagtcctggcgctgtgtcctttcaggatggt

SEQ ID NO: 218907 - DNA, 146 bp, Homo sapiens
  chr19:3118956-3119102
  hypo
ggaagtggatccactgctttgagaacgtgacatccatcatgtttctcgtcgccctcagcgaatacgaccaagtcctggtggagtcggacaacgaggtgggccctgccctgagcaggggcagcgttgggggccgggccttccccacc

SEQ ID NO: 218908 - DNA, 575 bp, Homo sapiens
  chr19:3148406-3148981
  hypo
ggggaaaccaaggcacagagcggcaaagccgctagcctagggtcactgagtgaggtcccggctgcaccggggtttgaacccaggaggcctggcgtggagttgggggtgtctgacgtggggttgggggtgtcgggggtgggagtcccgtggagggctgagcggttctgctgctccatccccaggcccaggcgagagcgggaagagcaccttcatcaagcagatgcggatcatccacggcgccggctactcggaggaggagcgcaagggcttccggcccctggtctaccagaacatcttcgtgtccatgcgggccatgatcgaggccatggagcggctgcagattccattcagcaggcccgagagcaaggtgagccgccagggcaggcaggggcccagggcaggcaggggcccagggcagggttccccagaccccggagcagggccaagttccccagacttcagggcagggcagggcagggcagggcaggcagggaagggtccccagaccctggggcaaggccatgtcctccagacatatgtgcatacatacaagtgcacacacaagtatacacgca

SEQ ID NO: 218909 - DNA, 210 bp, Homo sapiens
  chr19:3155758-3155968
  hypo
ggttgggggtgtcacggagcaggctcctgagctctgaaagggggcacctcggttccctgtaggatcgtggacgtcgggggccagaagtcagagcgtaagaaatggatccattgtttcgagaacgtgatcgccctcatctacctggcctcactgagtgaatacgaccagtgcctggaggagaacaaccaggaggtgcgccaccgcctccct

SEQ ID NO: 218910 - DNA, 342 bp, Homo sapiens
  chr19:3196251-3196593
  hypo
gactggctgattgccagcgtggaggtgagtgccgcctgccccggagccagccccacgtccccaggggttcctgccatccgcctggctccccggctcggccgtactagaggggagccgctgatgggaaactggagtcggatcgcccccctgcctggctgaaaacctcctgtggctccgctggcagctgcaggaacccaaactcctcacatggccggggagtcgctctgtggagtgcccaggcccctgccagcccccggcccatctccttccttccatcatggacccccacacaccaagccgctgcctcccaccccagggcctttgcaccggctgcccctccca

SEQ ID NO: 218911 - DNA, 86 bp, Homo sapiens
  chr19:3219654-3219740
  hypo
agatgtgcccaagctcacagcctcactattctccgtgctcacagcctcgctattctccaggctcacagcctcgctattctccaggc

SEQ ID NO: 218912 - DNA, 103 bp, Homo sapiens
  chr19:3296495-3296598
  hypo
tcttctgaaccaacttgtttcgatattccagagtttgataattgtttcgagactctcctctagcgtgcctgtgttccgtgtgtccccgtgtgcaagcgtgtgc

SEQ ID NO: 218913 - DNA, 116 bp, Homo sapiens
  chr19:3296765-3296881
  hypo
tttgtacaatgtactttatttctgctacgagtaatttcatgaagtttcaacttgcaaactgacttttgggacaaaccaacacacacacagaagagaaagcaaagaacttggaactt

SEQ ID NO: 218914 - DNA, 331 bp, Homo sapiens; identical to SEQ ID NO: 205114
  chr19:3367271-3367602
  hypo

SEQ ID NO: 218915 - DNA, 300 bp, Homo sapiens
  chr19:3381393-3381693
  hypo
aaaaaaaaaaaaaaaaaaaatgatcctccacaaacttccgccttgatttgtgcctctcacatagtccaagtctgtttgctcatctgggcgatgggttcttgcaggtccctgataaacttctcctgggtcccccgggccttttgcgtgcctccggcggcgtgcacgggtccgcagcgaccccctgcccacctctgcccagcccctcccactctgcgggtctgttcagggcccctccgacctcagccttcggggccgggcagtgggtccgccctctgcgtccctggcgctcctgacctctcg

SEQ ID NO: 218916 - DNA, 90 bp, Homo sapiens
  chr19:3449010-3449100
  hypo
ggcatctcgtccccggtgaagaagacagagatggacaagtcaccattcaacagcccgtccccccaggactctccccgcctctccagcttc

SEQ ID NO: 218917 - DNA, 157 bp, Homo sapiens
  chr19:3456283-3456440
  hypo
tcagcagacaccccgcccacctgggcgatctcagccgtgacccccgggcccctcgagtcaggatccccgcctcccaaggaccttgggcctttcaggggggcccggttcaactgggggtagggcggcaggctcggaggccccaggcactgggtgcaga

SEQ ID NO: 218918 - DNA, 139 bp, Homo sapiens
  chr19:3464751-3464890
  hypo
cccaagagaggttcgccatcctctggcctcgagcccttggtccctccgtccgtctgtcctcggggcccgctcccccggtggcccttggggatcaaagcgtgggccgctctccgggagggcgggcgggggagggggtggt

SEQ ID NO: 218919 - DNA, 34 bp, Homo sapiens
  chr19:3465695-3465729
  hypo
ggtccctaggccacgggccggcccccagacacca

SEQ ID NO: 218920 - DNA, 1005 bp, Homo sapiens
  chr19:3490887-3491892
  hypo
ctgtgccctacctgacccactcagggaccaccaccctgtccctacccaggcctcggggtgggggagtcagaggcccccagaccctgtgtcccattcctagtgaagctgaagccaccataacgtcagcctcttcccagagccccagctctgcccctggcttccctcgcgatcctcccctggctcccctcgcgatcctcccttggcttccctcgcgatcctcccctggcttccctcgcgatcctcccctggcttccctcgcgatcctcccctggcttccctcgcgatcctcccctggcttccctcgcaatcctcccctgtcctgagccgggcatcccagagcctcccgcagagtcccaccccaagcctggaaacttccacgctacagccctgcgccaggccccgaggagcagtcaggggactcagggagtcacagcacaacggcagctcctcggtcccagacggaggagggggacagcaaccatgcgcccagcaagacacaagcgatgacaccgatttacacacacccggtttagacgccaaagctctgcgggggaggagcggccctcaagagtcctccgggagctccgggtgagggtggggccctaggagggggccccgcgcagctgctccaggccgtccgcgtactggaaggcccgcccggtctcgtgctcatacatgtccagagccacctcgcagctctcacgcaccacgcgctctgggtcgtccgcgtgagcctgcagcgcggccaggcaggcgggccgggcaatggcgcccagggcctccgcgcactcgtgccgcaccatggggttctcggtgcatcgggccagggcggccgccagctggggcaccgccgcctcgtgctgcagctgtcccaggacgtagccgacctcgtggcggaagagggcgctcccacagtgcagacctgcaggggagagggacactcgctggggccaggaggggtgggaaggggagctctgtcttttcgaagacatggggtcttgctat

SEQ ID NO: 218921 - DNA, 381 bp, Homo sapiens
  chr19:3531590-3531971
  hypo
tcgttagggaaaccgtcccagagccctggtgaggagagagcctggcgcgaccaacgccaggacgggcacagtccccgggccagacctgacaccggtgctctgcccatgccttccatcctaggggaacctggtggcggtgggcacacacaagggcttcgtgcagatctgggacgcagccgcagggaagaagctgtccatgttggagggccacacggcacgcgtcggtgaggagcccgggtcccatggctggtgagctccctgaggccccagctccgcgagggcaggagaggctcacccccgcttccacctggcctccaggggcgctggcctggaatgctgagcagctgtcgtccgggagccgcgaccgcatgatcctgcaga

SEQ ID NO: 218922 - DNA, 142 bp, Homo sapiens
  chr19:3571351-3571493
  hypo
gattacaggcgtgagccactgcgcccggcccatggcggataatattctgttgtaaggatatatcccgtcatcgatccatgcatcattagcagacgtttgagttgttttcactttttggctattatgaatcacgctgctaccg

SEQ ID NO: 218923 - DNA, 209 bp, Homo sapiens
  chr19:3577496-3577705
  hypo
accggccccaccgtcgctggcccctctccctcgccagcccccgaccagcctgagcactgacccagcctccccgctcgccacgccacgttcccattcaccccacctccccacgcccccgtcacccatccctccccacgccccgctgacgcctgagccccctccaccaccccagtcacgtcccacgcgaccccagccccccggtgtcatcc

SEQ ID NO: 218924 - DNA, 247 bp, Homo sapiens
  chr19:3577877-3578124
  hypo
gcccgcgcgacccgccctgagtcaccccctaccgctgcccctggagcccccgccccgcgactccccggcaccctcgcctgaccttcccgcctgtcccccaggcacgggcgaaacgcccacgctgggcactctggacttctacatggcccggcttcacggagccatcgagcgcgaccccgcccagcacgagaagctcatcgtccgcatcaaggaaatcctggcccaggtcgccaggtgtgtgccgggc

SEQ ID NO: 218925 - DNA, 254 bp, Homo sapiens
  chr19:3578223-3578477
  hypo
atcacctcccggaggggcctacctgcggtcgcccctgatgcaccagtgctaggatggccatggagaaccccgggccggcgggacccactcgggggcaccagaacttccctaaagcttctcagggtggatcccagcgcccgggttagataggttcaacgcctgtcccccaaccctggcatctgttggagcagctgatgggccatggtctctggggttccccagggccggggtgggggccagagatgatgagggcc

SEQ ID NO: 218926 - DNA, 82 bp, Homo sapiens
  chr19:3600528-3600610
  hypo
cagaaggaggcggcgaaccagggcgaggcgatcagccgtctctcctccagggtaatgtttgtgggccggaaacagggcccca

SEQ ID NO: 218927 - DNA, 163 bp, Homo sapiens
  chr19:3638707-3638870
  hypo
tgcgtgtgggcgtgtcgtgagagtgctggctggtgagagagcatgtgggtgggtcgacagggcacactcacgtgcctgtgtgcaggtgtgtgtatgcggtgtgcacacggtggagcgtgtgtgagagagagtccggttgacgagccggcggcaggaggagccc

SEQ ID NO: 218928 - DNA, 160 bp, Homo sapiens
  chr19:3648545-3648705
  hypo
ctgcagacccgggcgcccacctgtgggactgcagacccggggcgtccacctgtaggactgcagacccgggcacccacctgtaggactgcaggatgtcgatgatgccaatgtgcagcagcagccgctccccgcggccgttcacagcggggatcccgcccat

SEQ ID NO: 218929 - DNA, 44 bp, Homo sapiens
  chr19:3691224-3691268
  hypo
atgggagagatggacgcgtcctccgctgccggaacacggagcgc

SEQ ID NO: 218930 - DNA, 87 bp, Homo sapiens
  chr19:3694859-3694946
  hypo
gcccaacgcagcccggctctgggctgggcaaacatcttccgtaaaggaccgggcagcaagtgttttcggcttcgtgggacacgtagc

SEQ ID NO: 218931 - DNA, 360 bp, Homo sapiens
  chr19:3709509-3709869
  hypo
tgggtcatttgctcccaaatgggaagaccaagggagcttcctcgtgagccaagtgtccgattgcatctcaagtctctctccagaaccaagagggtcccccggggccgaggaggcatggatgatcgcatagtgggggacagagcggcccggcatttggggtcaccttgtggctgtgtggctgcagagctcccagggagcaggcttgcttgagattcgggagtccgtgggggtgggcgacatggatcccaccttgcctgggttttgagagcaaacccgtggactcagttagatctggcttccacacctcccttctctccgggcctctgtttcctgctctgtaaaatggggatattgagggcc

SEQ ID NO: 218932 - DNA, 95 bp, Homo sapiens
  chr19:3739005-3739100
  hypo
tccacgtgctggacacgctgcaccccggccccgggcagagccacgcacgaggaggccactggctggcggtgcgcatgggtcgtgacctgcgggag

SEQ ID NO: 218933 - DNA, 398 bp, Homo sapiens
  chr19:3740455-3740853
  hypo
cctgtccacaggctccgaggggtaggacgaggacgtctttggggccaccatgctgctgaccccagtgctcagtactgtcccctcttctccccagggcggagcagctggccagcctggaagctgcccagagggccgtgggagtcgggcccggctcctccgcgggctccaatgctcgggccgagttctggcggctgcggggtcttcgtcgaggagccaagaagaccactcagcggagccgtgaggacctctcagctctgacccgacagggccgctacccgccctacgaacgagtggtgttgcgagaaggtggggcccggagctggaggggccctggggaggcctcacacacagctcctggtgcacctgttcactaacattcagcctctaaaaggcacagt

SEQ ID NO: 218934 - DNA, 80 bp, Homo sapiens
  chr19:3747812-3747892
  hypo
aacctagacctccctcaccacggcctggccgacagctccgctgacctcagctgcgacagccgcgttaacagcgactacga

SEQ ID NO: 218935 - DNA, 119 bp, Homo sapiens
  chr19:3748020-3748139
  hypo
cagatgagtcccagagcccgagggatcgtgggagaatctcggctcatcagggggcccaggtgcgtcggacatggggggcaggcctgggaagggtctccggaggggatgccagcacagag

SEQ ID NO: 218936 - DNA, 42 bp, Homo sapiens
  chr19:3754228-3754270
  hypo
gcgcgtgctggtgggcgggttccgttccgacaccagctgggt

SEQ ID NO: 218937 - DNA, 307 bp, Homo sapiens
  chr19:3767181-3767488
  hypo
tctgcccgaggtgcccgggacaccagggagcccaggggtcaccgtgtagctctgattcctgcccgcacccccgtcaggctgttcgagatgaacttgggtcccccaaagaccctggaggagctggaccccgagagccgggagtactggcggcggctgcggaaacagaacatctggcgccacaaccggctgagcaagaacaagaggttgtagcatggagggcccggcatcgctgacccccacgccgagggcttgccgttttcccggaggacgtggacttttgtgagacaagaggcggctccccagcctg

SEQ ID NO: 218938 - DNA, 320 bp, Homo sapiens
  chr19:3770694-3771014
  hypo
gcgaagccatctgcgaaggtgggagcaaaggcatgaggcccgaaggacgcttgcagccccgggcccgggcccaggaggcgggggaggcctggcacggccggcggtccggggcccaaccagggctccaggggcagcgacatggccggggggcgggcgaacggcagcgctggggcctcggggagtctcggagctgccacggcacccgagcctgactccagccgctcctggcggcgccacttggcccggcggttctggaaccacacctggagggtgcgagagggaaggggggttgctgtgagctcagccgctccccgccaatc

SEQ ID NO: 218939 - DNA, 106 bp, Homo sapiens
  chr19:3777968-3778074
  hypo
gagtccttagaatccgtctttatcgggcgatcatccttcgcaggtctggggtgtccacgggccgcccagagccccctacgtgggccagcccctgctgtgggcacca

SEQ ID NO: 218940 - DNA, 66 bp, Homo sapiens; identical to SEQ ID NO: 205117
  chr19:3785491-3785557
  hypo

SEQ ID NO: 218941 - DNA, 385 bp, Homo sapiens
  chr19:3792900-3793285
  hypo
gcctccatggaagccgtccccggcctagccgtcctcggctggaatctgcagttagatcacactgccccagttagcaaacctttaaatttagcttcctccccccagccaggggactccgggattgaggggaggaacgctggctctttcgaggaagaacgctgcatcactcattctgcaaccagtcgctgtctgcccggccattctcgattccttgaacgaagggcctcttggggcgagctgctttgggcgtctttgctggaaaacccttgccccgtcttcctcgtccttaagacgcagccggacaggttgttttccagccacacttgcaggtttcatccgtggaaactgggtctgtgtcacatccggccttaaaagcttcccggct

SEQ ID NO: 218942 - DNA, 211 bp, Homo sapiens
  chr19:3816690-3816901
  hypo
tgctgggcgatcctccgcagcaggctgtgcgtgggcttctcggagcagagcagagcgaggcgcacgttcctgtccccacgcaggaggaggcctttcgccaggatgcctactcgcatgacgcctttcaggacccgagtctggggggcaacgctgctgtggggacaaagccacagacgtgcgccatcagcggagagacgcggggtaccccagc

SEQ ID NO: 218943 - DNA, 96 bp, Homo sapiens
  chr19:3855704-3855800
  hypo
aggaggagggtgaagacacaaagttggggaaacagggcagcgcatttgagcagagggaattgcatgggaagggcctgagggtgaagtgcccggaac

SEQ ID NO: 218944 - DNA, 48 bp, Homo sapiens
  chr19:3907669-3907717
  hypo
gcaggagggcaggagatatccggactctggcgtccatgcgactctccg

SEQ ID NO: 218945 - DNA, 323 bp, Homo sapiens
  chr19:3907947-3908270
  hypo
gctccagcccggcccactgggcaacagggggttcgtcagtgcccctctctgatgcacggggatgttaagccgtcaactcgcttcgggtggacggactgtgggcaaggcgtgcatggtcagggaggcgcactgggggcccctgatggtcgctgtcactcctcagcgaaggcagagactggctaaggggtcgccggctgctgtggctcggagccatgccctcccgagcgtgtgggcaccgggacgtggtgggtggtgcgcgggaggcagctcagggctgggagaggactctgacgttgccgatcggctgcctctcctcagggtac

SEQ ID NO: 218946 - DNA, 111 bp, Homo sapiens
  chr19:3966392-3966503
  hypo
agaaaaccacgccttccagcccaaagagaccggtccagtccacagggctctgaacgcctgctgggaagagaggatctctctctccctctgctgggcttggatccaggctcg

SEQ ID NO: 218947 - DNA, 153 bp, Homo sapiens
  chr19:3966533-3966686
  hypo
aagaagcctgcctaagaacagaccaggccaggagaggggagccaccaggcactgcgggtggcacataagccccgtcattcactctgccagggcgcctcctccatgctggagtggacttcggccccggggacacagggcaccatatgcaccagc

SEQ ID NO: 218948 - DNA, 197 bp, Homo sapiens
  chr19:3966755-3966952
  hypo
tgctattgccaaccagatttcaggttctgccactgagtcctcctacagcaacagcagaccacagccgcccacctccagacagcccccggtctcactggccacagacttgctccttagaggcaaggccactggcaggctctcagttcctctacggaatgtgaaacgtgcctcatctccccagccgggaaagaaactcc

SEQ ID NO: 218949 - DNA, 149 bp, Homo sapiens
  chr19:3978025-3978174
  hypo
ctttatcgatgtcctcggccaggccgtcggggaagggccgcgccttcatgtacagccggttgtgcttgttgggggacttggagaggcagagcacgttcgactcttcactgaccgtctcgcggtacgagacgaccgggtcagatttctgc

SEQ ID NO: 218950 - DNA, 107 bp, Homo sapiens
  chr19:3979896-3980003
  hypo
acaacagggctgacgctgaacttcatcacccgcatgttgtgcgcgtgctcgaaggtggtgatggtgcccgtcttcaccaggaactggtccacgcccacgaggcccac

SEQ ID NO: 218951 - DNA, 239 bp, Homo sapiens
  chr19:3982494-3982733
  hypo
tgggcatgggcctcagacgcaggctttcttcagtagacatctggtcaaagtgaagaaatgatcagtcatcacgaataggggggccagcccctccaccacccagggcagcgttccctgagctcgtctcttccagctgcccaaagatcaagggctgggtcaagtcggatgaaaacattccagcccccttctctgtcacccaacattcctggcaaaaacacacttccagtccccctcagctc

SEQ ID NO: 218952 - DNA, 108 bp, Homo sapiens
  chr19:4043114-4043222
  hypo
ccttgggacccaggatccggtcaccctgggcccaaaggtgtggtgtggacgaggtgctcaacccacccagtctcttcagggccaaaaggggaaaagggggaccccccc

SEQ ID NO: 218953 - DNA, 144 bp, Homo sapiens
  chr19:4043330-4043474
  hypo
tttttttttttatgtacaagaaaaatgaatttttttgttttttcatcttttgtgtttttgtttgttttttattacttttaaagcttctccctccccactcccaaaaagtgcatttttatcagttttttttttttttaaatctcc

SEQ ID NO: 218954 - DNA, 47 bp, Homo sapiens
  chr19:4047771-4047818
  hypo
ttaccgtcggtggcggccccggggccacctccgctgtcacctcctcc

SEQ ID NO: 218955 - DNA, 37 bp, Homo sapiens; identical to SEQ ID NO: 205119
  chr19:4053797-4053834
  hypo

SEQ ID NO: 218956 - DNA, 265 bp, Homo sapiens; identical to SEQ ID NO: 205120
  chr19:4054040-4054305
  hypo

SEQ ID NO: 218957 - DNA, 55 bp, Homo sapiens; identical to SEQ ID NO: 205121
  chr19:4054380-4054435
  hypo

SEQ ID NO: 218958 - DNA, 170 bp, Homo sapiens; identical to SEQ ID NO: 205122
  chr19:4054471-4054641
  hypo

SEQ ID NO: 218959 - DNA, 541 bp, Homo sapiens; identical to SEQ ID NO: 205123
  chr19:4054917-4055458
  hypo

SEQ ID NO: 218960 - DNA, 97 bp, Homo sapiens; identical to SEQ ID NO: 205124
  chr19:4064872-4064969
  hypo

SEQ ID NO: 218961 - DNA, 39 bp, Homo sapiens
  chr19:4093667-4093706
  hypo
cagagtgagactctgtccgactctcaagaaaaaaacaaa

SEQ ID NO: 218962 - DNA, 171 bp, Homo sapiens
  chr19:4096245-4096416
  hypo
gggtgtggctgctaggtgcagggagagctgggtcaccagggccaccccacctggctccgtcatcatctcgccacccaaccccaggcctagcccagtctgcaggcagctcaaatgcccgtttctctgccccagctccaaagggccaccaaagacacagaaacccacagaagg

SEQ ID NO: 218963 - DNA, 80 bp, Homo sapiens
  chr19:4096525-4096605
  hypo
cttgttttactcatctgggcggtggaaaccctcatactgtggctcactgggttgttatggggactgacggagcaggagcc

SEQ ID NO: 218964 - DNA, 34 bp, Homo sapiens; identical to SEQ ID NO: 205126
  chr19:4304684-4304718
  hypo

SEQ ID NO: 218965 - DNA, 289 bp, Homo sapiens
  chr19:4361250-4361539
  hypo
ccccagaggaacattagtgtttctaagagcaccttagtgttgccccgcctcggccagctgggcgagaagttggggagcgggggaggaggctggcgccatggagtggggaagggagccgtcaccgttgggagtcagcgctagtgtaaacaggcatccccacccacccagataagcccccccacccaagtgtggggtcctgctcagggagtacctcaagggccggggcccaggtggcgccggcaggctcagacaccgccctggcagcaggggctccgtggaatgcaggaga

SEQ ID NO: 218966 - DNA, 200 bp, Homo sapiens
  chr19:4361700-4361900
  hypo
gcgtgatgacgtcgccctcatggaagcccagctccccgtcgttctcgggctcgaagtcgtacagcgccttgcagctcggctggtccaggggcgctgggggcgggagcgggctgtggggctggggctgctacgcctcaccccgcccagtctggggtctcagacctgctgtgacctggagcgtgtgggtgggcatgggcctc

SEQ ID NO: 218967 - DNA, 393 bp, Homo sapiens
  chr19:4371567-4371960
  hypo
aagaagaaagccagcgtgggggagggcaagggagggctgctgtggcccagcctgcagggatgcgccacatttgcccgcagaggggtcggccccagggtcctcaggtctcactggcagtcatgctgtggtgcttggtaatttccaggttcacagcagagttcacgggtcctccctcggctggggagcgggtctctggctggtgtctgcctgcccgtcggcatcggtggtgctgtggtgctgcacgctgtgctacagagccatctccgcgtccctccctgcagtcctcctcagcggaatctgtgagcgcacagaccacaggggcctcgcccagtgccaggcacagagcggagaaatggcaggtgggcacggctggtcaaccgcagcgaatacctg

SEQ ID NO: 218968 - DNA, 61 bp, Homo sapiens
  chr19:4429586-4429647
  hypo
cctgggcccaggacacggtgagctagccccagagtgcctccgtccccgtacctcctcactg

SEQ ID NO: 218969 - DNA, 148 bp, Homo sapiens; identical to SEQ ID NO: 205127
  chr19:4432845-4432993
  hypo

SEQ ID NO: 218970 - DNA, 185 bp, Homo sapiens
  chr19:4442913-4443098
  hypo
ccctgcagaggtccaagccccgtgtggagccgcttccggagctgggggtggtgtgggggtggacaccggcaaggccaccctgacctcgagcccactgggtgcatcctgagagcaggggtgacgtatgtagaatgcttagggtgtcctccccacagagcagatacttgaaccgactcaattcctgt

SEQ ID NO: 218971 - DNA, 415 bp, Homo sapiens
  chr19:4446322-4446737
  hypo
gtagttgtacttgcgcagcccccgctgctcctccttctcccgcatggccttggtccgcagcacgctcagccgctccaccgcctcggacctgcacacgcgggccaggtcacgagggctggccggggttcttccaccccgccccgccccactctgctccgcggacgtcaggcccacctgagcctctgctcccgcttgatctcctctgctgtgaggttgaagaagtccccaggcagttcgaactgcgaggccaggggcgagggctggaagacgcggcgctgcctgtccagcttggcgcgcacgggctccgcagccagcagctgttccttgtgcctctccaggctctggggctgggccaaggtggtctcgctcagcacgtagaactcctcggggtcctctacagcgtggcaggacatgg

SEQ ID NO: 218972 - DNA, 237 bp, Homo sapiens
  chr19:4483097-4483334
  hypo
tctcagcgttctccgtttgcggcctgacctacttagtattaccctttttaatcttgtcaaaaattacacagacagggccctgtcgcttgggccacgaagacacaagggagacaaaacgtgctcgggccgagcggtgacgcttcaccacacccggttctcgttttccttgtgtgctgattgggggccgctagcctgcggctgtgcgcacggaggctggtgtgcgcctgctgtgggctc

SEQ ID NO: 218973 - DNA, 37 bp, Homo sapiens
  chr19:4544028-4544065
  hypo
ggagggaggatgaagcggaggccgggagcagggggtg

SEQ ID NO: 218974 - DNA, 152 bp, Homo sapiens
  chr19:4550712-4550864
  hypo
tcagcatcagctaaataaccacccggaagccccagccctcggccctggggatcaggacctcatccgggcatgtgactcaggatggagggggttctcaccggggtcgaggcacctgatcctccggcaccggcgtccagatggactcgggggac

SEQ ID NO: 218975 - DNA, 38 bp, Homo sapiens
  chr19:4554410-4554448
  hypo
agttaaactccatcgcaatctcccggaagaagaagtag

SEQ ID NO: 218976 - DNA, 158 bp, Homo sapiens
  chr19:4675504-4675662
  hypo
cacatgtggctgggcggctgggctggggaggggacagccgccactgaccagcagagcgtggaagttcggtgcgtttcagtgcctgcctgaaagcttggggacaggagggctgtccacaggtggtgccccccgcgggccctggccgcttctcctgtggg

SEQ ID NO: 218977 - DNA, 641 bp, Homo sapiens
  chr19:4676079-4676720
  hypo
cggcctgtcttttaaataattatgaaaaatatccccccaaacaaaacacaaacatcaagttggggaggctggccgggggggacaggcaattgcatgcttgggtgctggggacggtggctggccgggccaggggactgagaggtcacagggagccccaggcggaaggcagcccgctcctctgagtctcttctggcctctccagtgcccatcagcgtgtgacctcctcctcccagaaggcggggagaggaggggctggcccgagaccaccatctctctgtctcggcaaccaagaagcagcggacataaaacccaagagcgtttaaaaaaggataaaaggcgtcggggcggtgaaggcagcggctcctcggggctggccagcgctgggcgggacaaagtgcctcactggggcccgcgggccactcagtccctcccgcctggttccccgcggaggctgcagccacttgtgctgtgatgtggcggctcccggtgggcaggctcagaggtattcctgtagaaagtgcagcaacgtgacttcatagtgctcgcccgactcggggcagcgaatactgtgtctctcgttggggtagatctgcggggagacaggaggcagggctggggggcgtggccggaccacccccgtg

SEQ ID NO: 218978 - DNA, 74 bp, Homo sapiens
  chr19:4683997-4684071
  hypo
aatggctggtgccatcgccgttgtcactaccagccacatccccaccaccgccactgccacgatttcaatgctgg

SEQ ID NO: 218979 - DNA, 120 bp, Homo sapiens
  chr19:4798239-4798359
  hypo
gtctcaaaaaacaaacaaacaaacaaacaaaacaaagcaggtccggtatggcaggcgggggaactgaggctactaagagacattaagatgcttaaggacagccgggcgcggtggcagacg

SEQ ID NO: 218980 - DNA, 213 bp, Homo sapiens
  chr19:4817458-4817671
  hypo
ggcctgcagacccctcggtgcactccactgggtagttggtgctggtttctggagctgcgggggtatcagggaggccagtggaggttgcatctggggccacttcgggaagcccaggaggtgggctgcttggcagctctggtgggctggcaatctcccccgatggcggccagctcatctcctcaggctcctggcagccaccggggacaggctcgg

SEQ ID NO: 218981 - DNA, 332 bp, Homo sapiens
  chr19:4817731-4818063
  hypo
ggctgaggaagggcatggtaggggactggctgatttccaagttgctggccagggaggcagggctgccagtggatcgcagggagcacccttggctccagtccgaaacaccgtcaatggggcgtgggaggctcctggtcccagagggcaaagccgaggatggtgggaggcagcccagattggactggagcgtccggatgctccctggatccccagcaatgtcccacccacaccggtttcgggcctcatcctgaagttcccccagccggtggtcgtccctggagctgagggtgcggacggcttcctggtaggccacgtcccgcagcgaggcgggg

SEQ ID NO: 218982 - DNA, 145 bp, Homo sapiens
  chr19:4851495-4851640
  hypo
ttaaagaagaatatcaaataaacagtgcagggagtgcgaatatgtgaccgagatgactggagtgggatgtctggcctggcgggaacaccagcattgttgtcacagttcagtgagatctcaagtttagtcacgtatttatgcagga

SEQ ID NO: 218983 - DNA, 191 bp, Homo sapiens
  chr19:4941804-4941995
  hypo
tctgccgggtctgcgcctgccacctgtgcgggggccggcaggaccccgacaagcagctcatgtgcgatgagtgcgacatggccttccacatctactgcctggacccgcccctcagcagtgttcccagcgaggacgagtggtgagtgcggccctgcccgccgcggggagaccagagcgccccctacaaatcc

SEQ ID NO: 218984 - DNA, 129 bp, Homo sapiens
  chr19:4944359-4944488
  hypo
ggcctgtgtgggccgcaccaaggaatgtaccatcgtcccgtccaaccactacggacccatcccggggatccccgtgggcaccatgtggcggttccgagtccaggtacctgcagcgtcccggggctccag

SEQ ID NO: 218985 - DNA, 59 bp, Homo sapiens
  chr19:4962295-4962354
  hypo
agacccaggagatgacggtgacgggctgaggtcctaaccgcagcctgggaggtgctggg

SEQ ID NO: 218986 - DNA, 116 bp, Homo sapiens
  chr19:4962384-4962500
  hypo
gtcagcaaacgacagccaatgggacccaagtcaggacactgcctgtctgtaaataaagttttattgacaccaccacacccatttctttatgtatatagtggcgtttacgctaccat

SEQ ID NO: 218987 - DNA, 149 bp, Homo sapiens
  chr19:4986364-4986513
  hypo
gatggcggagtaaacgggtgatggccactgagcgctggccgtggggactcttggtcctggctgccaagtagaagcttcaggggtgctcttcacagtcagctgactctgctgtccctgatagcagaagacagcgaaggcacctgccccct

SEQ ID NO: 218988 - DNA, 200 bp, Homo sapiens
  chr19:4986633-4986833
  hypo
gagcctggattagggccctcgaggggcggcgctgctttagccgggggaacagggagggcctctcccagcaggtgacattcagtcagagacctctgagcgactcacacctgcccacctttgcaggatttgggacaagagtgctccaaagaagtgcaggcagcacgtgcggaggccccaaggcggaacgaggcgcagctcac

SEQ ID NO: 218989 - DNA, 282 bp, Homo sapiens
  chr19:4990572-4990854
  hypo
attgggcaaagctcacatgccgtgttttaatactgtcattatggaagttggcctgggggtaatccagtgtctcttttagatctgtgttgtacaaacactgaactagttctggtcgcctctccggcctttgttttggggagaatattcgatgagatggcccgtaattctaacactgtgcattttgaaggatatttataaacccggatggataaggcccttcttagtgctattcttgtgttggttccctttattattttttttaaaaaactttattatgggccg

SEQ ID NO: 218990 - DNA, 42 bp, Homo sapiens
  chr19:4991094-4991136
  hypo
ctcctgcctgggcgacagagtgagactcggtctcaaaaaata

SEQ ID NO: 218991 - DNA, 143 bp, Homo sapiens
  chr19:5023072-5023215
  hypo
ctgagctgggagatgaccctggatgatctggggagcccgatgtcctcaccgggtcctcatgagaggaggcaggagggtgagagtcagagagaggctggaagaggctgtgctgtggctgcggaggtggaggaagggccttgagc

SEQ ID NO: 218992 - DNA, 464 bp, Homo sapiens
  chr19:5023245-5023709
  hypo
tggagtaggacgaagcagagaacgttctcgtgccaaggttttctctttcctgcctgagggccctttatgtagatcagaccagagacaagtgaatcccggtcttgccaggggaggcatttggagctgctcgtgggacgtggtgatgcggtgccaggccacatgcccggggctggggccgagtggcgttctcgtgctgcctctgtggccaggtttcacttgggaacctggctgcatcgcgggttcctcctgggccttctggtggcttggggctcctctgtcctcggtccctgctgggaaccgtgctttggcagcaggaaccagcgagatggcagcacaggggctggaggccggctgggactcactggggccgcatggggcttcacctgatgcccagccctcctgggacagggaccagtgggagcaggaggtgggacaagaggacgagggctcgagggagcccccac

SEQ ID NO: 218993 - DNA, 385 bp, Homo sapiens
  chr19:5037624-5038009
  hypo
ttaactctaaattagtgtttctcttcgcttggcactgtggacttggggccgcatcgttctctggggtggcgccatcctgggcattgcagggtgctgagcagcttccctggcctccatctacctcatgccaggagcaccctcagtcgtgaaagccacagacatccccagacatggccaggtgtcccctgggggacaagaccccccctcagttgagagccacctgctcgctgcggctgctgctgctgttactgcttttgctaaagaaacctgtgcatgccggccacggaggcagcaccttcctgtcgttaacaggcacctggaggataagtgttttcattgccaagcaaaacagtttcttcactgatgtgatcgctgggtccttggg

SEQ ID NO: 218994 - DNA, 162 bp, Homo sapiens
  chr19:5038229-5038391
  hypo
tggcagccccggagcggctgggagggcctgcacagaagggtgcctggcacccagaaggcccgtggtgcccaccggcagtctagaatctggtcttgtcggcccataggctcacccccaccagaggagggaacatgaggctggggacaaggccaggagcccagg

SEQ ID NO: 218995 - DNA, 269 bp, Homo sapiens
  chr19:5058359-5058628
  hypo
gagcagtgccaggcccgggagcccttgggatggaggcagggagaatggggggctctgaggactgagggaggaggggagcccggtgaggggaggatgggtgaccagctcaggagcaggggcgggaagggggcatagaagcttcctaagcaggggagctactactcttggccatgttccaggaggatggagtggctgtaggagcaggctttcgggccagggcctgggtgtggtgggagccggggctggctctggaccctgcaggggctgcc

SEQ ID NO: 218996 - DNA, 268 bp, Homo sapiens
  chr19:5060971-5061239
  hypo
ctttaattgcaggcgtgacatggcttgcctcggcgagtctgctcctaattaaagtgggctggcggtgtatgaagttcgcacggatcctcagggtgctgacccagccccggttccggagggccagtgtgacgacacctcgtggcccaggagagcagggcgggccacccatggccaccgtgccaggaatggggtcttctggctggccctgcgagagccgagagctctgtctcctccgcctgctgctccgctttgtcgggcattcctgtgg

SEQ ID NO: 218997 - DNA, 389 bp, Homo sapiens
  chr19:5080389-5080778
  hypo
agataagaaaacaaatggcccgatgaattcggcgtgaggggcttgagcagacgcgttacgaaggagctgcaggaacgaaagccatggttcagtgcccagcatcggtagaagtcagaggcagccagctgggagacaccgccagccccaggacggccacgtcagaacaccgccaccagatgccagtgaggagggcgcagctgcacgctgctcccagccggggtggatgcagggcggtgccatggccatggaaaaccgttcggcattttcttggaaacggaagcatgtaccctgtgccccagcgatgccactctgtgcatatttactcaggagaaatgaaaacatatgtctccagaaagattggtacataagtgttcttagcagttttcttc

SEQ ID NO: 218998 - DNA, 173 bp, Homo sapiens
  chr19:5102567-5102740
  hypo
ggggaggaatggggccggggccggggtggcatctggggccactcccggtctcttgctgttggcgttgggagggatctcgcaccacagcagggaatcgaggccccggctcccctcaggctctcccttcaccggcaatgggcggcgggcgacgggtgacgggtgacgggtgatgg

SEQ ID NO: 218999 - DNA, 704 bp, Homo sapiens
  chr19:5237889-5238593
  hypo
cgccccacccccccgatcccagcggctcagatgccccggctggagttgatgttaacccttcgactgatccgagatgcccctgtgtacacacacccagggcgggccttgaaggtttgaccatcatgactgattctggaagaaagcctggggtggctacgccgtgactgactgggtgaagggagggaagagggggaagcagggggaggccacgacagagagaccacgccggtggaggccacaccagggaaggccacgctgggctgagcggagccagggaggcaggtgaggtggggagacggcagaaggggcctgtccagctccgagtttagagaagtcagggagagagggtggcggtgacccacagccaactgccaggtgaagggtgactcgctccaaacagggaggccgggccggcacagcagagaactccagagatttgagccccgagtggggacctgcatgcccccacgaaacctggcctcggctccgattccaccccctccccaccctcgggaactgggacctcgtcctggggtcttgagagccaaggctccctgcccgggggaggaagaccgacggggaaggtgggttcgtctctgtgtcctttgctctgagaatgatggggtgcgagccgtgaccacagcctcacggtaccctcaaaatgcctgggaaatgggcacaacgtggcccttcaatcagccccc

SEQ ID NO: 219000 - DNA, 419 bp, Homo sapiens
  chr19:5245671-5246090
  hypo
ctgaagccaagagggtaactcggaggtgctcccacgctgcctcccacctgtgcctgaagtcggggatcgactccagcctgcccctccacctacgagccccatgggccctgctcacatttcaccgtgatctgagcaaccgcctcaatgacgcccaggctggacatggccacgcaggtgtagttggccgagtccttgacatctgtgagttccagcacgttccgacccacgggcatgtcatcctcgggggtcaggtcctcggccccctgcatccacttcacgtatggcatgggcgagcccacggccacgcaggtgatgttcacgttgccccctggcatgatctcgtggctcatgggcaggatggagaagcgcggggccacgcggcggactggggagggggcggcagtggcggcgggagggag

SEQ ID NO: 219001 - DNA, 100 bp, Homo sapiens
  chr19:5274368-5274468
  hypo
ggaaagaagggggggcgctgatgggtccaggcatctggctaggataccaaggagccacgaaaacctgcattccatgccctgcccacggaagtgccatgtg

SEQ ID NO: 219002 - DNA, 385 bp, Homo sapiens
  chr19:5334919-5335304
  hypo
cagagggcctggcacggggcgccaactctaaatagtcggagcagctgttattatccccccgacatcccctcatttgctgatcacgggggttaattataagcggcattaaattatacacacacagacgcgccaacctcgcttccccagaacccctgaatttccgcaaactctcaattacccacgtgacagcgcgacgatgggccatcctcccagcctctctccccacagcctgcctcatccgagggtcccaggcttccagagccatggcttctccgcccgccggatacccctctgggtgtccaggagcggaaggaaggatgcatgcgactgactgcggacgcgttgagagccaggggaggcatgtttacccacagcatctcatgtc

SEQ ID NO: 219003 - DNA, 201 bp, Homo sapiens
  chr19:5455314-5455515
  hypo
acagacctaggaatgatccattggccacaggcccaggcagctggcagctcctgggacagaatgtagcagggcgatgtcacagaagctgggggcatctagaaccctggtgactcctggtctccatgtcatctgccagaaaggccacctgcgccagcacctcctgagaccggccttcaaagacacgacgcatgccgctctgcc

SEQ ID NO: 219004 - DNA, 139 bp, Homo sapiens
  chr19:5587166-5587305
  hypo
ttaaaaagatcccccaagttcgagggaaccctggctaccagattcaacagtgcgtctgcccacccgaaaactcgcagcgagtgggacttagtagcggcgggtgaagtgggggtacggggggggatgagggtgtgggtga

SEQ ID NO: 219005 - DNA, 453 bp, Homo sapiens; identical to SEQ ID NO: 205135
  chr19:5608066-5608519
  hypo

SEQ ID NO: 219006 - DNA, 236 bp, Homo sapiens
  chr19:5608569-5608805
  hypo
gaaacattaaccaacacctgatcgggtgacacagacctagacaaaggaacggcttctgtagccagaaaactgtgtcagacagggcccactctgcctggaatcagggcaccctccagacactaaatggtccgaaccttgtcccttggaagccactccccagaggcacccaggagaccagggcagtgccaattgcttaccagaagactcttggctaggcgcggtggctcacgcctgta

SEQ ID NO: 219007 - DNA, 35 bp, Homo sapiens
  chr19:5609545-5609580
  hypo
tttaggtgatacgcccgcctcggcctcccaaatta

SEQ ID NO: 219008 - DNA, 197 bp, Homo sapiens
  chr19:5661600-5661797
  hypo
ggagattgcccgagagaggctggccttccagcgccagcggctggagcgggagcgcatggagcgggaacggctggagcgcgaacgcatgcacgtggagcacgagcgcaggcgcgagcaggagcgcatccaccgtgagcgcgaggagctgaggcgccagcaggaactgcgctatgagcaggagcggcggcccgcggtgc

SEQ ID NO: 219009 - DNA, 209 bp, Homo sapiens
  chr19:5694398-5694607
  hypo
cattgcggtccaggccagccccatgaccacgccgggcggtgtcacgtcatacatgcgctccacggtgaacacgggcttccccacgaagtcctgcaggttctcgggcgtcacctccacggactcggcctcgccgctgacaatcttgtaggccgatttccgtaacacctgggcggtcagggcaacacaatgggcacgggaaggtggggtga

SEQ ID NO: 219010 - DNA, 366 bp, Homo sapiens
  chr19:5695870-5696236
  hypo
cctgcgcccactcgcgccacctgcagctgctcgcaagcgtctggtgtgtctctcacggccccatctgctcctcggccgcaggtcccacctgtctctcccgggcccaggagctcccagaggcacggcctctgcaggctctggggggcgccccctgctctgggaaggggacagcagtggggaggggctgggcttacctccgcaatggccagcttctcctgggccacgtagcccgacacgttgatcatctccatacggtctcgcagcggctcggggatggtgtccgtgacgttggccgtgcagatgaacagcacctgggggcggcggcaaggtgctgggggactggccgcttaccctccccagcaagcc

SEQ ID NO: 219011 - DNA, 201 bp, Homo sapiens
  chr19:5711882-5712083
  hypo
ccgccgggtgcctggcgctcagctcgtcctccgcctccttcttgccccgctttgacttcctgcggggcttgtgcttgttctccgcctccggctcctcgggctccacctccagctgtctgctgatatggactctgacacgggagcaaggcaggtgtgaatcagccgctgaggctgggagctggacccggctgaggcctccct

SEQ ID NO: 219012 - DNA, 40 bp, Homo sapiens
  chr19:5785227-5785267
  hypo
tggccttgtgcttcggcaagaaggcgaagctggggggcac

SEQ ID NO: 219013 - DNA, 198 bp, Homo sapiens
  chr19:5785480-5785678
  hypo
atcctctgtgggagccgctccagcagccccacgggcacgtacctgcggcgggtgggcgggcaggacaggcttgagtcagctctaaccagccgcggcccacgcgccgcccaccccagccagccccggtgcccaccggcacaggaaggacagccactcgagcagaaagcgccgggtcttctccacgccctgcgtgtccga

SEQ ID NO: 219014 - DNA, 446 bp, Homo sapiens
  chr19:5789244-5789690
  hypo
gaccacgtcctcatccgtcaggggcccgcaggtccgcacggggctgctgggaggggtgctagtgcccggccctgcggggacctgctgggcaccacagttttcctgcctgggagcgccctcggctgccgtgccctcggggacagcggcagcgggtgtggggccctggctgaaccggcgcagggcctgctcagctcgctcgaagcggacctcgcgcttccgcagctgctgctgcagggctttgtccaggccgttgcggatggacgggggctgggtcccgcgggccgccaactcctcctgcaccaggttctgtccctcgggcctcaggtgggccccagcgaagcggcaggtcacgccgtaggggcaccggccgaaggtctcgaagagcacgcagcgggggcccaggtcggccggcttggtctccaggtagcgccccacgtcgtgcagaa

SEQ ID NO: 219015 - DNA, 241 bp, Homo sapiens
  chr19:5789927-5790168
  hypo
cggaatggcatcagagcaagctcactgctcgttgctgaaggcccaggagctttctaacaattacccgctgccaggaaacacaccctgctcctgcctgccccggcaggaatgctcacgtggccgcacttgcctggattagggagggacacagcctgttcttgtcgtagttcgtgggcttcacatggggccggcccttgttttgtccccgggccctcttctgagtctgtagctgctccccggg

SEQ ID NO: 219016 - DNA, 152 bp, Homo sapiens
  chr19:5790213-5790365
  hypo
cagtcggatccgcttagcctcaggctcagccagctcattgccagcagggtctcctacctcggtttcccggcaagtcttctcctgccctttggcttccaggaattggtgaaactgctccttggtggtgaggtatctgccgacagaaagggaaa

SEQ ID NO: 219017 - DNA, 141 bp, Homo sapiens; identical to SEQ ID NO: 205137
  chr19:5804852-5804993
  hypo

SEQ ID NO: 219018 - DNA, 50 bp, Homo sapiens
  chr19:5825264-5825314
  hypo
aatgcctgccccaccgcaggtgctgtggggtgagggtggtgcgtgggccc

SEQ ID NO: 219019 - DNA, 522 bp, Homo sapiens
  chr19:5825362-5825884
  hypo
ctgaggcgtggatgccggcagggtgcgtgtgcagcgcctttgggtgtgggccacgagtacgcccatgtgcgcgtctgcgcccgcccctgccagcccacacaatcctcttttcttgtccttacaatgcacaagggtggcctccagcacgagctccacttctgtcctcccaccacttccctctctgcaagcggcgtgaagtccttcctaggactctgggacagagacccgggcgggacccccaaaatccagtgctccaggacttggggtgcggggggcaaagcacgaatggaggaatttcaggcactgcggagggtcagggcccatgggcgggtgcctgtctgccctactgcaaaaagcgagtggccactgactccccaagtccccatgttctaggctcctggtggaatttcaggctggggaccttgtgttctagcccctgtgcaagcagccagccccgctgcagggaggcagggacagacatcctaaaagatgattcattgttgccaggtgcggtggctcacg

SEQ ID NO: 219020 - DNA, 50 bp, Homo sapiens
  chr19:5826124-5826174
  hypo
gacagagcgagactccgtctcaaaaaaaaaaaaaagattattcattgttt

SEQ ID NO: 219021 - DNA, 95 bp, Homo sapiens
  chr19:5826209-5826304
  hypo
tatcgggcaagcccacaaatgtctgcttcgatgcacccctctggggttgggtgtgccccctaaccccccagcacagtcctggccactccagtcct

SEQ ID NO: 219022 - DNA, 38 bp, Homo sapiens
  chr19:5834509-5834547
  hypo
agaaagagaaaccttcaggccgggtgtggtggctcacg

SEQ ID NO: 219023 - DNA, 358 bp, Homo sapiens
  chr19:5844274-5844632
  hypo
cagctcggtcttggccgagaggttgagcggtgggtgggcaggctggccggaccacggctccagccagccgtagggcgtgaagatgtcggagtcgctgcggtaggacatggtgagattgaagtatctgtccagggcttccaggtgctggcagttagggggtggctccaagttgaaccagatccagcgctgcccctgcggcctcggggaaggtgggaggcgtgacttagggttggacatgatatcccagtggtgcacgatgaccatgtctgcctgtgggtacaccttgcggtcggcagtgatgtggcagtcggctgtgccgggcaccatctctgaacagcgggacagagccacagggatg

SEQ ID NO: 219024 - DNA, 106 bp, Homo sapiens
  chr19:5844662-5844768
  hypo
agggtggggcgggtgggagtggtgtcctgtcgggaggacccactgggagccctaggggatccagtggcatcgtctcgggacacacgcaggtaggagaagaaacaca

SEQ ID NO: 219025 - DNA, 185 bp, Homo sapiens
  chr19:5910154-5910339
  hypo
ttttctcctctggatgaacaaggaggggggttgtttgtacaaaggaaaggcaggctggggcctgtctgtgctcaagaataaaccggatgatttcctggcctgggggcaagagggaggccctctgtgttatttgtgcctcctggtagggtcctgctgggccaggtagaatctagggagtgtaggcc

SEQ ID NO: 219026 - DNA, 159 bp, Homo sapiens
  chr19:5914411-5914570
  hypo
ccaagcatggacgccgtggatgccaccatggagaaactccgggcacagtgcctgtcccgcggggcctcgggcatccagggcctggccaggtgagctgtcccctctcaccttcctgaccccggcccctgagaccactgttccaaccgtgtcccctgcctc

SEQ ID NO: 219027 - DNA, 291 bp, Homo sapiens
  chr19:5915130-5915421
  hypo
ttcgactcctctgagaaggacgggcaggtgggtggctgcgcggggggccccctccccaggcagttcctcggccgtgccccctcacggccctctgttcccaggtcacactggcggaattccaggactactacagcggcgtgagtgcctccatgaacacggatgaggagttcgtggccatgatgaccagtgcctggcagctgtgagcagctccggctcagccctgctgccctggcctgtcactccccacccctgccggagacctcccttccctgggccccttctctcctgggc

SEQ ID NO: 219028 - DNA, 325 bp, Homo sapiens
  chr19:5915520-5915845
  hypo
ggtcctaacaggagtcactggctcaggaccccagggagaaacgctctccccacccacgccatgctgaccagagatcttgcagcccctgtggatgcccccgccgaggtcccccgatccccgcacccggactgctgctccctgcccctcccttgcgggtcccccaggaagccaggtgaccccaggtgggaggctgtgtgtggaggccatcctggaaggaagtttagacctgcccaggtgtggagcgaggggcacaggggcatcctaacctcagaaactgaaataaagcctttgaaaaaaaaatctgtaaaacatcaacccccaatca

SEQ ID NO: 219029 - DNA, 225 bp, Homo sapiens
  chr19:5925831-5926056
  hypo
ctgcatggagctgctcggagccatgaaccctctcctgtacccgcctgtgtgtgtgcgcgtgcatgtgctggggggcagggctataatcaactccatcaccttttgctttaacagttaggatggaaagagagctcatgaagctccaaggagccttttccaccttgttacaaaaccacgccttgttataaaaccacgcctaagctggcctctcggtcaatgcttcat

SEQ ID NO: 219030 - DNA, 150 bp, Homo sapiens
  chr19:5927750-5927900
  hypo
gtcactgcaggtgagggctccgaagcctgggctgctggtggggaagtgccagggcccagcacacgcacaccagcagcagactgtgccgtgagccatggggctgcctcgctaacaccttctttgtcccacgctcccctcccctgttaaaag

SEQ ID NO: 219031 - DNA, 326 bp, Homo sapiens
  chr19:5938101-5938427
  hypo
atgccttgttgaaacggggccatcaactcaatgctgagagttataagaacccacctcttcccttgacacggacatcacgccagcagctaacttatctcacaatgcttttgaagtcggcaatgaatttatatatggtaggttgggttacagaattcaggttgttaaactcgcttgttaaatcttttatgaggaatttcagccacgtgggagaaactttcaggaaaccttggagttggttctccagtgaaagaccaaaaaggcaggctccatattcttcagaaagggggagcggctttccttaaaattttaaagctgggggccagacg

SEQ ID NO: 219032 - DNA, 162 bp, Homo sapiens
  chr19:5985339-5985501
  hypo
ctggaaagtcctctggcatgcgcagttatctcttcatccctcatggagcgcatgtgcaagttcggggggcattagtctaaaccatgcggtagaaattgaggctatgacatcagcaagctcgttctgtgcaaactccagtccgccatattgttccaactgact

SEQ ID NO: 219033 - DNA, 956 bp, Homo sapiens
  chr19:5994753-5995709
  hypo
aggcactaatttggtggagccggtgaaatccaggttcccagagtgaccaggcggcatcttttggaacctcgaggaggcgccggccggggctgctagatgccctgcagggagtggttggggtcactgcgctcccgctttaccaggggctcacccaggctgcgggcgtctgggcccgcctcgctgccacgctgctcatcgcccatgtcatctgcggagggaggggtagggtcagtgtccatcatcaggagggcacgagagggagagaaggaagtgcacgttccgagaactgctccggcacgccaggcagggcaccgaggatacatggcagcctgtggaccccacctcggcctctgctccaggctgacctgtcctccccacctgccgttacccagaggtgcccccagctcgggccaggcgaaagagcctctgccctgtgcctccctttcccagcgccgacgggcctggggcctgctccccacagggctggggcctctggggtcctcccacccgcatgggacagagacggggcccgggggtccctctggcctgcctgtcccactctcctgctgggcgtgggcgcaggagaccaggggctgcctagtctgggcctggtgctgaggtccctgggcagcggctacccagaggccagcggcagtctgagccccagccgagccagtctgcagtgtcacctgctgctcaggcatcacccactgtccggatgacagatcccagggccctcaccccccaaggggctgcccgcatttccacctgttcatcatgagatggggcagacaggccacggccaggagtaccaccctcctgggagggtcgtggtgggaaagccgcagacgcacctacctttgtcgagcagcgtcagcgacagagaggcgagatcgttgaactgaaagagaaacctggagtcaggggcgcctgcagaggggcggcagttgctgttt

SEQ ID NO: 219034 - DNA, 53 bp, Homo sapiens
  chr19:5996649-5996702
  hypo
tgtggatgtgctaagcgccacttgattgtgcgctttcacgtggaaatctctcc

SEQ ID NO: 219035 - DNA, 321 bp, Homo sapiens
  chr19:5997028-5997349
  hypo
gcccggccaagccccggccgtcccacccaggagggtcctcacctctcccatcacagcgatcggcgtctctccggtggcctccgcgacgcggtgctccaccaggtagaacatgtactcgtcgtagagcaggcggatgaggtggaaggagccgaagctggcagcgctgcgcagggtcaggtcccggatcaccatggagctggggacaagcggacagaggctggggaccctcaggggagcatggaacccgggccccaggccagacttcatggcagcaacacaccccctgctctacgttccctggggaacccagaggctgagtga

SEQ ID NO: 219036 - DNA, 515 bp, Homo sapiens
  chr19:6001733-6002248
  hypo
ctgagctcaccagccgagccccctaccctctagaagtttctctcagagccccccacccgccagaattctctcggaggtctggtgggactaacctgtaaaaggaccatttcagcaagaactgccgggcggccttggggaagctggggctgccggcatgctgcttcaggacctgggtgaccacactgtccagccagctggcccactggtccagggagctctgctgctgcagggtcagcttgaaatcctgctccagccgctgcaccacactctcctcgcactggcacacccacgaggcctgctcctgtgggcagggcagaggccagtgtcagcaatgtggacccccagccacggcagccctccctggacctagccatgctcagggcgggacatcgtgctgtgcttgagccttctcgcccttgaccttgacagctgcaagccaagtcctgtgtctcccgtcacaggggcagaatagagagctgagggggatcgtacccggcttccggggactcataccc

SEQ ID NO: 219037 - DNA, 225 bp, Homo sapiens
  chr19:6003832-6004057
  hypo
gaacggtgggtaatcactctcttttccacaagtcggccaaggttctacatttcaaattcgactgatttgtggccaagattgcagcaataagggtcacagcaaggagattaaatttcccgaataagatgagcacagaaacacgcaatctgttctgaattgacccaaagatgtgacatcaaatgacatcttctgttgttccccttcctgccagcactgacgcgtcac

SEQ ID NO: 219038 - DNA, 470 bp, Homo sapiens; identical to SEQ ID NO: 96127
  chr19:6004120-6004590
  hypo

SEQ ID NO: 219039 - DNA, 223 bp, Homo sapiens
  chr19:6005315-6005538
  hypo
cggagagctgcctggtactaacgggcatgcatatttgtggatggcctgaggggcacggtccatgggcccggatgtttgtggatggactgcggggcatggcctgtggtcctgatgctgtgatttatgaagagaggcctctgtgcccagcttccttgacgacccccagggttttggggagcttggcacgggcctggcccgagggctccctcgtggtgggtgctgt

SEQ ID NO: 219040 - DNA, 199 bp, Homo sapiens
  chr19:6005978-6006177
  hypo
gctactcccagaggccggcctgcatgcccccagtgaaccttctagaaagcaccgagcccagcccagctactcttggctgtgtcctgacagcaggtagagctcaccagagccactgtgaccttcccctcgagtcagagacaaggacaaataacgcatgccagaggggacacattctacggcccacagcggctctcactta

SEQ ID NO: 219041 - DNA, 482 bp, Homo sapiens
  chr19:6006879-6007361
  hypo
ggcatgagccaccgcgcccggccacttttgggttttctgtgaaagcgatggtctgaggtggctgaagacgtacatgtaagaaaggacagaggaggcaggaagagaggatggagcagcgccgggcggggccgtgggtcacttactggggaccggcctcagcacgtcggggatgagaatctccaccagcgcctggtagaggatgtggtcgcagctcctcatccacctgaggatggggtcgcactgacacagggagataagcttgtccttgggcaggacggcgccctcggggtcttcgtcactgtggagggaggggggacaggtgagctgtggcctggcccaggtgggctcactcagccacgggagcgagcagagagccgggctgcgggacttttgcccaacagtggggctggggttttgctccccatccctgagcctcgatgggtcccctccctccatgttgctcccggcgcctccgtgtttcc

SEQ ID NO: 219042 - DNA, 482 bp, Homo sapiens
  chr19:6007912-6008394
  hypo
tgccctggaatcccaagggaggccacagagaggagaggagcaggcgatggacatggatgcggaggggctgctgcttcagagaggatgcttgttggggggctcggggctccagctcctcagcgtcacccggggacgcctggcctgagcgctggcggttcccgggagggacacgcaggagctgcctgcctgggctggggcggtcacctcgcagtgccgtctgtacaccagctgcagggccttgacgtcgtgcagtgtgacgccgtcctgcagcaggaagctgcccaggtcgggcgctgggaactcggggaagacgtgggagacatctgggggaggaacacgggaacatcagaaatggcgaggctcttaggacaccgtggacaactggaaggccacggtggatgggggcccagaaacagatgttctgccccaccccatgcagtcagggaatttgttttttctttctttttctttttctttttttt

SEQ ID NO: 219043 - DNA, 92 bp, Homo sapiens
  chr19:6012586-6012678
  hypo
ggtgatgctggctccgcggagggtcacgggtcatgagcaatgcaccgctgtgtgggggaggtgaatggtgggagaggcggtggggagcgggg

SEQ ID NO: 219044 - DNA, 46 bp, Homo sapiens
  chr19:6013009-6013055
  hypo
gcatgggctgctgccgcatggccatgtactgcgtgtcctcctgcag

SEQ ID NO: 219045 - DNA, 398 bp, Homo sapiens
  chr19:6017220-6017618
  hypo
gacagggcaagacttcgtctctttcaaaaaacgaaacaaaacaaaaagatgggctaaatgagtcccgagccaaggactatgcctcgagaggtgaacatccagttagaagggctgcgagaactgtccacacgaagagctcagtccccacactgggcatggacgcaaaggtggcctgcccaccaactgatgccctcacccaggtgccttaaagactgcggcttaattctggtttccacctctccctctgctatcgtctgtcccctgatccagagaggtctgctatgtgaatacaaaaggcttgcactgatgcctgcgatttgcagaaagacaggaattccacgcacagaagcgaggcccgagtccagatcccatgtcaagagcgtcgggggaaaccagct

SEQ ID NO: 219046 - DNA, 76 bp, Homo sapiens
  chr19:6018261-6018337
  hypo
tgagccaccgcgcccggccttcatctcctttttatgaaatagtgctatggggtggttctgacgagccctgcaccag

SEQ ID NO: 219047 - DNA, 521 bp, Homo sapiens
  chr19:6024682-6025203
  hypo
ctcattttacacatcggccagcacagaagtcaggatggaatcacagtgaggacgggagtgaggacgggatcacggtgaggacgggagtgaggacgggatcacggtgaggacgggagtgaggacgggatcacggtgaggacgggagtgaggacgggatcacggtgaggacgggagtgaggacgggatcacggtgaggacgggagtgaggacgggatcacggtgaggacgggagtcaggacgggatcacggtgaggacgggagtcaggacgggatcacggtgaggacgggagtcaggacgggatcacggtgatgactggggtccactgaaggggacttcttctctgatgtctgaattctcaagagaatgtcagagcccagtttaagtgctagagagcaactactagaaggacattctgacttcgatggcccgtcccagtgttaagatgccgaacacatttccagctatgtgcaaaaccgaatcaagagcgtttggggagaagtgaaagcgatgagtctgaggg

SEQ ID NO: 219048 - DNA, 360 bp, Homo sapiens
  chr19:6026055-6026415
  hypo
aaagtgctgggattacaggtgtgagccaccgcacctggttgccttcatttgtcttaaaaatgtctatgcaggttacaagcagagcagggacaggttgccaggtcagacgcacacttacatggctgttgagtaaaccgcttttgtgtgatgtgattccttcgcttttttggaggttttcaatcgccatttcaagctaaagaaaatgtgtgcagaaacaaaacaaaacaaaatggaaaaaaaaaaaaaggaaatcagatggttagcatcagccaagatttgtttttattaatatccaaataatgattcgagctcctacaaaataaaaatgaggctccacgcaggcagggcgggggtgagtta

SEQ ID NO: 219049 - DNA, 500 bp, Homo sapiens
  chr19:6026959-6027459
  hypo
gaggtggggagggaggtgggcggcaggtccacgcgatggaggaggcacacagctgtgcgtggccactaaggcattcgcacgcatttggtttgtcctagactcgcacacggaaaacagcgacgtaaaatctgctgcagcccaccctgacgaccagaggactgaagcgggaggagatgaacttgaagtatatgcttcctttcttaaggaggccaaagacttgacacttctgcaaagagcaggttgagtgtgtatttcagagagcaggcgagcggagctgagttcaagaatgagagggtaactgcttctcccacggcctccgaccacggtggttctgccttctctcattagctacccttgcttcaagccaaggaggacgtcagggtcacctttaagaagtgcagaaggtacactggaggaccaggggaaagtaggatggtgagacctctcccacccatcagcctcagggtgcaggcgatgagaaggcaatcgccacctctatg

SEQ ID NO: 219050 - DNA, 164 bp, Homo sapiens
  chr19:6040234-6040398
  hypo
taggtgtaggctgttcgtctgttagaaagagagaagtcacgcatgggacgctgtcccatttaaatgccttgtctgagttcacagatatccagccaaacatcacgtaaaagctgcaacccagagaggccagacatatggagcaattcggacgtggcatatgacac

SEQ ID NO: 219051 - DNA, 342 bp, Homo sapiens
  chr19:6044407-6044749
  hypo
aggactgatcagaggcgacggcggggtgatggtcagacttgcacactcacaccgacctgggcagacacacggcaggtacgtgcaggcacacaaacaatgcacatacatacacaagtgtgcacatacactcagcccatgcaccacacatatgcacgaattgtgggcacacacacacgtatgcacacacacatacacggaagcacatgcaccttcacccgcccaggcagctttgcctctgtgggtctgtagtctgcagcaaggtgacactgatcgtccctagtacagaggggactgctggggccctctggatagccatccgcaccactgcgtgggagagcactc

SEQ ID NO: 219052 - DNA, 686 bp, Homo sapiens
  chr19:6044993-6045679
  hypo
ggtcaaagtgaactcgagtcgagggaggaacaggagtgttttgtgtgtttattgagagctggggctttcggagtcattggctgcagtgctgtgatttcccggcatgaaccctgaatgtcacaggtagcagtgactgccatatatacatcacgaggggtgatgggtgaggacacgccatcccctgtgttgcaggagtggagctaaggatgaagatggtgctaataaggatgccagcgcaagggcattctgattccaggtgagctgggcgccgtgtgcttggagaattcacagggtcctggcaagtcctcagagagggaccacagtgatgaaacctgggacacacatggtggccgtgagtggcactgagacctgtccatggtggctgctgcagaggaaggcagagtccacctaggcctgggagagcctgagagaggggcttggcaggaagacctgagggctgactcctcttggacaatttcaagtgggcacggaaacatatcaattaggccacaactgctggcagggcgacggcgtctgatcctcacctcagatgggcttccaagacgccctccccactgccatatgtgcaagaaataaaagctaaagatgtctgaccatacacactacatcaaataaaccgcttcactgtctgcctttttgtttttgcggaattgtgtttttttgtt

SEQ ID NO: 219053 - DNA, 137 bp, Homo sapiens
  chr19:6046169-6046306
  hypo
cttatttcattccacggtagaaatccaggagcagagaaagcctgaatgtgaaaattctctctctgcgaattttaaagaatatgttcattcaggtgctagattctattttgaacaaaatcttaagaattctaactcat

SEQ ID NO: 219054 - DNA, 181 bp, Homo sapiens
  chr19:6062926-6063107
  hypo
gctccctggccagtcgcgcatattcaatatctgctcgtcctttccctccccttccagagaccaatgtcacctgtctgtccttttctggtgcctggcccttgctggggtcacccacatcccctcccgtgagctgctgtgtctcgtatccctcctgtcctgccgctctcgctcttgctcctag

SEQ ID NO: 219055 - DNA, 153 bp, Homo sapiens
  chr19:6064108-6064261
  hypo
caaccccagaccctacgtagcacattgcctgcaaagatgctcaagacgtgttttgcaatgaacaagagaatgagcagcccgcctgctccgggctgctcacctgttctagccaccttcaccatgttggcctccagctcccgtcttcagctgagc

SEQ ID NO: 219056 - DNA, 286 bp, Homo sapiens
  chr19:6105444-6105730
  hypo
aggcatctagcttggcgatgaggtcaaagaggtattaggcttggcggggagtggagttaggggtgactttggcttttgctgcagatgagatgggagccatcggagggtttcgagctgaggggtatgaagtagaacttaacatgacgccgcctctcccagggttaacaggccccgtctggctgctgggctgagagactgccgagcaccagtggtggaatcatccgggctagatgctggtggctgggaccagaggggctggcagtggaggtggcgaggcatggtcagg

SEQ ID NO: 219057 - DNA, 38 bp, Homo sapiens
  chr19:6107003-6107041
  hypo
ctataaaaatccacaggtgccggccgggcgcggtggct

SEQ ID NO: 219058 - DNA, 776 bp, Homo sapiens; identical to SEQ ID NO: 205141
  chr19:6110226-6111002
  hypo

SEQ ID NO: 219059 - DNA, 223 bp, Homo sapiens
  chr19:6215046-6215269
  hypo
ctgccggcctctgccccgcatcccacaggtgactgggatgacggctgggcaccgctgcagactgggcttcccaggcagcagaccagggtgtgcagaagctccgacggtgtggcctgggcgctccctgccccggcaacgcagggacaaggccggcaagccctcacccagggcccacacaaacgttccgggaggaatcaaaaggcgcttcgcgtgtggctcggtc

SEQ ID NO: 219060 - DNA, 208 bp, Homo sapiens
  chr19:6230445-6230653
  hypo
tgctgggtgctgccgtgtgacctgcgccttgggtctcggcccccagcaccgacacctctggctgggcacagacggccgcagcaaagtagcctcggtggagcggccccttggcgggcaggggcggggcacactcaccccgccggcccgcaggagcttgtaccggaactccgtggtggggttgttgaaggtgagcttctcgcagcgcagg

SEQ ID NO: 219061 - DNA, 143 bp, Homo sapiens
  chr19:6414854-6414997
  hypo
gcagttcagaagtcccgcctgcgagtctcagcgctccccagcatcacgacagcggcacacaggaacaagcagccggcgcagggaggcctcttcgtttaacctctggacccagcgaatgcttccctggcggtgcgtggggactc

SEQ ID NO: 219062 - DNA, 337 bp, Homo sapiens; identical to SEQ ID NO: 205145
  chr19:6590881-6591218
  hypo

SEQ ID NO: 219063 - DNA, 120 bp, Homo sapiens
  chr19:7100509-7100629
  hypo
gacaagttaaaggtggggagccaggggggccagatgcgaggtaggaggcggcaaaaggctcagagctctggtctccacactattgagtacaatcacttagatctgagaagcagatgttca

SEQ ID NO: 219064 - DNA, 82 bp, Homo sapiens
  chr19:7116309-7116391
  hypo
aggagagagggggatgagctcgcacccttgagaagaaccttcatgagccaattcccaaagcatcaactccgcatggatactt

SEQ ID NO: 219065 - DNA, 120 bp, Homo sapiens
  chr19:7135608-7135728
  hypo
tttttaacgggagatactgaaaatgcaattaaatagctagaggtggctttgtttatgaaactagcaaaagaaaaaaaaaataccttccaccagctgggcacggtggttcacgcctataat

SEQ ID NO: 219066 - DNA, 96 bp, Homo sapiens
  chr19:7194737-7194833
  hypo
gccaggctggtctcaaacacgtgacctccgtctgccttggcctcttaaagtgctggtacaggtgtgagccaccgcgccaggccagctttgctcttt

SEQ ID NO: 219067 - DNA, 280 bp, Homo sapiens; identical to SEQ ID NO: 205148
  chr19:7293746-7294026
  hypo

SEQ ID NO: 219068 - DNA, 720 bp, Homo sapiens; identical to SEQ ID NO: 205149
  chr19:7294386-7295106
  hypo

SEQ ID NO: 219069 - DNA, 1053 bp, Homo sapiens; identical to SEQ ID NO: 205150
  chr19:7459630-7460683
  hypo

SEQ ID NO: 219070 - DNA, 188 bp, Homo sapiens
  chr19:7484059-7484247
  hypo
accccagatgtacccacactcggcctctgtaccccgatgtacccacactcggcctctgtaccccgatgtacccacactcggcctccgcaccccaggtgtgcccacactcggcccccgcacctgggtgtgcccacacttggcccccacacccgggtgtgcccacacttggcccccgcaccccagatgcg

SEQ ID NO: 219071 - DNA, 179 bp, Homo sapiens
  chr19:7484791-7484970
  hypo
accccagatacacccacactcggcctctgtaccccaggtgtactcacactcggccctcataccccaggtgcgcccacactcggcctccacacccacactcggcccctgcaccccaggtgcacccacactcagcccccacactcacgctaagccctgacgacagcctcaggccagctgag

SEQ ID NO: 219072 - DNA, 273 bp, Homo sapiens
  chr19:7493740-7494013
  hypo
ctgtgtgctcgtgccgcaatgggctgagcacgtagatctgatgtgacaccagtgcctggagatgaacagcacctgacccttgctcccagggaggtcaaggtgcagcgaggctgtgcaataaagtcgggagtgtggtgagctgtaaaggaagcccgcaggcctaggccacgggcccgagggcaggggcacgccatgcagaaggactctgacccggccccacagctggccagataagagagacgccttgagtcgaggggccgggggctctgaggc

SEQ ID NO: 219073 - DNA, 316 bp, Homo sapiens
  chr19:7535298-7535614
  hypo
aaaccactgatgaccgcctggcaggggccagcctgtcggtgctctgggccttgcagctgtttctgtagggttagcggtggtgccggggtcactttctgaatctctttttttttttttcaaaaaggaaagtttttaatggaaagttgagccagaactaaaccagggagctgtctgaaatcatagcaccccatccgggtggcggggagatcaactccgagctgtttttccgaggcagtgaggaacggtgccggctctgcacggagctgaggacaggacagaccttgctttgagaaggagctgccggccggggccacgc

SEQ ID NO: 219074 - DNA, 83 bp, Homo sapiens; identical to SEQ ID NO: 205151
  chr19:7660603-7660686
  hypo

SEQ ID NO: 219075 - DNA, 278 bp, Homo sapiens; identical to SEQ ID NO: 55532
  chr19:7660714-7660992
  hypo

SEQ ID NO: 219076 - DNA, 1166 bp, Homo sapiens; identical to SEQ ID NO: 205153
  chr19:7676864-7678030
  hypo

SEQ ID NO: 219077 - DNA, 397 bp, Homo sapiens
  chr19:7680032-7680429
  hypo
agggggtggctggctggactcggcgtctgtccccaggatgaagacaagcctgaggacgagatggcccaaaagcgggccagcctgctggagcggcagcagcggcgagcagaggaggcgcggcggcgcaagcagtggcaggaggtggagaaggaacagcggagggaggaggccgcgaggtgaggccgggcctgcccgggacgcccgctccttggcctgtctgccaccgcggaccccgtgagcggttctgatgccgattccctgtgatctgcaggctggcccaagaggaggccccgggcccagccccgcttgtgtccgcagtcccgatggcgactccagcccctgctgcccgggctccagccgaggaggaggtgggcccccggaagggggacttcacgcg

SEQ ID NO: 219078 - DNA, 121 bp, Homo sapiens
  chr19:7682207-7682328
  hypo
gcagggctccctccccgtcaggtctcatgtccccaagccgcctgcctggaagccgcgaacgggactgggaaaatggcagcaatgcctcctccccagcgtcagtgcccgagtacacaggtaa

SEQ ID NO: 219079 - DNA, 90 bp, Homo sapiens
  chr19:7682911-7683001
  hypo
ctcccaagaagggcggcggcacccccaaatagccccacccgggcggtccacgggccgggccctgtgtgctgcggccgccatcccctggag

SEQ ID NO: 219080 - DNA, 262 bp, Homo sapiens
  chr19:7685294-7685556
  hypo
tcaaagtccttccacgtctgccagaacgcgccggtcgtctgcgtggggggcagggcaggggtgggtgtgtgtgcccgtgagctggctgactccgccgcagcccccaaccctgatacccgtccctccccacagccctacccgggggtcacagatctgggagcagaagctgtagatggcccgggcgcggtcaatctccccgagcttgcactccatgtctgcaaaccgcaggcacatctcacgcgcgtgctcgtccgacagcacc

SEQ ID NO: 219081 - DNA, 109 bp, Homo sapiens
  chr19:7701077-7701186
  hypo
gcttggtaccttcatcaacacggccgagcgaaggaaccagctcagaccagcaagagtctgtttgcacacatacctcgcaccttaaatcggagacctcattttgtatggg

SEQ ID NO: 219082 - DNA, 259 bp, Homo sapiens
  chr19:7711957-7712216
  hypo
atcttggcccctgaataccccgtggggggcactcctgaccccggaccccatgcctggggttcctcccctaacctgcctctcggccgccaggacgccgtggaggaccggctggacaggaacctgtggcccttcgtatccgaccccgcccccacggccagctcccaggccgctgtcaggtgaggccccggggccgcccccgcccacgcctgggtctgtgttaggtgggcggcctggcggcggtgagggcctcctgcctgga

SEQ ID NO: 219083 - DNA, 100 bp, Homo sapiens
  chr19:7838387-7838487
  hypo
cgcagtagcctgccagcacttgcggggggccacgtgaacagtgtatttactgaagttgtgcacatgcttatttcaggtgtttttccgttaccaatctagt

SEQ ID NO: 219084 - DNA, 372 bp, Homo sapiens
  chr19:7972036-7972408
  hypo
aaaaatttaaaaagcgtcttgaaggagttggggggggagagaagacagggccgccagggctctgagcgcagcgccagcctgtgtggggcatgcaggctgtgccccacgcctgtgttgggagagagagtagatggggtgcctggccctgtgagtggttgtgagtatgtgtgtccgagggcaagggggactctgtcccggctgcatgggtgttaggtccacggcatgccccgggtgtgtgttgtgcgtgcgtgcacttgcacggcatgtgcgtgcatgttgacatggcagccggtgcacctgtggctcctgtcggcagacacgtgccctccagcctctcgctctctctcatccgttctctttctcatcctcacc

SEQ ID NO: 219085 - DNA, 50 bp, Homo sapiens
  chr19:7989496-7989546
  hypo
gcggatggggggcagcggtgggcaccggggcagggcgcgctgacctgtcc

SEQ ID NO: 219086 - DNA, 170 bp, Homo sapiens; identical to SEQ ID NO: 205157
  chr19:7990126-7990296
  hypo

SEQ ID NO: 219087 - DNA, 300 bp, Homo sapiens; identical to SEQ ID NO: 205158
  chr19:7990894-7991194
  hypo

SEQ ID NO: 219088 - DNA, 389 bp, Homo sapiens
  chr19:7991810-7992199
  hypo
cccaggtgaccaggcgccgggacccctgcagggcagagcaacagggcaggggttggccctgcgggggagtgtctccagctgccgcgcacccgcaacagcccgttgtcccctcccgggccagctggtcttgcagccgtcctggcagagctgggggcagagcccgcagtcttgttcccagaggtctggagttgccgcaggtggtgttgcggtgcctctgtgcctgatgacccaggccggggctacctggctccggcaccacactcagagaatctgctcggtgctggaggccgagatgtccaggagccgccaggccgcgtaggggttgagctcgtcctggtctcggcagagcgcccacacgtacagcatccgcagcaccttgtcctgcaggg

SEQ ID NO: 219089 - DNA, 273 bp, Homo sapiens
  chr19:7998974-7999247
  hypo
tgggagagggctctgaaggccgctgtcctgcccagcttctccccgcctttggataccgactcggccgactgcttggccgtcttggctgcttcctccacgccctccttgattttccggccgagatcacttttactgacttcgtgaaggctctactgagacagacacagagagggggcgttggcaccggccctggcggccggggggcggggcaggaggaatgaattcctgccggagagaagggcggatctggttccccgaggccggcagaggcct

SEQ ID NO: 219090 - DNA, 97 bp, Homo sapiens
  chr19:8004778-8004875
  hypo
agagtgagactctgtttcaaaaaaacaacagagaaacagtttaatgaatgatcatacaataatccaatcaggcggaaggggccgcctgtggtcaact

SEQ ID NO: 219091 - DNA, 80 bp, Homo sapiens; identical to SEQ ID NO: 205159
  chr19:8115155-8115235
  hypo

SEQ ID NO: 219092 - DNA, 145 bp, Homo sapiens
  chr19:8148323-8148468
  hypo
tctctctgcccagcagccgtctcctcggaggaaagtccagcctcccttccacaccggccactgcaccccagcccacgtggaccccatcctcaggctgcggatgacacctgagcccgcaggacacgcccatgaagcttccagggaa

SEQ ID NO: 219093 - DNA, 323 bp, Homo sapiens; identical to SEQ ID NO: 205161
  chr19:8274271-8274594
  hypo

SEQ ID NO: 219094 - DNA, 217 bp, Homo sapiens
  chr19:8468435-8468652
  hypo
cctgtgacccctgcgcctccacccagcgtgcgtgcacgtcctccgcccgcccccgccacggtatcctctggcccctccctgctgtccctctgtggccggctcgttccagccctcccagtgagctctgcacggccgggccggggcccaggaaggacaggagccagtgctaccccgtcctgcccggggaaaagctagaagccccggtttgctgcaccca

SEQ ID NO: 219095 - DNA, 159 bp, Homo sapiens
  chr19:8526868-8527027
  hypo
agggcccctgagtgcggggctctgtacaattgcacgagttgctcacctgtgaagctggccctgcggccgtgtgtgcctgtgagcttataccttcgcatacgtgcgtccttgtatttatagcatgtgagctcagcccgatggcatcgcaatttgtatgca

SEQ ID NO: 219096 - DNA, 156 bp, Homo sapiens
  chr19:8528411-8528567
  hypo
tggtatttgagccttctaacttgtaggactggtttcactcgactcgtttccttttgactctatagtgttgttgaattcaagatggaagagagcatgaaaaaagctgcggaagtcctaaacaagcatagtctgagcggaagaccactgaaagtcaaa

SEQ ID NO: 219097 - DNA, 38 bp, Homo sapiens
  chr19:8539870-8539908
  hypo
ttacaggcgtgagccaccgtgctcggcacctgccccca

SEQ ID NO: 219098 - DNA, 293 bp, Homo sapiens
  chr19:8554978-8555271
  hypo
aggcagctctgtgactttcccgcgccgggatccagggctcctgggtgagcgggcgctgggctggctggctgtcctggccccacgcctaccggtcttaccgtcccagggggagtggttggttttccaggggatctgccgaggaagcgtgacttccatggacccctctccccagaagcccaatagtgagcagcgcccccggggaatcgccagggtccctccagccctcccagagtgtccacgtaccgcagaagtcgacatcatcgtacacctccgtctccctggcagagcacagt

SEQ ID NO: 219099 - DNA, 772 bp, Homo sapiens
  chr19:8576017-8576789
  hypo
atcagcttccgggcgcctagttcagtttctcccgggtctgtctgcccctagagttgggggcacccaacttggcttctccgcgtcccctactatcatccccagattcactgttggggagaagcccgctccgaggtgaacggtgaaaggggcgcaaggtttatacgggaacgccggcgcagatgaaggcgcaggtgccagtcatttttaaggcaaaaatcctgtatttcgggacggtggcatttgtgccccctgggaaggggatgagcactgctgcctcctggtatccaccagaccccgcagggcgcaggaaagaaagcccctccacccctccctggtggtcacctgcacgcacctgagggcgcgtcggagccgccctggggtcttcgggggctgctgccagcacctgcggtaaaggggcgggtcaagttcagagtcagggcgagcccagccagccctcctggaggcccccgaccccacactcaccttggctctttttccagacggcggcgctggaagccggcggcccgggtgcagcggccaggaaggggcgcaggcgcggggggcttaggccaaagggcgcagggttcaagtagggcaggaacggtccggtgggggcaggggcgggggtcgtgaagggttccagcagcgggaacggcaggcccggcgctgatgcggggtcaacctccggggggcgctccggcgcgggcggctctcggtccagggccgggggtggcggcggggctgggctctgcgcatgctccgcgcaaacatg

SEQ ID NO: 219100 - DNA, 65 bp, Homo sapiens
  chr19:8577130-8577195
  hypo
gttgagggcggggcttccccaaaggcccacccacatcaagtcccgccctccaacaccctgaccag

SEQ ID NO: 219101 - DNA, 204 bp, Homo sapiens
  chr19:8587385-8587589
  hypo
acaccaggcactggccgttgccccacgctgcgcttcctctgcatgctgtgggcacagggggtttgagtcacagccccagacactcccctaccccctgcccacctcctggagctgccctcccaccccacctacccggccatgccctggtcaggcacgttgaggaattctgtgttgtgctctgagggcggacgtgcccggggtcgt

SEQ ID NO: 219102 - DNA, 209 bp, Homo sapiens
  chr19:8606638-8606847
  hypo
tagtccatagaaacaccatcctggccgcacagccactcccctcgagtttgtggcgagatggcagttctgggtaagatggagtggggcccggtcctccctccatccccttggggggttgtagccggaggtccccatgcctgggaccactcactgctcactggtctgcatcagctctatgaggtcggagaagagaacgtctcggttcctct

SEQ ID NO: 219103 - DNA, 86 bp, Homo sapiens
  chr19:9343354-9343440
  hypo
ctggaagacccactcggcagcgcctcggagagagcttttctctttctctcatctatgaaacctccgctgttaaacccaatccttgt

SEQ ID NO: 219104 - DNA, 44 bp, Homo sapiens
  chr19:9371593-9371637
  hypo
ctgccttttctaactcacactacggaaggaatggaacagataat

SEQ ID NO: 219105 - DNA, 217 bp, Homo sapiens; identical to SEQ ID NO: 205164
  chr19:9648914-9649131
  hypo

SEQ ID NO: 219106 - DNA, 83 bp, Homo sapiens; identical to SEQ ID NO: 205165
  chr19:9649390-9649473
  hypo

SEQ ID NO: 219107 - DNA, 249 bp, Homo sapiens
  chr19:9960939-9961188
  hypo
ggacctgagcaactaaagcccggccccaggggacctcccctcccccaagcgctgagtttctaataaaggccaagcctcataaacaatcacctgtgcccgctcccatctggctggcttcgggagcaatcgctcattcgcctgctgcctgcctgccggagcatttgtcattaggaaggtttaatgggtttcctctcagctccagagggctggggagagccggctgcatggatacaccgccaggcagaatgt

SEQ ID NO: 219108 - DNA, 203 bp, Homo sapiens
  chr19:9965180-9965383
  hypo
cggctgaccacgatgttgcccgcgttctggttggtggtgtacacagcccagagcccgctctcgtccaccatgaagtccatgtcggagaagccgccccaggagtaggggaaggtgttgttgtaaccggcgcccgggaggctcctctgcaccagcacagagcgcgagcggaagtggtatttgaccaccacgttgctctggtactt

SEQ ID NO: 219109 - DNA, 226 bp, Homo sapiens; identical to SEQ ID NO: 205168
  chr19:10197446-10197672
  hypo

SEQ ID NO: 219110 - DNA, 143 bp, Homo sapiens
  chr19:10231242-10231385
  hypo
agtaaaattaaaataaataataataatcataaagctcacttattgagtgcttattgtatatgaagcatggtgaggaggatattacttccattttacagctgaagaaactgaggctcagactgggtgcagtggcgcctgcctgt

SEQ ID NO: 219111 - DNA, 115 bp, Homo sapiens
  chr19:10246096-10246211
  hypo
tagttcatttgaacctacagcgagtgagctgtcgccaccatgggttttagcctgctcctttagcgcgacggactgtccttctggctcaatctctgcctcaaaaacaaacagtaag

SEQ ID NO: 219112 - DNA, 253 bp, Homo sapiens
  chr19:10246253-10246506
  hypo
tgtccctcctgtgggccgtcttcccactgagagtgatggggctacccggcagccagcaggcgtcctcccggaagtgactgcgctggccccagccccacctggtgacaggcacagaagcctccttcctgtccagacccagcgggcgccgccccactgacctgccggtgcttgtccaggatgttgccgaagagccggtaggtgtcagggaagccctgggagcgggcacactcccgcacgctcaccacacggtgct

SEQ ID NO: 219113 - DNA, 416 bp, Homo sapiens
  chr19:10246566-10246982
  hypo
ccaggccgggtcaccgtcggggacagggagggaaatggcactgtgacagcatacggccatggccttggcctatgagcttgtcccgtggacgtggaggggcaggaggcagaggccaggtgcctggggtcctggggtgctgtcccccacttggctaaacccacacttccacctagttaggccgccaagtacagggcctgacccaggccctcggatgccccctccccacctacctgcttgcccatgggctcggggttggtgacggttgtgctgaagaagccgtcccactcgagccttccatagaggccagcccagtggttgtgccggttcccggtgtggggcaggcaccaggggatgagggtgttgaactgcctggctgcggggtcgcaggctttgccggctggaagacaggacagtga

SEQ ID NO: 219114 - DNA, 90 bp, Homo sapiens
  chr19:10253815-10253905
  hypo
agaggtggggacagcgggacagaacctggacagtcatagatggagcttgggaggttctctgggggtgcccaggcactctacccgtttttt

SEQ ID NO: 219115 - DNA, 145 bp, Homo sapiens
  chr19:10295674-10295819
  hypo
ctgattccccaccagcgccgctcacatatgagcacctgctgaatgccaggccctgctccaggcaaagagctaagtgattagatgtaggtgtcactaggcagggacttcctgacttgctgtgtggttaggaaagaccattctgtag

SEQ ID NO: 219116 - DNA, 58 bp, Homo sapiens
  chr19:10370252-10370310
  hypo
gcctgaccggccccccgccccgcccccaccccgcccccaggcctaaatgtgcacagca

SEQ ID NO: 219117 - DNA, 109 bp, Homo sapiens
  chr19:10370575-10370684
  hypo
ctggaccccttcattccacggaggaagctgaggccacagggagcggccatcgccattgggaaggggcgactccacggaaagcccagacgggcttctgcatccattccct

SEQ ID NO: 219118 - DNA, 420 bp, Homo sapiens; identical to SEQ ID NO: 205171
  chr19:10381196-10381616
  hypo

SEQ ID NO: 219119 - DNA, 214 bp, Homo sapiens; identical to SEQ ID NO: 205174
  chr19:10400761-10400975
  hypo

SEQ ID NO: 219120 - DNA, 100 bp, Homo sapiens
  chr19:10464757-10464857
  hypo
gtggtagagcgtgcgcagaatgtcaatctcctgcttccagcccgagcggtgctgggggccgcagtctgccttgagggctttcaccgccaccatctcgcca

SEQ ID NO: 219121 - DNA, 197 bp, Homo sapiens; identical to SEQ ID NO: 205176
  chr19:10529636-10529833
  hypo

SEQ ID NO: 219122 - DNA, 180 bp, Homo sapiens; identical to SEQ ID NO: 205177
  chr19:10529953-10530133
  hypo

SEQ ID NO: 219123 - DNA, 758 bp, Homo sapiens; identical to SEQ ID NO: 205178
  chr19:10530526-10531284
  hypo

SEQ ID NO: 219124 - DNA, 139 bp, Homo sapiens
  chr19:10665638-10665777
  hypo
cccaggtctcagagcggggggcgctgcattcccaaagtcatgcaacaagaggttgacggagccaagactcaagcctgggcctgacaggctccccacccacgcttccccagccagcactgcttactcttctcggcagagt

SEQ ID NO: 219125 - DNA, 157 bp, Homo sapiens
  chr19:10665807-10665964
  hypo
ttctgggccttctggctgtacgcccgcttgtcccgcagctcctcctgctctgacctgcagacagatgcccctgtgttgggtgctctgggaagtgcccgaggctgcccgccctgccccctgcgcatgtggccccgccgcgccccgccccatcacctgt

SEQ ID NO: 219126 - DNA, 116 bp, Homo sapiens
  chr19:10685492-10685608
  hypo
gggactgaggtgactcgagccaagggacaggagagaggggaacccaccgaagtcaaggggaggatcctccctgcctgcttctctcacctggatcccagagacggtgaagtagggga

SEQ ID NO: 219127 - DNA, 120 bp, Homo sapiens
  chr19:10687540-10687660
  hypo
cccagctaatttttgtacttttactagagacggatgttagccgtctctatgttagccaggctgggatttcaggcgtgagccactgcgcccagctcctcttaatatttttatagaggcagg

SEQ ID NO: 219128 - DNA, 120 bp, Homo sapiens
  chr19:10687720-10687840
  hypo
agcctctcaaagtactggcattccagtcatgagccatcacacctgactgggtctctgatttgttctctgccttgttctcatggctcctgggcagcccccacactactccagtcccctcca

SEQ ID NO: 219129 - DNA, 130 bp, Homo sapiens; identical to SEQ ID NO: 205179
  chr19:10691749-10691879
  hypo

SEQ ID NO: 219130 - DNA, 108 bp, Homo sapiens
  chr19:10747314-10747422
  hypo
ccgaccactccctcggcccgcaggtaccacacaggctccctggcctttggcgcgctcatcctggccattgtgcagatcatccgtgtgatactcgagtacctggatcag

SEQ ID NO: 219131 - DNA, 272 bp, Homo sapiens
  chr19:10792601-10792873
  hypo
ttggcagagctctcgtggagacctgccatcgtgctgatccagagccaccttgctattctctctgtagaggagaaggcagagcccccccaggctatgaatgccctgatgcggttgaaccagctgaagccagggctgcagtacaagctggtgtcccagactgggcccgtccatgcccccatctttaccatgtctgtggaggttgatggcaattcattcgaggcctctgggccctccaaaaagacggccaagctgcacgtggccgttaaggtgag

SEQ ID NO: 219132 - DNA, 36 bp, Homo sapiens
  chr19:10794362-10794398
  hypo
ccaccccccaaccttcgagggcggggaagaggcggg

SEQ ID NO: 219133 - DNA, 335 bp, Homo sapiens
  chr19:10823268-10823603
  hypo
gacatgttcgactgcgtcttccccacacggacagcggtgaggctctggcagaaggaggtcagggcgggagacgggtgggggactagggaggcaaggttaggggtggggggtggggagaatgaagccctgggtgacgcccctttccctgcccttcctctcccacagcgctttggctctgccctggtgcccactgggaacctgcagttgaggaagaaggtgtttgagaaggacttcggccccatagacccggagtgcacctgccccacgtgccaaaagtaggcaggatggcactgggagctggggcagggcatggaggggacagggcctggccgtgc

SEQ ID NO: 219134 - DNA, 45 bp, Homo sapiens
  chr19:10823633-10823678
  hypo
gccgcgccttcctgcacgcactgctgcacagtgacaacacggccg

SEQ ID NO: 219135 - DNA, 213 bp, Homo sapiens
  chr19:10823721-10823934
  hypo
ccagtgcccggggcaaggtgggcgggggtgtcctaggtgcgtatgccccacgctgacctcccctccccgcagctgcagctcatgagcgccgtccgcaccagcatcgtggagaagcgcttcccggacttcgtgcgggacttcatgggcgccatgtacggggatcccaccctctgtcccacctgggccactgacgctctggcctctgtgggaatc

SEQ ID NO: 219136 - DNA, 31 bp, Homo sapiens
  chr19:10824430-10824461
  hypo
ctttcttttttttttttttccgagactgagt

SEQ ID NO: 219137 - DNA, 103 bp, Homo sapiens
  chr19:10859110-10859213
  hypo
ggtgaccacagggatgcagtggcacctacctgcggacactgtgtgggccgagcactgtaaggcttgggcgtccttgctgggtgaccaatggctattgttggaa

SEQ ID NO: 219138 - DNA, 155 bp, Homo sapiens
  chr19:10875504-10875659
  hypo
actgtgctgcctgcctggaacgccctgttccctacctgccactgtctgctgctcacccgcacctggtcacttgccgccttcgttccccggtccccggcagcacgagttatcctgttcttgttttttctttttcttttttttttttttttgagatg

SEQ ID NO: 219139 - DNA, 74 bp, Homo sapiens
  chr19:10941838-10941912
  hypo
tggcctcttccttaacgctggccccggtccagggccggcccctgtgcctggctggacaccgcactgcgcaaagg

SEQ ID NO: 219140 - DNA, 117 bp, Homo sapiens
  chr19:10949225-10949342
  hypo
ttctgaaacggcctcgttgtcttgagtaacacccggggtcgttgtctcacagccacgaagaacaaggaccaggacacacaaaagaatgaggttgagaacgaacgtttaataggcaac

SEQ ID NO: 219141 - DNA, 191 bp, Homo sapiens
  chr19:11003087-11003278
  hypo
gctgcgccagaggagcccagggtgacctcatggtcctcagatacccggggctgggcagcacagtggaacagctgctccagagcttctccgaggacgacatcggaggatccgactcaggttacggcaggagagggaggccaggccgggttagggttctggggtttgggattctcttccgaggctggcattga

SEQ ID NO: 219142 - DNA, 446 bp, Homo sapiens
  chr19:11004769-11005215
  hypo
gtgtcgcctcctcccgagtctgcctggaatctgaattgggcctggtccgcatgcatcagcttccgtgctttccctcctctcagcgcttactgccagttcctgttgtccgtctcctcactgccctgctgggtgctgtctgcctcccactgtggactcccagcatgggagggccgggggtggctctctggttcaccgccaggtcctctgtgcctgcatgtggtccgggcagagcaggctgagcagagatgccagctgagtgggcttcagaaagcgtgtttttttttccgtgcctgtgggatgggagttggccacggggggtcggggtgtctccctctttttacctaactctcctcctttgatcgggaatattttcctctggaaggtgaagagcccatgttgtctttggcagcaggaggcgatttaatacaagacgtaccatttggaca

SEQ ID NO: 219143 - DNA, 173 bp, Homo sapiens
  chr19:11008196-11008369
  hypo
ccccagagcttcatcagggccgactgcagtgtggcaggccagcgagtagccccaggctgggtccaggggtggccaaagcgtaacactcagtccgggtttgtgttctttacgttccccgttggagactccacctggagatcccagtccctttccttttactgcagggtaaagaa

SEQ ID NO: 219144 - DNA, 45 bp, Homo sapiens
  chr19:11017077-11017122
  hypo
tgttgtgcaactgtcactaccgcccatctccagaacttgctcatc

SEQ ID NO: 219145 - DNA, 387 bp, Homo sapiens
  chr19:11030249-11030636
  hypo
cacacctgtggtctctcccaggacacatttgacatccggatcctgatggccaagtctgtcaagtacacggtgaacttcttagaagccaaagaaggagatttgcacaggtactggcacccacactccatcctcccaggcctggctcaggccgaaggtcagggccacccctggctcccgccggcatcctgccgtcccagggcagatggtgggcgggggccccaggcctctgcacctggcaccccctcttctctctcggcagcgcctgtctggcttccccagcagccactgccctttgccttccaggatagaaatcccattcaaattccacatgctgcattcagggctggtccacggcctggctttctggtttgacgttgctttcatcgg

SEQ ID NO: 219146 - DNA, 36 bp, Homo sapiens
  chr19:11117137-11117173
  hypo
tatttaaagccaggcgcggtgtctcacgcctgtaat

SEQ ID NO: 219147 - DNA, 273 bp, Homo sapiens
  chr19:11129445-11129718
  hypo
gcccttcacgtcctcgccagtctctcttcctccctccctccctcagctgccctaaacacagtttctctgcccactcggagggctgtggccatgttggcctcgcccctgacagccagtggctatgggtttgcacagtgagccattgatgagagaccggcacttgactctcatttccttgttccatcagaacgctgtccaactgggcgtacgagtttgacaagtgggccccctccgtggtgaaggtgtcttacaaggtaggtcacagccactgag

SEQ ID NO: 219148 - DNA, 183 bp, Homo sapiens
  chr19:11145621-11145804
  hypo
ccgcaaccccaagcggaagccgcgcctcatggaggaggacgagctcccctcgtggatcatcaaggacgacgcggaggtggagcggctgacctgtgaggaggaggaggagaagatgttcggccgtggctcccgccaccgcaaggaggtggactacagcgactcactgacggagaagcagtggct

SEQ ID NO: 219149 - DNA, 214 bp, Homo sapiens
  chr19:11151830-11152044
  hypo
gtgtgtgttatgccccgagccagtcaagctgaagggagagcgggtgcgggggccctcctccgtgtcccagcccggcccctgggattgcgtcgcggcctctgcttgtcgacctgggtgctggctgtcctattttactactattgaccctgaaggccatcgaggagggcacgctggaggagatcgaagaggaggtccggcagaagaaatcatcacg

SEQ ID NO: 219150 - DNA, 184 bp, Homo sapiens
  chr19:11152797-11152981
  hypo
cctgctccaagcctggagatcgctgtcctcacagacatgtcctatatacgaggcagcatgcggttccagctgtggccacggcccagcggcggatcataacgtgttggtggatcatgagtgccatttatatgtttttcatttactaatatccttttccgtgagcgactctatatgggtaccattt

SEQ ID NO: 219151 - DNA, 222 bp, Homo sapiens; identical to SEQ ID NO: 205180
  chr19:11199837-11200059
  hypo

SEQ ID NO: 219152 - DNA, 460 bp, Homo sapiens; identical to SEQ ID NO: 205181
  chr19:11200842-11201302
  hypo

SEQ ID NO: 219153 - DNA, 233 bp, Homo sapiens
  chr19:11215985-11216218
  hypo
tggacggctcagacgaggcctcctgcccggtgctcacctgtggtcccgccagcttccagtgcaacagctccacctgcatcccccagctgtgggcctgcgacaacgaccccgactgcgaagatggctcggatgagtggccgcagcgctgtaggggtctttacgtgttccaaggggacagtagcccctgctcggccttcgagttccactgcctaagtggcgagtgcatccactcc

SEQ ID NO: 219154 - DNA, 153 bp, Homo sapiens
  chr19:11289073-11289226
  hypo
aacctcctctttccgtttcatgatagatcgcacgcctgccgggggcccgcctggaggggaggacagcggaggtgctgtgagagtccttcagggccagactccgaactggcgccatcccggtgccccgtccctcttggcggccacccaccactt

SEQ ID NO: 219155 - DNA, 693 bp, Homo sapiens
  chr19:11303999-11304692
  hypo
gaggtccaggcagagctcgctgcgaccccggcccgctgtggggtggcccaggaacttctggctcttaagttgtactgtgagctgccgcttttcctcctggagcaccgagagcttcacctggagcacagggatcagcttcacctgctcctccagctgccgcagcttccgcagggcacccgccatctgctcccgcacgtgggccaggtgcccggcactgggaggcaccggtgtggacagtcctgaactccgtggtgtcgggggtggcaaccccacgcccaccagggaggctgtcgagccggccgcactgggggtcagggagcccaggccggtgggtgtggccgcctggtcctcgagacggcgacgggcatccagcagcgtgcgctccacccgcggattgaagccaccgcgggtctccagagcaccatactgagggtagaagccacggccgcagtaggaataggctgagtggcggctgtccccactggcattggagcacagcgactcagtggacgtccaccaggagccagggccacggggcagcgagctcaggcgggggcggcgctgcactgccacgcgtcgcagcgtgtggcccttctcgatgtcatccacgtacttgaggaagtccaggtccaggcggtagccatagggggtctccacggagtagggtggatcggggtccttggcagggaaggc

SEQ ID NO: 219156 - DNA, 330 bp, Homo sapiens; identical to SEQ ID NO: 205183
  chr19:11308102-11308432
  hypo

SEQ ID NO: 219157 - DNA, 150 bp, Homo sapiens
  chr19:11339623-11339773
  hypo
ggaagaagaaccaggcgtgctggaggatggcctcgcgtacggcactgctgctgaccacccactgcagagccagctcctcgtgaagcagctggggacagaggcaggggtcacagagtgcgaggtgccaccccttcccgtaccccctctgga

SEQ ID NO: 219158 - DNA, 105 bp, Homo sapiens; identical to SEQ ID NO: 205184
  chr19:11465993-11466098
  hypo

SEQ ID NO: 219159 - DNA, 300 bp, Homo sapiens
  chr19:11473074-11473374
  hypo
gccactccctccagccccaacgctctggccatgcgctctagcccagaaaggagcgtccacttgggttcggcgacttgcctccgctatccccctgaccagtccggctccccgcagatgtacgtgactctcgtgttccgcgtgaagggctcccgcctggtcaaaccctcgctctgcctggccttgctgtgcccggccttcctggtgggcgtggtccgcgtggccgagtaccgaaaccactggtcggacgtgctggctggcttcctgacaggggcggccatcgccacctttttggtgagttgc

SEQ ID NO: 219160 - DNA, 40 bp, Homo sapiens
  chr19:11549272-11549312
  hypo
aggtaaagtatacaacggaaggaggccaggcgcggtggct

SEQ ID NO: 219161 - DNA, 184 bp, Homo sapiens
  chr19:11559278-11559462
  hypo
ccctcctgtgtctgtcgtcctgggtcaggcactggcgtccccagctgccccttaaccgctccgcctccccttccaggaacctggagcaagagatttcttttgactttggccccaacggggagtttgcttacctgtacagccagtgctacgagctcaccaccaacgagtgcgtcccaggaatgca

SEQ ID NO: 219162 - DNA, 321 bp, Homo sapiens
  chr19:11559905-11560226
  hypo
gattggccccgaccacgacaagttcagtgccatgaagtatgagcaaggcacgggctgctggcagggccccaaccgctccaccaccgtgagtgcctgcaaggcaggggagctggggcggggagacccaggcctggcccagccgaaccctctcgagcacccgtctgcccatccccaggtgcgcctcctgtgcgggaaagagaccatggtgaccagcaccacagagcccagtcgctgcgagtacctcatggagctgatgacgccagccgcctgcccggagccaccgcctgaagcacccaccgaagacgaccatgacgagctcta

SEQ ID NO: 219163 - DNA, 155 bp, Homo sapiens
  chr19:11565669-11565824
  hypo
acctggcgatgagcgacaggggactactttgggggtcacgcgggctctgccctgaccccccgcatgcttctgaccccgttgtgacccttcacacctttatgacccctgactgtgccatgaccttggaatggtgtgacccctgcaatgcaattttt

SEQ ID NO: 219164 - DNA, 72 bp, Homo sapiens; identical to SEQ ID NO: 205190
  chr19:11591204-11591276
  hypo

SEQ ID NO: 219165 - DNA, 370 bp, Homo sapiens
  chr19:11605729-11606099
  hypo
cagtaaaaggcagaggagggcggaatgcagatcatgggatggggcagccgagaggccactgcacgctgagagcctggccgacacttggtgggacggtcgttggcgggggcgcccacccggaacacctctcgcccccggcttcccctcggccagctgggatgccacctgctccgagatgccagccagcgcaggctcagccctggtgaccgccccaccctcagccctgacaggacgcctggcagtgtgccctacgctccttctccagccattgccgaacccctgaggctgccggcagccccctcaccactcaccggggccaactgagcctccctcactgagtccctgccccgtgggatgggaaggagagagg

SEQ ID NO: 219166 - DNA, 446 bp, Homo sapiens
  chr19:11662234-11662680
  hypo
tgagcctgccaacccgggactctaaaaggctgtgtccagggcctcaacctcctcacatttcagaggggaccctgttatccccgggaggagggagaggtccccaaccatcaggattccaaggaggagaggaggcagagaagcgaggagcgcggcacggagctgtcttctccccagggagggcaggagttgaggctggaacgtggagacctgcggaggcagacaccagaagacccgcgcacagacgcacgcagcccctggggcctcgtaaaccggattccaggcgcttttggcctggctaccgcaagtcctgctccccctgggccggcgcggggaagctatgctgaggaggatccgggcctggcccagggccctgcctcctcgggaaaacagcaccatattagcacttagcctgtgaggctggggtgggcgggcggcaggaagggcct

SEQ ID NO: 219167 - DNA, 75 bp, Homo sapiens; identical to SEQ ID NO: 205200
  chr19:12146469-12146544
  hypo

SEQ ID NO: 219168 - DNA, 37 bp, Homo sapiens; identical to SEQ ID NO: 205203
  chr19:12203656-12203693
  hypo

SEQ ID NO: 219169 - DNA, 33 bp, Homo sapiens; identical to SEQ ID NO: 205204
  chr19:12204551-12204584
  hypo

SEQ ID NO: 219170 - DNA, 111 bp, Homo sapiens
  chr19:12418638-12418749
  hypo
ctttactgcctatctaaccacgtcttttattacctgagcactctatgttccatggaccaacacgatgacacgtgggagcgagttagaaacgtggactctcacactctgtcc

SEQ ID NO: 219171 - DNA, 538 bp, Homo sapiens; identical to SEQ ID NO: 205207
  chr19:12595307-12595845
  hypo

SEQ ID NO: 219172 - DNA, 200 bp, Homo sapiens; identical to SEQ ID NO: 205208
  chr19:12595896-12596096
  hypo

SEQ ID NO: 219173 - DNA, 120 bp, Homo sapiens
  chr19:12710770-12710890
  hypo
cctgctctttaacaaaaattgtaaagggtaataaaaaatctataaaaattgccaaacattggcgtaaatatgtctataaaattgggtaaatatgtctataaggttttattaagaattggg

SEQ ID NO: 219174 - DNA, 95 bp, Homo sapiens
  chr19:12729967-12730062
  hypo
tatatttctcatatgctagtatctgaagctgcaggctatccgttccaatggttgtggtgtttagactttttcacggttttgtttttgtttgcttt

SEQ ID NO: 219175 - DNA, 120 bp, Homo sapiens
  chr19:12746886-12747006
  hypo
acccggccaaagcaccattctctaaaatccccaccaagcctttgtctccttgcagttagctcctctctgggtgtgctgcctggtggaaccctgtaatgtattttctttctttctttcctt

SEQ ID NO: 219176 - DNA, 197 bp, Homo sapiens
  chr19:12794668-12794865
  hypo
cgtgagccactgcgcccggccgagggtcacttcttaagcgtcacccatggacaagatttcggtcaccaggcagagttagacacagtttcatccttcctcagccacttttgtctaatgggatagtgagcccggttcgtgccctcacaagtctccaaagccttcacatgctgcataacgctctgttcttccttccctta

SEQ ID NO: 219177 - DNA, 200 bp, Homo sapiens; identical to SEQ ID NO: 205210
  chr19:12806992-12807192
  hypo

SEQ ID NO: 219178 - DNA, 51 bp, Homo sapiens
  chr19:12811290-12811341
  hypo
gtggttctcaccctgcgagctaggctaggataaggacggagacaccaccag

SEQ ID NO: 219179 - DNA, 204 bp, Homo sapiens
  chr19:12817328-12817532
  hypo
cccagagggtggccgggggagagtgggggctgtgggatcaggggtccagggtcacctgcaggccgcctcctgtaccctcttgttgccatccaggatgcgtttgagcagctctgtcatcaggggcttgaggtgcatgtcgggtggctggctgaccacccagtgggcatagcggctcagcgtccagcaggcgatggagcggaccaa

SEQ ID NO: 219180 - DNA, 638 bp, Homo sapiens; identical to SEQ ID NO: 205213
  chr19:12900114-12900752
  hypo

SEQ ID NO: 219181 - DNA, 89 bp, Homo sapiens
  chr19:13010440-13010529
  hypo
agaaagggaggtggcggatggagtgggaagtgagagacactgatttttaaatatcaaaatttcccttctgaagtcgttcagatgtgttc

SEQ ID NO: 219182 - DNA, 98 bp, Homo sapiens; identical to SEQ ID NO: 205217
  chr19:13029775-13029873
  hypo

SEQ ID NO: 219183 - DNA, 77 bp, Homo sapiens; identical to SEQ ID NO: 205218
  chr19:13030316-13030393
  hypo

SEQ ID NO: 219184 - DNA, 513 bp, Homo sapiens; identical to SEQ ID NO: 205219
  chr19:13049935-13050448
  hypo

SEQ ID NO: 219185 - DNA, 828 bp, Homo sapiens; identical to SEQ ID NO: 205220
  chr19:13050858-13051686
  hypo

SEQ ID NO: 219186 - DNA, 931 bp, Homo sapiens; identical to SEQ ID NO: 205221
  chr19:13054373-13055304
  hypo

SEQ ID NO: 219187 - DNA, 131 bp, Homo sapiens; identical to SEQ ID NO: 205222
  chr19:13094456-13094587
  hypo

SEQ ID NO: 219188 - DNA, 264 bp, Homo sapiens; identical to SEQ ID NO: 205223
  chr19:13106028-13106292
  hypo

SEQ ID NO: 219189 - DNA, 300 bp, Homo sapiens; identical to SEQ ID NO: 205224
  chr19:13106649-13106949
  hypo

SEQ ID NO: 219190 - DNA, 260 bp, Homo sapiens; identical to SEQ ID NO: 205225
  chr19:13107129-13107389
  hypo

SEQ ID NO: 219191 - DNA, 672 bp, Homo sapiens
  chr19:13108002-13108674
  hypo
tgtgcagtggtgtcaaggggcgaggggtttgtcggggtgtgtgtcagctgtggctacaccacactcctgtatgcacaggtgagagtgtatgcaagtgtgaatcaatctagagtctgtgtgtagcccctgtgggccggccatgggcaggcctgcgtggcatggccgtgtgtgtggcccagggagcgggttttcctgtagaaagcaggcccaagtacgtgttggcgagggcgcaccggcatgcatacatgttgcagtgtgcatgcaggtgtgagcaggcaccctgagcaccatggcagtgtggggaacccccacatctgcacctccagttccacggccactccatgttgggcgcccctcacaacaactgcctacccagcggtgtctgagctgggcctctttggtgctacacttggctgggctgtgtggccgatgtttggggcctagtggaaccaagaccccacgctcaagcagccccttgcccaccaggctgccagcccggcctcccatgccaagcacgccagacatctgagcctgctcccccatggcttgggtgagacaccagcccctcagatttcacagcaccctgggagagaaaatgcctgtggatacgccggtgacatggctaggaaggggctggggcggctgcgagacccagggcgatggccggtgctt

SEQ ID NO: 219192 - DNA, 750 bp, Homo sapiens
  chr19:13109259-13110009
  hypo
gcgagggggaagggcggggggaaaaatctccttctagaaaaagcatcgaaattcagggcggccgggtggggcggttcctggagctgctggagtccattgtagccacagtcctgagtctcaggcggagagaggggtggggggtggatggatggacccccatccccatcccaaccctgccaagaaacagagacacaaccaggatgtgaactcacgtacaccaccatcaccgccaagatggggatgtaagtgtcctgttcacaccgatgtccagacccacgaccatcgacgagcctacagacctacggacacaggaaaccgacgacttgtgttcacactgtcacacacacccattaacacacacgcacctcttgaaatgggacacgtatattggtgtaggcttagcgacacagcagtacctctttgacgcacgtatggacacaggaaactgtggacttgtgttcacaaccacccccagcgcacacataaacactcacaaacccctcgagatgatacagatagcgacgaaggcacatggagaccacgacacctcccagactcatggagccctgagcacatgcttggatacaggtagacacaaatgtgtgttcacccccacacatgctcacatggacccaaggacggacaggcggatggatggatacacatctttacacagagacataatgcagttggctcgctcaggtgtgtacacaaataacttttctttttctattttttttttttttgaga

SEQ ID NO: 219193 - DNA, 210 bp, Homo sapiens
  chr19:13110309-13110519
  hypo
acacacacacacacacacacaaatatgcaccaatgcgtgcttccccctccttgccacagggataaaaaggcaaacatgccgacatttgctgacacacacaaagacatacatggccgcacacacggatacacccgctctcagacacgcagcgacctacgcccattttcctggccatacaagcagccgaacgttcctgtacttctgtatctg

SEQ ID NO: 219194 - DNA, 199 bp, Homo sapiens
  chr19:13110780-13110979
  hypo
atgagctggggctccgtgagatgttttgatgctgggccgagctcagagccgagggctctgccgggaacagggtgctccagtctctctagggcctggaatgtcttgtgtagcctcaagagctcccagacggaggctgcgggagcggagtcaagggctaggctttgccgtcagacagaaatgggttcgagctccagctcta

SEQ ID NO: 219195 - DNA, 45 bp, Homo sapiens
  chr19:13112075-13112120
  hypo
tgtctgtgtggcagcgtgtgtctgcccgggtccctctccatgcct

SEQ ID NO: 219196 - DNA, 156 bp, Homo sapiens
  chr19:13112293-13112449
  hypo
attggtgtaccggtcaccatctttgtatctgcgctttgtatctggggtgacagtgtcccagcgacatgcgtcacatctacagcagtgtttttctgggtgtctgtgcgtcacggcaaagagtgtatccgtgtgtctcacacacgtgttggcctgtcc

SEQ ID NO: 219197 - DNA, 93 bp, Homo sapiens
  chr19:13115952-13116045
  hypo
cctgtcctccgtggggctgtctcactaatcctttggcctttgactccccagttctgaccccagagaaagaagagacagcggtcagcagaatgg

SEQ ID NO: 219198 - DNA, 258 bp, Homo sapiens
  chr19:13156412-13156670
  hypo
ggagaccttggcccacggtgctcagcagtctgttgccagggaggtaggagagaggggcagcaggcacactgggttgacaactgcactgtgttgaccccatggcgggcatcaggggaccacaggctgtggttgcgcctgtccgttctccctcccttttctcgtaggcttcttcctcctccagtgcaagagctggatccaggattggagaatttgctcttgcccacctctccatgtcctcgttgccgactgaggcacctg

SEQ ID NO: 219199 - DNA, 98 bp, Homo sapiens
  chr19:13160324-13160422
  hypo
atgtggtcttcatgtcgggcttctttcacggagcataatgttttcaaggttcctatatgttgtagcagcaagtgtcagtggttccttttttttttttt

SEQ ID NO: 219200 - DNA, 39 bp, Homo sapiens
  chr19:13179793-13179832
  hypo
ggccaaggcacctgtcggacacagcggctgggctcaggt

SEQ ID NO: 219201 - DNA, 80 bp, Homo sapiens
  chr19:13196307-13196387
  hypo
ggcatggagatgaggggaggcgtcgcatcacctttctctgcagcgctgcaaacccccacgctctgacctgcactgttacc

SEQ ID NO: 219202 - DNA, 53 bp, Homo sapiens
  chr19:13199713-13199766
  hypo
agaagaaaaatcattcgagaggtcccaggtagacccggcgtgaaggacaggag

SEQ ID NO: 219203 - DNA, 202 bp, Homo sapiens; identical to SEQ ID NO: 205229
  chr19:13213414-13213616
  hypo

SEQ ID NO: 219204 - DNA, 93 bp, Homo sapiens; identical to SEQ ID NO: 205230
  chr19:13213834-13213927
  hypo

SEQ ID NO: 219205 - DNA, 89 bp, Homo sapiens
  chr19:13218631-13218720
  hypo
tgggagagtgagacccggaagtcagcgtggaggagggccgacctggggaacagcagggattatgagggagatgccggactccttgaccc

SEQ ID NO: 219206 - DNA, 1275 bp, Homo sapiens; identical to SEQ ID NO: 205231
  chr19:13265775-13267050
  hypo

SEQ ID NO: 219207 - DNA, 62 bp, Homo sapiens; identical to SEQ ID NO: 205232
  chr19:13274019-13274081
  hypo

SEQ ID NO: 219208 - DNA, 55 bp, Homo sapiens
  chr19:13332535-13332590
  hypo
gggcagtgcctgacacggttggtccccttcctcctgaagccgcccttttaaacat

SEQ ID NO: 219209 - DNA, 130 bp, Homo sapiens
  chr19:13397529-13397659
  hypo
tggccatggcagggatggccagcatggggccggggtcggtgctgtttcccatcttggctgggctctggggcaggccggcgtggccaaggctgccgtggggagcggccgactccgcggtggccagcttgtt

SEQ ID NO: 219210 - DNA, 159 bp, Homo sapiens
  chr19:13873457-13873616
  hypo
tcccctctgcccccggatccgcctccagcagcaaggtcagcggcgtcctgaagaagctggcacagagccgcagaaccgcgcttgccacctcccccatcaccgtcggggacctgggcatcgtgcggcggaggtctcgggacgtcccggagagcccccagc

SEQ ID NO: 219211 - DNA, 205 bp, Homo sapiens
  chr19:13879656-13879861
  hypo
ccgcgtggttgccaacggcgacacagccaacaaggtgggcacctaccagctggccattgtcgccaagcaccatggcattcccttctacgtggctgcccccagctcttcatgtgacctccgtctggagaccggcaaggagatcattattgaagagcgaccgggccaggagctgaccgatgttaatggggtccggattgcagcacct

SEQ ID NO: 219212 - DNA, 418 bp, Homo sapiens; identical to SEQ ID NO: 205234
  chr19:13961290-13961708
  hypo

SEQ ID NO: 219213 - DNA, 209 bp, Homo sapiens
  chr19:14000962-14001171
  hypo
gttccttttggccaccgtcacctggaaccctgtctgtctcaggcttgctgtcatcggccccttgttctgacaggtggtcttggctggccctctgtgaggcggacaaccccgtccccctgtctggagggtcatcaggctgagaatccccactgccgggcaccgcctgcacagggctctggctgctctgctcagggcgggcactgtctgcc

SEQ ID NO: 219214 - DNA, 1343 bp, Homo sapiens; identical to SEQ ID NO: 205235
  chr19:14073501-14074844
  hypo

SEQ ID NO: 219215 - DNA, 162 bp, Homo sapiens
  chr19:14181143-14181305
  hypo
atcaatcttcccgcgtccgccgattcctcctccttggtcgccgcgtccttggctggcgtcagaaaaatggctacaaacttcctagcacatgagaagatctggtttgacaagttcaaatatgacgacgcagaaaggagattctatcagcagatgaacaggcct

SEQ ID NO: 219216 - DNA, 181 bp, Homo sapiens
  chr19:14181846-14182027
  hypo
tggaggcctgtgtgcgctctatcgagctggacgggctggtctgggggacctccaagctgatgcccgtgggctacggtatccggaagctacagattcagtgtgtggtggaggacgacaaggtggggacttacttgctggaggaggagatcactaaatttgaggagcacgtgcagagtgtcga

SEQ ID NO: 219217 - DNA, 40 bp, Homo sapiens
  chr19:14225013-14225053
  hypo
gctcatgagacctgccgtgtctgttcggctgtctgtcccc

SEQ ID NO: 219218 - DNA, 142 bp, Homo sapiens
  chr19:14509047-14509189
  hypo
tctagtcagagacacacatgcgcataacatacacacaccacatacagtatgtgcacaaacatacacacccggacacgtgaagacacacgcatgcacacacacacaccaggtataatggcaacagagtgcagcacttaagaac

SEQ ID NO: 219219 - DNA, 101 bp, Homo sapiens
  chr19:14532585-14532686
  hypo
aaaaaaaaaaaaaagttgaagtcacctgtgcttcactccaactcctttcctcccagtacagaaacaatgccctaaagaaaaacagtcgtactgaacagtta

SEQ ID NO: 219220 - DNA, 373 bp, Homo sapiens
  chr19:14551929-14552302
  hypo
actgaccctgttctgtcctccgcagagtgagcctcgcagctggtccctgctagagcagctgggcctggccggggcagacctggcggcccccggggtacagcagcagctggagctggagcgggagcggctgcggcgggaaatccgcaaggagctgaagctgaaggagggtgctgagaacctgcggcgggccaccactgacctgggccgcagcctgggccccgtagagctgctgctgcggggctcctcgcgccgcctcgacctgctgcaccagcagctgcaggagctgcacgcccacgtggtgcttcccgacccggcggccacccacggtgagctgggatgcctctggggatgcgggactccagggattccactg

SEQ ID NO: 219221 - DNA, 143 bp, Homo sapiens; identical to SEQ ID NO: 205239
  chr19:14607038-14607181
  hypo

SEQ ID NO: 219222 - DNA, 137 bp, Homo sapiens
  chr19:14663788-14663925
  hypo
ggaggccctgagggcacaaccgcagggatgggtgtaggctgtgggtaccactgagaatggggggcaggcccagggctgagacccaggttctccaacttcccactgtgtttgtcttgtgccatattcatcctctatga

SEQ ID NO: 219223 - DNA, 47 bp, Homo sapiens
  chr19:14664432-14664479
  hypo
aagtgggaaggaaagggagccgagagggctgagccgctgagccggag

SEQ ID NO: 219224 - DNA, 281 bp, Homo sapiens
  chr19:14664561-14664842
  hypo
gatcgggccaggcctccgacctctatgctgggcattggctggacagggagctcaggcgatgagtgcagcagcgcttgtgcccggcgcggggatggtgagtgcctggctggccagctgcaggacctgtcaggccctttgtgtctttacctggggccctggttgcactgaccagggctcgcacccccagccaggcctcttgtgccccagactcgggagatgcttcctaccaggaagtgcagtcccctgcggggtccgagagagcctgccggagctttgagctc

SEQ ID NO: 219225 - DNA, 122 bp, Homo sapiens
  chr19:14863011-14863133
  hypo
tgggattacaggcatgagccaccacgcccagccgggctattatattaaggaatcaaatgccgcatcattccatgagccagcgtgtcctgcgtcaaggaagggagccctctggaacaccgctg

SEQ ID NO: 219226 - DNA, 59 bp, Homo sapiens
  chr19:14863163-14863222
  hypo
ccacgaggaagaggaggtgggccaggaagaggcagagcgagagctgcagatgcagtgag

SEQ ID NO: 219227 - DNA, 46 bp, Homo sapiens; identical to SEQ ID NO: 205241
  chr19:14887561-14887607
  hypo

SEQ ID NO: 219228 - DNA, 96 bp, Homo sapiens
  chr19:14912989-14913085
  hypo
gttcctggtgctgaagatagcggaaatgtatggcaatgttctgttttaatatgtccaatgggccgggcgtggtggctcacgcctgtaatcccagca

SEQ ID NO: 219229 - DNA, 159 bp, Homo sapiens
  chr19:15224770-15224929
  hypo
ctgagccagatgacggggtgggaccccggttagtaaggaccgggcgcccagtggctaaggcggtgccctggtgaccaaggagagccagacctgttgctcaggccgagctcctggttgccagcgagttaccacgggaccagtcgcgtgtatggctgagac

SEQ ID NO: 219230 - DNA, 417 bp, Homo sapiens
  chr19:15252000-15252417
  hypo
ttcagcagtggcatcaccaccgtgtagaacacagccaccaagcggtcctggtcggggttggccccggactccggacgcaagtagatgatggaggcgcagtcaaaatgtactacgaccacggtgacgtgggccacacaggtggagaaggccttgcgccggccggctgccaaggaaatcctcacgatggcagccacgatgaaggcataggagaagaggatcgggacgaaggacatcagcaccaccaggacgctcaggaaaaagatgcccagcgccttgctggcactcttggcgcagctgagcttcagcaccggggcgatgtcacagaagaagtgctccacgtggtctccgccgcaaaagggcgatgagaagatcatgctggtctcgatcaaggccaccgagaacccagagcagaaaacc

SEQ ID NO: 219231 - DNA, 41 bp, Homo sapiens
  chr19:15252900-15252941
  hypo
gagtgattaataagggtctgcgatgcatcaggtagcagtgt

SEQ ID NO: 219232 - DNA, 77 bp, Homo sapiens
  chr19:15281186-15281263
  hypo
tgaccagaggccacgtccttgtgcagtgagaagccctcagggaaccagagggtgctgtgctcgcgcttgcgccgggc

SEQ ID NO: 219233 - DNA, 40 bp, Homo sapiens
  chr19:15292612-15292652
  hypo
ctgcggacaggaggaaggcggtctggtcacctaccttgcc

SEQ ID NO: 219234 - DNA, 188 bp, Homo sapiens
  chr19:15352349-15352537
  hypo
ctggggcttgggtcacggccagggacctgaagtagagctggctggagaagacctgcctcagccccgataggtgcctggtgcacccgagtgctggctcttctaaatgccttgcatcccctgtctatcacccccaacaggagtccagccctgcttcgcatgagaacaggcacagccgcacagctgccagg

SEQ ID NO: 219235 - DNA, 396 bp, Homo sapiens
  chr19:15375241-15375637
  hypo
cttgatgatgtcacagtagtcgtgtaggcccagtgcctccacgtccacaggcttgtagaagggccaggcgtaggcggcgtgcttcttggcaaacatctccttgaggatgccgctgcagcacttgagctgctccgagaccttgctgctcttctctggtgctgggtgctgctgagagtcgggcacgtccttctttggaggtttcacaggccggctgctctcccgccgctggcccagcttggtggtcttgggctccgggggcagcgagggtggctcgtgaatggggtcaatggtggtgggggtggtggtgtctgctttcctcttcactcccttctttgtctgccaagaacacggacgccaacaggcacagtcagaagtggcagccggcacagctgccct

SEQ ID NO: 219236 - DNA, 141 bp, Homo sapiens
  chr19:15421598-15421739
  hypo
cctggccttaaacagtcctttaggcagtcctgaaagacacctggctgcaccactgtttgaaccatctcccgtacctttgtgcctactcttcaccgatgcccaatatccatccccaaaatcagtttccgtgtggaggcagga

SEQ ID NO: 219237 - DNA, 105 bp, Homo sapiens
  chr19:15422154-15422259
  hypo
atgttcactgctgtattattcacaacagccaagaggtggaagcaacccaactccatcaacaaaggagtggaattctgacatgctacaacacggatggacctggag

SEQ ID NO: 219238 - DNA, 120 bp, Homo sapiens
  chr19:15506075-15506195
  hypo
ctcgtgatccgcccaccttgtcctcccaaagtgccgtgcccattgttttggtttttttgttttgttttgttttgtttttgagatgagtctcgcagattgctctgcgagtggcgcaatctc

SEQ ID NO: 219239 - DNA, 340 bp, Homo sapiens
  chr19:15538869-15539209
  hypo
aggggctccagggcccgcagtgaggagggggcagctgaagcgagaacctacagaggttgagaggagacggctccacatcagaggcccagaaaatgccggcggctgcggcggccgagaggtcctgcttcccccaggggctggccatacccgcggccttcagcttggccttcttggccggcggtggggggggaagcaaggagagggccgcggaggtgggaggcggccgccccgggtgggccagggcgccgcgcctgggtgggaggcggatctggacgccgtccctcctgatgagcccgtggagcacgtctatgggggatcccttggcgtccggatcgctgac

SEQ ID NO: 219240 - DNA, 120 bp, Homo sapiens; identical to SEQ ID NO: 205247
  chr19:15695669-15695789
  hypo

SEQ ID NO: 219241 - DNA, 187 bp, Homo sapiens
  chr19:16025606-16025793
  hypo
tcctgcgtgcaacatcgggagatgaccgggactgggggatgcaaccgcaggctctccttaatgcacatggtcaggaagggcagctgggccaggtcgtccctaagaaaacaccccagccccaatcattatcaagggaacaaagacacaattctccagcttctctgtttccaagcgagactttttctcc

SEQ ID NO: 219242 - DNA, 102 bp, Homo sapiens; identical to SEQ ID NO: 205249
  chr19:16187000-16187102
  hypo

SEQ ID NO: 219243 - DNA, 517 bp, Homo sapiens; identical to SEQ ID NO: 205250
  chr19:16187103-16187620
  hypo

SEQ ID NO: 219244 - DNA, 655 bp, Homo sapiens; identical to SEQ ID NO: 55781
  chr19:16187640-16188295
  hypo

SEQ ID NO: 219245 - DNA, 214 bp, Homo sapiens; identical to SEQ ID NO: 131000
  chr19:16222493-16222707
  hypo

SEQ ID NO: 219246 - DNA, 860 bp, Homo sapiens
  chr19:16232495-16233355
  hypo
tgtctcctactgaggacagttattttcctttaatgttgctaatatcccttctcttcatgtttagggacacagccggtcaggaacggtttcggacgatcacaacggcctactacaggggtgcaatggtagggactttttgtttggttgtttttatctgctttttaagtcaacatgggagcgtcactgtgcattggttaccgaagcctagatgtttctgtggagcccgtgccccaactcctcagggctccttggtcccaagttagtcttaggaacaggctttgtgccccggcctacccccatgtacatacctccccttctggctgcagagacaatgcaaggtttaaataaagtggaaacataattctttgggaatgaagaaagacacaggaagccggttcttccaggtgagctcagtgcagttaaagccggcatgccccgacttttaggagctgtcacatgacctgcatctgtctctgaaatttgctaccaaaagcttgaagatcttccaggagctgacctgccctgggctgtcggccgttatatccgtcacccaggcctgaggcgggatgacgtgatgggaagactcagtcatcatccctcaaaacatttctcaagcaccttctctgggccaggccttaactagatgcagaaggcggccagggatgggacgaggtcctgtgtcaggggccctgtgtgtacatggcagggcattcaggggtagagggagcaggaggtggagcccctggacctgacctgagaccctggcttgcccactgagctccatctcctgacttggaaaagggaacggagcacagcactgtgtctcgggctgtgctgaggataaacggctgcctctcccc

SEQ ID NO: 219247 - DNA, 94 bp, Homo sapiens
  chr19:16235972-16236066
  hypo
atgaggggagccagccgggcttgtcagcgagtgcgtggcaggggctggcctgtgaggcagaagggtcacctcagcggcccggggggcaggacaa

SEQ ID NO: 219248 - DNA, 239 bp, Homo sapiens
  chr19:16243047-16243286
  hypo
ccagggagtcaaaatcacaccggaccagcagaagaggagcagctttttccgatgtgttcttctgtgaggaacaccgccttactctgagcctcgctcagcccagctgactgtgcctgttctgagtgagcccctcactcagccggggccctcccacctccaacgccccgcccacgccgcggccaccgggcccacggccaccagaatgcaattgagaaatcgtttattttagtaactgtctg

SEQ ID NO: 219249 - DNA, 170 bp, Homo sapiens
  chr19:16320831-16321001
  hypo
tccatcactggagtcttcatcgtgttgtgattgtcacacgagtggcatcatatgtcaccgcagctgtctttctgagattgtcgtatgaatggcgtcatacagtcatgagctctcgagtctggctgctttaactcattctaattctttgcgattcatccaaatccaattgt

SEQ ID NO: 219250 - DNA, 162 bp, Homo sapiens
  chr19:16328981-16329143
  hypo
ggtagccccgctccatagggagcagtgcctctgctgccgtgcacatggctgctttagtaaaagttctgtttatcaccaccagctcgcccttgagttctttcctggctgaaaccaagaaccctcccgggctgtctcagttttggggctcgcctgccctgcatc

SEQ ID NO: 219251 - DNA, 204 bp, Homo sapiens
  chr19:16337847-16338051
  hypo
gaagagggtgcagtggctgggcatgcccccgttcctagcccggtgagggcttctcgggcatcagtctatcagggcagctccccgcctggggctgggcagggccccacccacatagccctcagtgaggtggcaaaccaaggtaggacccaggaccccgtggatgccagggcctgagcccttggggagccccgagccatcccccag

SEQ ID NO: 219252 - DNA, 52 bp, Homo sapiens
  chr19:16343122-16343174
  hypo
gcctacagctctcatcgagagcagaattaaacccactcggctcaacgtgacg

SEQ ID NO: 219253 - DNA, 284 bp, Homo sapiens
  chr19:16485430-16485714
  hypo
agcagacccagcgccgggtttaggtacgtggggaggcgggggtggcggtttccatgaaacactgaaaatgaagctttgcacctgtgagctgttgagtgggatggctcctcctcagggcccagcaaatacggcactgctcggcaagtgtgtgcacccatatgagaatacgtgcacatgtgtgtaaatgtgtgtacacgtatgtaagcacagagtgtgcatgcccgggtgtgtatgagcacacacgcacgcatatgtgtgtgcacgtttgcatgcatgcattatgc

SEQ ID NO: 219254 - DNA, 360 bp, Homo sapiens
  chr19:16512024-16512384
  hypo
cagacacaagagacagatgagctcgccagcagtgccttcccagcagcccaggggacgcgtgtgcttccccataaatccttgggactgaggacttggctgctgagaaaagaaacacatcaagcattgaacataaagaggcaagtgtggtgtttagagagcacgagcgctcactcttattccagggaggaagaggaatccatgacgtacagaggcccaggagcagaagggctccagggaggagccctgggagagagggtggcagcacggagagagctgctggaggcagcagagcaccaaggaaacatccagacatgcgcggcccggcccatccgctcccggaacagcaccaagacgaaatgg

SEQ ID NO: 219255 - DNA, 54 bp, Homo sapiens
  chr19:16513151-16513205
  hypo
tctctgccagggagacgccttcgctcaggttggccaggtcggtcaggctggcac

SEQ ID NO: 219256 - DNA, 35 bp, Homo sapiens
  chr19:16550467-16550502
  hypo
ctccagcctgggcaacagagcgaggctcaaaaaat

SEQ ID NO: 219257 - DNA, 385 bp, Homo sapiens
  chr19:16620513-16620898
  hypo
atgcagccaccatctgaagcccccatggtgaacacagtcagctcagcttattcggaggattttgaaaactctccaagtctgacagcatctgagccaaccgcccattccaaggagtctcttgacagaacactggacgctttgtctgaatcctcttcaagtgtgaagacagaccttccacaaacagccgagtctaggaaaaagtcgggcaggcacgtgacaagagtgcttgtgaaggacacagctgtgcagacgccagatcctgccttcacctacgagtggaccaagggtaagccttggggcccgtgggggccggggcagccgggacaggagctcagcgtgtggtttacagcatcctgggagacacgtgggagagctcaggttcctg

SEQ ID NO: 219258 - DNA, 43 bp, Homo sapiens
  chr19:16631183-16631226
  hypo
gagcgggagtaggaacgggagcaggagcgcgaccttgaccttg

SEQ ID NO: 219259 - DNA, 120 bp, Homo sapiens; identical to SEQ ID NO: 205254
  chr19:16638141-16638261
  hypo

SEQ ID NO: 219260 - DNA, 83 bp, Homo sapiens
  chr19:16680107-16680190
  hypo
acaagcgtgggccaccgtgcccagcctctccacccactctgtctgttacatcatccggtcccgttagtgtaccttagagcagg

SEQ ID NO: 219261 - DNA, 180 bp, Homo sapiens
  chr19:16680657-16680837
  hypo
aaaacaaacactcttaaggagagataggagaggtggagattttaggagggagtggtcatgccacaaggagggcagaccgagggctgtggacctgaattccagcttcccgaatatcaggctgtggccctcaggcacatgattctcccctctcagtccatctcaggaaaacctgagatcagg

SEQ ID NO: 219262 - DNA, 170 bp, Homo sapiens
  chr19:16735778-16735948
  hypo
gatgggaaccgaatcacctgctgaggagactgctcactatgactgctgtgcgagagtaagacacagtccttcactttacccacaatgcagtgagagtaagctggaacaatcatgcacacactgcgcttcggagagattttcaacaccctgggctgaaagggtgcacgacg

SEQ ID NO: 219263 - DNA, 129 bp, Homo sapiens
  chr19:16756122-16756251
  hypo
ctcattgagacctccgcgccagtctgaataaggcaggaaggtttcttcacaccattcatctggcctgtgagggacccagccaagatcttggcgtgcctgttctgacagcgacaccggcctcagcaaagc

SEQ ID NO: 219264 - DNA, 194 bp, Homo sapiens
  chr19:16766708-16766902
  hypo
tagtattatctagccgacaggattagtcacgtgcagcacaacctgtatacagggctgatccagcacagactagaaacattaaatgcttggtctgtttccaggaagttttgagaggcgctgctcagcaagacccttcccctagcgaaggatcgtgaaaacaggacctcccaccatcaacagatgccaatcaaacg

SEQ ID NO: 219265 - DNA, 120 bp, Homo sapiens
  chr19:16781235-16781355
  hypo
ctaccgtgcccagccgaggcagagctgatttttaaaaaatccatctactgaaatttccacccacaggtactttccatttccgcactgttccagaaatacctcttgcgtcgttgctaggcg

SEQ ID NO: 219266 - DNA, 36 bp, Homo sapiens
  chr19:17160653-17160689
  hypo
tgctcaagtatcctgaatgtaaccatgagtcatgac

SEQ ID NO: 219267 - DNA, 288 bp, Homo sapiens
  chr19:17160719-17161007
  hypo
gggacttctgcctggctgcttgaagaaaaatcttcgcttgggctgatgaacgtggcctgagcgggggctgacgaggcacccgggttgtcgtcctcagacaggggcgtgttcttgggtgctcccccagattctctgcaggcactgtcttgattgaaataccaccggctggggggcgccatgccctgggtctcttcccagacttcctggtttgccaaggctgcctctttgcttgcctctgcggagagttccagcacctgggcaaagctcctgttgaggatgggagaaaga

SEQ ID NO: 219268 - DNA, 392 bp, Homo sapiens
  chr19:17172563-17172955
  hypo
agacactgcctaagcgttccctgggggtcagaatcgcccttgagtaagaactggttttaaggtgtggcaggcccagtctgatcccctggccacaccagcattcccagcttcatgcatggccttcaacccaattagatggggaaagactagcaggctggctctagtgtgcctgcttctcaaccacgcctgggaagggcatagcgcgaattctcacaaacatctacaccaggagtggcaaattgtagctcataggccaaatccagcccgcttcctttgcttgtaaatagttttattggcacacagctatacctgttcctctatgtctggtctggggttgtttttaatgttacaaacagcagagctgagtcttcttgttgatgttgttgagacgg

SEQ ID NO: 219269 - DNA, 137 bp, Homo sapiens
  chr19:17220150-17220287
  hypo
aagcatgagccactgcgcccggccatcattttctaataagaggaataagacctcaggcccactgggtatcagggtttgggcttcgtgattttcctccatcatctctaatccctcacggcagctctgcccattttaaa

SEQ ID NO: 219270 - DNA, 342 bp, Homo sapiens
  chr19:17240193-17240535
  hypo
agagcgagacagtttcaacaacaacaacaacaacaacaaaaagaaacagcatcaaggctccgggaagtgagcagcccactctgtccaggcaggtccagggaggctcccagaggccaagacacctgagctgtggctaaacgtaaccaaacgtgtcagggcaggtgggcagggcatgggccaggaggggagccacggacgcgtcagcctcctgctcttggacttgagggagggcggcagacctttcagcacttctgtttcctcgtctgaaatggggatggcaggtctgcttcttaaaggaatgcgagttgaagagggagtctcgaatcccacagtatatgcccc

SEQ ID NO: 219271 - DNA, 120 bp, Homo sapiens
  chr19:17255382-17255502
  hypo
ggtgacattgtgtgaccctgtctcaaacaaaaaaaaaaagagtgaaagaaaatgggctactctctgcttactgggtagccctactttgcaggaacagttaaagaaaaaataagagaccag

SEQ ID NO: 219272 - DNA, 260 bp, Homo sapiens
  chr19:17264700-17264960
  hypo
tgttagtagtggttcgcagagtagctattacttggcctccaaaaacaactattttcctcccaattttgacctgtaggaactaccatgtgttttattatttgttacttggggtcagcgaggaagagcgccaagaatttcagctcaagcagcctgaagattatttctacctcaaccaggtaaacagcctcaagcccgagccacaaacgccacctctgttcccggcctcaagctgtttatgtatagccgggaagtcagaggca

SEQ ID NO: 219273 - DNA, 276 bp, Homo sapiens; identical to SEQ ID NO: 205260
  chr19:17355714-17355990
  hypo

SEQ ID NO: 219274 - DNA, 67 bp, Homo sapiens; identical to SEQ ID NO: 205261
  chr19:17392435-17392502
  hypo

SEQ ID NO: 219275 - DNA, 360 bp, Homo sapiens
  chr19:17411857-17412217
  hypo
tggccagggaaccgccgacaccatggatgaaaaagagcaccacgtcggcctgggcgcctttgcagctagtgatgcgcttctcacagtcaatatggatggtcctcttggggcgcctggctcgccgccgccgcccaccactgccactgccgctgccgctgcctgcgctgccgggggccaagcggccatcgctgcccgccggatctgccagctccacctccagggcggccggcggctccccagagccattctgcccgtgtaggaggtcggctcgaggggctcggcccaggttttccaccagcaaccgcccattgcggtacacggtgatccggcgctgacagcggaccaagccggagaggtccc

SEQ ID NO: 219276 - DNA, 140 bp, Homo sapiens
  chr19:17415104-17415244
  hypo
cctttgctgatgtgtgacctcgggcaagttacttcactttcctgagcctccgtttatttctctatgaaattaatcctctcataagtttgctacgcaggtaaagcactcatcatagtgtcgtgcatataacaaatgctcca

SEQ ID NO: 219277 - DNA, 420 bp, Homo sapiens
  chr19:17422799-17423219
  hypo
caacgcagacatgttgatcctaaaggctgcccctgagggagctctgtgcaaagcattccccttgttgtcttatgactcagagtaaccctgggaggtggccctgttggaatgcgtctcttcacagggaggcccagaggctgggaagtccctcgtcccaggtcacacaaccagggacgggctaagccaggattgagagcagaatgcccggagtacctgcacctctcgccactcagccaccgggccctgtgtgagcccggccagggttcagtcagccctgtcctgtcctcttcccttggggaggtaccagtccagccagggaggtggacatgtaagcagatgacctcgccggggtgtgagggaggctctgggagaggctcccgaagtgtcgggggaacaaaggggccagggagggtgttggag

SEQ ID NO: 219278 - DNA, 119 bp, Homo sapiens
  chr19:17435942-17436061
  hypo
gtgccagcagggaccctgggcgcttgggccgttcaggcccgtggccacccgcagtgctgcccttggccttggcagaggccttctcggaggaggtggcagggtccagcccagagccctcg

SEQ ID NO: 219279 - DNA, 62 bp, Homo sapiens
  chr19:17436203-17436265
  hypo
agagccaagccgttacaggactaagaagaaagggtgttagcgggtgccagctgaggctggtg

SEQ ID NO: 219280 - DNA, 216 bp, Homo sapiens
  chr19:17597468-17597684
  hypo
cagcccgagcgcctggcgctggtggatgccgggaccggcgagtgctggacctttgcgcagctggacgcctactccaatgcggtagccaacctcttccgccagctgggcttcgcgccgggcgacgtggtggccatcttcctggagggccggccggagttcgtggggctgtggctgggcctggccaaggcgggcatggaggccgcgctgctcaacgtg

SEQ ID NO: 219281 - DNA, 34 bp, Homo sapiens
  chr19:17687927-17687961
  hypo
gtgggtggggaaagcgtgttggagagaggctgga

SEQ ID NO: 219282 - DNA, 338 bp, Homo sapiens
  chr19:17688091-17688429
  hypo
cttccctggaggcggggcgggggctggagggcccttgtttgcaggggctgatctggctggggactctccgggctgcaggtcttcatgatcaacctgaggcggcggcaggaccggcgggagcgcatgctgcgggcgctgcaggcacaggagatcgagtgccggctggtggaggccgtggacggcaagtgagtccgaggcctgggggtgggggggcgggtccgcacgtggatgtgggtgtagacctcgctggtagacggcaagtgattcagatgggggcgggcgtggtgtccaaacagatgtagacctcgtcagtgggcgtcctgaaggggaagtgaatg

SEQ ID NO: 219283 - DNA, 432 bp, Homo sapiens; identical to SEQ ID NO: 96847
  chr19:17691243-17691675
  hypo

SEQ ID NO: 219284 - DNA, 239 bp, Homo sapiens; identical to SEQ ID NO: 205266
  chr19:17716539-17716778
  hypo

SEQ ID NO: 219285 - DNA, 224 bp, Homo sapiens; identical to SEQ ID NO: 205269
  chr19:17799175-17799399
  hypo

SEQ ID NO: 219286 - DNA, 639 bp, Homo sapiens
  chr19:17838419-17839058
  hypo
tgtgaatttgagcatcgcaaggcggtgccaatggcaccggcacctgcgtcccccggcagctcgaatgacagcagtgcccggtcacaggaacgggcaggtgggctgggggccgaggagacgccacccacatcggtcagcgagtccctgcccaccctgtctgactcggatcccgtgcccctggcccccggtgcggcagactcagacgaagacacagagggctttggagtccctcgccacgaccctttgcctgaccccctcaaggtccccccaccactgcctgacccatccagcatctgcatggtggaccccgagatgctgccccccaagacagcacggcaaacggagaacgtcagccgcacccggaagcccctggcccgccccaactcacgcgctgccgcccccaaagccactccagtggctgctgccaaaaccaaggggcttgctggtggggaccgtgccagccgaccactcagtgcccggagtgagcccagtgagaagggaggccgggcacccctgtccagaaagtcctcaacccccaagactgccactcgaggcccgtcgggtgagtactggagctggggccctgggctgggttagcagctgcttaggctggagagcatagctcgtccccctgttttt

SEQ ID NO: 219287 - DNA, 316 bp, Homo sapiens
  chr19:17881372-17881688
  hypo
aggagatggacaaggtgggctcacagtgggggggttctgaggaatttgccgcggggcggaggggctgcctgatcagagagtggaaacacatcccagagcgacggtcctggaacctgtgggtgatcacaccctgggtaccccgaggagttcacctgccaggtgatggggcctgggggaggccccctgagtatcgccctcccatccccgtttcctccctgtgctttgtaggcggagactaaaaccaagaaggcggcagagagcctgcggcgctcagtggaaaaatacaactcagcccgagctgactttgagcagaaga

SEQ ID NO: 219288 - DNA, 60 bp, Homo sapiens
  chr19:17994750-17994810
  hypo
ggtcctgccatcgtcggctgcccgctgcgtggctctctcagtcaacgcctctggcctcct

SEQ ID NO: 219289 - DNA, 509 bp, Homo sapiens
  chr19:18053181-18053690
  hypo
taaggacgctcctgttccccagctctcccccttggccggcgctcttcgcacctaggagcgtcacttcttcaagagccacccacccgccctgtccaaggttcccctgttggcctcacatcccccgcccagggcagcaccgggacctatcttgttcctggtatgtcccctgcacccagcacagagcctaaatcctcgttggctgagatgaaaactcgaaccccaggctagtgggtggcgcgggggtgtggggtcttctgcctgaccatgcacgccgcccccgcaggaggagaaggagaagcggcgcctcgaccagctggaacgtaagaaggagacgcagcgcctactggaggaggaggactccaagctcaagggcggcaaggcgccgcgggtggccacgtccagcaaggtcacccgggcccagatcgaggacacgctgcgccgagaccatcagctcagggaggccccggacacaggtcgggcggcatcccgctctggagctgcacttttgc

SEQ ID NO: 219290 - DNA, 41 bp, Homo sapiens
  chr19:18054174-18054215
  hypo
cagtgctcaggtaacggggcggggcctggggctttcccagg

SEQ ID NO: 219291 - DNA, 429 bp, Homo sapiens
  chr19:18084483-18084912
  hypo
gatggtaaacccacgtgtcagcactctgggccactcccaaacttagaacgttctgggttggccgggatggtccttgcctttctggtcagtaagctggaccctgctgtgaccatgtccctctgtgcccttgcaggtcagtgcaggagcccagccgctgagccatgccgggccccgggcggcctgcagcgagcccaacccctgcacccaggtagtcatgaacagccacagctacaatggcagcgtggggcggccgctgggcagcgggccgggcgccctgggacgagaccctccggaccctgaggccggccaccccccacaacccccgcacagcccgggcctccaggtggtagtggccaagagtgagccagcccggccctcacccggcagcccccgggggcagccccaggaccaggacgatgacgaggatga

SEQ ID NO: 219292 - DNA, 108 bp, Homo sapiens
  chr19:18085018-18085126
  hypo
gactatgccctcattttcggcatgtttggcatcgtcgtcatggtgacggagaccgagctgtcctggggggtgtacaccaaggtaggcgtggtcctcccccaggcactc

SEQ ID NO: 219293 - DNA, 85 bp, Homo sapiens
  chr19:18092405-18092490
  hypo
cctgtggggtttcaggccaggctgacgtcactctctgggggcgcggtggggctgggcagggagcgcggcgcgtgtctgacaccca

SEQ ID NO: 219294 - DNA, 279 bp, Homo sapiens; identical to SEQ ID NO: 205273
  chr19:18117878-18118157
  hypo

SEQ ID NO: 219295 - DNA, 50 bp, Homo sapiens; identical to SEQ ID NO: 205274
  chr19:18118523-18118573
  hypo

SEQ ID NO: 219296 - DNA, 99 bp, Homo sapiens; identical to SEQ ID NO: 205275
  chr19:18119043-18119142
  hypo

SEQ ID NO: 219297 - DNA, 316 bp, Homo sapiens
  chr19:18123645-18123961
  hypo
tggctagatggggagcggtatttctgaatttctgtttccagtgttctctgaggcttaatgggaacatttctcttaggaggatccaaacccactcttgggggacatgaggccgcgctgcatgacttgctgaacggcacagggacccctcgaggaacaaggttgcacaccagctttcagccaccatgactgtggggagtggctggaccaagggctgacctccccgactgcatcaaagttggggaaccaagtctcagagtgaggcgggggcctttcggatatcacatgggacagaggaagagcccggctggaatctgac

SEQ ID NO: 219298 - DNA, 60 bp, Homo sapiens
  chr19:18241244-18241304
  hypo
tgtagtgcctgctggggcctcgatctccggtcccagcaagcctggccctctgtccccagg

SEQ ID NO: 219299 - DNA, 138 bp, Homo sapiens
  chr19:18241355-18241493
  hypo
aagatcaacaaacagaacttgatcctgcgtaaccagatccagcaggtctttgtggagcgtgacattctcacctttgccgagaacccctttgtggtcagcatgttctgctcctttgagacccggcgccacctatgtatg

SEQ ID NO: 219300 - DNA, 64 bp, Homo sapiens
  chr19:18273254-18273318
  hypo
ggcaccttcctagtccgagatgcttctagcaagatccagggcgagtacacgctgaccctcaggt

SEQ ID NO: 219301 - DNA, 136 bp, Homo sapiens; identical to SEQ ID NO: 205278
  chr19:18343303-18343439
  hypo

SEQ ID NO: 219302 - DNA, 627 bp, Homo sapiens
  chr19:18368469-18369096
  hypo
ctggaaccagcttcggtcagacatgaccccggcccggctgcccagctccacccacgtgacggggtggagcatctgccagtgccgggcttggtcccggcgggtgctgtagccgcgccaggcagactggatggtcgtggtggctctgcagaggtgtgccaggttccgccgcacacggtagccgcgccaagtagcttggatgaccatggccccccggtgccacagccggatcctgcgacgcgccaggtagccacggacgcccgcctggatagtgatcactgcgaggatgcggatctcctctgcagcctgcatggacaccattggctccccggaccgcctgggaggcaccaccgccttgttgcgccaggtgtcccaggacgcagcacccctggctggctcccatgcgcggttccacgattggccaccaaccacaccagcgtccgcggggccctggagtatagtggagttcagggatgccttgtgactaacggcaggattctgggggctataggagtcctgccgtctccacggtgactcctggttaaaaaggggtggcagggaaccacttggggaagactcatagcctagagacaccctccgaactcccggggccagcggaggaatgaccga

SEQ ID NO: 219303 - DNA, 330 bp, Homo sapiens; identical to SEQ ID NO: 205279
  chr19:18420497-18420827
  hypo

SEQ ID NO: 219304 - DNA, 79 bp, Homo sapiens
  chr19:18496195-18496274
  hypo
gacataagccaccatgcctggcccccagaattatgaatcctgtgaggatggcttcaaggtgagcgctgagccagacaaa

SEQ ID NO: 219305 - DNA, 571 bp, Homo sapiens; identical to SEQ ID NO: 205281
  chr19:18548568-18549139
  hypo

SEQ ID NO: 219306 - DNA, 67 bp, Homo sapiens
  chr19:18557168-18557235
  hypo
gggtgaaccgccgcgtgatgcgctcaatgcgggcgtgcaggtcgcggtactcgctgtactcggcatt

SEQ ID NO: 219307 - DNA, 84 bp, Homo sapiens
  chr19:18600813-18600897
  hypo
agcctccagccacctgcacgcggggccagccaggccaggtgagacacagccttgcttacacgccagctgcgtctgagagcagag

SEQ ID NO: 219308 - DNA, 81 bp, Homo sapiens
  chr19:18675984-18676065
  hypo
gggataaaatcttgacgtaagtttatttactgattgattaattgatcgagacagagttttttttttttttttggagacgga

SEQ ID NO: 219309 - DNA, 360 bp, Homo sapiens
  chr19:18688368-18688728
  hypo
ggagaaactgactcatcgtgggggctcacccaggatttccaaagcggtaacatcggacctctttcgcttgctactctgctctacttttctttagaattgagggcaaacaccgggcacctgtcggccatttaaaagcgacaagtgccgccgcctgactaaagacacagatgtaagggtatctgagaaagggctctctaacaacccccagcccttctgaatcgagagtgttgttttgcctagaaaccagttcccactttctctgcattttctgggttgaaccgagggctggccaagggtggaaaacagtggccccaagctcctggtaacgcccagtcgagatgacagcgctttgtgaaacct

SEQ ID NO: 219310 - DNA, 36 bp, Homo sapiens
  chr19:18757684-18757720
  hypo
gagagagtagagcacgtccagcgtgagctggagagg

SEQ ID NO: 219311 - DNA, 235 bp, Homo sapiens
  chr19:18757927-18758162
  hypo
cctcccctccttgtcggcaggtcccaagagctctgggagtggaattgctctgaaagcactcacttcaacctgaatcgtgcagtgcgatcgtcacagctggactgtttccacctggtagctgtgacccccgggacggcctccttgtcgttgtccgtagttaccggggaagaaaggctttattaccctccgccataatcgcaccatctccagggagcccctgcgaatgtcatcccac

SEQ ID NO: 219312 - DNA, 76 bp, Homo sapiens
  chr19:18771033-18771109
  hypo
ctgggcctggctagggtgcccgatgacattgctggggggatacagcggcaagcgggtgtcagaatggcccctagcc

SEQ ID NO: 219313 - DNA, 148 bp, Homo sapiens
  chr19:18798371-18798519
  hypo
ctgcagccatggcgcgctgcctcccatactgtagacagcaggggtttggccacacctgcagccaggtgaggcatgatcgggtcggcacctgctcctctcctttgaattccaaaggacagcatgtcactcatgcgtgtctgttcacagt

SEQ ID NO: 219314 - DNA, 203 bp, Homo sapiens
  chr19:18830681-18830884
  hypo
atgggcacaggcccgctccgggaaggccccaggcccgtccatgtgggcagcgtcggcgtcgggcttcttgcctgggacccaggggccgctcttggggagggagaccctgtttcaagtggccagcatccccgccagtggtttgcattattcaattggtgataagatttaaaattaaactgcaaaggatctgttcccccagctac

SEQ ID NO: 219315 - DNA, 375 bp, Homo sapiens
  chr19:18856004-18856379
  hypo
atggctccggaaggcgcctgtacttggctctggtggtgcctggagtgcctggaggaggctgcgggggagggtgtgtgggggccgcgtctcaatcaagagcagccctgggctccacaaggaagcctcccaggaactcgcgcttggccaggtgggccccgaaacagtcctgggctggaagcccctgggctgtctcttggcaggcccctccagggatgacgtaggtgggggtaggaggccgtccaggcccggagagagagggcggaggcctgtctgcacctggtgagactggggaggagggctgcctaggccggctacatccctggcacccggcgggcgctggccccgagcttgtgccgctctgcctggcctgtgcat

SEQ ID NO: 219316 - DNA, 327 bp, Homo sapiens
  chr19:18856409-18856736
  hypo
ggctcccgggaccccagctcacaccccctccctaccccccagtgcttggagagccagggagctggggctgaaggaagaagcccatcccaggctgtggagcgatggccgagggtgctccagagtggggggccctgcgatcagactctggggccagcgctggggccacagctggtaaccattgtttggatttctctctctctgtttccatctcctcctcccccagacccccttccaatcctcgggcctggacaccagccggaccacccggcaccatgggctggtggacagggtgtaccgggagcgtggccggctcggctccccacaccg

SEQ ID NO: 219317 - DNA, 65 bp, Homo sapiens
  chr19:18871011-18871076
  hypo
acctgggcatcggtggcgccggccagggtaaggcagggacactccgccctcggacagagcactgg

SEQ ID NO: 219318 - DNA, 165 bp, Homo sapiens
  chr19:18872660-18872825
  hypo
gagggaacagggccccagcccgagcgcattgaggctgcattctgactcccacacctgggccctgggccctgggcccgcggggctctgccactggacagagggcaccagagaaggcccagaaaacacagccgattcggaggagccctcttcattgtctccagatag

SEQ ID NO: 219319 - DNA, 134 bp, Homo sapiens
  chr19:18872900-18873034
  hypo
tacccctgccccgcatagaagccaccatctcccagcccctgcttttcccctcacatctcttcacggccaccagagcacatggcccccttcccgctggagggtccttggcaggtccccagcgcccgcccgggagc

SEQ ID NO: 219320 - DNA, 35 bp, Homo sapiens
  chr19:18957753-18957788
  hypo
gatcgcaccactgcactccagcctgagcgacagtc

SEQ ID NO: 219321 - DNA, 151 bp, Homo sapiens
  chr19:18963997-18964148
  hypo
tctccctggtggaagcgacggcgtgggttaaaatggccacctctctcacttttttacctcaagacatgcggctcatgcagggggatgagatatgcctgcggtacaaaggggaccttgcgcccctgtggaaagggatcggccacgtcatcaa

SEQ ID NO: 219322 - DNA, 200 bp, Homo sapiens
  chr19:19040159-19040359
  hypo
agtccctttccaggacgaatgggcccaactatgccgcctgcagcctggcccgcatcccaggccggaatcgttcatagaaaaccagccccggctcagggcgcagcctcagccaggcgggccaggccctcacgcagctcactcagctcaaacaggctgacgtccagcagctgcgctgcccggcccacctcagcccgcgcccg

SEQ ID NO: 219323 - DNA, 266 bp, Homo sapiens
  chr19:19109239-19109505
  hypo
tgtaagccaccgcacacctttttttatcctgttaatcttcttattgtcagttcatttcaacaggcttagacttggaccttcaaaggcggagggaaattccctttgttctcttcagaggcatctccgagggtattatataaagtagctgtgtgtgtgtatgcatgtgtgtgtgcgtgtgtgtatgcatgtgtgtgtgcatatgcgtgcacatgtgtgtatcttgtgtgtgtgcgtgagttactggatgcaggcggcccctccataat

SEQ ID NO: 219324 - DNA, 281 bp, Homo sapiens
  chr19:19114950-19115231
  hypo
aactgtgccgacaggcgggcactcaccttttggctcctggatgagacacactctcttgggagctggaatcatgccaaccttcaatgacttgctgctgatcctcttccgagggaagcaggtacctgaggaggcctgtgacaaggcaggtgctccagccaggtcgtcctcggcagcctcgccgggaaggccgtcggcaggggtgctgccctcagacttgcccgcccctccaggagcgggggcctcctctcccccatcctcatcgtcctcgtcctcctcctcag

SEQ ID NO: 219325 - DNA, 240 bp, Homo sapiens
  chr19:19156742-19156982
  hypo
agccactatgcccggcctattatgctaaattcttaaaatatgttctcttaatctgtgctcagcccatcttgctggtgaggtatctgaggcttcccaaggatcagtgaccacgcccctgcaccccgaaaggtcagctggtgagaggcagagctggtacccggatccaggaagcaaagcactgaaaggccgttctaccagcagtacaggaaactccgtgtttgtttataacattcgctcctt

SEQ ID NO: 219326 - DNA, 194 bp, Homo sapiens
  chr19:19416790-19416984
  hypo
ccccaggcctgtccgcctgctgatgagcagggacctcttcccagcgctgggggtgggtgtgctgggaggggcgctgggcgcactggtcggggcgtctggtatagaaggaaggatatgcgcactcgggatctgcagggcacctctcccggcttccgacctaacctaggtgctgtgggccccgggggagctgggtc

SEQ ID NO: 219327 - DNA, 690 bp, Homo sapiens
  chr19:19446448-19447138
  hypo
tggaagccccagagcgagccagtaaccaggtgccaggtgtttgcctgagaattaatcgttgttttctttctttttcagtggttgatatcacagcaagtatcctttccgtgttggtatggttccctttaaggaattctccacttaaataaaaagaatgtatcaaagcttgaatcccacctcccgacatgccctgtgagttgaggctcggcccacagagcacctggagtgtcccccacctggccctctgctgcccttgggcgctgtgctcctctttgtgcttctcttcgtaccttgcatccagctccaagccctgccctgcagcaagctcaaggttcactgggggaacaggaaaacttggaatttcagggcaggcagggacgtgtgtgccctgcagaccttggcagggtaggagccccaagctgtggccctttcaaaccgacctttttcgcagtgtctgtacttccttaactggacgtcactagatcccgcagttcgaagatgttaaatttgaagcagcaagtctgttgtctgaattgtactgtcaagaggtaagaacatattaaggtttctgaaagcaaagtgtctctccgtgtcgctaagacatgacagcacattggtaaattggggttccgggagttggaatccctccggctttttttgtttttttggtcggggtgggaggacagggtc

SEQ ID NO: 219328 - DNA, 180 bp, Homo sapiens
  chr19:19494668-19494848
  hypo
tacaggcgtgaaccaccgcgcccggcctgggttgcttttctaaaaaggtctaactcaccgcattgtcctagggctgaggcgtcagaaagtcgaagtttcaggaaaaggggaccccttcctcccacactcagatgctgcttagaaaagcacatggagcacaactccctcgcatttttcttt

SEQ ID NO: 219329 - DNA, 292 bp, Homo sapiens
  chr19:19576164-19576456
  hypo
aagcatgccgaacacggagtcagaaacgagcgcttgaacgggacccaacagaggacgatgtggagagcaagaaaataaaaatggagagaggattgttggcttcagatttaaacactgacggagacatgagggtgacacctgagccgggagcaggtccaacccaaggattgctgagggcaacagaggccacggccatggccatgggcagaggcgaagggctggtgggcgatgggcccgtggacatgcgcacctcacacaggtgagtgggaggagccagcgggaggggctggaa

SEQ ID NO: 219330 - DNA, 360 bp, Homo sapiens
  chr19:19625579-19625939
  hypo
gccggcgatgtccgagtcgtcgaagggcatgcacccggtgaccatgacgtagagcacgacgcccatgctccacacatcgtacttcttggggtcgtaggggatgcccaggagcacctcgggtgacgcgtaggcggctgagccgcagtaggtggtgctcaggtctgggtagccatgggcctggcggccgaagccgaagtcggtgagcttgacgcggcgctcgtccgggctcagcagcacgttttcgcacttgaggtcgcggtgcaccaggtgatgatcgtgcaggtagcgcacggcgccggcgatctgcgcaaagaggtcgcgcgcctgaactccggggatgcgcccgttgcgctgcacggc

SEQ ID NO: 219331 - DNA, 280 bp, Homo sapiens
  chr19:19636907-19637187
  hypo
attgcagagtgggcagcgcctggagctgtggaggagggtgtctgggggcgggctggcccgctgagcagcgcctctcttcacaggctacagcatgctggccatagggattggaaccctgatctacgggcactggagcataatgaagtggaaccgtgagcgcaggtagggcccctggtgggcgttgtctgaaagtgcccccccggcgagttgtcggggtcctgtagcattccgctgttgtctgtgctggcgaggggtgaacgggccccttggacttggctgt

SEQ ID NO: 219332 - DNA, 99 bp, Homo sapiens; identical to SEQ ID NO: 205290
  chr19:19729152-19729251
  hypo

SEQ ID NO: 219333 - DNA, 135 bp, Homo sapiens; identical to SEQ ID NO: 205291
  chr19:19729395-19729530
  hypo

SEQ ID NO: 219334 - DNA, 162 bp, Homo sapiens; identical to SEQ ID NO: 12178
  chr19:19729585-19729747
  hypo

SEQ ID NO: 219335 - DNA, 73 bp, Homo sapiens
  chr19:19737545-19737618
  hypo
ggtgccatgcgtgagcagcggtccagggcacagaggcagtgccaggagtgggcaggcagcagccccaggccca

SEQ ID NO: 219336 - DNA, 178 bp, Homo sapiens
  chr19:19737702-19737880
  hypo
ggtgccgctccacggcgatggccagcagtgtggccaccgacgcagtgaggcttgtgtccagcaagccctgccgcaggaaccagccctcaagtgaaagtcgggctgtgcggggaccagtgtggaacatgaggaagaggtaggccacgcccgcgaagaggtcagccgcggccagattgcc

SEQ ID NO: 219337 - DNA, 50 bp, Homo sapiens; identical to SEQ ID NO: 205293
  chr19:19738572-19738622
  hypo

SEQ ID NO: 219338 - DNA, 126 bp, Homo sapiens; identical to SEQ ID NO: 205294
  chr19:19738668-19738794
  hypo

SEQ ID NO: 219339 - DNA, 247 bp, Homo sapiens; identical to SEQ ID NO: 205295
  chr19:19739428-19739675
  hypo

SEQ ID NO: 219340 - DNA, 261 bp, Homo sapiens; identical to SEQ ID NO: 205296
  chr19:19843330-19843591
  hypo

SEQ ID NO: 219341 - DNA, 68 bp, Homo sapiens; identical to SEQ ID NO: 205297
  chr19:19844044-19844112
  hypo

SEQ ID NO: 219342 - DNA, 73 bp, Homo sapiens; identical to SEQ ID NO: 205308
  chr19:20162581-20162654
  hypo

SEQ ID NO: 219343 - DNA, 120 bp, Homo sapiens
  chr19:21261376-21261496
  hypo
tgggattacaggcgtgagccaccgcccccggcggataattttttataataaaaatgttctttatgtttgccccttaccatttttttttttttttttttttgagatgaagtttttgctctt

SEQ ID NO: 219344 - DNA, 89 bp, Homo sapiens
  chr19:21305621-21305710
  hypo
taactggtgagttcgcttatcaatataacattcagattagttaattaagataaaagccaggtgtggtggctcacgcctctaatcccagc

SEQ ID NO: 219345 - DNA, 120 bp, Homo sapiens
  chr19:21513407-21513527
  hypo
gctggccaccatgcccggctaatttgtagccaaactttaaaaagagtttagctctatttttaaaaagaaacaaagaacaggtgaaattgattgtaacaatttaacccaatatatcgaaaa

SEQ ID NO: 219346 - DNA, 349 bp, Homo sapiens
  chr19:21623090-21623439
  hypo
aattggcaagcccctcttgccgccccaagcctctctgggtcggactactagttacaccccgggaggtgatcaggctccccttccgtccttacgggacgggtcctgccttggtccccaataacttaccgtggttcctaaagtgcgctatttctggaatcatcctgtagcccttctcaggctccgttgcactgctgggtagggatgccgggtcatgggagagctgatttcccctccgggctgaagttctcccggcggtgcctgggtcccaggtttcccttgaatcaaggctccagccccgattttcccttgaatccggggctccagccccgatttcaaggcaaaggagaca

SEQ ID NO: 219347 - DNA, 92 bp, Homo sapiens
  chr19:21627223-21627315
  hypo
tactacatttttcaaccaaaaggttaaatacttaaatattgaaagtgacattctggattatccttttccacgcagactacattgcagttttt

SEQ ID NO: 219348 - DNA, 105 bp, Homo sapiens
  chr19:21645410-21645515
  hypo
actacctaactgtacccaatcgattaatttgctttgcttcatcacacaccttatagaagccttttcttcaagaccctctggtagccccaaaaccacaaacgtcgg

SEQ ID NO: 219349 - DNA, 96 bp, Homo sapiens
  chr19:21654951-21655047
  hypo
aaccaagtctcaccgagttgcaggagccacttttctttttttttttttttaatctatttttatttttttgagacagagttttacttttgtcgcccg

SEQ ID NO: 219350 - DNA, 139 bp, Homo sapiens
  chr19:21760988-21761127
  hypo
gtttaagggattctcctgcctcagcctcccatggtgttcaatttttaaaaatgcttttcctacatctgttaagataatcttgtagatttttctacttattctgttaatgaaataatttcatgagcggttctcaaccgag

SEQ ID NO: 219351 - DNA, 33 bp, Homo sapiens
  chr19:21792703-21792736
  hypo
agcagtgactcccaacgacgaacagtggattag

SEQ ID NO: 219352 - DNA, 180 bp, Homo sapiens
  chr19:22815034-22815214
  hypo
gcccatagtacatatttgaacaaaatgctaacttagtatctcagaataatggcaacatttttttgtttgttttatggtggaacacacacactcagggcataattatacagcttctaatattccaaaaagagtattcaagccctttttgtttgtttgtttgagacagaatctcgctctgct

SEQ ID NO: 219353 - DNA, 39 bp, Homo sapiens
  chr19:22815454-22815493
  hypo
tacaggcgttaggcaccgtgcccagccaagccttaactc

SEQ ID NO: 219354 - DNA, 31 bp, Homo sapiens
  chr19:22815523-22815554
  hypo
gccccaattcggtacatggcatgtttttaat

SEQ ID NO: 219355 - DNA, 36 bp, Homo sapiens
  chr19:22824862-22824898
  hypo
aggattacaggcgtgagccagcgcgcccggccacgc

SEQ ID NO: 219356 - DNA, 32 bp, Homo sapiens
  chr19:22825458-22825490
  hypo
gggagtacaggcgtaagcgaccgcgcacggcc

SEQ ID NO: 219357 - DNA, 180 bp, Homo sapiens
  chr19:23084164-23084344
  hypo
aggattacaggcgtgagccactgctcccagtctctttctgaatcttgactctgtgggcaccgcccgttagggaggctcgcgtccctgcccaggggccttcattaaccgaaggggacgtgccacgctgggggtgttcgaggtgtgggaggcctcctctgctggcgtcccacctctccgttt

SEQ ID NO: 219358 - DNA, 119 bp, Homo sapiens
  chr19:28296830-28296949
  hypo
cataggaccaccacggcctcggccacgctagctcactggccgcaccgctgcccgccttgctgttcaccagtccctgggcatcccgcatctggttgctgaggaacgcctgacgccgcctt

SEQ ID NO: 219359 - DNA, 35 bp, Homo sapiens
  chr19:29930745-29930780
  hypo
gacccaatgagaggtgacaacgtgctggtggccct

SEQ ID NO: 219360 - DNA, 79 bp, Homo sapiens
  chr19:30102075-30102154
  hypo
aacggccaaatagcctcccacgctccagaagacgcttaaagtatgccatgctgttcccggccccactcaggagatcagc

SEQ ID NO: 219361 - DNA, 145 bp, Homo sapiens
  chr19:30185996-30186141
  hypo
aaatcctgccactccgccacccagacaccgaacacccagacacctaacacacagacacctgacacccagacacctggacacctgacacccggacacccagactacctgacacccggacacctggacacccgatcacccagacacc

SEQ ID NO: 219362 - DNA, 96 bp, Homo sapiens
  chr19:30186240-30186336
  hypo
ctgacacccagacacctgacacccggacacctggacacccggacaccgagacacctgacacccagacactgagacgcctgacacccagacacctag

SEQ ID NO: 219363 - DNA, 196 bp, Homo sapiens
  chr19:30314899-30315095
  hypo
gccacctccagacaccagtgcgtgctcccgatgctgctatggaaggtgctacttgacctaagggactcccacaacaacaaaagcttgaagctgtggagggccacggtggcgtggctctcctcgcaggtgttctgggctccgttgtaccaagtggagcaggtggttgcgggcaagcgttgtgcagagcccatagcca

SEQ ID NO: 219364 - DNA, 162 bp, Homo sapiens
  chr19:30535945-30536107
  hypo
cttgaatgtgcttaagagcacggagccgaatgtgacctgtgcaggttttccacacggccaggactcagacctgtgtgtgtcttctgtgcggttgttgcacactccaaatctggtctgtgtgggttccttaataagaaagtcgctgtaggaaaagctgtccat

SEQ ID NO: 219365 - DNA, 31 bp, Homo sapiens
  chr19:30637463-30637494
  hypo
ccatgagcaccacattctggcggactcaccg

SEQ ID NO: 219366 - DNA, 60 bp, Homo sapiens; identical to SEQ ID NO: 205342
  chr19:30718934-30718994
  hypo

SEQ ID NO: 219367 - DNA, 395 bp, Homo sapiens
  chr19:30935128-30935523
  hypo
ccggccggacctgaagcccccgccgcacgcccagcaggccccgctggccgcctgcaccctggccctgcaggctaaccacagcgttcccgacgtggcccacccggtgccctcgcccaagcctgccagcgtgcaggaggacgcggtggccccggcggcgggcttccgctgtaccttctgcaagggcaagttcaagaagcgcgaggagctggaccgccacatccgcatcttgcacaagccctacaagtgcacgttgtgcgacttcgcggcttcgcaggaggaggagctcatcagccacgtggagaaggcacacatcacggccgagtcggcccagggccagggccccaacggcggtggcgagcagtcggccaacgagttccgctgcgaggtgtgcggtc

SEQ ID NO: 219368 - DNA, 164 bp, Homo sapiens
  chr19:30935877-30936041
  hypo
tgtctcccatctccagcatggcccacggcgtcccggagggggacaagcactccctcctgggatgcctcaatctcgtgccgccgctgaaatccagctgcatcgagcggctgcaggcggctgccaaggctgcggagatggaccccgtgaacagctaccaggcttgg

SEQ ID NO: 219369 - DNA, 337 bp, Homo sapiens
  chr19:30936341-30936678
  hypo
aacatgaaggagaagcccaccgagtgccccgactgcggccgggtgttccgcacttaccaccaggtggtcgtgcactcccgtgtccacaagcgggaccgcaagggcgaggaggatgggctgcacgtgggcctggatgagcggcgtggctcgggcagtgaccaggagtcccagtcggtgagccgctccaccacgccgggctcctctaacgtcaccgaggagagcggggtcggaggcggcctctcccagaccgggagtgcccaggaggacagcccgcacccctcctcgccatcctcctcaggtaggttagctgagaagcggggagaagcagcttgtacag

SEQ ID NO: 219370 - DNA, 85 bp, Homo sapiens
  chr19:31217750-31217835
  hypo
attggatggagaaagccaggcgctgctgagcgcttaacgacaaccagccttctccccagaaccggctgtgagcacagctaagaat

SEQ ID NO: 219371 - DNA, 96 bp, Homo sapiens
  chr19:31217914-31218010
  hypo
tctgcctcagccttgccgagcagggggccaagcgtgtctgagtcagttcagctgctgtaacaaagcaccgtgatcggggtagcttataaacaacag

SEQ ID NO: 219372 - DNA, 229 bp, Homo sapiens
  chr19:31767846-31768075
  hypo
gccagccagtggctgatggtggtcatggacagcccggtgaacctggagatatgcatccgctcctgggggctcaggtctgacatgatgtacttcccttctgaggtctgccggaggctggcggcaaactgggcctggaggatcaggaggtgctgggggttccagtttgactggcggcccttcctcttctgggcgggcgtcgactcctcagcctcctccagagtggccccgt

SEQ ID NO: 219373 - DNA, 521 bp, Homo sapiens
  chr19:31768105-31768626
  hypo
gagtggaggattttgacgtgtggctctctgtcaagttcttcagcatatcggatatatctgacaaggcattctcgcgtagcggcgagtttgacatgaatgatacgacggcagatgtctttgccgttgtcaccgtggatgaggaggttgccggggctgtggacgtgggtgacagaagcactgaacccaaggagcagcctttgtcactcttcccttttgtcaagtctatgggctggtcgttgttgacgtggtagaaatagcggtcgaggtggtctgccttcttggactgcaggggcggcggggtggccacagcagccttctccgccaggctgttgctcatcttgaaaagcatgctcatggggtccagggcaggcagggagggcttggcggccttgcccaggtgaatgttcatgactgactgcagggcgctcaaagggttaacaaaaggctgttcaggcgggtggtcggtgatgatggccgtgctgccactcaaactgctggctaggggcttcaccagctccttg

SEQ ID NO: 219374 - DNA, 312 bp, Homo sapiens
  chr19:31770148-31770460
  hypo
tgcggctctgtgacacctgctgcagcgtcttagccatggcgctctggtgccagtcgaagctcccgctgccacagctgctgctgctgctactgctgctgctgctgctgccgttgttcttctccgaggagggctggtgcaggttgaggttgaggttggaccagtaggagttggagaggaagttgttgtacacggccttcatctgctccaggctatccgacacagtcgtgtcttccagtgggaccgtgacctccttggtctcctcttcgttcttgatggagccgctttcaaagtcagccattcggtcactggtct

SEQ ID NO: 219375 - DNA, 178 bp, Homo sapiens
  chr19:31770490-31770668
  hypo
ggcaggaaaactcggcggccggggagttctggtagctggggcaggccctggcgagctccttctccgggcacatgtacttggccgagggctctccatctgccgtatgctcctctgggtctaaaccttcgtccaccagggcagcagcctttaactcttcggaaacataggctgccatgat

SEQ ID NO: 219376 - DNA, 239 bp, Homo sapiens
  chr19:31794098-31794337
  hypo
taacagccaagccttcactccggcaaatcgccccccatctctctgggaagagactgaagatggtggagctgctgacccgcaggcctgagtgttgtaaagggacctttctccactacgctaaggaatacgcccgggtctgcactgcgacattggtcgtgctgcaacacaggacagagacggcagcctctgagatggcatagacctggctcaccggagacgcacttggtccacataggcac

SEQ ID NO: 219377 - DNA, 72 bp, Homo sapiens; identical to SEQ ID NO: 205343
  chr19:31839494-31839566
  hypo

SEQ ID NO: 219378 - DNA, 158 bp, Homo sapiens; identical to SEQ ID NO: 205344
  chr19:31841177-31841335
  hypo

SEQ ID NO: 219379 - DNA, 153 bp, Homo sapiens; identical to SEQ ID NO: 205345
  chr19:31841755-31841908
  hypo

SEQ ID NO: 219380 - DNA, 74 bp, Homo sapiens
  chr19:32672523-32672597
  hypo
tgaattattgcagcccgggaagtggccactcaagaggggttgcttggccaggtgcacatcggagtcgtgggctg

SEQ ID NO: 219381 - DNA, 290 bp, Homo sapiens
  chr19:32845482-32845772
  hypo
atcagcatgtccttactcaccgtcattgaaaaattgagagaaaggacagaccaaaacgcttcagacgatgacattttgaaagagttgcaggacaacgcccagtgccaacccaacagcgatacaagtttgtccggaaacaatgtggtggaatacatcccgaatgctgaacgaccctaccgttgccgcctgtgtcactacacaagtggcaacaagggctacatcaagcagcacttacgagtccatcgacagagacagccttatcagtgtcctatctgcgagcacatagcgga

SEQ ID NO: 219382 - DNA, 192 bp, Homo sapiens
  chr19:32850567-32850759
  hypo
ttagtaacatggctacttttcgttggatccatgtctcctgcgtttcggagagctgcatattcatgtcagtcataacctttgtccctgtaacctgtcagttaactagaaagaattatacattgcatagcacttaaaaatttgcggccgcttttcctttcttgttgcgttggtagctgacgtttagtggtaaac

SEQ ID NO: 219383 - DNA, 163 bp, Homo sapiens
  chr19:32898172-32898335
  hypo
cccccacccattactcccaccgacgctccctgggatagcagctgccctgattggcacacccccgcagtcatcaccactgaggcgtattcctgaagctgccagtgtgaattgttttatagaacactggtgttaaaattcaggtacctgagacaaaacaatattt

SEQ ID NO: 219384 - DNA, 258 bp, Homo sapiens
  chr19:32898490-32898748
  hypo
ggctcagggagggagaagatcagccggaactggaatgtcccaagatgttctggaagaaaagcagtggctcgtttgtgttgcttacctgtattcctgactcctggcagggcctgctgtagagcacatgcttcatgaataaatatgattgagttgaataaatatttgaattgtgttttgagtgtagctttgaaggccagcaacgatttagatggcaagatcgagggcaggctgggcacaatggctcattcatgtaatcct

SEQ ID NO: 219385 - DNA, 124 bp, Homo sapiens; identical to SEQ ID NO: 205346
  chr19:33166794-33166918
  hypo

SEQ ID NO: 219386 - DNA, 320 bp, Homo sapiens; identical to SEQ ID NO: 205347
  chr19:33167523-33167843
  hypo

SEQ ID NO: 219387 - DNA, 107 bp, Homo sapiens; identical to SEQ ID NO: 205348
  chr19:33167907-33168014
  hypo

SEQ ID NO: 219388 - DNA, 47 bp, Homo sapiens
  chr19:33415226-33415273
  hypo
atgagaaagtgtcttactagcgtcatcagtctgcagagcttcactgg

SEQ ID NO: 219389 - DNA, 383 bp, Homo sapiens; identical to SEQ ID NO: 205351
  chr19:33555692-33556075
  hypo

SEQ ID NO: 219390 - DNA, 94 bp, Homo sapiens
  chr19:33585139-33585233
  hypo
ctcgagtaaagagacggccacgccgacagaaacctggtgtgtatgttaattgattaactgttatcactgctgcagcgtactttttttttttttt

SEQ ID NO: 219391 - DNA, 119 bp, Homo sapiens
  chr19:33693687-33693806
  hypo
ccccccactgcaacccgcatcccaaccaaagatgggccggcctttctcggcctcctctcccgacagcggcctgcagtgggaagctggagcagcacacggagcggcgtggggtcatctac

SEQ ID NO: 219392 - DNA, 94 bp, Homo sapiens
  chr19:33698374-33698468
  hypo
ccctgggcccccactcgccagagccactgggggtctgcaggaaccccccgcccccctgctccccaatgctggaggccagcgatgatgaggccct

SEQ ID NO: 219393 - DNA, 383 bp, Homo sapiens
  chr19:33701377-33701760
  hypo
tgggcctgtggagtgcaggccgcctccagcgcagcagcagcaggcccaggatggtgacgccgtagcagaggtagttgatgaaggacacatagttgatgagcgtgtacgtgtcgcccacgagcatgatgacggctgtggccccgcactgggagaggacctggggctgacggctggcccctagcctgcctcctgacgcccctgcaggatgagccctggccccacccccaacccccaccctggaatggctcacccctgccattacccggaaggtcctgcattgccgggtagccctgcctccacgccctgcctggcccaggtcccccaacttacacagacgaggagggcggggatgggggtgcagtgtctgacgtggatcatggcca

SEQ ID NO: 219394 - DNA, 1320 bp, Homo sapiens; identical to SEQ ID NO: 205355
  chr19:33790839-33792159
  hypo

SEQ ID NO: 219395 - DNA, 1246 bp, Homo sapiens; identical to SEQ ID NO: 205356
  chr19:33792630-33793876
  hypo

SEQ ID NO: 219396 - DNA, 81 bp, Homo sapiens
  chr19:33882202-33882283
  hypo
ctgggtagcctcccacgtcgtgcacgtcaatgcccaggaagtggccaagcccgtgaggcataaacacggcccccaggtgag

SEQ ID NO: 219397 - DNA, 178 bp, Homo sapiens
  chr19:33926621-33926799
  hypo
gttagttctcaatcacgacaggactgggtgtcagaacctcccagggccatgggcagaggccgtgcagcccaacccacgctcccatggcgtccctggattggtcactgggatgctcaggtgagtctgaggccagggggtgccctccaggctctcagcaggtcctcggccttcccagggc

SEQ ID NO: 219398 - DNA, 183 bp, Homo sapiens
  chr19:33939089-33939272
  hypo
gattttctaaaaaccggcaccaaacctcacagcataatcactactgcctgcctgttctgggagccaaacctcaataactgctcctgcggggctgctcctcactagatgcgcccaggacttggagccacgccttctcacgggcagaaccagacaggacacagccacctccgaggtgggcgtctg

SEQ ID NO: 219399 - DNA, 70 bp, Homo sapiens; identical to SEQ ID NO: 205358
  chr19:34114303-34114373
  hypo

SEQ ID NO: 219400 - DNA, 288 bp, Homo sapiens
  chr19:34177591-34177879
  hypo
cctaggtcaaactggcttcccggtgtctgactcaggaggctgcaggaagcgcacccacaccgtggccagcttactcaggggctcgcgacagttgctttccagctggggccttgctggggaccatcgatggtatgtgtgcaggcactggccggcatgcacccgggcatgtatgcatatgtgtgttattgaacccgcgtctgcttaggtccgtgggtgcggtgcacatgtgaacaccgtccccatgaccgtgcaatagcagctgctcccgagagaccttgcaggttcttc

SEQ ID NO: 219401 - DNA, 360 bp, Homo sapiens; identical to SEQ ID NO: 205360
  chr19:34286932-34287292
  hypo

SEQ ID NO: 219402 - DNA, 495 bp, Homo sapiens
  chr19:34303773-34304268
  hypo
agtatgtgctttgccgggaggagcggcggccgcagcccacccccactgctgttcgaatcaagcaggaacccctggactaggccctgcttcagtgcccacctgggcccccccagggacctggaaacagtgctggggagttctgcctgtgtatacttggccgtgggcatgagaccgagggtgaggctggagggtccaaagctggcccagcgagcaccagggtcccaggtgtcatggcaacagaacgtgggatgctggaggcatgcctgcagaaggactgttgatgcgacccaaagatacagcggtgggatctctgctgccagctctcccagcccctcagcttcgcagcctggcgcagcatcctctgaggccccggggcctgttggggcggggttggaagagccgtctgcagctacttcagaggagctgtttatccctctccacgcggggcagactctggcgggtctcctagcgtccgagagatggcttattttctac

SEQ ID NO: 219403 - DNA, 88 bp, Homo sapiens
  chr19:34421531-34421619
  hypo
gatcctcccttctcagcctccggcctacagacacacgccaccacacccggataattttttaaaaaattttaagagacagggtctcgct

SEQ ID NO: 219404 - DNA, 89 bp, Homo sapiens
  chr19:34949546-34949635
  hypo
ttttgccatctggacgggaatttttaagtcattttttattggatatctggtaaacgagattttagattgtatggcgtataaaattacag

SEQ ID NO: 219405 - DNA, 93 bp, Homo sapiens
  chr19:34963041-34963134
  hypo
tgggattataggccctgagccgcgtgccctgtcctcaccctgctttgtagacacagttaacaatgtgttcccgatattttgtgtatgttcttt

SEQ ID NO: 219406 - DNA, 39 bp, Homo sapiens; identical to SEQ ID NO: 205365
  chr19:35168868-35168907
  hypo

SEQ ID NO: 219407 - DNA, 94 bp, Homo sapiens; identical to SEQ ID NO: 205366
  chr19:35168992-35169086
  hypo

SEQ ID NO: 219408 - DNA, 103 bp, Homo sapiens; identical to SEQ ID NO: 205367
  chr19:35169517-35169620
  hypo

SEQ ID NO: 219409 - DNA, 139 bp, Homo sapiens
  chr19:35497760-35497899
  hypo
ctgccttaggctggatgatgcggaaggagagcatttgagctgaaggggacagagctggtgatgccggggccatggaaggacattcaggcggagggactacaaatgtggaggccttggcgtgggaatgagattggagagc

SEQ ID NO: 219410 - DNA, 360 bp, Homo sapiens
  chr19:35551129-35551489
  hypo
ctcaagctccccaggatggggccatgtactttcagaccccctagggcagggccaagcctgggctctggggacctgggctccagtcccctgtcgccgccccctgctgacccttgtcccacagactgtggccgcaggaagctgcccgtggaccgcatcgtgggaggccgggacaccagcttgggccggtggccgtggcaagtcagccttcgctatgatggagcacacctctgtgggggatccctgctctccggggactgggtgctgacagccgcccactgcttcccggagtgagtgccccccaatggcgctgatgatggggaggcagaggagcggagagacagtggggaggagggcggattg

SEQ ID NO: 219411 - DNA, 81 bp, Homo sapiens
  chr19:35589857-35589938
  hypo
aactctgcgccctgcgctgcgcgttgcctgcccgcgtggcgagccagcctgggatgcagttacgtgctccttccctttcac

SEQ ID NO: 219412 - DNA, 32 bp, Homo sapiens
  chr19:35591100-35591132
  hypo
cgtgaagaacagcaacgccgggcgtgggagct

SEQ ID NO: 219413 - DNA, 422 bp, Homo sapiens
  chr19:35617132-35617554
  hypo
gtgctgaaaagccagccccccgcccccaggcccagcctcaccatggagtccccaatgtagcgtgtgaggcacaggaacacgtccccaccagcctggaagtggcgtgtggcatagacatcctcggcctcggggatgtctgtgcgtctctcgaagcggccaccggtccagtggaagagcacgggccgctgggaagccgaggccagcagcaggtggggccggccgtccagctccagggcctcagcgtccgtgtcccggtgccaggcgtgcaggctctggtgcgggtaaaagccgggcccgtcgcggcacagcagcgtggtgctgcccgccttggaggcatcggccaccacgaagcagggttgcccttccagccacaggagctcggcgtcattgggccgcagcagccgccgcggggccagggtctg

SEQ ID NO: 219414 - DNA, 220 bp, Homo sapiens; identical to SEQ ID NO: 205370
  chr19:35738765-35738985
  hypo

SEQ ID NO: 219415 - DNA, 184 bp, Homo sapiens
  chr19:35842417-35842601
  hypo
tgcacacaggagccgtgcaggccaggacggcggccccatggacctgcccccgcagctctccttcggcctctatgtggccgcctttgcgctgggcttcccgctcaacgtcctggccatccgaggcgcgacggcccacgcccggctccgtctcacccctagcctggtctacgccctgaacctgggc

SEQ ID NO: 219416 - DNA, 96 bp, Homo sapiens
  chr19:35983448-35983544
  hypo
tacgatttgacaggcgggtgaggggacccagtgccagttttggcctgggtgatctagagcatcggtcaatccaacgctgtcttctgttttgctcta

SEQ ID NO: 219417 - DNA, 185 bp, Homo sapiens
  chr19:36041161-36041346
  hypo
ggccctcaggcagccgtccagcctggactggagtcctaagaacagaaacaccctccagaagcggtcagctgtactccctgtcagagccccaccgccaccacaggtggcggctttcccgaggccagcccagaggactgcccaggcgctgctgctccaggaggtgcgaaccttgggaatgggggagg

SEQ ID NO: 219418 - DNA, 420 bp, Homo sapiens
  chr19:36042051-36042471
  hypo
gggacgtgatggaaatcaggatactgtgggtcaaagtaggtcagatgtcagcagcagcagggaggtgttctacacactgaacactggagtggcccgggcctctcagcaccacccctttagtgaaatgtggagggggccgtggggggagttattggccagttagaaaggtttttttggcatgtcaccatctggcactggcacccgctggcatttgccggctgttctaaaccacagtcaggatctgatgggagttgggaccaggggttggagggcaggaagagggccagccagggacacctgaagaagccttgctggaaggcagagagacggcgcgtcttgcggatgaggacatcggcgatctggcacacctcaatgctgatgaagaacacggtgtagcaggtgtactgctggtacaggcgc

SEQ ID NO: 219419 - DNA, 116 bp, Homo sapiens; identical to SEQ ID NO: 205371
  chr19:36123862-36123978
  hypo

SEQ ID NO: 219420 - DNA, 120 bp, Homo sapiens
  chr19:36167374-36167494
  hypo
agccaccacgctgggtcccctctctgattttctagtgctcccccaactctctctcaagtcagcaggatgcacccagggtctgtctgaaccagacctggcacctacaactttactcaggtt

SEQ ID NO: 219421 - DNA, 72 bp, Homo sapiens
  chr19:36222534-36222606
  hypo
gcagttccccatggcgtgcaaagcctgcagcagaggcagagaggagatggcaaggagcgagtggggagaggc

SEQ ID NO: 219422 - DNA, 46 bp, Homo sapiens; identical to SEQ ID NO: 205374
  chr19:36336769-36336815
  hypo

SEQ ID NO: 219423 - DNA, 79 bp, Homo sapiens
  chr19:36388611-36388690
  hypo
gaggcaggaaattttcggcagcagaagcagggcaagagtaggggctgtcagtgtaggcagcatgcgtgttggggtccca

SEQ ID NO: 219424 - DNA, 215 bp, Homo sapiens
  chr19:36435529-36435744
  hypo
tgtatgaggacagcgccacggggctcacggccacgcggcctgtgggctgcgcccgcttctccaccgaacctgcgctgcggccatgcggggcgccgcacgctcccttcctgggcggcacgatgatcatcgcgctgggcggcgtcatcgtagcctcggtactggtcttcatcttcgtgctgctaatgcgctacaaggtgcacggcggccagcccccc

SEQ ID NO: 219425 - DNA, 80 bp, Homo sapiens
  chr19:36632702-36632782
  hypo
gatcccttgaaggggcggggaccaatggctggggtaggatgttgggaagacgggcatttaggaagcgggccatggagtag

SEQ ID NO: 219426 - DNA, 246 bp, Homo sapiens
  chr19:36641157-36641403
  hypo
ccgtgccagacccaggtgccccagtgcctttgtctatattctgctcccagcctgccaggcccaggaggaaataaacatgccccagttgctgatctctatgggatctgcctcctgatctgacccgagagaggaggggtggctcgggctctgggtcctggggagcaggggaggtagtagattcgtccccagggctggatccgtggatttcctcgtctttttctcgtcggcattttttgtctcatcctg

SEQ ID NO: 219427 - DNA, 32 bp, Homo sapiens
  chr19:36870583-36870615
  hypo
ggctcagccgcggaggatttagaaagaagttt

SEQ ID NO: 219428 - DNA, 285 bp, Homo sapiens
  chr19:37159168-37159453
  hypo
ttgagaatggctgttctatatgcccgcgtggggctcatgcggcgagcgccgccactcccgcagtggcccctgtgggggtgatacgtgatgtggcttaaatgtgagaggccacctggacccgtgtgattgccacgtttgcaggagcgcagccacgtgcacagggatcttgtgacattctgtgtgaggctttttgcgctgggtccacccatgattagaggactagtgtgactgtggcggcccctgagaagggaagaagctggttgcgaccaggaaggtctgagatgg

SEQ ID NO: 219429 - DNA, 190 bp, Homo sapiens
  chr19:37504006-37504196
  hypo
cctcttgtccaagatcaagacgaccaccccacacttaagcacattttttaaaggggtcgcagcctgatgtttaggagccgggcccatgtagacctggctaatgcaccttactcgcctctcactgcctgtcacttcgtccacagcagcccccgctcactattttttaaaggggccactgacgggattacag

SEQ ID NO: 219430 - DNA, 284 bp, Homo sapiens
  chr19:37504226-37504510
  hypo
gcatgctcgtggcgtgtgcaggttctcacgtcttaatgatcccctccatcgtctggggaatgggtccctgaggcttgccgatcacaatcactccgtggcagtgcatccgtgtcaaagcttttgcctgacctctcaacgtggttgacatgattgtctctggatgcccggatttgaggaggtcaccgaccaggatgaaaaaacctcatgcagagtcacggagaagcagcgcgggatcccagcttcaggggacagatggaatctccggactcccatttggatctgat

SEQ ID NO: 219431 - DNA, 327 bp, Homo sapiens
  chr19:37505284-37505611
  hypo
ataaccagccccatgggacccgatttctgcccataccttccaatccggaatcggagcagaagagcagtcccgagtgcccacctcacggtctgaagcgcctcctcctccaccgggatccgaacacgaagtcggcttaaggaggccctgaggtcaggactcttagggtcctgcgctgcttgtcgcaagcagcctcctcccccaagccgccgccggtccatctctagcattttcctggggctgccgcctgacagccctgacattgcagcgcgcgcgagccgaccacgacaatgcgcatgcaccaaacgcgaggcaccagggcaagctctg

SEQ ID NO: 219432 - DNA, 43 bp, Homo sapiens
  chr19:37702591-37702634
  hypo
taataatagtcttggctggtcgtggtggttcatgcctgtaatc

SEQ ID NO: 219433 - DNA, 39 bp, Homo sapiens
  chr19:38287060-38287099
  hypo
ccacgctgctcctcccggattctgcctgtggtttcatca

SEQ ID NO: 219434 - DNA, 74 bp, Homo sapiens
  chr19:38309039-38309113
  hypo
agattttgtgctgtaactttcgtggctcacagtttccttctaattaggttagatgcaaaatgaaagtattataa

SEQ ID NO: 219435 - DNA, 114 bp, Homo sapiens
  chr19:38347218-38347332
  hypo
agtagttcttagtgctcccccgcagacacactgtttagggttttgttgtgtttttagtccactcactgccaaacacaacttttcaaaccgaccgcacactcccattgcctccct

SEQ ID NO: 219436 - DNA, 194 bp, Homo sapiens
  chr19:38446271-38446465
  hypo
tcttttctgtaccaggcttccgtcacttagcataatgtttctgcgcttcctccaggtgatagctcatatcagtcgttcatttgttcttattgctgaataatattctattgtatgggtaaaccacattttgtttattcgttaaccatgaatggataatttcattaccattattcgttaatggatacttggattgt

SEQ ID NO: 219437 - DNA, 155 bp, Homo sapiens
  chr19:38481217-38481372
  hypo
ttgctcagctagtcagcccacagcgagaaccccgccccagtctgggctaacgtgtcctctgctgccagcagcccagtagggttctttgctggagtctggtttttccttgacttgtagctggcaagtgcttacacgctctcagaggcccagcagac

SEQ ID NO: 219438 - DNA, 196 bp, Homo sapiens
  chr19:38500327-38500523
  hypo
acgtccacaggatgctaagccgcagacctgtgatttgattctggctctagctgaccaccaagatggcgctccctggcctcgttgccacactgcttccccatctgctttggggattttcccagtgaccaggaggacagggtctggttttctatgacggcgtgatatggatggttaatcatgtcgcaaagccctgctg

SEQ ID NO: 219439 - DNA, 431 bp, Homo sapiens
  chr19:38564442-38564873
  hypo
tgctcttagaaacctcgcacggagtcctaggagaggaccctgggccgaccaagcccacgtcctgtgcccactccaactgtgcttctgtggggggaaaggggaagcacttctgccaaagatacacaacagaactgtagtaagagcaggtggtattatacccattttacagattgaaactgagtcactatttccataacccgtccatgacacacgaggattgagcccaggaggcagtctggttcctgcctatgctgtgcttctctcatcacgggggttccccatcgggaaggtccaagtgcttttagggaggaggagctcggtagaagacagctggaaagagaccagtgtgcaccctctgagtcccagaggctgcgggtgccactcagcctctgaatgtcacaggaagactcgactgcagctgctaggagaag

SEQ ID NO: 219440 - DNA, 42 bp, Homo sapiens
  chr19:38572016-38572058
  hypo
cctggctcagctgtgcacagcgatggtggagaactggactcc

SEQ ID NO: 219441 - DNA, 142 bp, Homo sapiens
  chr19:38572720-38572862
  hypo
cgagatcaccctcagcgagtgtgacgcggaggacgcgggggagccgcggggggcccggcacacgggggcgctgcccctcttccgcgagtacgggagcacctcgtccatcgacgtgcagggcatgcccgagcagagcttcttc

SEQ ID NO: 219442 - DNA, 51 bp, Homo sapiens
  chr19:38625643-38625694
  hypo
tgtgatctctgctttgtagacgagaaaaccgaggcccagagtgaacaagtc

SEQ ID NO: 219443 - DNA, 180 bp, Homo sapiens
  chr19:38636781-38636961
  hypo
gcgtgagccaccacacccaacctgtcttttaattattgttatttcatgatgaatgttagataaaaagaatcagatgtacgtatgcttcagaggttgtctttttcactcagcagaatgtccttaaggttcatccacgttgtcgcgagtctctagttcactcattatgctgtttattccgtg

SEQ ID NO: 219444 - DNA, 92 bp, Homo sapiens
  chr19:38639131-38639223
  hypo
ggaatctgggcaagcaggaacggaggtgatggctgctggggtggcagccaacaaggctacatcatctgaccgtcattttgcccaggcatcct

SEQ ID NO: 219445 - DNA, 180 bp, Homo sapiens
  chr19:38679125-38679305
  hypo
aaatttagacaacagaggcaactcagagatgatgtccagtcctgtcagtcagaacctggaggatgttttcttcactgaggttttgaaagataaaacatgcacaaggtaaaaaataaaatactacaaaagggtttgcaatagaaagtaagcctctcggccaggcgcggtggcgcatgcctg

SEQ ID NO: 219446 - DNA, 31 bp, Homo sapiens
  chr19:38679545-38679576
  hypo
gcgagactccgtctcaaaaaaaaaaaaaaag

SEQ ID NO: 219447 - DNA, 48 bp, Homo sapiens
  chr19:38689956-38690004
  hypo
cccagatgccatcagcggttgtagtgttgtttgcggaagacagagctg

SEQ ID NO: 219448 - DNA, 91 bp, Homo sapiens
  chr19:38691720-38691811
  hypo
tgccctgcccctgatggtgccgccctcaacacacggcacacagggacgccttggtgtttttaacacctccgaggattccattgtctggctg

SEQ ID NO: 219449 - DNA, 401 bp, Homo sapiens; identical to SEQ ID NO: 205395
  chr19:38754871-38755272
  hypo

SEQ ID NO: 219450 - DNA, 184 bp, Homo sapiens; identical to SEQ ID NO: 205396
  chr19:38755344-38755528
  hypo

SEQ ID NO: 219451 - DNA, 341 bp, Homo sapiens
  chr19:38781916-38782257
  hypo
aaagcatctgagctgaccagcgagactgcagtggggcagacactattaaatttgctggcacagctctgagtaccccctcgcttccaccctgacttcatcccgcagtagctctcagccctcccagcccctgcagggccacgtctttctctattgccggtcagcgtgtgtgtgcacaaagcccctaaggtttcatgtgtacacaccggtgctaagtgttttttacacccttgtgcatctctcggcctggggctcctgtgcaggttgccctgagagttgggtttttagttcaaaaagaaggaacacagatgactactctgctggcgacacggccactctgctgg

SEQ ID NO: 219452 - DNA, 71 bp, Homo sapiens
  chr19:38828045-38828116
  hypo
gagagtggtgtgagcgacagcttctttgagcaagagcccgtggacacagtgagcagcttgtttcacatgct

SEQ ID NO: 219453 - DNA, 44 bp, Homo sapiens
  chr19:38828333-38828377
  hypo
cccacctctaacatttttatttatttatttattttatttttttg

SEQ ID NO: 219454 - DNA, 138 bp, Homo sapiens
  chr19:38851300-38851438
  hypo
ctatgcggggacatcggggcaccccaggagggctgaccccagctcacctggccctgccttccccctgcagctggtgtaccttatgaacaaccagaagggccagctggtcaagaggctcgtgcccgtggagcagcttct

SEQ ID NO: 219455 - DNA, 201 bp, Homo sapiens; identical to SEQ ID NO: 205397
  chr19:38852766-38852967
  hypo

SEQ ID NO: 219456 - DNA, 312 bp, Homo sapiens; identical to SEQ ID NO: 205398
  chr19:38853193-38853505
  hypo

SEQ ID NO: 219457 - DNA, 155 bp, Homo sapiens
  chr19:38873780-38873935
  hypo
acgattggtgagaaaagagagcataggacacgtgggcaagtgctggccccatagggtggggatggagcctttgtgatcactctactcgtctctaatccctcctttcctgcagcgagggtgggtcctgggccccaacaactactacagttttgcca

SEQ ID NO: 219458 - DNA, 82 bp, Homo sapiens; identical to SEQ ID NO: 205399
  chr19:38976232-38976314
  hypo

SEQ ID NO: 219459 - DNA, 58 bp, Homo sapiens; identical to SEQ ID NO: 205400
  chr19:38976790-38976848
  hypo

SEQ ID NO: 219460 - DNA, 59 bp, Homo sapiens
  chr19:38993225-38993284
  hypo
gtgcgccgctctttgcgggcacagaacaccgcgccatcatggtggactctatgctgcat

SEQ ID NO: 219461 - DNA, 122 bp, Homo sapiens
  chr19:39027005-39027127
  hypo
acgccctggttgctgttctcttattaatgtccctaatccgggttaatcgcgtctcctctttgccgtgttgtgacgtgtctaacctttctacccggatcctcgctcctgcctttctacctcta

SEQ ID NO: 219462 - DNA, 595 bp, Homo sapiens
  chr19:39051723-39052318
  hypo
accccactgacctccctgcccgcccccaggccatggacagccagaagcagttcagcggtccagaaatccagttcctgctttcgtgctccgaagcggatgagaacgaaatgatcaactgcgaagagttcgccaaccgcttccaggagccagcacgcgacatcggcttcaacgtggcggtgctgctgaccaacctgtcggagcatgtgccgcatgaccctcgcctgcacaacttcctggagctggccgagagcatccttgagtacttccgcccctacctgggccgcatcgagatcatgggcgcgtcacgccgcatcgagcgcatctacttcgagatctcagagaccaaccgcgcccagtgggagatgccccaggtcagggaacccgcgcgcgtgcaagctcgcctcctggggcttcgggcatgcgggtgctcacttcctgcaccctcagaccccacgggggctgtgcgtgcctcgcatatctgccctgctccggcaagcccacgcccacccttttgtacacatttcgtccagctgcgcccttgcacatccctggctcgcccctggccacttcttgcggacctggcccacacaaggat

SEQ ID NO: 219463 - DNA, 340 bp, Homo sapiens
  chr19:39087585-39087925
  hypo
ttcatggagctcttgatagaagcgcaaagggtgcaaggccttagccacccactcctcagagttcccagcaccctcccaagccccttacccggacaagcaggaatttgttcatgggctggtaccactgaagcaggacaacggacgtctccaatgcaccgcacaggaacgggcccccagagctcgcaccctccgctgtggcatgggcaaggatgagtcaagatcaatgccctctatcctcctcgccacccacactaccacccatcttctgggttctggacacattgccttaactctgtaaccttctcaggtggatgcagttcaagcccctcctctggcctgg

SEQ ID NO: 219464 - DNA, 103 bp, Homo sapiens
  chr19:39094630-39094733
  hypo
aaaaaaaaaaattagccaagcgctactagggagggtgaggtgcatggattgcttgagtctccgaggtcaaggctgcagtgagccatgatcgcgccactgcact

SEQ ID NO: 219465 - DNA, 79 bp, Homo sapiens
  chr19:39144877-39144956
  hypo
cctgacccagggaaggatcccgcctcctccagaaagtgaaatcgccgggtgtggtggctcacgcctgtaatcccagcac

SEQ ID NO: 219466 - DNA, 34 bp, Homo sapiens
  chr19:39159904-39159938
  hypo
cgtgagtcaccgcgcccagccaaaatccagcttt

SEQ ID NO: 219467 - DNA, 209 bp, Homo sapiens
  chr19:39211687-39211896
  hypo
gtggggcacttagacgtggagaggaccaccacctgtgcgggtgcagggtcagggtcctagaagaagctggctctgatgcttccccttccccaagcctgctgggacatgggctttgaccccgggtgcttctccggatcaaagccctccagaaacaggtgctacctttctaagccgtgctaccacggcccgatttgtatggtttcctacta

SEQ ID NO: 219468 - DNA, 153 bp, Homo sapiens
  chr19:39222121-39222274
  hypo
tcgatgtgtgggtactgttactccttaaatcctgtggggctttctccttgccagtgggcactggaggatatttctgtgcagcaaaaaatatagtcaatcccatatggagtcagtttccttacagtctacctcagaggcgatttctaaagctga

SEQ ID NO: 219469 - DNA, 32 bp, Homo sapiens
  chr19:39238369-39238401
  hypo
tttttgggacagtctcgcctcgtcacccaggc

SEQ ID NO: 219470 - DNA, 287 bp, Homo sapiens
  chr19:39277439-39277726
  hypo
tacatccagccacagtgaagcgatcactaaaaagttgagttcctgggaaacacggtacacagcatgaggcgtcagtaatgtgaggagtgtgttctttagaatggtcaataatgttagaatgatggagttcaccattcaagggaacattctcgggaactaactgagctgcgctggtggtgtgatcaccggacaccctgctgtcctctctgtccgtgcccatgacatgtccttggcacagacacccctgtggagcccagggcctggccgcttccttggctgagaagctg

SEQ ID NO: 219471 - DNA, 178 bp, Homo sapiens
  chr19:39279303-39279481
  hypo
ctgaggacttcccatgaacccggcacactccaggacccaggggtgcagcactgagccaaccaggccgccctccgaccctgtgaagtccccctgtctggcactatcgtcgttgttgtggctgctgttccactggagacttagaagcagggatttcagcgcagacatttccagtctaggc

SEQ ID NO: 219472 - DNA, 104 bp, Homo sapiens
  chr19:39289871-39289975
  hypo
tttccttgtggtaagctttgcggaaagattctttgtttatattggtgaaatgcacaaatctaaaatgtacagttggctgggcacagcgactcacgccggtaatc

SEQ ID NO: 219473 - DNA, 87 bp, Homo sapiens
  chr19:39305780-39305867
  hypo
tgccaggcagggcacgaacgccaccctcaaccccagggcaggcagggagaccaggaagccttgcaacccagagggaccccagcgact

SEQ ID NO: 219474 - DNA, 206 bp, Homo sapiens
  chr19:39306227-39306433
  hypo
gctggggcctgggacgcgagggctctcagagcttggagaaggtgacggttttcagttccttgttctcagtcgtggcctggaccgacttcacgaggtcttgggtctgcagcatgctcatgttccaggacgcctggtaccgagggtgttgagagagaacgaggagagagattagcaggggccaatcaggataaagcatgagagcaccc

SEQ ID NO: 219475 - DNA, 114 bp, Homo sapiens
  chr19:39306545-39306659
  hypo
ttgaccttggtgctctgcaccgccacggggctcttgctggaaatctcggccgccagcgctaaggcagcatccagcatgacctctttgtctgggaacacccggctgcagtgaaag

SEQ ID NO: 219476 - DNA, 36 bp, Homo sapiens
  chr19:39310980-39311016
  hypo
tgagccacggcgcccggcaatcccccttacttttaa

SEQ ID NO: 219477 - DNA, 600 bp, Homo sapiens
  chr19:39406294-39406894
  hypo
gggccgatgtactggagaggcacgtgggtaggggctgtgatccgatcagtgccgaggtaggactggagggcagggggcacgagcactgagccgtcctggggacagagcagacctcaggacactgcagatgccccagccctccccggcgctgagctgcctctctgggtgggcccctcagcccctcaccttctgctggttactctccaggagcgcgatgagaaggcgggggacagcacaggcggtggcgttcacctgtgagacagccatgctcggaactggcgcccaccccaagctgagcccggggaggagccaaggtgggtgggtctagggcggcagaggctgcgggcgagggcacgcgggcaggaggctgtgcgggcctcaccgtgtgggcaaactgcagctccccagcctcggtctggaacatgatgtggaggcggcggctctggaagtctgtgcagttggaagcactggtgacctggggtggaggagcggcaggctgagcggatcagggatggggggcaggcctgtcctcctgcccaccccgtccccagcggcacagggctcacctctccaaagcggcctcggcctggcatccaggcc

SEQ ID NO: 219478 - DNA, 585 bp, Homo sapiens; identical to SEQ ID NO: 205404
  chr19:39574108-39574693
  hypo

SEQ ID NO: 219479 - DNA, 90 bp, Homo sapiens
  chr19:39595965-39596055
  hypo
cctttcatcagaaacattctctactctttcttcatttttcatgaccttgacaattttgaaaagcacagcgagttgttttgtggaatttcc

SEQ ID NO: 219480 - DNA, 124 bp, Homo sapiens
  chr19:39597518-39597642
  hypo
gcaggtcatttctgcttccccgcgggtcctccacctgctctgggtctgatcagttctccccgccccagggctgtgaggagcggctgacgccctttgctgtcttcccgaggccctggagtgccgt

SEQ ID NO: 219481 - DNA, 44 bp, Homo sapiens
  chr19:39650967-39651011
  hypo
ttccagccactgctctagatgccggcaagaaccagacagacaga

SEQ ID NO: 219482 - DNA, 59 bp, Homo sapiens
  chr19:39653250-39653309
  hypo
cctttctgattgctgcgttattttctatgtcagcatttctcacccgacttagtagatgt

SEQ ID NO: 219483 - DNA, 197 bp, Homo sapiens
  chr19:39663617-39663814
  hypo
tttgagaacatgtcggtgacacgctccaactccctgcggagagacagcccgccgccgcccgcccgtgcccgccaggaaaatgggatgccagaggagccggccaccacggccagagggggcccagggaaggcaggcagccgaggccggttcgccggtcacagcgaggcgggtggcggcagtggtgacaggcgacgggc

SEQ ID NO: 219484 - DNA, 270 bp, Homo sapiens
  chr19:39664416-39664686
  hypo
ccccgctcaccacagcgggagccacagcgagtatcccatgagcagttccgggctgccctgcagctggtggtggacccaggcgacccccgctcctacctggacaacttcatcaagattggcgagggctccacgggcatcgtgtgcatcgccaccgtgcgcagctcgggcaagctggtggccgtcaagaagatggacctgcgcaagcagcagaggcgcgagctgctcttcaacgaggtgcgggcgctgctgccctgccgccctgctggtcct

SEQ ID NO: 219485 - DNA, 85 bp, Homo sapiens
  chr19:39670670-39670755
  hypo
ccaggagtgagcctccgtccccaaagccagccaggcgtcatcagcaccagagacctcagcctggtcctctcgggaagtgagtggc

SEQ ID NO: 219486 - DNA, 196 bp, Homo sapiens
  chr19:39671859-39672055
  hypo
aggcgtgagccaccgtgcccagcccgctcactgcagtttgaaggcatggctttgggtggcgtggggtgaaagctgcccgaggccccgttcctccccacgtggctgcctcctgccagagccagtcaggaaaacagaccccaactagagttgtttcaaatggcagggatttggtaccggtggttggatcatgacaaag

SEQ ID NO: 219487 - DNA, 429 bp, Homo sapiens
  chr19:39672463-39672892
  hypo
ggcacagggatggattcgtccgcctgggggctggaggtgtgtttacagagccccaaaataaacaatgcaaccaggtcagaccagcggttctcacagtgtggttcccagaccagcagcatcactgggagcttactggacacgcaaataaatccctgtgtgccaccccagctgcatcagatgctggtggggcccagtgatctgtatttaacacaccctccgggggatgccggtgcccactcacgtttgagaacccctgcgatccacgactgccctcccgtgtaaaaggcccacctctgtgggactccaagtcatcagcaccctagggtccttccgtctttttccttcctcctgggacacctgcctctcccatgtcgtattagagaattccttatgctcccaagtgggcacggggagaggaaggcactcctc

SEQ ID NO: 219488 - DNA, 40 bp, Homo sapiens
  chr19:39934201-39934241
  hypo
tgttgtttttttttttgagacggagtcttgctcttttgtc

SEQ ID NO: 219489 - DNA, 53 bp, Homo sapiens
  chr19:39964614-39964667
  hypo
atatgagtatgctttcgatgatgagcccaccccgtccccgcaggcctatgggg

SEQ ID NO: 219490 - DNA, 165 bp, Homo sapiens
  chr19:40015704-40015869
  hypo
ccaaaaaaactttgtgcacgcaggcccagatagctttcccagctaggaatactctgcgtatcaccacaaatccatgtgccagaaaactgatgtgtcctgcctccacagggagaggacgtggaaactgtgcactgggaccatcccagacctcgccatgtgtgtgtt

SEQ ID NO: 219491 - DNA, 120 bp, Homo sapiens
  chr19:40019820-40019940
  hypo
gagtgagccacacccggccccatgactcaaagtctagaaaccgcaaaagaaataaactgaatatacacagctacattaaaaatttttttctctttttttttttttgagacggagtctggc

SEQ ID NO: 219492 - DNA, 420 bp, Homo sapiens
  chr19:40020180-40020600
  hypo
caggagtgagccaccacgcccacccaacatttttctgcatggcaaaaggatcacagcagtctgaactgctgtgaactatattccatgtcatcacaaagggctaacttctttagtgactgacacataacttacaagccaataaaaaataagaatatggacagatagttcgctgagaaatgaaaacaaatggctcttaagcatttgaaaacatgcgtcctcactcgtaattagagaaattcaaattaaaaccatagtgagaaaccatcttttactgtcagatgcttccaaagctgtcagattagccaggccgtggcgagaggcacaactatccctggctgaatggaaggtaaactggttgagccccaaggacagcactctggtgacacattaaaaataccaaggtggggccgggtgcggtgg

SEQ ID NO: 219493 - DNA, 175 bp, Homo sapiens
  chr19:40316373-40316548
  hypo
ctctggggtacaccacggaggcccaggtgaggccccagagtggcagggtcatcaggaggcgggaggggtggacgacctccagtcatccgagtccggagggctgaggcagccgggtgctggggggcaggcgctgggtgaggtggggagcagtcagcagggccgcccaccaggctca

SEQ ID NO: 219494 - DNA, 76 bp, Homo sapiens
  chr19:40322485-40322561
  hypo
catggcccggtgggacggccatggtgggctcagagggccgcaggggagcgaggcctggagcgggagcccggccggg

SEQ ID NO: 219495 - DNA, 212 bp, Homo sapiens
  chr19:40362759-40362971
  hypo
ctgcctgacaggccgccgtgtaggctgccaggctgcggcacaggaaggctttgtcacccttttgcgcgcacaggtcgtatacgcattggcggaagtactcagagggactcagcaccgcctggcaggtcgcgaaggggccctgggggttccggagctgcccgcaggcctcgttgctctcatagggtgcagtctcctctgccaagcacactggg

SEQ ID NO: 219496 - DNA, 65 bp, Homo sapiens
  chr19:40441597-40441662
  hypo
cctctggtgtgggcgcaggccaggctgcaggtgggcactgggactgaggcggtgtgtgaagaagg

SEQ ID NO: 219497 - DNA, 120 bp, Homo sapiens
  chr19:40474758-40474878
  hypo
gtccaccgctgctgtctgctgccatggcagctgtggcagacctgccgctgacttccacccctccggatccgggtgtccactgcacttctgatccagcgaggcggcacccattgccgctcc

SEQ ID NO: 219498 - DNA, 77 bp, Homo sapiens
  chr19:40660698-40660775
  hypo
cctcctgtcttaaaatatcacgtagaccaggcgcggtcccagcactttgggaggctaaggtgggcagatcacaaggt

SEQ ID NO: 219499 - DNA, 175 bp, Homo sapiens
  chr19:40711781-40711956
  hypo
aagcccctccccccagccaccgcctctccttcccaggagcttcggagccgtgaggaggagctgctgcgggcggcacaggagcagcgcttccaggaggagcagctgcggcggcgggagcaggagctggcagaacgtgagatggacatcgtggaacgggagctgcacctgctcatgt

SEQ ID NO: 219500 - DNA, 334 bp, Homo sapiens
  chr19:40741640-40741974
  hypo
tccctaagtgccactgtggacgttttcaggggctgtgtggggacgacacactgcgaccctacaagcgagcacccttgtggacgctgccccctccaggccgcagggacagtggcagcagctggcgctgggctgggtggggccgacgccagccctcacctctgcttggggtccttcttaagcagcccagcaagcagggacttggcctcggggctgagcgtgcgcgggaagcggatctcttccatgaggatgagctcgaagaggcgctcgtggtcctggttgtagaagggcaggcggccgcacatcatctcgtacatgaccacacccagcccccacc

SEQ ID NO: 219501 - DNA, 207 bp, Homo sapiens
  chr19:40744255-40744462
  hypo
tggaggcaaaaagaagcacacgtcatgaccaagtaacaataggccatgggcaagcccagatcagacagatgagcaaaccacgcatcccaaagcaggtgtgccaaccactgcacagagaaggcgcgaggcaaggagtgggtgacaaaagtgaggcgactctgtaaggggaagctgagcggctgcgggaattcacttcgagaggacacg

SEQ ID NO: 219502 - DNA, 161 bp, Homo sapiens
  chr19:40745940-40746101
  hypo
gggcaactcacagtgaggaacgggtgcctggtgttctggaggacccggctctcggtgactgtgtgagcgacttcatcctgcagacagactgcgggtgaggggctggtgggcaacaccacacctgcccactccgccccgacgaaggggagcaaggccttgtg

SEQ ID NO: 219503 - DNA, 318 bp, Homo sapiens
  chr19:40753397-40753715
  hypo
gtccctgagcctcagtgaagcgctgaaagctacacgagactcaggagggtaaagcagggaccctctctagggaaggctcatgggacacccagccagggagcccacgggaaaagcaaaggaagaactctcctcgtaagccatgatctgcacccgcttttcagagaggggcccccacccctgccactcaacagcagtcccaagaacaccttccacttgcagaggctggtaccactgtgcgttatggtggaggactcctgtcgccctcccagcaaccctgtgtagtaggtactgccattcacttcatgctaaaatgacaag

SEQ ID NO: 219504 - DNA, 169 bp, Homo sapiens
  chr19:40828672-40828841
  hypo
tacctggtcctaggccggcagtgctagggacacagtgatgaccaagacagcctcagcgctgcccgcatggggctcacagtccagtggggaagacaggcttggcatcagaaatgacacaaataattctgcaagaatgacagtaacgcattctagacggagaaggacagct

SEQ ID NO: 219505 - DNA, 308 bp, Homo sapiens
  chr19:40829211-40829519
  hypo
ctctacagccatccttggaggtgggtctatacagatgaggaggctgaagtacaaaggacttaagtgacatggccaaagccacgcagtcaggcccctgtgggcttcagggtgtactctgagctacacaccaggcctggggcctgtgggactgcgggccgcggcaggaagtacaggctgcatcatgggcacagtgaagagcctctgcagggcttccagtgaggggacgggccctgtcctgtgggccgcacacactgctgctgtggggataggggctggggtccatggtaactgtgcgagaccattcagga

SEQ ID NO: 219506 - DNA, 44 bp, Homo sapiens
  chr19:40829749-40829793
  hypo
gacagatgggaaagccgccagtgcaaagccaggaactgaggctg

SEQ ID NO: 219507 - DNA, 109 bp, Homo sapiens
  chr19:40873917-40874026
  hypo
aggtgtttgcaagcagctgtcgtcacgtggctctctggactgggggcgtttgtcacggtcatctgtaggcctctgaatgtcagggtgcgggtttggttacaagggatta

SEQ ID NO: 219508 - DNA, 51 bp, Homo sapiens
  chr19:40900951-40901002
  hypo
tgaccagctccacctcggggatcttaagctgcacagcggtggactcagcct

SEQ ID NO: 219509 - DNA, 113 bp, Homo sapiens
  chr19:40928722-40928835
  hypo
aaccattccagcacgagggctcagcgccctggccccggcggtcgctccagtgcctgtgtgcccaccagcacatccatgaggtagtccaattcggcctcgtccagctccggagc

SEQ ID NO: 219510 - DNA, 150 bp, Homo sapiens; identical to SEQ ID NO: 205417
  chr19:40939939-40940089
  hypo

SEQ ID NO: 219511 - DNA, 145 bp, Homo sapiens
  chr19:40952329-40952474
  hypo
gagtgcagtggcgcaccttggctcactgcagcctcagcctccctcctgaagcactagtgtaactctgtccccgggttacagccgtatgcttctttctgatgcctcccctccacccctcaccaactgtccacgcaggctcccaggc

SEQ ID NO: 219512 - DNA, 85 bp, Homo sapiens; identical to SEQ ID NO: 205419
  chr19:41025294-41025379
  hypo

SEQ ID NO: 219513 - DNA, 378 bp, Homo sapiens; identical to SEQ ID NO: 205429
  chr19:41190157-41190535
  hypo

SEQ ID NO: 219514 - DNA, 230 bp, Homo sapiens
  chr19:41292578-41292808
  hypo
tcctggagaccagcgctctcacaggcgagaacgtggaggaggcgttcctcaagtgtgcccgcactatcctcaacaagattgactcaggtgaggccccgaccggcccgagtgggagcgaagggcaggcccgggggtctccaggcaaccaatgctgacctctccccttccccacaggcgagctagacccggagaggatgggctctggcattcagtacggggatgcgtccctc

SEQ ID NO: 219515 - DNA, 41 bp, Homo sapiens
  chr19:41616326-41616367
  hypo
tacaggcgtgagccaccatgcccagccgtagattttcattt

SEQ ID NO: 219516 - DNA, 98 bp, Homo sapiens
  chr19:41665355-41665453
  hypo
agagttaaggctttactgcacgtggccctacttctgccaatgaacttggagcttacgtagcatcttttttttttttctttttgagatggagtttcgct

SEQ ID NO: 219517 - DNA, 342 bp, Homo sapiens
  chr19:41675691-41676033
  hypo
gaaaatttttcaataaaaataaacttaaagaataccagcgcttccgccacggctgccattggagagcagcagccatggctctgcgcgaccctgtggccgtgggccccaaggtgaccaaggacgtgagcaagcccaggcacagctgccgccccggacgtctgaccaaacacaccaggtttgtgcgggacatgatccgggaggtgtgtagcttcgtctcgtacaagcggctcgccatggagttgctgaaggtccccaaggacaaacggtccctcaagttcatcaagaaaaggatggggacgcacatccgcaccaagaggaagcggaaggagctgagcaaggtgc

SEQ ID NO: 219518 - DNA, 199 bp, Homo sapiens; identical to SEQ ID NO: 205437
  chr19:41859852-41860051
  hypo

SEQ ID NO: 219519 - DNA, 241 bp, Homo sapiens
  chr19:42398490-42398731
  hypo
cttagcctggtcttcctccccgccctctcacaggtgatggggaaccggcggtcggacgagcctgccaagaccaagaaggggctgagcagcatcctggatgccgcccgctggaaccggggagagccccagggtaaggcggctctggcctctgccctcccctgtcttccccagctgctcccactcactgtctcattctctctcgtttcagttccagattttcgacacctcaaagcagaggttg

SEQ ID NO: 219520 - DNA, 308 bp, Homo sapiens
  chr19:42400292-42400600
  hypo
gtcttaacatctgtccgtcccgtgctgaagtacagagcagccatgtggtgtctgccaggcactgggtagctttagcccccgcaattccaggcccccagagtgtgggtctcgtggccgcagaggccttccagccagccctgctccctccaccccacaggtgctgacgcccccctggagctgggggactcatccccgcagggcccaatgagcctggagtccttggcgcccccagagagtaccgacgagggggccgaaaccgagaggtgcccaggctggggtgcaggggcgggaggtgtggcttactgggc

SEQ ID NO: 219521 - DNA, 172 bp, Homo sapiens
  chr19:42408960-42409132
  hypo
agcagacagtgagtggtgagttgagccatgggagccctgagagcgccaccactgtgggtgacttctccagcttgtgcttagggaggggcaggcactggggggacctgggctctgagccccatctccccctctccctgcagatcacaaagccttctacgtcctttttacctgg

SEQ ID NO: 219522 - DNA, 108 bp, Homo sapiens
  chr19:42460853-42460961
  hypo
aacagctttattttcaaaggcgggatccctccccgggcttgtgatgggacggcgctgtgggcccgagcagcagagccgtgcaggacaggcatgggcaggggtggggca

SEQ ID NO: 219523 - DNA, 285 bp, Homo sapiens
  chr19:42461113-42461398
  hypo
acactcctgcacctggctcccaccatccaccccagctgctcagaccctgtactcacccagcacccagaagacggccgagcccgcaccagccagccagaagaaggggaaggagatgcctccagccagagcatactgatgcgctgggctcacctctcggcctgggggcagatggcattggggtgctgttccgactctccatgccctctcccagagtaacccctgctgccccccaacaatccgtacaagctccaggttctcgggatcgaatccaaactcctcatgcca

SEQ ID NO: 219524 - DNA, 130 bp, Homo sapiens
  chr19:42722466-42722596
  hypo
cctccttccaagcggcaacagaaccctccattccgactgtgtacatctcgatggcgtccatcacgacccccatcacagtcagatgtctccacccagagccaaaacggcccctccgtaaccccttccaatc

SEQ ID NO: 219525 - DNA, 159 bp, Homo sapiens
  chr19:42722739-42722898
  hypo
tgactcaaggtcaggacctgcatgtacttgagacaagtcccctccctggacctcttcccacccccgcaattaactcctcttgggagtcgggagatctgggtcctgcctagcactggcccagtactggctctgcctgagctgtagcagtgaattcaaaag

SEQ ID NO: 219526 - DNA, 31 bp, Homo sapiens
  chr19:42723738-42723769
  hypo
gtgagactccgtctcaaacaaacaaacaaac

SEQ ID NO: 219527 - DNA, 375 bp, Homo sapiens
  chr19:42791226-42791601
  hypo
ggccccctggagccacatgccctgagagcccaggacccggacccccacaccctttgggggtggtggaatctggtaagggtccgcctcccaccacggaggaggaggcctccggccccccaggagagccccggctggacagtgagacagagagtgaccatgatgatgcgtgagttccctgaggcctgggacttgggggtgggatggccagagacatggccctcactgtccctgctgccccgccgcagcttcctctccatcatgtctcctgagatccagttgcctctaccgcccggaaaacgtcggacccagtccctcagtgccctacccaaggaacgggactcatcttctgagaaggatggacgcagccccaacaag

SEQ ID NO: 219528 - DNA, 236 bp, Homo sapiens
  chr19:42873732-42873968
  hypo
catgtgtggagcccgaccactgccgctgccactttggctttgtgggccgcaactgctccacggaatgccgctgcaaccgccacagtgaatgcgctggtgttggggcgcgtgaccactgcttgctctgccgcaaccacaccaaggtgggccgcccggagcctcagacccccgaccctgggacccaggccctcacttgccttcatcccacgctcaggcggctcgcatctcatcctgag

SEQ ID NO: 219529 - DNA, 53 bp, Homo sapiens
  chr19:42906814-42906867
  hypo
acatgaaggggttcttgactatgggtgaggagtagaggggcatctgtgtggca

SEQ ID NO: 219530 - DNA, 178 bp, Homo sapiens
  chr19:42906913-42907091
  hypo
ggacgcccaggcctctgtccatggggctcagctcatttttggcctcagcctcttcccctgcatcctcaggtggtaataagaagttgacatcggagggtgtggaggggctaagtgtctcagctgacagcgacatctcgggggtgtccgacgacgtctcggagtttcccctcaggctcaa

SEQ ID NO: 219531 - DNA, 127 bp, Homo sapiens
  chr19:44005794-44005921
  hypo
gacaaccccggggcgcaggtggctaggagcacaccaacatccatggaccaggaaggacactgctgatgaagacccggtgagccaaacagacctgttcccgctgctggcggccgcgctgctccgaggc

SEQ ID NO: 219532 - DNA, 329 bp, Homo sapiens; identical to SEQ ID NO: 205453
  chr19:44144079-44144408
  hypo

SEQ ID NO: 219533 - DNA, 350 bp, Homo sapiens
  chr19:44222771-44223121
  hypo
aggaaaggctggaggccctgcgcacagcctttgagtcgggtgacctcccccaggccgcctctcacctccaggagctgctggcctccacggaaagcatccgcctggaggtgggcgtcacgggcgagtcgggcgcgggcaagtcctccctcatcaatgccctgcgtggcctggaggccgaggaccctggcgcggctctcacgggcgtcatggagaccacgatgcaaccgtcgccctatccacacccacagttccctgacgtgaccctctgggacctgccaggagccggctctccaggctgcccggctgacaagtacctaaagcaggtagacttcagccgctatgacttcttc

SEQ ID NO: 219534 - DNA, 344 bp, Homo sapiens
  chr19:44223175-44223519
  hypo
atcctgtgccagggcaagaagttctactttgtgcgcaccaaggtggacgaggacctggcggccacgcgcacccagcggccgtcgggcttcagagaggccgctgtcctgcaggagatccgagaccactgtgccgagcggctgcgggaggccggcgtggctgaccctcgcatcttcctggtgtccaacctctcgccggcccgctacgactttcccacgctggtgtccacctgggagcacgacctgccctcccaccggcgccacgctggcctgctgtcgctccccgacatctcgctggaggccttgcagaagaagaaggccatgcttcaagagcaagtcctcaagac

SEQ ID NO: 219535 - DNA, 44 bp, Homo sapiens
  chr19:44564104-44564148
  hypo
cctttgtcagttaccgcggtgatctgaaccgcaaattaccaaca

SEQ ID NO: 219536 - DNA, 37 bp, Homo sapiens
  chr19:44575624-44575661
  hypo
tgttgagccgcttttcgtgttttttttttttttctct

SEQ ID NO: 219537 - DNA, 56 bp, Homo sapiens
  chr19:44578499-44578555
  hypo
gcatcctctgcctcccggtctcaaaaaaaaaaaatatttaacgttttattttcata

SEQ ID NO: 219538 - DNA, 31 bp, Homo sapiens
  chr19:44988475-44988506
  hypo
tggcagccaccgcgcccggcctatttcctca

SEQ ID NO: 219539 - DNA, 758 bp, Homo sapiens; identical to SEQ ID NO: 205466
  chr19:45004163-45004921
  hypo

SEQ ID NO: 219540 - DNA, 93 bp, Homo sapiens
  chr19:45108543-45108636
  hypo
gcaagactctgtctcaaaaaatgtatatattttagagggttttcatcgacacgcttgttcccagggcccctagcgtgtcgcacacttgttccc

SEQ ID NO: 219541 - DNA, 150 bp, Homo sapiens
  chr19:45149597-45149747
  hypo
agagtaataatgcagcgtttcatggatttgaagacccaagatttctccccgttttctacattggggttattctaacccctaatggcaagttgtgctataaatgacaacagtcatggtatgtgaaacctacgacactggtgcgatgaaaaa

SEQ ID NO: 219542 - DNA, 41 bp, Homo sapiens
  chr19:45150351-45150392
  hypo
ccccctccccccacaccccacggtccaccggggatccaggg

SEQ ID NO: 219543 - DNA, 432 bp, Homo sapiens
  chr19:45150422-45150854
  hypo
ggctcctggagcccctccctatctagtccaagaacgccccgggtctgacaccttctcttcggttctccgcaggggacgtcgtcgtgcaggcgcccacccaggtgcccggcttcttgggcgactccgtgacgctgccctgctacctacaggtgcccaacatggaggtgacgcatgtgtcacagctgacttgggcgcggcatggtgaatctggcagcatggccgtcttccaccaaacgcagggccccagctattcggagtccaaacggctggaattcgtggcagccagactgggcgcggagctgcggaatgcctcgctgaggatgttcgggttgcgcgtagaggatgaaggcaactacacctgcctgttcgtcacgttcccgcagggcagcaggagcgtggatatctggctccgagtgcttggtgagcaggggg

SEQ ID NO: 219544 - DNA, 206 bp, Homo sapiens
  chr19:45164648-45164854
  hypo
gtcttcagatgcccacggcccggcctcaggagcctgggtcttttctcctggtgcctcgagcagcatttcccaacccttcctgctgggcggaatcccctgtagagtttgctaagacgcagccccagacagtctggtctgtgatggggccagggaatctgcattttaatatccgctctctcccccctgccccacgccccttcaattcc

SEQ ID NO: 219545 - DNA, 147 bp, Homo sapiens
  chr19:45186851-45186998
  hypo
tgggggctgtggggccgatgaggtggactcagccaaagactcagcagcacatggggcaggtgtcctggcagggggacaggagactgtaacaggcccaggtccttgtgcagcccgtgaatgcacgcccgccttcggtctgttccttca

SEQ ID NO: 219546 - DNA, 135 bp, Homo sapiens; identical to SEQ ID NO: 205470
  chr19:45207399-45207534
  hypo

SEQ ID NO: 219547 - DNA, 122 bp, Homo sapiens
  chr19:45211220-45211342
  hypo
ggacctgctggtctacgcctggtaccgcgggcctgcctccgagcccaaccggctgctcagccagctgccgtcaggaacctggattgcaggccccgcgcacacaggccgggaggtgggcttcc

SEQ ID NO: 219548 - DNA, 198 bp, Homo sapiens; identical to SEQ ID NO: 205472
  chr19:45312126-45312324
  hypo

SEQ ID NO: 219549 - DNA, 377 bp, Homo sapiens
  chr19:45314500-45314877
  hypo
cttgtctgtacccccgctggtggaggtgatgcgaggaaagtctgtcattctggactgcacccctacgggaacccacgaccattatatgctggaatggttccttgtgagtgcttggggctggggggcctggagtcagggcacagcagggcagcaaaggttcattctctcatcagtgcctaaggcctgtagagatccaccaagccacactccttgttacagatggggtcactgagtcccactgaggggaagggatctgcaaggtgccccgtgtctaggcacagccaagtctagaatgacattgacctgctctggactgcgggctcttgagagagagaacagagacagacatcaagaaagcagaagccaggcacggtggc

SEQ ID NO: 219550 - DNA, 321 bp, Homo sapiens
  chr19:45315415-45315736
  hypo
acagaccgaccgctcgggagctcgcccccgcctagcctcggctgagatgcagggctctgagctccaggtcacaatgcacgacacccggggccgcagtcccccataccagctggactcccaggggcgcctggtgctggctgaggcccaggtgggcgacgagcgagactacgtgtgcgtggtgagggcaggggcggcaggcactgctgaggccactgcgcggctcaacgtgtttggtaagtgtcctcgggcatcccccgaagggaggcaggcagggaggggcgcagggcaggggctcctgacgtgaacgtctttttcacagca

SEQ ID NO: 219551 - DNA, 214 bp, Homo sapiens; identical to SEQ ID NO: 205473
  chr19:45348060-45348274
  hypo

SEQ ID NO: 219552 - DNA, 987 bp, Homo sapiens; identical to SEQ ID NO: 205474
  chr19:45349505-45350492
  hypo

SEQ ID NO: 219553 - DNA, 267 bp, Homo sapiens
  chr19:45368681-45368948
  hypo
tgtggccgccttccaccctaagatgggtcccagcttccccagcccgaagcctggcagcgagcggctgtccttcgtctctgccaagcagagcactgggcaagacacagaggcagagctccaggacgccacgctggccctccacgggctcacggtggaggacgagggcaactacacttgcgagtttgccaccttccccaaggggtccgtccgagggatgacctggctcagagtcataggtgagcagggtaagggcgggaggcaaggagg

SEQ ID NO: 219554 - DNA, 212 bp, Homo sapiens
  chr19:45377062-45377274
  hypo
tacctcctgccaacccgccccgtttctttagcattcctgtctatctgctaacttgtccacccgctctgggattctcctccttgctgatccagtccccccatttcccccagaccctcctgaagtgtccatctccggctatgatgacaactggtacctcggccgtactgatgccaccctgagctgtgacgtccgcagcaacccagagcccacgg

SEQ ID NO: 219555 - DNA, 72 bp, Homo sapiens
  chr19:45390079-45390151
  hypo
ttgagcctaggagctcgagaccagcgtgggcaacatgggctacccagcaacattttgcgtctacaaaaatac

SEQ ID NO: 219556 - DNA, 327 bp, Homo sapiens
  chr19:45465023-45465350
  hypo
acagaggtgctctgcgagtgttttcctcctaaaagaagaggaccgcaccttcccaggtgttttcactgattcattctccagttattgataagcacccactctttgcccagcctgtgcctggccttcatgcatgatggtgtctaagacagcccccgtgtccattctccctccttaccctggcctctgtcccccacaggtgaccagcaatggcagcatcgggagggacccgccagcggagacccagcctcagaacccaccggcccagccggcacccaatgcctggcaggtcatcaaaggtgtgctgtttaggtgagcagacgggacttg

SEQ ID NO: 219557 - DNA, 101 bp, Homo sapiens
  chr19:45546675-45546776
  hypo
aaaaaaaaaaaaaaaaattttttccattcatacgtatatgcacatacccagctctgtgagactggggactaattatatttgggtcacgtttgtaccctagg

SEQ ID NO: 219558 - DNA, 212 bp, Homo sapiens
  chr19:45567707-45567919
  hypo
gttccggccgccacgcccgctcccggtcccgctcctggtcccgctcccgctcccgctcccggcgctattcccggtcccgtagccgtggccggcggcactcaggtgggggctcccgagacggacaccggtactcccgctcgcccgcccggcgtggtggttacgggccccggcgcagaagcaggtgtgtgtggctgggcgtggaggtgggaggg

SEQ ID NO: 219559 - DNA, 39 bp, Homo sapiens
  chr19:45569129-45569168
  hypo
gtgctggctaagtgccgttaatatcgtcagcatcattac

SEQ ID NO: 219560 - DNA, 73 bp, Homo sapiens
  chr19:45574700-45574773
  hypo
ggggaagcctcctgccccacctcatgcaccccaagaaagccagagtccagacgggtgtaaataaaagggaaaa

SEQ ID NO: 219561 - DNA, 47 bp, Homo sapiens
  chr19:45574888-45574935
  hypo
ctgccgcaggtgtttgtccagggtggctcgcaggccgaagggcacat

SEQ ID NO: 219562 - DNA, 472 bp, Homo sapiens
  chr19:45575156-45575628
  hypo
gacttgggcatctttttgggtgatgccttctggctgtttgcagggtcagttctttgttccgtggtgatggctccccaagtgtctccaccagggccggcttgagccccactgccaggagccccgggttcctggacacctgctgtggcggcggctccagccccctcaccaccgctgcatggaagggtgctggtgggggcagcagcatggacagccggctccggaggggctgcagaggcctgctcctggctggtgtcggccatgagggggctctggggcggcacctgccggtgggtcttcttgtggcggttgagcttgctgctctgggcgcaggcgtagggacactggtcgcaagcatagggccgctcgcctgtgtgtgagcgcatgtgcactttgaggttgctgaaggagctgagggtcttcttgcacacaggacaggtggggctccgccgggtgaggccgctgccacttgcac

SEQ ID NO: 219563 - DNA, 41 bp, Homo sapiens
  chr19:45603142-45603183
  hypo
ttagcacccattctgactcccggaagagcacgcgaagctgg

SEQ ID NO: 219564 - DNA, 220 bp, Homo sapiens
  chr19:45603213-45603433
  hypo
agtgcgtcagcgggagtgcgtgtgcacttgtttctgggagcgagtactggggctctgcgaaccttcacaggcatccgactccaagaggattaagaaccgtggggccaaatgccctgtgttggacggactgcagctggagcagtcactgagcacggaggccagaaacctgtttttacaaaagctccccaggtggttctgacaacctcgcttggctgtctgt

SEQ ID NO: 219565 - DNA, 147 bp, Homo sapiens
  chr19:45603730-45603877
  hypo
ccaggaggtaggtgccgtttgccccaatttgtagatgaggaaatggagcccatagaggtaaagtaattttcctgaggtcacacagtgggtaagtggtggagctgggattcaaatccaggcagccagcctggcgccgaagcctgcgca

SEQ ID NO: 219566 - DNA, 348 bp, Homo sapiens
  chr19:45603910-45604258
  hypo
acgcattcggtgcaacgtgccatacggtctcttcatctataacccagaatcgtttataaaatagaggcaacagtgctggctttgcggtgttgtggcagggaggagaaacagaaacaggtggggtaagggcccagccttggtgggcacgcaggagggggtcactgtggttcgtggacagcttgagtccctggagatttgtgctgctcctctgtcctcagcattgcctgctgttctgacccttggcctctgggacgtgttcttcctgtgctactcagtgtctggtatgtgataggcgctcaatatattcttgctgcgtgagtgacttggtgaccccgtaaccagtcatgc

SEQ ID NO: 219567 - DNA, 136 bp, Homo sapiens
  chr19:45678712-45678848
  hypo
ttattgagtatgatgaagcctaccaagaaaaaagtgcgagagggagaccaggagaatgtataaaggagatccaaatttgactgggggctcagggaaggcatccctgaggaagggattgttacgctaagatctgaag

SEQ ID NO: 219568 - DNA, 47 bp, Homo sapiens
  chr19:45810267-45810314
  hypo
agccgcatgtagtgagtgcctactgtgtaacaggttacctgcacaca

SEQ ID NO: 219569 - DNA, 86 bp, Homo sapiens
  chr19:45866860-45866946
  hypo
agacaaggtcccacgtgcctcgcccagctcactcactcctgatgctgcagtggtgacctggggctacaggcgtggaggacacggct

SEQ ID NO: 219570 - DNA, 262 bp, Homo sapiens; identical to SEQ ID NO: 205479
  chr19:45959073-45959335
  hypo

SEQ ID NO: 219571 - DNA, 195 bp, Homo sapiens
  chr19:45997680-45997875
  hypo
gatacggtagagagaggaggccgtgagctttcttcttggaggtgccccaaggagaaaccacccacccctcttggctttggtcccagcacctcggacatctcaccttccccagcttctcctgtctccaatctgttgggttcttggggttcttcgtcttccagcggggtggagctgctggtggaagagtcctccccg

SEQ ID NO: 219572 - DNA, 214 bp, Homo sapiens
  chr19:46056763-46056977
  hypo
gcaagctcctatttcttggacgcaggcactgcgtgggaagcggaccggccgggattgcagagctgggcgcgcacctcttgcagctctgtgcgcagttcctccagggcgccctgtggcggcgccgcctgcacctgcgcctgcagcgcttccagcgccagcgccaggtggcccacctcgtcccgcagcgcgttccaggcagcacgctgctcctcct

SEQ ID NO: 219573 - DNA, 202 bp, Homo sapiens
  chr19:46236703-46236905
  hypo
ctctgctcctcacgcctcgcgcaggatcctcgcgccgggaggattcgcacccaaccccaagcccggttgggaacgtggtgtccgagaccgtctgggatccccgcgcgcacggccggcttcccgggacccgcgcgagacgctgtctgatcgggctccctagagtggggcccggagaaaccagaacggcgggggcagcctcacg

SEQ ID NO: 219574 - DNA, 204 bp, Homo sapiens; identical to SEQ ID NO: 205488
  chr19:46271267-46271471
  hypo

SEQ ID NO: 219575 - DNA, 60 bp, Homo sapiens
  chr19:46307536-46307596
  hypo
cacccagttggccatggagtcgaccagctccagcacggggatgccctcgaagtccgggtt

SEQ ID NO: 219576 - DNA, 60 bp, Homo sapiens; identical to SEQ ID NO: 32688
  chr19:46308096-46308156
  hypo

SEQ ID NO: 219577 - DNA, 62 bp, Homo sapiens
  chr19:46321116-46321178
  hypo
ccaccgggctccctccggggtcagacgggggaaggggagggcaagcaggctagaagctgctg

SEQ ID NO: 219578 - DNA, 124 bp, Homo sapiens
  chr19:46321422-46321546
  hypo
tgggcctgtcctctctgcccagctgccccctgggaggtgggagtcccggcctctgctgtctgcccatgtgaggggaagacttctaaagccctgacttctaaagcccctgcgggagagaggagac

SEQ ID NO: 219579 - DNA, 360 bp, Homo sapiens
  chr19:46330529-46330889
  hypo
gtgtgtgtgtacacactacaggcagactcaggcacggtaaccctggtttctaggcagcttgatgccactgaaaatgaaaataaaacagacagaaatagccaaaaaaccactgaaagaagggaatgggcccagagaaacttgcaagggagtgtggaagacgtgggctggttactcaggatagaggcggcctctgcaagctgcaggctgagggcagccaggaagtggaggaggggatcaccttgtccttctcatgggagctgaggtcgaggaggacatgcaggtactggaactggcgggacgggcgcttgaagatcaggtctcgaagtgtggacatgcccagataggtgcgactctgcagca

SEQ ID NO: 219580 - DNA, 93 bp, Homo sapiens
  chr19:46356447-46356540
  hypo
gctgatgaaggagccgaacgggttctcacacaggaatgctaaccctgccagtctctgaactccaactgcctcctgctctgaaccatgcccagc

SEQ ID NO: 219581 - DNA, 38 bp, Homo sapiens
  chr19:46404484-46404522
  hypo
aaaggcttgcaacagcgcaggcacacagcctactctga

SEQ ID NO: 219582 - DNA, 345 bp, Homo sapiens; identical to SEQ ID NO: 205489
  chr19:46404950-46405295
  hypo

SEQ ID NO: 219583 - DNA, 108 bp, Homo sapiens; identical to SEQ ID NO: 205491
  chr19:46519147-46519255
  hypo

SEQ ID NO: 219584 - DNA, 203 bp, Homo sapiens; identical to SEQ ID NO: 205492
  chr19:46519582-46519785
  hypo

SEQ ID NO: 219585 - DNA, 198 bp, Homo sapiens
  chr19:46885486-46885684
  hypo
ttcccctcacgcagggcatcccgccctgctgcctcgcaccagggtgaaagctgtgggctccttccccaaggaagggctcgtcctgtctgcattttgattaatttaggtccctttgcattgccagctctcagatggctttacctttgattttgttgcttgtttggcttgttttcatctttagggcgagacagtcttttg

SEQ ID NO: 219586 - DNA, 268 bp, Homo sapiens
  chr19:47113154-47113422
  hypo
ttcctgaagcgctctcgagctgttctgtaaatacctggtgctaacatcccatgccgctccctcctcacgatgcacccaccgccctgagggcccgtcctaggaatggatgtggggatggtcgctttgtaatgtgctggttctctttttttttctttcccctctatggcccttaagactttcattttgttcagaaccatgctgggctagctaaagggtggggagagggaagatgggccccaccacgctctcaagagaacgcacctgcaat

SEQ ID NO: 219587 - DNA, 447 bp, Homo sapiens
  chr19:47223627-47224074
  hypo
cgccgcctctagggcgcctctaaggcctcaacccctcccctgcatgcccagggctcccccagtgattctcacaggacgcccctgactggactgcggggctcagcacacctggcagtactaggcatgggcgtgcagagactcagaatgcggggtttctgccctcacctcagccccacctgcccggccctacaccccagccagcgtggcggccagggcagggccaggtgggcatcatacgaagaccttggccagggcatcagcgccagcactggcaatgagggccttgctggggtggcaggcaacagcgtggatggcctcctcgtgcttcttgcggtgggccgtgatctcctgcacgcacgttttgttgtccaggctccagagacgcagggagcagtcatggcctgcacatgtgtcggggacagaaggggtggtcactgggctcctcgc

SEQ ID NO: 219588 - DNA, 117 bp, Homo sapiens; identical to SEQ ID NO: 205503
  chr19:47363286-47363403
  hypo

SEQ ID NO: 219589 - DNA, 195 bp, Homo sapiens
  chr19:47502167-47502362
  hypo
gcagcggccgcccgtctccatctggtcaggaagcaagcaggctttctgcgtagggatgcctgtctccaggggcaaccggatgagcaaagaatggtgttctttatggcggagtgtctccagattgttctgtcttgggtggtgggggccaggaagccccaggcacacagtgccgcccttcagcgggggcctgggaca

SEQ ID NO: 219590 - DNA, 202 bp, Homo sapiens
  chr19:47646678-47646880
  hypo
tattttttgttcttctgtgattctgcaagctcactgttctgtatcatcaggttaacaatgtttgtcttacaggctgcgggcctctcgggtgcttcttgtcggcttgaaaggacttggggctgaaattgccaagaatctcatcttggcaggagtgaaaggactgaccatgctggatcacgaacaggtgcgctgttgtgagctc

SEQ ID NO: 219591 - DNA, 360 bp, Homo sapiens; identical to SEQ ID NO: 205505
  chr19:47729862-47730222
  hypo

SEQ ID NO: 219592 - DNA, 293 bp, Homo sapiens; identical to SEQ ID NO: 205506
  chr19:47731298-47731591
  hypo

SEQ ID NO: 219593 - DNA, 137 bp, Homo sapiens
  chr19:47868801-47868938
  hypo
cccggcctataaaggtttttaaatgagtattgggtgaactcatagacggcatcaaggcttggtcagcagggaggaaggagcagcagctgcttgcaggtggacgccagaacttctagtgccctcggatcaaagccagg

SEQ ID NO: 219594 - DNA, 58 bp, Homo sapiens; identical to SEQ ID NO: 56409
  chr19:47910679-47910737
  hypo

SEQ ID NO: 219595 - DNA, 224 bp, Homo sapiens
  chr19:47976135-47976359
  hypo
caggtgagagccaccgcacaggtgagagccaccgcacctggcatgttctaatgttttttataaatttaggtaaatgctattatgagcttcacttacagacagggaaaccaaggcatgaggtggtaaatatggctccagattctacacccttaactgctgcaccgcacaattccccaggctgaggacgggtcaggtcaagaagagacttgcaggctgggtgcggt

SEQ ID NO: 219596 - DNA, 102 bp, Homo sapiens
  chr19:47995719-47995821
  hypo
tgggaacatgagaggcggcgcccgcccctctctcccagggggccagctgcctgcctttttctcggccatcacccagggctccgtgcacgctggggggacccc

SEQ ID NO: 219597 - DNA, 214 bp, Homo sapiens
  chr19:48003714-48003928
  hypo
aggaagagagccagttctaaagtcaacgctcactctgcctcaggcacgcccctgccagcctatcacatgtcggccactggaaaaaccagagccgccaggaaacctgaggaatcaatgcagggtgctaggatggcgctccggacagccagcccgtgtggcccgcagaggccctcaccttgggggtcggctttcttgaatgcgttgccagcgtcca

SEQ ID NO: 219598 - DNA, 238 bp, Homo sapiens
  chr19:48012650-48012888
  hypo
caggcctggcctcagcgccagctcatcgtgtgccagcctgcgtttccttatgtgtaactaggcataagactccacaccttgcagggctgctgaagcacgagcaatcttgcaggcagcaccccacggcgtgcccagcagagagctggccacaccacgggcgttcagtaaacgagagcatccctctcatcaggccccgcagaggaccgattccaggcacgcttccctacttcagaatagc

SEQ ID NO: 219599 - DNA, 115 bp, Homo sapiens
  chr19:48137351-48137466
  hypo
agccttgtgttttattgtatttaccactcagctctccagtccttgccagacgagtgagaatgagcagtggcgtcaggccttgacgggctctgcagggtgggcgggaggagtgggc

SEQ ID NO: 219600 - DNA, 39 bp, Homo sapiens
  chr19:48145667-48145706
  hypo
aactgcccacctgggcgcagtggctcacacctgtagtcc

SEQ ID NO: 219601 - DNA, 196 bp, Homo sapiens
  chr19:48151069-48151265
  hypo
ccacactgcacggggatcctgtccacgatggggggtgtcctgttgggcttgagtgtctagatatggagaccgtagttcgcggggggagtggggggccgtttggcatatttgccctggcatttggggttgtttattgggggtgggagtgctcctggcatttcctgggcgggaactactggtgtagacctactggatt

SEQ ID NO: 219602 - DNA, 120 bp, Homo sapiens
  chr19:48161876-48161996
  hypo
agacttcgtctcaaaaaaaaaaaaaaaaaaaaaagcagcagcagcttctagaacagtggttcgcagagtgtggtctgtgccagcagcatcagcatcacctgggaactcattagaaatgca

SEQ ID NO: 219603 - DNA, 38 bp, Homo sapiens
  chr19:48393224-48393262
  hypo
aaaattttttttttttgaaacggagtctcgtgctcagt

SEQ ID NO: 219604 - DNA, 181 bp, Homo sapiens
  chr19:48675139-48675320
  hypo
ggccgagttcagccgcttcttcgacgcgtggtgccagcagcggctggcgctcttcttcgtcaagagctccatgcacctggcgcgctgccgctgggccagtgcgcccccgctctacacgctcatcgacgtgctcaagtacagctacgtgcggcttgtgtgcaaggacgtgcgtgcgcccagc

SEQ ID NO: 219605 - DNA, 330 bp, Homo sapiens
  chr19:48685675-48686005
  hypo
gtgatgtgaccagggcggtggtggttcctcccacaggcctccccagcccggctgccccgccttcatcatcgtcaagctgagcccgctgcgggaccgcctcgtggtgacggagtgccagctgacccactcacacccggcctgcccgctggagttcgcctactacttccgcccgggccacctgctggccaacgcctgcctgccggtgcgcaccaccaacaagatctccaagcagttcgtggccccagccgacgtgcgccgcctgctgtcctactgcaagggccgcgaccacggcgtcctggacgccctgcacgtgctcgagggcctcttccg

SEQ ID NO: 219606 - DNA, 110 bp, Homo sapiens; identical to SEQ ID NO: 205512
  chr19:48823626-48823736
  hypo

SEQ ID NO: 219607 - DNA, 112 bp, Homo sapiens
  chr19:48844372-48844484
  hypo
agcaggtgaatgatcgcgtacgacagatgcttcacaccagtctacactcctggggccggtgccaaccctgggaagaatcagtaaaaggcagctcccctctgggctgactcag

SEQ ID NO: 219608 - DNA, 340 bp, Homo sapiens
  chr19:48857831-48858171
  hypo
tctgtaccttgttgctggtctcttcctcagtagaacagagcctgtgaggtacatctctcatgctgtccactgtctcccagagcctcaagccattccagagacacagtaggtgctcaataaatatttactgagcgaactcaatgaatgaatgaatcagcgaaaaaagatcagagagaggtcacccgccaaggtcacccgcaccactagtgaacaaccaagctattgtttgaaccgaggctatgctgcttctttccctgcccaggccacatcttcaaaggacttaagtcatcagcaaatggtcacccagcgggcctcacccgcctctgccacttctaccctg

SEQ ID NO: 219609 - DNA, 144 bp, Homo sapiens
  chr19:48889258-48889402
  hypo
atgctgctgggaaacgaacccattaaattgatgcccattcaactctcacccctggggttgcccttagggaacagagtcaccgtttaaagagagacagaaggtctgttgctttttttttttttttttcctgaggccgagtttcac

SEQ ID NO: 219610 - DNA, 322 bp, Homo sapiens; identical to SEQ ID NO: 205513
  chr19:48901493-48901815
  hypo

SEQ ID NO: 219611 - DNA, 287 bp, Homo sapiens
  chr19:48908063-48908350
  hypo
aggagtatgactggacgtcctttgtagccgtgaccactcgtgcccctggccaccgggccttcctgtcctacattgaggtgctgactgacggtagtctggtgggctgggagcaccgcggagcgctgacgctggaccctggggcgggcgaggccgtgctcagtgcccagctccgcagtgtcagcgcgcagatccgcctgctcttctgcgcccgagaggaggccgagcccgtgttccgcgcagctgaggaggctggcctcactggatctggctacgtctggttcatggtg

SEQ ID NO: 219612 - DNA, 34 bp, Homo sapiens
  chr19:48953831-48953865
  hypo
tctgcaacaaggggccgggcgcttagactccaag

SEQ ID NO: 219613 - DNA, 114 bp, Homo sapiens
  chr19:49012370-49012484
  hypo
gacatggggtgagacactcacgggcccagaatccgatggacgcagggacggatggaaggatggacagacggacggacgcgtggagagccgggtggcgcggcggagtggtcaatg

SEQ ID NO: 219614 - DNA, 284 bp, Homo sapiens
  chr19:49132668-49132952
  hypo
agggggactttgtgctcatgttggccatctcgcccagccacctaggcgctgacctggtggcagctccgcatgcgcgcttcgacgacggcctggtgcacctgtgctgggtgcgtagcggcatctcgcgggctgcgctgctgcgccttttcttggccatggagcgtggtagccacttcagcctgggctgtccgcagctgggctacgccgcggcccgtgccttccgcctagagccgctcacaccacgcggcgtgctcacagtggacggggagcaggtggagtatggg

SEQ ID NO: 219615 - DNA, 112 bp, Homo sapiens
  chr19:49173707-49173819
  hypo
tggcggcagtggcagcgggggggccgggcacgggcggcacagcgggcagcgtggccatgacactggcagcggcctctcagcccagctgccgctagcccggcctggcccccaa

SEQ ID NO: 219616 - DNA, 180 bp, Homo sapiens
  chr19:49180129-49180309
  hypo
gcagcactatttgcaacagccgaaaactggaaacaactccagtgcctatcacctgatgagtgaatacattgtggtctacctggacaatgggactttcagtcttgaaaggagtgaggcaattatctgggcgtggtggctgtacctgtagtcctacctgtagtcccagctactcgggaggct

SEQ ID NO: 219617 - DNA, 279 bp, Homo sapiens
  chr19:49183711-49183990
  hypo
gggctacccctgctcctggaccttctaccaccacctccgccaggagatcctccaggagttcaccctgcacgaccacgtgcgcgaggaggcccagaagttcctgcggggcctgcaggccaagtgggcagggcaggcgaccttcgtgggggtccacgtgcgccggggggactatgtccgtgtcatgccgcgcgtatggaagggggtgctggccgaccggctacctgcagcgggccctggactggttccgggcctgctgccgcctcccggtctttgtggtca

SEQ ID NO: 219618 - DNA, 45 bp, Homo sapiens
  chr19:49207344-49207389
  hypo
tcttctgtgaagatgcgttgggctgcaagtaacagaaatctcagt

SEQ ID NO: 219619 - DNA, 138 bp, Homo sapiens
  chr19:49221485-49221623
  hypo
ctctggacatatgcgcctttttgtatactccttgctctttgattgctggtgtctttgtacccatccaaccacataggcacgctcacgtgcacactcaagtaccctttgccttctcaggaactgatctgtagttcgaaa

SEQ ID NO: 219620 - DNA, 180 bp, Homo sapiens
  chr19:49232014-49232194
  hypo
tctcaaaaacaaaagcaaacaaacaaacaaacaaaacccaaaaccccaaatccttcccgaggcgtcatgggaacagtagtatccagcccagctatgaaaagggttgaaggtagggaagggaggctggagaagggacttggggcgctggtggggctggacggcgattggggggcgctcacc

SEQ ID NO: 219621 - DNA, 76 bp, Homo sapiens
  chr19:49246879-49246955
  hypo
tcctagatggtcagacgaaggcacaggaccaggacgcaggtaagtagtaagtgggctccaacaaggctcagtaaag

SEQ ID NO: 219622 - DNA, 88 bp, Homo sapiens
  chr19:49281057-49281145
  hypo
cggccagctttgccattttcacacgtggcctccaaggtctctctggatgtgggacgcaggctcccaggtgaaccgcaatgatccccac

SEQ ID NO: 219623 - DNA, 78 bp, Homo sapiens
  chr19:49287699-49287777
  hypo
cgtgcgcagtccgggggacaaaattttaaacaagtgttggtcatgtaagcatggcagactgcacgtgtgactgacctc

SEQ ID NO: 219624 - DNA, 93 bp, Homo sapiens
  chr19:49419216-49419309
  hypo
taattgtacagttcaatagtattaagtatatttacactgtcatgcaaccaattctgagagctcttcatctcgcacaaccgaaaccgtatccat

SEQ ID NO: 219625 - DNA, 323 bp, Homo sapiens; identical to SEQ ID NO: 205524
  chr19:49467050-49467373
  hypo

SEQ ID NO: 219626 - DNA, 33 bp, Homo sapiens
  chr19:49525578-49525611
  hypo
tcctagccagggggacggcgagttagtcagaac

SEQ ID NO: 219627 - DNA, 163 bp, Homo sapiens
  chr19:49606743-49606906
  hypo
ccgtgtcccccccccgggaagcccgcctcctcgccaggcccccaggagttgccgagccccccccatcccgctcggtttggacacccgcaaggccggcatcggtaaatggcacctttttctcttcctctggttgttatttgggggggagcgggctggggcgggg

SEQ ID NO: 219628 - DNA, 446 bp, Homo sapiens; identical to SEQ ID NO: 205528
  chr19:49660928-49661374
  hypo

SEQ ID NO: 219629 - DNA, 34 bp, Homo sapiens; identical to SEQ ID NO: 205529
  chr19:49925606-49925640
  hypo

SEQ ID NO: 219630 - DNA, 463 bp, Homo sapiens
  chr19:49971403-49971866
  hypo
gagagtccgtctcaaaaaaaaaaaaaaagaaaggcggttatgcaggatgtttctcaccgcccgaacccccgtggaatgattcactttgaccagcgtctgcgaaatggcaggggcttccacaatggtgcggtttgggccaacaccaagtgttggggagaatgtagaggaactggatctctcatttactgcgggcggggctcccctgccccacacgtgacccacctgtccctgcaggtagccgggctgagaggccctgtgctgcgcctgcgggagccgctgggtgtgctggctgtggtgtgtccggacgagtggcccctgcttgccttcgtgtccctgctggctcccgccctggcctacggcaacactgtggtcatggtgcccagtgcggcctgtcctctgctggccctggaggtctgccaggtatagccccctgccttcctgcctctcctccccgtagcctcag

SEQ ID NO: 219631 - DNA, 131 bp, Homo sapiens
  chr19:49978920-49979051
  hypo
gctcccccagcacccgctcccctgcagacctatctcctcctgctgctgctgctgagctcgggactcagtgggacccaggactgctccttccaacacagccccatctcctccgacttcgctgtcaaaatccg

SEQ ID NO: 219632 - DNA, 859 bp, Homo sapiens
  chr19:50059668-50060527
  hypo
tgaccacagccccactacggtgaggccgaaggcgggagactctgatcaggggccttcctggggacctactggccccaaagccggaccgccccgcaggttcccgagtggtcccttccctcccctcccaggtgactcacgagggccgcagcacagcgcagggggtggcgttgctcaggctgtcgcgggtcacggcacacacgtagcgctcgctgcgggtgatgagccccacgcggtccacggagctgtctagcggtgtgaagtgcacgggcgtcaggtccgacatgcgcaggggcttccctgacatggggcaggtcaccgtgcgggactgcaaggggcagagagaggcgggctcagtaggcagggctggcgcaggtggagagcgcgtggtccctgtgcgtgaggaggacggtggggaaccctggcgccctggcaccgtgcgtgccggggcgctgtgggggctcaccggcttctccagcttggtggccttggcttcgggcgtcagcgacgggatccagaagctgggcagcactttgtccttgtccttacttggaggacccacactgggcccaggttggacatcatctgtgggggaaggaagggactcagatgccgccccctgggcccgcccagcccgcggcgccccgccccccaacccacaagaagcccaacctgagtcacctgggctggtgcccgagagggccttggctgtgaaagggttgaggggccggctcacgatagccgactccttctccaggaagccccgcacatggtcctgcgaggccgcccgctgaagctccttctgctcctcgcgccgggtgccccgctgcttctcgtaggcctgcgtcggggaaagtgggct

SEQ ID NO: 219633 - DNA, 172 bp, Homo sapiens
  chr19:50060912-50061084
  hypo
gtgcatgccccagcccgtgtttgggacgggggatgtagacttcagatctaagggaatgctgaggagcccatgtctatggacggacagtgagtgaggacgggagaagtgaagccatgacctgagctcagccctgcctggcgcacagcagttgcctgggcggtgctgcagttcc

SEQ ID NO: 219634 - DNA, 163 bp, Homo sapiens
  chr19:50061336-50061499
  hypo
catggaaggccaggccgggttcccagtaacacgccttgagaatgctcatctgcgtgtacctcccaggtgccctgctgtgtcctctgatttggccgtcagcccgttttacagacgatgaaactgaggcccagaaaaaatgaggtgatgtcaattcacgtagcac

SEQ ID NO: 219635 - DNA, 190 bp, Homo sapiens
  chr19:50063175-50063365
  hypo
ctgttcccagctcacgtgacaacaggatcgtggcaaggctgcagggagagacaacagcagtcgaagtccttcacggcatcccggctcagtcgaatgttctgggtcccatagcccgaggccgctggggacagagatgggcagagtgatggaggggcggagcaacaggagacatgtccgtctccaaagcccc

SEQ ID NO: 219636 - DNA, 123 bp, Homo sapiens
  chr19:50129559-50129682
  hypo
cccgttctcgcccccgccccaccccctgctcccactaccctttgtctcttgctctttcttgggcttctgtacaactcaacttgtatacactgtgtacacacaaccagccaaacgaaaacccaa

SEQ ID NO: 219637 - DNA, 51 bp, Homo sapiens
  chr19:50129741-50129792
  hypo
cagtggtagcaggggcagaggttctggaacgggactttcccagagccctgg

SEQ ID NO: 219638 - DNA, 38 bp, Homo sapiens
  chr19:50130457-50130495
  hypo
ttacaggtgtgagccactgcgcccggcctcaagtcctg

SEQ ID NO: 219639 - DNA, 80 bp, Homo sapiens
  chr19:50130728-50130808
  hypo
caagtttgaagaaccgtgttctagaacaagaatgttaaaaatgtgcaggttggctgggcacggtggctcacggctataat

SEQ ID NO: 219640 - DNA, 199 bp, Homo sapiens
  chr19:50208442-50208641
  hypo
gcagctcacagcccacggtttcctgcagactttgctgatgggaatgcgccccttatgctctgcccagtacgagaagatcttcaacaccacgcggattccaggggtccaaaaaggtgagaccctctcctgtccccactgatggaggcagaacaatatagtggctaagagcatgttttctggagtccgcctgactgagctg

SEQ ID NO: 219641 - DNA, 87 bp, Homo sapiens
  chr19:50274628-50274715
  hypo
gaatgtactaaagaacgctgaattgttcactgtaaaagggtcaattttatggtatgtgaattgtatctctttttttttgtgacagtc

SEQ ID NO: 219642 - DNA, 39 bp, Homo sapiens
  chr19:50303027-50303066
  hypo
gtgctgtggggtgcgggctggactcttgggtctgaggca

SEQ ID NO: 219643 - DNA, 278 bp, Homo sapiens
  chr19:50303126-50303404
  hypo
ctgggtctccagatgggggcagtggtgagcccagatccaggtgagtgaaagcccgacatggcctgcggcacactctctctcacacgccccggcggcaggtcctgaaggtggccatcctggccgagaagtacgccgtggactacagctggtacgtggacaccatcctcaacctcatccgcattgcgggcgactacgtgagtgaggaggtgtggtaccgtgtgctacagatcgtcaccaaccgtgatgacgtccagggctatgccgccaagaccgtcttt

SEQ ID NO: 219644 - DNA, 34 bp, Homo sapiens
  chr19:50305176-50305210
  hypo
tgcctggggctgggtcctgccgggcgccgcctgt

SEQ ID NO: 219645 - DNA, 162 bp, Homo sapiens
  chr19:50305240-50305402
  hypo
acgccctcgccctccgccgacctcctggggctgcgggcagcccctcccccggcagcacccccggcttctgcaggagcagggaaccttctggtggacgtcttcgatggcccggccgcccagcccagcctggggcccacccccgaggaggccttcctcaggtag

SEQ ID NO: 219646 - DNA, 90 bp, Homo sapiens
  chr19:50320125-50320215
  hypo
tttgagacacgccagagcaacacagtgagaccccatctctacaaaaaatttaaaaattagctggaagtggtagtgcgcggctgtggtccc

SEQ ID NO: 219647 - DNA, 57 bp, Homo sapiens
  chr19:50331699-50331756
  hypo
ctgcaggttcatgggcgggggtggtgagagctgcagcctcatcgcggaaggactcag

SEQ ID NO: 219648 - DNA, 204 bp, Homo sapiens
  chr19:50406382-50406586
  hypo
caacaaaacaaaaaacggttggtttgtcaagatgcaaatcacagtccatattgcatttgagtgacattgtcttggtcagtaagtgtcactatcagttctgtggattcaagggaactagggtatctgaggtgaccccagggcaccaggctagtccccatcacggcagcgcacccggtctgcttcttgcctcgggaaacctttggc

SEQ ID NO: 219649 - DNA, 347 bp, Homo sapiens
  chr19:50423833-50424180
  hypo
cctccatgaggctgtggaggcggataggcgtcaggctcagagctgactttaccccgagggcaacggctcgggcagagtttctaagggcaggcccatgccttccttggggtggccggtaatgctggttgagaacaggctggggaagagcctagagctgaaacgctctggttggcggtgcaggcacaggacatcaaggcctggagagggactgaggcatcagggctgagggactctgagagcagcggacaggcgtgtgtggcgggggaggaacggcgcacacctgtgccccatccgcagcccctcttcttgtcaacatcagcttccccggggagaggcagtgatgttgg

SEQ ID NO: 219650 - DNA, 194 bp, Homo sapiens; identical to SEQ ID NO: 205536
  chr19:50553803-50553997
  hypo

SEQ ID NO: 219651 - DNA, 37 bp, Homo sapiens
  chr19:50705041-50705078
  hypo
tggaattagaggcgtgagccaccgctcctggccagta

SEQ ID NO: 219652 - DNA, 266 bp, Homo sapiens
  chr19:50784840-50785106
  hypo
ctcccctcagctttccgagtggcggcggcgccaggaggaggaggcaggggcactggaggcaggggaggaggcacggcgccgggcagcccgggaggccgaggccctgacccagcgcctggcagaaaagacagagaccgtggatcggctggagcggggccgccgccggctgcagcaggagctggacgacgccaccatggacctggagcagcagcggcagcttgtgagcaccctggagaagaagcagcgcaagtttgaccaggtggggc

SEQ ID NO: 219653 - DNA, 923 bp, Homo sapiens
  chr19:50826194-50827117
  hypo
tccacctgtgcccccgatccctgacgcccaggctcacctgcccggttgatctcaatcacctcctcctgagccaacgggcaaggctcgccgggggctggcagaggaggcagccccatgatccccagcccacccgctccccccctgagcagcccggggtgcgtgtggggccccgctgggtaggccccggccacagtcacccccatggagggtggggtgatgggtggcggcgggctgatgcccccgctgccgtggtgcgggtggggcgggggtggcgggggtgggtcaggcttgcagtagttgggcgagcccggttgcgggggccgggggatgtgtttgttcttcttcttgggcagcttctgcttggccatggccagcgaatagtacatgccaaagttgttgacaatgacgggcacaggcatggcgatggtcagcacccccgccagggcacacagcgccccgaccagcatccccgaccacgtcttggggtacatgtctccatagcccagggtcgtcatggtgaccacagcccaccagaagccaatggggatgttcttgaagtaggtgtggttggagcccaggatgtcatcggggtcggcgccaatgcgctcagcgtagtaaatcatggtggcgaagatgagcacccccagggccaggaagatgatgagcagcaggaactcgttggtgctggcgcggagcgtgtgtcccagcacgcgcagccccacgaagtgccgggtcagcttgaagatgcgcaggatgcggacgaagcggaccacccgcaggaagcccagcacgtctttggcggccttggagctgaggcccgagaggcccacctcgagatagaagggcaggatggccacacagtcgatgatgttgaggctgcttttaagaaactccaccttgtctgggcagaaggtgatgcgcat

SEQ ID NO: 219654 - DNA, 90 bp, Homo sapiens
  chr19:50871401-50871491
  hypo
aagactccctctcaaaaaaaaaaaaaaaaaaaaaagaaacaaaagaaaggctaggtgcggtgggggtgcgtttgggaggctgggggtgtc

SEQ ID NO: 219655 - DNA, 76 bp, Homo sapiens
  chr19:50898815-50898891
  hypo
gggagacagagcgagactccgtctccaaaaaaaaaaaaaaatagtgtaaagaacacctgcacgccctttgcccaga

SEQ ID NO: 219656 - DNA, 196 bp, Homo sapiens
  chr19:50919573-50919769
  hypo
cccaggccccatgaccaccccgtgtccaccccggtgccctttccctggctgcccgggtgtgactgccatgtggccgcaggacccgctgttcgtgctggagcacagcctgcccattgacacgcagtactacctggagcagcagctggccaagcccctcctgcgcatcttcgagcccatcctgggcgagggccgtgcc

SEQ ID NO: 219657 - DNA, 44 bp, Homo sapiens
  chr19:51098421-51098465
  hypo
tataggcatgagccatcgcgcccggccaacttatctttttatta

SEQ ID NO: 219658 - DNA, 94 bp, Homo sapiens; identical to SEQ ID NO: 205545
  chr19:51228809-51228903
  hypo

SEQ ID NO: 219659 - DNA, 136 bp, Homo sapiens
  chr19:51293556-51293692
  hypo
gcccctgggggagcgtgccagggcctgctataatgggggtgctgagtgcagggctgggacaggcggggctgcggcccagacagtgggctgagctcagcgtctgggctgggtggaaatggccggcctggggttttgg

SEQ ID NO: 219660 - DNA, 105 bp, Homo sapiens
  chr19:51302699-51302804
  hypo
ggcccctcagacccccgggtgtcaaaggtcccggggggcaccgtgtcctcagtggcagtcggagcccagtgctggacatcatggaggccccggtgccctcacccc

SEQ ID NO: 219661 - DNA, 695 bp, Homo sapiens
  chr19:51303006-51303701
  hypo
tgtttctctggaaaacgggactagagatgcctgcagacaggcacatctgtggggttcagtgagaggacggggccaaacccttctgcttgggcctcccatgcctaacgggatacccctcaatcgcctctgctgcccccggcccagctcttctaagctgctctgacttcaccagaaccttctgtgacatggggaaggggcagctgcctctcactgggaccctggcaggataagttcagtttattctccgcaaaagcactaacactgtgggtgctcgctcagtgggtgctgctgtttaacaacctcagaaacaccaaaagccccattttgcatagaaatatgctttgtaggaagaggggggtccttgtttaaactaatcaaggaaaattaaaaacccagcccccagccacaaactagccacattccaggtgtccaagagccacccgtggccagtggctgccagactggacaaggcgaggaacatttctatctggacagtcgtaaggaaggcgccggcccagaatccacaaatgctacgtgtcccttctgtctccctatcccgcatcagctctgtcgtctcacctctcacacatccctacccaactggcaccgacaccactcatgtccccaagaatcccctctaagccagccatgacaaacgctcagctccattcactaccccacagaggatctcggat

SEQ ID NO: 219662 - DNA, 117 bp, Homo sapiens; identical to SEQ ID NO: 205552
  chr19:51527588-51527705
  hypo

SEQ ID NO: 219663 - DNA, 88 bp, Homo sapiens
  chr19:51535217-51535305
  hypo
acgctgctggttacgcggacgggcaggcgcagccgcagcagccggaggtcgtgctcgtggctcgtcgaggctcccaggtagccgggat

SEQ ID NO: 219664 - DNA, 216 bp, Homo sapiens
  chr19:51607231-51607447
  hypo
gaatcccctttcaggtcccgcctcctcgcctgtgcattcgccccactgcctcggagagtgccgctctgcggcccgtactacgctcacctgtcacgatgtgcgtggctcccacgcggcgcgccccttcctccagcgcccggcgccgcagcactccacagaaggtgcagcaggagcggctgcggccggagccggctgtgctgcgggccacggcgtcca

SEQ ID NO: 219665 - DNA, 178 bp, Homo sapiens
  chr19:51607825-51608003
  hypo
ttgcgggaggggtcggcttctcctagacagggagagagaggaggtgggttacatatggattccggattgcagggtccctgccatcggggagattgtctggattgcacctctgcccggaatagaccagggagacgtgtgcgcgagtggagtagcttcttctagcgctggggataggatg

SEQ ID NO: 219666 - DNA, 251 bp, Homo sapiens
  chr19:51754291-51754542
  hypo
gtaaagtaagcccatgcagccgctgattggctgcgggtggatgcactcacctaaggatgcgagctagcaggtcttgcagcggctatcacgcccctcacgccgctatctctgtgcagccgactgaggatccctagtcgcataaggctgtgcctggcctgttggcgtccctggcagttgttgggttctggcggttgttgggtccctggcagttgttggcggttgttgggttccttcattgaaactgcactaac

SEQ ID NO: 219667 - DNA, 41 bp, Homo sapiens
  chr19:52026931-52026972
  hypo
agtaaacacctcaaaccttccgttaggactcaagaagggtt

SEQ ID NO: 219668 - DNA, 57 bp, Homo sapiens
  chr19:52058332-52058389
  hypo
ttggtcactggaggacgccatcttcaaaagatggtcgttccatacagccagggaagg

SEQ ID NO: 219669 - DNA, 211 bp, Homo sapiens
  chr19:52101647-52101858
  hypo
catttataacccacgtatataagagcagcagccacagctgcccctggtctattccaggcaggggcactatctagggaactcctcaaaggcaatgaaacatgtgtaacccgcctcctctcccggtctaggagaagctgtcccttcttgcaatgcccgccccgtcatgtgcctcctgccacgtggcatgcgcctccctccgccgtccatgctc

SEQ ID NO: 219670 - DNA, 38 bp, Homo sapiens
  chr19:52289294-52289332
  hypo
tttatttatttattttttttcgagacggagtttcgctc

SEQ ID NO: 219671 - DNA, 540 bp, Homo sapiens
  chr19:52342920-52343460
  hypo
gcccccaactccgcatcgcttgctcgcttttcctggttccccagacaccgacttccactcgacgctgaggatgctccaatccagaccacagaagccctcagtggctaacccccagcttcagattccactgaccattccctgaagccttcttacaccgcaaacctccacaagtaccccatgctggtcgcatccggtcaaggaccccaacagcgctgggaaactcaccctacagctggagtcgcacaaacattcgcttgaggactagcaggtttccgtaacctcttcactcactgccgtagtcacgctcttgtgcagactcagtagcaccttcgcggaacacaagatgtctacagactttgaaaccaggcgtgcacatggaagcagcagtcttggaagatgcttcttacagatagcgagatggccattttctggcgactaaattccatcgtgctagaaaggaaagaggcaatgcagctgatcttctactgtccttttcaccacttccccagctgctaccagcagcgttgtgcattctcagga

SEQ ID NO: 219672 - DNA, 47 bp, Homo sapiens
  chr19:52405665-52405712
  hypo
aatcaggattcacacggcctcctcctcaggttcgattaatttgctgg

SEQ ID NO: 219673 - DNA, 93 bp, Homo sapiens
  chr19:52405954-52406047
  hypo
atcatcagaattctcgatttggtaaaaatcggatccatccagtgagtcttcagccaagaactgtttgagaatgatgttaacatcacatgtagg

SEQ ID NO: 219674 - DNA, 152 bp, Homo sapiens
  chr19:52406167-52406319
  hypo
ggcgacctactagagcgatgtgaaaataataaaagtgagatcgttcatggcaaagttatctcggggtaaatgctccagctgcaagcaccaaaggtgagtattctcagggcaaatgggaaaaggaataaaggatattacgaaggatacagatg

SEQ ID NO: 219675 - DNA, 120 bp, Homo sapiens
  chr19:52479228-52479348
  hypo
gtcagcaaactcatgactgctccggctgatgaaggtttgctggaggcaatcactccctggcgccgttatctactgcgacatctagagaatgcagtcttgcaagactactctggacccctg

SEQ ID NO: 219676 - DNA, 82 bp, Homo sapiens
  chr19:52479588-52479670
  hypo
ccaaatacactcttttgtctcatctttattcccgtgttcaccccactttgtttagtccacctaggtccgtgcaggttacaaa

SEQ ID NO: 219677 - DNA, 65 bp, Homo sapiens
  chr19:52530500-52530565
  hypo
cccatgtactggttcgaaagtctctgtaagctctttgggtatacatacctcgtgtcaagaccaat

SEQ ID NO: 219678 - DNA, 74 bp, Homo sapiens; identical to SEQ ID NO: 205557
  chr19:52531285-52531359
  hypo

SEQ ID NO: 219679 - DNA, 222 bp, Homo sapiens; identical to SEQ ID NO: 205558
  chr19:52531884-52532106
  hypo

SEQ ID NO: 219680 - DNA, 218 bp, Homo sapiens
  chr19:52569174-52569392
  hypo
tataaggtttctctccggtatgaattttccgatgacgtgctaggcatgagtagtaactgaagaccttgccgcattcgttacactggaaaggtttctctccggtatgacttcgcctatgaattgaaaggtttccactgtcaatgaagaccttgccacacacattacatttgtaaggtttctctccggtatgcattctttgatgacgtgctaggcatgaa

SEQ ID NO: 219681 - DNA, 114 bp, Homo sapiens; identical to SEQ ID NO: 205561
  chr19:52643387-52643501
  hypo

SEQ ID NO: 219682 - DNA, 160 bp, Homo sapiens; identical to SEQ ID NO: 205562
  chr19:52715132-52715292
  hypo

SEQ ID NO: 219683 - DNA, 36 bp, Homo sapiens
  chr19:52718578-52718614
  hypo
gggattataggcatgagccatcgcacttggcctatt

SEQ ID NO: 219684 - DNA, 120 bp, Homo sapiens
  chr19:52780745-52780865
  hypo
agaagcccagaagaggaaagcagaggagtcaggcatgccacttactcaggtaaagtgatattctcagtagattgttctgtttcttatttcttcctgaaatgccgggtgctggagttgaga

SEQ ID NO: 219685 - DNA, 35 bp, Homo sapiens
  chr19:52801591-52801626
  hypo
gggaagaggcaagaccgggcacagtggctcacgcc

SEQ ID NO: 219686 - DNA, 41 bp, Homo sapiens
  chr19:52860523-52860564
  hypo
tttttggaggctgaggtgggcgcattacttgatcccaggag

SEQ ID NO: 219687 - DNA, 31 bp, Homo sapiens
  chr19:52861439-52861470
  hypo
tttgctttctttttttgagacggagtcccac

SEQ ID NO: 219688 - DNA, 182 bp, Homo sapiens
  chr19:52917256-52917438
  hypo
tagaacttgaaacaactgcacgtagtgtttttttcaacagacaagttctgccccacgttaccctgattcagaaaacttcccgttcgcagtactttagagcaccgacctcatatcgctcccagtacctcttcagggcactgaccttatatccgctgccagccgactcatccaggtttccccat

SEQ ID NO: 219689 - DNA, 101 bp, Homo sapiens
  chr19:52927832-52927933
  hypo
acacccggcccacttcctccatctttacaggcgagataaaatctctttatccctctattttcaacacatcacaactgtccgtccctcagggtctacctgca

SEQ ID NO: 219690 - DNA, 76 bp, Homo sapiens
  chr19:53027352-53027428
  hypo
attttctctgtcttctgaagcggtatgttatttgagacagagtttcgcgcttgtagcccacgctggagtggaatgg

SEQ ID NO: 219691 - DNA, 351 bp, Homo sapiens; identical to SEQ ID NO: 205567
  chr19:53030790-53031141
  hypo

SEQ ID NO: 219692 - DNA, 158 bp, Homo sapiens
  chr19:53089793-53089951
  hypo
caccacacgtagccagtcctggcattttgtagaaggatggccaacgcagcctgttgacccttcctggccatcacatgaaaatcagcgactcttccttcttacaaaactcggagcttctcaggataacttggtgaaacgtcccccgctgtgaacctcag

SEQ ID NO: 219693 - DNA, 437 bp, Homo sapiens
  chr19:53228798-53229235
  hypo
aagcgacttcaaacccaaaaggaagcaacttccagactcttatgggcgtctcaatttgctctgggtgaaggaagacaggcaagaatttccaggtctgtgaggaccccacgtcccagggacagaagtgccagggacctgggaagtgcagacttaatacaaggcagagcaaaactcacgcgcctcggtaggacctttactccacgtgatccacttccgggtttgctgcgcaggacagaagccagtcccgggtggggcccccgaacatggtggcggggcctgggtgggacagaggcggggcgcgaggcggagagaccttgccctttagaacaggcaaagggcggggccgggaccagacctgtgcatctctccgcctcgcacccagcgcctctgtttttcgggtgtttggaggtgagagcggccaggaaggctgaggcatg

SEQ ID NO: 219694 - DNA, 78 bp, Homo sapiens
  chr19:53241622-53241700
  hypo
gacagagctcccaagtccttcggaaatacattcctgggtcattaagctaaaaagcggtttagttagtttctaaaaaaa

SEQ ID NO: 219695 - DNA, 94 bp, Homo sapiens
  chr19:53412364-53412458
  hypo
tccagcctgagcaaaaaagtgagactccatctcaaaaaaaaaagaaaatgttaataccatatttttctgaataactgttacaaaattacctata

SEQ ID NO: 219696 - DNA, 37 bp, Homo sapiens
  chr19:53438070-53438107
  hypo
aggcaagagccacggcgcctggccaggactagtgctt

SEQ ID NO: 219697 - DNA, 348 bp, Homo sapiens; identical to SEQ ID NO: 205573
  chr19:53445362-53445710
  hypo

SEQ ID NO: 219698 - DNA, 245 bp, Homo sapiens; identical to SEQ ID NO: 205574
  chr19:53445822-53446067
  hypo

SEQ ID NO: 219699 - DNA, 90 bp, Homo sapiens
  chr19:53463666-53463756
  hypo
tacgaatcagctcggataacgggctggagtttgtggctgacttagtacagacgacagcaaaggtattaaagatcacgtggaaactgcatg

SEQ ID NO: 219700 - DNA, 153 bp, Homo sapiens
  chr19:53477544-53477697
  hypo
agcttatagcttgcagtgaacgccaagaatgaagtactcagataattccagctgagtggggcggggagcaaaccttctgagagagtgctgccccagaatccgtcctccaagtatttattgaaagggcttgtttagaccggtcgcggtggctca

SEQ ID NO: 219701 - DNA, 247 bp, Homo sapiens
  chr19:53507269-53507516
  hypo
ctcctttgaaaacactaagaatgacatcactgcatcagtttttactagagccaatcacctgtcgtgcctggaacagggatcgtacccagattgccctcagtcctgataatcaggaagcgcacatctataagaagcatgggagccagcgagtgaaagctcgtgaactcagtgagcacaatggacatatcacaggcattcactgggctcccaagagcgaccgcatcgtcacttgcggggtagactgcaa

SEQ ID NO: 219702 - DNA, 221 bp, Homo sapiens; identical to SEQ ID NO: 205580
  chr19:53606354-53606575
  hypo

SEQ ID NO: 219703 - DNA, 93 bp, Homo sapiens
  chr19:53667653-53667746
  hypo
gtgctgggattacaggcgtgagccaccacgcccggcgtcctttgtaaggtttctatccactatgaattcttcgatgttttgcaaggtttgaat

SEQ ID NO: 219704 - DNA, 100 bp, Homo sapiens
  chr19:53685270-53685370
  hypo
aatattctgtcttttcagggcgctgcctgagggataagtttctctcttggttgaatataagtaatgaaggccgggcgcggtagttcacgcctgtaatccc

SEQ ID NO: 219705 - DNA, 159 bp, Homo sapiens
  chr19:53685610-53685769
  hypo
gagactctgtctcaacaaaaacaacaaaaaaaaggagtttggagtcagaaacacagtgactcacttgttcggcatcaaatgcaaatataaatgaggtgacaaagctttccccacagtcgtctcattttacagcatttcgtgggtgcttgtacacactaa

SEQ ID NO: 219706 - DNA, 40 bp, Homo sapiens
  chr19:53756649-53756689
  hypo
tagaaagcatttaggccaggcgcggtggctcacgcctgta

SEQ ID NO: 219707 - DNA, 64 bp, Homo sapiens; identical to SEQ ID NO: 205588
  chr19:53758247-53758311
  hypo

SEQ ID NO: 219708 - DNA, 34 bp, Homo sapiens
  chr19:53821074-53821108
  hypo
gattacaggcgtgagccaccgcgcccggccttgc

SEQ ID NO: 219709 - DNA, 36 bp, Homo sapiens
  chr19:53859893-53859929
  hypo
taaatgaggccgggcgtggtggctcacgcctgtaat

SEQ ID NO: 219710 - DNA, 290 bp, Homo sapiens
  chr19:53886631-53886921
  hypo
catactggagagaaaccttagaaatgtgaagaatgtgacaaagtttacagtcgcaaatcaaacctcgaaagacaggagaattcatactggagagaaaccataaaaatgtaagagtttttgacaaggctttcggacgtgattcacacctggcacaacatcccagagttcacactggagagaaaccttacaagtgtaatgagtgtgtcaaagcctttagtgggcagtcaacacttattcaccatcaggcaatccgtagtgtagggaaacttgactaacgtaatgattctcac

SEQ ID NO: 219711 - DNA, 360 bp, Homo sapiens
  chr19:54080889-54081249
  hypo
aatgtgggaaggccttcaattgtggctatcacctcactcagcacgagagaatccacacaggcgaaaccccgtataaatgtaaggagtgtgggaaggctttcatttatggatcgagcctcgtgaaacatgagagaattcataccggggtgaaaccctatgggtgtacagaatgtgggaagagctttagtcacggccatcagcttacacaacatcagaaaacgcacagtggggcgaaatcctacgaatgtaaggagtgcgggaaggcatgtaaccacctaaaccatctccgagaacatcagaggatccacaacagttgaagagccttttgaacgcagtagcccgctcgtatctatggtttcg

SEQ ID NO: 219712 - DNA, 99 bp, Homo sapiens
  chr19:54109746-54109845
  hypo
ccaatgtggacaaaagcctccggcaaggggttctcgggacatatcaggtagtaggggcactatgagggtgagcgccgctgagacaccaaaataggccaa

SEQ ID NO: 219713 - DNA, 306 bp, Homo sapiens
  chr19:54109903-54110209
  hypo
cggtgagggtggagggcttcttctcctgcgggacaggtatatgcaccgggcggtgagggtggagggcttcttctcctgcgggacaggtatatgcaccgggcggtgagggtggagggcttcttctcctgcaggacaggtatacgcactgggccaggaaaatgcacggaagtgaaggtacaaaaccctcttccctcttccccatctgagaacagggtagcctttaatgaaacctgtgcccagcggcagcccaaacagtgcccaaacccccgatgagacagaatgaccgtgttacctgtggtggcaatg

SEQ ID NO: 219714 - DNA, 140 bp, Homo sapiens
  chr19:54120021-54120161
  hypo
aaatagaggccgagaatggcccttgctgccaccaacatggagactttgtaccgtgtcccgttcttagcgcttgaatgtcccaacctgaagctgaagaagccgccctggctgcacatgccgttggccatgactatgtatgc

SEQ ID NO: 219715 - DNA, 403 bp, Homo sapiens
  chr19:54135151-54135554
  hypo
ctcaatcaatattagataaaatgacagtattgggagaaatccagggggctctggaggaccgagggatcatattggaggcagatagggcagagaaaggtggaggaggtgggagtcgggtgtggctgtggaggaagctacttaaatccggatttgatctttgctagttcttatccctggacctgaacccaggcgcacatctggattagaagatgccaggctcagaggatcttcgtaaaggtaagccagaaaaaatgagaaccgaagcaaagacacgtgaagaagtggaaagcagctggcggcgggaaaaggcagagggaccaggcggccgaagctggtgcttcgtccacgtgggtggcagggacttcccacagaggctgtcatcgtttttgttgttgttgttttg

SEQ ID NO: 219716 - DNA, 45 bp, Homo sapiens
  chr19:54153203-54153248
  hypo
cactctagcctggtcaacaagagcgggaaactccatatcaaaaaa

SEQ ID NO: 219717 - DNA, 33 bp, Homo sapiens
  chr19:54161842-54161875
  hypo
tgcctctccatggctgggtgcggtggctcacgc

SEQ ID NO: 219718 - DNA, 80 bp, Homo sapiens; identical to SEQ ID NO: 205591
  chr19:54206968-54207048
  hypo

SEQ ID NO: 219719 - DNA, 82 bp, Homo sapiens
  chr19:54271336-54271418
  hypo
ttgtctgaagatgtatccttcgttgctgcctttttcggcttcatttccactggtttttttgttttgttttgttttgttttgt

SEQ ID NO: 219720 - DNA, 240 bp, Homo sapiens
  chr19:54271718-54271958
  hypo
aggagcaggtttagctgacaaccgtgcgatctcctcgtgggctcttccttggcggcccctatggcggagctaacctgcctcttgggcatcctggtggcggagagggcgcgtgccggctgtctgcgggccgcggctgccgagagccttggcgaagctgggctgcctggcggctgcggctcctcccgccgcccgagctgctgagacccacagcggggtcggtgggagaaccgaatggaaccc

SEQ ID NO: 219721 - DNA, 359 bp, Homo sapiens
  chr19:54313979-54314338
  hypo
gcaccagggtccctgaggatcgtggaaagaaggcttgagctcatcgaagccgtcgatgatgaaaaggaggcgctcgggaactcggatgagctcctggagaggcgcgctgggctcaggccagcagctgaagatgaggtcttgcatgctgcattccgtggcactctggttcatctccctgcagttgatgtagaagagataatcaaatctgccttggaagagcttcccgtccgcccagtccagcatcaccttgtgtgccagcatggacttgcctatccctgccgcgccttgcatgaccacggtgcgcggtggctcggggcgctcctcgtctggctcaaagagggtctctatcttgatggggc

SEQ ID NO: 219722 - DNA, 193 bp, Homo sapiens; identical to SEQ ID NO: 205592
  chr19:54372431-54372624
  hypo

SEQ ID NO: 219723 - DNA, 109 bp, Homo sapiens; identical to SEQ ID NO: 205593
  chr19:54372682-54372791
  hypo

SEQ ID NO: 219724 - DNA, 112 bp, Homo sapiens; identical to SEQ ID NO: 205594
  chr19:54372851-54372963
  hypo

SEQ ID NO: 219725 - DNA, 230 bp, Homo sapiens; identical to SEQ ID NO: 205595
  chr19:54382484-54382714
  hypo

SEQ ID NO: 219726 - DNA, 40 bp, Homo sapiens; identical to SEQ ID NO: 205596
  chr19:54382804-54382844
  hypo

SEQ ID NO: 219727 - DNA, 40 bp, Homo sapiens
  chr19:55609523-55609563
  hypo
tgctttccaggggcacgtactcccccgagctcctgacagc

SEQ ID NO: 219728 - DNA, 104 bp, Homo sapiens
  chr19:55740668-55740772
  hypo
cctgttagctgagcgagcccccaggtgacctccaagccaactgccaccccagtgaggacgctgtcctcatggcccggtccacacgctccggtttcccagcgccg

SEQ ID NO: 219729 - DNA, 92 bp, Homo sapiens
  chr19:55775276-55775368
  hypo
atctaatttgaatgtttccacgggtgtatacataagtcaaaacttctcatgtagtacactttttttttttttttttttgagatggagtctca

SEQ ID NO: 219730 - DNA, 79 bp, Homo sapiens
  chr19:55799281-55799360
  hypo
aggggacagccctcgtgttcccccccggcacccagtcccccggatgaactgacatcaggtccgtcgatgctggcgcagg

SEQ ID NO: 219731 - DNA, 176 bp, Homo sapiens
  chr19:55824302-55824478
  hypo
cagctctccagggcggagaagtcaacggctaagagaccgaagagcgcgaacagcagcatggccacgacccactcgcaggccgcagagacgctacgcagcgagcaggcgtggaggacgatcactgccccagggtcaagggccacactgctaccgtgacagacgcggagcccggcctg

SEQ ID NO: 219732 - DNA, 63 bp, Homo sapiens
  chr19:55838911-55838974
  hypo
ccaaaaagttaaatttaataaataaataaataaacactttagcacattgactttagaggtgtc

SEQ ID NO: 219733 - DNA, 93 bp, Homo sapiens
  chr19:55848034-55848127
  hypo
gcccagccattgtatgtgtttcaaaacttcgtgtcaatggcattgtagacttctgcaactacgggttgtcccgggtgatatatgggacactgg

SEQ ID NO: 219734 - DNA, 36 bp, Homo sapiens
  chr19:55858739-55858775
  hypo
ttctccccacccaagcgcctacggctggtggtcagc

SEQ ID NO: 219735 - DNA, 321 bp, Homo sapiens; identical to SEQ ID NO: 205603
  chr19:55866138-55866459
  hypo

SEQ ID NO: 219736 - DNA, 404 bp, Homo sapiens
  chr19:55872208-55872612
  hypo
ggttgatcttaccaggcaagcggatttgggtgtgagttctgtcggggcgggggtctgagtgggacctgcaggagcaataccgtgggactttggtggcatctgggctggggtctcccaccttctcccacccacccaccggcaacaagaccccacgcccacttcttttctgcaggtttcttcctgacgtcagcatgctccagctgcgaccagatgaggggcacagagtcgcccacggcctgagacttgaaactgcgcttgagcgcctggagtgggtgaggaagggacggttagacaggggcagccccttgggcccacaccaccccgccggctcaccttggccttcctctgtctctgagcagccaccgtcttatgcggaaagttgcgctcagcaaccctgactggga

SEQ ID NO: 219737 - DNA, 36 bp, Homo sapiens
  chr19:55912229-55912265
  hypo
atcagatgattcaaggggaccgaaccttggcccagt

SEQ ID NO: 219738 - DNA, 78 bp, Homo sapiens
  chr19:55912363-55912441
  hypo
agagggagaagtatagggcagtgccgctcaggccaccaggagcagctccaggtcctcgccccattttagattggaaat

SEQ ID NO: 219739 - DNA, 204 bp, Homo sapiens; identical to SEQ ID NO: 205604
  chr19:55962684-55962888
  hypo

SEQ ID NO: 219740 - DNA, 513 bp, Homo sapiens
  chr19:55986210-55986723
  hypo
tgtaatgcctctgcgtgggcaggtaaatgaggggggctgagctgagggcccctttcactactgcagagaccaaaatggcccgaggcaagggggacggaagtgggatccgcacctctgggctttcctagcctggcagccagctgggcagtgcattcccatccacgtctccaccctgcatggcagccgctttgtgtggttaatgctgacgtgaaaggaatgttgggctgagctggatgccaagggtttttacacgcacgaatgcacggagacatcagcaccaagaccctgtaaggtaggggtgggtccacaccaccgcagatcagccctgagttccagcctgcttgtggacttgggaaacggtgtgggaggctggaaaaatccactcattcaacaaacaagtaccgtctgcttctccatcagggcccatgctggttgtttggaatacctgggcagcaaagacacgaaaggtcctcgctgtcatgggacatagataaatgtcgctgagcatgtaag

SEQ ID NO: 219741 - DNA, 133 bp, Homo sapiens
  chr19:55993945-55994078
  hypo
cttcaagggctcctccgggctgcgctaccacctgcgggaccacacgggcgagcggccctaccagtgtggcgagtgcggcaaggccttcaagcgctcctccctgctggccatccaccagcgggtgcacacgggc

SEQ ID NO: 219742 - DNA, 43 bp, Homo sapiens
  chr19:55998067-55998110
  hypo
ggcccgggtcacccgcctgtctgtctctcgctggcaccgccgc

SEQ ID NO: 219743 - DNA, 38 bp, Homo sapiens
  chr19:56115323-56115361
  hypo
gggaagaacaggaggaactgcgtgagagtggggcaagg

SEQ ID NO: 219744 - DNA, 64 bp, Homo sapiens
  chr19:56163846-56163910
  hypo
tccagaagctcaagagcatgtcgcgggccttcgagcaccaccgcgtggacaggaacaccgtggc

SEQ ID NO: 219745 - DNA, 241 bp, Homo sapiens
  chr19:56163943-56164184
  hypo
ggcccccgagaagctggccgaggtgggcgagttcgacccctccaaggagcgcctgctcgagtactcccgccgctgctttctggccctggacgacgagacgctcaagaaggtgcaggcgctcaagaagagcaagctgctgctgcccatcacctaccgcttcaagcggtgatcgcaccacgcctccgcgcctccacccgggccttcctcccccgtggaccccggtggatgacctgcccctctc

SEQ ID NO: 219746 - DNA, 139 bp, Homo sapiens
  chr19:56170493-56170632
  hypo
acatagccaccagcgcgcagggtgggctgggcccgcatccttactccgcttatcccgtgcccctcctctcacccttgcccagagcgggacaaggagaaccggcatcggaagcgcagccacagccgctctcggagccggg

SEQ ID NO: 219747 - DNA, 54 bp, Homo sapiens
  chr19:56176622-56176676
  hypo
tgccctccatgcacggcagttctacgacacagggattggcgctgtcctaagtgc

SEQ ID NO: 219748 - DNA, 78 bp, Homo sapiens
  chr19:56176926-56177004
  hypo
agtgccctccatgcacggcagttctacgacacagggattggcaggttacaactgagagtccaacgctggcccactgcc

SEQ ID NO: 219749 - DNA, 213 bp, Homo sapiens
  chr19:56178938-56179151
  hypo
tggtatgtcagccctcgaagacactggatcctgcatcccacagtcagcccacagttcccagtgagatcagagcagctaatgctgcggatgctgttctgagacttcccgggcagccgcggctgctcatcgtgtcgtgccacccctgtgagggcagttgcacccctgcagtggcacctgcagttctgacagggcgtgaagggaagggactgagct

SEQ ID NO: 219750 - DNA, 197 bp, Homo sapiens
  chr19:56179451-56179648
  hypo
ctgagctttaatgggagccttgcctgggtggctgtcagagaaggggtggggtgtgttgtgactcaccagtaggtcccgagcccaggtgacctgccagcattccacagcagcaggtagcagatgtgggtgtgaactttgtgcctttggagcgttctggaggatgttctagtttgaggttcccctgaggctgggcagat

SEQ ID NO: 219751 - DNA, 64 bp, Homo sapiens
  chr19:56179687-56179751
  hypo
tgccactgcccaggaccctcactggtcagataaggctggggtggggtgggcacgtggcgacccc

SEQ ID NO: 219752 - DNA, 341 bp, Homo sapiens
  chr19:56199076-56199417
  hypo
aagtccgtcaatccctgctggttctctcgtcctttcctcactcataaccccagatggtcacccttcggccccgctctgccacccacatgctccctggagcatcccatgcacccagccctgctgggcacaccacacgggggccagcctgggggcccctggacccggtgcaggtggggccgccagacagctgcctgctgcggctccgggcaaggggagccagggcctgctcgtcagggagaggcctgggcctggggagtgggttgggtggggacacaagtacaggacacaggtgcaaggcggcgtcttggagctggagcagacagaacttgctgaccagtgca

SEQ ID NO: 219753 - DNA, 147 bp, Homo sapiens
  chr19:56199619-56199766
  hypo
gatgctgcagtggaggccggggatatctcagcagcctcctggagggtccggccctgccttcctgtgtcctctctctcccttcccctcctgctcttggaaccaagggctcctcgctagcccactccctaaccccgactaggccttgga

SEQ ID NO: 219754 - DNA, 140 bp, Homo sapiens
  chr19:56201503-56201643
  hypo
accaggctgccctgcggccacctcctgtggtcagcgctggccatcccccttcgggctgagcaccgtgagggccaccaccggccgccacagctgaatggggaggcccagaataggccaacagcctggcatggccacaggga

SEQ ID NO: 219755 - DNA, 162 bp, Homo sapiens
  chr19:56227938-56228100
  hypo
gatgagcaactgaggcgtgggaaaggaactcaggtctagctacggattccgcattctgctgcacccctcagtgagcaccgcgttgctttgataatgggtggatccaggtgcacgcttcagaaatctccgaacgtgcttcccgcagaccaacttacatcagcc

SEQ ID NO: 219756 - DNA, 252 bp, Homo sapiens
  chr19:56538661-56538913
  hypo
gaaaggctgttgttcatcattgacggtttcgatgacctgggctctgtcctcaacaatgacacaaagctctgcaaagactgggctgagaagcagcctccgttcaccctcatacgcagtctgctgaggaaggtcctgctccctgagtccttcctgatcgtcaccgtcagagacgtgggcacagagaagctcaagtcagaggtcgtgtctccccgttacctgttagttagaggaatctccggggaacaaagaatc

SEQ ID NO: 219757 - DNA, 95 bp, Homo sapiens
  chr19:56539122-56539217
  hypo
tcagctcacccctcgaggcgtggtccggcgctgtctcaatctggaggaaagagttgtcctgaagcgcttctgccgtatggctgtggagggagtgt

SEQ ID NO: 219758 - DNA, 270 bp, Homo sapiens
  chr19:56564933-56565203
  hypo
gctgaaccttctcccgctgttccactttcctcgagagaggcagactctctctattccccgcctcttgcaggttggtaaagtgtcatctcaccgccgcgtgctgtgagagtctgtcctgtgtgatctcgaggagcagacacctgaagagcctggatctcacggacaatgccctgggtgacggtggggttgctgcgctgtgcgagggactgaagcaaaagaacagtgttctggcgagactcgggtaacttcctggggcgcctctttgcgggc

SEQ ID NO: 219759 - DNA, 155 bp, Homo sapiens
  chr19:56615755-56615910
  hypo
ccgggagggtccctacgcacgccgccgacccgtgccacgcaccgggagggtccctacgcacgccgccgacccgtgccacgcaccgggagggtccctacgcacgccgacccgtgccacgcacagtgagggtctctacacacgccactgatccgtgc

SEQ ID NO: 219760 - DNA, 481 bp, Homo sapiens
  chr19:56617360-56617841
  hypo
gcgcccacggcagtcaccgcgcattccgcattcccccctccgcgcccacggcagtcaccgcgcattccgccctccgcgcccacggcagtcaccgcgcattcccccttccgcgcccacggcagtcaccgcgcattcccccgccgcgccctgcagcctctgaactcctttccgtccctctggacttgctgccgtgtgctctgcacaggagagggacagcatctgttcctgcgtgtctgactcttccacacagcatggtgctgcggcgtgccagcgtgtcgctcctctctcgggctgaaccccactccactgtacggcggccacagtggtccatgcacccacccatcgctggaggacaactgtgagctgcttccacagcgggcattgtgtatactccagcttcaacgccgcgtccatccatttatttctgtggacgttcgcgttcatctctctgggaaggagaagcctgcgcaggccccagccc

SEQ ID NO: 219761 - DNA, 228 bp, Homo sapiens
  chr19:56658488-56658716
  hypo
gcgcgctgcccgccgacacgcaggcctgggtgtgcagccggcagccgcagagcggggaggaggcggtggccctgctggaggagctctgggtgagcctggcgggactgcaagcggggaagggagaggggaaggtgccagggaagccaccaggaagcccagggaggagcaccactgaacccctgaaaaccagtgtgactcgcggtggggaggctgcggtacaggctgcgg

SEQ ID NO: 219762 - DNA, 165 bp, Homo sapiens
  chr19:56688203-56688368
  hypo
agtggggcagaaggcatgggcgctgggggaccaggtcggcctgatccgatgatgggggaaggagaggcttaattgcttgcacacgtccaaactcctcaagatgtgtacattaaatgtgcgccatttttgtatctcgatgatgcctccataaagctaaaaaataaa

SEQ ID NO: 219763 - DNA, 52 bp, Homo sapiens
  chr19:56727917-56727969
  hypo
caccgaatccctccacgtttcttttcttttttctttcttccttttttttttt

SEQ ID NO: 219764 - DNA, 216 bp, Homo sapiens
  chr19:56806989-56807205
  hypo
aacaaacagaagagatgggaatggcgtggcggcttccttcccagcctaaccttgctgcggtgcaaatcctgcaagtcactgcacgtccctccaacccacacgaagcagcctctgactgttctgcgctgttcactgtggcatgtcctgactactcagcacgacccacccagggctccgctctcctgtgctcccatcgctctgtcttctgatgttgtg

SEQ ID NO: 219765 - DNA, 107 bp, Homo sapiens
  chr19:56807587-56807694
  hypo
ccagcagggcttctcggaggaggagtggcttggggcgagcctgctggacctgctggtctggaagtgtttatcatgctgtcccttctgactcgcgttgtatgcccctg

SEQ ID NO: 219766 - DNA, 32 bp, Homo sapiens; identical to SEQ ID NO: 205607
  chr19:56915935-56915967
  hypo

SEQ ID NO: 219767 - DNA, 120 bp, Homo sapiens; identical to SEQ ID NO: 205608
  chr19:56987582-56987702
  hypo

SEQ ID NO: 219768 - DNA, 172 bp, Homo sapiens; identical to SEQ ID NO: 205609
  chr19:56988112-56988284
  hypo

SEQ ID NO: 219769 - DNA, 360 bp, Homo sapiens
  chr19:57133218-57133578
  hypo
cggggactgcggcaaggccttcagccagcgcatgaacctcactgtgcaccagcgcacgcacacgggcgagaagccgtatgtgtgcgacgtgtgtggcaaggccttccggaagacttcctctctcacccagcacgagcggatccacacgggggagaagccctacgcgtgcggggactgcggcaaggccttcagccagaacatgcacctcatcgtgcaccagcgcacgcacaccggggagaagccgtacgtgtgccccgagtgcgggcgagccttcagccagaacatgcacctgaccgagcaccagcgcacgcacaccggggagaagccgtacgcctgcaaggagtgcggcaaggccttcaa

SEQ ID NO: 219770 - DNA, 170 bp, Homo sapiens
  chr19:57134013-57134183
  hypo
cactgtgcaccagcggatccacacgggcgagaagccctaccgatgcggcgagtgcgggaagaccttcagccgcaacacgaacctgacgcgccacctgcggattcacacctgagcgcctctgtgcagggctctcactggcggtgcccaggacggacgccagatggctgcgc

SEQ ID NO: 219771 - DNA, 1448 bp, Homo sapiens
  chr19:57175022-57176470
  hypo
agcccaggtgttgagtcaggcgtgggagctgggcaaaggcgtcccgaactgtctgcatgcgtcctctggtgtcggatgagcgcggaggagaagctgaaggccttcccgcagccgctgcactcgtagggcttctccccggtgtgcacgatgtggtgctggatcaggtaggagcggttgctgaaggccttgccgcactcggggcaggtgtagggccgctcgcccgtgtgcgtgcgctggtgcagggcgagcgaggagccctggctgaaagctttgccgcactcgccgcacttgtagggccgctctccggtgtggatcttctggtgctctataagcgaggacacgtggctgaaggcggccccgcattgcaggcacctgtagggccgctcaccggtgtgcacgaggcggtgctggaggaggtgggagcggttgctgaagcgcttgccgcagtcgtggcaggggtaaggccgctctccggtgtgcgtgcgctggtgctgcgtcaggtgcgacacctgggtgaaggccttggcgcactggccgcacgcgtagggcttctcgcctgtgtggatgcgccggtgctcggccagagaggcgctctggctgaagagcgcgccgcagtcctggcacgtgtagggcttctcgcccgtgtgcacgcgccggtgctgggtcaggtgcgcgatctgcgcgaaggccttggcgcactggccgcagcggtagggcttctcctccgtgtggatgcgctggtggcggatgagcgctgaggagaagcggaaggccttggcgcacgcggagcactcgtagggcttctcaccggtgtggatgcgctggtgctctatcagggacgagcggttgcggaacgccttggcgcactgggcgcacgcgtagggccgctcgcccgtgtgcacgcgccggtgctgggtcaggtgcgtgacgcgcgtgaaggccttgccgcagtcggcgcagcggtgcggcttctcgcccgtgtgcgtgcgccagtgggacgccaggtacgagccctggctgaaggccttgccgcactcgtggcaggcgtagggcttctcgcccgtgtgcgtgcgctggtgcagggtcaggtgcacgctctggctgaaggccttgccgcactcggggcacgcaaatggcttctccccggtgtggattctctggtgtaagatgaacgctgaacagtagctgaaggccttcccgcagtccccgcatttccacggcttcttggggcctccacctctctcccgctggcggctgtcaggatgcctctccttcgggctctccccaggcgcgctgcacctccgggaactgctgtcgtcggggacactggcttgggtagcagcagggctcgatatggttcttgggattcggctgaattcatcgcgttcctgcatgctgtccccagcagggtctcccttgcaggccacggcctctggctctggacagct

SEQ ID NO: 219772 - DNA, 105 bp, Homo sapiens
  chr19:57491412-57491517
  hypo
cagacgttaagcatggagcctggagaggaggaccccaggtggaggccctggtcccgcctttacgaatgggtagaaagggcttccgtctactgagacaggggtctt

SEQ ID NO: 219773 - DNA, 76 bp, Homo sapiens
  chr19:57604471-57604547
  hypo
aaatcacacagtgtgtactccgttgagcccaggcgccttgagctcacaatcatgtttgtgaaatcgatgcatgtgg

SEQ ID NO: 219774 - DNA, 75 bp, Homo sapiens
  chr19:57604847-57604922
  hypo
aaaaagaaattgacgcatgcgattgtgtgtgactgtggggttgttccacgtcgttgggaccgtttgattcattgt

SEQ ID NO: 219775 - DNA, 90 bp, Homo sapiens
  chr19:57689867-57689957
  hypo
catggtgaggtccatcgctcttgtcatcaggataagcctgcaacctacaatgttggtgcgctgacctcgtgctgccgtcctcgtgtgact

SEQ ID NO: 219776 - DNA, 32 bp, Homo sapiens; identical to SEQ ID NO: 205627
  chr19:58039267-58039299
  hypo

SEQ ID NO: 219777 - DNA, 50 bp, Homo sapiens; identical to SEQ ID NO: 205631
  chr19:58125365-58125415
  hypo

SEQ ID NO: 219778 - DNA, 180 bp, Homo sapiens
  chr19:58304691-58304871
  hypo
acaggcatgagcccccgtgcctggccaaaactgcacatatttaaactgtaaagtgtgataagttttgacattaataagcctgtaatatgatccatcaccttcatatttacctggagtctggtaacgtctttacctctgccttccagatgaccattgataactttgctttataatagatta

SEQ ID NO: 219779 - DNA, 39 bp, Homo sapiens
  chr19:58316856-58316895
  hypo
atttttttttttttttgagacggagtctcgctctgtcgc

SEQ ID NO: 219780 - DNA, 38 bp, Homo sapiens
  chr19:58317135-58317173
  hypo
caggcgtgagccaccacgccctgccctcaatttctttt

SEQ ID NO: 219781 - DNA, 33 bp, Homo sapiens
  chr19:58472252-58472285
  hypo
aaaccaagccacaggccaggcgcggtggctcac

SEQ ID NO: 219782 - DNA, 250 bp, Homo sapiens
  chr19:58551437-58551687
  hypo
ctgaaccctgcttcagcagtcgtcctctgtgcactctgtgcacacagccccggggggcttggggagcagagggctcacagtgctcgggcctccctagttagtcagtgctgcagtgtgtgtcctcgtgggcttctggaggcgcacaggggtgtggagtatgagtgaagagggtacttgtcttcagcggccctcggtgtcaccacaggttcctgcccagcagccacatggagggacagaatgacagccctgc

SEQ ID NO: 219783 - DNA, 62 bp, Homo sapiens
  chr19:58551717-58551779
  hypo
gcagggatgttcggggaaagtctgccctccccagaaggcctggagaattgggggctctggga

SEQ ID NO: 219784 - DNA, 343 bp, Homo sapiens
  chr19:58556344-58556687
  hypo
aacaagaagctggaggaaggcggccctgtgtacagcgcccccgcagagatggtggtgaagtcccgggggcagagagggtgctgggcgagctgaggcactactaccatggcttccgcctgctacggatccacaccaagatcgcagcacgcatgctctggcgcatcctcaactgccacaccctgacccgccaggcgcgcaggcagttgctccggttctgtgccgacctcttccgcctggtgccgttcctcctgttcgtggtggtgccgttcgtggagtttctgctgcctgttgctgtgaaactcttccccaacatgttgccatccacatccgagactcagtccat

SEQ ID NO: 219785 - DNA, 318 bp, Homo sapiens
  chr19:58557757-58558075
  hypo
aaaagggtgcagcagataatcgggcagatcaacggcttgatctcgcagctggagatggaccagtgggccagcaagctggccccggccaagggcgtgcccatgggggagaacgtcatcagtgttgccgagctcatcaacgccatgaagcaagtcaagcacattcccaaaagcaagctcaccagcctggccgcagcactgaatgaaaataaggatggcaaggtcaacgtcgaccacctcatcaaggtgattgagctggtggacaaagaagatgttcacgtctccaccagtcaggtggccgagattgtagcaacactggaa

SEQ ID NO: 219786 - DNA, 540 bp, Homo sapiens
  chr19:58564632-58565172
  hypo
cttgtatcttaaaggacagaacggaggacacaggggccgtattgagcagaggaagggcctggacttggctcagtcactggggtcctccgtgcccctggggagcacagggagatgccaaggccatccactcactacaggtgacccatctccctcgccctccacagggtcccgggcccgcttgcctctgaagccgagtatctgggacgagcctgaggaccttctcgcagggccctcctcagacctgcgggcagaagggactgtgatctcgagccccaagggtccaagtgctcagagaatcagtccccgaaggagaaacaggaacactgaccagagcggccgccaccagccatccctcaagcacaccaaaggtggtacccaagaggctgttgcaggcatctcggtagtgccgcgtgggccccgaggtgggcggcccttccagtgtgccgactgtgggatggtcttcacctgggtcacccacttcatcgagcaccagaagacccatcgcgaggaagggccctttccgtgccccgagtgtggcaa

SEQ ID NO: 219787 - DNA, 35 bp, Homo sapiens
  chr19:58593733-58593768
  hypo
gagccaccgcgcccggccaatctgtgcactatttt

SEQ ID NO: 219788 - DNA, 273 bp, Homo sapiens
  chr19:58598368-58598641
  hypo
tcagcttctgaaacattagtcgtggctgagacctcccacctgccctagagaagggaggacccgccgcagccccacagccacaggagcaggctaggagccagccctggccagggactctaacccaggtgcactgcaggaggcagcccccttcgcaccacaaagattccgccctcacgctcccaccagggtgggttctgggcctcagcgctgtggacgtttggggccacagccctctgctgagcactggtgatggggagggggatgcctctaagc

SEQ ID NO: 219789 - DNA, 188 bp, Homo sapiens; identical to SEQ ID NO: 205645
  chr19:58665953-58666141
  hypo

SEQ ID NO: 219790 - DNA, 224 bp, Homo sapiens; identical to SEQ ID NO: 205646
  chr19:58666733-58666957
  hypo

SEQ ID NO: 219791 - DNA, 816 bp, Homo sapiens
  chr19:58830534-58831350
  hypo
ccacaaggagtccacgctggggagggtgtactgccatgtagtgggtgggaagatacctttggcaagaacacgtgccttgtgagctatcagcagattcccaacaaaaggagaccctgtacgtgcgaagagtgtggcaaggcctttggacagagaagtcaccttgttcagcacaccagtgagaagctgtatgcatgccaggaatgtgggtgtaccttcagcaacaattcatctctagtcaagcactggcacgtccacacaggcgagaagccctacatgtgtggccactgtggcaagtgcttccgagagagctcatcccttgccaagcaccagcgtgtgcacacaggtgagaagccatacgtgtgtggtgagtgtggacgcaccttcagcgagagcacacaccttgtacagcactggtgattccacaccggggaaaagccatttgcctgccaagagcagcaaagcctttgctgacttctcggccctccttgcatgccacggaacctacacgggtgagaggccctacgagtgccgggtatgctgcaaggcattcagccccagcttgtccctggctgagcacatacgctgccacacgggagagaagctgtatgcgtgtcaggaatgtgggaaagctttcagccacagctcatccctcagcaagcaccagcaggtacacacaggtgagtggccctatgtgtgtgcagaatgtggaaaggccttcagccaggggtcctacctgacccagcacctcaagatccacagcggtgagaagccgtacatacgtggtgagtaaaggaagccattcggtgactcctcagc

SEQ ID NO: 219792 - DNA, 197 bp, Homo sapiens; identical to SEQ ID NO: 205648
  chr19:58858560-58858757
  hypo

SEQ ID NO: 219793 - DNA, 157 bp, Homo sapiens
  chr19:58872591-58872748
  hypo
agttgacaaaaagaggttaacggggagcagaggtaggagggaagggtatgcggctctgtaagggcaacacggggatccttcgtgatggaaatattctgcatctcagttgtgatattgtactctagtttttctttctcttctctttttttgagacaga

SEQ ID NO: 219794 - DNA, 316 bp, Homo sapiens; identical to SEQ ID NO: 205649
  chr19:58874184-58874500
  hypo

SEQ ID NO: 219795 - DNA, 118 bp, Homo sapiens
  chr19:58878556-58878674
  hypo
gaaccctttctgccgcgactaccgagctgccagggccgggacaggcagaagcctgccccgaggtctcacctctggagggttacgagctgtgccaggccggctacggtagagggtgtgc

SEQ ID NO: 219796 - DNA, 32 bp, Homo sapiens
  chr19:58915038-58915070
  hypo
tacaatgttaacaaatgggccgggtgcggtag

SEQ ID NO: 219797 - DNA, 63 bp, Homo sapiens
  chr19:58964117-58964180
  hypo
agcagtcaggcgtgcggagttacagcttgagggtaaagaaaaccggctggggtgcctgaggct

SEQ ID NO: 219798 - DNA, 105 bp, Homo sapiens
  chr20:276872-276977
  hypo
actggaaagtgcaaacggcccaagtcagtggctcccctgagaccaataccagcagttgggatgaagggaatctgcctgttaacaaggtttcctaggatctgatgc

SEQ ID NO: 219799 - DNA, 211 bp, Homo sapiens
  chr20:371970-372181
  hypo
atgcgcggctgcccccgcacaagcatgtggctcggcccactgaggtcctggctggtacccagctcctctacgcctttttcactcggacccatggggacatgcacagcctggtgcgaagccgccaccgtatccctgagcctgaggctgccgtgctcttccgccagatggccaccgccctggcgcactgtcaccagcacggtctggtcctgcg

SEQ ID NO: 219800 - DNA, 56 bp, Homo sapiens
  chr20:400960-401016
  hypo
cacagacattgatccccgagtgctccccattctgatctcacccctggccccacctg

SEQ ID NO: 219801 - DNA, 116 bp, Homo sapiens
  chr20:413054-413170
  hypo
catgctgcagtggtgcggaggagcagggagctgtgtagggccaaccccggttcctgcctcagctccacccgccttgcacctgcaagtgaaaggtcttaagacgagcaggcccaggg

SEQ ID NO: 219802 - DNA, 43 bp, Homo sapiens
  chr20:417445-417488
  hypo
ctttttttggttttaaagtgcgtagtggtggctgggcgtggtg

SEQ ID NO: 219803 - DNA, 149 bp, Homo sapiens
  chr20:488507-488656
  hypo
agaataccgtcatgcgttatttaatgacattctgagaaatgtgttaaacatcagagtgtttacacaaacctacatggtatggcatattacatacctagggtatggcctacggctcctaggatacaaatgtgtaccgtaataaatacttt

SEQ ID NO: 219804 - DNA, 68 bp, Homo sapiens
  chr20:688357-688425
  hypo
ggcattgccgaacacgcgtcctttttttcttttcttctttcattattatgatcgggcccataaatctt

SEQ ID NO: 219805 - DNA, 59 bp, Homo sapiens; identical to SEQ ID NO: 205656
  chr20:708541-708600
  hypo

SEQ ID NO: 219806 - DNA, 51 bp, Homo sapiens; identical to SEQ ID NO: 205657
  chr20:708851-708902
  hypo

SEQ ID NO: 219807 - DNA, 474 bp, Homo sapiens; identical to SEQ ID NO: 56810
  chr20:708944-709418
  hypo

SEQ ID NO: 219808 - DNA, 213 bp, Homo sapiens
  chr20:926439-926652
  hypo
caaagaattaggttgtgttccgtccattcactcacggctctgctcccacgcatggctgcgctatgcacactgccctgcagcttcctttgtctgctgcacaatgggctctggacggagccctgttggcgcaatgagtgagccctacatcaagcttcgtcatcgctgcatcgctttgcaccgtgtggctgggccgccatcagtacagccaactgc

SEQ ID NO: 219809 - DNA, 36 bp, Homo sapiens
  chr20:1276610-1276646
  hypo
gtagagtagaagactcggtgccggcagtcaggaggc

SEQ ID NO: 219810 - DNA, 192 bp, Homo sapiens
  chr20:1435437-1435629
  hypo
caaatcttggtttcacgttaaagggtgagataaactacactcgtgttccgcacagaagaccaagtaagcaaatgaaaaaaagaaaaaaatcagtcactaccggggtgaagaaggtggcattcccagttctggaatctcagtcctgtgggcacagacaatgacccttatactcactctcggtttactggtctc

SEQ ID NO: 219811 - DNA, 487 bp, Homo sapiens; identical to SEQ ID NO: 205664
  chr20:2188036-2188523
  hypo

SEQ ID NO: 219812 - DNA, 304 bp, Homo sapiens
  chr20:2308758-2309062
  hypo
cctccaggggtgttccagtgcggccccgcttcggtcattggtgttcgagagggtgatgtgcagctgaacttcgacatgccctttatcttcgcggaggttaatgccgaccgcatcacctggctgtacgacaacaccactggcaaacagtggaagaattccgtgaacagtcacaccattggcaggtacatcagcaccaaggcggtgggcagcaatgctcgcatggacgtcacggacaagtacaagtacccagaaggtaggagggacgctggcggggcagtgccgcgagaggttctattgtgggagg

SEQ ID NO: 219813 - DNA, 218 bp, Homo sapiens; identical to SEQ ID NO: 205665
  chr20:2444432-2444650
  hypo

SEQ ID NO: 219814 - DNA, 139 bp, Homo sapiens
  chr20:2820587-2820726
  hypo
agaggccactaagcagcgcgatggtggggactctgggcaggtcagcctcagggctagcccctccggggctgctcaatgctaaagggaggaggtgacggcagcagagccatggtggcgccagccttggtcacacttggta

SEQ ID NO: 219815 - DNA, 178 bp, Homo sapiens
  chr20:2939675-2939853
  hypo
ttgtatatggggggtcgggaagtcacaggagtttgcctcaaagtctttctcggagacggatgaggttttcactgtgattttcctggtcgtggtctatggatatagtacctgttagtgacatggatcttcttaacttctgatgtgtcttttcctccctagtgtacgcataccaattctc

SEQ ID NO: 219816 - DNA, 260 bp, Homo sapiens; identical to SEQ ID NO: 205673
  chr20:3154656-3154916
  hypo

SEQ ID NO: 219817 - DNA, 265 bp, Homo sapiens
  chr20:3202153-3202418
  hypo
tttctttctgtctatctttcaaagtagcctcattgttcttcagtgatgtcccaatttgtcccgggtgtggctggcgagggcgcgtggccccggaggtgctggtggtcctgtgggtccatgcctcctccctgtgtgtgagggaagagctgccccgctctgctttttattgtattcagcaaacatttgcaggtgctgtaggggccttgcaactacattttgcgtaagttgggtcaaatcaaattcacagactcaccaaactcatact

SEQ ID NO: 219818 - DNA, 41 bp, Homo sapiens
  chr20:3208779-3208820
  hypo
gcacccaccccaacccgcccattctccgcccctaggtggga

SEQ ID NO: 219819 - DNA, 539 bp, Homo sapiens; identical to SEQ ID NO: 205674
  chr20:3220010-3220549
  hypo

SEQ ID NO: 219820 - DNA, 145 bp, Homo sapiens; identical to SEQ ID NO: 205675
  chr20:3229108-3229253
  hypo

SEQ ID NO: 219821 - DNA, 154 bp, Homo sapiens; identical to SEQ ID NO: 205676
  chr20:3229326-3229480
  hypo

SEQ ID NO: 219822 - DNA, 31 bp, Homo sapiens; identical to SEQ ID NO: 205677
  chr20:3229526-3229557
  hypo

SEQ ID NO: 219823 - DNA, 158 bp, Homo sapiens; identical to SEQ ID NO: 205678
  chr20:3229659-3229817
  hypo

SEQ ID NO: 219824 - DNA, 436 bp, Homo sapiens; identical to SEQ ID NO: 205679
  chr20:3451349-3451785
  hypo

SEQ ID NO: 219825 - DNA, 897 bp, Homo sapiens; identical to SEQ ID NO: 205683
  chr20:4129347-4130244
  hypo

SEQ ID NO: 219826 - DNA, 413 bp, Homo sapiens; identical to SEQ ID NO: 205684
  chr20:4804008-4804421
  hypo

SEQ ID NO: 219827 - DNA, 105 bp, Homo sapiens
  chr20:4966924-4967029
  hypo
tagagagacccctttcgccacaaaaagaaaaaacaaaggttatgtggtgtggtatgaaacctttttatttttttgcccaagctggagtgcagtggcacgatctcg

SEQ ID NO: 219828 - DNA, 53 bp, Homo sapiens
  chr20:5072894-5072947
  hypo
aagatcatcttgagtcgatgttcagaatgaggagtcctcgatcctgggccagc

SEQ ID NO: 219829 - DNA, 46 bp, Homo sapiens
  chr20:5178251-5178297
  hypo
ccttgaagcagttctcggtgtgtagagtccacgtgacagtccccac

SEQ ID NO: 219830 - DNA, 84 bp, Homo sapiens; identical to SEQ ID NO: 205687
  chr20:5297756-5297840
  hypo

SEQ ID NO: 219831 - DNA, 37 bp, Homo sapiens
  chr20:5610249-5610286
  hypo
ggattacaggcgtgagccaccacgcctggcccatctt

SEQ ID NO: 219832 - DNA, 174 bp, Homo sapiens
  chr20:5610576-5610750
  hypo
ttagcaatacagttcggaagatagctcaaatgcttggtacacgtatctcctctcaacttcaagttcactgtcctcagcctggggacttgaaattggccatcatgggaatcagaagccagcagaaaacaccattcatcagggctatcctccttggagagccggttgttcgatatt

SEQ ID NO: 219833 - DNA, 180 bp, Homo sapiens
  chr20:5734498-5734678
  hypo
caaatgggggagatccgttcggaacccccctccctctgcatgggagagcttttctcttttgcctattagactttcctctcttaaacacactccttgtgtgttagcgtctttgatttccttgtcatgagacagtgaaccttgggtattaccgcagacaaacgacgccgcttcagaagtgct

SEQ ID NO: 219834 - DNA, 148 bp, Homo sapiens
  chr20:5762408-5762556
  hypo
gctaccacacccggccaatcttacactacttctttccttccagctccaatcaaaaagctcctctgccttgttttcgggactctgtgtaatctgctgcctggaatatttgttcaaaatatttaataaccaatacagcagtattgcaata

SEQ ID NO: 219835 - DNA, 92 bp, Homo sapiens
  chr20:5765408-5765500
  hypo
aaaagctcaagaatgttatttgccacctgtgacatctctcgttgttcctcactcttaagtttcaagggcacgtgctatgggggaagaggctt

SEQ ID NO: 219836 - DNA, 35 bp, Homo sapiens
  chr20:5801860-5801895
  hypo
ttaaacttattaaggctgggcgtggtggtggctca

SEQ ID NO: 219837 - DNA, 120 bp, Homo sapiens
  chr20:5812853-5812973
  hypo
tgggattacaagcatgagcctctgcgctgggcctctcttcatttctagagaataatggaagtgaatccaggagacagacttctccacattgttaaaagctcctcgggcagagtggaactg

SEQ ID NO: 219838 - DNA, 327 bp, Homo sapiens; identical to SEQ ID NO: 205689
  chr20:5892269-5892596
  hypo

SEQ ID NO: 219839 - DNA, 154 bp, Homo sapiens
  chr20:6021570-6021724
  hypo
gaaaccctaggagcggatggggtcgtttttgaccgtctgtgtcttcctttttgcgctcagatccagttcgatgagacgcgttatcccagaagctgggctaactgacggtctggagccccagcgggtaatcatcaaaggccgggtttttgtaggc

SEQ ID NO: 219840 - DNA, 89 bp, Homo sapiens
  chr20:6022708-6022797
  hypo
ggctgcgctgggcgcgacggtggtaccctgtgcgtaggtggagcggttgaagcaaggtgggtgtgaagccccgagagtggtgctttggt

SEQ ID NO: 219841 - DNA, 120 bp, Homo sapiens
  chr20:6302507-6302627
  hypo
aataacaatttcctggacacatatcagccaaactaaagagtaacaaccaaagtaaacttgtaggtgtgagactgaagttttgttgttgctttttttttttttttgagacggagtcttgct

SEQ ID NO: 219842 - DNA, 210 bp, Homo sapiens; identical to SEQ ID NO: 205690
  chr20:6748553-6748763
  hypo

SEQ ID NO: 219843 - DNA, 360 bp, Homo sapiens; identical to SEQ ID NO: 205691
  chr20:6749273-6749633
  hypo

SEQ ID NO: 219844 - DNA, 35 bp, Homo sapiens
  chr20:6861141-6861176
  hypo
agaatgcatcttaggccaggcgcggtggctcacgc

SEQ ID NO: 219845 - DNA, 167 bp, Homo sapiens
  chr20:10515152-10515319
  hypo
gccttagaaggtttccgtaaagaaggagcctcgagtcaagcctgagcctaggggaaggtggggtagaagaaggaatggggagctccttccagcagagccaaggtcctttctgctttgtcctgctccgtgttcagctcctggcgcagggctggcgtctggggtatgct

SEQ ID NO: 219846 - DNA, 42 bp, Homo sapiens
  chr20:10571270-10571312
  hypo
agtgctagaattacaggcatgagccaccgcacccggctgagt

SEQ ID NO: 219847 - DNA, 380 bp, Homo sapiens; identical to SEQ ID NO: 205704
  chr20:10653644-10654024
  hypo

SEQ ID NO: 219848 - DNA, 1019 bp, Homo sapiens; identical to SEQ ID NO: 205705
  chr20:10654669-10655688
  hypo

SEQ ID NO: 219849 - DNA, 181 bp, Homo sapiens
  chr20:11589406-11589587
  hypo
gggtgactcctccactgtttcgtcctccttcaggctccaggaagccctccgtgtgcagcttactctggtacacaaagacgtccactgggggatcgagcgcgaccctggctagggcggtcatggacaggaagacaaaccccaagcccacgttgaaccgcttacagatgcccgcatcgtgcag

SEQ ID NO: 219850 - DNA, 67 bp, Homo sapiens
  chr20:11589753-11589820
  hypo
gagaagtccgaaggcttcaaccttcttcactacctatgttttcaacggctgtgtaaaagaatgcata

SEQ ID NO: 219851 - DNA, 1239 bp, Homo sapiens; identical to SEQ ID NO: 205706
  chr20:11871115-11872354
  hypo

SEQ ID NO: 219852 - DNA, 153 bp, Homo sapiens
  chr20:13417379-13417532
  hypo
ggataatccctttccagcaacgcagccaactcaagactaacgacctacttgagagacacccccaagaaaacgtgtcctcgacttagggtaagagcttcaagatgacaagtatgactcatacactaaaggtttttagttcggcttagcgtttaa

SEQ ID NO: 219853 - DNA, 58 bp, Homo sapiens
  chr20:14812474-14812532
  hypo
cacacgttgtcctgccgagttgttgtgagtttgtcatcgttttcgtttgttgttgctg

SEQ ID NO: 219854 - DNA, 324 bp, Homo sapiens
  chr20:16510961-16511285
  hypo
gactacaacacaaacacacccaagtgatggtctgtcacttcccaggcgggctttcaagactgtgacttctgtcttgctggctctctcttctgccctctctgtttgagccctggcagtgtgaaaagtcagggacgacagagtgaggacccctgtggacagacccagccagcaggaaacaggggcccgctagcagcacgccagacagcctggcagggcacgctccccaagcccgcaccgggacatgatgatgagagatgactgggaagccgtctggcaccctgactgcagcgctaggggagagccggagtcagaggaccctgctca

SEQ ID NO: 219855 - DNA, 208 bp, Homo sapiens
  chr20:16543130-16543338
  hypo
aatgtgagacatgcaacaaacgccgtgactacggatcccaatccctcacgagcaaccacagaaagtaagaggcatgtgtggagggtgagtggagatacttataaatgtaacaaatactttctgagtgctcaggtcttcccggcacagttccaggccccggggaaacagccatgaacaagatctacacggtgactggctctcagagagt

SEQ ID NO: 219856 - DNA, 35 bp, Homo sapiens
  chr20:16555178-16555213
  hypo
gccattccaggaagccaagctataatgggagacgc

SEQ ID NO: 219857 - DNA, 266 bp, Homo sapiens
  chr20:17481118-17481384
  hypo
catgtctgtgaggacgccggcgtaaacagactgtgctgccagttgcataaaaaaaagtctagcacatgcaattatgtacaacacataatacttgatgatgataataaacaactatgttactggtttatgtatttacgatactacactttttctcattattttggcgtgtagtcccacttttaacgagatgtttctggtaagacagtgacgccgcattaccccagccgcagcctcctacagctcacgtttcccacagctcttgattg

SEQ ID NO: 219858 - DNA, 269 bp, Homo sapiens; identical to SEQ ID NO: 205714
  chr20:17549782-17550051
  hypo

SEQ ID NO: 219859 - DNA, 187 bp, Homo sapiens; identical to SEQ ID NO: 205715
  chr20:17661564-17661751
  hypo

SEQ ID NO: 219860 - DNA, 31 bp, Homo sapiens
  chr20:17971881-17971912
  hypo
tgtaagtgcataaaagaaagcgtcctcggct

SEQ ID NO: 219861 - DNA, 63 bp, Homo sapiens; identical to SEQ ID NO: 205720
  chr20:18039584-18039647
  hypo

SEQ ID NO: 219862 - DNA, 91 bp, Homo sapiens; identical to SEQ ID NO: 205721
  chr20:18039936-18040027
  hypo

SEQ ID NO: 219863 - DNA, 72 bp, Homo sapiens
  chr20:18724827-18724899
  hypo
ccccgaaaagaagaccgcagtgccagcagcggggctgagggcgacgtgtcctctgaacgggagccgtagctc

SEQ ID NO: 219864 - DNA, 180 bp, Homo sapiens; identical to SEQ ID NO: 205724
  chr20:19738432-19738612
  hypo

SEQ ID NO: 219865 - DNA, 172 bp, Homo sapiens
  chr20:20372436-20372608
  hypo
ggtggggaggcctcccgcacagggcccgcctttcccaggaccagcccacccatcataagccctgagttaggggctgcgtctctcgtgctgctgtcccttcccactgcagggcgttgctctgtacctggccgctgtgagaacaaagcctgcgcagtggcgatggactctggta

SEQ ID NO: 219866 - DNA, 232 bp, Homo sapiens
  chr20:20376599-20376831
  hypo
aactgctcgccttccgcctgtgagcctgggaggtggtgcagcccaggccacacgggacagggttttcagacagccttgccaaggcggctgccatccatcagagcgctctgggcagggcctggaccccagacccaggacagaaaggcaggctggggaggtcacacctgccatggccagcctatcctctgggtcctagaccgcagcccattcctaggtctccaccctctgcgct

SEQ ID NO: 219867 - DNA, 218 bp, Homo sapiens
  chr20:20376973-20377191
  hypo
cggcccatctcaagaccctgctccttcaggcctgggcaacaaaaaagggggcggccccagcgcccgctggctccctgcagccccacacacaaaagggcaggcgacaaagacattttccgggatggcaggtgttggtgtcggattcctccccgagtgcacgggcagaagaaaggcaaggctgggcttccccgggcagcgcagacatgcaggggcaggag

SEQ ID NO: 219868 - DNA, 222 bp, Homo sapiens
  chr20:20392201-20392423
  hypo
gtaatgatggaccccgggacactgtccttccatgtctcctgcattaatccctgaccttcgaatctcggcagcataatccccatttagcattagtagcaacggcttccactgtgaggaactcttttttgataagtaagcactgattcgggcatcgcttttaaacagcatattcccagctcagcaagaaacccacactcctgaatgaaccggagcacattactg

SEQ ID NO: 219869 - DNA, 119 bp, Homo sapiens
  chr20:20392662-20392781
  hypo
acactcacccgttccgctgagggagtagctgggagagggagaaaagacttgggctgcgaaatcctcgaatgtcattacttcgcggtggttctgaattattgcttcgagatacagagctc

SEQ ID NO: 219870 - DNA, 269 bp, Homo sapiens
  chr20:20421239-20421508
  hypo
aaagactagggaagaaagcccgcgctctggttggcagcagtcttggattctcgcccccggccatactgtgcaatcacgctgtttattccactgtaacaatcagacagcgagagcagagcacctggtactccccggcccgggccttccttggcagctgacgggcaacctcactgccaggtggtcgcgcttcaattacattagctagccattctagggttaacgaggacccactttcttcagaatgccccgggaaaatcagttattcataa

SEQ ID NO: 219871 - DNA, 283 bp, Homo sapiens
  chr20:20435758-20436041
  hypo
tgtccctaggaagggtgttacgaatctaagccccggagctgctgcctccacagtcccgtgtaatgccacctaagtgctctgcctcgcatgacttgctgcaggctgccacggattagagctatcgatcgctgcctgcagaagggtctcgctgtgcgaaaggaaggtgagcgctagagacagacagctcaagtatcgatctgctctggcagaaggccgtggttccagatgcagagtggcactccttcacatcacccatgagttactataacgtgcacggaaacac

SEQ ID NO: 219872 - DNA, 32 bp, Homo sapiens
  chr20:21115585-21115617
  hypo
ccatgaacccccatgcccgacccatctttcag

SEQ ID NO: 219873 - DNA, 154 bp, Homo sapiens
  chr20:21371533-21371687
  hypo
gagaaactgatgacggcagatttcctctgcagaactggcaggtgttccctcgctgagccggcttcaggccctgctccgtgacctcacccttgcttcttcctctccatccttagtcttcatctctttccaacttggttccgcgtttgaatcttcc

SEQ ID NO: 219874 - DNA, 192 bp, Homo sapiens
  chr20:21555354-21555546
  hypo
cccacgatcctctcgcgtccaatgtgcgtgacctctccgtccgatagcacaagcaattctcaaacagccacttgagctggacgcccccggacatgccctgcacttttccagctttacatcctggcctgtgttgccccctccatgtgtgatgccctccttgagtccggcatgggtgcacggctgcccgctcca

SEQ ID NO: 219875 - DNA, 221 bp, Homo sapiens; identical to SEQ ID NO: 205736
  chr20:21686742-21686963
  hypo

SEQ ID NO: 219876 - DNA, 250 bp, Homo sapiens; identical to SEQ ID NO: 205742
  chr20:22563313-22563563
  hypo

SEQ ID NO: 219877 - DNA, 34 bp, Homo sapiens; identical to SEQ ID NO: 205743
  chr20:22563602-22563636
  hypo

SEQ ID NO: 219878 - DNA, 101 bp, Homo sapiens; identical to SEQ ID NO: 205744
  chr20:22563663-22563764
  hypo

SEQ ID NO: 219879 - DNA, 360 bp, Homo sapiens; identical to SEQ ID NO: 205745
  chr20:22563794-22564154
  hypo

SEQ ID NO: 219880 - DNA, 848 bp, Homo sapiens; identical to SEQ ID NO: 205747
  chr20:22564265-22565113
  hypo

SEQ ID NO: 219881 - DNA, 79 bp, Homo sapiens
  chr20:23092302-23092381
  hypo
ctctgagctcggggcgaaccaaagatgggagaggagcatcagtgcccccctccccatcaccacattagaatcctgcggg

SEQ ID NO: 219882 - DNA, 120 bp, Homo sapiens
  chr20:23092426-23092546
  hypo
cataaggaccctgagacccagggccactagggtgaggcgacagggcagggcctgatgcacctgtcgaaatccacttctagctcccaccctgcccccagagacatgcgccccatgggccgg

SEQ ID NO: 219883 - DNA, 79 bp, Homo sapiens
  chr20:23138537-23138616
  hypo
gccgatttcactgtgctctgattctctaaatactgctactcacgtagggcaattctgttcaacacggtgagctgggccg

SEQ ID NO: 219884 - DNA, 258 bp, Homo sapiens; identical to SEQ ID NO: 205751
  chr20:23617972-23618230
  hypo

SEQ ID NO: 219885 - DNA, 112 bp, Homo sapiens
  chr20:23969320-23969432
  hypo
gtttaaaaggcgcgttgcccggcagcagaagaaactgctggcttcgcctttggccgagttggcggctggacgaggacgcagagcccagctctcgagagttcaagcaaccgac

SEQ ID NO: 219886 - DNA, 38 bp, Homo sapiens
  chr20:24524102-24524140
  hypo
gacagcctcgagtacccggatgggaagttcattgacct

SEQ ID NO: 219887 - DNA, 323 bp, Homo sapiens
  chr20:24944573-24944896
  hypo
ttctccggaaggcaccgctgtcgctgagttctaggacgaggctgtaccgcggcacaaacttcatcaccgtctcttgactaaagagctagagggaagcacagtgcagggaaagttcaccagctggccaagaacactgtgcgcagatcaaccgtgccgcccccaccatccaggaacggtctgactccttcccatgacagggcagccccacagggcagtgccccacaggacagctaatccagctcccactcccagcccaggggccccaaagcaggccccaccccacccctgtccctgtgaagatcaggccaaagaggctccccagc

SEQ ID NO: 219888 - DNA, 173 bp, Homo sapiens
  chr20:24947029-24947202
  hypo
gacatgaaagaaccacgtccaggtggagacacctggcattccctgcctgaatcaggtggccaaagttgccaccaccccaacagagcaaactggtatcgcgccctcatgacagccgcgccaagatgagcacagcttcactgctgcgccactgctgccaacgatgcgagagcaga

SEQ ID NO: 219889 - DNA, 37 bp, Homo sapiens
  chr20:24950217-24950254
  hypo
cagctggactccattcgggaaccgcagctggtccaat

SEQ ID NO: 219890 - DNA, 196 bp, Homo sapiens
  chr20:25040600-25040796
  hypo
ctcttccttcccacgcctgcaccgcctgcacatgatggtgtgctgctctgtccagaggaggaccctggctggctggattgctttggccagtacagcctggtgggagggatgctgtgacagttccatgtggaggtcctgagagaccccgtagccccagcttatcctcccatggaacccagctgcgagctgtgaggaa

SEQ ID NO: 219891 - DNA, 334 bp, Homo sapiens
  chr20:25187779-25188113
  hypo
gaaggtggcataccccctggggctgtgtgtgggcgtgttcatctatgttgcctacatcaagtggcaccgggccaccgccacccaggccttcttcagcatcaccagggcagccccgggggcccggtggggtcagcaggcccacagccccctggggacagctgcagacgggcacgaggtcttctacgggatcatgtttgatgcaggaagcactggcacccgagtacacgtcttccagttcacccggccccccagaggtacccgcctctcatggcagggctctcgggatctcctcccctgtgctacagtgttggccgggtcccctgccacagactca

SEQ ID NO: 219892 - DNA, 87 bp, Homo sapiens
  chr20:25223054-25223141
  hypo
tctgtgttcatttgcaaacacgaaattgaccagcacagatctgccagtggcgttgctgggatcccagagagattttccctccgcacc

SEQ ID NO: 219893 - DNA, 33 bp, Homo sapiens
  chr20:25278858-25278891
  hypo
actaggtgtggaacccggggtcatgtgtgcctg

SEQ ID NO: 219894 - DNA, 33 bp, Homo sapiens
  chr20:25284746-25284779
  hypo
atgggctgccaggaccggcggagcctgggctct

SEQ ID NO: 219895 - DNA, 242 bp, Homo sapiens
  chr20:25320327-25320569
  hypo
aacctcgtatcaggaaagagcggcctcctcaggcctcccgatccgtcttctgtgagacaactgcaggcaggcgtaggttacttattagctcctggtaggaagcacgtagaccaaggacatcaacagaacctgcctgaccaggtcctcagagagcaggaggctaagaactggcacggtgtgtccttgcatttacgcgtgggcgagcccctctgtacccacccaacagaggacccttttccagg

SEQ ID NO: 219896 - DNA, 88 bp, Homo sapiens
  chr20:25344156-25344244
  hypo
tttacttttcattataatgttggttgatgagatggatgcctttaatcaatatttaattttaagggggcaggcacggtggctcattcct

SEQ ID NO: 219897 - DNA, 38 bp, Homo sapiens
  chr20:25605596-25605634
  hypo
tttatttttatttttattttcgagatggagtcttgctc

SEQ ID NO: 219898 - DNA, 196 bp, Homo sapiens
  chr20:25971830-25972026
  hypo
ctagtacccttcccacttgccgcctcggactgtaccgccaccccagtcgccgcagtcagctgtgttgcagccattttttaaagggtccgcagcctgactctccggagcaagggcggagtcggcctctccagtgagcatgctcgacgactgagccaccactttggtaacagtgtccgccactgttgcccagaaatag

SEQ ID NO: 219899 - DNA, 180 bp, Homo sapiens
  chr20:30134131-30134311
  hypo
cccggccgtagcactctctcttactggtgcctagcacatgctgccttgtccctaatcggcagcaattttatgtgattgctttgtgcatctctaaggaacctctgttaaacaattgttgattttttttttttaaagactgagcttgggccaggtgagatggctcacgcctcccagcacttt

SEQ ID NO: 219900 - DNA, 154 bp, Homo sapiens
  chr20:30139496-30139650
  hypo
atgccatggaagcactggctcgtggcgacaggcagtcgttgggggagactgggggagattccactcaggggatcaagaaacagctgtctttctcgtgactcactctaccactgcggacagcctttctccctgcgttgaggagagcttcatggcc

SEQ ID NO: 219901 - DNA, 1022 bp, Homo sapiens; identical to SEQ ID NO: 205755
  chr20:30192834-30193856
  hypo

SEQ ID NO: 219902 - DNA, 203 bp, Homo sapiens; identical to SEQ ID NO: 205756
  chr20:30193992-30194195
  hypo

SEQ ID NO: 219903 - DNA, 35 bp, Homo sapiens
  chr20:30334935-30334970
  hypo
tgttgtttgagaaggagtctcgctctgtcccaggc

SEQ ID NO: 219904 - DNA, 41 bp, Homo sapiens
  chr20:30468561-30468602
  hypo
ttacaggcgtgagccactgcgcccagcctccatcttacttc

SEQ ID NO: 219905 - DNA, 495 bp, Homo sapiens; identical to SEQ ID NO: 205761
  chr20:30555391-30555886
  hypo

SEQ ID NO: 219906 - DNA, 269 bp, Homo sapiens; identical to SEQ ID NO: 205762
  chr20:30556403-30556672
  hypo

SEQ ID NO: 219907 - DNA, 40 bp, Homo sapiens
  chr20:30713763-30713803
  hypo
caccgggctagattatttcatttatcgttattagatgtca

SEQ ID NO: 219908 - DNA, 188 bp, Homo sapiens
  chr20:30720874-30721062
  hypo
tgtgcctggggtcgcgcctatcaacttccaccagaacgatcccgtagaaatcaaggtaagtgtgttcctggatttttggagcctctgtgctaggcagtgtgtctggagcaccatggtgagctgttcgtgtccatcctgtggttgcagagaagaaagaatagtgccagttaccccggaactctgcctct

SEQ ID NO: 219909 - DNA, 37 bp, Homo sapiens
  chr20:30935781-30935818
  hypo
atgagccaccgcgcccggcccccaaggattttttaac

SEQ ID NO: 219910 - DNA, 96 bp, Homo sapiens; identical to SEQ ID NO: 205763
  chr20:30946058-30946154
  hypo

SEQ ID NO: 219911 - DNA, 112 bp, Homo sapiens; identical to SEQ ID NO: 205764
  chr20:30946218-30946330
  hypo

SEQ ID NO: 219912 - DNA, 290 bp, Homo sapiens; identical to SEQ ID NO: 12906
  chr20:30946345-30946635
  hypo

SEQ ID NO: 219913 - DNA, 83 bp, Homo sapiens; identical to SEQ ID NO: 205766
  chr20:30954186-30954269
  hypo

SEQ ID NO: 219914 - DNA, 109 bp, Homo sapiens; identical to SEQ ID NO: 205767
  chr20:30956817-30956926
  hypo

SEQ ID NO: 219915 - DNA, 386 bp, Homo sapiens; identical to SEQ ID NO: 205768
  chr20:30959966-30960352
  hypo

SEQ ID NO: 219916 - DNA, 295 bp, Homo sapiens; identical to SEQ ID NO: 205769
  chr20:31015930-31016225
  hypo

SEQ ID NO: 219917 - DNA, 104 bp, Homo sapiens; identical to SEQ ID NO: 205770
  chr20:31017140-31017244
  hypo

SEQ ID NO: 219918 - DNA, 153 bp, Homo sapiens; identical to SEQ ID NO: 205771
  chr20:31017703-31017856
  hypo

SEQ ID NO: 219919 - DNA, 359 bp, Homo sapiens; identical to SEQ ID NO: 205772
  chr20:31019123-31019482
  hypo

SEQ ID NO: 219920 - DNA, 106 bp, Homo sapiens; identical to SEQ ID NO: 205773
  chr20:31020682-31020788
  hypo

SEQ ID NO: 219921 - DNA, 634 bp, Homo sapiens; identical to SEQ ID NO: 205774
  chr20:31021086-31021720
  hypo

SEQ ID NO: 219922 - DNA, 4888 bp, Homo sapiens; identical to SEQ ID NO: 205775
  chr20:31022234-31027122
  hypo

SEQ ID NO: 219923 - DNA, 88 bp, Homo sapiens
  chr20:31115869-31115957
  hypo
gagggggacgccagagtcagggtggctgcagctatgaaatctaccagcaacaatgggcagagaacggcgacaacgaaaatacaaatta

SEQ ID NO: 219924 - DNA, 56 bp, Homo sapiens
  chr20:31146689-31146745
  hypo
cactgcagcctggaccggagcaggggcagcggaggggccgccgagaaccagtgcaa

SEQ ID NO: 219925 - DNA, 35 bp, Homo sapiens
  chr20:31332339-31332374
  hypo
aatgtcttctacccggcccggcgcggtggctcact

SEQ ID NO: 219926 - DNA, 480 bp, Homo sapiens; identical to SEQ ID NO: 205778
  chr20:31350980-31351460
  hypo

SEQ ID NO: 219927 - DNA, 68 bp, Homo sapiens
  chr20:31367769-31367837
  hypo
gcggcagacgggccgggacaggcaggtcctaaatggcattgtttgaaggggccggctaattgcacaga

SEQ ID NO: 219928 - DNA, 81 bp, Homo sapiens
  chr20:31900463-31900544
  hypo
ctgggattacaggcatgagccaccgcgccgggccccagttttctttttcttcaaaataacggtaacaaccagcagcctctg

SEQ ID NO: 219929 - DNA, 37 bp, Homo sapiens
  chr20:32151830-32151867
  hypo
ttccccccactccgcgacctcccgctggaaaattgtt

SEQ ID NO: 219930 - DNA, 120 bp, Homo sapiens
  chr20:32266978-32267098
  hypo
aggggcacaagagaaccttctagggtgttgaaaatgctcttatcttgatctgaatggtggcaacccagatgaataaatatataaagctgcgcggggcgcagtggctcatgcctgtaatcc

SEQ ID NO: 219931 - DNA, 160 bp, Homo sapiens
  chr20:32301637-32301797
  hypo
cattaaacactagaccgcaacccgttttctgagaagtgccttgagggaagagctacgggagatgacaggaaggtgaagatgcttcagcgagagacaagagatcagggagctttgaggaggaagtgatcctcagagaactggtctggattgccaggaggga

SEQ ID NO: 219932 - DNA, 100 bp, Homo sapiens
  chr20:32311064-32311164
  hypo
gaaagtccatcttaaaaaaaaaaaaaaaagtatgaggaatgctcaggccaattatggagtgaaagctggtaaccagatgcttaacgggaagattgggata

SEQ ID NO: 219933 - DNA, 164 bp, Homo sapiens
  chr20:32370539-32370703
  hypo
agctgggtctgtgcccgtgaccaacgctctaccaaaatgaatgaatgtgtgaatacatgcccttcttttgcctggactggaaagagattttcacttctgtgttttctggctttaaaaaaattacctttcatacaaaaattagctgggtgtggtggtgggcgcct

SEQ ID NO: 219934 - DNA, 200 bp, Homo sapiens
  chr20:32376690-32376890
  hypo
agtgtgcgagtctgcgttcaaccgcaaggacaaactgaagagacacatgttgatccacgagcccttcaagaaatacaaatgccctttctcgtgagtagagactgccatgcaggggggtgggtagcgggacagattctccaggggtgctgctggggagggtgggacagatgtcaggcctgagggcaggcctctcctttttt

SEQ ID NO: 219935 - DNA, 427 bp, Homo sapiens
  chr20:32378463-32378890
  hypo
gtgggtggcctcaggcgtcacggcccctccctgagcctgagatgacctggcaaagcgagccaaggtgcagagagtgagcagctgttccaggcagaggagaatggcaagtacaaaggcgcagagggaggagccagcgtggcatctctgaggagagcgagtgtggctggcgcagagagtggctggaagaaggcagacgacgagggtggagagagctggggccagatcacacaggtgctggtggggaaagagcctggattttattcccagcgcagggcactgttgcggggtgaaggtctggatgcttctcactgactttcccttgccctccaggcatgaagctccacaaatgcgccctgtgcagcaagtccttcagccgccgtgcccacctcgccgagcatcagcgcgcccacacgggcaactacaagtt

SEQ ID NO: 219936 - DNA, 251 bp, Homo sapiens
  chr20:32378966-32379217
  hypo
aaggacaaggacctgcaaacccggcggcccccccagaggagggcagccccccgcagttgcggcagtggtgggcgcaaggtgctgacccccttgcctgacccgctggggctggaggagctgaaggacacaggggctgggctggtgcccgaggctgtccccggcaagccgcccttcgcagagccggacgcggtgctgtccatcgttgtgggtggtgcggtgggcgcggaaactgagctggtggtacctggaca

SEQ ID NO: 219937 - DNA, 35 bp, Homo sapiens
  chr20:32381768-32381803
  hypo
attgaaagaaatgtgaagaacgacatcttcagccg

SEQ ID NO: 219938 - DNA, 214 bp, Homo sapiens
  chr20:32413015-32413229
  hypo
tgtacttttaatacccgttaattgagaagatcagatattaattcccttcaaccgatattcactatatacccaccgtctttcttccctaggattgtgtctgcgtaaatggtagatggtcacatggtagttgtttttattattgtgtgatatattcatcatttagtgcacaggcagggcacagttgggcacattcacagagcgctggagtgaccac

SEQ ID NO: 219939 - DNA, 255 bp, Homo sapiens
  chr20:32436253-32436508
  hypo
tgttttctccctcacgcagcggccctccaggcactgaagcgtaagaagaggtatgagaagcagctggcgcagatcgacggcacattatcaaccatcgagttccagcgggaggccctggagaatgccaacaccaacaccgaggtgctcaagaacatgggctatgccgccaaggccatgaaggcggcccatgacaacatgtacgtgtccacccgcccctgcgccacagggcagtgctagtcccggaatgcctcgtac

SEQ ID NO: 219940 - DNA, 223 bp, Homo sapiens
  chr20:32441362-32441585
  hypo
gtaatggggtccagcgctggctgggcccagacagactgtggtggcctgcgcagcgagcaggcgtgtgcgtgtgtggggcaggcaggatgtggtgcaggcaggttccatcgctttcgactctcactccaaagcagtagggccgcgttgctgctcactctctgcatagcatggtctgcacctgggagatgggcggggggaggggggcgggcggggtgggaagtgc

SEQ ID NO: 219941 - DNA, 31 bp, Homo sapiens
  chr20:32584928-32584959
  hypo
tgttttttttggagacggagtctcactccgt

SEQ ID NO: 219942 - DNA, 51 bp, Homo sapiens
  chr20:32677610-32677661
  hypo
acatctagaatgacaagtttcgcactgtaggaaatagagtcgtgtgtcctt

SEQ ID NO: 219943 - DNA, 186 bp, Homo sapiens
  chr20:32677691-32677877
  hypo
gtgacaagtgacatattcctctgcaaataaagcaacacacagaattacctggtggctgcagtgaggtagagaagtttctgccttcttaaatacatctacaaagaactccacaagcccaggctgagaatttagctgggcacccagaccagggaagcgcagctattcgaggggtaagaaaacacaagc

SEQ ID NO: 219944 - DNA, 100 bp, Homo sapiens
  chr20:33085651-33085751
  hypo
ggattacaggcatgagccactacacccagccgtcattggtatttctgtagggattgcattgaatctgtagaaatttttaatagtacggttattagtggag

SEQ ID NO: 219945 - DNA, 139 bp, Homo sapiens
  chr20:33112448-33112587
  hypo
gcattgtactctcacgtccacagagccctgtcattgtacccaggctccagatcttagaggcataagtccattttccacttttttttttgttttttttttttggaaatggagtcccagtcgcccatgctggagtgcagtg

SEQ ID NO: 219946 - DNA, 155 bp, Homo sapiens
  chr20:33183817-33183972
  hypo
ggagcgagaccctgtctcaaaaacaaaacaaaacaaaaaaagttacagtggagaaacctggcagacactaacgtcaccaagtgatcaaggtaaacattagcattgagaagatatggcaatatcatgaacccctcggtacagtgcactgaggacac

SEQ ID NO: 219947 - DNA, 483 bp, Homo sapiens; identical to SEQ ID NO: 205787
  chr20:33464343-33464826
  hypo

SEQ ID NO: 219948 - DNA, 184 bp, Homo sapiens
  chr20:33879776-33879960
  hypo
cttcagagagcaggctgaggcggtctggcccggaggcctcctgcccctgagcctcgctgagctcagggcccccgcgcacatggctggtcatgtagtccacatccagggcgctcaggaagggcagctcccgctcctcggagatgacccgcaggtaggcagcctcaccccgctccaggagggcgtc

SEQ ID NO: 219949 - DNA, 121 bp, Homo sapiens
  chr20:33880280-33880401
  hypo
cccctggcctctggaacctgtcaggtcagccccacctgtctgcctgtgttgggactcgcctgcccagggaagcggcagtgccaggccctcggtgcacactcctgcctccctctcttcctcc

SEQ ID NO: 219950 - DNA, 191 bp, Homo sapiens
  chr20:34055202-34055393
  hypo
tgggagcacagtctcgggaacccaacggatctggaagaatggatgggcgggagccggcccagctgctgctgctactagccaagacccaggagctggagaaggaagcccatgaaaggagccaggagttaatacagctgaagagtcaaggggatctggagaaggctgaacttcaggaccggtgagatggcctg

SEQ ID NO: 219951 - DNA, 36 bp, Homo sapiens
  chr20:34176526-34176562
  hypo
taagaatttcaacaattggccgggtgcggtggctca

SEQ ID NO: 219952 - DNA, 83 bp, Homo sapiens
  chr20:34200333-34200416
  hypo
tgagccactgtgcccggctcacctctattaaaaggacccaaaggagttaacggacagaaaacgtggcagaggcagagatgggg

SEQ ID NO: 219953 - DNA, 469 bp, Homo sapiens; identical to SEQ ID NO: 205791
  chr20:34359742-34360211
  hypo

SEQ ID NO: 219954 - DNA, 86 bp, Homo sapiens
  chr20:34670678-34670764
  hypo
gctcatgctggtacttttgtcgtctcctgcctttggacttttttttgagacaggttctcgctgtcacacacgttggagtgcagtgg

SEQ ID NO: 219955 - DNA, 237 bp, Homo sapiens; identical to SEQ ID NO: 205792
  chr20:34680127-34680364
  hypo

SEQ ID NO: 219956 - DNA, 944 bp, Homo sapiens; identical to SEQ ID NO: 205793
  chr20:34680573-34681517
  hypo

SEQ ID NO: 219957 - DNA, 82 bp, Homo sapiens
  chr20:35088673-35088755
  hypo
gcctgagcaacagagaccttgtcgctacaaaaaataaaaataaccaacttaaagtgaatagtacaggcgtagcataagtgac

SEQ ID NO: 219958 - DNA, 128 bp, Homo sapiens
  chr20:35441117-35441245
  hypo
aggaatcattgtcttcagctcggtaaggcctgaagctccggctggggtcgggcttagagtccaagtcaccagtgcggaaagcctctcggatcctgggctcccattccggcaggtccctgaagtcaggt

SEQ ID NO: 219959 - DNA, 83 bp, Homo sapiens
  chr20:35442203-35442286
  hypo
aaatcgctctctttccctggaaatgaaaaattccctgccattgctctgaggatgaagatcaaacctcccgcatgctcagtgca

SEQ ID NO: 219960 - DNA, 455 bp, Homo sapiens
  chr20:35443720-35444175
  hypo
cttggtgtccctggggccctcgctgttgtcgggggcctcatgcagccggaagtcagcacactcgttgtccagacacagccggaggccagccgtgaagccattggcatcagccaccaggacatcgatggccttactgaccagggcggcctgctctctcagcccaggcagcacctcggcctccctggctctgcagagtcggaccgcatgggactcgtgtgtctcgcccaggggagcaggcacacactgggcagagtccccggcctcggcgtccgtctccagcatgggccgcgtactctggcaggaggcgaggtcacagcgctggaggttggagaggagcacgcggttctcgtactgcagcttcttgaccttgccgctgagctcgccgatctgcagcttggcggccgccagctcctcctgtgaaggttcgctgagcacagaacaactgtcctccgaca

SEQ ID NO: 219961 - DNA, 391 bp, Homo sapiens
  chr20:35444205-35444596
  hypo
acttggccagctcgttcagcagcagcttgttctggtcctcgagctcggcagaggagcgccgcagcagctcggcctcctcttcgacaaactgcaggtgtcgccgcagctctgccaagctctccccgcactctccgccacccagcgcggagaaggccaggcgtgcctcaggacccccacagccacctccatgatccttcatgtcgtccatctcagcccgcaggcctcggttctccacctccagctccacgatgcggcggctcagcaggttggcttcctcctccaccagcttcaggtgcaccttcagctcggtctcccgcgagtggggggcatcggccagctcctcggctgacagcgcgctgtccaggtccccatagagcgagcggtacttcag

SEQ ID NO: 219962 - DNA, 97 bp, Homo sapiens
  chr20:35615275-35615372
  hypo
ggacctggctagatacgactttcaccaacccgcaaagccacccttgctggaatcacagaagcctccttgagattttggtccacgaagacatggacca

SEQ ID NO: 219963 - DNA, 36 bp, Homo sapiens
  chr20:35788336-35788372
  hypo
actccagcctgggggacagagcgagactccattgaa

SEQ ID NO: 219964 - DNA, 136 bp, Homo sapiens
  chr20:35812619-35812755
  hypo
agccagcacctgggctctgacgcccactcactacctcaccaagcatgacgtggagagactaaaagcctcgctggatcgccctttcacaaatttggaatctgccttctactccatcgtgggactcagcagccttggt

SEQ ID NO: 219965 - DNA, 87 bp, Homo sapiens
  chr20:35833168-35833255
  hypo
ggaccttgttgctcgcctggatgaactcgggggcgtgtatctccagtttgaagaaggactggaaacaacagcgttatttgtggctgc

SEQ ID NO: 219966 - DNA, 67 bp, Homo sapiens
  chr20:35874023-35874090
  hypo
gaaaaatagcactccgtcttaagtaggaccctccccggagtgggaagctcccagctcctctgcgggg

SEQ ID NO: 219967 - DNA, 285 bp, Homo sapiens
  chr20:35874236-35874521
  hypo
aaaactaattggaagttgaaagagccctcggcttttgcttttgtcaggataggccaaggaaagagatgagcaggtgggtctgggaggaaggagggggtcttggggcaggccgggcgcgcctcccattcacagccccttcctttgtgcctgcctctcttggttgaagtgggccacctgccctctaaggccagccttttcctccgagggggcttttgtctcccattgttctgattgtctcctccgtggagccgcctcagtggccccctgcagacggtttcccaggct

SEQ ID NO: 219968 - DNA, 93 bp, Homo sapiens
  chr20:35929626-35929719
  hypo
gtgagtcagaagagacgtcaggcagcaagcgacttgggccatggcctctgacctagacttctcacctccggaggtgcccgagcccactttcct

SEQ ID NO: 219969 - DNA, 123 bp, Homo sapiens
  chr20:35987182-35987305
  hypo
ctgggctgcaggccccgtccccagtgcacccctccatgtctgccggtgtccgccccggcctgccgtctccaccccagccccactggcagagccggtttgagtctactgtccctgagcatgttc

SEQ ID NO: 219970 - DNA, 34 bp, Homo sapiens
  chr20:36151088-36151122
  hypo
gaagctggcatacacggtgtcgcggaccgggcgg

SEQ ID NO: 219971 - DNA, 197 bp, Homo sapiens
  chr20:36151161-36151358
  hypo
ggccccagctcccagccctgggcggccgtatcatcaggtgctcctgtgcatctcggccagcacgggagccagtgccgcgcaggaatgtggggtcccctgtgttccctcgccagaggagcacttggcaaggtcagtgaggggccagtagacccccggagaagcagtaccgacaatgacgaagataccagatcccttcc

SEQ ID NO: 219972 - DNA, 352 bp, Homo sapiens
  chr20:36760841-36761193
  hypo
ttggactccgtaaggcagtcacggtatttctcatagaggatgcaaagaggaacgctcttctctgcagaaggggagaaaggagggtgctcatgatgcagaatcacccctcccaactctcttgcaactccaagaggcacagagaggggaaggaatgtgcttggggtcacacagcgggggaatggctgggcggatccctgaactccccactgtggctccagggttcccagcgaggagctggagagtggacactgagcagcgggtagaggacgcacttggactcccacgggccttggttctaatcctgcctttgcctcttctaatgggtgaccccgcgtgagccactccacctccc

SEQ ID NO: 219973 - DNA, 217 bp, Homo sapiens
  chr20:36765891-36766108
  hypo
tttagttctacggttgcaccagccacatttcaagcgcttagcagccacgtgcagctggtggcagccatgctggataggcggtgcagactcagcacgtctccatcactgtggaaagtgcaacaggcactttccaaggcgctgggttagagacttttctttgaggccgagagcaaccagaggcacaggagaggttctcgaagggcccatggagagaggc

SEQ ID NO: 219974 - DNA, 206 bp, Homo sapiens
  chr20:36767670-36767876
  hypo
tgaagatggagtatagcctacggggccattgctgtacgtaggctaccaattaaaacacacgcacacacatacacgagcctgccgggctgggaaaactggatgcttatcttcaaggctgcattaaagactctgagggcacataccctctgggtatttgtaggtgtgggtgatatcctcccgctcgtctcggcccacgctcttagtgc

SEQ ID NO: 219975 - DNA, 106 bp, Homo sapiens
  chr20:36767917-36768023
  hypo
tgcacagacccatcgtcctgctggatccagtctaccacgtcggcattgacctccgcaaagacaaagggcgcatcgtacttggtgctcaggtcgccctccttgatgg

SEQ ID NO: 219976 - DNA, 279 bp, Homo sapiens
  chr20:36770537-36770816
  hypo
ttctggtcatgggccgagttgtagttggtcacgacgcgggtagggatgcccaggcacctcagcactgttggagaggagtggaaagcggggtgaggtcctggagacatccgccctgctctgggcctccacctgcccatctgcattccagggaacactgtacctgctgtccaagtgctgagaacatgagccagcccttcctgccgggacaatggcgcccacctctctggtcaccccatgtccattctatgcccctcacatcacagttgccagaaggagact

SEQ ID NO: 219977 - DNA, 120 bp, Homo sapiens
  chr20:37036241-37036361
  hypo
ctccgcccagcagccgccctgtccgggaggtggggggcagccccgccccccgggccagccgccccatcctggagggaggtggggggcagcccccccccgccagccgccccatcggggagg

SEQ ID NO: 219978 - DNA, 49 bp, Homo sapiens
  chr20:37054866-37054915
  hypo
ctgtaagccccaccgtgattcacacagtggagtcgcagagttcgaggaa

SEQ ID NO: 219979 - DNA, 43 bp, Homo sapiens
  chr20:37114343-37114386
  hypo
acaggtgtgagccagagttgagttttatcgcttgttttgttag

SEQ ID NO: 219980 - DNA, 76 bp, Homo sapiens; identical to SEQ ID NO: 205801
  chr20:37274625-37274701
  hypo

SEQ ID NO: 219981 - DNA, 546 bp, Homo sapiens; identical to SEQ ID NO: 205802
  chr20:37274731-37275277
  hypo

SEQ ID NO: 219982 - DNA, 78 bp, Homo sapiens; identical to SEQ ID NO: 205803
  chr20:37303401-37303479
  hypo

SEQ ID NO: 219983 - DNA, 79 bp, Homo sapiens; identical to SEQ ID NO: 205805
  chr20:37434033-37434112
  hypo

SEQ ID NO: 219984 - DNA, 120 bp, Homo sapiens
  chr20:37540091-37540211
  hypo
agccaccacgcctggccgcctcattcttttttattgctttctagaattcgattgtttgaatattaaaatttacatatccatgctcctttttttttttttttaaattgagacagagtctcg

SEQ ID NO: 219985 - DNA, 147 bp, Homo sapiens
  chr20:37596755-37596902
  hypo
ttctagtgcttagagtggtacgtgacatggagtgggcccttggtccatccttgctggtccttgctggaccacgatgaatgattggtagaggagttgtaagcgtgaaccctggcactgccggcagccgtctttccagctcctgtacag

SEQ ID NO: 219986 - DNA, 43 bp, Homo sapiens
  chr20:37632981-37633024
  hypo
acaggcgtcagccaccgtgcccggcctgttgtgaagattctaa

SEQ ID NO: 219987 - DNA, 151 bp, Homo sapiens
  chr20:37656985-37657136
  hypo
atcctgtgcattagagcacacggagcctagggcaggcaagggtttcacccgcctctctgttggctgcctatgtaggtgacccggatctggttctgaggtgcattgtctccggcttcttcgccaatgcagcgaggtttcattctactggagc

SEQ ID NO: 219988 - DNA, 44 bp, Homo sapiens
  chr20:37659950-37659994
  hypo
tgaattgggatcccagctcacggttctttttttttttttttttt

SEQ ID NO: 219989 - DNA, 167 bp, Homo sapiens
  chr20:37673288-37673455
  hypo
acagtggaaaggtggcggatggagatgcggcggcctctgtgcgcagctggtacggcagtcctggagagccacctgggactactcatgtgtgttcctgccccacagcccagaaactctgcttctgggggtgtgttcccaacaaaattctcacccgggtccttaggaga

SEQ ID NO: 219990 - DNA, 42 bp, Homo sapiens
  chr20:39672622-39672664
  hypo
atgcaagtgcccagccgggcgtggtggctcacgcctgtaatc

SEQ ID NO: 219991 - DNA, 42 bp, Homo sapiens
  chr20:39831202-39831244
  hypo
tggacaaagagctgccgcagcaagtgccgctgctgggcagtc

SEQ ID NO: 219992 - DNA, 128 bp, Homo sapiens
  chr20:39989813-39989941
  hypo
gggaaggctggaaggcgctgctggataaggctgggctctggggtgatgttccccgagttggtgggatctaggggttgggtcctggccagcctgtctagttggcttgccctggccgcacctgctcagcc

SEQ ID NO: 219993 - DNA, 292 bp, Homo sapiens
  chr20:40020281-40020573
  hypo
agaatcatggtggaaggcaaggagaagcaaggcacatcttacatgagggcaggaggtggcggggcagagagagagagcgcgcctcaatggctttcaatagttcaagtgcattcacaccaggcgcattcctgcgcttgagattcctagcatcagccaggagcggcttagtgggagaaagagctgcgacggtgatgatagtgacattccaaagttttgtggcaacatgaaggaggaggtgtgtctgcgcttgcacagtgactgcagcccttgggcagatgtggagaatgtgtga

SEQ ID NO: 219994 - DNA, 105 bp, Homo sapiens
  chr20:42088526-42088631
  hypo
gatttaaaggtatgttttgtaattcaagatagaaatgatatgactaatgctttaaagtaaactccttttatattcttatttctgggaatttattatggtatatag

SEQ ID NO: 219995 - DNA, 143 bp, Homo sapiens
  chr20:42192721-42192864
  hypo
catctgcctacccctcgggatcctggggagaggaagggaccctgtgagaacctaatgaccgccccaggcagcaaggccttcatgagccagggtgctctctgggaccgtttcttacgcagcaggagagtcgtgggccaaccagg

SEQ ID NO: 219996 - DNA, 91 bp, Homo sapiens
  chr20:42193732-42193823
  hypo
ctgccggatcccgcgtgacatcagctagccccctcgcggctgccgggagctgtgagctctgtgctggggccaggccggcaccaggcacaga

SEQ ID NO: 219997 - DNA, 169 bp, Homo sapiens
  chr20:42314843-42315012
  hypo
ggcctgtgtgcacatgagaacgcgtgtgtctgttgtgtaggtggggcctggcctggctcttgtggctgcgtatgttgtggtttgtgtcctgagctaggaagcctgactgagggcaggtggggactcaggtctggctaggtcagcccgcgatgcctgctaccatggctca

SEQ ID NO: 219998 - DNA, 210 bp, Homo sapiens
  chr20:42833284-42833494
  hypo
tcctgccctccccacgccagtagtcagcggtgtctattgttcccatgtccacgtgtgttcaatgtttagcccccacttctaagtgagaacatgcagcatgtggttttacaaatacataatttttgaccatatattttgaaaaatttttaaataatgttccaagtaatttttagggataccaaaatggcttaattttactttttttttttt

SEQ ID NO: 219999 - DNA, 156 bp, Homo sapiens
  chr20:42924601-42924757
  hypo
taaataaaataaaaaagacaattaaagactagtgtggcagaaagtattatcctcacttcgtagttgagtaaccagctcagaaaaacgaagtgatttgcccaagatcatacagctgaggagctgattggcagatctggaacgcggtctgcttggctc

SEQ ID NO: 220000 - DNA, 238 bp, Homo sapiens
  chr20:42965898-42966136
  hypo
ccagcccgagagcacggctatgcggctcctgagtggcctggaggtgcccaggtaccgccggaagcgccacatctctgtgagagacatgaatgccttactggattatcacaaccacatccgggccagtgtgtacccacctgccgccaacatggaatacatggtgagtccccgtacctgccccccaccccccgcagtgtcccttccggcaaacgcagccggactcatcttggcctagaat

SEQ ID NO: 220001 - DNA, 31 bp, Homo sapiens
  chr20:43717047-43717078
  hypo
catggtgtagtgttacaggccgaaatgatga

SEQ ID NO: 220002 - DNA, 49 bp, Homo sapiens; identical to SEQ ID NO: 205816
  chr20:43726868-43726917
  hypo

SEQ ID NO: 220003 - DNA, 53 bp, Homo sapiens
  chr20:43926537-43926590
  hypo
cccgagagagatgcgctcacctggacagatgctgcctctgaggttctccagca

SEQ ID NO: 220004 - DNA, 77 bp, Homo sapiens
  chr20:44469456-44469533
  hypo
tgcccgccgtagccgggcctttgagcagtttttgggtcacctgcaggcagtgcctgagctgcgccatgccccggacc

SEQ ID NO: 220005 - DNA, 41 bp, Homo sapiens
  chr20:44502012-44502053
  hypo
ctgggcaacaagagtgaaacgccatctcaaaaaaaaaagca

SEQ ID NO: 220006 - DNA, 34 bp, Homo sapiens
  chr20:44560415-44560449
  hypo
agatacttaactatccaggccggaggcggtggct

SEQ ID NO: 220007 - DNA, 46 bp, Homo sapiens
  chr20:44601783-44601829
  hypo
tgggcgacagagcgagaccctctttcaaaaaataaataaatacaag

SEQ ID NO: 220008 - DNA, 79 bp, Homo sapiens
  chr20:44602364-44602443
  hypo
caaacaaacaaacaaaaagtcctaaggagaagacctattaataaggagaaaaggtccgggctcggtgggtcacacctgt

SEQ ID NO: 220009 - DNA, 166 bp, Homo sapiens; identical to SEQ ID NO: 205826
  chr20:44935840-44936006
  hypo

SEQ ID NO: 220010 - DNA, 81 bp, Homo sapiens; identical to SEQ ID NO: 205827
  chr20:44937643-44937724
  hypo

SEQ ID NO: 220011 - DNA, 76 bp, Homo sapiens
  chr20:44978787-44978863
  hypo
tgctgcgattccagcgcagcttgggcccagctctggccagtcccaggctggcctggtgctcgccccttgtgtgacc

SEQ ID NO: 220012 - DNA, 205 bp, Homo sapiens
  chr20:45833334-45833539
  hypo
gttattacaaaacccgaaggattacagcatggaaagcctcagcacagagccccacgtggggcaggcccacatcagcgacacttggaggaatataggtgacctttgcttctctagactaaagaaaataaataagaatatagatggggtcctgatgtaccctgatatgaaggtggcagctaaatgctgacctttggaaaactcaact

SEQ ID NO: 220013 - DNA, 42 bp, Homo sapiens
  chr20:45833568-45833610
  hypo
aaaatggacggtcggccgggcgcggtgactcatgcctgtaat

SEQ ID NO: 220014 - DNA, 196 bp, Homo sapiens
  chr20:45837756-45837952
  hypo
ggggtgttcatgacctctcacggccccttctgtgtttggtcgtgcaaacctgacacagccatcccgaccaaatggaaaactgcaaattcgaggacgaccacggcatttttccaaaacagtttaattaaaaaaaggtaaagaaatctgaaaaaactgggggggtgggggaaggaacgggcaaacccaaaaaagcata

SEQ ID NO: 220015 - DNA, 40 bp, Homo sapiens
  chr20:45880361-45880401
  hypo
aaaactctttatacccgtctctgtccggcaagaaatctga

SEQ ID NO: 220016 - DNA, 47 bp, Homo sapiens
  chr20:45949054-45949101
  hypo
tgaaacgccaggtacgaagggacaggccctccacagtcaccttgtca

SEQ ID NO: 220017 - DNA, 36 bp, Homo sapiens
  chr20:45968504-45968540
  hypo
tgaggcaccacacccggccccaagaaccattctgag

SEQ ID NO: 220018 - DNA, 120 bp, Homo sapiens
  chr20:46011002-46011122
  hypo
accgcacccaggttgatatagtttttaaagagccccagctgattctaatgtgtagccacggttgagcgccactgttctagaaaactacaagtttaaactagaacaaaaagaggcattttg

SEQ ID NO: 220019 - DNA, 92 bp, Homo sapiens
  chr20:46823583-46823675
  hypo
gcttttggcccaaacagctctttggaaaagagcacaggaatggccccggaaggtgggacctgtttccatggtgcacgcgcaacattggagga

SEQ ID NO: 220020 - DNA, 158 bp, Homo sapiens
  chr20:47688821-47688979
  hypo
ggatgaagaggaagccggcttattggagctcttaaaatcccagatttgtgataatgccgcactctatgcacaaaagtacgatgaagaattccagcgatacctgcctcgttttgttacagccatctggaatttactagttacaacgggtcaagaggtta

SEQ ID NO: 220021 - DNA, 78 bp, Homo sapiens
  chr20:47713209-47713287
  hypo
gttcagtgtatggcgttggtttgtgttgagcgtttgcacggtttggataatcttaaattttgacggacactgtggaga

SEQ ID NO: 220022 - DNA, 60 bp, Homo sapiens
  chr20:47766303-47766363
  hypo
aaatggaaatgcagcgtaacaaaagaaaaacaaatcgctcctgtgcggccagccatgaag

SEQ ID NO: 220023 - DNA, 38 bp, Homo sapiens
  chr20:47799076-47799114
  hypo
acaaagagcagaaggtatgccgggcacagtggctcacg

SEQ ID NO: 220024 - DNA, 59 bp, Homo sapiens; identical to SEQ ID NO: 205833
  chr20:47934765-47934824
  hypo

SEQ ID NO: 220025 - DNA, 82 bp, Homo sapiens; identical to SEQ ID NO: 205837
  chr20:48100505-48100587
  hypo

SEQ ID NO: 220026 - DNA, 122 bp, Homo sapiens
  chr20:48259015-48259137
  hypo
cataaaatgcaaactgcaagcgctggcgctggagcatgggaagcaggtgtctgaacaggactgggaggtgctcgtggcggttccggaaggggataaggatcgccacctggagtggattacag

SEQ ID NO: 220027 - DNA, 76 bp, Homo sapiens
  chr20:48300266-48300342
  hypo
tcagctgaatgacctttggcaaattattcattctgtgtttcctcatccataaaacggggataataatatccctatc

SEQ ID NO: 220028 - DNA, 353 bp, Homo sapiens
  chr20:48504343-48504696
  hypo
ttggttgtgtctctcgacccaggacctgcaccacgggcgcatccagatgaaaactctcaccaacaagtggtacgaggaggtacgccagggcccctccggctccgaggacgacgagcaggagctgctctgacgccaggtgccaaggcttcaggcaggcaggcccaggatgggcgtttgctgcgcacagacactcagcaggggcctcgcagagatgcgtgcatccagcagccccttcaagacataagagggcggggcgaggtactggctgcagagtcgccttagtccagaacctgacaggcctctggagccaggcgacttcttgggaaactgtcatctcccgactcctccctgag

SEQ ID NO: 220029 - DNA, 984 bp, Homo sapiens; identical to SEQ ID NO: 205839
  chr20:48598696-48599680
  hypo

SEQ ID NO: 220030 - DNA, 42 bp, Homo sapiens
  chr20:48673854-48673896
  hypo
ttcctcctgcccctccgcttgtgcggctgaatccaggatttt

SEQ ID NO: 220031 - DNA, 120 bp, Homo sapiens
  chr20:48707851-48707971
  hypo
ggattacaggcgtgaatcaccacacctgggcttttgtcattaaaaatttttacaagaatatattcatattcattaatcagtcatataacttaaggcttttttttttttttttttgagatg

SEQ ID NO: 220032 - DNA, 93 bp, Homo sapiens
  chr20:48720826-48720919
  hypo
aaaaaaaaaggcagtatttcctattgtaaactctaatctactgggtccaaaatattggacactgttgccatataattaacatacctggctggg

SEQ ID NO: 220033 - DNA, 184 bp, Homo sapiens; identical to SEQ ID NO: 205841
  chr20:48771157-48771341
  hypo

SEQ ID NO: 220034 - DNA, 65 bp, Homo sapiens
  chr20:49046944-49047009
  hypo
cagccctgcattttcaatcaccgcgactgggagaggaagccaaccgccggccctagtgggtggca

SEQ ID NO: 220035 - DNA, 144 bp, Homo sapiens
  chr20:49197043-49197187
  hypo
agtgatgtgatagaggtgtccgctgaggtggtcagggaaggctgcttgcagtaggtggccgtgcacggaaagtttgcagaatgagcaggtgttagttccagctggagatgactgccggctgtgcccttggtacctgctttctgg

SEQ ID NO: 220036 - DNA, 204 bp, Homo sapiens
  chr20:49203141-49203345
  hypo
catccaccagccgccgtctgtgagctccaccagcactcgcagcaagtcagtcgggctgagagtgtggttgtagaaaccctggctttgtgccttcccaccttccccagctcaccaaggtgacacctggctgctgctgaaatggcctgagcagtcttgcattagcagggccagccacctgccagcctgctgcatccccagtgcctc

SEQ ID NO: 220037 - DNA, 125 bp, Homo sapiens
  chr20:49204054-49204179
  hypo
cctctaggatgttccgctgaatgggaaccctgccttgcctctggcttctatcccaaaggtctaagaagacagcgaacactccctgccaccccagccatggaggaggcctgccttggcaggatgct

SEQ ID NO: 220038 - DNA, 313 bp, Homo sapiens
  chr20:49204449-49204762
  hypo
aagaaccctttagggggccttctcaacagcaggtagagtccacttagtggccctgcagggccagtcctagcatggtctctggggcctcagccccttccttttctccaggcttccaggttttttaggtggcctcaggttcatgagaggcacctctggactctggaagcgtctcgcctcttcagcccttacacccgctagggagccaggctgttagcagaactcgtcatcctggatgcctgctgaaaggctagaattgaaaaggagacctgctgctttctggaccttcctgcctccctcacgctctccttgccct

SEQ ID NO: 220039 - DNA, 255 bp, Homo sapiens
  chr20:49206899-49207154
  hypo
gcagtggagtccagcgtctgcggctgcaaagggaaacccaggagtgggtttgccctcactcagtcgagtggctgcaccttcaactgcacgggtggggcgatggaggggcccaggtgtagagttggctccagggacctgggcccagagccaaaagagaatggccgcctttccatctgcaggtggctctccaaagtgtctgctgctttgggaagacagactgggagtaggatcgggtcctcccgctcctcctacaca

SEQ ID NO: 220040 - DNA, 583 bp, Homo sapiens
  chr20:49223638-49224221
  hypo
gttcaagtctttgttcaaaatgccagggacttggacaactcattgtcaagaccctccaccagtaacaactggacacccccagttagaggcccctttgagaagctcagccgatgagcaggggacactcggttcagaccccttgtctgtaaaaggggtgcgcttacagaagaacccccatgtggaacatgcacagggaagggtgggaatccaggcgagcgcatgggagcaccgaggcaagtgatgctcagcctggcccgtgatgctcagcctggcctgtgtccagccttgcactcggagtaggtaggtccccatagatccatttgcctcgaagaaacttgcttataattatttgcacaaaggcctggctcgtggcacctgggcctggcctgaccagaaggcctagagctcagaggctctgcaagtgcccacttctctgcccagggtgtctgcagacccgcaggcaccctgggtcctaggcttggatggcactgagctgcccgccaccctgtacacttcaggggcccctgggcgaggggtattctcagccctaccagacaggtgaggaccccgagggtgcaggtgg

SEQ ID NO: 220041 - DNA, 588 bp, Homo sapiens; identical to SEQ ID NO: 205842
  chr20:49224900-49225488
  hypo

SEQ ID NO: 220042 - DNA, 323 bp, Homo sapiens; identical to SEQ ID NO: 205843
  chr20:49225976-49226299
  hypo

SEQ ID NO: 220043 - DNA, 99 bp, Homo sapiens
  chr20:49230488-49230587
  hypo
ctaccctgcccaccccgaggccctctctgctggagccaggatacagagacggccgcttgtttgcttgcttatttcattcattcattcattcattcattc

SEQ ID NO: 220044 - DNA, 173 bp, Homo sapiens
  chr20:49236429-49236602
  hypo
gacaagacccatccacgcttccccaggaagagacagagaggaggcgaggtagaggaatgcacttcttaaaggcagcacacagcccagccttacttgaggcctcttttcaatgcttcgaagatcttcttcacctgctggggcttcgggtctgcacagaccgaccccttccgcag

SEQ ID NO: 220045 - DNA, 160 bp, Homo sapiens
  chr20:49240802-49240962
  hypo
gaggctggcagagacggtcagggctgcagactcgggaaaaggcaggtttctgagaggttagggaccccggcaggtgggcagcaggcagtggggcaggagctcgctcactcccagctcctgcctccagcccccaacaggtgtgcaccgttggcccagcccc

SEQ ID NO: 220046 - DNA, 101 bp, Homo sapiens
  chr20:49244321-49244422
  hypo
acagaatgacacccacaaaaatttctagagcacaacagcagagcgttcaatcaaagtacagagcacaggctacacgctcatgaagccgcccttgggtacag

SEQ ID NO: 220047 - DNA, 144 bp, Homo sapiens
  chr20:49247308-49247452
  hypo
cgaaggaggcgctccggcccacgacccccacggcccctgtgtccccaggggacaggaaccgcaacctcaccgacatggtggtcacctgcaaggagaggacaggagagtcagcctggcatcaccatccagcgagtgccgtccgca

SEQ ID NO: 220048 - DNA, 150 bp, Homo sapiens
  chr20:49264294-49264444
  hypo
aggcatgagccaccgcacccggccacctcattctcactatgtgaccttggacaagtcacttatcctctttgagcctccagttcctcatctatacattggaagccactgaaattatcttacagttactttcagttgcgaggacttgctctt

SEQ ID NO: 220049 - DNA, 203 bp, Homo sapiens
  chr20:49282236-49282439
  hypo
atgagccactgtgcctgccgggtgggtttcttatggcgaatgatcccacaccacttttcagtgcacgtagttacatggagtagaacacagacagtcacacctccacgttcttttggccaccatgactggttcaaccaaggaatctgctccaagctaggtgaaggaaaatcagccctaaggccccccgtcgccacgcacctcac

SEQ ID NO: 220050 - DNA, 279 bp, Homo sapiens
  chr20:49290376-49290655
  hypo
gttgcgagcatttatttaatagcattatcttgatgatgaataaatcacaccttcatgaaccatttttccatttgtagccccaagtcaagactcccaaaatgttaccagatgtcaggcatgaaatatacacccctggcaagctctgccatgcacaggagtcatgctgctttcaatccacgggagagccggacacgagcgttccaaggcaggagcagaactccatgttggccattataaagacaagattccttttcccccgctttttatagcctctctggg

SEQ ID NO: 220051 - DNA, 31 bp, Homo sapiens
  chr20:49323815-49323846
  hypo
cagacagctttaaaaggtgacgaagggggcc

SEQ ID NO: 220052 - DNA, 76 bp, Homo sapiens
  chr20:49331494-49331570
  hypo
gcactctgagaggcacggggctgccggagagagaagagttgtctaaactgaggaaggtagccaggcgcggtggctc

SEQ ID NO: 220053 - DNA, 69 bp, Homo sapiens
  chr20:49406843-49406912
  hypo
atggttttagagatcggggtcccagacaaagctatgccagtgctgaaacactgtcgatcggaaccacct

SEQ ID NO: 220054 - DNA, 33 bp, Homo sapiens
  chr20:49556446-49556479
  hypo
caccagccaacgcccatccgcaatcagagatct

SEQ ID NO: 220055 - DNA, 117 bp, Homo sapiens
  chr20:50084694-50084811
  hypo
tgggcttgaggaggcggccttggctgaagggacatggggaacgttcaagagtgaagaaagtgctctgtcttgagtggtggttacgtgggtatatgcgattgtcaaaaatcactgaac

SEQ ID NO: 220056 - DNA, 31 bp, Homo sapiens
  chr20:50326111-50326142
  hypo
agaaatttagcagggcgtggtggtgtgcacc

SEQ ID NO: 220057 - DNA, 102 bp, Homo sapiens
  chr20:50337348-50337450
  hypo
ggcgacacagcgagactctgtctcacaaaaaacaaaaacaaaaaccgtttcctgatgatcacaatatcagtgcttaaaggcgcaggcaccacctggcagttg

SEQ ID NO: 220058 - DNA, 41 bp, Homo sapiens
  chr20:50346533-50346574
  hypo
cacgcatcaaggccacgcccacgcatcgaggctgtgctcat

SEQ ID NO: 220059 - DNA, 135 bp, Homo sapiens
  chr20:50378297-50378432
  hypo
caaaaaaaaaaaaaaattagcacaacttgagtggcttaaaacaatgcaagtttattaccctacagttaggtccgaagtccaaaatgggcctcatgggactaaaatcaaggaaggtgtcagcagagccgtgttcct

SEQ ID NO: 220060 - DNA, 590 bp, Homo sapiens; identical to SEQ ID NO: 205847
  chr20:50383655-50384245
  hypo

SEQ ID NO: 220061 - DNA, 243 bp, Homo sapiens; identical to SEQ ID NO: 205849
  chr20:50384928-50385171
  hypo

SEQ ID NO: 220062 - DNA, 93 bp, Homo sapiens
  chr20:50390636-50390729
  hypo
tggaaagaaaaagaacgtcttaggttgagaactttccatgaacaacaatatctagctaaaatttaataatattctgggctgtgtgtgtatttt

SEQ ID NO: 220063 - DNA, 79 bp, Homo sapiens
  chr20:50405412-50405491
  hypo
ttggtggtaaaagctcgcccacaaatgttgcacacaaaaggcttctctccagtgtgagtccgctcgtggatctgaagag

SEQ ID NO: 220064 - DNA, 193 bp, Homo sapiens
  chr20:50407493-50407686
  hypo
caggctgcaggtcaccgggcaaggagccacccgtgaggtccttgggattagtccccgaagaaagattctgaggtagccctacagaggtggttacaaggacaggtttgctgtctaaagaaagactcggttcatctatggggtcaggtacagagagtgcataggggatgccattgccggccgccactttgtcctg

SEQ ID NO: 220065 - DNA, 155 bp, Homo sapiens
  chr20:50407905-50408060
  hypo
tttgacatccaccgcggagatgttcggtggcttccccttccctttcttggatgtgtctagcgccacagtggagaaagggctctggaagagcaccgagcccggggcctgaggaagcaaagcgctcgggaggcgggacatgacgttcgggagcaccc

SEQ ID NO: 220066 - DNA, 149 bp, Homo sapiens
  chr20:50408300-50408449
  hypo
tgttcacctggatgcggatctgctcggtgagctggatctgctgtagctgctgctgctgcagacacaagatctgctcgaggacccacgggatgctgttggcaccaggcacgggggcagggagtgcatccgcgctccgctgattcaccgcc

SEQ ID NO: 220067 - DNA, 31 bp, Homo sapiens
  chr20:50430800-50430831
  hypo
acaggcatgagccaccgcgcccggccaataa

SEQ ID NO: 220068 - DNA, 38 bp, Homo sapiens
  chr20:50441826-50441864
  hypo
ataaggactccaagccgggcgtggtggctcgcacctgt

SEQ ID NO: 220069 - DNA, 180 bp, Homo sapiens
  chr20:50602381-50602561
  hypo
cccagctccaagctgcttctttcttggttctctgctttgcagagtcaaatgacctcattgccgaagatggcggcatccaagttccaggcagcaagatggagaaaagaacaaagagaaagcaaagatacccacccgaggcttgacacttccatttatatcccattggccagaacaaagtca

SEQ ID NO: 220070 - DNA, 34 bp, Homo sapiens
  chr20:50805266-50805300
  hypo
tcaataaagacatagcgggtagatcatgaggtca

SEQ ID NO: 220071 - DNA, 120 bp, Homo sapiens
  chr20:50805540-50805660
  hypo
tttataagaaaatttagaagaaacttataaagaaggggaaaatcactcaatatttccatctctgcctaccatgaatattataaaatatttttttccattcattttctttacacttaaaag

SEQ ID NO: 220072 - DNA, 33 bp, Homo sapiens
  chr20:50805900-50805933
  hypo
cttccagcctggtgacagcgagacttcatctca

SEQ ID NO: 220073 - DNA, 43 bp, Homo sapiens
  chr20:52179947-52179990
  hypo
acaggcgtgaaccaccgtgcccggccaagattctttataaagc

SEQ ID NO: 220074 - DNA, 166 bp, Homo sapiens; identical to SEQ ID NO: 205855
  chr20:52209197-52209363
  hypo

SEQ ID NO: 220075 - DNA, 32 bp, Homo sapiens
  chr20:52281658-52281690
  hypo
ctaacgtgcccggctcttttttttctttttct

SEQ ID NO: 220076 - DNA, 77 bp, Homo sapiens
  chr20:52311776-52311853
  hypo
aaaaaaaaaaaaagtcgaagctgtctattaaaaataaatgatagtaataatctaacgtggttcatgaggaaatttaa

SEQ ID NO: 220077 - DNA, 240 bp, Homo sapiens
  chr20:52538430-52538670
  hypo
tgtggtggtggtggagaggttgtcggagcctattaatgttaaaaggaaaagtgcgcactcaatcagcctgcaggtgcaattctttacctgccctagagaaatgaaattctcatgggtgcacagggagaagtggtaaagggtgccctttgttgtattattatttgtttcagtgaagaactagaaacaacctaaacgtgcatcaggagttcaagaccagcccggccaagagaccagcctcgc

SEQ ID NO: 220078 - DNA, 393 bp, Homo sapiens; identical to SEQ ID NO: 205861
  chr20:54934126-54934519
  hypo

SEQ ID NO: 220079 - DNA, 128 bp, Homo sapiens
  chr20:54944844-54944972
  hypo
ctccttaactgatcggggtcagggcagagtggtcactttccccacagccaggctctggatttgcctcctgtgaagacaccatgcctagcacaggctgacggggcggctgcagtcgaaccttgcctcca

SEQ ID NO: 220080 - DNA, 135 bp, Homo sapiens; identical to SEQ ID NO: 205864
  chr20:55206463-55206598
  hypo

SEQ ID NO: 220081 - DNA, 109 bp, Homo sapiens; identical to SEQ ID NO: 205865
  chr20:55206774-55206883
  hypo

SEQ ID NO: 220082 - DNA, 45 bp, Homo sapiens
  chr20:55925556-55925601
  hypo
tgttcggaggcagcgttagagcagcttctcggaggttggccttgg

SEQ ID NO: 220083 - DNA, 37 bp, Homo sapiens
  chr20:55959339-55959376
  hypo
ggagtgaaccactgcacctggccttctcttgtgtctt

SEQ ID NO: 220084 - DNA, 145 bp, Homo sapiens; identical to SEQ ID NO: 205870
  chr20:55966824-55966969
  hypo

SEQ ID NO: 220085 - DNA, 218 bp, Homo sapiens
  chr20:55969522-55969740
  hypo
agtgtagcagtgggaggagccgctggctgaggggtgctggagggtggccggggcccttctagcctgtgcgagtggccgggcagctcaggttcctgccggggtgcctctgtcctcctgggaagggagcgtgtagggtggtgggagcaggcggccctgtccgtctcgtcctggaatctgttttgtagatgtctagagtcgtcttagagggtgtttgggga

SEQ ID NO: 220086 - DNA, 260 bp, Homo sapiens
  chr20:56001371-56001631
  hypo
gatggatgtttactcttccccgcttcgagcacaggccatttgctctgcacggcacctgtctctttcccactaaatgcatcttgaccaggccccttagcacacacggggcttgctctttctttgccgtcagctgcgtgctatctgtggcgtgcatggggcaggtggggtgggcgttcccatccccagcgatggaggcaggagctctttcaggctcacctggaacacagtcacatgtgctggtctgtcggcatcacctcagc

SEQ ID NO: 220087 - DNA, 205 bp, Homo sapiens
  chr20:56099534-56099739
  hypo
agcacacatcctgcgcctggcaaggttccgcctgagcacactctggcccagtgcatatcctgggcctagcaaggttaggcctgagccggttcagtcagtgaacatcctgggcctagtaaggtttgggcccagcaggctctcggccagtgcatatcctgggcctagcaagtttcaggtccaagcaggccccgggccagtgcacacc

SEQ ID NO: 220088 - DNA, 371 bp, Homo sapiens
  chr20:56126192-56126563
  hypo
cgattggaatgagtcgggccaggtggaaaacgaatctggccattcatcagagctgtcaggacgggtctctcaccagaagtgtttaccagtgttcaccatgagcttccgagttctgctaacgggagcttcgactgtaactcagaggacttggaaaacgacttgggtgacttagcgtacctatgttattgaattcgcctaagtgttgcgactcttgatgctgacacttacgagaatgcacagtgggacttccagaaaatttaacagtgcagttcagaaaaatgcctccgtgggggtggggggctttgaggaagtccaggtggcatgggactggggaggggaagaagcaaggagcacagcggcgtcgggagtga

SEQ ID NO: 220089 - DNA, 145 bp, Homo sapiens
  chr20:56264917-56265062
  hypo
gattcagcagctctatatatcggagggacacagacacggcgctgctggggctgacgtgggtcccaggggccagtggctgcatcgcccggcagcagccgaggtccatggggcacttactgtgtgcgaggcatttgctgagcttctc

SEQ ID NO: 220090 - DNA, 38 bp, Homo sapiens
  chr20:56265326-56265364
  hypo
gggcacagaccacccgggggggccgggcccagtgcctg

SEQ ID NO: 220091 - DNA, 213 bp, Homo sapiens
  chr20:56780225-56780438
  hypo
taagacgtcggttccaattcttcagcctctctgcctctgcccctcgccgtggcctcatcggagggaggcatcgctccctgaccctcgactttcagcttggccactcgactcgcttggcttcccacctacagccaggagtgacggcataacaggtctgcgcccgcccctgaagacgcctcccacgtccccgctccccacgtccgcgcccacacc

SEQ ID NO: 220092 - DNA, 60 bp, Homo sapiens
  chr20:56780951-56781011
  hypo
gcacctgaagacgcctcccacgtccccacgtctgcgcccgcacctgaagacgcctcccac

SEQ ID NO: 220093 - DNA, 117 bp, Homo sapiens
  chr20:56781104-56781221
  hypo
ctcccacgtcgacgcctcctaggtctccacttcccacgtccctgcttgtggagcctgtgccccggccgacctgctggtgccaggacagtgagagacgcctgcagcagagctgcccag

SEQ ID NO: 220094 - DNA, 284 bp, Homo sapiens; identical to SEQ ID NO: 205873
  chr20:56784961-56785245
  hypo

SEQ ID NO: 220095 - DNA, 35 bp, Homo sapiens
  chr20:56941012-56941047
  hypo
tatttttaaaccattcgttacgctgtgtagacaga

SEQ ID NO: 220096 - DNA, 258 bp, Homo sapiens
  chr20:56941588-56941846
  hypo
agtccattacacattcgatacaggtatcaaaatatcataggcacctcaaagacatgtacaactcttaatttaacatttttgaaagaaaaaaaaaccggccagagcattaaaacaaataaaataagaaacacagaggccagtgttaggtgaagaactccgctgcttcagaaagagaatagcagcgctcgcttaccgtgggaacacggccagttaacaaaatgggttttggttttttgttttgttttgttttaccattgg

SEQ ID NO: 220097 - DNA, 154 bp, Homo sapiens
  chr20:56977720-56977874
  hypo
ctctgggtctaaggcataggcgaggaagggttggtgtttaggagaaagctgagaaagatgccaggcgcaatggctcacacctgtaatccaaggattttgggactccgaggcaagcgaatcagttgaggccaggaatttgagatgagcctgggca

SEQ ID NO: 220098 - DNA, 182 bp, Homo sapiens
  chr20:57009363-57009545
  hypo
tgtagcagacatttacggtaggcttgcagtagtgaaagatccatggactaggaatcagaagactgggtcctcggccttattcccagctctgtcatgcgtgattttgtggctcttaggttggtgacctgcaaaatggagatgttggtcatccttgcttacttcaccaggggcgtccatcctaa

SEQ ID NO: 220099 - DNA, 162 bp, Homo sapiens
  chr20:57041475-57041637
  hypo
tgggcgagggtggcgccccagtggctgtgcggctaggtcagtgtgaggctcgcactgagatttcgagggggtggcatctgggctggtgtgcgcggccccagcggcgccctggaggaaagctgccctctccctaattcatccatccacgtttattggtcctga

SEQ ID NO: 220100 - DNA, 127 bp, Homo sapiens; identical to SEQ ID NO: 205874
  chr20:57225466-57225593
  hypo

SEQ ID NO: 220101 - DNA, 38 bp, Homo sapiens
  chr20:57241750-57241788
  hypo
ctgggattacaggcgtgagccaccgcgcccagccgatt

SEQ ID NO: 220102 - DNA, 234 bp, Homo sapiens
  chr20:57244309-57244543
  hypo
cccaggcttgccctgagcctcgggcttgttctcttagctcttccacaggtgccagcgtgccgtgcaggccctgccgagccgggcccgggcctgctccgagcaggaggggcggctgcttgggaacgtggtggcctcgctggcgcaggccctgcaggaactctccaccagcttccggcacgcacagtcaggctacctcaaacgtgagtgctgcccgggcctagtgaagggattttg

SEQ ID NO: 220103 - DNA, 185 bp, Homo sapiens
  chr20:57268976-57269161
  hypo
tggtgagtgcttcgagaggaggcagccacggtgctcctagtcgggcagcggtgagctcgggcctggggagctcacagccctgctcagactgcagcgcacgcccagagggctgtggacgttatcatccctgctctgtagacagggaaacaggtccagagagacgcggggatttgccccagatcagt

SEQ ID NO: 220104 - DNA, 158 bp, Homo sapiens; identical to SEQ ID NO: 205875
  chr20:57415180-57415338
  hypo

SEQ ID NO: 220105 - DNA, 302 bp, Homo sapiens; identical to SEQ ID NO: 205876
  chr20:57415539-57415841
  hypo

SEQ ID NO: 220106 - DNA, 2076 bp, Homo sapiens; identical to SEQ ID NO: 205877
  chr20:57428311-57430387
  hypo

SEQ ID NO: 220107 - DNA, 33 bp, Homo sapiens; identical to SEQ ID NO: 205879
  chr20:57470653-57470686
  hypo

SEQ ID NO: 220108 - DNA, 251 bp, Homo sapiens; identical to SEQ ID NO: 205880
  chr20:57478608-57478859
  hypo

SEQ ID NO: 220109 - DNA, 397 bp, Homo sapiens; identical to SEQ ID NO: 205881
  chr20:57484445-57484842
  hypo

SEQ ID NO: 220110 - DNA, 204 bp, Homo sapiens; identical to SEQ ID NO: 205882
  chr20:57485751-57485955
  hypo

SEQ ID NO: 220111 - DNA, 230 bp, Homo sapiens
  chr20:57577637-57577867
  hypo
tcccacactgccccacagtccgctcctccacctggcctcctcccggtcgcccagccaggggccttctggaactgtccctgctctggtgacttcacgcatcactgaaaagtcccaaagcagacctccatcctgccgccacccagcctgcccatgctctgcaccccaaaccctcttcctggagcagccggtggctggtttgtcccctcccacctgaccgacccaccctaggt

SEQ ID NO: 220112 - DNA, 269 bp, Homo sapiens
  chr20:57578208-57578477
  hypo
ttccacttggcagtgcagggcgtcccatggcctgcccccgagccctatccttctatgcccaacccaacccggcgacagcagtcctggcccagaggcagagctcggatggatgagcagtttcggttctggcctctccgtctactcctgcctgaagcatctggacccggcctaaccagctcactgaggtatgcacaagcttctcccacggccaaactcaatccttcatcccaccagccccatctgggaacgggcttattactcacactgtg

SEQ ID NO: 220113 - DNA, 202 bp, Homo sapiens
  chr20:57578998-57579200
  hypo
aggagaccagtgagggcagtcggcagtggggcggtgtggcttagacctggaggaggcggtgggcggtgcgtgatttctgcatctgcttcgaaggtagaaccgacaagacttgtgggtggattatatgagggacagaaaacagaggagtcgggtaccagtccaggcttttgcctgcatagccggaaggacagccagggaggac

SEQ ID NO: 220114 - DNA, 57 bp, Homo sapiens; identical to SEQ ID NO: 205883
  chr20:57797335-57797392
  hypo

SEQ ID NO: 220115 - DNA, 319 bp, Homo sapiens; identical to SEQ ID NO: 205884
  chr20:57797935-57798254
  hypo

SEQ ID NO: 220116 - DNA, 176 bp, Homo sapiens; identical to SEQ ID NO: 205885
  chr20:57875365-57875541
  hypo

SEQ ID NO: 220117 - DNA, 223 bp, Homo sapiens; identical to SEQ ID NO: 205886
  chr20:57875889-57876112
  hypo

SEQ ID NO: 220118 - DNA, 254 bp, Homo sapiens; identical to SEQ ID NO: 205887
  chr20:57978841-57979095
  hypo

SEQ ID NO: 220119 - DNA, 54 bp, Homo sapiens; identical to SEQ ID NO: 205889
  chr20:58180712-58180766
  hypo

SEQ ID NO: 220120 - DNA, 110 bp, Homo sapiens
  chr20:58397113-58397223
  hypo
cgatccgccccgcaacgatcccaccccttctccagcgatcccaccccctccgcagcgatcccaccccctccgcagcgatcccaccccctccgcagcgatcccaccccttc

SEQ ID NO: 220121 - DNA, 360 bp, Homo sapiens
  chr20:58507081-58507441
  hypo
agaataataatgtttcaagagaagcgtggatttacctgacaagtaagcaggctctgggctccagtctactgaactgggggactggttagcgagcaacacagagaactagtaagatgatgattgtgtatctgcaggcagataaaagcgttacggataaaaacaacaacaaagaaaacaatttggcagatgggggaggcaaagattttcccccaaaggaaaaactgctgaatgaatgcaagcagcagtagataattcaaagtcccctctgccctggtaactaacatagctaaggtgtccaaaaagacattaaaggtgaatgaaggggagggaaggcgtcctcctcctcccatcattactaaa

SEQ ID NO: 220122 - DNA, 258 bp, Homo sapiens
  chr20:58508063-58508321
  hypo
cagggtcacccccgaaccaacaaagcacacacacacccgagatgcgccccaggccgcagcgccaaccccccttcagatgtcccggagacaggcgagcagcggtccccagggctcccgtcgccaccgcttctcccgcacccctcagcctcctcgggccggcgacgcgcgcagccccaggcctgctccccgctcgccaagcgcaccgccccgcgcctcagccaccttgaccgagtcgcccacgcgcgggggcggctccga

SEQ ID NO: 220123 - DNA, 76 bp, Homo sapiens
  chr20:58514021-58514097
  hypo
agcagggaaatgacaggaggcgcagcttaggtgtggaggctccaggtggccggtccccgcgcggctcagatgaagt

SEQ ID NO: 220124 - DNA, 129 bp, Homo sapiens; identical to SEQ ID NO: 205890
  chr20:58514400-58514529
  hypo

SEQ ID NO: 220125 - DNA, 444 bp, Homo sapiens
  chr20:59872750-59873194
  hypo
ggattctggaggccttgcagcgcactttcctgccctctcgcgtgtatgatagagacattagcgcgtgtcagcccctttaccggggcttcccattgtcttagcgtgctcctttcatctaatgagcaggcgcccttggctgaacttttcaggaatccgtggggaaccagagtgaatatattatggcgctgtggagcgaatgacaatcgggcagtgctcgcctgtggccgtggaggtatctgcgccaccgcaaaatgcctcacccttcttttgggttttggggtttcaggtcagctctgggggcccgttatcccgtgtcaaggaggcccacgcaggcacccgaggaaggctttggctatcacgaggtggcctttgtgcaggcgggttcagcaactttggcattcattggggcagcctgttactggtgcttggagtaagtgaagagtg

SEQ ID NO: 220126 - DNA, 252 bp, Homo sapiens
  chr20:60094624-60094876
  hypo
aaggaggctccctggtgccccgaccccgaggagggctcatagcactggccaggcagcgctgcctctcgggctgctgcgccagcatcgcagggcgattaccctgtgctgctctctagatgggtgtctattctttcgttgttccttaatcgaatgccactagttcctgggcgcaggacgccagtgtgtcttcacaggcagactgcgtggtggtggtataatccccattaccacgtggaggaaactgaggtgcag

SEQ ID NO: 220127 - DNA, 403 bp, Homo sapiens
  chr20:60226061-60226464
  hypo
gtgcttgtgtgagttagcctcgtgcttggccgtgcactggtgtgcttgtgtgagtgagttagcgccgtgcttggccgtgcactggtgtgctcgtgtcagtgagttagcaccgtgcttggccgtgcactggtgtgctcgtgtgagtgagttagcctcgtgcttggtcacgcactggtgtgcttgtgtgagttagcgtcatgcttggccgtgcactggtgtgcttgtgtgagtgagttagcatcgtgcttggccatggcagtgagttctgattgcagggtctcaacgctcagggaaggacgagtgccccttctgtgccattttccaaaactctagggatattgagtcttgctcaggtcacccaaaggcacatgtcccagccccgagtcaagcgtacaggggcctc

SEQ ID NO: 220128 - DNA, 352 bp, Homo sapiens
  chr20:60238496-60238848
  hypo
ttctgaaggctctgggtcgggggcatttcaggcgagggtcctagaaatgccaatgctggggatgccgccgagtgggtcagaggggccggaggaaggtgaacagggcagggggcagtggggctggattttatcccaagtgagtcgggagctgctgggacggcaggaccgggtgtgtgtgtccaagagaccatcttggctgcccaggggaagcggggactcgaggagagcagggagtgctgtcttcccggcgggagctggcggtactgaggaaggacgtgcagaaccaggcagggctgacagacgcggggtcgggggaagatcaggagctcccggtgtccaggctgcacaatgt

SEQ ID NO: 220129 - DNA, 51 bp, Homo sapiens
  chr20:60261583-60261634
  hypo
catttgtgtatgtgtgcattcgcgtgtatgtgcatgtgcattcgcgtgtgt

SEQ ID NO: 220130 - DNA, 31 bp, Homo sapiens
  chr20:60261672-60261703
  hypo
gtatctgagtgcacattctcgtgtgcattcg

SEQ ID NO: 220131 - DNA, 500 bp, Homo sapiens
  chr20:60275730-60276230
  hypo
atacggcctccctgtggggccacacatcaccctatacggcctcactgtggggccatgtctgtcttcatgggtgtcttcttcatgtcttcttcatgtctgtcttcatggcccaggcctggggcagagccggggttgccggctcagcgggtgagtgccacatgagtcttgccttcaaagctggagtgcctgatcttgacagcggaccgacatcttcaagggaacggcggctccccccttttttgcagaacactttcaaaggtgtattcgtgttccagggccgccataacagagcgccacagaggggcggtgtaaacagcagaggtgtatgctctcgctgctctggaggatggaagcttaaagccgaggcatcggcaggggtggtttgacgaaagccgtcagagagctcggagggaagactctgttccaggcctctctcctcggcttgcaggtgccatcttcttcccgcatctcttcacatcgccttccctctgggagtgtgt

SEQ ID NO: 220132 - DNA, 219 bp, Homo sapiens
  chr20:60316298-60316517
  hypo
agtgtgcaggggccctggtgcggtcccccgggcatcacttccccaagccacccacggagctgcctttgagggcgctgtcatcagtttcatccagggtctctccggcagggaacgcctttcacctgcaaagtccttggttcatatggctgacgccaccgctgtttcctgcctggtcattcagacgttggtggcccattcgttctcaaagcagcttcaatg

SEQ ID NO: 220133 - DNA, 68 bp, Homo sapiens
  chr20:60334003-60334071
  hypo
tatatgagtgtgcacatgtgcgcatgggtgtgcacatgggtgtgcacgtgtatgcccacttgtgagta

SEQ ID NO: 220134 - DNA, 31 bp, Homo sapiens
  chr20:60352646-60352677
  hypo
tgtgcacacacatccacatgcgcacacacgt

SEQ ID NO: 220135 - DNA, 368 bp, Homo sapiens
  chr20:60352702-60353070
  hypo
cgcacacacgtgcatacaaagacacacacccatacgcgcacacacgtgcatacaaaaacacacacccacatgcgtgcacacgtgcatacaaaaacacacacccacatgcgcacacacgtgcatacaaaaacacacatccacatgcgcacacacgtgcatacaaaaacacacatccacatgcgcacgcacttgcatacaaaaacacatccacatgcgcacgcacgtgcatactatacacacatgcacacacgtgcatgcaatacacacatccacatgtgcatacacgtgcatactatacacacatgcacacacgtgcatactatacacacatccacatgcacacacacgtgcacactatacacacatgc

SEQ ID NO: 220136 - DNA, 190 bp, Homo sapiens
  chr20:60361300-60361490
  hypo
ctggccccaggcaggaggggcggctacacatgtgcaccacccccatgaccgtcttgagtgtggttctgaagacgcaatcccaagatgaacacgatcgccctgctgcagtctgcgagtcgcccggcagccagacacagcgctgagacccacggggattcacattgtccccgctgaagccagagggatgtga

SEQ ID NO: 220137 - DNA, 132 bp, Homo sapiens
  chr20:60448951-60449083
  hypo
gagaggtgaggcggggtggggtctgcgtgcaggcgggtgagctcctggtccccgcaggacacccacaggaccctcggggagcctctccagtggcgccgtcggggagtgatcgacagtctccccagtggcact

SEQ ID NO: 220138 - DNA, 263 bp, Homo sapiens
  chr20:60485425-60485688
  hypo
gcatatttacacttaacacgggtttgtgacattctttccttccattttgcagtttgcaggggaggtccccgaaaaccgcgtggagaccgtggtcgcaaacctcacggtgatggaccgagatcagccccactctccaaactggaatgccgtttaccgcatcatcagtggggatccatccgggcacttcagcgtccgcacagaccccgtaaccaacgagggcatggtcaccgtggtgaaggtgcgtactcttctcacaccctgcc

SEQ ID NO: 220139 - DNA, 204 bp, Homo sapiens
  chr20:60494908-60495112
  hypo
aagcatggtgtcgcggtgattgcatggaagcttgtgattgtgtggaagcatggtatcgtgattatgtggaagcgtggtgtcacggtgattgcgtggaagcgtgttgtgattgtgtggaagcgtggtatcgcggtgattgcatggaagtgtggtgtcacagtgattgcgtggaagcgtgtcgtgattgtgtggaagcatggtatc

SEQ ID NO: 220140 - DNA, 107 bp, Homo sapiens
  chr20:60495161-60495268
  hypo
tgattggaagcgtgtcacggtgattgcgtggaagcgtggttttgtgattgcatggaagcatggcgtcacagtgactgcgtggaagcgtggtgtcatggtgactgcgt

SEQ ID NO: 220141 - DNA, 107 bp, Homo sapiens
  chr20:60495298-60495405
  hypo
agcgtggtgtcacagtgattgcatggaagcgtgtcatgattgtgtggaagcatggtatcgtgattgtgtggaagcgtggtgtgattgtgtggaagcgtggtgtcata

SEQ ID NO: 220142 - DNA, 206 bp, Homo sapiens
  chr20:60495440-60495646
  hypo
ggtgtcgcggtgattgtgtggaagtgtggtgtgattgcgtggaagcgtgtcttggtgattgcatggaaatgtgtgattgcatggaagcgcagtgtcacggtgattgtgtggaagcgtgtcatggtgattatgtggaagtgtggtgtcgtgatgattgcatggaagcaccgtgtcatggtgattgtgtggaaatgtggtgtgattgc

SEQ ID NO: 220143 - DNA, 171 bp, Homo sapiens
  chr20:60503295-60503466
  hypo
acatcaacgacaacgcccctgagctgctgcccaaggaggcgcagatctgcgagaagcccaacctgaacgccatcaacatcacggcggccgacgctgacgtcgaccccaacatcggcccctacgtcttcgagctgccctttgtcccggcggccgtgcggaagaactggacca

SEQ ID NO: 220144 - DNA, 189 bp, Homo sapiens
  chr20:60507914-60508103
  hypo
cacacatgggcacagtcatgcttgtgtgccacctgcatgtacatgcccacatagacacatggcaaacacagaggcacacatgcgcacacccgcagcacaccctgctcacgggcagccctcccccacagccatggtcctgctgtttgtcatgtggatgaagcggcgagagaaggagcgccacacgaagca

SEQ ID NO: 220145 - DNA, 87 bp, Homo sapiens
  chr20:60544918-60545005
  hypo
ccatcggaacactcggccccctcatcggggcactcggccccccgtcggagcactcgcccccccgtcggggcactcggccccccgtcg

SEQ ID NO: 220146 - DNA, 208 bp, Homo sapiens
  chr20:60545058-60545266
  hypo
ccacgagtcctttggtgtcagatccctagtgcggggccaggtgacccacctgggtggggcccaagcctttcccggttgcttaactgaggtgcccttacactggctcaaatgcacagatattacctgtcagcttagtgtttcacattggcacgcgcctgtgtgacacccatgatgatcaaaacagaacattttcatcaccccagagggc

SEQ ID NO: 220147 - DNA, 265 bp, Homo sapiens
  chr20:60545296-60545561
  hypo
cggagccccacaccctgcttctacccacccatgaacttccatcaggcggaatcagaatgcataggcttctgtgtccggcctcttccagtcagcgtagctcctctgagattcagctacctggtggagcatatcagtagttcgttcctttttattcctggggggcgtttcactgactaaatatgcatctgtttgactctccattcacctgctgaagggcatttgggctgcttccatcttgagcatcaatacggccattgtgaacatt

SEQ ID NO: 220148 - DNA, 269 bp, Homo sapiens
  chr20:60549275-60549544
  hypo
cgtaaacctgcatatcgctgtgggtccgtcacagtaggtggagtgaacgtcacaatgggagaccaactccaattgcatcagagaccgttcccaaaggctctccaaggtgctcgaaggcagggagcggtacacattggcgctgagcctctgagggcccagcaggagctgtgacctgtcaggaccaaccaataccacaaactgccctggagacgccctctctcgccacaggaggtctgcgtcaaggctggggccctctgggcacctcagcc

SEQ ID NO: 220149 - DNA, 141 bp, Homo sapiens
  chr20:60551924-60552065
  hypo
cctggctgcacagacgccgcctccgtcagcccctacaggtgaccaggtgtctcccgagctgcctcagatgtgttcctgcttggagaagcatagctgctgcgtgccagctcctgtggagagctctggcggtttcagctgatg

SEQ ID NO: 220150 - DNA, 164 bp, Homo sapiens; identical to SEQ ID NO: 205891
  chr20:60552337-60552501
  hypo

SEQ ID NO: 220151 - DNA, 372 bp, Homo sapiens
  chr20:60563049-60563421
  hypo
acatgatattctggaaaaggcgaaactaggagacaataagatccgtggaccagggactgacaggaggggagggatgaacgggcagagcacagaggaattcagggctgtggaacgactccacatgatacggtactggtggaaacacgtcattctacagctgtcaaaacccacagaatgtacacaccaagagtgcaccctgatgggaactatggaagctgggtgagaaggacgtgttgacgtgggttcatggattctaacaaacgcaccacccggccaagcgggggaggctgtgcacctgcagggaggagggtatgggaagtctctgtactaaaaaagtcccctcctttttccgtgaacctaaaactgctctaa

SEQ ID NO: 220152 - DNA, 150 bp, Homo sapiens
  chr20:60563782-60563932
  hypo
gctccccaaacagacgccggcgccaatcttcacccactcggcagtgcctcacctgggtcctccaggtccggcgttctcgatactccacgtacctcccagccccacaccccggcccttctcatgagtgaggacgcacgagctcccttactc

SEQ ID NO: 220153 - DNA, 70 bp, Homo sapiens
  chr20:60581687-60581757
  hypo
agctactcagcaccacggccgtgagcgcagtggtggcctgcgaggtgggcggtggcggctgctgctggct

SEQ ID NO: 220154 - DNA, 193 bp, Homo sapiens
  chr20:60662808-60663001
  hypo
gctctgtacactcacctgcatgcactcacacgcgctcctatacactcacctgcacacgcactcacacaagctcttgtacactcacctgcacacgcactcacacaagctcttgtacactcactgcagactcacccacacacgctcctgtacactcacctgcatgcactcacatgtactcctgtacactcacctg

SEQ ID NO: 220155 - DNA, 436 bp, Homo sapiens
  chr20:60725126-60725562
  hypo
tctttgaaattgcacacacacgtcaagcatacagcggtggggccgtgaggcagcagccagctcctctcaaggagactgcacatgtgtaaattgagacgctcttctgaaacctacacaccgacttcacggattccacagttgggtgaatgttcagaggggtcccactggcttccatcagtggagtctgtagtatcggcttgctgacctcgggggcagggacggagcagctcaggctgggctcagagggaaggactgctgatgggtcagcgatgtctgccccgagaacaggagtggcaggcgctagcgcaggtgccatcgctggcttagccacctgctgatgctcgaccagctctccggttagccaggctggtccccctcacaccttgatgactcctaggaattgattctgcgtctgtgtccacgccatgcgtgggga

SEQ ID NO: 220156 - DNA, 370 bp, Homo sapiens
  chr20:60773878-60774248
  hypo
gagctcaagacggtggcccacgccggaatggtaggtgtccccactgccaacagcatctgcacacactcagctctagaaaatccacttttctcaatggggatttgccagtggcctggaagagaacagctttgcgactcacctttttcccatcagtacactgctgacttggtcgtgagcatgagcccttgtgactcccccagccctgaaatcctccctccaatcccagttagttacagactctgcgctaacaaaggtgctgccgcgggccgtgccaccgtcttccctctttcccccaggtgggattccccaacgccgggaagtcctcactgctccgggccatttcaaacgccagacccgccgtggcttccta

SEQ ID NO: 220157 - DNA, 195 bp, Homo sapiens
  chr20:60781094-60781289
  hypo
agtgccctgcccagacaccccgtgaaatgccctctagtcaaaaagccaaagacagccacacgcgcccaggctctgcacagttgggcccaccaccctctcgtgcacgcactttccacacttcacgttagccgccgtcgcccccccgccctaagctcctggagaacagagacctcgtttgtctgtatgcagtgcccg

SEQ ID NO: 220158 - DNA, 206 bp, Homo sapiens
  chr20:60781567-60781773
  hypo
attggcggtcctcgggctgaggagggcgggagggtggaggtagccgtggacacaaaagggccatgccagggtcctcagaccatcaccctgtgtgttggcggtggggccacgagtctgcacgtgcgaaagaatcctgttggcttagtgtttcaggctgggaagatgaccggctctgaaggtggagggtggtgatgggagagccactg

SEQ ID NO: 220159 - DNA, 240 bp, Homo sapiens
  chr20:60791330-60791570
  hypo
ccactttcctgtcccgagacagccgaaagcgctgggtgaagctctgggacaccatcttcatgcgcttctccagcgaggccgaggacgccgacggcttggagcccctcttgagtgagcgcggcctctcagtgcccctcgaggagctgccggagctggaggtgggtgaagccacggagccgcccccaccgccacccccgagggtcgcctccccggcctcagcgcctacggccgcctcaccca

SEQ ID NO: 220160 - DNA, 200 bp, Homo sapiens
  chr20:60816041-60816241
  hypo
acactgccttagagtacacacgtaggacatttttcttccacgcctcgagtgcgttgagagggtcagactctgctgtgttccacatgttaatgagaggtgctgtttgaatgtgaaaaaaatgccacttgactttcatcccagtgtctctcctctgtgccgtccaggagatgccagcagatgggtcttggaatttttttttt

SEQ ID NO: 220161 - DNA, 223 bp, Homo sapiens
  chr20:60816433-60816656
  hypo
tcattaaagcttgctcgacttttaaagttttagtacattcagccaattacaaaagtgacattttgtataagggaattgttgacacattttaggttcttatgctgtcttcaagcagggaagctgccatctcctcaaggtgatttctttaatgtccccatgcaagccatgtcttgtctggccgtgcaggcacagctggcgccgtgccttcctgagtcacagcatc

SEQ ID NO: 220162 - DNA, 79 bp, Homo sapiens
  chr20:60816686-60816765
  hypo
cttgggtcctgggtgggttcccactggctcctgccttcagtgtctttgcctgtaagacggattactatgtggaatctgt

SEQ ID NO: 220163 - DNA, 85 bp, Homo sapiens
  chr20:60842013-60842098
  hypo
aaagctgtgggcaggccaggcgtgcgacggctcacgcctataatcactgtcagaggctgaggcgagaggatcgctcgaggctacg

SEQ ID NO: 220164 - DNA, 458 bp, Homo sapiens
  chr20:60842462-60842920
  hypo
ctcttcaaggtggcccggagtcctttacaaaaggagcttcaggcctatcctgtgcgtttactgtttggggtctggcatcatctacttgtccagggagagaaggagaattcaggaccacagccgggctctcaggaggccaccggggtagtcttatttcgaggtctgttcctacagctaggaactgtgtttttgtttgtttcagtgatgcttcaaatttgggccaacaggctccacctaacctctgcggcctcatgtctgcgtctcttttctccctcactgacagtcccagttttctgcagccctggcgaggacagatttagaccggcacgcagttgtgactcactcactttgccccacatacctgtgggaccagctctgctgccgacagtgtctttgctgagacagcacatgtctgtgcctcctgcagttgccacttgtcattgtcttcagggtatatc

SEQ ID NO: 220165 - DNA, 34 bp, Homo sapiens
  chr20:60845091-60845125
  hypo
gcccccctcccagcacggacgctgagttttggga

SEQ ID NO: 220166 - DNA, 209 bp, Homo sapiens
  chr20:60868206-60868415
  hypo
ccgcgcccggcctgttcattgtttttttaaagtgttaaaaaaaatatactgtgaaaataatgatcttttgtccttcgaagaaaatgtcttctcctttgtgagcgctgcccccaccccacccccaacactaaggacacccctcgggccctgagtgccagccgggggctgtggacggcggctgaaccagcgccaacactcaggccctgtgc

SEQ ID NO: 220167 - DNA, 360 bp, Homo sapiens
  chr20:60868813-60869173
  hypo
ctgacccccctcccttgtatccggcaggtggttctacccaggcaataacccctacactgggacccccgactggttgtatgcaggggattactttgagcggaatttctccgactgcccagatatctactgagggcctggaggggcctggggcccgggaccggaggctgacgaggctggacttcctcgagtggccactgtgagcctcgtcacagcagaaaccaacttttctaacgactgagttcgcggagatagcatcatccctgatcaaggatgtaattctaattaactgttgattgccaaacatttcactctgctgtgccgtctcttcataaagcttcacttgggatcatcgtcttcatt

SEQ ID NO: 220168 - DNA, 148 bp, Homo sapiens
  chr20:60891780-60891928
  hypo
tggccaggagctgctgggctcggtccaccaggccctgccgcaccaccgtctgtggatgccagggcagaccgtggctcagacacgcaggccggggctgcgggaggtgcaggcagtgggggcgctcctgctggggctgaggggaagtgag

SEQ ID NO: 220169 - DNA, 206 bp, Homo sapiens
  chr20:60891958-60892164
  hypo
ctgcagggcctggccagcagcatcctcggcagcctgcacggcctgcaggatgcggctgtaggcgttggaggcctcgatggccctctgggtgaggcggtcctggttgacgtccaggatgatgctgcagcggaagggagggtcgaaggagtgggtaagcgcagacgccctcggcctggctctccagcctcctgcgctcacaaccagcc

SEQ ID NO: 220170 - DNA, 186 bp, Homo sapiens
  chr20:60892222-60892408
  hypo
ctgggtgtactgctcctgtcactctgggccccagcttgccgtggagctgaggaaggcctggcttctttgaggacaacggcctcagcccctaggagccttcccagaccagctggccctcccaaggccctgtctgcatccccagggtgggcccagggcccctcctctcctggccacccacctggacag

SEQ ID NO: 220171 - DNA, 83 bp, Homo sapiens
  chr20:60905868-60905951
  hypo
gctggggacatggctggagtgagatcctgcgcgtgggtcagcgggaggccgggcggcagcgggatcacctggcagtccctgag

SEQ ID NO: 220172 - DNA, 236 bp, Homo sapiens
  chr20:60906010-60906246
  hypo
cacagtgggtgagtcagagccggccctgccgccgggccctcggccgcgcccctcccagccccattacctgccattacctgttggggccaaaggcgccgtggctgctgatgcagctgacccggggctccacgaactccgggctgaactcctcaatgggcaccagagtgaccccgtgctgcaggcagagggacgagatgctgcaacgcccgtggtgcggggaggatagggggtgcagg

SEQ ID NO: 220173 - DNA, 272 bp, Homo sapiens
  chr20:60912907-60913179
  hypo
cagtgcctgtgtagccggggcggcagcggcacaaacctcccgccccacagagctggtccagggctccccgagggtcgcaggtgcatgctgcagagggacaatggggtcaggccctggcgccatgtgggtggcagaaccccttcctgccctgaccctctgctcaccttggcagttggggaaaccatggtagccagggcggcaccggtcacaatgaggtccagcaaactcaggctggcataggcagcggccggcctcatcgcagccctcgggca

SEQ ID NO: 220174 - DNA, 234 bp, Homo sapiens
  chr20:60913381-60913615
  hypo
gtcacagcggtcatcggccactccagggctggaacactggcaggctgcaggaaagggtggcccacatgcttggtcagaggcaccaggcctcaggtgtccacctcgagcgcaggtagaggttgagcggggagaggggactcacgctggcagccggggccgtagaaccctggcgcgcagagctcacaatgggtgccttggaagttgggtttgcacagacagcgtcccacccttggg

SEQ ID NO: 220175 - DNA, 86 bp, Homo sapiens
  chr20:60925165-60925251
  hypo
ccacacccaggtgcggtgagtcaggggatggcaatgtcttccctgcaggccaaggcaagccccggctcccgcgcccttcctctcct

SEQ ID NO: 220176 - DNA, 172 bp, Homo sapiens
  chr20:60925653-60925825
  hypo
catgaaagttgggctgctcggttgcaggcactagatgagccctgccagctccctgctgggggtccaggagcctcgtcacacactcagcctcagctgcaccactctgagtggcttctgtccagccccatgcctgcactgccaccctagggtgttacaccctccgggcaccacg

SEQ ID NO: 220177 - DNA, 125 bp, Homo sapiens
  chr20:60926049-60926174
  hypo
gaggactctgggtgaggcccaggaatgtgccggtgccagcaccagggctgctgcccatcctgtgaggggctcccgggaggtggatgctctgcagtgccctcggctgcccccgaaagcaggcacac

SEQ ID NO: 220178 - DNA, 401 bp, Homo sapiens
  chr20:60936962-60937363
  hypo
gggactggagagcaggcacccgaccccacctaaccctcagtggccgccacctcggcacaggtatcccaggaatgtccacttgcgccagcctcctctgcattcctgcagcccctcccgcacctgccaggaattccttaaacagcagggcgcctgacgcagggggcaccaccgcactgctcacagcacctccgccctcccagccccaagctgtctactcagcacccgcaaccaaactctgtggcctttggaaacacccccatgagcacccgctttccctgtgtcatggggacgctgaaagcacaaacaaaaggtgaccactgccgtgcctttgtccctgtggggactccccccaccaagtccttcgtgtccagcctcccaggccccaggtctcgctcacggtg

SEQ ID NO: 220179 - DNA, 243 bp, Homo sapiens; identical to SEQ ID NO: 205894
  chr20:60941671-60941914
  hypo

SEQ ID NO: 220180 - DNA, 85 bp, Homo sapiens
  chr20:60953645-60953730
  hypo
tccagggaagcgactccgtcccgcttggcctcagtcactgctctgtcaatgggatgataactgcccttcccgcaggctgccatgg

SEQ ID NO: 220181 - DNA, 181 bp, Homo sapiens
  chr20:60984130-60984311
  hypo
agccaacctggcctgcgggcagtgtgtagggaacacacggcttttgtttcgtgtgattctggagaaattaaagcaacctttaacacacctggacttccctcttgggagttcagtccctctggcctctcaggacaacaggcagacatgtcacaggctgcaggtgggaggcagtgccccctga

SEQ ID NO: 220182 - DNA, 205 bp, Homo sapiens
  chr20:60996144-60996349
  hypo
gaggttgggataccggtcaagtggctgggcctctgcaagccagtgtttgtggcacacaaaccgctgcagttcagacttcttcaccgggtggcttgtgcttcacgcggtcgggtgggggagtgtgtgtgtttgccgtgtgtgtgcacgcccgagccagtgtgcatgtgtgtgccgtgtgtgtgcatgatagccagtgtgcgtgtgt

SEQ ID NO: 220183 - DNA, 201 bp, Homo sapiens
  chr20:60997210-60997411
  hypo
ccaaggcctcgccacggccagcccagcccaagtggatcacagagcggaacagccatggctgcatctgggttctcaaaggtcagcctggagacgcccacgtgagggtcctgtgtgcaacatcattctacagaaccgtcccgaacaggaccgcctaaccccatcccatgacgggtggaatatggtggccgcccagccccatgc

SEQ ID NO: 220184 - DNA, 400 bp, Homo sapiens
  chr20:61000472-61000872
  hypo
ccaatgggctcacggcatctctgtggctacacccaggggagatgccacctgcctcccacacacaggccagggaatcacaggcccagctgtggccctggcaggactggacattgtccggccgagtgccaaaacccacagtgatgcctgttcttaccctgtcctctgggaggccgggccccctgagctcctctgctgtctgagcaggaggcatccggggcatcactgggctccccgcctctccgagggcactcaaccagagaagccgcctgggcaccagtgctccaaggacgtctgccaggccggctgctctccaccccagccaccgacccccagcaggctctttggggcaggagtgcggagctggacactggtaccctccgtctctgaggcctgggctgtc

SEQ ID NO: 220185 - DNA, 201 bp, Homo sapiens
  chr20:61285585-61285786
  hypo
tctaaaaatgcacctgtcaccgggtttagggcccaccctaatccaggatgatctcttctcagatcacttgtcacatctgcaaagacgctttttccaaataaggtcatgcgctcaggtcccaggtgaacgtgactgcccggggaacacggggggcaccggtccgcccaccccagccccagcgcaggcccagtgagcagactc

SEQ ID NO: 220186 - DNA, 210 bp, Homo sapiens
  chr20:61287772-61287982
  hypo
tgaagcctcgaggtcaccaggcggaggcgcggagatgcccctgcatcagctgggggacaagccgctcaccttccccagccccaactcagccatggaaaacgggcttgaccacaccccacccagcaggagggcatccccgggcacacccctgagccccggctccctccgctccgctgcccatagccccctggacaccagcaagcagcccct

SEQ ID NO: 220187 - DNA, 81 bp, Homo sapiens
  chr20:61288557-61288638
  hypo
acctggatgagaacgtcaagtccagctgctcgcccgtctacattggtgagtggggctggcggggtaagtgctggcaggggt

SEQ ID NO: 220188 - DNA, 171 bp, Homo sapiens
  chr20:61314706-61314877
  hypo
ctggaggtggcgaggacgggcttttccatcactctcggtgggggcacctgctccaggggcagctccatgggcgcttggcgggacggaagctgcgggaatagttgatgttgaggttgacggcgacagtgaggactgcaagaatacagtcacgtaccctggaacaatgttcag

SEQ ID NO: 220189 - DNA, 61 bp, Homo sapiens; identical to SEQ ID NO: 205895
  chr20:61447609-61447670
  hypo

SEQ ID NO: 220190 - DNA, 51 bp, Homo sapiens; identical to SEQ ID NO: 205896
  chr20:61447763-61447814
  hypo

SEQ ID NO: 220191 - DNA, 421 bp, Homo sapiens
  chr20:61458920-61459341
  hypo
gcccccagagaaaacggctctcgggttgagcaagtgaacataaggaaagtccagaggcagccaagcgttccaggagtggaactgaagtgaccgtccccagactggtcagcctccacacctccctcgactgagccctggcagccggagtgcagggagccgccgtgccgtcctgcagcatctgtggatccaaacacagttttctccacgcacccacaggccccagggtggtggtcgggggtggcccctgccgctgcccaccatagctccttggtgtccccgagcagctggccggagaatgcgtgaggccgtctgggaagagactgccactgcttctgtcacttgtgtgtcctctagggcagacctggtcccaagggaacccccggagtggccgggccaagcggagagccggtgagtgcacgtg

SEQ ID NO: 220192 - DNA, 38 bp, Homo sapiens
  chr20:61470101-61470139
  hypo
aggggccccaaggtacgagtccacggccagcaaggctt

SEQ ID NO: 220193 - DNA, 172 bp, Homo sapiens
  chr20:61472199-61472371
  hypo
ctcggccgccgactggacgcgcgggccttgccagcgagcaccctcatcgggctgtcgcctgacagcatacctcaaaaggccctagctaataaacctgtaagcccagcatttgagagaaggtagggtgtgtatatataaaaggttgtgtacaactccacgaggtgaaaaatat

SEQ ID NO: 220194 - DNA, 587 bp, Homo sapiens
  chr20:61488410-61488997
  hypo
acctgcctgactccacagggcgcgctcttagaagcttgcacctcagctcctgccttctccccacgcgcctttgctgatcgcacctggcatcctttctccatagtaagtcacagcctgagagtgactgcatgcggagtcccgggagtcctcctagtgagccagcgagcctgggcatagtctgggggatccttgatccatctgggaaagctaacgatgctcctacctgctttattccctctgaacgcagaaacggctaaggatcactcatctgtgataaccatgtatgactaaggtaatcatatatgagtcagcctgacaagcagtcacacgtattaccttctatctctttccattcggttatgcctctccctacgttgagaccttcctccctggggcccactctgggcctgctcccccaggtttgcctgtgaggactccgaggactgccaagcgccttgtgtggcggtggcaccttcgcccacattctgaatctctccaagggctcttcgctctacatttgtgtccaactgacgcattctactccgattcctcttcagtgcttgtttgcatagcgctgcttctttgcg

SEQ ID NO: 220195 - DNA, 259 bp, Homo sapiens; identical to SEQ ID NO: 205897
  chr20:61492757-61493016
  hypo

SEQ ID NO: 220196 - DNA, 35 bp, Homo sapiens
  chr20:61506536-61506571
  hypo
gtgaattcatcggggagccccgcaccctcacctgc

SEQ ID NO: 220197 - DNA, 93 bp, Homo sapiens
  chr20:61518345-61518438
  hypo
taagaggagagcgacgtccatcttcttctgggtgccggggtgccgagaagggccccagggcagcaccagcctgcactgcgtcctctccagcag

SEQ ID NO: 220198 - DNA, 55 bp, Homo sapiens
  chr20:61527972-61528027
  hypo
cgtcctggggctggcgaggccattggaacagaaggtaccactggcttccttacgg

SEQ ID NO: 220199 - DNA, 138 bp, Homo sapiens
  chr20:61528147-61528285
  hypo
tcttggggatggtgcccttgaaacctgagggtggctttttaatggctggtgtggctgctgccacattagcaaaagaagacttctttggcacgaggtttctaggtgcaggctgcttgcccaccgcggagcctggagggg

SEQ ID NO: 220200 - DNA, 135 bp, Homo sapiens
  chr20:61576504-61576639
  hypo
aatctggaaggttgcggtttgctcttccagtgttcgggggcctctggctgctgaaggattcggtctaccacggagggctgtgctgttaggctgcatcccactcaaaatacaggaaaagcacgaatcatgattctg

SEQ ID NO: 220201 - DNA, 130 bp, Homo sapiens
  chr20:61619034-61619164
  hypo
atgaaagccaggcgtgcgagccaactacttgtacctgcaggacaggaacagtgaggatagagcgatgggcacagacctcaccccgaggacagaggtcattgtcaccaaagacccccgagagaggacggcg

SEQ ID NO: 220202 - DNA, 454 bp, Homo sapiens
  chr20:61674870-61675324
  hypo
cctgagcagctctgcgatgcgcatcatggtcggggctgttttggggccgtttccaacaccagcagcgtcgtggctccacagcagcaaggcttcctgaaggaagaagggggcttcgcagtatagttcgagtcgggctctgtttctttccatcccaaacacatagagacgaccaaggccctgatcccaaaagaagaacccaggctgccggcgatcctggggacaacgatgttaactcagggacaggcgcagtctctggaccaggccaggtcgtggtgcacacactcgatctctgcagcgtttcccacatgggcactgcggaccgggaatgtcaggggaacgcgggcaccgtggaccgggaatgccaggggatcgtgggcaccgccgaccgggaatgtcaggggaacacgggcactgccgaccgggaatgtcaggggaacgggggcactgcagaccg

SEQ ID NO: 220203 - DNA, 75 bp, Homo sapiens
  chr20:61675700-61675775
  hypo
aacgcaggcacggctgaccgggaatgtcaggggatcgcgggcactgccgaccgggaatgtcgggaacgcaggcac

SEQ ID NO: 220204 - DNA, 480 bp, Homo sapiens
  chr20:61692646-61693126
  hypo
cctattcatgtccgtgtcctgtccgtgtcctgcctgtgtccgtgtctgtgtcctgtccgtgtcctgtctgtgtccgtgtcctgtccatatctgtgtccgtgtcctgtccatatctgtgtccgtgtccgagtccgtgtctgtgtctgtgtccatgtccatgtcctgtgtccgcgtctgtgtctgtgtccatgtccatgtcctgtctgtgtccatgtctatgtcctgtccgtgtcctgtcagtgtcctgtctatgtcttgtccataacctgtctgtgtccgtgtcctgtccatgtctgtgtcctgtctgtgtcctgtctgtgtccgtgtcctgtccatgtccatgtcctgtccgtgtctatgtcttgtctgtgtccatgtcctgtccatgtctgtgtccgagtcctgtccatgtccatgtccatgtcctgtccgtgtctgtgtccatgtccgtgtcctgtccgtgtctgtgtctgtgtcttg

SEQ ID NO: 220205 - DNA, 253 bp, Homo sapiens
  chr20:61693186-61693439
  hypo
tgtccgtgtccgtgtccatgtccatgtcctgtccatgtccgtgtcctgtccgtgtctgtgtccatgtccgtgtcctgtccatgtccgtgtcctgtttgtgtcctgtctgtgtccgtgtcctgtttgtgtcctgtctgtgttcgtgtcctgtccatgtccatgtcctgtccgtgtctgtgtccatgtccttgtcctgtccatgtctgtgtcctgtccatgtctgtgtcctgtctgtgttcgtgtcctgtccatg

SEQ ID NO: 220206 - DNA, 74 bp, Homo sapiens; identical to SEQ ID NO: 205901
  chr20:61734534-61734608
  hypo

SEQ ID NO: 220207 - DNA, 165 bp, Homo sapiens
  chr20:61748971-61749136
  hypo
ggacaacctcaccacgaagacaggagcgagggggtgaacacagtgtggaccaaatccacagtctgtctggacgaccagccaccacgcagacaggagcgagggggttaacgcagtgtggaccgaatccacagtctgtctggatgaccagccaccacgcagacagga

SEQ ID NO: 220208 - DNA, 66 bp, Homo sapiens
  chr20:61749166-61749232
  hypo
ccacagtctgtctggacgaccagccaccacgcagacaggagcaagggggttaacgcggtgtggacc

SEQ ID NO: 220209 - DNA, 60 bp, Homo sapiens
  chr20:61771324-61771384
  hypo
aggaaaggagaccagagcagcgctcgtacctctgaagtcctctcccgcaatgcgacgtat

SEQ ID NO: 220210 - DNA, 53 bp, Homo sapiens
  chr20:61771414-61771467
  hypo
ggcggggcagctctgtttgtgagcacggaatcgaggctgggagctgcacactc

SEQ ID NO: 220211 - DNA, 247 bp, Homo sapiens; identical to SEQ ID NO: 205902
  chr20:61810310-61810557
  hypo

SEQ ID NO: 220212 - DNA, 285 bp, Homo sapiens; identical to SEQ ID NO: 133337
  chr20:61810632-61810917
  hypo

SEQ ID NO: 220213 - DNA, 143 bp, Homo sapiens
  chr20:61838281-61838424
  hypo
tcacagtcctggtcacagtgcgtgggagacaactggaaacgcacagttcgggctgcctggaaaacacatgcagcctcctttcagggcctttgatctccctttgtctcccgcacagccaggcacaggttcagcgctcactcgct

SEQ ID NO: 220214 - DNA, 281 bp, Homo sapiens
  chr20:61870869-61871150
  hypo
ggtctgtgctgagtgtgcccccggcctgcagctgtgccccatctgcagagcccccgtccgcagccgcgtgcgcaccttcctgtcctaggccaggtgagcgccccagcaccacgcgcagccagccctcctgcggagggggccctgagccggctgtgcccggccctcctgaacccatgcaggcccttcccgggtggcagcgtcagcttgtttttacccggctcccaggtcccgctgatagcgcccatcaatcttactacctcccttgacgcttaggttggggc

SEQ ID NO: 220215 - DNA, 36 bp, Homo sapiens; identical to SEQ ID NO: 205905
  chr20:61886327-61886363
  hypo

SEQ ID NO: 220216 - DNA, 55 bp, Homo sapiens
  chr20:61895763-61895818
  hypo
attttctggttgcttcggctgctggctgtagtggggacggcggctgtgagccttc

SEQ ID NO: 220217 - DNA, 37 bp, Homo sapiens
  chr20:61909562-61909599
  hypo
cttgagagctggggacgcctggcgtgggccaggccca

SEQ ID NO: 220218 - DNA, 58 bp, Homo sapiens
  chr20:61913595-61913653
  hypo
tcagcttctggttcccgccagggccgccgttttctcgtctgcacgggagggctgcggc

SEQ ID NO: 220219 - DNA, 96 bp, Homo sapiens
  chr20:61967699-61967795
  hypo
gaggctcctgcctggtgagacgccaggactggggagggagcccgacaaatccaggatctgaacacagaaacggagaaaccctggggacgactcagg

SEQ ID NO: 220220 - DNA, 95 bp, Homo sapiens
  chr20:61967915-61968010
  hypo
tgtgcgtgcgtgtgcgtgcacgtttgtgtgcgtgtctgcgtgcactgtgcacgtgtgtgcgtgtgcatgcacgcgtgtgtgacagtagcccacaa

SEQ ID NO: 220221 - DNA, 247 bp, Homo sapiens
  chr20:61981498-61981745
  hypo
aggaaggcccaggctcagccggcacatccagggggacacagaaggacggtgagggcgggtgcaggctctgggtgccgctcgtggcagggggctccccttctggctcgggccagaagcgcggggcactggccatcttatgcatggactcgatgagccgccggcaattgtccttgaccacggacggccgcttcatgaggagcaggcgtggcacgatgtccaggaagaccctgcgtacccaggtgggcat

SEQ ID NO: 220222 - DNA, 187 bp, Homo sapiens
  chr20:61982647-61982834
  hypo
aaagggctggcggccttgcccgggtacactgttcgtcttctcacctactcgtgcacctcagtttatcatccctgagctgggcgtagcacgtggttcagagaacgggaagggacctacgagtgcctgacacacataatcactgctgctggtgattacccttatccatgagtggcgcatggatggggct

SEQ ID NO: 220223 - DNA, 64 bp, Homo sapiens
  chr20:61991069-61991133
  hypo
cagtggctcaggtgcaggcgggacaggagccgggagctgtccaggagctctccaggctgcccca

SEQ ID NO: 220224 - DNA, 55 bp, Homo sapiens
  chr20:61991163-61991218
  hypo
agctcctcacatgagcccttcccaccccaggacctgtgtgtgtgccgggcgtgcg

SEQ ID NO: 220225 - DNA, 35 bp, Homo sapiens
  chr20:62018865-62018900
  hypo
cacacacatgcacacgcacatgcacacccgcacac

SEQ ID NO: 220226 - DNA, 84 bp, Homo sapiens
  chr20:62019257-62019341
  hypo
gcacgtgcaagacccgatgcgcatacatgcacacgtgcacaaacaggcacacacacgcacgtgcacacacccacccacacatgt

SEQ ID NO: 220227 - DNA, 233 bp, Homo sapiens
  chr20:62031374-62031607
  hypo
ctcactgtggcccccagccccactgtttcacaacaccccagctcgttcgtgccctgaggagagggaccatccgtccccacacccggtccacagcaccgcacccgactcagccccagcatcgaccagaagtccccggccctcagaccggccgcccagagacagtgggagtgaggaggccacacaccgtccaggttgaatcactgcgttttactgagtgcacaggtccacctggc

SEQ ID NO: 220228 - DNA, 276 bp, Homo sapiens
  chr20:62056056-62056332
  hypo
cccagggtttgcaccgctgaccaactgtcccggcctcgtcctgcaggcaaagctgtctgggccttccggcgtctcatctggggctgtttccgcgggtaaaggcgttatggattgagtgagagatcggcggatcgtgatttggctcatccatggggaggccccagcgatctcattcgaacacctgggctggtgccccggctggtacgccgtgttacaagcaggctctttggtgcacttccaaatacttcatgtgacagggaccgtgttgccgtggaa

SEQ ID NO: 220229 - DNA, 32 bp, Homo sapiens
  chr20:62083855-62083887
  hypo
cacctgcacagcagcgtcgaggcaggtgcgtg

SEQ ID NO: 220230 - DNA, 251 bp, Homo sapiens
  chr20:62110513-62110764
  hypo
ggctgcacagagctgaagtccggcgagtcccaaggctcccagggcggcccgctgccccacaccctccggcaaacacgaaggcgccaccctcggcacccagcagcatctgcctcagcccctgcagagggcggcgctggtgtgggctgcagagagtatggcccgcaggcagccgccatgggcctgcccgagctgagtggctttcagcagaccaggcggccactcaggcctgcgtggactggatgtgtccccag

SEQ ID NO: 220231 - DNA, 111 bp, Homo sapiens
  chr20:62153098-62153209
  hypo
tgttggagtccgcagagcactcggaacctccccaggcctccagcagcatgaccgcctgtggcctggctcgggacgccccgaggaagcagcccggcggtcagtccagcacag

SEQ ID NO: 220232 - DNA, 149 bp, Homo sapiens
  chr20:62153462-62153611
  hypo
cacctggaactgtgcacctggcaccaagcggaaaataaactccaagcagccagtagccccgatggtgtgtgcctgagctgtgtggcccgaggttccatttgagtgtgagaaatggctgaatccctcccgacctcactgccttgtggggg

SEQ ID NO: 220233 - DNA, 378 bp, Homo sapiens
  chr20:62174691-62175069
  hypo
gggttctggatcagcttccagttggccttgtagtaggtgagcagctcctccaggccgggaaagagccgtcccttctgcaggtagaggctgccatcagctgccatggagacccggtagtggcagaccttggcctgggcccggactaggaagggttcagagatggagacccctgccttggctgccagctgccccgaccctcccaccccagaggatgctggccacaacccactaaggggtctggctcagacctagctggggaccctgagatggtcagagctgtgtggaggagggagtgtgggcagccacaggctggggcggggcagcgagagcggcccaggttggagcttttctgctgacggtgtgcacagagtaggcact

SEQ ID NO: 220234 - DNA, 77 bp, Homo sapiens
  chr20:62190624-62190701
  hypo
agacgcgcacctggccggcaggcacgagggtctgctgagcctcgcagaagtccaggaggctacgccagagggggcag

SEQ ID NO: 220235 - DNA, 38 bp, Homo sapiens
  chr20:62214176-62214214
  hypo
gaaaccacctcacacgggcagaccgactgcgtccagag

SEQ ID NO: 220236 - DNA, 199 bp, Homo sapiens
  chr20:62218354-62218553
  hypo
gggcgtgagtctgttgagctcctgactggcgggcgcaggcccctgtgccactgagaggtctccttacctgtgagcggcggtgcctccgacgccagcctcgggtcaaggtggggcccaggctgttcttactattgtcctccagcgatttgcaggacaccttcaaaaccctcacgagttaccgaatcggctgattcaaaac

SEQ ID NO: 220237 - DNA, 327 bp, Homo sapiens
  chr20:62220463-62220790
  hypo
ccacatgggaatcctcgacctccatagtgactggttctgtttatgcctctgccccaggactgaagccctagggacacacctcatggatctcagacccctgggaggggccggctcagggacaggctgcccaggacctccgcacccggtcaagtgcactcacaggggctcaggggccacccaaagagctaactcgggaagcctaggcactcaccattattttggttgaaaatgctataaatctgactcttcctagaagcctactaagcaattcacttaaaaacaccctcagtacatgtgcaacaatgcctggaccacgcctcgtctgtg

SEQ ID NO: 220238 - DNA, 289 bp, Homo sapiens
  chr20:62221030-62221319
  hypo
gggggcctcgtgacctgctgcaccgcgtccagcacctgcagggtcgcgctcggcacctggctctgcttcctctgtctctgctgcacccaggctccccctagcccccgcccacctggctcctgatcaaggcccaatgtgtaaacagtattaataagcaacagatggaaaaatatatttcccaagaaaaaagggggaggaaacgtgggacctgaagaccgattttccaggttgctctcgctgttctgtccccttctctcttctcgtgatttgttttggcgattcctctctt

SEQ ID NO: 220239 - DNA, 634 bp, Homo sapiens
  chr20:62221442-62222076
  hypo
tacttccgctcgtggtcctctgccatggcagccacctcaatggtggccgtgtgctcctcaggcccgggggcagcccctgcgggcactgtcacaattgtgctggagccaggcgaggcctgggccacgttctgcagggtggggcccaggccaggcaacgtgagcagctgtagcgggctgaccaccttgaacaccgtgctaccgtcctgcacggcggccgtgctcaggaccgtgaggctggacgcgtccgggtggatctccactgtgctggggtaggtggagccggaagaggccaagactgtgtatcccccgagcagcggggaggccggggagctggcggggggcgcctgaagggaacccttgcccaggacggtggacggcagggtggacaccactttaccaaggggcacgctggtcagctgggggacgggcacgcccgggccaagcgccagctgggcagactgggtgagcacctgcgaggccatggcggccggtcctgatgtggcacgtgcaagccggggccgcttcacaggcggtggcagggagaccggcgtcagcgtcatgagcacgttgctgaggtgctgggacttgtgcttcagctccttggctcggcgacgatgctcatcacactgctgct

SEQ ID NO: 220240 - DNA, 76 bp, Homo sapiens
  chr20:62231698-62231774
  hypo
acatttttttctgatgcaggatccagcccaagactgtggagcatgcagctgccttgctcttcggcttttgtcccca

SEQ ID NO: 220241 - DNA, 255 bp, Homo sapiens
  chr20:62242305-62242560
  hypo
cacatgcagagcctcggccagcccaccaatgcccggatatgcaagtgagcccagcctggaccccccggcgaggcccagcagcaccagcccaggcccgaaaaccttaagaaatgaccagtgtctgctgctttaagccaccaagctctgcggtggtttgttaggctgcaagcatggctaattcagaaactgccagaaacaagcactgctgtccccagcctgggacacacagcaccgcctctgcgtggggagagggca

SEQ ID NO: 220242 - DNA, 393 bp, Homo sapiens; identical to SEQ ID NO: 205907
  chr20:62273400-62273793
  hypo

SEQ ID NO: 220243 - DNA, 360 bp, Homo sapiens; identical to SEQ ID NO: 205908
  chr20:62283922-62284282
  hypo

SEQ ID NO: 220244 - DNA, 211 bp, Homo sapiens
  chr20:62317398-62317609
  hypo
agttactgagagacgtaggagatggcctgatggcaccgtgacctgcccagagtcacctggttggtggtggcagagccacagcccagccaggcctccctgctgggacacgctcgtttatgccgaggccgtcagcacagagcctccacagtgaggcacggctctgcctgctgcctccacgcagcgcctggccgggccaagcctcagggtcaca

SEQ ID NO: 220245 - DNA, 283 bp, Homo sapiens
  chr20:62322022-62322305
  hypo
ccccaatagcagggaggacacccacaggcaggaccccaagtgctgggactctcccccaagaggggctttgccacaggcagggaccccagctggggccccccgtgggcttcactgcgcactcgggtgcccctgcagggtcaccagctgccggggaccccgagagtagcctgtgtgtggagtatgagcaggagccagttcctgcccggcagaggcccagggggctgctggccgccctggagcacagcgaacagcgggcggggagccctggcgaggagcaggtaca

SEQ ID NO: 220246 - DNA, 577 bp, Homo sapiens
  chr20:62326137-62326714
  hypo
gcagggaagcagggccagcacgccgtgagcgcctacctggctgatgcccgcagggccctggggtccgcgggctgtagccaactcttggcagcgctgacagcctataagcaagacgacgacctcgacaaggtgctggctgtgttggccgccctgaccactgcaaagccagaggacttccccctgctgcacagcaagtggccctggcgtggggaacagccggtggggtggggggcaggggacaaaatgggggctgtgccgggtctgattgaagctccccgcagggttcagcatgtttgtgcgtccacaccacaagcagcgcttctcacagacgtgcacagacctgaccggccggccctacccgggcatggagccaccgggaccccaggaggagaggcttgccgtgcctcctgtgcttacccacagggctccccaaccaggtagggcacctgcctggctgctcctggcagcgccccaaccgcacgcagccctgggagtgagcagcaaagccccaggcccccctcagactcaagtctctgtctccaggcccctcacggtccgagaagaccgggaagaccca

SEQ ID NO: 220247 - DNA, 380 bp, Homo sapiens; identical to SEQ ID NO: 205909
  chr20:62384603-62384983
  hypo

SEQ ID NO: 220248 - DNA, 55 bp, Homo sapiens
  chr20:62398949-62399004
  hypo
tggccgcagcactgaggtcaaagcaaacgccggctccagcgcacagaccagaggc

SEQ ID NO: 220249 - DNA, 107 bp, Homo sapiens
  chr20:62401273-62401380
  hypo
tccgccatctccacggccaccttctccagtaacgagctggtcagaagccgtccccgcaggaaaggactgcagggagctggggtgagcttcacgggaggcggcaccgc

SEQ ID NO: 220250 - DNA, 182 bp, Homo sapiens
  chr20:62407202-62407384
  hypo
gcccagatagctggcttctcctcccaggagaccctcctccacctgtgcatagagctcggccctctctcctcggctgtcggagctgctggcttcggtgacggacaggtccgcatctggggacagagggacacacgtcagaagacacgggtcgttcccagactctccaagtgggacaggcgaca

SEQ ID NO: 220251 - DNA, 227 bp, Homo sapiens; identical to SEQ ID NO: 205911
  chr20:62461639-62461866
  hypo

SEQ ID NO: 220252 - DNA, 45 bp, Homo sapiens
  chr20:62481642-62481687
  hypo
tttcctgaatctctttttttttttttctttgagacggagtctctc

SEQ ID NO: 220253 - DNA, 339 bp, Homo sapiens; identical to SEQ ID NO: 205912
  chr20:62495239-62495578
  hypo

SEQ ID NO: 220254 - DNA, 42 bp, Homo sapiens
  chr20:62544237-62544279
  hypo
gtttggccaccgtgcccggccggcagtcagtttttacatggt

SEQ ID NO: 220255 - DNA, 507 bp, Homo sapiens
  chr20:62550666-62551173
  hypo
gatgcatcgtaactgttgagcaaatgaatgctgagctgtgatggcaccgacgtgtccggggagaggacgcacccggctgtgtggacatgtgcccagggcccaggacagcgccacggaagaggacacacccggctgtgtggacatgtgcccagggcccgggacagcgccacggaagaggacgcacccggctgtgtgcacatgtgcccagggcccgggacagcgccacggaagaggacgcacccggctgtgtgcacatgtgcccagggcccgggacagcgccacggaagaggacgcacccggctgtgtgcacatgtgcccagggcccgggacagcgccacggaagaggacgcacccggctgtgtggacatgtgcccagggcccgggacagcgccacggaagaggacgcacaggacagcgccacggaagaggacgcacccggctgtgtgcacatgtgcccagggcccgggacagcgccacggaagaggacgcacccggctgtgtgcacat

SEQ ID NO: 220256 - DNA, 265 bp, Homo sapiens
  chr20:62551402-62551667
  hypo
cagggcccgggacagcgccacggaagaggacgcacccggctgtgtggacatgtgcccagggcccgggacagcgccacggaagaggacgcacaggacagcgccacggaagaggacgcacccggctgtgtggcaggggaggttcccaagagcaggctcagggctctggggtctgagtgagggctctccagccagcagggagcagggcagggtgttgaagagacggcaggtgcgtcaggggctgacgtgggacccggcactctgtgct

SEQ ID NO: 220257 - DNA, 265 bp, Homo sapiens
  chr20:62551727-62551992
  hypo
ggggaaggggctggcgtcagcagggctctcgtccgccaacgtctggtggggatgcccgccatgcgggggcctcaggctacagccagggctgtgaaggagccgaggtcatagagtggctgccctggcgtagggagggaggacacgggtccccgccatttcagaagctcagcgtccctgcacgtgtgcggtcttgtctgcctaggcatgtgtgcgggccctggggctgctgccagcagaacggactgggatacgctggatttgtaaa

SEQ ID NO: 220258 - DNA, 1175 bp, Homo sapiens
  chr20:62562217-62563392
  hypo
ctgcggcctcctcacgtgctgctactgctgctgctgtctgtgctgctgcttcaactgctgctgcgggaagtgtaagcccaaggcgcctgaaggcgaggagacggagttctacgtgtcccccgaggatctggaggcacagctgcagtctgacgagaggggtgagtgcccgccccagggcccgtgtgtgtgtgtggggcagagccagaatgggccctgaatggtgtcaacctgtcttgtcaaacaggagggcactgacactgtgccgcgagtgtttgtggtggcagctgggactgttgaggtgtgaacgtggaccctgaggtaaagcaggcgcatagagctgtccccgccgtgacctgcggtagccgtagatcccagggactgcgaggcggggcagggcggcaggcagttggggcggggctgagggccgagggctggcggtgacccaaggcgacggaggaaagccgtgtggggtggaggtcagcgagtagcctctcccggtggagagtttgtccaggtgcccgaaagtcgctccacaggaccagcgttgggtgcgcgccaggctgtggccctcgtgcagtgccctgtgtgcttgcttttcagaggccacagacacgccgatcgtcatacagccggcatccgccaccgagaccacccagctcacagccgactcccaccccagctaccacactgacgggttcaactaaatccaggaggagctgtggtcagaggaggagccggcgcctggccacgccaaccttagaatcatgaactgtagtcacagagatgggaaggcagcctcctgcctgccctggccttgctggggcccctcctgcctccacgcccacccagcgtcgacccttgacccacgaagtgcgtagcatgcagtatttaaagcagtgtagctacggtcttctgtttttttcccttttttaatagcatgtatggggttctgttccatgtctgtgttgtggacattccgcggcatgaccgcgtgaactgcacggtggagctgcctcagggctgtcggtcaggttggtccagtgaggggtgactgcagccggtcaggtgggcgaggagaaggggggctgcccctttcctacctgtgcttgaggggccggaggcaggtgctgcctggcagagctgtgttaccgtcttggcctcggggtctggtccac

SEQ ID NO: 220259 - DNA, 212 bp, Homo sapiens
  chr20:62571650-62571862
  hypo
gtcgtggtcctaccgagtgtattgggcaggtaaatcccacctctgcctgaacctgccccgcctacccagggctcactcaccaggagcacgcgcactgccatcatggccgccgcgcccgtggacacggtgcagtccatgaggatcacgtggtcatcgctgatgtccttgggcagcctcaggtagtggagctgcgggcagcaggggtcaggctg

SEQ ID NO: 220260 - DNA, 45 bp, Homo sapiens
  chr20:62572479-62572524
  hypo
gccccgtacctgcggcgtgctcttcaggacgctcagcgtccgggg

SEQ ID NO: 220261 - DNA, 325 bp, Homo sapiens
  chr20:62578679-62579004
  hypo
tgagaccccaaaatggaccacgttcccttgcaacccggcacactctctgggcagccaaatcgctgccatgctgaaggctgggtgcccaaggagacgtgagggcggcgtgtgggtggaggcgagaccagaccaggttgtgcgcacacaccgagggtgaggtccccagacaggaccaggctgaagggctcagggagagaggcagagggctcagccaggacctgattctcctgcagtgacagcaggcccagcacagtgcctcggcctggcctctctggctgtcagagtgccggatgggggaccctgcgctgggagccttattggaacc

SEQ ID NO: 220262 - DNA, 139 bp, Homo sapiens
  chr20:62581868-62582007
  hypo
acaaaaggttaattccaacccggagggttccaagccgtaaccaacacaagagagacgcgcccagaccaacagcctcaagcaaaatggcaccttcgaccctgggctctgcccggtgcccgagagcacctgccagcctgtt

SEQ ID NO: 220263 - DNA, 386 bp, Homo sapiens
  chr20:62583701-62584087
  hypo
actgtgctggccaggcgagggacggaggagcccaggcacgcagctgtgaatggaaccaccaggccccaccctggaatcacgtcgcctcgctgcaggccacgtggtccccaacatgcccctccacggggctgctctcggccacagcagcccacggcagggaggggccgctcacggtggggaggggtagcctgccctggtcctattcactggtgttcctcccaggttctaacttcctgagctgggccggtccagagaactcccattcccacgccacccacaggtgctgatgccgcgctggggtaagcgctgcccagagcaccttctgcctaaggcttcctccttgcaggtggggctgtctgaggcccgtggtgctggaggctgcctca

SEQ ID NO: 220264 - DNA, 759 bp, Homo sapiens; identical to SEQ ID NO: 205913
  chr20:62600809-62601568
  hypo

SEQ ID NO: 220265 - DNA, 79 bp, Homo sapiens; identical to SEQ ID NO: 205914
  chr20:62601569-62601648
  hypo

SEQ ID NO: 220266 - DNA, 125 bp, Homo sapiens
  chr20:62608161-62608286
  hypo
aaaagacagattctgcggagatgaagaacagaggggaggttgattcacaggagaaactagacagacgaaaacaacagcaagagaaaggcaggctgagtgtggggaagagacgctctgaggcaggt

SEQ ID NO: 220267 - DNA, 170 bp, Homo sapiens
  chr20:62630918-62631088
  hypo
gcatggcctgatgccgtgtgcactctccctctcatagtgatatcaagaaggcgcgactgctcctcaagtctgttcgggagacgaaccctcatcacccgccagcctggattgcatcagcccgcctggaagaagtcactgggaagctacaagtagctcggaaccttatcatg

SEQ ID NO: 220268 - DNA, 120 bp, Homo sapiens
  chr20:62631831-62631951
  hypo
aaaaagaacgacccgagcagatgtgcagtctctgctttgtccatggagttgtcctgaaggaaatcatgctcttttcacaaagtggtgtttcattttttttttttctttttttttgagtct

SEQ ID NO: 220269 - DNA, 104 bp, Homo sapiens
  chr20:62639423-62639527
  hypo
gtacctggcccggcctaatttcttaacatcattaaatgtctactgcattcatatttttccagctgtcatgtcagtacctgcacgggcacatgcatgcataacca

SEQ ID NO: 220270 - DNA, 68 bp, Homo sapiens
  chr20:62662105-62662173
  hypo
aatcacagtttatctaacaccgggcaattaagaataccacaaggcttaaaaaacaatcaggttatcag

SEQ ID NO: 220271 - DNA, 206 bp, Homo sapiens
  chr20:62662271-62662477
  hypo
cagggggaggtgaccctgaggagagggtggcagcaacgcagagtcccgggcctgccagcatgctcagcagccagcgcccgccatcccttctccagcagcgggtgggggtgccatgcacacccttacctggcctctcatagcatggacctcttcgggcccggtttttcaggtgtgcatgtgtctggcaggcacggcggtgtgaatcc

SEQ ID NO: 220272 - DNA, 40 bp, Homo sapiens; identical to SEQ ID NO: 205915
  chr20:62680176-62680216
  hypo

SEQ ID NO: 220273 - DNA, 93 bp, Homo sapiens; identical to SEQ ID NO: 205916
  chr20:62680443-62680536
  hypo

SEQ ID NO: 220274 - DNA, 251 bp, Homo sapiens; identical to SEQ ID NO: 205918
  chr20:62694767-62695018
  hypo

SEQ ID NO: 220275 - DNA, 51 bp, Homo sapiens; identical to SEQ ID NO: 205919
  chr20:62695048-62695099
  hypo

SEQ ID NO: 220276 - DNA, 148 bp, Homo sapiens; identical to SEQ ID NO: 205920
  chr20:62714866-62715014
  hypo

SEQ ID NO: 220277 - DNA, 102 bp, Homo sapiens; identical to SEQ ID NO: 205921
  chr20:62715069-62715171
  hypo

SEQ ID NO: 220278 - DNA, 175 bp, Homo sapiens; identical to SEQ ID NO: 205922
  chr20:62715621-62715796
  hypo

SEQ ID NO: 220279 - DNA, 575 bp, Homo sapiens
  chr20:62737169-62737744
  hypo
gtgcccaggcccttcagcaccgcaatatgctgcggaagttcttccggaagttgtcatctagaaaggcgtagaggaaggggttcaggcacgagttggcgtagctgaggctggtgatgacgtaggacatactgatgaccagtggggtctggggcaggtccgtggtcagggccacgacagaggccaggtggaagggcgtccagcagaggaggcacacggccagcacgacgaggaccaggacggtcaccttccgcctggccttgcctagagccttggctccagagcggagccgcacggcccgcagcctgcgcaggaggtctgtgtagagcacacagatggtgcacacgggcagcacgaagcccaggaccaacgtgtagacacggctggccttgaaccagacctgctcgggccacgggaagctcagcccacagcttgggacctgcagctcgttgctgtagacgccagcgaaagagaagaagggcagaaccaggaccgtgacgcccagccagacacacaggctggcgaccttcgccccccggtaggtgcgccagggcatgtggcgggacctcacggtggcc

SEQ ID NO: 220280 - DNA, 301 bp, Homo sapiens
  chr20:62737790-62738091
  hypo
tgctggagaagatgttgtagtggtcgacggccagcaccagcttgcagagcagctccccgaagggccagtactgcagcaggtgctccgcgatgttgacgggcagtaccagcgtgaagagcccgtcggcgacggccaggttcaggatgaacacgttggtcaccgtcttcatcttgggcgcccttaggattacaaggatgacggccgtgttgccagtcagccccacagcacagatcccggagtacacggcgggcaggagcacatagaggaacggcagtggctcggagaaggtggcattgtggcc

SEQ ID NO: 220281 - DNA, 121 bp, Homo sapiens
  chr20:62839658-62839779
  hypo
ggacatgatgacccggggaaacctgggcctcctggagcaggccatcgccctgaaggctgaacaggtgcgcacagtctgcgagccgggctgcccgcctgccgagcagagccagctgggcctg

SEQ ID NO: 220282 - DNA, 221 bp, Homo sapiens
  chr20:62859325-62859546
  hypo
tacgttgggccatgctggctctttcattgcattgcggaattgagattttcgtgtgttttataatgtaaaaaaactcctactagattcccttttcattaatacaacgggtcacctaactgaccaacgccaactttcgtttctttcatttttatggaagctctcatacgctacacgttgatacctgtgaagataggagccctggatgtcgcgtggagggcatg

SEQ ID NO: 220283 - DNA, 144 bp, Homo sapiens
  chr21:15448689-15448833
  hypo
gtccctgactcccccggggacttggaaaataattcggcaggtgcctcagatgtccaggacctgtactggcctgccaccaggctgggaagttcgtccccagccacccgcaaaatgcccaatacgtccccgcgggtcttgggtcaa

SEQ ID NO: 220284 - DNA, 180 bp, Homo sapiens
  chr21:15449925-15450105
  hypo
cttcgtctgaaaaaacttgaacgaataaagattgcgagtcctgcaagaaaaagatataaaggaaatgaagaaggaggtcgcgttctgaaaggaaaaatattttaaaaagaaacaatgggcggatgcggtggctcttggctgtaatcccagcaatgtgggaggtcaagtattcaagaccag

SEQ ID NO: 220285 - DNA, 165 bp, Homo sapiens
  chr21:15455717-15455882
  hypo
cttaatacatctgttctcactgtgtcctgaccacatgcccttaaagaactcgagtcgagagagtcagcaagagactttcagcattgtctcccgaaagcagtgaggtggatggcggtggagtgtcccaaaagcagtgaggtggatggcggtggagtgtcccgaaag

SEQ ID NO: 220286 - DNA, 57 bp, Homo sapiens
  chr21:15455989-15456046
  hypo
cagagcatccgagctcgggatggggtttctgacagcgccttaagggcaaggaagggc

SEQ ID NO: 220287 - DNA, 67 bp, Homo sapiens; identical to SEQ ID NO: 205923
  chr21:15588289-15588356
  hypo

SEQ ID NO: 220288 - DNA, 87 bp, Homo sapiens; identical to SEQ ID NO: 205924
  chr21:15588911-15588998
  hypo

SEQ ID NO: 220289 - DNA, 164 bp, Homo sapiens; identical to SEQ ID NO: 205925
  chr21:16130747-16130911
  hypo

SEQ ID NO: 220290 - DNA, 153 bp, Homo sapiens
  chr21:16408140-16408293
  hypo
tgctgggattacaggcatcgtgatgtatatgactttctaacaaatactgtaatgatgctattcatccttaatagaaatccatgggagtatttaaataatacaataatgttaacgatttcttattttctgaaattactgcgaaaatggcaaatt

SEQ ID NO: 220291 - DNA, 1160 bp, Homo sapiens; identical to SEQ ID NO: 205927
  chr21:18885248-18886408
  hypo

SEQ ID NO: 220292 - DNA, 56 bp, Homo sapiens
  chr21:19274772-19274828
  hypo
gtgagccaccgcgcccagcctggagtgtttaattttatgtgtcaacttgtctgggc

SEQ ID NO: 220293 - DNA, 122 bp, Homo sapiens; identical to SEQ ID NO: 205931
  chr21:27011487-27011609
  hypo

SEQ ID NO: 220294 - DNA, 133 bp, Homo sapiens; identical to SEQ ID NO: 205932
  chr21:27011639-27011772
  hypo

SEQ ID NO: 220295 - DNA, 83 bp, Homo sapiens
  chr21:30294961-30295044
  hypo
ggaaggctgatctacgacttaaaagaatgcaaccttttgcgtcttacctacttctaacggggccacttcgagttgtcctgcct

SEQ ID NO: 220296 - DNA, 190 bp, Homo sapiens
  chr21:30357057-30357247
  hypo
gcttggaggaaaagccgcttcaaatgcatcttttgctgcaaacgcagctggtgtgtaagtatcacactgagccattagccaatatcccattaaactttttaagtagggagccaactgtttctttactttaaggataagtttttcaaaagcttgttgtgtggcttctcggacgcgacggtcatgatcctat

SEQ ID NO: 220297 - DNA, 42 bp, Homo sapiens
  chr21:30406901-30406943
  hypo
tgctgggattacaggtgtgagccaccgcgcctagcgagtgca

SEQ ID NO: 220298 - DNA, 99 bp, Homo sapiens
  chr21:30407636-30407735
  hypo
atcattaaaacagatttttacgtcttaaaaatcattttcacagtagtcttcactgaatgacatcttttttttttttttgagacggaatctttctgtcgc

SEQ ID NO: 220299 - DNA, 69 bp, Homo sapiens
  chr21:30722445-30722514
  hypo
cgtcactcctgtaaaaacccacttggcctaatacaaacctccacatacaatcgaaggtaaaatgtcacg

SEQ ID NO: 220300 - DNA, 97 bp, Homo sapiens
  chr21:30722544-30722641
  hypo
tcccaatcacatgcgtctcttactacccaaactctgctcttctggttttgatttttcaatgtctgtatacaatgccgccctgccaaatgttgggttt

SEQ ID NO: 220301 - DNA, 187 bp, Homo sapiens; identical to SEQ ID NO: 205950
  chr21:32716048-32716235
  hypo

SEQ ID NO: 220302 - DNA, 89 bp, Homo sapiens; identical to SEQ ID NO: 13211
  chr21:32931770-32931859
  hypo

SEQ ID NO: 220303 - DNA, 154 bp, Homo sapiens; identical to SEQ ID NO: 205952
  chr21:32932326-32932480
  hypo

SEQ ID NO: 220304 - DNA, 150 bp, Homo sapiens
  chr21:33057409-33057559
  hypo
gtgcagcaggtggcacggcagagccatacattttcacgctgtcaccagactcggcgtttcctctagccccagacaccactgttggaatgggatttccaatagataagtcttttgtagtgtcttcatttataccagcgatagtagctaagg

SEQ ID NO: 220305 - DNA, 45 bp, Homo sapiens; identical to SEQ ID NO: 205953
  chr21:33058221-33058266
  hypo

SEQ ID NO: 220306 - DNA, 32 bp, Homo sapiens
  chr21:33058553-33058585
  hypo
gaaagaaatcaaagttgcgctcttcactttat

SEQ ID NO: 220307 - DNA, 101 bp, Homo sapiens
  chr21:33175427-33175528
  hypo
gtctcaaaaaaaaaaaaaaaaaaaagaaatttcgcttatcggtctttcttataagcattacttacattatagatcagagcgatgcactagaacttttcaaa

SEQ ID NO: 220308 - DNA, 33 bp, Homo sapiens
  chr21:33641298-33641331
  hypo
aaataaggggaggaagggcgggggcagaatgga

SEQ ID NO: 220309 - DNA, 616 bp, Homo sapiens
  chr21:33707628-33708244
  hypo
accctggcacgaatcggtcttgagcacatagggcctggctcttggtgctcctgtaagagctggtttatatcacggggcgtgagtcagctgccactttaaaaatgtctaaatttctcacagtctgttaccctcagcagatgggaagactgtatctcattcccataggttttcctgagagcaccaagcccagcgcctccaggcaatcaaggaacattatctatagagctaaatacttctaaacaaaattcttctaaatacaggttcgcttctgtgcaagtcgacaacagtcactaatgtcagaaaaggaaagaatcatcctttcaggaatgctcgctgttcaccccagtttctggcaggcagagagcccatgcgccaggcacacccggcagactgcccatcacagaccggcgggagagccgccacgtagcgtccaggatccccagctcagctccccgagctcaggcctgctccctcatctaaggacgagatgtttattttgtttgcggaaatgctctgtgccccttagagccacagtgccagtgagcggcacatccttgattcgctcttccccggcagctgaaactagactcccttcacagccagccctgtcctgtga

SEQ ID NO: 220310 - DNA, 171 bp, Homo sapiens
  chr21:33711061-33711232
  hypo
agtcggcagaaacagcgagtgctgcatgagcatcacgtagaccaccgggagctggatgagcttcgtgcgcacggagctttctgggctgtacaggagctgtacggcggtgaggagcatctttaaaaatgtgtggtcctggtaccgaaatctaggcggcgagagtcaaaggga

SEQ ID NO: 220311 - DNA, 441 bp, Homo sapiens
  chr21:33760533-33760974
  hypo
ctctgggtacctcacctgtataacggaacaagaacagaacctacctgacagggtttgtatgaagcgtaaaaaggctaatttacacataaagcatccagcatcacacttaggtcaaggtaaaccctcaaaacataagcagccccccgggtgtcctcagcagcagcagtgaaaatccagtcacattcggcctctgccagcctcacaggtgttttcagatccccttttatgctgcaacattttccgcagcaaccaccgccattcctttaacagtcactgagcaagtgcatctgctatgccaggcgctgctctgagcttcggggccagactccattgctgccgtctgcagcgtggtctggtggtgattatgagcaggccatgggtgttctgaccaaggtgactgtgagttacaggagctcagtcggcacaggcaccctggagtta

SEQ ID NO: 220312 - DNA, 317 bp, Homo sapiens
  chr21:33781921-33782238
  hypo
gcaattcagttttctcgcaagattccaaaattcttaaagagatcagattaggaccaaaatcttctgatttaacagtgaggggctaagggacaaaacagagggaagccagggagacgtccttcagaccctctcatagcccacgactgcccggtcgcattgtgctgtccatctgccttctaaacatccttccattgtggccgcttctcctcttctttctgggtgtacagcgagcacatcagcccaagcacagccataaacccctgactgcactctctccctcaccacggccatctccccagacccacttttcttttttg

SEQ ID NO: 220313 - DNA, 163 bp, Homo sapiens
  chr21:33812566-33812729
  hypo
tgatcctggcttcatcgccaagtggctctgcagtttgaggattacgctgtgtcccgaagaaaagaaaagaaaattgttccgtttagttgcttggggtaaagggggattgatccagttacttttaaattaatctaagtcagatggtgttcgctgcataactttc

SEQ ID NO: 220314 - DNA, 240 bp, Homo sapiens
  chr21:33844219-33844459
  hypo
agcaaccgcactcggcctccatttcttaatattgcagagaagcacctcatttcccaggcttactagtctaacttagccacatgtgttttaagaagcagcagtaagtaacatccctgtcagttgttcttttcagcagaattcagttggccaagcaggtaaatctgtaagccgaatggtttgtgttcacttggtcactgcctttcattcctaggaatggtagatgaaagttggatttaatta

SEQ ID NO: 220315 - DNA, 208 bp, Homo sapiens
  chr21:33845782-33845990
  hypo
ctgttttgacctcccgtctcctacccgctatccgtccctcccttcagtcccatgggcagagcatttgccgtctgcagagaatttgcagacagtcccagggcggtcccatggtggcacctctctaatctgtccactttgctcccagcctcctccgggcatctctcccctggacatcgaagctgcctcccctcttcgcttagcagccaga

SEQ ID NO: 220316 - DNA, 65 bp, Homo sapiens
  chr21:33849056-33849121
  hypo
acccccagggctgcccgaggcctggctgccagtactcccgtatcctgcaccgcagtgggacacac

SEQ ID NO: 220317 - DNA, 89 bp, Homo sapiens
  chr21:33875251-33875340
  hypo
tctaacagggttcccacccgatccataaacagcctggtccccctgcagtgggggcctgagagccaaccctgtgccgtctctcctcaaag

SEQ ID NO: 220318 - DNA, 148 bp, Homo sapiens
  chr21:33876126-33876274
  hypo
gacttttaattattccggcggtccctggggtaggagcagcaggggtgtcttagaataggcgtactatgaacagctgtgattaattggtcttgcatttttcatgaaacaggtataaacttcgacccaagcggatcgaaggttctgagga

SEQ ID NO: 220319 - DNA, 219 bp, Homo sapiens
  chr21:33924144-33924363
  hypo
ttagagagactcaggcgtgcaccaaggaaacgtctagctatgctcttctccagcctctcaccgggctgcaggtcttagcttttagtatcactggggtgtcccgggcttttgtttgaatggctcaacctggctgcaatcattgcagccgatcgctctgccagcatctgcattgtctgcttcaaaagtcaggctcaccagagagagcaatttcttttttct

SEQ ID NO: 220320 - DNA, 120 bp, Homo sapiens
  chr21:34033543-34033663
  hypo
cacttgccagcccttgccaaagcagtagcacaatggtgtgttacttgctgacagcgcaatgtgaggcaaggccccacggttccacccagcatacaagcttatggagcggctccttttgag

SEQ ID NO: 220321 - DNA, 92 bp, Homo sapiens
  chr21:34710940-34711032
  hypo
agttatattatgaaacggatttcatgaagtaaatattacattagttacatattcatatttcatattctgttctgagctaattattgcatatg

SEQ ID NO: 220322 - DNA, 32 bp, Homo sapiens
  chr21:34711332-34711364
  hypo
ccaccgagcccggccaataatgatttttttaa

SEQ ID NO: 220323 - DNA, 40 bp, Homo sapiens
  chr21:34745739-34745779
  hypo
gaaaaaaaaaaaaaacaacgagagtgagcctcagccctcc

SEQ ID NO: 220324 - DNA, 360 bp, Homo sapiens; identical to SEQ ID NO: 205967
  chr21:34776292-34776652
  hypo

SEQ ID NO: 220325 - DNA, 247 bp, Homo sapiens; identical to SEQ ID NO: 205971
  chr21:35986732-35986979
  hypo

SEQ ID NO: 220326 - DNA, 1781 bp, Homo sapiens; identical to SEQ ID NO: 205972
  chr21:36160097-36161878
  hypo

SEQ ID NO: 220327 - DNA, 3126 bp, Homo sapiens; identical to SEQ ID NO: 205973
  chr21:36161932-36165058
  hypo

SEQ ID NO: 220328 - DNA, 162 bp, Homo sapiens; identical to SEQ ID NO: 205974
  chr21:36171597-36171759
  hypo

SEQ ID NO: 220329 - DNA, 203 bp, Homo sapiens; identical to SEQ ID NO: 205975
  chr21:36206695-36206898
  hypo

SEQ ID NO: 220330 - DNA, 105 bp, Homo sapiens; identical to SEQ ID NO: 205976
  chr21:36231770-36231875
  hypo

SEQ ID NO: 220331 - DNA, 179 bp, Homo sapiens; identical to SEQ ID NO: 205977
  chr21:36252845-36253024
  hypo

SEQ ID NO: 220332 - DNA, 266 bp, Homo sapiens; identical to SEQ ID NO: 205978
  chr21:36259127-36259393
  hypo

SEQ ID NO: 220333 - DNA, 39 bp, Homo sapiens; identical to SEQ ID NO: 205980
  chr21:36265221-36265260
  hypo

SEQ ID NO: 220334 - DNA, 117 bp, Homo sapiens; identical to SEQ ID NO: 205981
  chr21:36421138-36421255
  hypo

SEQ ID NO: 220335 - DNA, 131 bp, Homo sapiens; identical to SEQ ID NO: 205982
  chr21:36421464-36421595
  hypo

SEQ ID NO: 220336 - DNA, 182 bp, Homo sapiens
  chr21:36437235-36437417
  hypo
ctttcgggtccaggcgaactcgctgtggtattgttcttctctgctcggtttccaaaggagagcccaggcgcgttaattgctgggtggcagctacactaaatgcaagtggacgacagctgggtgccgggctcgctctgcaagagaaggtttgggtttccattgtagtccgcatcataatccgc

SEQ ID NO: 220337 - DNA, 134 bp, Homo sapiens
  chr21:37259305-37259439
  hypo
ctggcgtctgggtcgttgtgtcctgacaaccgctcaggtaaccgtttcctagacagcgggtgcggctactttagccctgagcgtgctctgcggctgcctgcgggtctcagctagtgtccgacccctctcttcgc

SEQ ID NO: 220338 - DNA, 322 bp, Homo sapiens
  chr21:37405027-37405349
  hypo
tgtgtgggggtcgctgttctattgtgggggccgctgatgtgtgtgggggtcgctgtcctattgtgggggccgctgatgtgtgtgggggttgctgtcctgttgtgagggccgctgatgtgtgggggtcgctgtcctgttgtggggcgctaatatgtgggggtcgctgtcctgttgtggggcgctgatgtgaggagtcgctgtcctgttgtggggcgctgatgtgtgtgggggtcgctgatctattgtgggggctgatgtgtgtgggggttgctgtcctattgtaggggccgctgatgtgtgggggtcacgtcctgttgtgggg

SEQ ID NO: 220339 - DNA, 373 bp, Homo sapiens; identical to SEQ ID NO: 205983
  chr21:37528252-37528625
  hypo

SEQ ID NO: 220340 - DNA, 275 bp, Homo sapiens
  chr21:37582267-37582542
  hypo
gtggaaaaatggatgaaaagcgcctcgcacaatgatcaggacacaggcgaccccgatgaacacgtccctttcctgccccgtcagtatcccctttgtctctttctctccatcgtctcagccctgctctggcttcttgtctcttactcttggatctgactggtttcttcccatcccaaatctgctaagagatttgggatggggagaaagcctagctttgctcatatgtatcctgtgctttaaaaatgtctgacttcccggctgggtgcggtgactca

SEQ ID NO: 220341 - DNA, 63 bp, Homo sapiens
  chr21:37775172-37775235
  hypo
aaaggaatgatggccgagtggggatgtctgctcccgttttacgctgcagcttatcagctcagt

SEQ ID NO: 220342 - DNA, 40 bp, Homo sapiens
  chr21:37781692-37781732
  hypo
tcctggaaaagccactcttgctgttcgctgctgtccggtc

SEQ ID NO: 220343 - DNA, 206 bp, Homo sapiens
  chr21:37847275-37847481
  hypo
atgggggaggaggtgcgggaggcttgagcacagaggaggagaccatggtcatccaggagaatgaccgcaggcctggaccaagtcaaggggtcaagtgctagtcagtgccgggtgcaggtggggcaagtggtcctgcgggtaccatagactatcacgccggacagcctttcccagcaccatcaactgcactgcgagggtcccaagtg

SEQ ID NO: 220344 - DNA, 120 bp, Homo sapiens
  chr21:38419197-38419317
  hypo
gggtccccaagcaggccattgctgcctggcaccgcagggacccattgggagagcagctagagtggggggatatgctacagggagaaggaaatctccagctgaactggggcgagaagcctc

SEQ ID NO: 220345 - DNA, 73 bp, Homo sapiens
  chr21:38566696-38566769
  hypo
tgctgctccctgcccgcgagccacttagaagctgatttggtgaccagatgaacttctcgcgttaccccagtgc

SEQ ID NO: 220346 - DNA, 35 bp, Homo sapiens
  chr21:38605997-38606032
  hypo
cccactggcaaacaggtgcacggtcccacctgtag

SEQ ID NO: 220347 - DNA, 44 bp, Homo sapiens
  chr21:38606095-38606139
  hypo
cgttgttgtctgccttactgtgcgagcccagacagataacacaa

SEQ ID NO: 220348 - DNA, 120 bp, Homo sapiens
  chr21:38673107-38673227
  hypo
gaggtaggaggtggccgatgcttgttggatattcaagagcatctgtattcacttttttataaattcattatggttaagagtggtcttttgtaggggtttggatttcgggagaaatcattc

SEQ ID NO: 220349 - DNA, 397 bp, Homo sapiens
  chr21:38823665-38824062
  hypo
ccctccctccatccctcccccacccattgcaacttccagtcctgcaagctccattcctgtaaacgcccacacaagtgatcttttatatcatatttttattgtaccttttccatgcctatagcacaaataatgagggttacagttgccctcattattcagcacggctgaacaggtttgcagcctaagagcagtaggctctaccgtctagcgtgggcgtgcagtaggctccaccgtctagcgtgggcgtgcagtaggctccaccgtctagcgtgggcgtgcagtaggctccaccgtctagcgtgggcgtgcagtaggctccactgtctagcgtgggcgtgcagtgtatactcagtgatgttctcacaaccatgaaatcgcctgacagtgaatttcttag

SEQ ID NO: 220350 - DNA, 310 bp, Homo sapiens; identical to SEQ ID NO: 206000
  chr21:39288394-39288704
  hypo

SEQ ID NO: 220351 - DNA, 279 bp, Homo sapiens; identical to SEQ ID NO: 206001
  chr21:39288901-39289180
  hypo

SEQ ID NO: 220352 - DNA, 142 bp, Homo sapiens
  chr21:39726165-39726307
  hypo
ggtgtgcccttactgaggatcgacaaaggagaacacgtctatgttttgtggaaacacgactgaagccttcatccaatgacgttggccggccccgctctcctcgtgccatcaagcactctacgctgactcagtagagcagcac

SEQ ID NO: 220353 - DNA, 35 bp, Homo sapiens; identical to SEQ ID NO: 206002
  chr21:40032286-40032321
  hypo

SEQ ID NO: 220354 - DNA, 158 bp, Homo sapiens; identical to SEQ ID NO: 206003
  chr21:40032367-40032525
  hypo

SEQ ID NO: 220355 - DNA, 66 bp, Homo sapiens; identical to SEQ ID NO: 206004
  chr21:40032848-40032914
  hypo

SEQ ID NO: 220356 - DNA, 132 bp, Homo sapiens; identical to SEQ ID NO: 206005
  chr21:40032974-40033106
  hypo

SEQ ID NO: 220357 - DNA, 86 bp, Homo sapiens
  chr21:40117700-40117786
  hypo
aagactctgtctcataaacaaacaaaaacaaacaaacaaccaaaaaatccttaatgaacatgtatgtttaacgatatatatatata

SEQ ID NO: 220358 - DNA, 1162 bp, Homo sapiens; identical to SEQ ID NO: 206010
  chr21:40177485-40178647
  hypo

SEQ ID NO: 220359 - DNA, 183 bp, Homo sapiens
  chr21:40191659-40191842
  hypo
atacctgcagctgtgctggccggcttcacaggtgtgtgtggaactccgagagcctggccgcccagtctcctgggtcctgtcccttgcttcctttcgagccacagtaccacattcaccgagggtgtttctaagctaggtacaccagtgctctacactccatgttttatgcgtggcttgctgtat

SEQ ID NO: 220360 - DNA, 43 bp, Homo sapiens
  chr21:40208390-40208433
  hypo
tcagaagaagattatcggccgggcgcggtggctcatgtctgta

SEQ ID NO: 220361 - DNA, 44 bp, Homo sapiens
  chr21:40278582-40278626
  hypo
attacaggcgtgagccaccgcgccccaccgcgtctgccattctg

SEQ ID NO: 220362 - DNA, 272 bp, Homo sapiens
  chr21:40316174-40316446
  hypo
ctctgtgactccagcgcactcggggtcccaattccacaccctctgcaaaggccctcgcagcctgcccgtgtctccgcctcctccccaaggtctcccctcccgcctgctcctccaacagatgggcccctggctttgcactactcctcttttcccttcctcaggactttatttttattttattttatttatttttattccggtaccacctctcagtgagacccactgtcaccccatcagcgccctctccaccctcccctgctttacttctcctt

SEQ ID NO: 220363 - DNA, 452 bp, Homo sapiens
  chr21:40316506-40316958
  hypo
aaatgattctcaactggcggtgacatcgctcctcacttctcccgggggacagtgggcagtgcccggggtcacttttgattgtcacaattggaggaggcccctgacatctggtgagtggaggccagggatgctgcttaacatccttcaatgcacaggaaggcccagccacaaagcacgatccagcccaaaacgccggcagtgcctcggcagaaatgtcacctcctacaccatcaactctgtgagagcggggatttgtttgtcacgactgcgtcctggtgcccagaccaaagcctgcacatcacggtgctccgtggatgggtttgaaggagcggacctggaccagagcgtgctgtaggccacagtcagtgccggcccacccagaactggccactcagcggttacccatctctatcgctttctttcccagagtcggaaacttggaaccactttca

SEQ ID NO: 220364 - DNA, 201 bp, Homo sapiens
  chr21:40434519-40434720
  hypo
aaggccagcggggacgcttgtaggcagctaacacagtgagagcagaaacaagcactcagccctccgggagctgccagcttcacgggaacgagatcctctccaggggatctggagcggctgcgtgttccgcacattaatcctctccatgagacctggtcacctttctccccctgagttcctgagcatcgcagctggggaatc

SEQ ID NO: 220365 - DNA, 148 bp, Homo sapiens
  chr21:40480501-40480649
  hypo
cccacaggtgtgcaaggtagcggggagacctgtgtctgcccaacaaggcccgggctccaggggccctaaccaggtgtgggctgagaacgggagctccccaagggcgggccgcgctcctcatcctctcgctaagcccttgctgaatgag

SEQ ID NO: 220366 - DNA, 62 bp, Homo sapiens
  chr21:40488784-40488846
  hypo
tggaccctcagtaaacgcatgctgagtggacagcacatggtctaggccgggaaggggtgagg

SEQ ID NO: 220367 - DNA, 348 bp, Homo sapiens
  chr21:40506196-40506544
  hypo
acagcgcccacctccgctaagggggctccgctttcctgcctagctccttcagtttcttgccgcgaaaatggtctttgtattgcactttgtggctgacagacaccgtccgttacctctcagcattgtttcaatacacacacattaacacacactcgcgcacacacacacgtacacactcgcacacactcccacatgtacacatatacacgcacacccacacatgtacacagtcacacacaaactcactaacacaaacatgtatacattcactaacacacacaaactcacgaacacgtgctaacatgtacacactaatacactcatacatacacacgaacacattcacac

SEQ ID NO: 220368 - DNA, 34 bp, Homo sapiens
  chr21:40697450-40697484
  hypo
attataggcataagccaccgcgcctggaccccct

SEQ ID NO: 220369 - DNA, 441 bp, Homo sapiens
  chr21:40762349-40762790
  hypo
gtgtatgtgggagtttaaggactttgtcatggtggggctagtttgtaggtgtttctcagcaggatgaatctcccagtgttctccagcaacagcctttgctctttatcagtcctgggaacgttcacggccgcagtttgcattcagtcctgcagggacgcacacaactggctgggtcacagagtggtcagggcatagacagaaagtagcgggggactggggaaccctcctgtgacccgtgttggaaggtgctgatccccgttgtccgccctgccagatgtccagggtgctgcagaaggacgcggagcaggagtcacagatgagagcggagatccaggacatgaagcaggagctctccacagtcaacatgatggacgagtttgccagatatgccaggctggaaagaaagatcaacaagatgacggataagctcaaaacccatgg

SEQ ID NO: 220370 - DNA, 89 bp, Homo sapiens
  chr21:40904967-40905056
  hypo
ttaactaacctttctcgtgatacaaatcattttcatgtaagtcagagctctccttcagtccagtagtttttaatttttttttttttttg

SEQ ID NO: 220371 - DNA, 70 bp, Homo sapiens; identical to SEQ ID NO: 206012
  chr21:40941233-40941303
  hypo

SEQ ID NO: 220372 - DNA, 85 bp, Homo sapiens; identical to SEQ ID NO: 206013
  chr21:42539458-42539543
  hypo

SEQ ID NO: 220373 - DNA, 295 bp, Homo sapiens; identical to SEQ ID NO: 206014
  chr21:42539583-42539878
  hypo

SEQ ID NO: 220374 - DNA, 840 bp, Homo sapiens; identical to SEQ ID NO: 206015
  chr21:42540178-42541018
  hypo

SEQ ID NO: 220375 - DNA, 272 bp, Homo sapiens
  chr21:42572214-42572486
  hypo
attatttcagaatgaaatttcgtttagtttatgagtctgtccaaatatttcgatcatttaaattcagatgttagtttacctcggtttgtggagaatggactgggctgtagaaacttagaagccaagcgaatgtggactccgctgtcttcattgctgtcttgttactatggatgtcggattaggtgcacccgtgaggtcttggattgtaaccccatgttctgcaggtctcaggacctcttccctgcactgtgctagcccggccccctgtgatg

SEQ ID NO: 220376 - DNA, 39 bp, Homo sapiens
  chr21:42585677-42585716
  hypo
gtgacagagcgatactccgtctcaaaaaaaaaaagagta

SEQ ID NO: 220377 - DNA, 94 bp, Homo sapiens
  chr21:42593386-42593480
  hypo
tctttgtaccaagggcaaaacgagtgtctttgattttacctttgcaaataattttgttgtcgattccacaaatgtgtgagtgtcggccgggcgc

SEQ ID NO: 220378 - DNA, 213 bp, Homo sapiens
  chr21:42593780-42593993
  hypo
gtcagtgtctactgtgtgcctggccctgttacaggcatgcacggcagacagagcagcaaacagcaaaaatccctgtcagagggaggcttcacgctggtggggcggaggcagcaggagctgtcgggaccccgtgaatggcatgattgcgcacggggcccaggcagtggctgagttggttacaagaatgcgctcggagtctgactctgggttcca

SEQ ID NO: 220379 - DNA, 43 bp, Homo sapiens
  chr21:42596858-42596901
  hypo
acagtaaaaatgtatctagtcggctgggtgcggtggctcacgc

SEQ ID NO: 220380 - DNA, 180 bp, Homo sapiens
  chr21:42608632-42608812
  hypo
aacctgaactccagctgctgcgggcacaggctggtggagcctccctctgggatgccggcacctacccgtgtcacacagcagcagcacagcagccctgcaaagccggagggccaggcaggtgccagattgggttgtgtccttcaaagggtcgtgtcctacggtggccaaacaaagcacctg

SEQ ID NO: 220381 - DNA, 85 bp, Homo sapiens
  chr21:42609014-42609099
  hypo
taggatagctgccttggacacggcaaccttatcttcatggttcgggaacatggatacataagagaatgcaaggggcttagccggg

SEQ ID NO: 220382 - DNA, 110 bp, Homo sapiens
  chr21:42613646-42613756
  hypo
aacaccaggaatgtctgtggcgcgtggcgtctacactgggtgacccatgtctacactgtgagtcctaagcgggtgcccctctctgtcgccctcccgcagccatcaagttc

SEQ ID NO: 220383 - DNA, 103 bp, Homo sapiens
  chr21:42613819-42613922
  hypo
gatgtgtggagccggcttgcccgttgctggatctgggaccaacggaggtagtcttgtgggtatcttttagtcttaaaggggcgaaaaatcacagatggatggg

SEQ ID NO: 220384 - DNA, 166 bp, Homo sapiens
  chr21:42617797-42617963
  hypo
taacagacagatggtgatggcggctagagccacgtggggcggggagcgccactgtcactcacgcacctttccctttctctcccggttcaagtataacgcagacaaggccatcgtggacagtggcaccacgctgctgcgcctgccccagaaggtgtttgatgcggtg

SEQ ID NO: 220385 - DNA, 113 bp, Homo sapiens
  chr21:42617995-42618108
  hypo
tcctcgggacactcacgggtccccgagttgctgagttacagtcacctgctgaggagcagcactgcgtgttctgagcatctctgaactattgcgccatgtatttccaattttca

SEQ ID NO: 220386 - DNA, 214 bp, Homo sapiens
  chr21:42676099-42676313
  hypo
tcatagactggattcgcgactgcgctgttcccgtgatccactgcgcctgcgcgggcgcctggctgggctcggcgggcatggctggggcaccctggcgccatctttttccaccgtgcgaaggcaggagcccgagactgggtgagaggacgcggggctggcgtggggaggggaaggatggacggggcaggacgctgccgcctgcatctgggaccct

SEQ ID NO: 220387 - DNA, 180 bp, Homo sapiens
  chr21:42780052-42780232
  hypo
gagcagagtgagaccgctaccaagagaagaatccttaaggagagaatttaccggctcactcaggcgcgacacgcactctgtcaattctccagcaaagagatccactgaagggcggcgatgcctgtggttgttttcttgtgcgtactcattcattctaaggggagtcggtgcaggatgccg

SEQ ID NO: 220388 - DNA, 120 bp, Homo sapiens
  chr21:42896357-42896477
  hypo
caagtctttataatcataaaataagctttttgatccttgtacatttcttttttccagctaaaatacatgcaagtaactttttaaaaataggttaagccggctgggcgtggtggctcacgc

SEQ ID NO: 220389 - DNA, 127 bp, Homo sapiens
  chr21:42953516-42953643
  hypo
ccccacgacacagcggggggcaaatgaccaccaggagccagggagtcccagggaaaggacgcagatggctcgtgtcctggaatttcatgggagccatttgaaatcatcagcaaatgacgcccgagtc

SEQ ID NO: 220390 - DNA, 54 bp, Homo sapiens
  chr21:42953673-42953727
  hypo
agacagggtgggcagccacaaaacagggtggtgaaggcccgaggccaggagggc

SEQ ID NO: 220391 - DNA, 164 bp, Homo sapiens
  chr21:43021070-43021234
  hypo
acacctgtagtcccagctactcgggaggctgaggtcccagccgaatcccagctactcgggaggcggatcccttgttcaaaaagcatgaagactttacagatggcgacagcctctcgttgagcccaggaagagtcatctgagccggggaggtggaggttgcattg

SEQ ID NO: 220392 - DNA, 140 bp, Homo sapiens
  chr21:43026399-43026539
  hypo
cctgagtagggtgggcgctaagtccaaagactccggagaagcgacagacacagagacaggagaaaggcacgtgaaggtggaggcagagactgcagtgaggcagcccacgagccagggattacaggcgtgagccaccgcgc

SEQ ID NO: 220393 - DNA, 243 bp, Homo sapiens
  chr21:43088944-43089187
  hypo
actggcttgcctgagctgggcggccccgcggtctaagcattagagcgacctacctgtctcatcttgccggaaaactggggataataacgcttacctcacaaggaaggtgtggggattaatgacttaatgctgcttagcgcccctgtgggtctgctgagccagccaaggagggccggctgccctgggaccggagcccagcacttgggacttccggggccctgtaggagccggggtcctggcgag

SEQ ID NO: 220394 - DNA, 62 bp, Homo sapiens
  chr21:43090566-43090628
  hypo
cccagccagggcctgcgtgcggggcgtgcccggctggttctgttgaccgagggtcagcacgc

SEQ ID NO: 220395 - DNA, 254 bp, Homo sapiens
  chr21:43109376-43109630
  hypo
ccgggtcaccctgcacgggccctcgtcaccgggtcatcccccacgggccctcgtcaccgggtcaccccgcatgggccctggtcaccgggtcaccctgcacgggccctcgtcaccgggtcaccccgcacgggccctggtcaccgggtcaccccgcatgggccctggtcaccgggtcgccccccacgggccctcatcactgggtcgccctgcatgggccctcgtcaccgggtcatcccccacgggccctggtcacc

SEQ ID NO: 220396 - DNA, 826 bp, Homo sapiens
  chr21:43160962-43161788
  hypo
ccccacgtggacccccggtctccgcaggcagccagctaggtcttgcttcgccgcaggagcgtggcggcggggccatggccgccctggaacttgaggctctgcaggttgatgtgggccccatgcctgagcagagtctccaccgtctgtgcgtgccggccctgggcggccaggtgcagcgcgctgagcccctgctcgtcgaacaggtcaatgacatcggcgctgaccaactcctccaccacctccgagtgcccgtgggcggcagccaggtgcagcgccgtctggttcaggggtccccgggccagcacatcggccttctcctcgacaagcagcttgacagtggccaggtgtccgttgcgggcagccaggtgcagagcggtgtagccgtctgaggtcatggcctccttgccagcgccccgatgcaggagcagcctggcagtgctcgtgtgccccgtctccgcggccacgtgcaggggtgtctgtgccagcaggctgcagacgttgacgtcggagcacaggtcgatgaggatgcgggccacgcggtagtgcccgcgctgtgcggccaggtgcaatggcgtcctcccatccagcgtctgggcgttcacactcacccccggctgcttggccagcagcttgacgatgggcaggtggccctgccaggcagcgtagtgcagtggcagccaggcatccttgccctgcaggctcacgtccacgcctcggcgcagcaggatgcgcacgatattctcctgcccgtgctggcaggccacgtgcatgggcgtccggccctcaaagtccacctcgttgaccgaggcgttcttctccaacagca

SEQ ID NO: 220397 - DNA, 336 bp, Homo sapiens
  chr21:43161818-43162154
  hypo
ctgcaaagtggagggctgtccactggtcctcatccttggcgttgacactgatcttccgcgccagcaggagctccacgacaccccgcaccctcctctccacggccatgtgcaacggggtggagcccctacggttgctcaggttggggttggcattgttgagcagcagccacttggcgcactcctcttgcccggcctccaccgccaggtgcagcaggctggcaccgctgtccagtgccaggtccacgtcctgcggctgcaggatcttcatcagtttgctggtgtccccggacacgatggcatccacaagcttcttcttctggacgtctgtggtgccca

SEQ ID NO: 220398 - DNA, 323 bp, Homo sapiens
  chr21:43162542-43162865
  hypo
ggcacctgccacccacggacgccccaggcctagcagcctgcagagatggtgactagagctggaaggggctgctccagctcttgccccacctcgaagtggcacctcctgacctggggaggttaagtcggaagttttctatgataatcctgaagggaccgagcttctcgtttcaggaggacgttagtccagcactcaggatgaaaagttgtatttaccacaaaaatcctaccgtagtgcctggaatgctgaaaccctgcaacgagactctcctccgccctcatgtgaaacgcgtggggacttggaagtcggcggtgggaaggtgt

SEQ ID NO: 220399 - DNA, 644 bp, Homo sapiens
  chr21:43164044-43164688
  hypo
tggttgaaggttcccgctcaaaggacagcgacagtgatcctctggaagagaaggcggagtccaccgaggacacccccgagagcctcttcccactgccggacgatggcagcttggactcagaggagctgcggctgagctcctcggggccctcgacagcctgggaaactccagagtccagctgtgagagcagctcggagaggctgtagtcgttatcgaaggtgggggcagaggcccgcttgagcctcgcaggcaccacctgcgaagatgcagaagagggggtgggtgaagaccctgccatagaccgcatggcccgcccatgacacaaacacagaagagcaaggtgggccacgggagggagatgggggaggaaaggacggaccctggaagcaatgcagataacctattggtcaccgagctcagaccccgcatcggcacagcactagggagctcagacgccatgtccacacagcgccgcggagctcagaccccgcgcccgcacagtgccgggcagctcagaccctgcacccgcacagcacttgggatgctcagactctgcacccgcacagcgccagggagctcaaagacttggagctacaaagacttgcgctggccccacccagcacggagacatcttaaggaaagat

SEQ ID NO: 220400 - DNA, 366 bp, Homo sapiens
  chr21:43165725-43166091
  hypo
ggcggggatgcagtcgggcaggtggacctgagcccccatgggacctacacttctaatggagttgggtgcgggatgggctcagaagagagggagagtggtccgggcggcgggggactctgcaaagaggagtggtttggaaactcctgcctggaagccgaggagacaaaagacccctgtgggaaggactcgttacctcgctcctgggctccggggggcttttcacgtccagatcatgagcagtttctttcacttcgtcatcaggcttttcacacaggtcctcggtttcagaagtaatttcttgtggggaagaaaggggacatgtcactcggatgatgacttctgcgtacacacgcgttccatataaac

SEQ ID NO: 220401 - DNA, 223 bp, Homo sapiens
  chr21:43166637-43166860
  hypo
gtgcagggctcatttcggcccacctgttacacgccttgtttctcacccaggcctggtccctcaccctgtcctgtctgtcacctctgtctcctgtgacacccacagaatgtggcggggagaccccggggtgctcaccttggaaggtgggcctaactcgcggatccccctgccagcaccgctgcatgaggcgtatcaggtggctgcaggcgcgcggccgggctct

SEQ ID NO: 220402 - DNA, 192 bp, Homo sapiens
  chr21:43168156-43168348
  hypo
tgacctgtcccctgcgcctagcttcgggtgtcacatctatcagacactgcctcatttcacaagccttcgggctgtaggccactgtgcgggagaacgtacagaaggcaagaaaggcgacaggcggtcagacaacacagacggacaccggccagcagaggcctggcaggacgcgttctgtgctttctactgaca

SEQ ID NO: 220403 - DNA, 291 bp, Homo sapiens
  chr21:43239791-43240082
  hypo
tcccacactcggcccgtggccccggcccccgcccccgccacacccaccttccccacactcccagttctcgctcatgtccccttccagcaccctgcagcagggtggcctggctgagcctggcccatgtccccagcacccgtacccacctttcccacactcggcacacaggtactcgcggacattgtcgtgcacacgcatgtgctccttcagcatgtccttcctggcaaaggacttcccacactgctcgcaggcgtggctcttcacacctgagaacacaggcatctgccactc

SEQ ID NO: 220404 - DNA, 219 bp, Homo sapiens
  chr21:43240112-43240331
  hypo
gcaaagaggatgcaccaaggagaggggcccagcctccccagcagctagaagcgcagtaacaggggtggggtcgcctcttcagcggcctccacagagccctcccggggatcctgtgactccagtagatccctgaggacctggaggggtgagggggctgggggcgctgggctgtgagtggcagggctgataaggacgggaaaagctggagaaacagaggaa

SEQ ID NO: 220405 - DNA, 111 bp, Homo sapiens
  chr21:43245253-43245364
  hypo
ggaaggcaggacggcggggacggtgacagcgggcctcctgcgggggcctgtgctcccagctgctgaaacgctggatgagcgtcactccggggctcacgtgagctgtgtgtg

SEQ ID NO: 220406 - DNA, 342 bp, Homo sapiens
  chr21:43271351-43271693
  hypo
ccttcacgtatccagtctgaacagtgagaactgggcaagcggccagctttctggatgtttctagcctctcttcgaaggtcttgttatctatcgagatactcatttctgagacgcaggcagcgttgggctccagtgcatagcttcagctgggtgaggtgctcgacacacactcagactctggtgggccctgggtgcattgggcgggcagggctctagaagcgccactgtgcctcgagagggacccctggcagggtcagggaggaggggctcaggggaaggagccagataggtggcagagggtgagaggcagtgtgtgtgtggcgggggcgctgacgcggctgc

SEQ ID NO: 220407 - DNA, 211 bp, Homo sapiens
  chr21:43273228-43273439
  hypo
tgcgggaggcacatttctgacgtgaaggcactgggttgctggtgttttatgggggcagcgcagcgccgggacactcccacacagcccattgtggacctgggattagggacaaccaggggcattttacaaagcctcaatcatactgacaaacaggacagaccagaaccttccaataagttaagaatcttaagctaccgagctactaatattt

SEQ ID NO: 220408 - DNA, 239 bp, Homo sapiens
  chr21:43290514-43290753
  hypo
agcaggaggagcatctttcccgctgggcacacggcctcgtgacaatattaaaagcactcagggaaaacccactaacggaaaaagcaaacgtattttcaaaaatatgcgccgcagaaccatcctgaaaaatgctgtgggtgggcttcagggggctagcgggtgggtggagacggactctgactaagtcagtttgtgacaccctgcagattcccactctggagtcacgacacacacaggca

SEQ ID NO: 220409 - DNA, 89 bp, Homo sapiens
  chr21:43347890-43347979
  hypo
tataagaaattctcgcaggggattgagatgaaaagggttggaaacaagatggtggccaaccccaagagctgctgtttatcctcttttgg

SEQ ID NO: 220410 - DNA, 33 bp, Homo sapiens
  chr21:43348009-43348042
  hypo
tcaacctgactccaaccccgcccccagcaacac

SEQ ID NO: 220411 - DNA, 240 bp, Homo sapiens; identical to SEQ ID NO: 206024
  chr21:43373583-43373823
  hypo

SEQ ID NO: 220412 - DNA, 60 bp, Homo sapiens
  chr21:43386123-43386183
  hypo
ggggggcccaccatgcgattgtccgggtgaggaggggaggttgggcgccttccctggcat

SEQ ID NO: 220413 - DNA, 65 bp, Homo sapiens
  chr21:43481098-43481163
  hypo
tggtgtgggcggaggcggtggtccctggtgtgccctggctgcagccgcctcgctccccctccacc

SEQ ID NO: 220414 - DNA, 234 bp, Homo sapiens
  chr21:43546441-43546675
  hypo
gctttgtgctcagaacatgacgaacaccgtggtgaggaccacgctgaggaacgacctgtcccaggagggcatcatccaccacctgaagatcctgagccccatctactgcgccttccagaatgacctgctgacatcctccggcttcaccctggagtgggggtaagggagaaatgccccggctgccccacagccacgtgcctccagaccacctgcgctttgagagttctttagggt

SEQ ID NO: 220415 - DNA, 390 bp, Homo sapiens
  chr21:43547671-43548061
  hypo
gcctgtggaatctgcgagtgtcgtcagatgtagtcgtgagtaaactcatctgagaacaaggacagcggggctcgctgacaagcaaggagtcccatttcctctcttctcagctgccctgtgcccaacacatacaccaacgtgattgagaacggcaactccaataaggcccagttcaagctgaggatcttttcctttatcaacgactccatcgtctacctgcactgcaaactccgcgtctgcatggaatcccccggagccacgtgcaaaatcgtaagtgttttttggttttctaaacgtttggttggattcacgttccttattgttacggttcgaggctctgttaataaaaacctagggctcgagtggctcggggccaacctctgggaggag

SEQ ID NO: 220416 - DNA, 237 bp, Homo sapiens
  chr21:43736993-43737230
  hypo
gtggacttggtttatcaccccgagaaatgggagcgcctggctgcttggatttagcctgcagctggggtccccggtggtgtgtgcagggcggccttgagcctccaagggtgcatccacaaactgcccttccccgagtgacccatgggagctcgatggcgtacgtgctgagcaccaggatgtgtcctgccctgtgactcccaggccccgcccttgcgctcagcacgccctttgtggatg

SEQ ID NO: 220417 - DNA, 122 bp, Homo sapiens
  chr21:43981535-43981657
  hypo
tagtactcacaaggcgggatgcggtagcctgtacgcctgtgtgctgacacaatggtcggaattgtttcatctgtgtgtttccaggtggcttgataatgtacaatgatttcagttccagggaa

SEQ ID NO: 220418 - DNA, 61 bp, Homo sapiens
  chr21:43981687-43981748
  hypo
tgcacccggctatacgagaactcttttaatagctaagttttccaggcgatgtagtatgaaa

SEQ ID NO: 220419 - DNA, 39 bp, Homo sapiens
  chr21:43991261-43991300
  hypo
aagacaaagtacaggctccagtgggaaggccaccatgtc

SEQ ID NO: 220420 - DNA, 188 bp, Homo sapiens
  chr21:43991493-43991681
  hypo
ttctgtacatttcatgcagagcaattaaatagggcactgcatttttcttcaagttaatttttatttattaaagtaaaacataatgtaccttagaagctagacagtcctacaagcttattatgttgtacagcggcgttccgtccccctccccagccctctctttctagaggcagccaatttcagctgcc

SEQ ID NO: 220421 - DNA, 147 bp, Homo sapiens
  chr21:44057645-44057792
  hypo
actccagtgacccacacctccttctcagaagtaccacagcgctgagctctgatctcacttgcgaattctgataagaagcgacatatcctagatgggaagggggcgtgtgaccatgaggcgacgtagcgtctgcgctgcatgggagag

SEQ ID NO: 220422 - DNA, 109 bp, Homo sapiens
  chr21:44065364-44065473
  hypo
ctggcccaggtggccgtgctgatggcaaaacctcgtgaccaaaacaaggttatcttcccagctgcgctatccccagctcatgccgagaaggtcacgtgctacagcagag

SEQ ID NO: 220423 - DNA, 82 bp, Homo sapiens
  chr21:44065918-44066000
  hypo
ctcccaggaggccccgggctgagggatttgcagcacgctcccatcctcccagttaatcctcagctttcgggttgctcgttgt

SEQ ID NO: 220424 - DNA, 205 bp, Homo sapiens
  chr21:44082373-44082578
  hypo
tatcgtccccagcacggtgccgtgtccgggcgtgcgtgaagggccagctcacctcacagctctgcttcccaggttagctcccatccaccctccccctacctgtttcctcaccgaaggaaggggcagaaagatgccctccatgccccttccgactgttgcagagggatggaggactatggtacatacacacatatacacgcacaca

SEQ ID NO: 220425 - DNA, 496 bp, Homo sapiens
  chr21:44112761-44113257
  hypo
gctggcccgggacacgccactgatgctcttctgacccaggggcttttctctcccgcttccgtccctcttccctcgccggcaggtgacgttactggccttttcttttttggccctgcctcccccttggcttctcccctcttcctctcctccactcggtgcctggtgacatgcggccatcctcagagatgtgcttcggggcccgcacgccttgctcctcgcactcttcctgcaccggagccgcggtgcgaggcctcgggaatgctcaccgtttctctcccgccccccggccgcatgctgcagccattccctcaccacatgtccaggagggagccggcatcctttgctgactttcttgctgtgactatggtgctgcgtggaaaaggggccgtgggaaggctgggcaggtggctgctcagagccccacctgacacggtgacccacggggcctggaaattcactgccccgatttccacacaggtgcctgagctcctgcaga

SEQ ID NO: 220426 - DNA, 43 bp, Homo sapiens
  chr21:44338552-44338595
  hypo
tggacacattcatggtaagcacaatggttctcctagatctaca

SEQ ID NO: 220427 - DNA, 246 bp, Homo sapiens
  chr21:44440492-44440738
  hypo
tgtgtgagggaggccgtgccagggcctggagcacggccttgtaacgagcagatcttctctcgtgttttgtgagaaggaatttaacaaagaaatgccattcacatctttttcttttaaaatgaagttggcagagtagcctacgctttcctgggtgacaggagggaaggtccgtatctctagtgcctgtggaggcgtctggaacaaggagtcagcctgtgccctcctgttctgcggaccctctttctg

SEQ ID NO: 220428 - DNA, 237 bp, Homo sapiens
  chr21:44444700-44444937
  hypo
gctcctcatgatgtcgctgctgttatcgtcaccgctgaaccgttaaacgtggggggcggtctgccttggcctatgcactaaccagccactgcagcactaggacattcctgggacgaggagaaacactttgttcgtgagactacagttaggttttggctagaagcactgttgacgtgaccattattttctaatgattatgtaatgctcacattttgcctaaatcgtcttgatttcctt

SEQ ID NO: 220429 - DNA, 390 bp, Homo sapiens
  chr21:44448042-44448432
  hypo
gtccagcctgccctgccagcctgtgattgttgctgctctcgttctctgtggagtcttatcacaggcgtgagtgcctggtctgacagagtcgccagcgtctgtcggggatttcatcactgctggtgcctacgtgctgtgctggccacatgtctaggaccactggaggacttacgcctccagtcatctaagaaacagctcatcattgggaatggtttttgaaaagatgcagctcttgccttagatcgtgctttgtggtgaaacaagaggaggtggcagtcccattctctgatggctcagacacgttgccacccagaggctcggccccgttggtgatctggtgacgtccagacgagtgcagactgcccgatcgtctcaggcatgatggcacta

SEQ ID NO: 220430 - DNA, 46 bp, Homo sapiens
  chr21:44448696-44448742
  hypo
gtcattctttgtagcgtgcttcgtagagcagcgtgtttgttagaag

SEQ ID NO: 220431 - DNA, 34 bp, Homo sapiens
  chr21:44482858-44482892
  hypo
gtgaggtcaggccacgtgtgcggacatcgtcccc

SEQ ID NO: 220432 - DNA, 165 bp, Homo sapiens
  chr21:44482954-44483119
  hypo
tgtttcagtggagaagctggttggggcccagggtcagccaggctccccagtgtgagggtgagttacaggctgcaccggcactgtggccgggctctggactcgacctaccgtcctgtccagcaccgtggggatgaagtcgtagccgatcccttccacctcgtaggt

SEQ ID NO: 220433 - DNA, 110 bp, Homo sapiens; identical to SEQ ID NO: 206026
  chr21:44513219-44513329
  hypo

SEQ ID NO: 220434 - DNA, 176 bp, Homo sapiens; identical to SEQ ID NO: 206027
  chr21:44514586-44514762
  hypo

SEQ ID NO: 220435 - DNA, 229 bp, Homo sapiens
  chr21:44601206-44601435
  hypo
ctgggttctgggtgggggcacggcaggcaggctcttctggcagctgggtgatgcccgtgagcgctaaatgcaagacgtgtgaacacaggcggctcacagatgccagtgctgagtgcgactgtgcctccgcctggcctcgaggcatttgctgaacttccagcttacccggttctcctcctgtgctgactccagggcctccttgggccctgctaggcgcgggctgccgccg

SEQ ID NO: 220436 - DNA, 507 bp, Homo sapiens
  chr21:44630108-44630615
  hypo
tgcccctgggccagcacccggctgtctgggctgcggttctgagtctgtcagtgggataaggatgtgcacctcgtccgggaagtgtctgcgcctcctgtggagcacgcactgacttagaacttctccgttgggattgcttttcgtcctgttatcaggccagtgactcagtcctgctccatcttccagaggaggagacagaagcgctacgaggttgagtcactcgtccaagttgacacagtggcctgtctgagtccagagcctgcgccgtggccccacgcagcctctctgcctcccggtgccgtgagtttgcctgggtaaagctggctgcatacgagcctctgtcgtcacgggctcctactttaaggtgccgtcctgtgcggctgccaaagggaacaacgttgtcagaacctcttcccccggggagtccggagctgcttggtgctggggggctagccagtgaccttgctccctgatcttggcacacacgaggcaaatctgagtcaccca

SEQ ID NO: 220437 - DNA, 201 bp, Homo sapiens
  chr21:44799064-44799265
  hypo
gtccaggaggggagtcggggcagggacatacagggcatctccgacctggaggaggtccccccgctgcagaggtctctggggatgaaagcggggagtccctgtcttgaccacacctgaaccctacaggaggcttcaagggcaggtgggcggtgggctgagggggtgctgagtctttggcctctgaggcggtgccccatctgt

SEQ ID NO: 220438 - DNA, 49 bp, Homo sapiens
  chr21:44830890-44830939
  hypo
gcacagaggcagggcccaggcgcctccaggcgaaggcctccgctcccac

SEQ ID NO: 220439 - DNA, 324 bp, Homo sapiens
  chr21:44830969-44831293
  hypo
ataagcaggcggtcaggtcgccaacaatccggtcaaccacggtgcttcttccctggtgggtgtctggccccgttcttgctggggatggcgctcggggatgccaccgtgtttccccagggcccactgtgcaccctgcatgtcgcgcccttgtcacgggagcggcctgctgacccggagcacgcgtggccgtcacaaagggctgcaaagctgcagcaccagaacgcaaactcaggcgtgcggcaacggaggccacgttctcagccaccgtgccactctgcatgtcagctggctgggcgtgcctccgtcttgtgttagcaaggacat

SEQ ID NO: 220440 - DNA, 153 bp, Homo sapiens
  chr21:44837213-44837366
  hypo
tcacccacccagggactttaaaggacacgcccgcctgctgcacccccatggctcagcacctaggacctacgccccacacatctccctggctgggagcgggggtgtgcactgggctacagagaggagggaaccacttagcagatgaggttcctc

SEQ ID NO: 220441 - DNA, 341 bp, Homo sapiens
  chr21:44840059-44840400
  hypo
agacagctgcctagcccctgcgggtgaggccagggcaagtgtggccaggctcacctccaccgtcctctgccggtccacgcccagggtctgcatgatacccagcgcctgctcatcgtagtcgcccaggttggaggtgtagctgtgtgcggagaaggcggggcaggcgggtcccggcaagcagggctcagcccgcatccaccggtgctgccggatctgggcgatggtgatgcgcctggcggggtccaccaccagcatgcggcggatcaggctctcacagtctgtggaggggccaggaggctgagccagggcggccgggacctcggctgcgctcccacccaccg

SEQ ID NO: 220442 - DNA, 38 bp, Homo sapiens; identical to SEQ ID NO: 206028
  chr21:44847473-44847511
  hypo

SEQ ID NO: 220443 - DNA, 228 bp, Homo sapiens
  chr21:44856274-44856502
  hypo
tcagagcctctggccgctcctacctgaagggccggggctctgtgtgggtgaagaccggcagcttcctggagtaaccagagggctgagcctcctccttgacttgttcggagtgtttcttcactgaccggtttacctgggtgtgcatacggagggtgagccactggaacagtgaaagcgtccacccttcactgagtcagtccctctcccggaaggggccagggacagggc

SEQ ID NO: 220444 - DNA, 216 bp, Homo sapiens
  chr21:44865715-44865931
  hypo
agcccacatggccccggggcattcatctcactgggcaggggcagcctccgacctcatcccagctcagtaggtgctcgcggtgccctcctaaacgccagccatgagcttgagcgaacgccagtgtgtcgtgaggctgagcacagcctggcccctccactccggctcctggtggctgtctgctgtgtcccctatcggggaagaggtttctctttggcc

SEQ ID NO: 220445 - DNA, 181 bp, Homo sapiens
  chr21:44871658-44871839
  hypo
ccccgtggtgggcccgccccttgagcctgggatccagcctcagcgaggctccagaagtgtcgtctccgccggccaggcgtcagcgcctccacccaggatcacacactcctatctctgcacttctgccctccatcctgctccacgccgcctctgcttgttattccagcacattccagggtga

SEQ ID NO: 220446 - DNA, 389 bp, Homo sapiens
  chr21:44871869-44872258
  hypo
caccctaccccccatctgacccaccggccccttccgcacgctggaagcctgcccggcctgaagtgtcctcacctgtcgccctatcctcccctccactccagcccaccggtgactcagccctcacagctctctcctccccgagggagccggtgacttggctctgatggtgccgggacccagccccggcatgttcagaatccttgtcctttaacctgcgtccacatgtagtcgcctccacctccctgcctgaacctccaggccctgcagagcaaacactgctgcctgcaggagacccctggggccttctccgtcccctcatcctcctaaggagcctcccctgccaccgtgccagaatgtgccggaggaacagaggcccgagcctcccgtgg

SEQ ID NO: 220447 - DNA, 33 bp, Homo sapiens
  chr21:45194488-45194521
  hypo
ttcctaccagcacccgttcggggcaggccctcc

SEQ ID NO: 220448 - DNA, 204 bp, Homo sapiens
  chr21:45223775-45223979
  hypo
gagggaagggcggcactggagagatgggcccatcattaggggccagcatcccaggaactggacctttccccagagcctccgcctgtggctgtgatgaccttgggccagaaggtcaaactccgaagactgaaactctgcctgcagcaggactggccgcccctgctgtggggggttcagaaaataaaatgccgcgcagcccttgcc

SEQ ID NO: 220449 - DNA, 598 bp, Homo sapiens
  chr21:45224195-45224793
  hypo
ccagtaaggcctggattgcccggggtgagcgtgtgtgtggtgggaagacctggcttccgcgagagccttgttcctggaggcaggagcgccccgccatcctgggtacccgcgggtccgcaggctgcgcacctctttccctcagccaggtcaccctcagcgtcctccctgcccctctccccttcacacctgctggagcctgtgagggaggtggcgggtccccactgtggcgacggagagctgacagtagcccagggctttccacctgcatggaacaagggcctgtctgccgccagcgctgtggccacagcctgcataggtgacaaggggccgctgcgttgggttttgcccgcatcttctgttccatgggtgcccagccagccaggccgtgtgggatccagcgagaggccagggcttggagtgggcctgggaccaggaaggacctctaggctgtggctggccttgtgcagaccctggactgcatccggttccccaaagccctgctgcattcgagtgtcccccaaccccgggcaggtggcacctggtgacacctccttcagtcccactcagctgggcggccggggcaggcttagggcacagt

SEQ ID NO: 220450 - DNA, 106 bp, Homo sapiens
  chr21:45233494-45233600
  hypo
gggcttatggtgccgtggcctgtctgctgcctggtctgtcctaaggccagtggccctgtccctaggctgtggggcacaggtcccattccccgggggagtgaagggc

SEQ ID NO: 220451 - DNA, 42 bp, Homo sapiens
  chr21:45281601-45281643
  hypo
aggtaaaatggggtgtcagtcgtctctaccttgtggcctggt

SEQ ID NO: 220452 - DNA, 50 bp, Homo sapiens
  chr21:45299401-45299451
  hypo
gaagtgctgggtggccgtgggcttggaggctgggtcgtgggggtgtggcc

SEQ ID NO: 220453 - DNA, 731 bp, Homo sapiens
  chr21:45345793-45346524
  hypo
tctggtgtggtggccgccggcgccatgtagctgcctgcccaggagaagcggcgaggcccacgtgtgaggccctgagagctggaaataggtactggatttcagtgtccgatggagaagtctgtgatattttggatatgttggattaggtaaaacacatcgttaaagttaattccacttttctctgtgttttactgtggccactggagcattcagtggtacggtggctgcggcttgccttctcccgctgggtcagcaccagggtacaggtcatctgtagacttttgcctgagacacagacgcctgcttgggacatggactccagctcctcagccctgtcctccagcagcggtgaaatctggagtgttcttgagtaacgcactggcgccaagggggtgctgagccttcgctctgccgtccttggctgaacaagctgtttctctggggaccacgtcaggtaacacgtaggacagcggggtggtccagcagggagggcatgcgcatctgtgtggcaggactgggggtgattttatccgggatcccctggggtggcccagcgttggctcgggtgtttcattctcacagagaacaggcagcttcaggggccacgcgtgcacgagaggagcccccagcccccacggcgcgttcctgggtttccatgctgcggcatttaagaaaagagctctgtgtcgtgctgctggggtagcttccgtgagctacgctggccttttttt

SEQ ID NO: 220454 - DNA, 71 bp, Homo sapiens
  chr21:45352875-45352946
  hypo
gtagtggccacactgattgacgctctctctccctcacagcgtgccaggtgccttttctctgcgttctcgtc

SEQ ID NO: 220455 - DNA, 500 bp, Homo sapiens
  chr21:45353002-45353502
  hypo
cctccctgtggcttcgatttgcttctccctgatggttaataatgccgaacagctcttcgttaacctgctggctgtcggtgtggctccttctgaggcacagccgttcgggtcctttgctgtttgctttcttgctattgagtctgagcccctttaccctgtggatgctgggcctgcatcgggcatgtggtctgcagggttttctctcccttgcgggtcgtctctttaccctgtcgttccctttgtcatgcagaagctgtttagtttgccgtaatcccagtggtctatgtttgcttttgtcgtgtatcttttttaaagctctgccatctgttttctccatggggaaaggtttgggaatatcgatgatgtcatcatactcctggctgcttcttgacattttccatgcccagcattgttctcagtgcgccccgggggtctttggttctccatagcctgctggcgtccatgtgtttttattctttctttatggttgaggaaactga

SEQ ID NO: 220456 - DNA, 358 bp, Homo sapiens
  chr21:45353564-45353922
  hypo
aatgtgggaggggcagcacaggggaaaggtgaggggagagtcaggagagaaggacgccgcataccagatgcccagaggccccggcggcctccatccaagcacaggcccaagcaccagctgcaagagccagaggacggcactcccgcgcctgccacgagcctcacgtggagagtggacagtggcatggaaacgccagagggttagaactgagcagcaggacggggtctgtgggtgcacgagaggaggcccttggtctggaacagcctggggtccccatgtgctgtcactgtgtggactggccacacctggtgtgccgcttcctttctcagtcatggccagctgccgaatgccgtaccag

SEQ ID NO: 220457 - DNA, 78 bp, Homo sapiens
  chr21:45354855-45354933
  hypo
ccaccacgccacttacgccacccacgctactacccatgccacccatgtgccgtccaccacccacgccacccacaccac

SEQ ID NO: 220458 - DNA, 256 bp, Homo sapiens
  chr21:45360447-45360703
  hypo
cctgaaggagctgagcggtttcataccatctgggcggtgtttgtagatgcctggcatgtcctgggacggacaagtgcctgatgtatgggcacagactcccactgccccccaaggcaggtgctgtaggatggctgatttacatggtgatctgcaccctgagcagaaaatgcgtagttaccatcaaagtggcgctgctctgtcacacccattgcctgatgggctggtttatggtgatcgcaggcgatttcccagctgc

SEQ ID NO: 220459 - DNA, 115 bp, Homo sapiens
  chr21:45374890-45375005
  hypo
acacagaggctgggacgtgaatgtgcatcacggctctatctgtggcccccaaaggctgggtgccagctgcctgtcggcagggagcgtatcaccgtggcacgtccatgccgtgggg

SEQ ID NO: 220460 - DNA, 214 bp, Homo sapiens; identical to SEQ ID NO: 206030
  chr21:45381427-45381641
  hypo

SEQ ID NO: 220461 - DNA, 221 bp, Homo sapiens
  chr21:45396665-45396886
  hypo
gcaccagtgaaaacaggtcacgcctacctgacgtcttgccgtgtggctcagtgacgggcgctgtggacgtggcagcccctgaatcccagctcccgtacacacagtatcactgctgccttagtcaccaccgtcatcctagctggcaaacttggtgttcttattaaattgtaaaagtatttaaaagattttaatatatcatatgtgagcggcttaccctgtgt

SEQ ID NO: 220462 - DNA, 219 bp, Homo sapiens
  chr21:45399689-45399908
  hypo
gggtggccaggacacgatgacacctgcctttgcacggacacagtgtgtggctggcagggggcaccccaaccccagtttccagcaggaagctgagaaccatgaagagatcaaagagatcaactagaaaaaatatcttgaagccagtgagctcagtgataacagtctccaaccatctttaaaagagagcgggtcggccaggtgtggtggctcacatctgta

SEQ ID NO: 220463 - DNA, 676 bp, Homo sapiens
  chr21:45400148-45400824
  hypo
tccatctcaaaaaaaaaaaaaaaacaaaaaaaaacgagagagttgatggtgcccttcactacttcccaagcatcctagagtcccacgggctgccccgcccacgggcagtggctgcggagtgtctgctctatcaggcatggtgatttcctgccagcctgtgcctttgacattcccaccagaggcagaaccttctgcaggtggccctggccaggctcctctctcctcccagctcctcattagcctcctttgccaggctaggaaaccgaggtatgcgaggttaaggaactttccttgggccgtgcagctgagagtgcgctttgcagggatttgcatccaggccgcgggactcacacaggccacacctgccacccccactgcctctggctcgtgggaggtgtgggatgtggcgggtggccggggcagtgctgggcaggcaggtgttggtattcacaacgttgctttcttgaccgattattttcctgggagacttcctcagtcaaagggttgatatgcttgcgagctctcgatgcacgctatcagattctccaaaaacgtacagccagcttcgcctgcacctgcagcttctgtgatttgtgctcttaattgacgtggcgctttttttaggttgagtcgtttttcattgccaacaatcttctcctgcattgaaataatagct

SEQ ID NO: 220464 - DNA, 292 bp, Homo sapiens
  chr21:45400854-45401146
  hypo
tgttgactcttctaggacgcgctccaggagatatataatcagaagggcatgtttccaggggagcagtttaagcctgcccggaggccgtggaccctcctgaacttcctgtcctgggccaccattctcctgtctcccctcttcagttttgtcttgggcgtctttgccagcggatcacctctcctgatcctgactttcttggggtttgtgggagcaggtaatggacactgtcgctaacagctcacactctgacgggcctcacagtatcagccacagggtccgggacctggtgact

SEQ ID NO: 220465 - DNA, 810 bp, Homo sapiens
  chr21:45403410-45404220
  hypo
ccagctccctacctcctggacgtctctgagagtccaggcagagcagagggcagcgctcggccggtcatgctggctcccttggccttgcagcgagcccctggcccacgccgagcgagggatgcttctccctacagcatgtccactcccccggcatggccaggtggggcccctggggcaatggcagtggtagaacgctcaacttggttgcggtaccatcagcccacctgcatttggctttcgacttgcttgttctaagtcacagcgccctcatctttttagcaaggtaaaaaaaccaaaatgggtgttatctctgatatcttgaaaccagcgttctgaatagaggtaggttgagttttctaggggaaaacaaatggagaaaagaggcatgaagaaaagtaaaccgagaacataattaggcatcgggcctaagtgtcctggggagattggaggggacggcagcgttctgcatgatggaggcgctgccgggccccgggtctgtgggggccgtgctctcagggcgtgtgcgggacgccacctgtgcacacctgctcagagcacggctcctcgcaggggtgaaggggcagaccaacgaaaccagatgagaccaacgacaccatgcgagacacgcttgcagacactgttgttttggaaatgtgcttccctccatctgaaatctcatccctccacccgcccactcgggcagctgtgccgtgggcagggcatgcgctcccctggctgagcaccccagagattctcctgcaccttcctcatgccgcacgctgctcatccgtctccatgtgtgtttagatc

SEQ ID NO: 220466 - DNA, 135 bp, Homo sapiens
  chr21:45446230-45446365
  hypo
tactgcctcgacattatacacgaattatagcaaatactttatgcattattgaacaggctgagatgacttcccagtttgtaatctcggatgtttttatcgtccatttgaaagcccgttttaccaaaagccattgaa

SEQ ID NO: 220467 - DNA, 325 bp, Homo sapiens
  chr21:45513669-45513994
  hypo
tgatctcatatgatataaaacttatggtatcataaaaagttaaagatttaccaattttgtacaatcttctgctgggacaaggccaggcaaagggagtcagggcagggacaggtgctgtggggcctaaagcagcatgcataggcgtgctgtgaggcggggcctgcccatggtgtctgctcagcacccttcgcatggcgtgtgtttcgctgcagtgtctgtgtcctctttgcggttatggtgctgtgtgagcagtgacccccaactctctttccagcccatctacagcaagcagtcggtgttcttcgtctgggaactcaagtggaca

SEQ ID NO: 220468 - DNA, 334 bp, Homo sapiens
  chr21:45518811-45519145
  hypo
atcattcatttttaatcagacgtctaccaaatacccaacactgaataactagcttccccagcgctcttgcaagtgaaaagggcgttctgtgaaaacagcggctatttcagctcgcagcaccgagcgctccccgtgtgctttccctgagccagctgtcattctgcagcagagacccagagaatgtcaagaacacaagcactcaagaatggaaataactcaaacgtccttcagctcgagagcggttaaactggcacatctgattcctcctcagcagtgaaacagaagggactgttgacacacgcagtgctgtggttggatctcaagggcattatac

SEQ ID NO: 220469 - DNA, 165 bp, Homo sapiens
  chr21:45546680-45546845
  hypo
caccccccagccagccgggagaccgcaggatgacttgcttcgtggggagagcagcctggatatgctgtccagtgatcattaacggttcttttttccccaggtgacatgagttctcggcacttcaaacctgagatcagggtgacctcactccgcttctctcccact

SEQ ID NO: 220470 - DNA, 63 bp, Homo sapiens; identical to SEQ ID NO: 206032
  chr21:45553436-45553499
  hypo

SEQ ID NO: 220471 - DNA, 192 bp, Homo sapiens
  chr21:45558785-45558977
  hypo
tgggactgatgtgcccgtgtgtctgagcccacgtcccctgggcgaagctcccattttcactgacctgtccagagcgttctgggtgagcctgccctgcgtgtccatggtgcggcgcgctctaatgagctgcagccgtggccactctgcaccctctgagacagtcacccatggggacggcgaacacccactgcc

SEQ ID NO: 220472 - DNA, 70 bp, Homo sapiens
  chr21:45583677-45583747
  hypo
gggccttccaggcgcgttcccgagcgtgcactgaaggtgttagcgcgtggcaccggagacaccaggctgg

SEQ ID NO: 220473 - DNA, 265 bp, Homo sapiens
  chr21:45628849-45629114
  hypo
acctgcaaaaatgtccgcctgcacagatgtccacctgcatgaatgcccacctgtgtccacatgcacgaatacccacctgcacagatgcccacctgcacggatgcccacctgtacaaaggcctacctgcgtgaatgtccacctgcatggatgcccacccgcacggatgcccacctgcacagttatccatctgaacagccctctggtgcctccttttgcttgcacatgttcaaatcctcccagtcctacagtcgattgttcctagtt

SEQ ID NO: 220474 - DNA, 164 bp, Homo sapiens; identical to SEQ ID NO: 206033
  chr21:45660235-45660399
  hypo

SEQ ID NO: 220475 - DNA, 132 bp, Homo sapiens
  chr21:45678289-45678421
  hypo
ccgaggctgcagccgtggtgcccgtcggcgcgcctgcattctgcagcgggaaccgagggaaggccgtaagtcagggcctgctgctgccgggtgctgcccctccacgggctccttaccgactctcggtcgtag

SEQ ID NO: 220476 - DNA, 110 bp, Homo sapiens
  chr21:45709581-45709691
  hypo
ctcccagcaagttcgaagactccggcagtgggaagaacaaggcccgcagcagcagtggcccgaagcctctggttcgagccaagggagcccagggcgctgcccccgtaagc

SEQ ID NO: 220477 - DNA, 277 bp, Homo sapiens; identical to SEQ ID NO: 206034
  chr21:45713496-45713773
  hypo

SEQ ID NO: 220478 - DNA, 83 bp, Homo sapiens
  chr21:45736416-45736499
  hypo
catcaccctgccctgcgtacgtgcgtgggtaagcgtggtgtgtgggtgtgggtgtgggcagtgtgcacgcgagcatggcacgt

SEQ ID NO: 220479 - DNA, 199 bp, Homo sapiens
  chr21:45744649-45744848
  hypo
ccagtgctcctgctggccccggatcgccggtcagcctggaattccctccccacagtcctccggctcatccgtgtccgcccctcccgcaggtcaacgtggagcacatgacggagaagatgaagacagacattcagaggggcctggtgctgcggtgaggctgccgtgggtccctggccacagctgcgcgtccaactctcgg

SEQ ID NO: 220480 - DNA, 201 bp, Homo sapiens
  chr21:45750194-45750395
  hypo
ggcagtcaggacgttctgagggcagaggggtgcggactaagcccacccggcacggcgaggctgcttccctccacaagggctggggcctggccagcggtgccccaccacggagcgactggtcccgggggtgtgggccgtccaagtgactgaccggcacactcggagaatctgagcagaggagccccgcctgtggacgcgtgt

SEQ ID NO: 220481 - DNA, 66 bp, Homo sapiens
  chr21:45791167-45791233
  hypo
tctgcctccgtgtcccgtggccgcctccctccagtgtctgcctccgtgtcccgtggccgcctccct

SEQ ID NO: 220482 - DNA, 141 bp, Homo sapiens
  chr21:45819238-45819379
  hypo
tgtccgaggcctgggggaagaccacctgcctgcagctcgccctggaggccaaggacatgaagtttgtgtctcacgggggcatccaggtgacctcccaagagccccttccagaaacagacgcctgtggtgcctgcagggcgg

SEQ ID NO: 220483 - DNA, 339 bp, Homo sapiens
  chr21:45819409-45819748
  hypo
cacactcacacaggcttcagggccctcagcagctcggggacagcgcctgacccctcggccacctgctccaggctctggcctcccattttgcagatggggggaagctaacatgaagcaaaagcaggagctggtggccatggagatcgcaattcacctccccatggatgttcctacctgggagcggcaggcagaagcccaggtggctctgggaacggcgtctgccctctctccctggagggataagcgggacacggcgtgtcctccctggagcagcaggggctcccaggcatggctgccctcagcatcgccctggaacccccggcagggcctggctcccag

SEQ ID NO: 220484 - DNA, 129 bp, Homo sapiens
  chr21:45847703-45847832
  hypo
ggtggtaggaggcgatggggcctgagagcagaggtcctggccaggtggctgcagctgcaggcggcccgctctggtgttgggggtatgtgggacgggcaagggcgggtgtttagggaggtgcatccggtg

SEQ ID NO: 220485 - DNA, 60 bp, Homo sapiens
  chr21:45847973-45848033
  hypo
cagaagagcactttctgtatgcaccatgcttctgttgtggacttgcgaatcatattttca

SEQ ID NO: 220486 - DNA, 34 bp, Homo sapiens
  chr21:46036538-46036572
  hypo
ggctttgtttacctggaacccgagaccctgccct

SEQ ID NO: 220487 - DNA, 41 bp, Homo sapiens
  chr21:46193373-46193414
  hypo
acattctaaagacaggatgacgcaaggctggagaacacctg

SEQ ID NO: 220488 - DNA, 43 bp, Homo sapiens
  chr21:46193542-46193585
  hypo
ccatggggtcatcgcctggcgcgtggaggatggaaatgcagac

SEQ ID NO: 220489 - DNA, 34 bp, Homo sapiens
  chr21:46206038-46206072
  hypo
acagacaggcctcccgccactctgggcccctgca

SEQ ID NO: 220490 - DNA, 111 bp, Homo sapiens
  chr21:46206226-46206337
  hypo
tgaggacagcccagactgtgggactcgccatccatctcataactgccttgggggccacattacacacaaacacagattccagaaaccttcagacaccgaaaaaacatgtgc

SEQ ID NO: 220491 - DNA, 197 bp, Homo sapiens
  chr21:46270477-46270674
  hypo
actctggacacacctgcttccggggcacgtggcccagagccgggcctgtggacgggcctttctttcttcttggggtggaccccgtccccacgatccctaaatggccaccccccagacagcccaacaggcagcgagaggcctgcaggcactgaggatgccaacagggctggagagagctgcagcgtcctgccccgtcc

SEQ ID NO: 220492 - DNA, 184 bp, Homo sapiens
  chr21:46277397-46277581
  hypo
tcttgaaacaaacaaaaaacacccagccagcctcctgaagatggctttataagcaaactcccctgggcagtagattaccgcatgattcactgtttttaactacagttaatagctgtgccaccaccacaggtgacaccgtctcacctccaggggctgggagttgaacacttgctgcatgcctggg

SEQ ID NO: 220493 - DNA, 189 bp, Homo sapiens
  chr21:46317252-46317441
  hypo
agcctaagcagcagggcaggggctgtgaggctgcccagctgggcagagccccaggcagggggaagagggggccctggtttcctgcgtgccattttgaagaagatggcggtgatggccctggaatggccagcaggtcggtcactgtccggatgaggataatcgggccctttagggcggctgctctgtgaa

SEQ ID NO: 220494 - DNA, 320 bp, Homo sapiens
  chr21:46319505-46319825
  hypo
ttgtatctctaaagtcctttgcggcccccagagcctacaacgtcaggctgcaagagcgtcgcactacggccagcgaggacaagccccttgtgaccagtggttgcctctcggcccacggctgatcccagccagaagtcctggcccctctgagccattgagatgcctccgcagagaggctcatcctaacccgtgcatcctgggctccttctcgcctctgtccctccctgcatgttcctcatggtccccgcagccgctcacccagctcaggcaatgggggcagggaggggccacactggaggaggcggactcaggggcagcag

SEQ ID NO: 220495 - DNA, 329 bp, Homo sapiens
  chr21:46323619-46323948
  hypo
catccaggcaggctggagtttcagaggaaggacatgactcccggacgcaggcatgtgcctcgcagtgacactgaaacccgcctggggtgcttagagttgacgccagcgacattggggacgcctttcattgagagtggcagcggctcacctgggctcacacctaacccggccccatgcctgcagtcccacgggcgccctcatcagcagccacatagacaggcatcacacgaacctggcacttcccagcaaggcccacgcgggccgtccccaggaggcccctttctccatcccagccctggacttccgctcgcccgcgtctcagtcacacg

SEQ ID NO: 220496 - DNA, 447 bp, Homo sapiens
  chr21:46326563-46327010
  hypo
aaggtgcagaacgtcgggctgcgagagagtgcagacactgggcaccgatggtaagggctggggcagctccacctggggacagagcggaagggcactgaggagctcagctttccagcagccttggggcttcactggcccacacacccgtccgacccggacacatgccttctgggcagccctgacaccccagagcagggccggactcccagccagagccaataaccagcacagacggtgcctggcaccaccaccgaggccaagcctacctggtcgcaggtaaagcgtcactttttgtggggacagctgcttctggcccccattgtggtcttcctgggtttcagcgaggcttgtggggtccatgatgtcgtcagccgcacagcccctcatgagcagctgtggccgggtgtcgcagcgaatggagtcaggatcccccggccctgtgaagtt

SEQ ID NO: 220497 - DNA, 178 bp, Homo sapiens
  chr21:46328823-46329001
  hypo
ggatttgagcaactcggggaagaaaggacagccacagatcatgcactactgaacaaaataaaactgtgggtcacgctgatgagagagaggctgcagagaaggagagacccttccttaggttggcagccgtgagtggcaggcggggaccagcacggcaccaatctgcagccatcgcagt

SEQ ID NO: 220498 - DNA, 375 bp, Homo sapiens
  chr21:46329031-46329406
  hypo
atgctgagcctgcgggtgcgatttgatgagggcagaacctcaccagcccacagtggctgcgaggggatcatgcagcgggatggggaggccggggggatgccgtctcagcagagccgtccacgctgacctcatcaagactgggacggggccacagcagtgcctctcatgggcacttaggacaccgtcactgaggggctcctgccaaagcacacctgagtccaggcagaggaaactccagacaagacccccgagggtcatgctacaaagctgctctcctgacttcctcagaaacgcccaaggacaggaaagacaaagaaagctgaggacttgtccagattcaagaagcccaaggagacggctgagcgtagggcgagc

SEQ ID NO: 220499 - DNA, 204 bp, Homo sapiens
  chr21:46330494-46330698
  hypo
ggcctgagtccccgacctacccccagtggcaaggtccttccccagcctcccgggaacttctgtctatgggaaagtgagggcaggccctgttctccctgattggaatgtcacgcgtggagtcccctccgtggaacacagaactcaccgcacccgagggagagcagccccaccagggcgagcagtggggggcgcaggcccagcatg

SEQ ID NO: 220500 - DNA, 170 bp, Homo sapiens
  chr21:46353949-46354119
  hypo
aggtctgggtggggccggagactgtaccccacaaaaggtcccaggtgaggcggatgtggcctggcgctgtgtggctctggacctagtccttgggcttgggctggcacccagggcctgggcttgagacagctgtgacgcaggcaagccatttaccccgtttgtggggacat

SEQ ID NO: 220501 - DNA, 96 bp, Homo sapiens
  chr21:46368232-46368328
  hypo
tcgtggagcatcgggcgtccggggagctggtcgtggagcatcgggcgtccggggagctggtcatgcagcatcgggcggtccggggagctggtcgtg

SEQ ID NO: 220502 - DNA, 436 bp, Homo sapiens
  chr21:46373000-46373436
  hypo
ctggtgtgttttccagaccccgcctggcaaggcccaggccgagcctgtgcagcaggctctcctcattcactcctcagacactactcctcatgggaggtggcagcgagtgccccccggctacagggctatcccttcctctgtgggcgcgtggccggcctgtcatgttcaggggccctgggcactgtggttttctgatgtgtgcttgtctgaggtgtaggcaggtcgtggaggctgtcttgcgaggttccctaggtggggcccccagactagctgaacccaccaagagctgcgagtggctgtacctcccagagcaggacgcctctaggtgagcagcacagccactccctcgggcaccatccccggcggtggggccctgcgtccgggcctcgggagcctgtcctgcaccatccccggcggtggggccctgcatccgggc

SEQ ID NO: 220503 - DNA, 200 bp, Homo sapiens
  chr21:46392162-46392362
  hypo
ttaaggcccaggtcgctgtcccatgtgaacattcggccaggtgggcggctgccttggccggctgaccacaaggagtgcaggcgagctcccgaagattcccacggttaactgagggtgagaagctccgcgggcagccggagcctgcctggggtggacgtcagagatgagagtgtcctggcccgcccgtgcccttagtcaag

SEQ ID NO: 220504 - DNA, 213 bp, Homo sapiens
  chr21:46673929-46674142
  hypo
ggtctggtggagcccccggtctggtggagccccccggtctggtggagccccccggtctggtggagcccccggtctggatgagcctctggtctggtggagcccccggtctggtggcgtccccggtctggtggcgtccccggtctggtagagaacgttgaggtgagtgctcgaggggttgctcgctgctgctgggccccacggtgcccacctggc

SEQ ID NO: 220505 - DNA, 286 bp, Homo sapiens
  chr21:46748050-46748336
  hypo
gaacgccccggggtcggggtctcacagcaggagcttagctggtgtcggcatctcctggacccgtcctcagctccgagcgcccagtcctgccacctgtgtccaagtctgcactgtgcccacgaggccctcaaggccgcagacagccccacacttctcggacgccgccccagcacggtccttgtgtgaggtggacactccttctggacgccgccccagcacggtccttgtgtgaggtggacactccttctggacgccgccccagtacggtccttgtgtgaggtggaca

SEQ ID NO: 220506 - DNA, 255 bp, Homo sapiens
  chr21:46763204-46763459
  hypo
agatgcatacggaacgcaggaagccggggccccacgttcccccatatgcagtctgcaaatgcaaacacggaggctgaaacaaacacgtctggaagaaatcacaggggagcatctcccctgctgtgcccaggatccacgggtgagcaagacagggtccctgtccggatggggtttcatttgggggtgcggagggggtgcagaaccaaaaaaaaaccaagcaagcgagtgaaacagggagctcggaagtgggcgctc

SEQ ID NO: 220507 - DNA, 411 bp, Homo sapiens
  chr21:46772699-46773110
  hypo
ggtgctcacaatcagccccccgcccagcagttacctccatccaggcacacacggccctcgttcccctctctgcccgtggggcgcctccacagatggctggaggacccatgcagaccctcggcttggtagcctgctgcccattcctgtgcccacagccggggctcctgtgcccacagccggggctcctgtgcccacagccggggcggcctgacctcgcagcacagggtgtcagccgggaggatgcgggggaggcggctgcccagcctcctgtgatcccggcaggtcctggccctgcactgggcccggtttcaccacctgtcagcctcagggtaggattttatgcagagtcacgcagtttacacacaaacacacacacgctggtatacacacgtatgtgcacacacatgcaca

SEQ ID NO: 220508 - DNA, 199 bp, Homo sapiens
  chr21:46799933-46800132
  hypo
tcgcacccagagtccgtccgtgcacacactcaccttgcacccagagtccatccatgcacacacgctcatctctcacccagcgttggtccgtgcacacacgctcacttcgcacccagcatccgtccgtgcacacacgctcacctcgcacccagtgtccatgcacacacactcacctcgcaaccagcgtccatccatgcac

SEQ ID NO: 220509 - DNA, 344 bp, Homo sapiens; identical to SEQ ID NO: 206038
  chr21:46800406-46800750
  hypo

SEQ ID NO: 220510 - DNA, 302 bp, Homo sapiens; identical to SEQ ID NO: 206039
  chr21:46800780-46801082
  hypo

SEQ ID NO: 220511 - DNA, 589 bp, Homo sapiens
  chr21:46801820-46802409
  hypo
agtcctgtccaggccgaaaggtggtgggtgggtgctttaggggccagtggggagcgaggccgaagctatctctgtgcagctgccccctcacgctgctgtggccccagggtttggttcagatgctgagtgtccggtgacttccagacacttcctttccagtctcagggaacccaccccacaaagcgcctgccccaggacctgggtggcgcgtctgtgtcttctcagcatatccggttcttggagcagggagacgacccagatcctgctctctggctcctggcccgctgcccccaagctgtcaccaaggcaggtcatggatgttccgtgtcatggctgcgtgggccgttcgaccacggccacacacgcatagactgaggaagacagagcaaggggctgatcgctgccaagcagtggatgccagtgcaccgtgacaaggagcccagagcctttggtgggcgcctgactgtgtcttcaagttcccgggatctgtgtggacagctgccatcccagtcggccctttcttggttttcttggttttcagagaaggggcgaagaataagggggcagcgtcttctccaccagaagacac

SEQ ID NO: 220512 - DNA, 218 bp, Homo sapiens
  chr21:46802648-46802866
  hypo
atgggattgagttaggatcccgggatgggggtgatcaactggggtcatccgggtgggccccaggtggcattgcaaggttcgcacaagacggagacttgacatggaggaaaccatggaccacggaggcagagagcaccatgaagaggctgtccacgaaggtcagagcgatgtggccgcaagccaaggagtgcacggccgctgggagccaagagaagcca

SEQ ID NO: 220513 - DNA, 87 bp, Homo sapiens
  chr21:46804103-46804190
  hypo
cctgtgcatgaccgaagccacaagcatcaaaacagctacattcatgctgaagaggacatttatttttatttttgagacggagtcttg

SEQ ID NO: 220514 - DNA, 288 bp, Homo sapiens
  chr21:46804430-46804718
  hypo
gattatagacgttagccaccgtacccagctggcaaaatttctaggtgaaataataaaataaaataaaaatagtggtcggaaatctgtctcctgagacagaagtgtctgattttctataactcagttaaaagtggtgccaatagaaacgcagttacgacgtcaataccggaaggccaggaatgccgcgtggtgaagaaagtgggtccagaggccctccctgaccttggtgtgctcggcctggacatgcctgtcactgttgatgaacagcaggtgcagatgtgtgtgccg

SEQ ID NO: 220515 - DNA, 352 bp, Homo sapiens
  chr21:46812000-46812352
  hypo
tgggagaggagctccgggctggctgatacactcgcctcctgacaggagcttgctttgcctccagtttgcagccctcacaaacaaggccgctatgaacatgtggcttcaggtcttgatgcggatgactgaggacctgaatatctggatcacgagacaggtgtgtgtttaactttttagcaagcggcaaaactgtttttcagaagggtcgtcctactgcggaagtgagtggccttccctgagtttccagtcggtgctgggagttccctgagtttccgcactcagggccgggagttctagctgctccacacctttgacgactcttgctacagtcggtcttgtaaattgtaacctt

SEQ ID NO: 220516 - DNA, 94 bp, Homo sapiens
  chr21:46812982-46813076
  hypo
agggcattgctcccggcacgaggccgcccgcctgcagcaggcccgcaggggcacggtgggtccccgcccgctcctcatgccttgagcgcgtcat

SEQ ID NO: 220517 - DNA, 72 bp, Homo sapiens
  chr21:46813106-46813178
  hypo
agacctcaacacggccagcacggtgtgcatggtgtgcacgcctcctgcgccggggccaccagagtgggctct

SEQ ID NO: 220518 - DNA, 138 bp, Homo sapiens
  chr21:46827462-46827600
  hypo
tggatttgtgtgtgcgaaacagccgtgacccccaagaggtgcttgtagtcagtgcttcagagtcagagtggagctgaggaagaggactgtgtcaccggggcagttgctgatgcccatggccacgccaggagcctggtc

SEQ ID NO: 220519 - DNA, 45 bp, Homo sapiens
  chr21:46835035-46835080
  hypo
aggtgacagtgcggcgtggtgttggttcaccgaaggggtggcatt

SEQ ID NO: 220520 - DNA, 521 bp, Homo sapiens
  chr21:46835359-46835880
  hypo
cagggctcagagctcaggaccggctgccacgggtggggcaggaggaggggcaggaccatgcgcaggggcggcggagcggggctgtgaatggagccccccttccggaagatggatgcaggtgggaaccagcgtggtgtggagttgagagcgggggtgcggcaggcggccggggcaggccccggacgggaaagtgcaggcggtgccattgatcagaccctggctgggggcctggggttcacgccttgcctggccttcagagaggtgcgagctctacttttggagaatgaggcaaaggcgcagaagcactcccggaaagtgccatccagcccagtgcctggcgctgcagccgggtggagccccaggtggtgctcacgcagccaggcgggcatggtgtgttgggggttttcataaagaaaagctgaccaggcacgtgccaagcaggccctcagccctgagggtacttgccgggggccgggagagtgtgggcccccgcttatccagaacactgcgtgggccctcgg

SEQ ID NO: 220521 - DNA, 113 bp, Homo sapiens
  chr21:46835910-46836023
  hypo
ttatccagaacacacagccagaccccttctgttatccggactgcccagcaacaccgggcaggtatgcctctgtgaccctgacccagctgagttgggaacgtggccacaccggc

SEQ ID NO: 220522 - DNA, 187 bp, Homo sapiens
  chr21:46838494-46838681
  hypo
cggttcccacctgctctgcacagcccgcctcgtgcacctgctgaccccaccgtgtccacagcccgccctccttggctcacatctcttcctggggtctcagggaagcggcacctcctcaggggcctcccagccacctcacgtcacttcctggggtctcagggcagcggcacctcctcaggggcctcca

SEQ ID NO: 220523 - DNA, 275 bp, Homo sapiens
  chr21:46839249-46839524
  hypo
tgctgtgtgtagtgatgcgcgatgccgtgtgtggtgacacgatgccgtgtgtggtgacacttaatgtcatgtagtgacacgctcgcaggatcgccaaggccaggctggctccaaaggcttgggtctggcttcctggggccactgggtgctctctgaggccgcccatcactgttcgggccctggggtgggagctgggctgcaaagtggcctggactttatgtcctgccaggtacagtgtttccctcagcagatttatcaggcgttttgggtgtaaa

SEQ ID NO: 220524 - DNA, 339 bp, Homo sapiens
  chr21:46841107-46841446
  hypo
ccttggccagacggctttgccgcccccacccccataggtgcttgctttgagccccttgcaaaggtgaagccagatctgggatcccagggcctggtgcggctggacatgggaggagggccacggtcacgcttgcacggggcagagactcccagaaccacaggcctcaggagagctgggaagggaaggagagggcactgcggtgcctggagagccagagtccgcccgtgtggaagtgttgggggctgtgttgcagtgacagccctggcgtctcaggagcggagcaggacaccgcgtttctggctgtgcaaggctccacgcgggtcagcagcccatcctggc

SEQ ID NO: 220525 - DNA, 292 bp, Homo sapiens
  chr21:46844336-46844628
  hypo
gtgggtctctgggcgagggttcccgggatacagacacctgccccaaggtgccccacagaggatgacccccagggcagccgtgcctgagcctgcgtggtcacctcccacagtgccaaggcgctcccccaaggcccctgcggcccacctgaccagtggagaactcgcgagcactcggccagtggtgcctccaatttgcagcctccaatccctggtcagaggtgtgacctgaccctggaccagagcgctgggccaggtcctggtggcttctgcccttcagcttggaagctcctga

SEQ ID NO: 220526 - DNA, 448 bp, Homo sapiens
  chr21:46844763-46845211
  hypo
aggcactgcctcgcccgcgcctctttctcccagacctgagccaccgctgccaggatccttccccagctggttttccttctctttgatgtgtttccactgagggtccaaaccggtccaggcgcgggttccagaactttcttcagatctctcgcacctgaaaatttcctctgtagccattcgcaggaggtttctcagatgccccgggctcgggggccagtcagtctcatgaggacggggtgggtctgacttgtggcatcgcggcctctccatcggtgctgctgggcctgtgagccaatgggtgggcagcaccacccaccgcctccttcctcacaccagtcttgggctgcgcagagccccagccatgtgtgtgctgagtgcagtgtgaccgcgtccgcccgtctccccggacacgcctgttggagccccggccgtgtgtgtgtgtgtgctg

SEQ ID NO: 220527 - DNA, 81 bp, Homo sapiens
  chr21:46848491-46848572
  hypo
ctagaacattcacacgccggagagagggagccctgggccatcacgcagccaccgcccggccccaagaacctgcgagtccac

SEQ ID NO: 220528 - DNA, 52 bp, Homo sapiens
  chr21:46848762-46848814
  hypo
tttatgtgcctgaaatgtctctgcactcgagactatagcttgctttctttct

SEQ ID NO: 220529 - DNA, 686 bp, Homo sapiens
  chr21:46849579-46850265
  hypo
ctgggagcctgactgcgggtgacggacaggctctggcagcccctgtcagcatcctctccagggcatgtgaaagccagtgtgtcctcagctgccagtgccccctccccacctcctctgggcccatgtgcacgggacctgggctcccccaaccaagcctgcccgccttggttcagcagaacggctcctgtctctacagcggtgccaggccaggagtgctgtgtctgtgaagcggggtcatggttttggggccctcatctccctcgcgccctctcattggggaccccccgtctccctagcgccctctcgtcctctcctgcatgtgctgtgtctgtgaagcggggtcatggttttggggccccccgtctccctagcgttctctcgccctctccagcatgtgaagtggggtcatggtttgggggcccccatctccctagcgccctctcgttggggaccccccgtctccctagcgccctctcgccctcgcctgcatgtgctgtgtccatgaagtggggtcatggtttgggggccccctatctttctagcaccctctcgccctctcctgtatgtgaagtggggtcatggtttgggggccgccatctttctagcgccctctcgccttctcctgagcgtgtggaactctgtggtggtcagagctaaggttctgaataggtcgaagcacctccccg

SEQ ID NO: 220530 - DNA, 820 bp, Homo sapiens
  chr21:46861363-46862183
  hypo
cagcagctgcctccaggcctcgggacgcttgaacccacctcgagggctgccagctcctggcctggaggtgcccccaccgggtcctccagtcctgctgcccggtggctctggccatggttcccgtcccgggctgttcatgttccccctgctcctctccgtgatctgccatctctgcttcaccagccggcgccttctacagaacacggccgtgagcttcccatgttctgccgctggctcttcacgccaacaggtctcctctgagcagggccagcttatggcatggcgccgggtcagctctcacctgtccccctcagacgcccacctctgatatgcaactatttccagcagaaaatgtcccatgtccttaaaggatggagcacgctgctgggaacacggctctctccataaaggagggactccccatgccactcccaaggccacgggaggccgccctcagcacagggtccatggggtctcggggtctccctgccaaagcacaggcctggtgaccccctgggaccctcactccagggagaggactgtgcatcttgtgtgcttctcacagtcactgtgtggggttcagcccaggggaggtcacctcgccctcatccacgcagtcctgcggggaggcccatttgccctgactgcacagtcctgcagctcggctgtgcccttgagtgggtggcgctgccctgttgcccaccgtagctgctgtggggccacagccttgagcctggacactggccatgactggataccaccggtgcacagggtgcacgtgaggaaaccctgcccgttctgtgcccgtgccttgcttttt

SEQ ID NO: 220531 - DNA, 117 bp, Homo sapiens
  chr21:46862421-46862538
  hypo
gtagtctctgtcgccgggtagtagcagggccggaccccttcggatgagcacgcccaggcccaagagtggcagtcctggtgtgggcggtggtgctggtgtgggcggcggtcctggtgt

SEQ ID NO: 220532 - DNA, 302 bp, Homo sapiens
  chr21:46863356-46863658
  hypo
gcccagctcggcatcgcagcagagtcccggtggtggagatgctttgccactggccacccagagctaggagcctcggccaagggctccctccttgcactgtggtctctcgggacctaggaggtcccggggtgtggactgtgctgaactgttctccgacaggcggccctttttctcccacgtgggcgaaaagtgaagcctctgggtggtcctgtacctgtctgtcacatcccgggctgcagccgggtccccagggaggcctccgtgaaaacacaaatcaagtgccaatttcctggtgaagagtc

SEQ ID NO: 220533 - DNA, 44 bp, Homo sapiens
  chr21:46863708-46863752
  hypo
agaggaatagctgagctgcagcactaaggagagatgcctgctgc

SEQ ID NO: 220534 - DNA, 68 bp, Homo sapiens
  chr21:46864062-46864130
  hypo
ccatgtgacacattcgctccatggtacctcctgcctcccgaaatcacctctaagttcactttgtgcca

SEQ ID NO: 220535 - DNA, 204 bp, Homo sapiens
  chr21:46885701-46885905
  hypo
cacctgatgctgagcacaggcgggcgtccgtggagtgcacgtgtctgagggtctctgaggggtttgcccttttcttcggagccacggtggccgtgagggatgcaggacattgggtgtggccctcgaggactggcctgtctggagcccactcccccgtgggtgaacgcggctcttggtggagagcccagtttggggagaagggac

SEQ ID NO: 220536 - DNA, 285 bp, Homo sapiens
  chr21:46886369-46886654
  hypo
tgagctctcgcacccgggaaggctgagctctcgcacccgggaaggctgagctctcgaaatggggttcaggcatttgctgtttgattccaggacatctgagacagctgggcctgtacctcggggagtggaggctgcgccattctctgcccatccagcatcttagggccgggcatttggaagctggcttctgaagggagcccccaggagcttcgtggagaggagacgggacagctttggaaagggcgttgctgtcactggggtccctggggccgccggtgtagcgtg

SEQ ID NO: 220537 - DNA, 268 bp, Homo sapiens
  chr21:46894503-46894771
  hypo
tggtggggtgtgtggaatcacgtggtacccaaggggagaatcccccagccccaggtgtgaggaacagcagggaattctcactcaggggcccagatcacaacatgccccacgtgaacatggacccacagcctcgctcctgggggcgtgggcaggagacgccgtggacgtggacccacagcctcgctcctgggggcgtgggcaggagacaccgtggctggactgtgggcagtgtgtgaacatccatgttactttcatgctttttctttat

SEQ ID NO: 220538 - DNA, 257 bp, Homo sapiens
  chr21:46894910-46895167
  hypo
gcctgtcttgccctcaggggtcagtagcggtccctgaggatgtttctcctccgggttttcctgaagtttaaaacatccagccgccttggcgcgtgttcggcccagccgggcgtgcgctggggaaacctgtgcggggagcatctgcggtgcggcctcctccagggcagggctctggccagaagagaggagcgcgttccccctcccgcctccgcatgtctgaccaccggccgaggcaggttcagaagcgtcactgtcct

SEQ ID NO: 220539 - DNA, 215 bp, Homo sapiens
  chr21:46895491-46895706
  hypo
ggagagcccctcccagcagtggggtgacacatgtgcacacgcaggtgtggctccaagagctccctctatgccacgaagacatattcctggctggggacagggatgctgggctgggcagacgctcggagcctgggcacaggccccgctccggccctgcctggccgccgcgtgtctctggtgagaggatattcctttaaaacgaggtcctgccctgc

SEQ ID NO: 220540 - DNA, 589 bp, Homo sapiens
  chr21:46895736-46896325
  hypo
cttcccttcgccccatccctccgttagctcgtgcgtggccatcagggaatgaacgcgtgtgtgagcctgacgaccaggaggagaaggcggcgcagggagcgcgcggaaggctttccccagctcgggccacctgagaaaacacaggaggggcggggagtggggaggccccagccgcgggactgaggcgcggtgctgtccgtgagagacgggtgcgggaacgtgttccctgcggggaccctctgcagattcacatcagcttcccagcatggcctgtcgggcgccgggaggcctctgtggtgacggcaggcgcggtcctgggtcctggggagccggggagcccacaggcggccacacccctgcggcccacggaaggaagcccctcgcgcacggccctggagcaccctcctgtttcagaggatttttctttatctttcttgcgatcttaagtatttcatttcacaaaccaagcaagtctccaccgggcatctgccggccgaataacaggccacctcccctctcgtcctccagggcgcggccctaaaacccaggctccccgcgccaccccccgtcaccacgccacccttggctg

SEQ ID NO: 220541 - DNA, 894 bp, Homo sapiens
  chr21:46900277-46901171
  hypo
ttgtagaaacagctcgatatgcagcttgcggggcaggggccaggagtaggccaggcggggggccgagctcagggcaacgtgtctctccggctcttttcctcagaccttcattgacatggagggatctggcttcgggggcgatctggaggccctgcgggtgagtggcccttaaactgcagcgctgcccgatgtctgtgcccatgaggaacaggccatggacccccaagattcagctggggtcctgtggggggtggggatgaggcccgttctgggggtggtggtcatccctggtgggtgccacatgggctgtgactatctgtgttcgcccacgtccagggtcctcgaggcttccctggacctcccggaccccccggtgtcccaggcctgcccggcgagccaggccgctttggggtgaacagctccgacgtcccaggacccgccggccttcctggtgtgcctgggcgcgagggtccccccgggtttcctggcctcccggtaagtcctgcctccaccgtcagtgtcgggagccctgtctgctgggagtgaggggtgaacaccccacatgggagcccctgccccgcctcaggcctccccagtccccgcctcctcacctcatctcctctaggagctggcgggcagttgctgactcggggccaccctggggtgtgcggaagcacctgagtggccaccccatggttctaggggtgctgaccagtgggggtgaccgcaagcaaggcctccgacctctctggccctgtgggtccacggactgcacagagagcgtctccatgagcaattcccatgggtgggtgtgggagggccgaggtcagcattgctggagggccaggggagggaggagcctgcttggccaacgcggctcgtagggtctcaggt

SEQ ID NO: 220542 - DNA, 222 bp, Homo sapiens
  chr21:46901444-46901666
  hypo
ccagccaaccctaccgatgggcattcaccgtcaccatcggctctgaggcctctctgggtgccgcatggcaagtgctccccagaatccattctgaggggaatttgggcttaaagaacatgcctaatccatattcacgcatgtggccagactgcctctcagagggagcagcggctaccccagccctggtgtgcaagcatcttcccgccgtggtgctgtcggctc

SEQ ID NO: 220543 - DNA, 1262 bp, Homo sapiens
  chr21:46906441-46907703
  hypo
tccccttgcctgcccgggagccagggctggaggtaacgagggtgccctgtgcacctcccgctgtgcatgtgggcctccccctgtgcatgtgggcccaaccccgaccaagttcgggctccgtggctctctcctcagttgtgtttctgtgtggctgaaatcgtgtcgtaaagttagaagaaaggctgctgtggggcctgcgttgcttggcagaatgttccttaccttttgatttgcagggtttagaaagcatcataagaaaacgtgtctacgctggggttgcagggccagcgggggctgggctgggtcctgacacgctctcctcaccccacgcaggggagcaagggagcccccggtcctgctggtgctcgtggggagagcggcctggcaggagcccccggacctgctggaccaccaggcccccctgggccccctgggcccccaggaccaggactccccgctggatttgtgagtaccgcctacacctgaccccctggagagccgggggctgccgttgccccagccctactacccctggcatctcactcacagagcagcacgtcctgggcggtggccttgctggcactgcctcatcctgggattccatattccgcatggtggggctcgagtctctcgcccgtcgcccgtgccccacggtgctgatggggatcttggcccagccatgccccagcacccgtgccctgaccaagagcgaatgagctgacccgagacgggctgccccgggggggctccacccaggccctgccaccaggtagacagtccccatctgagaacggcggctccccaggccaccgtggccccaaagcatgtcccaccctcctctcgggcagtgccaccccagggaggggtccttccctaagaagggacacaggcccctacgtgtctcgtgtgtctcttccaggatgacatggaaggctccggggggcccttctggtcaacagcccgaagcgctgatgggccacaggtagtgttgtgagctgggcgtggccggctctgaggggtaagggggtgttgcctggggcaggagagtgtccctgagagccaccggccttgcatgggatcggaagccgccctgcagagccgtgaggaccacgtgtggcgggcgctgtgccccgcgggccacccttgttcttcggagatgccccttcattgaactaaagtcacggggtgagggcctggtctgcaaagtgggagacactgtgagtggtcaagacaaaggaacacggggccgcatgccccctgaa

SEQ ID NO: 220544 - DNA, 635 bp, Homo sapiens
  chr21:46911012-46911647
  hypo
tccacagccccgggcgcctcctcacccaccgtgggctctgggcaccccctccagggctgggtggactctggggtcctggccagagcggttgagatgaaatgccggacgcgtggcctcctcttccagggagatccagggaaggacggagtcgggcagccgggcctccctggcccccccggacccccgggacctgtggtctacgtgtcggagcaggacgtaaggacgctgcgtgggtgggcacccaatctgtccagaccccccacggggtgcagagatccctccccgagccccccccacacccccacatcccccaggtcaggacaggccctgactgccagtctacactccacctcctcggtgggggctgcagacgccctcggtcagagacgcctggggagcccagctccatgtggtgttggagacaccgaggagaggggagggcctgcacaggggccagtgtttttacgtcaaaggctcccattgggctcactccctgtgtccttgacactgtggccccaaagctgcatgtagtcacccagctgccccgtcagaagaagcagatgcacccttggcccctctggtgaaggttgtgttggttccggaaccttcctcccccactgcggcccgtccatcag

SEQ ID NO: 220545 - DNA, 755 bp, Homo sapiens
  chr21:46912528-46913283
  hypo
aaggctgggtggggtccgggcaggcgcgagggtgcgtgatgaccccagctgacgccgtccctctttccccagggccggccgggtttcgcaggctttcccgtgagtaacctggtgccagagctgcatgctgcccggctggggaggggtctccacctggtagcacagagcagcccggtcgagctggggtgggccttgtcaggcccgagggatagcgacagtcactgcccccaaggaaatgatgggagtgggatgtgggcgagagccgctggcaggccctgtgctgggtgggcacccgtgagggtgaggcagctccttgcacctgcagaggcctgcagtgtccagagtgaggctggggccgggaggtgtcctggtgggggtcacctgcggaggcctgcagtgtccagagtgaggctggggccgcgaggggccctggtcgggctgtcgaggcaggcatattgcggggggcagctgtcgggggagatggagcagccgtcggggatgggggagatgccagccgctcgggcctcacggcctggcctccattccagggacctgcaggacccaagggcaacctgggctctaagggcgaacgaggctccccgggacccaaggtaaggggctcaggtgctgtccctcaaccccctttgtgacccaggggtggctccagcctgcccagatgaccactgttgggagggacctgggaccccccggctgctgctgtgacacgtgaggggtacatccctgctcgggccgtc

SEQ ID NO: 220546 - DNA, 322 bp, Homo sapiens
  chr21:46913360-46913682
  hypo
ggctttgtggggaaggagctggccctgactctgctggacctcctgccattccagggtgagaagggtgaaccgggcagcatcttcagccccgacggcggtgccctgggccctgcccagaaaggagccaaggtgagggccgggcagcctccttccggcaggcgtgggggctcctggggctgtggagacagcctggggagggtcttcctgagggtctggctcctgatgcacgagcctctcccaagcagggctctaccatccaggcctggccctggtggcccctcctttctcgcacccatgtcggcggttccgccggcccctcgtc

SEQ ID NO: 220547 - DNA, 476 bp, Homo sapiens
  chr21:46914469-46914945
  hypo
cttccgaggacccccggtaagtcggtccctggctttctctgcactgagctcgggcatgacggcccccaaggacacggtcgcccgcggctgctgagcttgtgctgtgcggcccagggctcatctccctagtgcagttttaaagcgtgtggggcaggtgtcggcgtgaggctgcagtgggctcctccgagctgatgggtggcccagggtgctgtgctctgcatggcccctccccttccccaggaccccccaactcgtggtcaagggccagggtctgccccactaagcctggcccccttcctcttgcagggtccatacggacggccggggtacaagggagagattggctttcctggacggccggtgaggacctggggtctccagtgggggcggcagatggggtctggcaggtggggagcagcccaggcccacgggggtgacatgcccagaggggagtggacggccgccgcacccactgt

SEQ ID NO: 220548 - DNA, 411 bp, Homo sapiens
  chr21:46918204-46918615
  hypo
ccagggtcccctctcgccgccacggtcccctctcgccgccagggtcccctctcaccgccagggttccctctcgccaccacggtcccctctcgccgccagggtcccctctcgccgccagggtcccctctcgccgccacggtcccctctcgccgccagggtcccctctcgccgccacggtccccgctcgccgccagggtcccctctcgctgccagggtcctctgcagaggaggccgccatacctgctcttgctggggctgcactctggggtgggaagggaccaggcaggcagaggccgagtctgggccgggacatccttaaggcctgtggaggcaaaggcaggcagaaagcaagcgggaagatggaagatgtgcccatgccagccttggatctctcagcgtcacacacgacgc

SEQ ID NO: 220549 - DNA, 227 bp, Homo sapiens
  chr21:46918886-46919113
  hypo
cagaacgagggctccgagggctctagagggaacagtgtttgcaggcggaatggctgatgctcttccaaagccaaggaaggctcagagcattcccctcattcgaaggatcaacaattagagtgacgagatttctcaacaaaacgggagaagccagaagaccataaatggtttccaaaatatccaagaaagtcaattgccagtgtagactccgacagccagtggtactc

SEQ ID NO: 220550 - DNA, 247 bp, Homo sapiens
  chr21:46929727-46929974
  hypo
atccttgaggaaccggcgtacctccgcctacagcggcagctgggggcacccacgtggcccggggctgctctgacctggcagcgtatgggggctgctgcctgggcccctcagtgtgtcacttgcgcgcctcccgctcagcgcccctcggccgtgcctgtccacacaggtgcggggccggggtggtgcgcccggggcctgggtgcagggggcagcgtgggacacagcccgtgacgcgcccctctccccg

SEQ ID NO: 220551 - DNA, 404 bp, Homo sapiens
  chr21:46935335-46935739
  hypo
ccagcaacaaagcccgcggggcacagtgcagggacagcatggccaggcagctgccctgagtgtcgccagcacgctgtggccaccgccagagtgcggcacagggcagggggaatcctagggggcctgctagcaggataagcggaggcccccattgctaaggcaggcggccctcgaggcaggggtcgtggggatgcactgagggccgcctgcaaagttaccacaggggcgcccgagagtcactggttcacattctgaacaccgtcgcttggaagacactgcaaacccagcttgctgacaccaggaggatggacagccagctggggacaagtctcatctgcagcctcagggcctgaggcttgggcggagcacagagtgcagggggaaggggttgtcactgggctcag

SEQ ID NO: 220552 - DNA, 50 bp, Homo sapiens
  chr21:46937010-46937060
  hypo
tggggagctgtgccacgcaaggacagactgtgccacgcagagctccctgg

SEQ ID NO: 220553 - DNA, 104 bp, Homo sapiens; identical to SEQ ID NO: 206041
  chr21:46950778-46950882
  hypo

SEQ ID NO: 220554 - DNA, 88 bp, Homo sapiens
  chr21:46998316-46998404
  hypo
cccgtccttagccacgggggctcctgtgtgggtagctgtcgcaggcccactcctcctttccgaaccccagaatcgatttcctggtgga

SEQ ID NO: 220555 - DNA, 54 bp, Homo sapiens; identical to SEQ ID NO: 206042
  chr21:47062898-47062952
  hypo

SEQ ID NO: 220556 - DNA, 139 bp, Homo sapiens; identical to SEQ ID NO: 206043
  chr21:47063293-47063432
  hypo

SEQ ID NO: 220557 - DNA, 46 bp, Homo sapiens
  chr21:47167569-47167615
  hypo
agtcacagaggctgcggtcttgcccttaccccgctcctcgccagcc

SEQ ID NO: 220558 - DNA, 85 bp, Homo sapiens
  chr21:47286941-47287026
  hypo
gactattcagtgaaagacatcggtcattgaggtatctattcaaaaacacggtttagtactctgccacacaccgaacgcaacgcca

SEQ ID NO: 220559 - DNA, 112 bp, Homo sapiens
  chr21:47287439-47287551
  hypo
tgcaaatatccttccaccagccagttctccttccaggaatctgccacccgacccttgtgttgtgcacagacatggtccaggtgtttgcgacgtgattgtttatcagagagag

SEQ ID NO: 220560 - DNA, 209 bp, Homo sapiens
  chr21:47330900-47331109
  hypo
ccatcatccagtgcgtcaagcagatctgtgtggtcatgctggaggtaccgtctgcgcgccagggccagcccacgtcagtgctggatttggcctcccagcactgcaggcaaaggcttggaagccccggtcgccccaaggactcacacagttggggctgtggggggctcctgaccccaagtcagcctgagcgagagcggtgccggtatggg

SEQ ID NO: 220561 - DNA, 452 bp, Homo sapiens
  chr21:47369967-47370419
  hypo
gtccacccccgcgcctcctggcatgacgccgacctcactccttggcccccggaattcccacaggtgggaggtggtcacagaagctttgtcgattccgttctctttttggcaaggacacttccaggtgcctctgcacgggcactgacccacaggtgggcacagggccatgctcccagcctgggcctgacgggccggggtgcaaccaccgccagcatctaccatgctgtgagtgggcggcggtgacgcacccacctgggaatggcagcgagtgcccggagtgccggattccccccgagctttcacgtctaaggattacgaggaagacctggactacgtgcctttatgagatgcctcctgtgggtccctgaggccgtcaggtgccacctcacccctgcgtgtcctgcggaaactgtgacctgtgactccggggcggggtggccttgggggcacca

SEQ ID NO: 220562 - DNA, 360 bp, Homo sapiens
  chr21:47413926-47414286
  hypo
acgcttggcgaggccaggaaggggctgtgcggggagggaaggccggaacagcccagtgaccacctggacagcatgctgtggctcccagcgtgcccgggcagccatcctccccaaggatggcccagctccacactcacggctcgtttctcttcagggtgaagctggcccgcagggtgatcagggaagagaaggccccgttggtgtccctggagacccggtaggaagcgctgtggggttggggggcgttggccaatttgggttttgggggtagaagtgctccagcagctcacgcactgggggtctgttcatttccgtttgagggcctctgtgtttccgtagatctcgggggtgtccctgcgt

SEQ ID NO: 220563 - DNA, 141 bp, Homo sapiens
  chr21:47417619-47417760
  hypo
agaggagccccaggacctgccggaccccctggagacccggggctgatgggtgaaagggtgagtgtccaacagctcgggccctagggcggaggcctggccgccagaggccctgggaagccccagccccgcactgtggagctg

SEQ ID NO: 220564 - DNA, 318 bp, Homo sapiens
  chr21:47418109-47418427
  hypo
caggaacatgcccaagctgcctgcggcgccctctttagtggactgggcactcttgggtgggcgggctggccccaggaccgccggctggcccaggaattccatggccgggattctgtcagctcaggcccttccgctgtgcgcccctcacagcctcccctctcaaatcagaacccggtatcactgccctgcttttccatgacaggggtatccgggcaacaggggcgctcccgggataaacgtgagtacgccccctcctccatctggctgtgggcacacaaacattcacagtcacagggacacgcacgtgtgaacacacat

SEQ ID NO: 220565 - DNA, 139 bp, Homo sapiens
  chr21:47422523-47422662
  hypo
accatcccagggccggcccggcctctcgctggtcaaggagaactatgcagagctgctggaggatgccttcctgaagaatgtcaccgcccagatctgcataggtgcgcatggggccacccgggcagtcccagatctgcgt

SEQ ID NO: 220566 - DNA, 85 bp, Homo sapiens
  chr21:47423177-47423262
  hypo
ggctcactccggtggctgagcaccaccgtgccgtgccctctctggggagcttagacgctctctggccggcccactgcggctgcat

SEQ ID NO: 220567 - DNA, 114 bp, Homo sapiens
  chr21:47459901-47460015
  hypo
tcaccacaccccaccgctgccacccgcgagccagccacgtcccgccctccaccctccctccagcccttcccaggaccctctgcgtgtccctggtcctcgcggcctgcatctgag

SEQ ID NO: 220568 - DNA, 157 bp, Homo sapiens
  chr21:47538429-47538586
  hypo
gtcccaagcccgaccgtgggtcctgcccccgcagcgggcatcctgcaccccccttcccctgccaaaagacgtgaggctgattctgcaaacccttccagggggaccctggccgcccaggacgcagagggcccccgggagaaatcggggccaagggaag

SEQ ID NO: 220569 - DNA, 171 bp, Homo sapiens
  chr21:47627575-47627746
  hypo
ccaccacagagcacccggtcagggcaggggcccagccaccaaaggtgtgggtgcagccagggccccaagctgggtacatccagacagacctccagcttccagcacagggaccctcaggggtgcagctcacaccctcaacacctgcagatctcacgacggacaggatggggc

SEQ ID NO: 220570 - DNA, 87 bp, Homo sapiens
  chr21:47689551-47689638
  hypo
cccaggcagcatcctccccacgctgtggccactacgggcttgtggcaaggaatcctggcagcctccttggagccgctgccagaatgg

SEQ ID NO: 220571 - DNA, 143 bp, Homo sapiens
  chr21:47689700-47689843
  hypo
tgcactgaacggaatcatgcagggcctagaacagcaggtgctacaggggctgctctgtcctcatccccaagttccgtggaagtggaacaaaataaccgactggaaaccccaagacacagtttactctgcgcaaaccccagggg

SEQ ID NO: 220572 - DNA, 110 bp, Homo sapiens; identical to SEQ ID NO: 206045
  chr21:47717450-47717560
  hypo

SEQ ID NO: 220573 - DNA, 84 bp, Homo sapiens; identical to SEQ ID NO: 206046
  chr21:47717589-47717673
  hypo

SEQ ID NO: 220574 - DNA, 116 bp, Homo sapiens; identical to SEQ ID NO: 206047
  chr21:47717748-47717864
  hypo

SEQ ID NO: 220575 - DNA, 98 bp, Homo sapiens
  chr21:47773781-47773879
  hypo
ccttgactggaagcacgaggaggcgcctctgctgtgagcagtcggtcctggggagggaatggcgcacacatggaaaaggggtacgtgtgtaaagcttt

SEQ ID NO: 220576 - DNA, 439 bp, Homo sapiens
  chr21:47774497-47774936
  hypo
atgtgcagcatgagcaagcccggtgtcgggctccgggggacacacgggagggcagggaggagacgcaggggcagcaccgcgtggcttgttgcacggtggaaccagtggaggggaactcggggcatctgggctcagcggccaggagccctcactctggagcagggtccctgggcctgctggaggccacagggtgtccaggcagggtggcagcgggctgtgtgccagtttgagttccctgcaaagcggaccccaacacagaatttgctgcacaagaggctatgggggaaatgccagagaagggcaagggcccggctggaacaggcagccaggaccttcccacgagcaggccttgcaccagagagaacccaggaagggctggggtgggtagccccaccaggcattcgtgtatcacctgagagccaacccctgcctctgcgcg

SEQ ID NO: 220577 - DNA, 439 bp, Homo sapiens
  chr21:47775296-47775735
  hypo
ttgagggttatagctgcgagcgaggtagcttggctcactaacgtgcttgtcccacgtggtttctctgtaggagagcctgccacgcttccaggcggagttagaagaaagccacaggcaccagctggaagcgctggagtctcccctctgcatccagcacgaggggcatgtctcagacagatgctgcgtagagacttcagcattgggacacgagtggcgtctggaaccctctgaagggcacagccaaggtgggcccctcccgcctcgccatggtgtcggcaggtcccgggtctgggggacgttctcggggagcctgggtgcctgggttcgatccaagtcctccgtgaagcagctgagtgctccgacctcttcttctggggctgacacctcaacagagtgtgtcctgatgagggtttggcgttagaggcggggtcactggctg

SEQ ID NO: 220578 - DNA, 128 bp, Homo sapiens
  chr21:47797823-47797951
  hypo
gcctggtgatgtgccgtctgcttgccgtacctgtgggcgtcctacgtacatagactcagcgtgtgccctcggtgtccgcggctttcactttgtgtgtttcccaggttggcgcacgttgtagcatgtgt

SEQ ID NO: 220579 - DNA, 44 bp, Homo sapiens; identical to SEQ ID NO: 206048
  chr21:47799137-47799181
  hypo

SEQ ID NO: 220580 - DNA, 52 bp, Homo sapiens; identical to SEQ ID NO: 206049
  chr21:47799225-47799277
  hypo

SEQ ID NO: 220581 - DNA, 264 bp, Homo sapiens
  chr21:47811198-47811462
  hypo
cggcccaggagcaggcggcgctgagggaggagtgcacccgtctgtggagtcggggggaggccacagccacggacgccgaggccagagaagctggtaaggagcgcgggctgtggagggtggtgcgagctgtggggcgcggatacagctgccacggtttccccagctcccaaggacactcagtgtctctagagggtcaagtgtaaaccagcacgcagcttctcctggaacactgggcatgggaagcttgtgcggatcaggtgaggc

SEQ ID NO: 220582 - DNA, 753 bp, Homo sapiens
  chr21:47832836-47833589
  hypo
gaggcagctgcagtcggagctgctcttggtgaaaaatgaaatgcgcctgagtctggaggacggcggcaaggtgtggggaggggggaaggcgcgaggtccccccgggagaggctggacacgcggcagcaaggtgtggggagcggggaaggcacgaggcccacccgggagaggctggacacgcggcagcaaggtgtggggagcggggaaggcacgaggcccacccgggagaggctggacacgcggcagcaaggtgtggggagcggggaaggcacgaggcccacccgggagaggctggacacgcagcagcaaggtgtggggagggggaaggcgtgaggcccccctgggagaggctggacacgcggcagcaaggtgtggggaacggggaaggcacgaggcccacccgggagaggctggacacgcggcagcaaggtgtggggaggggggaaggcgtgaggcccccctgggagaggctgggtgcagaacatgtgggtcttgccctgggcagaggcgggtattctgctgaggtgaggagcacagtccgtgcctgcagtgacatgttctctgaatcctttctgttctgtaacgagctgtccataactgttgtgaaatttcgtacgtgcttcatttaagccactctgtagaaacaatcagttgggtttttttcttgtaattgatccaaatggatttaactgtgctcgagggttagtcctggtttgtcttttcatgggaggaccacatcgcccccgtgggcct

SEQ ID NO: 220583 - DNA, 336 bp, Homo sapiens
  chr21:47965680-47966016
  hypo
cccctggccagcaggcgcacacgtggtgctgagcctcctgccgcctgctgggtctttttggccagttggttggttgtccacagcctgatcgtgcccctctccactttgtgcaggcagttccggtcaccacaggaggagcacccatctttgacaggccattcaccaggacaggcctgctgggcttcatcgggcctgtgagtatgtcctcctgtaccagcactggcagtcagagaaggtagggggtgtggctaagggacacctcgttgcagccccacccttgtcctggccgttcctgacctcccatgtggccttggtcggtggcgctgacctccctgc

SEQ ID NO: 220584 - DNA, 110 bp, Homo sapiens; identical to SEQ ID NO: 206050
  chr21:48087089-48087199
  hypo

SEQ ID NO: 220585 - DNA, 72 bp, Homo sapiens; identical to SEQ ID NO: 206051
  chr22:17601506-17601578
  hypo

SEQ ID NO: 220586 - DNA, 35 bp, Homo sapiens
  chr22:18074668-18074703
  hypo
caataaagttgtgcacgtcacgctgaagagccatg

SEQ ID NO: 220587 - DNA, 161 bp, Homo sapiens
  chr22:18081585-18081746
  hypo
gggtatacagacaaacggatagaaagcaggacagatatccgtatacccatgtttgcagcagcattattcacaacagccaaaaggtgggagtaacccaagtgtccagtgacagatgaacggataaacacaacgtggggcatccataccgtggaatattattc

SEQ ID NO: 220588 - DNA, 132 bp, Homo sapiens
  chr22:18265344-18265476
  hypo
atctcccccacacacgatctgaccccgtggcatccttcctttcctacaaactgcactgagacccaggtgtcatcgtgaagttcatgccagccagaggagccactgtggcgtttccggccataggcctgggca

SEQ ID NO: 220589 - DNA, 199 bp, Homo sapiens
  chr22:18265523-18265722
  hypo
ggaagagatgcctgtatgggaccaactcaggcagccacagagggatggcccagcaccccacaaaacccaaagtgctcagcgtctaggatctgtttacggggcagagaagtggatgttcttttcctggttcaaaggtagaaacaggcttggagagccgcacccggcatcagccagccaggcagacgcctggtctagcgct

SEQ ID NO: 220590 - DNA, 329 bp, Homo sapiens
  chr22:18286547-18286876
  hypo
agtgtcagcacaggcgctgccatacataccacccagatgcaagtcgatgaggtcactgtaataagactctccccaatagtctacaacaaggaatcggtgaagagagagttattccatcaggtagtcctcctgtccccccatacccaatcaatgatatgatatggagcaatcaatgatatggagcgcaagaaacacagacacagcgaggcggcagaggaacggctggaaggcatgcgtgcctaagtgcatcacatactgcatgtccacacatgccgtatctgcatactgcgtggctgcgggaggagggcggtaactaaaactcactgtgg

SEQ ID NO: 220591 - DNA, 96 bp, Homo sapiens
  chr22:18291185-18291281
  hypo
gtcccagggaactaacgacatgagggggtctgggggtgcaggctggggacctgctcagtgcaattctgtgatggttccttgcggttcaatctccct

SEQ ID NO: 220592 - DNA, 315 bp, Homo sapiens
  chr22:18291533-18291848
  hypo
gaagcaaaactagcctaccacggcgggagggagggcttcctccaggagcagagcttaggagggagcccggcagtacctgcttcgccccggagcgccttctccacagccacgcccctttcctccagccgccgctgcctctcctccacctgctgcagctgccgctggatgatctatgacagacagcacagactgagcacccggctctccagccctgcttcaggaggacacacaactccacacccacacgaggggaaacacaggagttgccgctctggaaagggctctagtctgtgggcggtgcgctcagggtgtggc

SEQ ID NO: 220593 - DNA, 221 bp, Homo sapiens
  chr22:18295585-18295806
  hypo
cagcttcttcctcaccacccccaaaactcgcctcatctcactgtcccttgtgtaaagttaaagccgttaaaatatgtgattctagatgcttttctccttgagtgaccatgtgcttgtggaaattcagcccacttcttcctgctgaatgctccgggggagtagaagtggggtgcgggaggaaagggggtcctgctctcagagacagacgcagcaaaactggg

SEQ ID NO: 220594 - DNA, 64 bp, Homo sapiens
  chr22:18328029-18328093
  hypo
tgattttacagtagagtgaacgaaacttgggaaggaaaacatccaagaggcgtctgtttgacgt

SEQ ID NO: 220595 - DNA, 98 bp, Homo sapiens
  chr22:18329915-18330013
  hypo
tggcaaagcccccctgtactcggcacagcagctgctgaagacacttcagggctccgcgccgctgagaagggtgtcgcgtaggaaatcaggatgtcaag

SEQ ID NO: 220596 - DNA, 558 bp, Homo sapiens
  chr22:18340868-18341426
  hypo
gagagtcccatccacctggaggcccgcatcccctcccgggcaatgaaacgtgtttctgcgtacaagcctaccaccccctcccgccaaggtaagcggtgaggagacaaggagcaattataaagaaagaggtgttggcagccaacagggtgctgagaattccgggcggtggtgagaggagcccacagtgccatgacctgacctgggcaggagtgccaatgggcctcaccaccccttgtttcattatgactaatctacttgctggcacttgtgaggcgcttggctgggtgagctgcaaggtaagggctggtttttgagtctaaaggaggtttcagggcttcgtgaaaggggctggaattcggaaagacttctcctgaaatctctgcctggctgctgccgttcagagctccacatgggtgtttttatctcggggagcacttgtgggaccgggtcctatacggcatcatcctgccctattttttagcatgaaaataagagtggcccattttcacagccgctctccttccatgtgtgtgccacggcctccctcttaggcagtgt

SEQ ID NO: 220597 - DNA, 196 bp, Homo sapiens
  chr22:18352969-18353165
  hypo
cctctcactgccacccgatctcccaccaggtgcgcacctctgccctctactcagtcaccatacccttctctctcaaagtctagccaagggtcagggaggtcatcccaagatgctcttgaacttcacagatttcctcctcccctgtgcttctacaaagcgacaacctaggctgtgtaaccgagcctttcgctgcaca

SEQ ID NO: 220598 - DNA, 375 bp, Homo sapiens
  chr22:18353345-18353720
  hypo
ctccacggtgagaggctaactagaacaccctgagcatcagggacagctcagcgaggttgggtggctccctctgccaggccccatccttgagatcaaatgagctatccagagagcaggtgtgtgtgagaggtggaacagaagacttgacagcaaacaatctgcctgccttatctaaacagcgtcctaattctttcattcttccccgactcgggagtgctttttaccaacatagcagaagggccaggcaccatgacaggagtcagcctttctcggctcacctctctgggctccttccttgctccttctaacagaggtgactgtttgttcaccctcaggacagctgaagtgactaggtcctaacggcatggcatccct

SEQ ID NO: 220599 - DNA, 385 bp, Homo sapiens
  chr22:18354757-18355142
  hypo
aggttctgcgggaactccttcttcatggagccctgcaggaggtggcggtcgggaggaaggggagcacctcagggagtgccacacaggccctcctagaggcacagccttgcgagagcaaagccaaccctcactaaggggtctgctttgagacagacttctaactggctacggtcaactgtgctcttggctctgccacagagtgacggcaccgccacagtcactgcctccacgcactgacagagaacacttggcacaaccgcgaaagcctgggccagcctgctgctgacgagggagccagcatcacagtgcttcacaccagacttgagtaatgctatgatacagcctggcgacgccgggaaatatcgacaagaaagagtcttagaga

SEQ ID NO: 220600 - DNA, 154 bp, Homo sapiens
  chr22:18355710-18355864
  hypo
atctttgggaagtgcaatttgaatacaaggtgcagcagcaaaccatgccaacacagtgctcacaggcagggaaaccgggtggaagaaaaacatcgcgtcagtgtccacgcaggggtaccggcacaggcaggacggctgcaggggaagtgtcttc

SEQ ID NO: 220601 - DNA, 82 bp, Homo sapiens
  chr22:18358159-18358241
  hypo
cgtgagtggaggctgcggagggcagagttttagtgagtcctaggccatgctacctgtcggagggagtcggaggagggagagg

SEQ ID NO: 220602 - DNA, 146 bp, Homo sapiens
  chr22:18363713-18363859
  hypo
gttgaacttctagttcgtggtgggacagtcgtgtttccatgatgtgggtgggactgactagggtcaggtgtgaatgtaggatgcaccatcctgagggccataaaagttgcttccaccacaaacggtttctacgcatagcctttctt

SEQ ID NO: 220603 - DNA, 62 bp, Homo sapiens
  chr22:18371272-18371334
  hypo
gaggagacaagataattccacgaaaagggacatcgttctccggtgctcaacaatgcagaaaa

SEQ ID NO: 220604 - DNA, 105 bp, Homo sapiens
  chr22:18400898-18401003
  hypo
acaaggccctataaacgtgtcgtaaacattttggtctcaggactcctttatacacttcaaagctaaggaggaccagagttcgaggctgcagtgagctacgatcat

SEQ ID NO: 220605 - DNA, 180 bp, Homo sapiens
  chr22:18427241-18427421
  hypo
attacattaagtcccgaacaatgaagtcggaggcagggagagcagagccgacccagcctccgctttgctaatggcacaagggcaacattccatgcaaagtttcggtgtgcaggcctcctgagaacccagcagtgccaggcagcagtgagcacacgcacccactgacgataggactgtggg

SEQ ID NO: 220606 - DNA, 403 bp, Homo sapiens
  chr22:18443245-18443648
  hypo
caggtaccacacatgcgaacccagcatatgggaaggaaacatgcaccctggaacaccccgcccaggagtgtgtgtgggaaggagactccaggagctctgcgaactgttctggaactggacctgttcaggattggcaaggggctccgggaacagatcctgtgggtgtgagactgtgtccccgtccgcttagggaaggaccatgggggtgagagggtggggggaaggaggcagatttggaaacagacacccgccccggggtcagatttgacccaggggggcccgcaaagtggggaaggaggagaggaagcactaagctgtgccagggagattctgaggcgagcaggagcagagcaaggaccgaaggagccagcacggggtcactgggagtcctccaggcatggaa

SEQ ID NO: 220607 - DNA, 194 bp, Homo sapiens
  chr22:18553635-18553829
  hypo
acctgtaatatatttccactgtcccgctacatttcagaaccagatgcacaaagaacaaacaagtttcccagcaggactcaaaatagaagggatggtgactgcatgccttaccattcgggatcctcttcttcccggagaactccgcgcaggcaggtctgtacctgcttagaggcagcctgtctgttgagcagccc

SEQ ID NO: 220608 - DNA, 450 bp, Homo sapiens
  chr22:18619403-18619853
  hypo
aacaaaacaaaaaaaaagagtcacacgaacacatgttctgatccacctgaggcaaaaggcgcccctgtggagcccagcacgtctgtgtgggaggaaccgcctggaggagcagagagcaaagcaaaggggcttggggcggaacacgacgggagtggcaggagcagccagcgggaagccagggagagggtttggagatcagccagtcgcgggcaggggtaggcaaaacctgtaggttcctgtggacgccctggaattgtgcagttacttctgagtgaggcatgaaaccagtgagttctgaggagacaactaacgctgcaatttaatttccagttaacctgtggagcttcagaagctctcactcacaactgggatattaacaaggtcggatccggagggaagtccctcagcacatagagcatgaagtgtgcacccccccgtgcagcaagtcca

SEQ ID NO: 220609 - DNA, 75 bp, Homo sapiens
  chr22:19039218-19039293
  hypo
acagagcaagaccctttctcaaaacaaaacgaacaaacgatgcaaagagaaaacggaagaataatgtgaacaaca

SEQ ID NO: 220610 - DNA, 193 bp, Homo sapiens
  chr22:19053069-19053262
  hypo
agccatgacactgtgtgacccgcccctgcctcccacagccgaaaaaaataaggtgtgggcgatgccacaggtggcaaagctaaggagccagccagcacttgagtatcaatgagtctggccagcgtcctctcacttcctccacccatcacttccgactcctacacccacacacgggaatgcctggtaatttaca

SEQ ID NO: 220611 - DNA, 33 bp, Homo sapiens
  chr22:19130728-19130761
  hypo
aaaaagaaaaaagaaagtcggagctgcagtctg

SEQ ID NO: 220612 - DNA, 219 bp, Homo sapiens
  chr22:19620238-19620457
  hypo
gggtggcccagacactcttccgactcccggccaaactccacgtcattccgcgatcagtggcatgcctgtgcctgtgggcgcattcctctcgccagccggccacttgtggattcctccgccagtgtgctcctctccacgtccagccgctcctgtctctgccttgctagggtctgggtttttataggcgcccgatggggcgtggcagcaagagcggtcttg

SEQ ID NO: 220613 - DNA, 67 bp, Homo sapiens
  chr22:19621109-19621176
  hypo
gacagagggagaggacgatggcaataatgttgcccctgtggcccaccaggcccgcaccttggcaaca

SEQ ID NO: 220614 - DNA, 128 bp, Homo sapiens; identical to SEQ ID NO: 206056
  chr22:19706043-19706171
  hypo

SEQ ID NO: 220615 - DNA, 146 bp, Homo sapiens; identical to SEQ ID NO: 206057
  chr22:19748443-19748589
  hypo

SEQ ID NO: 220616 - DNA, 40 bp, Homo sapiens; identical to SEQ ID NO: 133782
  chr22:19749084-19749124
  hypo

SEQ ID NO: 220617 - DNA, 170 bp, Homo sapiens
  chr22:19798779-19798949
  hypo
ccaagcccaactgtgcgtgggggccgtcctgcccagtaccagccccaaagactgcccgggcacagcgaatggggaggactcggcagtgggcatggacagtagcccccacgtgtgcgccccctattccatggtatgtcctccccatgccccgccctcgggccaccatgccc

SEQ ID NO: 220618 - DNA, 84 bp, Homo sapiens
  chr22:19856498-19856582
  hypo
cagagcttgtctgagctggtgaaggcgggactcatccctgctgtgtctgggcctcctggtgcggtcttccgccctgacatgcct

SEQ ID NO: 220619 - DNA, 419 bp, Homo sapiens
  chr22:19872851-19873270
  hypo
cggtatgcgggtggcgcccacctaagcatctggaagctgaagctcccgtgagagggaacccttaagtctccagctgctgtcccggggcaggagtcaaaacataccaacttggctaagccagcttgcgggaggccggctccagcctctgtgctctgctcagccgcaggaattgggtgccgggagggctggcaccggtcggggatcagcccagacacaggggatgccagcccacatcagaggaaggagctgggccccatgggcagggctggggcacgaaggaggggctgtggtccctgcaggccgggggctcacgctcagccgtctggtccctctccaacctggtgtccagcccaccaggcccagcacttcctggtgcctgctccgtgccggaacagaacatctgacgctgcacccacact

SEQ ID NO: 220620 - DNA, 159 bp, Homo sapiens
  chr22:19882774-19882933
  hypo
ttcacggttgctctcgaggtgcactggggagcggccaacccgcctggcagccagcaggatgggggagccctgggaggtgacaggaagtggggcaaagattctccatgcacctcggggagaccagagacagagcgtgtggctcgacgtgcccttacctat

SEQ ID NO: 220621 - DNA, 114 bp, Homo sapiens
  chr22:19891185-19891299
  hypo
ggcccctctgggcctcgggctcctcttggctgcacttggatcccgacccccagtgcctgcctctgtaaaggagctccccggtgtgggctcaccatcctcgccttccacattcct

SEQ ID NO: 220622 - DNA, 218 bp, Homo sapiens
  chr22:19892473-19892691
  hypo
ataaggcaaataaatctggcagaaacagcccctccaagtgtgagtggaggcctcccctcagccccagcccaagctgataaaatacagaaatgctactgtagaccctccgggcttattttgactgcagcagaggaatgtaacatgtaaacactgactcccatattacactgttacaacttgcattaacagcgccggacaaaagccgcattttcacagaa

SEQ ID NO: 220623 - DNA, 102 bp, Homo sapiens
  chr22:19924379-19924481
  hypo
tgcaatgcttattacgccaaaacaaacaagtagattagaggcgtgggcttattcggtcatgctggaacctcctaatgctcaaggggtacaagtgtgtcgata

SEQ ID NO: 220624 - DNA, 57 bp, Homo sapiens
  chr22:19965520-19965577
  hypo
gcatgcaggagcgcgtccaccagcccttcacactcccggagtcgccgccgggcctca

SEQ ID NO: 220625 - DNA, 300 bp, Homo sapiens
  chr22:19966359-19966659
  hypo
gggaccacgaggacggggcctggtgtgcatgtgggctttagcaccaggtctggtccacacctcaggcagcccgacgtgttcttgaagacagttgtccactcggcgtcccgtggcttggagtcctcgttgggctcacgctcccatcctgagtggggcacgatcacctcgtgggtcagcgtctgcaggccatggtcaatgatgaccatcttcaggggctcataggatgacaggttccacagggtgcctgtggggtgcgattggccaatctgtgctgaccatatgcaccgcctgcctacctcc

SEQ ID NO: 220626 - DNA, 275 bp, Homo sapiens
  chr22:19967264-19967539
  hypo
ccagtgacaagctcacggacctcgttgtcccgggcagccctcagcaggcgcaccagggcaggcacaccaccgcagtcccggatggcggccttgttgtcagtgtcgcggccataggagaggttgcgcagtgccccacaggcccggcgccgcacctcagcccgcgggtggtccagcagtgccacaagcagcggcagcccccgcaactgccgtacacgccgcttgacaccctcgttctcaaagcacagatgctgcaggtaggcggccgcattggcctt

SEQ ID NO: 220627 - DNA, 38 bp, Homo sapiens
  chr22:19971874-19971912
  hypo
gagagccacgcccccgcagcaagacctggcaaccctgc

SEQ ID NO: 220628 - DNA, 156 bp, Homo sapiens
  chr22:19972131-19972287
  hypo
tgcatgtacatacacgtgtgcaagtacccagcccggcacaggccgagcacatcaacccgtgtgctctaacagcaccccaagggcacggcgcccactgttcccagaggcacactcgtgagcacacatcctcccgtcctccaccgtgtatcggagacc

SEQ ID NO: 220629 - DNA, 272 bp, Homo sapiens
  chr22:20073379-20073651
  hypo
ggcaggacgcgcccgggtctcagcggacttgtgcatgttagctgtgtagatttatgtgagggcttgtaaaactctggtcttgtaaactagtcttaagcgcttttaatatggagacagatgagagcccctctccgctcccgtgtgggcccgcaggagaagcggtgatggagagccgagctcgccccttccaagcgctgccccgtgagcagtctccaccacctcccctgcaaacgtccagtggtgcagaggtaatggacgttggctctggtggt

SEQ ID NO: 220630 - DNA, 174 bp, Homo sapiens
  chr22:20123202-20123376
  hypo
gcccccctgctgggacccaccgcatgtggcctggggtattcctggcccccgagcctcagtttccccatctgtccaggtgtctatagggattggacaggtaggtgcaggtacttcgaggcccaaaggcctggcctgacaagggcgcagcagcttctgccccgccggtcccgagcg

SEQ ID NO: 220631 - DNA, 202 bp, Homo sapiens
  chr22:20123633-20123835
  hypo
ccctggacctgccctccacccgtagcttggctggagccagccaggaggggctcagagggacatggcgggccagacactccacctccagcccaggcccagagcctgtctttgcctggccctccggcaggcgagcctggtgtgcaccatcaggtctgggtgggagtggagcctccccgagcctggacccagactactgcctgct

SEQ ID NO: 220632 - DNA, 190 bp, Homo sapiens
  chr22:20126324-20126514
  hypo
gcctggatgaggcatcgtggcgcattttccatctggggctcccacctccagcctgtgtaccgcccccgccccctaccccgccccagtcatggagcctaggtcgctggaatggggtgaccttaggtctgtgggcctctctgagacggctgccctgagaggttgccgggtcagggcacgggtagcccacatg

SEQ ID NO: 220633 - DNA, 132 bp, Homo sapiens
  chr22:20228947-20229079
  hypo
agctctttattccacgtcgtccgatatttttacacaagtaaaataaaatgcatatctctatataccgcgatctgggtgggaggcggcgttctggaacaaacgctgccgccgaaccctgtaaacatgatgggg

SEQ ID NO: 220634 - DNA, 161 bp, Homo sapiens
  chr22:20248011-20248172
  hypo
ggccaggagcaccagcgcagcacatcctgcgtgaccttgggccagctcctcagccctccctcgacagccgtgctggtagctggccaggcccgggtgagtgagttccccaggtaggtggaaggggcttctggggtaggggccacgcccgggggcaggtggcc

SEQ ID NO: 220635 - DNA, 433 bp, Homo sapiens; identical to SEQ ID NO: 206059
  chr22:20255237-20255670
  hypo

SEQ ID NO: 220636 - DNA, 208 bp, Homo sapiens
  chr22:20760013-20760221
  hypo
aagttcccccaggtgcgccggcagcgcggggcgggcgccggggagggcgagttcgtgtgcggcgagtgcgggaaggcgttccgccagagctcctccctcacgctgcaccggcgctggcacagccgggagaaggcttacaagtgcgatgaatgcggcaaggccttcacctggagcaccaaccttctggagcaccggcgcatccacaccg

SEQ ID NO: 220637 - DNA, 131 bp, Homo sapiens
  chr22:20908750-20908881
  hypo
gactctgcaacagcacgagtggagctgtgtgtgcctgtggacttgtgccctccctgggagagcgtcccctggccactgtgttaccgcttgctcagaagggcccatcgtgctttgtacgctcacccagcagg

SEQ ID NO: 220638 - DNA, 202 bp, Homo sapiens
  chr22:20929349-20929551
  hypo
tgagtttctttgttgcgatcaccttgtctgttgtccctctgtcctcaaagatgatcacggaagccttggcccaaggtgggatgcacataagagcccggttcccgcctaccaccgctgtgtccgccatcccgtcaagctccatccctttgggcagacagcccatggcacaggtatttacggggcagcgcccagggcacggctg

SEQ ID NO: 220639 - DNA, 164 bp, Homo sapiens
  chr22:21354050-21354214
  hypo
acagcaggccctccgtctagaatccgctttattatggcacctggtgggtctggtgggatctgagggaggaagaggctgcagtcttgctgggcagcccctcggtcagtccagcagcccctcaggccatgctgctgctcagctgcatggcaaagtcctgcacatgc

SEQ ID NO: 220640 - DNA, 149 bp, Homo sapiens
  chr22:21380146-21380295
  hypo
agctctatggaatccgcttcgacatcctcgtcaccgggcaggtaggcacaggtaggggtcaggccggggatgggatggggcaggcagacagggctggaggaggcatgaggctgacagtcgtgggctgagaggttcagctcagatctctc

SEQ ID NO: 220641 - DNA, 102 bp, Homo sapiens
  chr22:21380358-21380460
  hypo
gggcgtggtgagtgcgagcactgtgggcacctgcaggctgcagtgagtgctgctgaccagggtgtgtccaatgcatgctggagcctccggtgcctgcacatt

SEQ ID NO: 220642 - DNA, 216 bp, Homo sapiens; identical to SEQ ID NO: 206063
  chr22:21385764-21385980
  hypo

SEQ ID NO: 220643 - DNA, 296 bp, Homo sapiens
  chr22:21803347-21803643
  hypo
ccctcactcaacgacgtttgtgcgacatagtattgtatccaccttagtattgtatcgagccttttctgtgttttaatgagaaagcagaacactagtttcctatttaagactttaagggtttgtggggcggggcgggattaacacaacatttggctttgttttctttttcctttgatttccacatcaggtgtgtgcgagtgtgtgtgtgtggagatgttaagagcctcacaaggaaactgggttattggaggccaaggcggcttacagttctctgcgttcgtcacttaattcctgaa

SEQ ID NO: 220644 - DNA, 31 bp, Homo sapiens
  chr22:21970644-21970675
  hypo
tgaaaatgttccaggctgggcgtggtgggtc

SEQ ID NO: 220645 - DNA, 223 bp, Homo sapiens
  chr22:21977476-21977699
  hypo
ccggggcctacaggcgtgtaagacagcttggtctggtctgtgcagaagtggggagtgatgggcaggttcggcagcctaacattgttcaggcgcatggcccctgcggtgtgtacacgaactcggcttcttttgtcctaggtacgccaagggcaggtttctggagactcccttgtgcccgggatggcaagggcaccgggctggcgtttccacatctgtcttcatt

SEQ ID NO: 220646 - DNA, 67 bp, Homo sapiens
  chr22:21983041-21983108
  hypo
cgcaagtgctcaggcccacgaaggcgtctgtccacctgtggggggcgggacatcagaggtgggacca

SEQ ID NO: 220647 - DNA, 147 bp, Homo sapiens
  chr22:22007501-22007648
  hypo
caccctttccccccgggcagaggccccgccccagccagcctgcattccaggtctcagatccctgcagaccaccctgggggaggcactggcaggcctgcccgacactctttccctgttgcactactataggccgctgggaagcagtgc

SEQ ID NO: 220648 - DNA, 41 bp, Homo sapiens
  chr22:22044381-22044422
  hypo
acagggatggccaggcgtggtggctcacacctgtaatccca

SEQ ID NO: 220649 - DNA, 111 bp, Homo sapiens
  chr22:22057965-22058076
  hypo
ggcaagatccttagcgcgtttcagaaactcccggcggggggatggtgggttctttcaggacccctaaagacccaggtgattctacacagggcactgtgtaggtgccatcca

SEQ ID NO: 220650 - DNA, 35 bp, Homo sapiens
  chr22:22201294-22201329
  hypo
ctctccctctctccttctcccgctttccacggtct

SEQ ID NO: 220651 - DNA, 216 bp, Homo sapiens; identical to SEQ ID NO: 206067
  chr22:22292760-22292976
  hypo

SEQ ID NO: 220652 - DNA, 233 bp, Homo sapiens
  chr22:22324545-22324778
  hypo
agggtgtgcccaggactctgcgggtgtggccagcacctggtgaatgcacagccgattcgcaggtccagctcctggcgagcatccactgagagcgcctcgttgtggtcaggctcgcctaggcaggccatggcattacagatgtctgtgtccgtgatggagctaaacctggcccggaacacggtcttctcgccaccatgggccttgttcatgacgggcagaacagcatcaagaac

SEQ ID NO: 220653 - DNA, 150 bp, Homo sapiens; identical to SEQ ID NO: 206068
  chr22:22862458-22862608
  hypo

SEQ ID NO: 220654 - DNA, 33 bp, Homo sapiens
  chr22:22899308-22899341
  hypo
gtcacttgttgccacgcacgtctgagagtaata

SEQ ID NO: 220655 - DNA, 37 bp, Homo sapiens
  chr22:22899562-22899599
  hypo
gtggtcaaggaccctgactacggtcttgcagcgacat

SEQ ID NO: 220656 - DNA, 155 bp, Homo sapiens
  chr22:22899978-22900133
  hypo
agttcaccacaccgcgaagttgctggaaggaaagaacgagacaatggctcagctaagcgccctagccgctgcgtggggcggggggggcggcggtgggggccggggggctgggcagcctggtctgaccaatccccgtttctcagtccttccagggc

SEQ ID NO: 220657 - DNA, 49 bp, Homo sapiens
  chr22:22901056-22901105
  hypo
cagggtggaaaaagggggtgcggtgggcgaatggggaggcggggggctg

SEQ ID NO: 220658 - DNA, 56 bp, Homo sapiens
  chr22:22901455-22901511
  hypo
actccccgtgtttccactctccacagaaatccacgcattcacgcccctcccctccc

SEQ ID NO: 220659 - DNA, 129 bp, Homo sapiens
  chr22:23437447-23437576
  hypo
gcacagtgggagccggaggcggggggctgcagggagcacaccagcgaccggccctccaaccctccagccactcagcaacatcgccacagcaaccagcaaccagacggcagcagccgaggcaaacacaag

SEQ ID NO: 220660 - DNA, 80 bp, Homo sapiens
  chr22:23437631-23437711
  hypo
ctttgccaactagggaggtggagtgtcactagtggggaggggcggccaccgcccgctgcacagagcgccatgccggctgg

SEQ ID NO: 220661 - DNA, 198 bp, Homo sapiens
  chr22:23437916-23438114
  hypo
cagcccggcggtcccggagaattgaccgccacctgcgctcagagagccagcggcaacgccgcgaaatcaagctgctcctgctgggcaccagcaactcaggcaagagcaccatcgtcaaacagatgaagatcatccacagcggcggcttcaacctggaggcctgcaaggagtacaagcccctcatcatctacaatgcca

SEQ ID NO: 220662 - DNA, 106 bp, Homo sapiens
  chr22:23438416-23438522
  hypo
cgggacatgaccacgggcattgtggagaacaagttcaccttcaaggagctcaccttcaagatggtggacgtgggggggcagaggtcagagcgcaaaaagtggatcc

SEQ ID NO: 220663 - DNA, 401 bp, Homo sapiens; identical to SEQ ID NO: 206069
  chr22:23523110-23523511
  hypo

SEQ ID NO: 220664 - DNA, 99 bp, Homo sapiens
  chr22:23737249-23737348
  hypo
accccagctcagggccggcttcccaccccacatcccacctgccctccagaaggcagcccctctgcacggggctctgacccaaggcgtcttaggagggtc

SEQ ID NO: 220665 - DNA, 496 bp, Homo sapiens
  chr22:23800963-23801459
  hypo
gagggttcccagagggctgccgggcgaagggagtcctttccaaaacggtttcctgagctctgatgcacacacatgcagctcacccccaagtctagcgttccattagtctaccgttccgttcttcccagcacattcggtgcgcagccgcgaccagtctaaccgtggcacctttccaccggccctgagccctggcgtgcccctccacgacatcccctgggcacggagttgtgtcgacaggtctctgtgactggctgggcatgttttcggggtttgcccgcggggcagcgtgtctcagagtttggctgtacgaagcggtgttgacgggtaaacccggttttgtctctccctccggcggttgagggctggttccgcgttccatctgttagtgatgggatcgtgttgccgtggacgtccgtgccgaggtctgtgtgtggacagcgctcagaccccctggctgcgcgcccgggcgtgtgctgggcccatggactctgcgttc

SEQ ID NO: 220666 - DNA, 39 bp, Homo sapiens
  chr22:23801610-23801649
  hypo
tgaggttcacgtttccccggtgcccggcgtcctggcatg

SEQ ID NO: 220667 - DNA, 153 bp, Homo sapiens
  chr22:24054816-24054969
  hypo
cccagtaataatcagcgctctctcatccttaggagcagactgccctgaatcctctctcagggtgaaccgtgtattttggacttcacgatctttttttagatggggtctcgctctgtcacccaggctgtctcagcctcccgagtacctgggatt

SEQ ID NO: 220668 - DNA, 35 bp, Homo sapiens
  chr22:24061196-24061231
  hypo
cttagcttggggctccgaacacacattcttcttag

SEQ ID NO: 220669 - DNA, 200 bp, Homo sapiens
  chr22:24205105-24205305
  hypo
ggtctcatcaatgttatttataaagtagccagtggagattaagtttccgtgttcagcggtgaagccttgagctatcacggcctcagcttcatggaaaaaggaagaagaaattttaaaaagcaagcagggcaggcagacctgaccaaatgaacccctcggtttcactgtctcacaccttcgctcccccaaccctgatacca

SEQ ID NO: 220670 - DNA, 108 bp, Homo sapiens
  chr22:24459508-24459616
  hypo
agctgtcatttgcctcgtcccagcgcgacctgttcgaggatggttggctggagtttgtggtccgtgtttactggctgaaggctcgcttcctggcgctgcaggttagtt

SEQ ID NO: 220671 - DNA, 149 bp, Homo sapiens; identical to SEQ ID NO: 206071
  chr22:24552924-24553073
  hypo

SEQ ID NO: 220672 - DNA, 38 bp, Homo sapiens
  chr22:24763169-24763207
  hypo
gacttttatgttgagccgtgacaagtttttgtttgttt

SEQ ID NO: 220673 - DNA, 91 bp, Homo sapiens; identical to SEQ ID NO: 206073
  chr22:24989196-24989287
  hypo

SEQ ID NO: 220674 - DNA, 130 bp, Homo sapiens
  chr22:25016920-25017050
  hypo
agagactgaccctgccgcagctggctgacacctacgagacgctggccatcgagggtgcccaggccttctacaacggcagcctcacggcccagattgtgaaggacatccaggcggccggtgagtgggtaac

SEQ ID NO: 220675 - DNA, 120 bp, Homo sapiens
  chr22:25336184-25336304
  hypo
gcacggcctatttatccattcttccatggagcctcctctgttctaaagggctgcttctacccagtcggggcaccttttaaaaattcacacacatagccgggcgcggtggctcacgcctgt

SEQ ID NO: 220676 - DNA, 254 bp, Homo sapiens; identical to SEQ ID NO: 206074
  chr22:25348188-25348442
  hypo

SEQ ID NO: 220677 - DNA, 787 bp, Homo sapiens; identical to SEQ ID NO: 206075
  chr22:25348485-25349272
  hypo

SEQ ID NO: 220678 - DNA, 409 bp, Homo sapiens; identical to SEQ ID NO: 206076
  chr22:25349348-25349757
  hypo

SEQ ID NO: 220679 - DNA, 331 bp, Homo sapiens
  chr22:25461275-25461606
  hypo
tgaggaatgggtggccgcctggggtcctggagagtagtatttcggatgtctgggctgtgggatgtgggaggaatgtcactgagccattcctcaggtggcacatgccattcctgccccgtccccacataggaatgcgggccacttctcacaggctggaagatggccttgctacatgcgagtcttctgatgtttaaatgttggttagtaactaattcaaacaaaatggtgcaccaccttcctctttccccccaaaaaagaaaaacaacactcaaacaaaattatgtctaaggggactaccatttttcaactttttttaaagaattattattat

SEQ ID NO: 220680 - DNA, 187 bp, Homo sapiens
  chr22:25462990-25463177
  hypo
ctccccgggctgcctcggcccacgggtcagggtggtggtcagggcggccagagcaggataaccaggactgggcactgggggcagcttctcctgggggtgtgccctggtgcgtctgaccacctctggttgggagatggggacttgggggtctccattgttggcacctgcccagcggtgctcccctccc

SEQ ID NO: 220681 - DNA, 101 bp, Homo sapiens
  chr22:25484763-25484864
  hypo
ccttttgaaaatattctctgcgtacataagacaatgtctgtgcctatatctgcgtctgtaccctcccatatgtacatatgtacacacacacacacacgtgc

SEQ ID NO: 220682 - DNA, 41 bp, Homo sapiens
  chr22:25484924-25484965
  hypo
accatagatcaaaaacattcgaagaaaaatgtatggttgta

SEQ ID NO: 220683 - DNA, 85 bp, Homo sapiens
  chr22:25505390-25505475
  hypo
ctcagacgtgagccaccgcgcccggcccatcacttctttattctgctaaccacacggaccaaccttgattcgttgtgggagggga

SEQ ID NO: 220684 - DNA, 327 bp, Homo sapiens
  chr22:25561924-25562251
  hypo
gcaggtcccgcaggccgtaaccctttccctaaccccagcccttacccggagggacgtggggggctgtggaagggctttgagcagggacctattcagttttggaaagtagaatgagaagcacatacagggcgaaggatgccaggggaggtccctcggaagctgccgccgtgggtgaacagatagctggtcatagctggaaggaatgttgttcgagaaagagactttgaaggactgaggatcgatgcagtatggcagtgaaggagagagaggagggagcagcgctggcctcaggaccctcagtctggcattaggcggtggagggagaaa

SEQ ID NO: 220685 - DNA, 184 bp, Homo sapiens
  chr22:25573211-25573395
  hypo
cctctcatctgtcaacgaagctgtgtaccgccaactgtgttgtggtaccctccattgatggttcccttgatttttttcctcttcctccctgctgctcccaaagcaaacctcagtcctcgactcaagtgccctcaagacccgggtgcagctcagcaagagaagccgccgccgggcccccatctcc

SEQ ID NO: 220686 - DNA, 223 bp, Homo sapiens
  chr22:25603125-25603348
  hypo
cgccgcatccgtgaccagaagtggcacaagcggggccgcttccccagcagctgaaaggcacccagacttcaaggacccagacccaccctggggggctgcaagggcaagaagaggaggctccagggttggggcgagggccgacctgtccacccttccctggaatctgctcaataaagcctggggttggtcccccacccgccacgttcctcggcatcacttcctg

SEQ ID NO: 220687 - DNA, 155 bp, Homo sapiens
  chr22:25753158-25753313
  hypo
gagcccagggacagccgggcagggccaggcctccaggatcaaatacctccatgggagcctcacctcgatcttgtctgtcttggcatctccccagtagagcttcccttcctgcaggtccagggccaggccgttgggccacccgagggaagcattga

SEQ ID NO: 220688 - DNA, 42 bp, Homo sapiens
  chr22:25756562-25756604
  hypo
ggggctcacccttcccgcccagctcaacgccacctcatccct

SEQ ID NO: 220689 - DNA, 42 bp, Homo sapiens; identical to SEQ ID NO: 206078
  chr22:26565123-26565165
  hypo

SEQ ID NO: 220690 - DNA, 126 bp, Homo sapiens; identical to SEQ ID NO: 206079
  chr22:26565999-26566125
  hypo

SEQ ID NO: 220691 - DNA, 112 bp, Homo sapiens; identical to SEQ ID NO: 206082
  chr22:26825000-26825112
  hypo

SEQ ID NO: 220692 - DNA, 219 bp, Homo sapiens
  chr22:26961223-26961442
  hypo
cgagggtcaggctcgagctggcaggtggctggagtggggaccaccaggagctggcagacccttggtggccaaggtctctctcctgctggcttttagctgggaggctcctttgaaggatcagtcagccttgcgatgggcctgcctctcctaaaggctcctccctcttctggatccagtcttgttgctcacctgtggactggcagcgggcacctcctctct

SEQ ID NO: 220693 - DNA, 80 bp, Homo sapiens
  chr22:26965205-26965285
  hypo
tccatggatacaaagtacaaaaacaggtgaaattctagggggagatgtcaggatggtggttaccccggtggggcaagggg

SEQ ID NO: 220694 - DNA, 73 bp, Homo sapiens
  chr22:27007746-27007819
  hypo
tttttgctatagtagaagcagcatttctccagagcccagaaccatggcttactgccagtgtgatcttatgcta

SEQ ID NO: 220695 - DNA, 265 bp, Homo sapiens
  chr22:27007869-27008134
  hypo
agaacaattcctccctcttcagtttgatatgaggattggacataatgtatgtgccaggagtacgaacggccgcaggcacagagcagatgctggagaaatggcagctactgttgtgtggtcattttactgtggcagagagtgtgcccctccgccgcccagtactcacggtcccgcggagacaatgatgctgcgcacacggtcgaagccacggtctgccagatttgagcactcccccgagaattctgctcgacggccctggaagttt

SEQ ID NO: 220696 - DNA, 35 bp, Homo sapiens
  chr22:27099774-27099809
  hypo
ggatttcggccgggcgcggtggctcacgcctgtaa

SEQ ID NO: 220697 - DNA, 91 bp, Homo sapiens
  chr22:29076604-29076695
  hypo
caccgcgcacggcctgtttctcctaaatataaggactcaatataataataagagaaagcctcagcaccgcgcctagcacttagtaggtagt

SEQ ID NO: 220698 - DNA, 425 bp, Homo sapiens; identical to SEQ ID NO: 206095
  chr22:29468748-29469173
  hypo

SEQ ID NO: 220699 - DNA, 202 bp, Homo sapiens; identical to SEQ ID NO: 206096
  chr22:29469213-29469415
  hypo

SEQ ID NO: 220700 - DNA, 138 bp, Homo sapiens
  chr22:29587096-29587234
  hypo
atgctgtcaagcatgttgcagcatgtgtcagcgcttcattccttccaaacaatattccattgcgtggatggaccacatgttgtctgttcaattcatctgtcgacgcgcatttgggtcgttgctgctttttagttctta

SEQ ID NO: 220701 - DNA, 180 bp, Homo sapiens
  chr22:29607821-29608001
  hypo
tcacgtaggctccaaggagcctctgaacccccttaacctgtacaccaagttttatgcgtatttctggagaggagccacgattcaccgcaattttctaaaggggcttatgcccccactctccatattcaaccctaacaggttcaaaaccacacctttggttttttttgttttgagacagag

SEQ ID NO: 220702 - DNA, 34 bp, Homo sapiens
  chr22:29678067-29678101
  hypo
gtagcacacaatatcgcaacgcacttttatagcg

SEQ ID NO: 220703 - DNA, 174 bp, Homo sapiens
  chr22:29686337-29686511
  hypo
tattttcattggctgttaaacgtggaaactttttaacatgctttgtcgcatttatatgctacaggttacaaagtgagagccttgtatacacttcaatacttaaaaagtacccgtactcagtactcagccggcagcataatgaaaagtgggactagacacggtgtccatatggag

SEQ ID NO: 220704 - DNA, 394 bp, Homo sapiens; identical to SEQ ID NO: 206098
  chr22:29702352-29702746
  hypo

SEQ ID NO: 220705 - DNA, 514 bp, Homo sapiens; identical to SEQ ID NO: 206099
  chr22:29702806-29703320
  hypo

SEQ ID NO: 220706 - DNA, 150 bp, Homo sapiens
  chr22:29714174-29714324
  hypo
atgaagccctgcaaacgtgccatgttccctaggagactctcacagcagcgttcctagcagcagtgcccatttatcaagggcctgcgatgtgccaagcctgacccacagcctcatgctcactaaggctccctgggacgccatgattgggcc

SEQ ID NO: 220707 - DNA, 159 bp, Homo sapiens
  chr22:29758099-29758258
  hypo
tgggaagacaagctgggtcactgggcgctcccacaggggaagcatgagccaaggtgcggcagccgctctacacacaaccggctttagccatcaggtgcgacagaggctgcacaccggtgacaaattagagaaatccaatctgcacgtgtgttttacttg

SEQ ID NO: 220708 - DNA, 180 bp, Homo sapiens
  chr22:29846233-29846413
  hypo
gaaaaaagtaggtttgaaaactttacatacaacatccaaaacgtggaaacaactcaaatacccgtcaactaataaatggacacaatgtggtctatccggacaaacagaggattattcagccttgcgaaggaataaagcactgacacatgtgacaacacggatgagcctagagggcattat

SEQ ID NO: 220709 - DNA, 120 bp, Homo sapiens
  chr22:30004164-30004284
  hypo
aaaaaaaaaaaaaaaaaaaaaagtacaataacaaatttaaaaattaactagagggactcaggactcaataacagatttgaactgggtgaagaaagaattcgttaattttttttttctttt

SEQ ID NO: 220710 - DNA, 206 bp, Homo sapiens
  chr22:30090533-30090739
  hypo
atcctcatttgtcacctcctaatttgaattattgggcaaatctggccgcttatttgggactgacagccaacttcttgagcatctatttgaacagccttccctttcgctcccagccacctttgaggtgagtccaagtggcaggacaggaccctgtgtgacagagcggaggtcttgtgccctctcagcttcttctctgctttcttaca

SEQ ID NO: 220711 - DNA, 88 bp, Homo sapiens
  chr22:30090769-30090857
  hypo
ggccttctttgaagagctctagcaggtgacccagccaccccaggacctgccacttctcctgctaccgggaccgcgggatggaccagat

SEQ ID NO: 220712 - DNA, 50 bp, Homo sapiens
  chr22:30091060-30091110
  hypo
ttcctgactcccttcgtccaaggcaccggtgtgtgtgtgtcttgcactcc

SEQ ID NO: 220713 - DNA, 448 bp, Homo sapiens
  chr22:30091301-30091749
  hypo
catcgtcagggagcccgcccagagctcgtgacgagcaagtgctgggtccccgccaggcaccccgaggcggcgctctggctggcagctggtggggaataggcagggcagctgtggctggggagagactttaggcagaagctgtgatgcaggctgactgccagccgaggggctgggtagtgccgtgcgggagctgatggtacagggcactcgctgtccccctccggccaccctagaccagggtccgagaggcaggcaggagccactcatgtcttccccattgcccgacgcccatagacgctccttcctgtgtggggctggggtactccctggtcgtactgcagtcagcacccgtaacccggctatgaccagggatctgtaagccctgtggctccacaggtgctgcttctcactggcccagactctgagctccaccggcccagtctgcacg

SEQ ID NO: 220714 - DNA, 270 bp, Homo sapiens
  chr22:30190730-30191000
  hypo
ctatttgtgctgatgcggaaagaattctcacttattcccaaggaaaacaagcaagctacagaaaaatgcgtacagtatgatcccaaaagcaaactacgctaactctgtttctatggccacacgcctatgcatgacaatgcagacagaaggctaggaagccccacgccaaatgacagtggttactgcttggaagcacctggagttgtctaaatcttttttttttttttttgttacaggctagagtgcagtgatatgatcttgcaacctccg

SEQ ID NO: 220715 - DNA, 31 bp, Homo sapiens
  chr22:30309742-30309773
  hypo
atttatttatttatttgagacggagtctcgc

SEQ ID NO: 220716 - DNA, 31 bp, Homo sapiens
  chr22:30310013-30310044
  hypo
caggcatgagccaccacgcccggcccagttt

SEQ ID NO: 220717 - DNA, 80 bp, Homo sapiens
  chr22:30352153-30352233
  hypo
attgtcacaaaggaacaggtcggttagatgttttgtctctgtaaagttcagattgttgcctactggtgacaagaattctt

SEQ ID NO: 220718 - DNA, 174 bp, Homo sapiens
  chr22:30422074-30422248
  hypo
gcccactgtaactgccgagctgcctgctgtcacgtgacactgagggatggcttgtttcttccgggtgggaggatggtggtcagagccaggagtatggagatctgagaccgtgagcagggaagaaagccagtgctaacatgcaaccattcctcacgccaccgccacatcagagct

SEQ ID NO: 220719 - DNA, 185 bp, Homo sapiens
  chr22:30624613-30624798
  hypo
atggaattaagtcaacgaatgccgatgagatgagatgagttttatgttagtaaatgccaaagccctattcacctgtaagggatgactttttaaatatgtgctgtacttcaaggcgccttactccccatgttccccggtgcctaaaattccagcattagtcactcgtttgccgtagggcactgaag

SEQ ID NO: 220720 - DNA, 197 bp, Homo sapiens
  chr22:30656576-30656773
  hypo
cttggggctgggaggcggggccccacctgccctgctcttccttgagcgcctactgtgcaccaggcaccatgcggatgcagagacagcatcaagcaaagcagactcggtctccgtcctccatgctaataagagatgcagttgggaatgtgaacaccacacagagtgcgtgctgccagaagggacggcacaaccaagtt

SEQ ID NO: 220721 - DNA, 264 bp, Homo sapiens; identical to SEQ ID NO: 206101
  chr22:30792874-30793138
  hypo

SEQ ID NO: 220722 - DNA, 1159 bp, Homo sapiens
  chr22:30950936-30952095
  hypo
acgtcaccaccgcaggaaatcgcgaatgaacttccagagcttggtgacccacaggttggcgccgaggtccatcaggtactggatctcgggcgtgagcatgcgccggcagagctgcgcgtgccgctgcccgatgctcttcttgaggttgtagcccaggatggacttggtgcccagcggctgccagggctgcatggcctcgtcctggatggcggcggcgtccacggcgtggcccccgtcgatgcagatggtccgcatgcgctcgttggcatggcgcagggcggccacctcgcgggccatgcgctcccgcccgaaggcctccaccttgcgccagaagctggcgttgaagtggcggtagaggtgggagtccagcatgttccaggcggtggcgcgcccatacagctcccccgagagccgcggcacgggcgagtcgcggcgggcgttgagcttgaagtagagcacgtcctccagctcccagcacagcaggtccttcagcagcaccagcgactcgtcgaagtactcttgaaggagcaccaggtggaagcgacgctccacctccaggatgtgctcctgcacctgcgggctgctggggtccaggctgttgtcatagcccaggtcgaagaagagcaggtttcggaggtagtgggcattgaagccgttggggtcgtagtagcgatccgggtcttgcaggaactcggtcagcttgtcgccggccgagagcttccacgtgaggggcaccaccggcccgaagtagtggaaggaggactcgaacaagcgggcggggtcgcggagcaccgtgatgaagatggcgttggtcggcaccaggccgcgcacctcgtcgtagtggaagcgcatgtggttgcagatgatgttgaagcaggccccgggccgatagtcctgcaccaggctgcgggcgaagaaggtcgggtagtcgaagtcattgcggccgttagggaaggcgaacttgagccggtgcttctggccgaagcggaacaggatgttgagcagggtgctgctggccgtcttgtgcgtcttcaagaacacgatgttgcgccgcggctggcactcccccgccgagccgttggcccggatcactgcctctggctcgagtgcaggtggagagcaggacgctgcggcctccggggtcctgctggggacagag

SEQ ID NO: 220723 - DNA, 327 bp, Homo sapiens
  chr22:30977857-30978184
  hypo
gtcccaagggttagacgcatcctggaagtcagtgccagacccccataaaagagtgagaaaagggaccctggtccctgctgctccgaagactggctggccctcccctccctgctccggctctcccacttccttcaggtctagctcagactcggacagaccactttccgacctggccagagctcctgccttctacatcacctagtctacaatctttgctgcatgtctgctgctgggctagcgtgtgagcaccagagggtggtgctcccagcgctgtctctagcccagaggggctggcaaaaccttggctgactaaggtgccttgggaag

SEQ ID NO: 220724 - DNA, 105 bp, Homo sapiens; identical to SEQ ID NO: 206102
  chr22:31002803-31002908
  hypo

SEQ ID NO: 220725 - DNA, 33 bp, Homo sapiens
  chr22:31062272-31062305
  hypo
gagggtagtgatgcgaggagtcattttcatgct

SEQ ID NO: 220726 - DNA, 85 bp, Homo sapiens
  chr22:31169318-31169403
  hypo
gtgcctggcctcttaaatgcctttttatccaggacaccctcctgactccccagcccaggtcagcttcccacgtagtggaaagagt

SEQ ID NO: 220727 - DNA, 409 bp, Homo sapiens; identical to SEQ ID NO: 206106
  chr22:31198752-31199161
  hypo

SEQ ID NO: 220728 - DNA, 128 bp, Homo sapiens
  chr22:31260802-31260930
  hypo
acacccatgaggggacgggtccctgctggacatctatgccttaaccctggaggagctcacgggcagtgagggcaaagttagtttccccgaaacaagcaagcaagtggggtggccgcagggcctctgcc

SEQ ID NO: 220729 - DNA, 237 bp, Homo sapiens
  chr22:31264325-31264562
  hypo
tctactgacctctaccgtgaggcccagagcaacagcttacggagccagtggcccagaccctggcccagcccgtgtggcctccagacgtctgggggccgcagttgggcttctgagtgcagacacgctgtggcctctcaatggccttgccagggtagggactgtcccatccccaggcaatagatgaggaaattgaggctctgagaggtgaagccatgctcaggccgcctggctggccac

SEQ ID NO: 220730 - DNA, 360 bp, Homo sapiens
  chr22:31266454-31266814
  hypo
acaagagcgagctgcaccacaccctgaagaatctttccctgaagttagatgacctcagcacgtgcaatgacctcatcgccaagcacggcgctgcactccagcgctccctgacagagctggacggcctcaagatcccatctgagagtggggagaagctgaaggtggtgaatgagcgggccaccctcttccgcatcacatccaatgctatgatcaacgtgagtacccacccccaccgccctggcacggggctccctggctccagccccggggtccctcggtgggtgaccagggtcagcttgaagggtcagcgttccatttcctgtggttccacggtgtttcccaaagccagcgccccccagc

SEQ ID NO: 220731 - DNA, 200 bp, Homo sapiens
  chr22:31301710-31301910
  hypo
gctggagggtgaggcgacccgggaggagacaccgccaggcaggggagggcggccgggtaggtgtggtccggctcacaccgcagccaccgccaccgccaccaccaccgccacagggagaacgcggagaacatgtactacttctcagagctggccctgaccctcaacgagcacgaggagggcgtagcgccaaccgacagccg

SEQ ID NO: 220732 - DNA, 64 bp, Homo sapiens
  chr22:31494668-31494732
  hypo
gaccaggccagcccacgggccggcagcctggcggcgctcgagaaacggcaggccgagaagaaga

SEQ ID NO: 220733 - DNA, 78 bp, Homo sapiens
  chr22:31494797-31494875
  hypo
gagaagctggagaaggagggcgcggccgggtgagctgcagaagtgggctgggcagtggggggcggggcgtgataggca

SEQ ID NO: 220734 - DNA, 110 bp, Homo sapiens
  chr22:31495079-31495189
  hypo
gatccaccagcttcggggtccccaacgccaacagcatcaagcagatgctgctggactggtgtcgagccaagactcgcggctacgaggtgagccccgggaggccagggggc

SEQ ID NO: 220735 - DNA, 266 bp, Homo sapiens
  chr22:31644627-31644893
  hypo
tggccatctacagccggcctgaggcagtcacagacggatttgcagctgagcctgtctatctggtgtgggaagaagatggggagttacttgtcagtcccggcttacttcacctccagagacctgtttcggtgagttggtctccgagttcccctctccatctctcctggcccctggtcctgagaggagggtggtctccctaaatctccttctcacttagtcctttaccatcggttctgccgggcagaagccagcggaggttataccca

SEQ ID NO: 220736 - DNA, 44 bp, Homo sapiens
  chr22:31744073-31744117
  hypo
gaaagagaaaggggccgggcgcggtggctcacgcctgttatccc

SEQ ID NO: 220737 - DNA, 143 bp, Homo sapiens
  chr22:31942754-31942897
  hypo
actttttcatgagacggcaagaatatgtgatttgggaagagatgttagctccaacatcatcatatatatatatgattttttttttgccgtagattttactatgagcagcgattactacggaaggtcttcgaagaatggaaaga

SEQ ID NO: 220738 - DNA, 87 bp, Homo sapiens
  chr22:32014373-32014460
  hypo
catccaggccctgcggcaggccctgtgctagcgtgttcgcaccaggaacgcaggtgctgggctgtcggggaggcctcaggccacctc

SEQ ID NO: 220739 - DNA, 212 bp, Homo sapiens
  chr22:32025196-32025408
  hypo
gggcctgcaagattgttgtgcgtgaggggtaggtgcatgtaggtggaagtgtgtgtgcatggaggatacgtgtgcaggtgcaagggtatgtgcatggaggggtgcgtgtataggtgcgaggatgtgtggggtgtgtaggtgtgagggtgtgtgtagggggtgtgtaggtgtgagtgtgttatgcgtataggtggtgtgtgcgtaggtgtgag

SEQ ID NO: 220740 - DNA, 282 bp, Homo sapiens
  chr22:32078008-32078290
  hypo
ctgcctaaaagttggtctttcgcagatcttaatgtacatggcattgattatgagacggaattccagcctggagacggagcgacggccgtgcattcattggctgcaccgcggccttggatctgctgctcccgtcctgtacgctccctgctgctcttggctcagtgggcaaggaaggagccacgggggaggtctcacgcccagatagtgggatctggaatggacctcaggttggctctggagcccgtgccaaagaccctttcaggcaaaattgtgacaaagtat

SEQ ID NO: 220741 - DNA, 95 bp, Homo sapiens; identical to SEQ ID NO: 206112
  chr22:32571844-32571939
  hypo

SEQ ID NO: 220742 - DNA, 160 bp, Homo sapiens
  chr22:32804846-32805006
  hypo
tgtctgagtacatgcgcggcaagtgtaggcactggacagaatgcactgtatgcaatatttactgtgctttactctttaccaaacactttcacgttaccttaagcacacagaaaacttcctatcaaagactacgagctgctcccatcggaaaatatacctt

SEQ ID NO: 220743 - DNA, 196 bp, Homo sapiens
  chr22:32914038-32914234
  hypo
ggatggggtggtgctggcttcttggactcttcaccctgctgggaggtactacggccctgcacagggggccggggctgtgaggcgagggtggcacctggcttggaggcctggtttggggagctgccactggatgcccgggatagctgcggagagcctggtgacctttgctgctgtggagatccggactgggggctca

SEQ ID NO: 220744 - DNA, 420 bp, Homo sapiens; identical to SEQ ID NO: 206113
  chr22:34316313-34316733
  hypo

SEQ ID NO: 220745 - DNA, 183 bp, Homo sapiens
  chr22:35730462-35730645
  hypo
tggtcccctgcagttcgggtggctctcggggttctggaacccggttttatggtggcacaccatgaggaagggcacacggaccctgcttagtaagcacgcccttagtatcccctaagtcagtccagcatggcctgggagccctgtggtcagttgacagactgcgctccccacaggccatgctgg

SEQ ID NO: 220746 - DNA, 317 bp, Homo sapiens
  chr22:35742069-35742386
  hypo
aggaagcataacagcgccaggctcttacctgcagtagctcagaagactccagccacttgcagagggaacccatcaccaccctgtttacagatcagaagaccgataagcagctgtcctctaaggggaagcacccaggaggaggagggcgggtgccagtcatggggaccccaagccctgccaccctcccagggagcagaaggggcagggccagactcagcttctccgtccagggctcctaccgcagcatctgccaccccgtctctgggcaccaaggcccacatgggcacttcaggcccagaagccgccttctgcaggtg

SEQ ID NO: 220747 - DNA, 57 bp, Homo sapiens
  chr22:35758435-35758492
  hypo
tgggaccacaacccacgtctcctgccctgccaatttccactgcggggaacagaaggg

SEQ ID NO: 220748 - DNA, 256 bp, Homo sapiens; identical to SEQ ID NO: 206114
  chr22:35767978-35768234
  hypo

SEQ ID NO: 220749 - DNA, 191 bp, Homo sapiens; identical to SEQ ID NO: 206115
  chr22:35777069-35777260
  hypo

SEQ ID NO: 220750 - DNA, 150 bp, Homo sapiens
  chr22:35848670-35848820
  hypo
tcctggttagccctgtgtgtgagtttgtgttaaataatcagtccgactcctccgctggggtggtggtgccagtgtggccagttcttgtgcaaatagaacattttcaagatagttctgccacttgtacagcactctacgtgctgtagagtt

SEQ ID NO: 220751 - DNA, 300 bp, Homo sapiens
  chr22:35947846-35948146
  hypo
ccaagctgccacacgagatgagccccgccctgcatcgcaagatctccgtgcagtacggtgacgccttccaccccaggcccttctgcatgcgccgcgtcaaggagatggacgcctatggcatggtctcgcccttcgcccgccgccccagcgtcaacagtgacctcaagtacatcaaggccaaggtccttcgggaaggccaggcccgtgagagggacaagtgcaccatccagtgagcgagggatgctggggcggggcttggccagtgccttcagggaggtggccccagatgcccactgtgcg

SEQ ID NO: 220752 - DNA, 102 bp, Homo sapiens
  chr22:36246094-36246196
  hypo
tatgttccaggctttaagtgcgtcagagaatactcccaatccaggacacagaaaggcagatgggactggtattactactctattctttcttgggcggggagc

SEQ ID NO: 220753 - DNA, 58 bp, Homo sapiens; identical to SEQ ID NO: 206117
  chr22:36424337-36424395
  hypo

SEQ ID NO: 220754 - DNA, 78 bp, Homo sapiens; identical to SEQ ID NO: 57980
  chr22:36424418-36424496
  hypo

SEQ ID NO: 220755 - DNA, 186 bp, Homo sapiens; identical to SEQ ID NO: 206119
  chr22:36425195-36425381
  hypo

SEQ ID NO: 220756 - DNA, 278 bp, Homo sapiens; identical to SEQ ID NO: 206120
  chr22:36462014-36462292
  hypo

SEQ ID NO: 220757 - DNA, 174 bp, Homo sapiens
  chr22:36677171-36677345
  hypo
tcttagcttttctgcacaaccgcccacagctagctcagcctacgcctcagccaatctggttcccgacgatgcagagccggcattggctgcagaagccaggcctagtcctgtccagggccccctggccgcagacaaatgctacagacacggctcgtagcacatggttctctttat

SEQ ID NO: 220758 - DNA, 199 bp, Homo sapiens
  chr22:36688126-36688325
  hypo
gcgtcttggtcttctccagcttgtcgtaggcggccaccttctcctcgtgccgctggctcaggccctccaggtccttctggagcttcctcttcacctcctcagcagtttccaggcaccccacactgtcctccatcttctttttcatgtcggccacctgggcaggagcaaggagtaagcagatgcccgagatggcacctgc

SEQ ID NO: 220759 - DNA, 171 bp, Homo sapiens
  chr22:36692853-36693024
  hypo
ccacctggcctcaggcgggcaggcggggtcctcacctggccagggcggcctggagctcctcctctttcttggccagctgcatcttgagctccgcgatctgggcctggagctcggcgatctggtcgctgaggtctgtggagtctccctccagcttccggcgggtcttctcca

SEQ ID NO: 220760 - DNA, 129 bp, Homo sapiens
  chr22:36695463-36695592
  hypo
ctgccaggtgggccacggcccctccccctcttcagccccgcggtgccccgggctgctctccttgctttctgttctgtgtggcccctgcaacacccctgcccagcggccacagctcggcacaagcacctg

SEQ ID NO: 220761 - DNA, 71 bp, Homo sapiens
  chr22:36696999-36697070
  hypo
tcctgcttcttggcggtcaggcgggcccggagctcctcagcctcggcacacagctcggtttctgcctggag

SEQ ID NO: 220762 - DNA, 238 bp, Homo sapiens
  chr22:36713506-36713744
  hypo
tggcaggaataatacgcgatgtcttttgaaaacaacagtcttgtctttcatgcaatgcttctgcacagaaacagccgtgagctgtcagtgtacagtgaatgggagaaagactaacaaaatgagcttccaagtatttttgagagatgggtttggcaccctaaaaacccccatggccagcaccataaaagaaactagaaaccccggagagaggcagaaagcggtccgcactgggcgggac

SEQ ID NO: 220763 - DNA, 203 bp, Homo sapiens
  chr22:36732742-36732945
  hypo
tactgactgacacacaccaccgcctttctgcaagatccgacctcgccacacctgacaaaactcccaggacacctgacattggctcagtcgtgctggcgcaggtgtaggcaccaaatgtcttgttttgtagctagggccacaaatctctgtctataaacatgcctcgtctctccacctggaccgccagggcatccagtaacagg

SEQ ID NO: 220764 - DNA, 117 bp, Homo sapiens
  chr22:36902565-36902682
  hypo
caatctgggtcacggccaggcccagaagccgtcctcagagctcatttgcccggactccaccgtttcaagctgggacttggggctccccggaatcccgagcccctccatcttatctcc

SEQ ID NO: 220765 - DNA, 177 bp, Homo sapiens
  chr22:37168633-37168810
  hypo
attcactttgtgttcgctgtgttagaacgtatcacacgcatcttagttcttccttgagtgcaactgactcatgcttgcaggcccactgcaccttgcacggtgactctgacgtagtaggtgctcagcgagtatctgttcaatgcataaacacttgaactgaacgtcaggtccttcaat

SEQ ID NO: 220766 - DNA, 479 bp, Homo sapiens; identical to SEQ ID NO: 206124
  chr22:37414885-37415364
  hypo

SEQ ID NO: 220767 - DNA, 500 bp, Homo sapiens; identical to SEQ ID NO: 206127
  chr22:37914933-37915433
  hypo

SEQ ID NO: 220768 - DNA, 615 bp, Homo sapiens; identical to SEQ ID NO: 206128
  chr22:37956588-37957203
  hypo

SEQ ID NO: 220769 - DNA, 211 bp, Homo sapiens
  chr22:38146539-38146750
  hypo
gcctccgtctcaggtggaagacggggtgggcagaatacagagcagcgggacaaacgcagccccaggggttctcggccgtgagcagagcctgtgtctctcccttagacaggtatacagggaggggctgggatgccaacctactgggtcccccgactgtggctgtggaaggttctggatcttcagctgtcccaagccccggttggtccacttc

SEQ ID NO: 220770 - DNA, 44 bp, Homo sapiens
  chr22:38149554-38149598
  hypo
ggattataggcgcgagctaccgcgcccagctatagggacttctt

SEQ ID NO: 220771 - DNA, 388 bp, Homo sapiens
  chr22:38209275-38209663
  hypo
cttactagagcagggcgctggtccagcccggcactgagacacgggggccccagagagaagcacagaacaccttgcctctctacccagaggagcgccctggctggcagtacagttttttgatttgctggagtcccggtcaagggagaagcccagggtggttaaatgatggctctacgctcactgcctccctccaggccctgctgaccccagaggacgcagtcctgtcggacgagctgaaccatgcctccatcatcgacggcatccggctgtgcaaggcccacaagtaccgctatcgccacctggacatggccgacctagaagccaagctgcaggaggcccaggtggggcgacgcctgggtccaccctcagcctccgcctggggaaggaa

SEQ ID NO: 220772 - DNA, 32 bp, Homo sapiens
  chr22:38285336-38285368
  hypo
cgtgagccaccgtgcccagccctaaattgaat

SEQ ID NO: 220773 - DNA, 266 bp, Homo sapiens
  chr22:38363621-38363887
  hypo
cctgccacagggcccgaaagatccccatcatcattcgccgttacctgccagatgggagctatgaagactggggggtggacgagctcatcatcaccgactgagctggagtcatcttcctgcccttgccccatgcccaattttcattctcactttatatgtgtaaataataaaatattcaactttccaacccccttcccctctgcttatctgcaatgtcaccacctgttgcttccccgttaccgccatgctgcgtggagcatgcacct

SEQ ID NO: 220774 - DNA, 67 bp, Homo sapiens
  chr22:38364989-38365056
  hypo
cagctctgaaatgccgcctttgtgctggcatccaggcagccgccccagagtgcgggggtcactttct

SEQ ID NO: 220775 - DNA, 121 bp, Homo sapiens
  chr22:38378985-38379106
  hypo
cgtttccctcgtatcctcctgaccacagcagctggtggcatagtgtgcgtatctgtgggcaggagttagtgaaggcctccttccctccctccaaagccccaggccccacggtctgccaccc

SEQ ID NO: 220776 - DNA, 803 bp, Homo sapiens
  chr22:38379136-38379939
  hypo
ctgcccgccgccccgtagggagacccggcctaggccgctggagttccgagttccagggtccttgtgatggaagggcgggcgcggcccccacacctggtcttccagccctatccaaggaggactgccagacagtcccgctctgaggtgcaggaggccgggccgcctcggctaccctgaatccacccgaagctagagggcccgagcccggggggcggtcgggtgctcacctccagagcttgcccagcgtcttgctgagctcagcgttgtgcaggtgcgggtactggtccgcgagcttcctgcgcgctgcctgagcccacaccatgaaggcgttcatgggccgcttgacgtgcggcttgcttttgctggcgccgttgacgcgcacgggcatgggcaccagcgtccagtcgtagccgctgagcacctggctgacggcctcgcggatgcacacggggaacttgtcatcgtccgcctcgccgtcctgctgctccttcttgaccttgcccagctcgcctggccccgggctggctcgcaggcccgatccgccgccgccgccgtcgggccctagcgagggcgcgctccccggggacaggcagcggggctcctccgagcccacggggctcagctccacctccgataggtcctgctcctccgccatgtcgcccccggccgccgccgccgccgcctcggccgcctcccccgggccagccgccggggtcctcgcaaagagtccaacgcccacctggatggaaggagggcgcgatggagcggccgcgcgcgcagccccgagggcggcccgagacagg

SEQ ID NO: 220777 - DNA, 79 bp, Homo sapiens
  chr22:38379969-38380048
  hypo
tcctgctccagctaaacccatctggcccctggggcccacgcacatgccagactctaggtgggtgcgtcccgcctctgtg

SEQ ID NO: 220778 - DNA, 59 bp, Homo sapiens
  chr22:38380262-38380321
  hypo
caagggcggggtgtcgcctctctccacctcacagcagggtcccaggcctgggcgggcca

SEQ ID NO: 220779 - DNA, 135 bp, Homo sapiens
  chr22:38380437-38380572
  hypo
acgctggtgggctgggagggaggggcggggggccctgagcctcaggccacggcctcgttaggacggagcctgaatccttaccaccaaccaccctggccggacagcccgagactgactgagcgactgagcctgagc

SEQ ID NO: 220780 - DNA, 251 bp, Homo sapiens
  chr22:38381980-38382231
  hypo
cccccagttttcctcgacgccacccccggcgctgccaaccctcctccccccgcctcccttctcttccctgtgcccagactcttgttcggggccttgaaacagtgagctgtctttgttcgaaatacaggtgaacggcaatcatgtgattaacacacacacacataaaaagctttttaacagcgcccgctcggcctcagaaccgcccggagaggagccgccctggatggacagagggacgagggacgagcatc

SEQ ID NO: 220781 - DNA, 611 bp, Homo sapiens
  chr22:38434365-38434976
  hypo
cttgggggaaaggaccaggccgggcccaggcaggtggaagccatggctctggccgggtcacagggcggctggggtttgacctggcggccatgatgggctctggacccaggagccacccgggcacaggatgggacgggttgagagattggtcgtccaggcgttgagtgtgccctcgctcctccccaccttccgccgtggccttgagccccttgcgcccgcgcccatggggttaaatctctccctgtctctctctgctccaagttgttttccaagtgaggcagagaatggttctcttgttaccaacatggcttctgggcattgggtaatgcgctccctcttctcccgcagcgccacaaagggaccttttgttcccctccctgcccctctcgctggctcttcccggccccccacccacccaaactccctcctccccccgccggcgcccgcaccccggggctgcgcgctgaccgtggcggccgcggcgccctccctctcccagcgcctgcactggcggccgccatcttgcgagcggccctcagggcggcctgggctttcccagggttctcggggccggggcagtcgtagggggcggctggggctccacaggacgt

SEQ ID NO: 220782 - DNA, 160 bp, Homo sapiens
  chr22:38435006-38435166
  hypo
ggcaggaccctcccgtccccagcctccgcgccaggcctcgtccctgcatgggacaagaggcagccctccgccatttcccgcggcccttgcctcccgggagcggctcccctctgacgactgagtggactgcgcttgagggggccgccgctgggaaccagcc

SEQ ID NO: 220783 - DNA, 114 bp, Homo sapiens
  chr22:38470384-38470498
  hypo
ggaggcgcgcgcccgcttctcccagatgcgcaaggatgtgctggagaagatggagctgctggaccagaagcacggtgagcgccgccctcctccccgtccgctctccatttcaga

SEQ ID NO: 220784 - DNA, 223 bp, Homo sapiens
  chr22:38506380-38506603
  hypo
acatctgtagccccggctggccctccgtcctccagagcgggcctgatttctgtgccctgggaggaggggctcaggcctggcttggccacccatgtgctcaccttgtagatggccatggtggacctgtaaaactggtccatctcgggggccatggaggggctgtcccgggtctgagcaggaggctgggagctggtggcgatggcacagccgggagcagtggtag

SEQ ID NO: 220785 - DNA, 388 bp, Homo sapiens
  chr22:38506928-38507316
  hypo
cccaccttactgggcgggcgctgcccgatgccctcccccaggactctctctgccagacccagcagcagcagcccctggaggggaacgccgctttacttctcactgtcctcaggcctgcggctcacagtggggccacgccctctgagcttggctcccacagccgctctggcccgcccagctcctccacttgccggagcaggagcagcacaaacgctggagttgcccagccctgggcagacctcggccctgcacacgcgctgcctgtccacgcggagtccccggcctctctgggtgacaaatggggctctccctggtcctccaagatgaagttgaagattgtggccctccttgggcctgccgggggtatgtgggcctggcagctgcctct

SEQ ID NO: 220786 - DNA, 126 bp, Homo sapiens
  chr22:38507346-38507472
  hypo
ctagaggaaagaggaggtgtccctgcccagggatcctggaaaacagagtgtccgggtacaaaggaaaagtccggtcaaggccaagggtcaaggccgaggggagccgggggtcaggggaacaggtgg

SEQ ID NO: 220787 - DNA, 218 bp, Homo sapiens
  chr22:38520660-38520878
  hypo
tttactctctcctgcgctgacctggaagctccaccagggcagaagccgcctctgctctgggcagcgctgtgtgtcaaggggatgcaggaggtgcccaagagggctgataaatggaggaggcccgggtcccacctctaggggtcttttcctggaccaggtacccagccccacagcaagcctagaggtggcaggggagagactacactgttgctggaggc

SEQ ID NO: 220788 - DNA, 126 bp, Homo sapiens
  chr22:38525495-38525621
  hypo
tccccaaagtcattcggggtgtccacttctgctccgaacacgatgagggccttgatcatctccacgttgtctttctgttggagatggagagaggataagacgtgcaactgccggggaagtgaagaa

SEQ ID NO: 220789 - DNA, 218 bp, Homo sapiens
  chr22:38528880-38529098
  hypo
gcatccgcgttggccccgtgggtcagcagcactatggcacagtcgaagcggttgcgcatcaccgccacgtgcagggccgtgttccccgcggagctggtgctgttcacgttgcagccccgtttcagcagcatgcgggccatctgcgggagacggtcaggctgagttagcacaggcactcggggagctgccgcaccccgggacacgtgggcactgccact

SEQ ID NO: 220790 - DNA, 308 bp, Homo sapiens; identical to SEQ ID NO: 206132
  chr22:38577844-38578152
  hypo

SEQ ID NO: 220791 - DNA, 37 bp, Homo sapiens
  chr22:38578432-38578469
  hypo
tttttttttgagacaagtctcgctctgtcgaccatgc

SEQ ID NO: 220792 - DNA, 223 bp, Homo sapiens
  chr22:38633370-38633593
  hypo
tataacttcaatacacactcgctgtgtgcctactgtgtgccacacactgcgtgcgggaccccgatgaccctgggcacactgggccattctaagctcaccccctgtgcacaccttcagcgcctaaagctggcctcatggcccagccttctgctgcagagaaacactctggttacttggaaagactgggggcattctgtatttcagataacgggtggatgagcct

SEQ ID NO: 220793 - DNA, 405 bp, Homo sapiens
  chr22:38694593-38694998
  hypo
tgctgcccatggtggcacaagctgtcagcacggatgaggctggagggctctgggaccccagtgaggtcaaccacactgtccagctcgtacctcccgtctgtcgggagcccctcccgccaccagctcactctggccctctgagtcagggccttccccatccagtcccccaagcccgccttggcctccaggtgactcacgaatttcagcatgttccagtcaaagacgtagtcataggagaagccctgccggtggaagaggttgcggaagagctgacgtaggtaagagtagtcgggcttgtcgtcaaaccgcagggagcggcagaagttgaggtatgttgagaattcggctggagggtgttgcagaggatagagaaggccactgtgaggcccacgctcccagaccccc

SEQ ID NO: 220794 - DNA, 38 bp, Homo sapiens
  chr22:38695215-38695253
  hypo
gcccacagctcttccgctgccctcgccaagcaccctgg

SEQ ID NO: 220795 - DNA, 73 bp, Homo sapiens
  chr22:38874142-38874215
  hypo
aaaaaagactgcttcgaggaaataactccaaataggagtacaaataggagtgctctaggccagtgtggtcctg

SEQ ID NO: 220796 - DNA, 42 bp, Homo sapiens
  chr22:38874259-38874301
  hypo
aacttttaaggctgggctcggtggctcatgcctataatccca

SEQ ID NO: 220797 - DNA, 84 bp, Homo sapiens
  chr22:38995555-38995639
  hypo
ctcatggccagttcacgaggctggctctagatttggaactaagatgagcacgattctgaccctgaggctcgcaccactggccac

SEQ ID NO: 220798 - DNA, 229 bp, Homo sapiens
  chr22:39132169-39132398
  hypo
tgtgctcctagaagtcagagcgccgagcaagcgtgtgggggaagcggcggggtgctgttcacccactcccagatggctggcagcaggcaccagtaagcagggctagtgggcgggctccccatgcactctgaagcggtagatgcaggtgtactcggggtggccccagttagtcaggatccgcagctccaccacctggtacgtggccatcgtaggggcctgggtagagaag

SEQ ID NO: 220799 - DNA, 167 bp, Homo sapiens; identical to SEQ ID NO: 206136
  chr22:39239179-39239346
  hypo

SEQ ID NO: 220800 - DNA, 32 bp, Homo sapiens; identical to SEQ ID NO: 206137
  chr22:39239412-39239444
  hypo

SEQ ID NO: 220801 - DNA, 89 bp, Homo sapiens
  chr22:39424923-39425012
  hypo
gtgagaccgtgtgcaaaaataaataaattcgctgtgatcccgatataaaaataatcatcatcatcatcggacaggtgaaatgtgaggaa

SEQ ID NO: 220802 - DNA, 83 bp, Homo sapiens
  chr22:39425582-39425665
  hypo
aacacaatacgtgacgtgccccgcgtgggctctgctatgtgtactttcctcttacatttctttcttttttttttttttaagac

SEQ ID NO: 220803 - DNA, 123 bp, Homo sapiens
  chr22:39529109-39529232
  hypo
atcaccccacgttcgcctggccagggtttctaacccaggttcgcaaggcccatgtggacacgtctgcagccacacatgctttcacggggcacatgggaacgtacacgcgaagggtaatgcgtg

SEQ ID NO: 220804 - DNA, 100 bp, Homo sapiens
  chr22:39530873-39530973
  hypo
ctccttcccatgccacggctggccatcaccccaccccaccccagcccagagagtgcgccccgggcaaccccagggtcggccagctcagccctgcctctgg

SEQ ID NO: 220805 - DNA, 39 bp, Homo sapiens
  chr22:39571321-39571360
  hypo
actttgggctggtttcgggggttgcgagggtggcagcac

SEQ ID NO: 220806 - DNA, 47 bp, Homo sapiens; identical to SEQ ID NO: 206139
  chr22:39638593-39638640
  hypo

SEQ ID NO: 220807 - DNA, 328 bp, Homo sapiens
  chr22:39690553-39690881
  hypo
tgcactgccttctgggtgtgccaggttggcatggggaggctgggctcacacccaaatcaggacatagcctatcgtgagggtctgggtgagctgggaggtgttcagaatagaagagcaacccatgaaggctccccggaggaagcaggcctggcgctgagtcacaggagcctggggcagggtaacccccacctgaagtcactgtctccccagcagtgacatcattagcaagccagaatgcgcagggcatacagctggaggaccaggcaagctgaggcgggggccaagtgggtagttcggggccaacccccatcagcggccaatggcctct

SEQ ID NO: 220808 - DNA, 154 bp, Homo sapiens
  chr22:39755185-39755339
  hypo
gctgggtgtagaggtcgacagggtccttctggttcctgaggccacttacaggacattgtcccccagctttgaatctcacaccagcactgggtcgcccactccccttcatgatgagccagctcgaggccactttgcccgttcttcaaagatgccc

SEQ ID NO: 220809 - DNA, 208 bp, Homo sapiens
  chr22:39756426-39756634
  hypo
cctcctcgccatcttctcaggctcattcctgaccttcacattgccaatctcatggccaactgtcattgatggatctctcagcagcgtctggcagccgtgaggggtttatgcatcctcccttgaatccaaacggctgcagaatgtggacgccctcaccccgctcgccgcagaatgtggacaccctcaccccgctcgtcctctctttaat

SEQ ID NO: 220810 - DNA, 130 bp, Homo sapiens
  chr22:39770342-39770472
  hypo
gctccatcgtgaacgagggctacctcaacagcgcctccgagggggaggagttctgcatctacaaccgcaaccccaacgcctgcagctatggcgtggccgtgggcgtgctcgccttcctcacctgcctgct

SEQ ID NO: 220811 - DNA, 136 bp, Homo sapiens
  chr22:39773595-39773731
  hypo
ctggcagagcctgaccgcagccctggccgtgcggagattcaaggacctaagcttccaggaggagtacagcacactgttccctgcctcggcacagccgtaggcctccccggcttgcagaggccggcagccctgtatc

SEQ ID NO: 220812 - DNA, 49 bp, Homo sapiens
  chr22:39872956-39873005
  hypo
cgggactccaggatcggccatgttctgcagccaccgcctctacctgtct

SEQ ID NO: 220813 - DNA, 212 bp, Homo sapiens
  chr22:39907959-39908171
  hypo
acagggacatgaagacgggcctgagccggtccttgcagacccttcccacagactcctccaccttcgacacaggtgagaagggctgctgcccctcctgggacctctctggactttcagtaccactcctgcactcagcagatgtttcctgagcacatctgtgccaggcactgtgccagcacttgccctccatgccaggcccttctttctggggc

SEQ ID NO: 220814 - DNA, 220 bp, Homo sapiens
  chr22:40026479-40026699
  hypo
gctgagtggctccattcactcgcccaccgctcctttactcattcaagctgtcggccttcaagggactgctttgtgcccggtcctggtctggatgggagaacacagagcagccgccttggccttgggcgcagagcatgcctggtttccagcggggaggaggaggcagagccgggaactggcacaggctatgatggagggcgggtgggcagcagtaactcat

SEQ ID NO: 220815 - DNA, 428 bp, Homo sapiens
  chr22:40045203-40045631
  hypo
atggccggtcagcacggatgcgcgccctgcaccgtgctgggcccatcatgtgccttaagggagagaatcctcctacagcctgcatggtgggcgttcctgccccaacttctacaacaggggcagacaaagctcagagagctgcagccgcttccccaggcacccctgaccgcctttccaggctgggtcggctggttccaggcagacctgtgggcctgggagccaagcgcactcagggatgtgtcccagggtggattgggcctggtgtgggcaacgactctatgcccctctcatttgcttttcagagctgtgcccgcaacatagccccctggatgcgacgccccacaccctggtgcagcccatccccgccacgctggcttccgatcccgccagctgcccttgctgccagcatgaggacggccggcggccct

SEQ ID NO: 220816 - DNA, 217 bp, Homo sapiens; identical to SEQ ID NO: 101328
  chr22:40045721-40045938
  hypo

SEQ ID NO: 220817 - DNA, 185 bp, Homo sapiens
  chr22:40074972-40075157
  hypo
ggggcagggcagcccggggccatctcgggggttgaatctcggtcttgctgcctccgagcgtggccctgggctggcctctgcctccagcagcctctgggatgtctccgtcctcatcctcaccgccctccctgccacgcaggacacgctgcgggactgcacccacgacgagcgcagctgcctgagca

SEQ ID NO: 220818 - DNA, 216 bp, Homo sapiens
  chr22:40075302-40075518
  hypo
gctcgagctggagatggcccatggcctgggccctggcccgaggctgcctaccggctccccgggcgcccctggccgagggccgggaggggcgggcggcgggggcgacaccgagggcggcttgtgccggcgctgctactcgcctgcccaggtgggcaggggctggagaggtgtgagggtcgccagagggggggcaccgcagggccagatgggcagcag

SEQ ID NO: 220819 - DNA, 313 bp, Homo sapiens
  chr22:40089236-40089549
  hypo
caaaaccaaaacccttggtacgcattaaacacgaactcccattctccagtccccggcagccaccgtgccactgtctccatgagtgtgaccatgccaggaaccacgagtgtgagtggagtcacacggtatttgtccttttatgactgcttatttcacttagcacgaggttctcgaggttcttgaggttctcgaggttcacgcatgctgtggcgcgtgtcggacttttctcccttcttcaggtgcagtgggattcccgtcacgtgtctacaccgcactgggtttggatccacccgttgagaggcccttggttgct

SEQ ID NO: 220820 - DNA, 39 bp, Homo sapiens
  chr22:40262908-40262947
  hypo
atacttttttttttttgagacggagtctcgctctgttgc

SEQ ID NO: 220821 - DNA, 108 bp, Homo sapiens
  chr22:40444189-40444297
  hypo
gtcattctttaaacttttgcagccagattgttccaaggttgccaattacctagtgggtaaatttcccacattggccgggcgtggtggctcacgcctgtaataccagca

SEQ ID NO: 220822 - DNA, 79 bp, Homo sapiens
  chr22:40593308-40593387
  hypo
agtctcacactgttgcccctcgctggagcgcagcacatggcttgatctcagctcactgcaacctccacctcccgggttc

SEQ ID NO: 220823 - DNA, 39 bp, Homo sapiens
  chr22:40621438-40621477
  hypo
aaacatatttgaggccgggtgcagtggctcacgccagta

SEQ ID NO: 220824 - DNA, 40 bp, Homo sapiens
  chr22:40624792-40624832
  hypo
gctgggattacagacatgagccaccgcgcccagccccagg

SEQ ID NO: 220825 - DNA, 117 bp, Homo sapiens
  chr22:40815004-40815121
  hypo
catctcaccaaaggtgtccccgggggtggagttttcatcgcccgtgctgagcagtgagcgctccgagggggtgggagacacggggggcgtggagcccgtgctgccaaacttcaccac

SEQ ID NO: 220826 - DNA, 34 bp, Homo sapiens
  chr22:40912133-40912167
  hypo
tttctgggctaggcacggtggctcatgcctgtaa

SEQ ID NO: 220827 - DNA, 96 bp, Homo sapiens
  chr22:41156760-41156856
  hypo
ccatgccactgtactcagcccggggaaataaagcaagacgcagtctcctaaaaacaaaaaaaaaaaagagatttggccggtcgcggtggcttacac

SEQ ID NO: 220828 - DNA, 139 bp, Homo sapiens
  chr22:41486563-41486702
  hypo
gtagatactggtttcggggtttctttcggggtcacttacacccctgccacctcctccagtaccaatttacccatggccaaacacagggtgatgtgtaggaacctgaaagcacgtctccgacctcagctgcaaaactgtg

SEQ ID NO: 220829 - DNA, 204 bp, Homo sapiens
  chr22:41536178-41536382
  hypo
ctttaaaagacagacggatggaaaacctagttgcatatgctcggaaagttgaaggggacatgtatgaatctgcaaacaatcgagtgagtgtctggtttttttctattaatagccaagattgaacctgttgtggttattttattcctctttagcatgtacaagtagtacatatgcttcagacgggggacacgctgtagctatccc

SEQ ID NO: 220830 - DNA, 127 bp, Homo sapiens
  chr22:41634855-41634982
  hypo
gcaaattgccctgcaggtccagccgctgggtcagctggggacagcgaggagaaagtggggctgagccaggcagggaccccgcctttgcaagtgctgcttcttccccggaacactcttttctcctgtc

SEQ ID NO: 220831 - DNA, 420 bp, Homo sapiens
  chr22:41639282-41639702
  hypo
taggatttacaggtgtgagcccgcacccggcttcatctattttaattttttttttaaattcagcattccagccttccattctataaatatatgacaacagtggcatggggcaggggcgggaggcagtctgcccacaatgcaggcagtaagcgggtgtgctgtcagtggagaagtgagacacaatggaactgacttaaagttggtctctgctttttattatcatgtgctgacaagtctaaacaatgtcaatgctaaaatatttcttcttgggcagaccattcctaccttctcggtaccacaccgtaccacaagtagcttacccattcctctagtgatagacatttgggttgtttccagcatgggtttattagaaagagcactgtagccgggcatggtggttcatgcctgttaagtgagctg

SEQ ID NO: 220832 - DNA, 135 bp, Homo sapiens
  chr22:41641907-41642042
  hypo
aaggcccactaggtccggggccagcgcagtcccagcagctcctgctcctggacaatctggtgtctgcctgtccacacggtgtggggcccagggttgccctctgccaacaaccccacgatccgacccccacagtcc

SEQ ID NO: 220833 - DNA, 281 bp, Homo sapiens
  chr22:41656916-41657197
  hypo
ttctgctggcactcacgatcggggactcagcaatgtcctgcggggatggggagaggagagtggaagaggagtggggataaggtcacctgagagcacgtcatttggcacctgagccctgcggctgcccctgcctatctccctgtcttggaggtctggtatgttccttctctgtgccccacaccagtggctgggccaggctactgtcagcactcgcaccatctcacttcaccacttctgagcctggcagatgacactccttggtcagagtggcctgcctggcc

SEQ ID NO: 220834 - DNA, 302 bp, Homo sapiens
  chr22:41657416-41657718
  hypo
gctgcaggggcaggatggacagaaaccactcaccctaaaagcttctgccaaggcagtggcgccatcattctccagacggtttctgccagccacaaagaccttcagggccagaggcttgccttgggcactggatttccggtgacattcggtcagagctgcagccaggatctgtggggaaaggcaaggggccctggtcatgggcaggagccccttctcccagcggggtggccactgctgctgaactgctcttcaacatcccacgccacccatcggtgcaggtcaggggacgcaggactgctaac

SEQ ID NO: 220835 - DNA, 110 bp, Homo sapiens
  chr22:41658259-41658369
  hypo
ttaggaaaagcactgaaaaacggagactgaccgatgggaatcagagcccatggtaaatgcgacataaaagaatcacgagcgagtgcaccgagagaagtgatatttgcaga

SEQ ID NO: 220836 - DNA, 87 bp, Homo sapiens
  chr22:41664703-41664790
  hypo
aaccctctaggtggacgtgtgacgtggttatggatgacagagaaacatgaacataaacaacacagaattctacgttgagggccagtg

SEQ ID NO: 220837 - DNA, 256 bp, Homo sapiens
  chr22:41667841-41668097
  hypo
tggcatcagcactacgcccggaacactgggccatcaagggcagatcccaccctgcccctgccctgggctgcttcctgcacagaggagggcctaggaggtggtgtgcagtgattcactcgagccactgcatctgtagcaggcgggaaggtgcatgcagcactcctaccggccaggctctcccaggacaacctctgaggaagaaggaagggctctatctcctatttcatataagagcccagcctcagagctgcacgca

SEQ ID NO: 220838 - DNA, 77 bp, Homo sapiens
  chr22:41668168-41668245
  hypo
ctcctgctgagtcctgtagccttcaggcccatggctccttcattcctgttcttcacaggtctcggggagggctgagt

SEQ ID NO: 220839 - DNA, 44 bp, Homo sapiens
  chr22:41669065-41669109
  hypo
ctgggattatagctgtgagccatcgtgcccgactgatcgtggct

SEQ ID NO: 220840 - DNA, 164 bp, Homo sapiens
  chr22:41669352-41669516
  hypo
cttttctcacagagcgtatcagaagactggtgtttaggagaacctgtttggggaacacggggctagaataacctgacttgccctttgcgttggccaaaaagggcaccacttggatctaaccttcaggagaacttgccagccgcacgcagtggctcacgcctgta

SEQ ID NO: 220841 - DNA, 103 bp, Homo sapiens
  chr22:41676091-41676194
  hypo
ccatctcaaaaaaaaaaagtgataaatgcacagggaggaagtctataaacgttagaccttatggagatgttaggaacatgcatcagcacgctcccagctaccc

SEQ ID NO: 220842 - DNA, 160 bp, Homo sapiens
  chr22:41779337-41779497
  hypo
tttgtttttgagacggtgctttgttccaaatctggggctgagacaagctgcagggacaggtgtacacatctgacagtttcttgtttgaaattaccaggtaataaccatccataacaagaattctacccgatattcgtagagtgctcgcaaagcacgctga

SEQ ID NO: 220843 - DNA, 42 bp, Homo sapiens
  chr22:41839259-41839301
  hypo
aggtgtgtgtgtgtgtcacacgcgcgcgcatgtgtctgcctg

SEQ ID NO: 220844 - DNA, 360 bp, Homo sapiens
  chr22:41970799-41971159
  hypo
tcccaagaaccagaagttccaggccgtggaggtggtgctcactcagctggccccccacactccccacgagacgtggtctggccaggtcgtgggctcctaggctgagtggttcacaggccagctggccgggggttggggagccacacagggtgaacgggcagcagccggctccatgccccactgccctggctgatgagtccttcggtggcctcagtgtgcacgtctgtctgtccgtctgtgcttgtggctatgagcgtgtgcctccacccaccccacgacccgtgactactgtgcaagctggccaggaggtaggtggagggcaaggccaccagacctggcttcgcgctgtccactgcctct

SEQ ID NO: 220845 - DNA, 97 bp, Homo sapiens
  chr22:42033731-42033828
  hypo
gcaagctagaagacctgttgcggaaggttcgcgccaaggagaccaggaagcgagcactcagcaggtgtgcactcagcccgggtcagctgcctacact

SEQ ID NO: 220846 - DNA, 31 bp, Homo sapiens
  chr22:42034495-42034526
  hypo
aatatgatataggccagacacggtggctcac

SEQ ID NO: 220847 - DNA, 213 bp, Homo sapiens
  chr22:42095789-42096002
  hypo
cagacccgctccggtgaacccgacgcgaaaccgggcccccgcgctgtgttcactctcctccctgtcagcccgtcccggacccggccgcagcggcctctcgggcccctcagccccaggccggcctgcgggcctccgtggagcccggtccactggctctgcgcctgaaaggacggaaatccggatcccccgggacctcacccagtctcagggaca

SEQ ID NO: 220848 - DNA, 98 bp, Homo sapiens; identical to SEQ ID NO: 206152
  chr22:42310966-42311064
  hypo

SEQ ID NO: 220849 - DNA, 71 bp, Homo sapiens
  chr22:42395290-42395361
  hypo
aggacaggtactgggtgtgtatctcctcctacttccacgaacaaggtgtcgctctttggtaagagggatga

SEQ ID NO: 220850 - DNA, 400 bp, Homo sapiens; identical to SEQ ID NO: 206156
  chr22:42669780-42670180
  hypo

SEQ ID NO: 220851 - DNA, 40 bp, Homo sapiens
  chr22:42916315-42916355
  hypo
cagttacgagaggagccgggtgcggtgattcatgcctgta

SEQ ID NO: 220852 - DNA, 50 bp, Homo sapiens
  chr22:42972462-42972512
  hypo
cttcccacagccacacgggcgacgcggggctcggccgaccccgcggggcc

SEQ ID NO: 220853 - DNA, 97 bp, Homo sapiens
  chr22:42995215-42995312
  hypo
aaggcaccccagtgtctcagcgtttataaaactaagggaatggactagttccagctctgaaaatcttacggcccaaacaaagaaatatttctgcatt

SEQ ID NO: 220854 - DNA, 106 bp, Homo sapiens
  chr22:42995599-42995705
  hypo
cgagatgtcgtctcaaaacaaaaaaaacaacaggttctattcaacacgacctctcccacctgcctgatcagacacgcagtgtaagaaaacatgaaatgccatacca

SEQ ID NO: 220855 - DNA, 350 bp, Homo sapiens
  chr22:42998893-42999243
  hypo
ggcttctggggcaccgtggtctgctgcttgcgagagttcaacatctctctggcatcctgcactttccctttgattcgaaatcgggcatctttctgcaaaagcttctcccgggcatccttgactcccagtttgagccgggcatctgagaggccaatcttctgccgggcatcaaatctctgctggaaggtggctgtgcgtgttgactggctgagaaggccttgctggatcccaactcgagatcggacacctccaactcccggtctggcattaagcctgtaaatataaattgcaatcaatattaagtggatctgggtatctacagcagtctatgaaagcggaactgtggtaac

SEQ ID NO: 220856 - DNA, 34 bp, Homo sapiens
  chr22:43137119-43137153
  hypo
ctcttcctgcattgccgatctctcagggttgtta

SEQ ID NO: 220857 - DNA, 180 bp, Homo sapiens
  chr22:43150032-43150212
  hypo
tcaggaggctgcccatggtgtggtcctggcgacgcaccagcagcacgtcaccctcttgacccgggcgtgtgcctggctagctgagttttaagcctctctctggtgacatttggctttggagaaggttctttctctggcaaagcatttagatgtagctaaaaatacattattggccaggtg

SEQ ID NO: 220858 - DNA, 461 bp, Homo sapiens
  chr22:43164782-43165243
  hypo
gcttgggcctgtcagaccctcccctccacagtctgagtgacctggccagtggcaggatggaggcctgagaggtggcgccgttcacggaactgggagggccatgggaccggctggggcgctggctgacggtgacgggcgtgtgtgtgagaacctgaatggatgagggtgggtgggtgggtggtggggtggaggcagctccctccccgtttactggggtgtgacttgagcacctcgcaagcacaggcagtgcctcagccgcttactctgtgaggggccgaccgtgcccacctgcaggcccactgtgtgccgggcaccctgagccccgcgtttccagtggctccaactctcccacaggtgacccggtggatgctgctctcctctgtgtgagggaggaagcgaggggactgtcatggcccacgagcctgttcgcctccacaagcggctcccaaccccaggctcct

SEQ ID NO: 220859 - DNA, 137 bp, Homo sapiens
  chr22:43253987-43254124
  hypo
ttttaattcttgccctcagctcacgccaggccctgggtggaaagctttctttgcccggaaactggctttctgaaaccaagggcttttgtgtcacgttcatggagagatggcagtgcgggttgaggcagaagtgctca

SEQ ID NO: 220860 - DNA, 149 bp, Homo sapiens
  chr22:43266094-43266243
  hypo
tcccgggcgactccgggcagcccgagacactcgtgctgcgggtaagacccagcttctgtttgtgcacaagtaacacgacgactgaaatctgcaactactgcaaagacgcgggcacttttacagtgttctgctacggagccaggacaaag

SEQ ID NO: 220861 - DNA, 51 bp, Homo sapiens
  chr22:43273690-43273741
  hypo
ctgagggctgggagccgggagctgagttacacactacgaagaccacaggca

SEQ ID NO: 220862 - DNA, 175 bp, Homo sapiens
  chr22:43351234-43351409
  hypo
acagtgcctgatgtgaactgcgtggacaagagaccaagaaggtaaactgaatgaatgaatgaatgaatgaacaaacaaacgaacgaacgaacgaaaaaacaaatcaactgatccagccagccagcatccaggtgaactgtccctccaggcagtgatctaacggatggctggaaat

SEQ ID NO: 220863 - DNA, 267 bp, Homo sapiens
  chr22:43465387-43465654
  hypo
attctgtctcaaaaaaaaaaaaaaaaaaacgccatgccaggcaattcccaaggcactcacagaaactaggatgccacactcaggcccctccttctccctcattctggagacacctgaaatgaaacaggtgccaccacaactcgcatggacatgctcacgcatcaaagccaacagtcaccacctcagcgcctcgcgccccaaagaaaaaattcagctgtttactgaaaacatgagccggtggaagacgcacaaacccagatagaggta

SEQ ID NO: 220864 - DNA, 194 bp, Homo sapiens
  chr22:43529307-43529501
  hypo
ctatgcgcgtggacgttggagtagacagaaaccagaggcttcttaatgtcgactgcctttaaagcttgcgtcaggggctccacggctggctccatgaggcgggtgtggaatgcgccactaaccggcaacatcctggtgcgtctgaaatgaaacttagaggaattcttctggagaaaccgtagagcctggggaag

SEQ ID NO: 220865 - DNA, 202 bp, Homo sapiens
  chr22:43566412-43566614
  hypo
agtcctcctagaggactcctcggacatgggcatggccaggtgcctccacgcatgttcacgcgccatgatttatcattagtgaagacctcagatgaccaatcgccgccacagttagcaacaagcccgaacctcaaaacctcaaaacacgccactcagccaacaaagcaagctgcagaaggatccgttgaataagatgatattt

SEQ ID NO: 220866 - DNA, 224 bp, Homo sapiens
  chr22:43567756-43567980
  hypo
gggcggggtggggtcgggtgtgccctggcctctgtgtgaacctgctctgcacctccctcaggccctacctgcttcagcaccacatccgggtcatagttcatgaccgtgaagtgcttctcgtagtcatccaggtcgttgagtgcaaaggccctggaagacaagtgtgcagacacatatgggttcttgagcggccttgtccctgcgagggaggtgccacccactca

SEQ ID NO: 220867 - DNA, 120 bp, Homo sapiens
  chr22:43570127-43570247
  hypo
tgggtgctcatggaggagcaggcggacacagacgctgggccggggaaaagggccatggagcacaccgatgccgtgtctgggacttaccacctttcccgctgctggaagtagctgacaaac

SEQ ID NO: 220868 - DNA, 293 bp, Homo sapiens
  chr22:43570314-43570607
  hypo
ggcgcgcgatggaggccaggcagtccttgacagtcagcaggttctcgcaggggaactggttcagcagcacgcctggcctctcctggctgagtttcctgcagggcggaggcaggtgcgccagctcaaggggaggccggcagtgcctagaagccctgactgggagggcccctgcggccagaggtgccctcacctgtagtccttgaagtgtgagaagttgaagaggatgtcggcgtccgcctcactctgggtgagggtgaagcgcgggtgggtgaggctgctggccacctgctgca

SEQ ID NO: 220869 - DNA, 182 bp, Homo sapiens
  chr22:43581409-43581591
  hypo
ctgctgctgctggcggcctcctccacacctgggccagtagcagcaggaggcttcactcaggaagagctgcaagtttgtgaatggtaaagcagtgattcagctctgtccttaacggctggggaagggtcacggaaaaacactggctgccccttagtagggcaacagcaggcaaggcggcctgg

SEQ ID NO: 220870 - DNA, 135 bp, Homo sapiens
  chr22:43689261-43689396
  hypo
ggcgcaggcccacgcgatcctcacagctacctgggtgacaggtcatgttattgaccccattttacagatgaggacacggaggctccgggagctggagtagcttgagtagagtgacacagcacaccagagtgaagg

SEQ ID NO: 220871 - DNA, 301 bp, Homo sapiens
  chr22:43926571-43926872
  hypo
ctgaagcagccaggtcacaccgggccttcggcagcaggtagagggctccccgtgggaagtttctggccgctggcatttggcagctgctccctgcagaggcactgggcgcagagctgtgctcaccgtcctgaaatctgcgacgcttagcagccctgttccagcctcatcatagcttttgaacgtgcgccgcattggcctccagcagtgcacaattttgggctgaatacgcagcagagcagagtaaaaagatggcgtctccgcgccggcttctttctagacacaagacaagaaggggtgagga

SEQ ID NO: 220872 - DNA, 78 bp, Homo sapiens
  chr22:43926902-43926980
  hypo
gctcctcctcgcctcgcccccgcctcgcccagccctgctccggcttcacctcccaacctgctccgctggctctgaatc

SEQ ID NO: 220873 - DNA, 132 bp, Homo sapiens; identical to SEQ ID NO: 206161
  chr22:44287922-44288054
  hypo

SEQ ID NO: 220874 - DNA, 207 bp, Homo sapiens
  chr22:44322831-44323038
  hypo
ctctcagatcttgtgcggaaggccaggagtcggaacattggcatcttccatccatccttcaacttaagcaagttcctccgacagggtctctgcaaatgcctcccggccaatgtccaccagctcatctccggcaaaataggcatctctcttaccagagtgtctgatggggaaaacgttctggtgtctgactttcggtccaaagacgaa

SEQ ID NO: 220875 - DNA, 93 bp, Homo sapiens
  chr22:44500128-44500221
  hypo
tgctctcagactgcaggttgcgtctcaaagcaggctggcagacattttccactcttgatcaatcattttccaaaataagcatagacacagcaa

SEQ ID NO: 220876 - DNA, 45 bp, Homo sapiens
  chr22:44500269-44500314
  hypo
agtggtggcacagaggcgatatacgttaaatattagttctcactg

SEQ ID NO: 220877 - DNA, 300 bp, Homo sapiens
  chr22:45074487-45074787
  hypo
ccctgcctgctagttctttaagccgctgctggaaggcatccttctctagaaagtcttcctggctgcctcctgttcaccgcaggccaggcggacccacggccccctcagtgccatctcaccctgggctctgctcatgcctttgggccagcgcttgtcatacagagcttctctgccctgttcccaggtctccccgacagcctggggctgctctgtgtgattcatctctgggtcccagggctcagctgggggctggcacagagtgggaccccagcagcattcgatgaattgagagcacgagtg

SEQ ID NO: 220878 - DNA, 557 bp, Homo sapiens; identical to SEQ ID NO: 206165
  chr22:45097773-45098330
  hypo

SEQ ID NO: 220879 - DNA, 470 bp, Homo sapiens; identical to SEQ ID NO: 206166
  chr22:45098381-45098851
  hypo

SEQ ID NO: 220880 - DNA, 32 bp, Homo sapiens
  chr22:45113077-45113109
  hypo
tttttttttttgagacgtagtttcactgttgt

SEQ ID NO: 220881 - DNA, 32 bp, Homo sapiens
  chr22:45113349-45113381
  hypo
gcgtgagccaccatgcccggtatccaggagat

SEQ ID NO: 220882 - DNA, 163 bp, Homo sapiens
  chr22:45122235-45122398
  hypo
gaccacctcctgtctcgtgacaacccggggttgggtcagttaccctcctggatgaactgatgctcaggccctgcagcaggtggactgtgggacctcagtgagtctcctccccctttaagccttggctgctcactggtggatggactctcgggggccctgctgg

SEQ ID NO: 220883 - DNA, 280 bp, Homo sapiens
  chr22:45123031-45123311
  hypo
catcaggggtgggggcgggactcaaacccaggtctgcctgactttagggcacacaccctttgcccttctcacggcccggaggtccccgctggcctcactgtgcaggttgggcttcccgtggccgagagcctcgggcagcagcagcagcgtgcgcatccttgcaggagcgagctgccctgggagcggggtcaggtgagggggtccactcagttcccacggatgctgctttgctcgggctgtgctgggatcgggcctgcgctgtacccgtgtgttgagcacc

SEQ ID NO: 220884 - DNA, 129 bp, Homo sapiens
  chr22:45123857-45123986
  hypo
gcccctcgcttgatgcggcacattctggcggtgcctgtacctcccaccagatctggcctaggggagccggggctctcggagaagggagttttgtgtggcttgaaaggagctctgcgtgggacagccagg

SEQ ID NO: 220885 - DNA, 183 bp, Homo sapiens
  chr22:45242866-45243049
  hypo
gcaggtgaaggggctcgtggctgtgggagtgcgggagcgtgcggggcttcgaggaagttgggaggagaaggggaggtcaggccttgcaagtcccaagaagacttgcacctccagatgcctgcgccacagtcctaggtcctggtgttccggggcacccccatcatgcaccgcaggccccccaag

SEQ ID NO: 220886 - DNA, 265 bp, Homo sapiens
  chr22:45277521-45277786
  hypo
tcctcgctctgcacctctgcgtgtgtgcatgcgtgtctgtggtcgtggccgcgtgcgatgcacacacgcgtgttcagtgcaattcggcaccatgtgatatgctcggggtgggagcccgtggctcctggacgcttatcctgttgtgctgagtccctcaggactgggatgtgggaatcgggcaagggtgacaagctgccactgcccaccctggatgcagaagcccttggcagcaagtctggtccccgaaggccggaacctcccgagc

SEQ ID NO: 220887 - DNA, 147 bp, Homo sapiens
  chr22:45591073-45591220
  hypo
tgctggccaagcctccgagcttggccaaatgctggccccagaggagacaaccttctcccgcccctcacctctgagaacagagggcgggccgctgtgctcctcacaacctggactgcctcatcttcccacggacgagctgtcagggct

SEQ ID NO: 220888 - DNA, 285 bp, Homo sapiens
  chr22:45593358-45593643
  hypo
tgcaggcctgggtcagcgaggtggcctgagagcctcccctcgcccgtgagtaacacacacctgggcatctgtggccactcaagaggggacagcaggtgcgccagaaaggtgaacaaagggaggacttcagctctgggaaagctacggctccacccaaagtctgagacaaagaggccaagagccctgcaaagaaacccaaccaaccgacaggacagggcgggatgactccgggtggctcacaagtaccaaggccctggaggcagagctggctgtgagaaggtgcgg

SEQ ID NO: 220889 - DNA, 272 bp, Homo sapiens
  chr22:45593715-45593987
  hypo
catagagaaggaagtttccatctgctctgttcagcttcagccaggacccgaccagggaccgtcctgtgcccgacagggaccgagaccgcaggttggttgcattgtgcagatcggctggaggaaagaaggccaggtcaaggcccccacagcatgggacgcggcgggagcagcaggaggccagctcccagtccaggctgaggccaaactctgctgaggccaggacgctccttaccaacacccccacaccagcacccacacgctccagagctgct

SEQ ID NO: 220890 - DNA, 386 bp, Homo sapiens
  chr22:45594190-45594576
  hypo
tgggagcagcaaggctgagccgacctgcaccattacccagtcctgcggtccaggctgggggaacctgccccagagaggcagactagggcagtgatcagtacttcttactgattcgggaacgggcccaggtggggaaggggcttgcccaagttcacacaagagcaggtcgaggccagtgctggagtccctgacccaggccagggccttgagcaggtgggacacccctgcttcttggtcccagtggtcaggacaaagactgccacctcttctgatcaatgctgcagccctgctccctgctgggggaggtgctcagtgggagttgtcagcgaatccttcacgtcgtttttttttgtttgttttgagatggaatctcactcttgcccagg

SEQ ID NO: 220891 - DNA, 85 bp, Homo sapiens
  chr22:45594816-45594901
  hypo
ccactgtgcctggccaatccttcacttccatacactcaacagacacgcacacagtgcggagccaggcgcccgctgggtcctgagg

SEQ ID NO: 220892 - DNA, 217 bp, Homo sapiens
  chr22:45603967-45604184
  hypo
tgcgcaccaaagccaggcccaagaggacactgggagctgcccggtacccactgacaggagggtggccaggccgccatggtacactctgcaggcattacacagcagtgagaccagattacaaccacctgtgtcaacaggcatgactcacaaacatgacatgcggagaaagaagcctgaaacaacatatactgcccgattccaatgtatgagctgtgag

SEQ ID NO: 220893 - DNA, 76 bp, Homo sapiens
  chr22:45604387-45604463
  hypo
ggcagaacccaccgactccacatgcaggagctgtgagaacaggcagaacccgcccgggaagtttgaggagacagag

SEQ ID NO: 220894 - DNA, 323 bp, Homo sapiens
  chr22:45607125-45607448
  hypo
aaggaaaacaaaagcgtttccatgtctggcatatggagttgattaaacattttacgaacagcaaaagcttgtgaaaaacagagaaggaagcatgcaaaatgtattttattagctcctcccacactgcgatttagtggatgaaatacgttaggcgaatcacttcatctccgagccctccgtttcctcatctgtaaaaggggtaagaacacccaccctgtcgagttgttgggacttcacaaggaggctaagaagaagagagctcagcactgtgtctagatgatggcgagggctcagtaagtggaaggcaccgtcatcatcaccac

SEQ ID NO: 220895 - DNA, 360 bp, Homo sapiens
  chr22:45607751-45608111
  hypo
aggaaagcccacatgtacaccgagagcagacaccacagggatgcttggggcacagacgcaggggcaggggccgggggtcactcaccttcctcccgtctgcaccgctttcgctgccggagtacgccagcttccggcgcacatagaaaagcatgtcgtcctgccggggagcccatttctccatgaagtaggtggagaacatccaagtccagaagacgatgcggtcatccttgaagcaccctgcagagggaggccagacaggagtgaggaaggacggccaccctggcccttgcagcatggccttggccaagctgcgcccatacccccacatttctggccagaaatttgcgagggctctgagat

SEQ ID NO: 220896 - DNA, 120 bp, Homo sapiens
  chr22:45653545-45653665
  hypo
tgtttgggtcatgggggcggacaactcatgaatggcatgtgtcctcatcatggtaataagtggcaatgagttcacacaagatctggttgtttaaaagcgtgtggcatgctgggcgtggtg

SEQ ID NO: 220897 - DNA, 617 bp, Homo sapiens
  chr22:45808543-45809160
  hypo
cacccagctaattttggtattattagtagagacctccgcaggtcctctggcctctccagacctcagtttccccaactataaaatggggagagcagccatgcgccatggctaaccaaagacggtgtcgccaggaacttaggaaaagctcagtaaactgggtcatcatcactacattcctgggtcaaagctcccttggatccaaatggtggttctggctgcttggaacccattacctcctcgacagctccctctcacttcaacttcggatgagaagggaaaagggacgcgagtgaccagggccaagggccagagcagtccccgaagcaggagtgagggcagagaacagggcccatggcgggaccggggcggagaggaagcgtcaggacccccagggtggggggcgagggttgggagcccctgagatgaagggcgagggccggagctgaggtggggtggggtccctcagggtgtcggaggagggtcgggagccaggaggtggagggcgagagcggggcccgaggcggggccgagtggaagggtcaggacctccgaggtggggcggagggacaagggtcgggacccctgaggtggacggcgaggaccggggctgaggtggg

SEQ ID NO: 220898 - DNA, 360 bp, Homo sapiens
  chr22:45821550-45821910
  hypo
cctgccttggtaagttggtgcaagacccggagctcttatgcatacacccaacaggtggtgatcccccgagtccagcccacccgcccagcagtgcgcaggcagccaggggttcaaggacccacccacatccgtgcctgacaagtctcccctccacccgactcctgctgcccttagcatatcctcccctcgagggcccccagtgagatttgctggcctgggtgtcagaatgcccctggggtcactcggaccatcttctttaatgtcttcacctgcttaggccatcgagtcagtggaaaggaaaaagcaagagaaaaagcaagaacaagaggacaacttggccgagatcaccaacctcctgcg

SEQ ID NO: 220899 - DNA, 149 bp, Homo sapiens
  chr22:45822398-45822547
  hypo
ctgctcagagaagggcgtggagcctggtgactagagtggagtgaggagaggggcaggtacggaggcctcagaggcagacggtcgaggtcctggcagtccactggggaggactttggcttcttctgtgacggagacggggaactctgcag

SEQ ID NO: 220900 - DNA, 72 bp, Homo sapiens
  chr22:45826806-45826878
  hypo
gacctggactgggaccggcggaggattcagggggctcgcgccaccctgctgtttgagcggcagcagtggcgg

SEQ ID NO: 220901 - DNA, 269 bp, Homo sapiens
  chr22:45929578-45929847
  hypo
taggatgtattaggatgggtcgttcttgctggtcacccccgcactgcctcggtctctcctagatgtcaatgaatgcatcacgggcagccacagctgccggcttggagaatcctgcatcaacacagtgggctctttccgctgccagcgggacagcagctgcgggactggctatgagctcacagaggacaatagctgcaaaggtacagcatgcgctccgagtctgcaaacctggtcttccaggcgtagatacggcgcggtgggaagggcag

SEQ ID NO: 220902 - DNA, 427 bp, Homo sapiens
  chr22:45959026-45959453
  hypo
accaagcctgtccccgagcccagggacttgctcctgaccgtcaagatggatctctctcgccacggcaccgtcagctcctttgtggccaagcttttcatctttgtgtctgcagagctctgagcactcgcttcgcgtcgcggggtctccctcctgttgctttcctaaccctgccctccggggcgttaataaagtcttagcaagcgtcccacacagtgagcctcgcgtgccttggttttatttggcatggttgggagtctgtgccgcttgttacccgggggtgagctgggcactggccaccgcctggtacccccgagggctgactgaggagcgctccccactagagggtgtgtgctcgggggtccctgttcacagagcccactgtctgtgccgacagggaggccaggccgggtacatcatttcacatgtg

SEQ ID NO: 220903 - DNA, 125 bp, Homo sapiens
  chr22:45976304-45976429
  hypo
ggaggaggtgaggcccgagctgagtgtccttgcatgtgagggagtgacacttagtgagcacctgtgatgaccaggagccagggtttcatcatcgccaggaccctgtgacacggtgggattatctc

SEQ ID NO: 220904 - DNA, 70 bp, Homo sapiens
  chr22:45982908-45982978
  hypo
gcttctcagacctgcgggtaccccacctcccagatgttgtcaatgggatgtgaggttcacgagcacgtca

SEQ ID NO: 220905 - DNA, 259 bp, Homo sapiens
  chr22:45983008-45983267
  hypo
catcatggcaaaatgtgcctggccactggttcctgacgctggaaggcacgaacccactccccacacccacagccggcgttgctgtgactgcagtgtctgtgttctaagccccacttttcacatccatccccgctgcccggccagagagacgtcctcagcccagagccccacttttcacatccatccccgctgcccggccagagacacgtcctcagcccagagccccacttttcacatccatccccgctgcccggccaga

SEQ ID NO: 220906 - DNA, 494 bp, Homo sapiens
  chr22:46255144-46255638
  hypo
agcaggacagcggccgtttgctcagcatcttctaagagcaaggcaccttatagaaagcactggatggaatccgcccctcaattcgggtttgctggagaagatgtagaccttggtgctcagagacgctgaatcgctgggctcacccaggcgggtgcggagccccagtctgccccttccactcggccaggctgcctcccgcctctgccctgcagtgccagctttgtgttgcccaattcatctgcagccactagaggtatcttccttgagaatctcctgttggaggctcccgctgccctcaggacatggcccagactccttagagaggcacatgaggtgcgtcccgagccctcctccagccctccctctctggcaggtgaccatgcagcagccgcaaagcacttggcggtctcttctggctcgaggctgacgcccacgcgagcccccacctagaacctccccaacctgtgtccaccgggtgtgcccccagaaatctt

SEQ ID NO: 220907 - DNA, 394 bp, Homo sapiens
  chr22:46261684-46262078
  hypo
ccatgactgtgaaatggagccgacacctctgcagcttcgaccacacagggcttgtggcttggcatggccgcagacgcactgccaggccggcagccttcgccaagaactggattcctcccggcctggcccggctcggctggcattctcgccagtttcattgggttgagttccagagcgatggcagcgattgataatgctgtaattggagtgacttgggtattttctgaggtgttgccacgatgactcatactagggcaagttgagggcccgcactgtccagccggagtcggttagagaccctcaggaggctcacaggctccagggcctggatgttaggatgtgaggcctggggttaccgagatcccacacccaggagatgctcgcgtggagcctt

SEQ ID NO: 220908 - DNA, 181 bp, Homo sapiens
  chr22:46312229-46312410
  hypo
gatggggatggtgtgcgcaggtccagccggcaagtggccccagctgtggcttctttggccccagcagctcagatggggatggtgtgcgcaggtccagccggcaagtggccccagctgtggcttctttggccccagccgctctgacgagggcttccagggctgcagacgccacagggacctc

SEQ ID NO: 220909 - DNA, 102 bp, Homo sapiens
  chr22:46437983-46438085
  hypo
gtgaacattttccctaaatacaatgatcttcagttaaaatatttgtatcttacatagaatctggaattatttctgtaaacagaatttagtaaaagaaatata

SEQ ID NO: 220910 - DNA, 36 bp, Homo sapiens
  chr22:46455649-46455685
  hypo
ataatggaacattgtgtcaccgttaaaacggtggtg

SEQ ID NO: 220911 - DNA, 95 bp, Homo sapiens
  chr22:46455925-46456020
  hypo
actccatctcaataaataaataaataataataaaatggtattgacaaaaagtttggaatggtatgggtgtgtacgggatacaacaccttcctaca

SEQ ID NO: 220912 - DNA, 274 bp, Homo sapiens; identical to SEQ ID NO: 206177
  chr22:46465987-46466261
  hypo

SEQ ID NO: 220913 - DNA, 90 bp, Homo sapiens
  chr22:46521762-46521852
  hypo
cttccaccctctgaccgccatggctccacaggcagcccgcaagagcctccagcctctggcagccctggaccagaccttggtaacacctgc

SEQ ID NO: 220914 - DNA, 39 bp, Homo sapiens
  chr22:46522039-46522078
  hypo
gacaccttccccaagtgcccgtcccggcgctgcacagcc

SEQ ID NO: 220915 - DNA, 43 bp, Homo sapiens
  chr22:46585895-46585938
  hypo
ccagccgtgttcatctatttctgtgaaccgatgctaggtgaag

SEQ ID NO: 220916 - DNA, 120 bp, Homo sapiens
  chr22:46598479-46598599
  hypo
aaaaaattagctgggcgtggaggcgtgcacctcttaagcttaaggacatatttcttatgatccaattaatgtaaaatattttattttttatttattttttgagacagagtttcactcttg

SEQ ID NO: 220917 - DNA, 94 bp, Homo sapiens
  chr22:46678247-46678341
  hypo
aggcagaggcagaaacgcctgcagaggcctcagggaaggaaaggctagcaccatggtggaggtgggccctctggacagacggggctgcatcagg

SEQ ID NO: 220918 - DNA, 110 bp, Homo sapiens
  chr22:46785285-46785395
  hypo
gtcattgccaaagagcgtgcccgtgtgctgtgtagcactgcgcagcgccctcaccagctgcagggccctggcgccgtccacctgcgtctcattgcggctcagcttctcat

SEQ ID NO: 220919 - DNA, 263 bp, Homo sapiens
  chr22:46805803-46806066
  hypo
cctgactcggaggaaccgcccggggtccccggcgccagacgtggcgtgggaaaccaggacggaatggacccggggctggacagaagtcagaccaggtctgaacgcccctggcaacggcaggaacatgggaactaagaaggtgctgaacgcactgaccacatttggagacgctgggacgccaggccatcacggcagccggcccggtcacctggtgacacatatgcaagaccctaggatcatgtgcgcctcgggttagctggctg

SEQ ID NO: 220920 - DNA, 452 bp, Homo sapiens
  chr22:46812395-46812847
  hypo
acagtgactggagacagcaggggctgcccacggtacctctacacccctcggcgggcaaccctggccagcacaggctccctggggcaggcggaaacagagccagcaaggaaaagccacatgctcactcctgcagccacctgagaaaaaacctacagtgccgctgagcactgcaaggagtggcccagaagcgctaagctgtgcagatccggaatcctgctccaggagtcatccccggggtccagcctcttcttattttccttcgaggtattttcttccctgcgtgcaggccctcctccttggcttccactcagccgctctacgcagtgctgggagtttctgtgtgcgcacaaaagcatttggtccttacgaagtgctcacatttctccagccttttaacctgctgcagacgattctgcattgggaggccggtgggggtacggtttcaatgctgg

SEQ ID NO: 220921 - DNA, 462 bp, Homo sapiens
  chr22:46815955-46816417
  hypo
cacacgtgcgctcatactcacatgtgcacacctacccacactcgtgcatactcatccacattcacactcacatatacactcacccactcaaatgtgccctcacccacacgtgcactcattcatactcacatgtgcacacctacccacactcgtacatacccacattcacacccacatatgctcacccacactcaaatgcactcgcccacacacgtgcactcatatatgcacactcagccactcatgtgcactcacgtatgcactcacccactcgtgcactcatgtgcacatttacccacatgtgcatgctcacccactcaaatgtgcactcacccacacatttacacgtgtgcttcttcacacacgtgcacacacccacacacatgcatactcacccaggtgcactcacccactcacgtatgcactcacacgtgtgcacacgtggacacacccactcacatc

SEQ ID NO: 220922 - DNA, 270 bp, Homo sapiens
  chr22:46816771-46817041
  hypo
tgggggacagagcatggaagcgcctggataagacagggagaaggtgggggccggggatggtcacggcaggaaaacgcgacagccctcggatggcacgtcccagagcagcggatacacgggtgggtgagagatgctgggtccatggctccgcctaaacccggccctcccatcatctactctgtgcttcagtttcctcatctgtgaaacagcaacagcacctcctcctccaggagctaacatgaggatcacgtgggggacacacatgagcct

SEQ ID NO: 220923 - DNA, 196 bp, Homo sapiens
  chr22:46828035-46828231
  hypo
tacttggagtctgtgtggcacgcctgggagatgatgggatattcaaggcagatgggaggggcgggccagggaggtggagggacgccggtggccagcatggaaaggagagtgaaagccagtggaggcgacactacgacctcaggcccagtggctggaccccaactgctggtgagtcgcagccaggcacagtggctgt

SEQ ID NO: 220924 - DNA, 203 bp, Homo sapiens
  chr22:46838991-46839194
  hypo
ctcttaagaaaaaaaaaaaaaagaatgtgtaactggctaagccaaggtgactccagattccagtatgaagccctctcgagaacgaggagggctgaaatcgctgacgttttgctgaatttcatgagcatgcacggcctccacgccagtaaccccgagggctcacaggcaccagagctgacgccgggtcagagccaggcacaggc

SEQ ID NO: 220925 - DNA, 235 bp, Homo sapiens
  chr22:46859885-46860120
  hypo
gcagcacgcgctgcgtggagatggtggtcagcagcgtccgattcaggtagatctgctcctgcaggtcctccgacgggaagaactggccgcggacgccgccaggcagcagcgccgagaaggtcacgttcaggatgttggagctgacgtcggtgtcgttctggacgttgaagacgaagacgtcgtccttggtggtggacagcacggcggccaccccctccacgaagagggccagcag

SEQ ID NO: 220926 - DNA, 44 bp, Homo sapiens
  chr22:46888632-46888676
  hypo
ggcaagatccaccgtgctcggccgaaacccaggaggacagtaga

SEQ ID NO: 220927 - DNA, 109 bp, Homo sapiens
  chr22:46929516-46929625
  hypo
cactcaccagacacagacacctccatgagcgcctccagcggccggttgttgtccaggtcgcggctgagctgcagttcgcccgtggcggggtccagcagcaacaggcgca

SEQ ID NO: 220928 - DNA, 158 bp, Homo sapiens
  chr22:46929718-46929876
  hypo
tggacttgttggtgacatagttgttgaagaggatctggaagtcgggcagcacaggcgggttgtcattctggtccacgagaaggatgtgcaccgtggctcggctcaccagcggagccgacgtggcctgcaccaccagcacatactcccgccggacctca

SEQ ID NO: 220929 - DNA, 301 bp, Homo sapiens
  chr22:46931418-46931719
  hypo
acccctgaagaattgatgagcgggggccggcccccatcctgggccttaatgctcagcgagtatttctggacatcctcgaaatccaaggggttgatcacatccaggatcccgctcagcgagtgcaggtagaactggccggccacgttcccgctgaggatgctgtagtgaatggccgcgttctggccctggtcccggtccgtggcctgcactcgcagcacagccgtgttgagccccacgtcctcgggcacctggaccacgtagttctgctcgctgaactgggggtagttgtcgttctcgtcct

SEQ ID NO: 220930 - DNA, 66 bp, Homo sapiens
  chr22:46932128-46932194
  hypo
gcggtccagtacgctgtccgtgctcacggcgcccgtggcagagtcgattcggaagtagccccggga

SEQ ID NO: 220931 - DNA, 336 bp, Homo sapiens
  chr22:46980009-46980345
  hypo
ccttcacggtgggtggtgtgagtccttcctcactttctggccctgtgagatgctccaggctcagcttgtccattccctgcccaggcctagagtcagccccttctgcagggagcccgggttccttttgttggagggcagaatcggaaaccaagatccaggtggcgggtacgctcatcactaccggggtgtcattgcttctgggccctcttagctgacagcaaggaaatgcacgtgtgagctgacgcgcacatatgtacgtgtctctgcctgtgtccgcgtgtagcctcctgtacctgtattgagcaaagtgtgagttcgcgccgctgatgaactctg

SEQ ID NO: 220932 - DNA, 87 bp, Homo sapiens
  chr22:47004986-47005073
  hypo
aagaccttgtctctaaaaaaaaaaacaacaacaacccgaaaagcccaaaacatttttttttgttttttcttggctcttgggttttgc

SEQ ID NO: 220933 - DNA, 154 bp, Homo sapiens
  chr22:47022397-47022551
  hypo
cccacctgatgggtgcagggcgggggtctctgggtcggggttttctttggaaagctggaccggccgtgccctgcgtgtgggagctggctcgtggggcttggaggtgtgtgtgggagggacggtggcagggcggggtctctgggtcggggttttc

SEQ ID NO: 220934 - DNA, 412 bp, Homo sapiens
  chr22:47022632-47023044
  hypo
gcccctctcttgcagggaacccgagcgtcatgttagggtgaagcagaggacctcagtgctgaacatgctaaggaggttggacaaaatcaggttcagaggtcacaagagagatgacttcctcgatctagcggagtctccaaatgcctcggacaccgaatgcagcgacgaaatccccctgaaggtaccgcggacctcgccccgggacagcgaggagctgagggaccctgtgagtacctgtcctcgtcccccggtgtgggctggggtgtcgtccccgtcctctgtggccgggccaagcgtggactcaggcagattcgtgtcctgcccatgctggtcagagatggactgggcctgactctctgtctcacctgctcccgacccctgcagaccttgtggggccggggtgctgccacgc

SEQ ID NO: 220935 - DNA, 79 bp, Homo sapiens
  chr22:47023191-47023270
  hypo
gggcgttgtctggaagccgctggtgcctggcttgtcttctattcaagccaaggtgcacgtttccagcccccaaagctgg

SEQ ID NO: 220936 - DNA, 297 bp, Homo sapiens
  chr22:47054011-47054308
  hypo
ctgccccagcatcccagagtcggggtcgcgtggacatgagcgatggtcacctggccgttctctcccccatagaggaggagctccggaagctgcgagaagaaaccaacgcggagatgctgcggcaggagctggaccgcgagcggcagcggcggatggagctggagcagaaggtgcaggaggtgctgaaggccaggtaccgcgccttcctcggggccctggcctgtgtgcggctgccccaaccccccaccccacccgccccgccgtcctctgctgcacccatagcgtcttggcagcatc

SEQ ID NO: 220937 - DNA, 33 bp, Homo sapiens
  chr22:47056194-47056227
  hypo
tgctttacatgggggcggcgcttaggaaccttc

SEQ ID NO: 220938 - DNA, 160 bp, Homo sapiens
  chr22:47163644-47163804
  hypo
accaggaggctggggaagagcggtcctggcagaggagtgagcaggtgcagaggactcccagagcgatgctggcgtgcttgaggagaggagctggggccagggtgggtctggccgagagaaggggagagtcgtggggtgcgtcatgaaaggtggtggggta

SEQ ID NO: 220939 - DNA, 284 bp, Homo sapiens
  chr22:47172072-47172356
  hypo
acctggggtgtggggcgtgttctgtagtcaggggctgggacaaggccttcttggcacagggtggcttgaacacagcctgagtgaggaggagtacagggtgtgtttgggagcctggcgggtcgctggctacctgagaacagaggtgtgcgtggaagtagtgggcacagctgtggctgtatggtgggatggtgtgcgtggaagcagtgggcatagttgtggctgtgtggtggggtggtatggatggaaggagtgggcacagctgcggctgcgtggtgggatgggag

SEQ ID NO: 220940 - DNA, 119 bp, Homo sapiens
  chr22:47192836-47192955
  hypo
gcaggtgagagccctcgcagcgccctggttcctgctgtgtccccactgttgccttctgtcctcagcacctctgcaggctttctcctttccctcatggtaactcacgggcttgccctccg

SEQ ID NO: 220941 - DNA, 46 bp, Homo sapiens
  chr22:47193289-47193335
  hypo
gtagtcgggaggagcgccctcaccctcacccccattctctcacccc

SEQ ID NO: 220942 - DNA, 89 bp, Homo sapiens
  chr22:47193371-47193460
  hypo
gtcccagtctctcccacactcggccaccgtcacgctgggtggcacatctgaccccagcactctcagcagctcagcgctgagcgaaagag

SEQ ID NO: 220943 - DNA, 780 bp, Homo sapiens
  chr22:47197416-47198196
  hypo
gctcaatatttactcacacaaagactgcctgctttgaagccccggaaaatgacactcaagttggtcacatgtatctggtgaatggtagtgcgatttggtaacatgtagaacacgcagtttcctgaggaccgtctagggcctgcctcgcagcagtggggcctcggagggcaaactgtgtgtggagctcagctctggccctcaaggctttcgaacggtaggacagaaggcacgacgacccgtccgtcaaggagtggggccaggccacggctgtgttccacttcccctgaggggtgaccatccagtctaggctttatgagagcgtgctgatagatggaggtcagcgggagagggtgttttgggggttgggagggcatgaacagaagtttggagccgtacaccttggcagcactaatacgagtagatgcccccttggtgtccgtggctctagggcagccgtgaaggggcctgggcccttggtgacaggaggaagcaggtgcggccttggagtaggccctcagtgtgatggctggccgtgtccttactcatgaagtggctcaacctacctgtttcgtcagctgtagagggagcatgagacctgccctgcagggtcctcgtgaaggtcagtgggaatttatgtagagtcactcatccaggctctgttgagcacctgctgtggttgtaggcactggggaggaatcggcggcgaggcttgcgagggccctgccctcaaggagctgacattctcgtgtgaggagacagagggagctcgctcagtacccc

SEQ ID NO: 220944 - DNA, 262 bp, Homo sapiens
  chr22:47299237-47299499
  hypo
ggaagctgtggaccaggcatggagccagcctgtttgccctccccgccctgatggctgctccggctggctaggcctcttctctgagattcttggcttagtacctctggcttttgccgcttgaatttggggacctgtcggctcttcctgtttcgcttcagtggacttccaccctagctctcgcctctggttgctgctctgagcgtgagtctagagggaccagcaaggtcctgagggagttgcgaggaatcgggccctgtccagg

SEQ ID NO: 220945 - DNA, 110 bp, Homo sapiens
  chr22:47370212-47370322
  hypo
tctccggcgtgcccgcagaggtgctgtgcaacatcgaggccgacacctactggtgcatgagcaagctgctggatggcattcaggtgagcgcccgcgcccacgggacacag

SEQ ID NO: 220946 - DNA, 212 bp, Homo sapiens
  chr22:47372536-47372748
  hypo
ctccatttcattcttttggaactgctcgaaccatcttccttaagcaccctcttcaccacatcatcgccctgattgaaacccttggggaagctctctcttggttttctgaagtgcaggctctcagcccggcctccaccagttgttcccagcgttctttcaagggcgtgtttgttcatcggctctgtggcagccgtccacgccgttgctgcaga

SEQ ID NO: 220947 - DNA, 207 bp, Homo sapiens
  chr22:47393125-47393332
  hypo
gttggttcccggcagggctgagtgcttagggtccaggtggccagcgaggtggtcagttcccacagacggttctggtcaatgagctatgcccatggatgcctgtttttcaatttagatgtaagtgtcttacatttacaaatagaaatgtaccattcagtgttccctgagatgcacgtgcttatcacctgacatcgggaaatactggcc

SEQ ID NO: 220948 - DNA, 360 bp, Homo sapiens
  chr22:47436579-47436939
  hypo
gaggttaccccgtgcgggacgtgactcagcagcagaggagcagctggggtaggccgtggaatgaaaaagaacaacaggttctgacaggacattcaaagccaggttcttttctctaaatcccggtgacttcttcctcttggggaacattcagggctctgagtatggtgagtgagcagcagccaagccggcctcctgggcctgggaggttccatttccagtttggtgaaggccacctctcgtttgagatcctcggctgccttcagggctgcgggtacacctgaaacggttacttacgctgctttagaatggctcctcacacacatcctgtgcaggtggcgggggactcgctggtaaacgggc

SEQ ID NO: 220949 - DNA, 214 bp, Homo sapiens
  chr22:47455004-47455218
  hypo
gagaacatcaaggctcggccagggtaggtgctcttgtccaaagccatccagctggtaagtagcaaagcgctgggggacaggccatgccgtgtgggcgcctccactgtctggcacctggattttctgccagggtcctactgggcatcttgaacacactggtgtgggtgcgcacgcgtctggtgtgggagccctttcttgacgctgtaagagagca

SEQ ID NO: 220950 - DNA, 92 bp, Homo sapiens
  chr22:47465507-47465599
  hypo
gttgtttggttggacgctgttccctgtttggatggagtggagctgacttgacggttcccggctgttccctgttgtttggttggagcggggct

SEQ ID NO: 220951 - DNA, 120 bp, Homo sapiens
  chr22:47465779-47465899
  hypo
gagcggagctgacttgacggttccagcgctgtcccctgttgtttggttggagcagagctgacctgacggtcccagcgctgtcccctgtttggttggagcggagctgacctgacggtccca

SEQ ID NO: 220952 - DNA, 120 bp, Homo sapiens
  chr22:47465959-47466079
  hypo
gttgtttggttggacgctgtcccctgttgtttggttggagcggagctgacttgatggttcgagactgttccctgttgtttggttggagcagggctgacctgacggtcctggctgttccct

SEQ ID NO: 220953 - DNA, 120 bp, Homo sapiens
  chr22:47466259-47466379
  hypo
ctggctgttccctgttgtttggttggagcggagctgacctgacggttccaggttgttccctgttgtttggttggacgctgtcccctgttgtttggttggagcggagctgacctgacggtt

SEQ ID NO: 220954 - DNA, 411 bp, Homo sapiens
  chr22:47534596-47535007
  hypo
gtgaggattttaaccgatggattgggggaaacacaaacgttccagccgtagcacgttatttggccgaaacccagaataccaggaggccagccctcgctctgcagccgtctcccctgagggcccagcctggattcaggccttttggcttggccaaagcccttctgagtcccaccctgagcctttgcgggagggtgacgtcatgtgctttattgctttgtttatgtgcttcagtcaccgttccgctcctgcagcgaccagtcaggcacagaacactgaggccgccaaagactggcccttggttccagttgcccgcacggaactgtgtgtctggggcccagttgctgaggaagtacctcagaggacaccgctgacacaagccacaggtgctgacgtggccgcacctcccagggc

SEQ ID NO: 220955 - DNA, 248 bp, Homo sapiens
  chr22:48027378-48027626
  hypo
tttttgtcctgttccggcttccacagattggacgaggcccacccaccttggggaggggccagctgctgtgttcagtccgccattgcaaacacgaagctcttccagaaacgccctcacagacaccccggaagtcacgtacccactctgtaggtgccccggggcacaggcaagcggacgagccagttatccctcagagctcctgctgcctcgcccgctttctctcggaaacgtgaagtgtggcctcagct

SEQ ID NO: 220956 - DNA, 62 bp, Homo sapiens
  chr22:48027786-48027848
  hypo
ggcccagcgtcagacgtttccagcatccgcgggagtgaaacggaggctggtgggtggttgtg

SEQ ID NO: 220957 - DNA, 218 bp, Homo sapiens
  chr22:48793077-48793295
  hypo
acagcaagtaagacacccaccgcgagctggaagaacccgcctgaagtcacaccataggaaagggccctggtctcagacagagcttctgttcctgaggtcccctgcctgccgggcgacgcttgctgcagcccgggaagcgcgtcttccattgctctgtgctgagcacagccgcggtgcggggcctgggttgggcctgtctgccacgcctgctcataccc

SEQ ID NO: 220958 - DNA, 278 bp, Homo sapiens
  chr22:48923928-48924206
  hypo
gcgatggctctgatggcgtcgatgatgctgattctcagttaaggacgctgaagttcggaggtgccggaaacccgtgaatcaggagcctggtgtggtcctggtacctgacaagcttcgagcggagtgagatgggagtgggcctgggggctgctgcagagttgcggtgaggactccagtagggccttggggcatgagtcggtgccacctgggtgcatcgtgtctccaggaaagggttctgctctgggggtccattccccgatgcctgtgtatagccaagg

SEQ ID NO: 220959 - DNA, 772 bp, Homo sapiens
  chr22:49026210-49026982
  hypo
ggcttgctccactgctgcctcggccctggctttggggcgtgcgtggcctttattcattgcctttgttgagtcgtcagcggcgtgtgatgaccaggtgtgcgctgttgtgtccacaactttccagcctcgctcgggcccagggcaggtggccacgccttcttactacacaggttcacgggataattggtggggccaggtggacccagtgaggcgctaatgatggaagtctgtgcagtgagtgccgcttccagaacaatgacagcgtccacgtcttcaccgccctccatcaggggccgcctagaagccacacaggctgcagggctggctaccggggccctgaatcacgggggcgatgagccccaggctccaggcgctggggaaggaagctgggcactcggctgtggggcttttgtttctacctgaaaccagccagccaggccccccgaggaaaagcaaagtgagcccaaatctgccccctatacccagatacccagtgtcccaggggcacctgcatggggggagcccggcgtgcgtgctggctctgggatgcaaggcccagggtcaccgaggacaggggaactcggcgtgtcctgcagccaggggccggcgctctggaatgcagcgtggagtccctgcaggaacgttctggagggggtgtggctccccgccctgtcctttctaaggacggacctcctgggccaggcagaggcagagctccttcggctcacccactcgggacggtcaggggaccggggctgggatgacctgccat

SEQ ID NO: 220960 - DNA, 240 bp, Homo sapiens
  chr22:49138231-49138471
  hypo
agagcaggtggggcaggagacgggtggagcgggtggtgctgtgtggcggagctggcggcgcagtggagcgggcgttgtggtggacccggtggcgtggcagaccaggcgacgtggtggacccggccgcatggtggaccaggcaacgtggtagactgggcagcgtgatggaccaggcgacatggtggaccgggccgcatggtggaccaggcaacgtggtagaccgggccgcatggtggacca

SEQ ID NO: 220961 - DNA, 242 bp, Homo sapiens
  chr22:49138501-49138743
  hypo
accaggcgacgtggtgggccgggtggtgtggtgaagccggcagcacagtggagcaggcattatggtggactgggcagcatggtgtattagaagaggagagatggcctggggtgctcagcggggctgagtccccagctgggagctcaggtgcgatgaagcccaagggactgacggtgtgaggagggccctctgctgcctccatgcagcccacacgcggggcccccacagtgcggacatgttgg

SEQ ID NO: 220962 - DNA, 281 bp, Homo sapiens
  chr22:49277152-49277433
  hypo
accgggcccggcctgcgccctccttttttagaccagagctccggccagggaattcgtcctgaatccatcatgtcctggtggctgtgggtggtggcgttcctccgactcccagaccacccccgccgggatctgctgggaaacgcccagagccccactcctgctcgtccgctcatcctgggcctcgcctctttttagggtgagtgtggcctcctggggccgcctgtggctccgtgtgcccttccgaccaggctgcgtgtctcatgtgccgctgcccaggccca

SEQ ID NO: 220963 - DNA, 222 bp, Homo sapiens
  chr22:49729772-49729994
  hypo
tgaagtggtttttgggagcccggatgggggcatgggcaggagggaccccgcctggaggtgagtgccggccccagagcctcacgtggctctgaacgatggaatcgcagtcactgagtccaggtgctgtgaccgtgcacgtcggtgccagacacacgagaggcatctcgggaggggctgtcgtgcaactgttcacgatggttgcatccttttttttttttttga

SEQ ID NO: 220964 - DNA, 41 bp, Homo sapiens
  chr22:49730114-49730155
  hypo
caggcatccctaatagaagcggaaacctctccagaccaact

SEQ ID NO: 220965 - DNA, 138 bp, Homo sapiens
  chr22:49857253-49857391
  hypo
gattacaggcgtgaaccaccgcgcccggctattattcaaaattcttatagatggaatgttggtggactctccactattcgtttacttatgaaatcatgtgttgacatcagtgtagacgcatgtgcaccctctttatgg

SEQ ID NO: 220966 - DNA, 488 bp, Homo sapiens
  chr22:49911018-49911506
  hypo
gagtaagggacaggaccagacgccatctgagggacaaagtccccgagccccgatgcctgggcgcagagctggagactcggcttcttcttcgacctccccggccacttcccaacaccacatcacctcaacgcaggtataaggcacgtcccgtcattgcccccgttttagagctgagaaacatgaggaccagagaatcaaggctgtctgagccagagggcgcctcgctggcccctaccccaaaacagcacccgccctgccctggtcattactgccccccaaccttaaccaccctccccactgccctacagaagacccttagaagggggctgactgatggaccatggtgaaggccagcctggcctccttcagccacagtgtgaagcgcagttcaccaaaactggaaactgccatgcatcccggtgtcatcaaacaccacagcaaaagagccaggtgaacgcacggaacatcaagccgcaaccctccacacc

SEQ ID NO: 220967 - DNA, 180 bp, Homo sapiens
  chr22:49911586-49911766
  hypo
ccgtcggagctggggatcatcctcccagagtttcagcagctcagagaaggccagcaactcaccgagccatgccacagcgtgcaagcacagcggcccggccctcctgcattctgtcatgcactgcgtgtcatcttattaaaggatccaacgcaggctcataaaatacttaatgaaaacatg

SEQ ID NO: 220968 - DNA, 53 bp, Homo sapiens
  chr22:49983615-49983668
  hypo
cctcccagcagcctgaggcccgagcagggtctgtgatgagcagaggccgcaga

SEQ ID NO: 220969 - DNA, 42 bp, Homo sapiens
  chr22:50000856-50000898
  hypo
tgtttctccaaaagcgtgtgctggagacggaatccccaaagc

SEQ ID NO: 220970 - DNA, 210 bp, Homo sapiens
  chr22:50008973-50009183
  hypo
ctctgggcagcctggctagagctctgcccacggcacgtcagcccctccacttccgtctgaaaggtgccggccgcgtgtgtcacgcgagaccagtcctgcacgtggatctggacggggcaactgcgcgaagggtcatgaatcccgccggccagggaggatcgtctcctgtgcagaatgaggtgcggtcagaacacggcagaagctgggagc

SEQ ID NO: 220971 - DNA, 289 bp, Homo sapiens
  chr22:50009330-50009619
  hypo
aacccggaaacacctcgacgcggccggtcaatctgaatccccagaaaacaccgcggcgcggcaggtcagtccgaacccggaaacaccgcggcgcggcctgtcaatctgaacccggaaacaccgcagcgtggcctgtcagtctgaacccggaaacacctcgacgcggccggtcaatctgaatccccggaaaacactgcggcgcggcaggtcaatccaaacccgggacatcattgctaccagggcggaggagaatacacgcaaaatataccagggcggaggggaatacacg

SEQ ID NO: 220972 - DNA, 69 bp, Homo sapiens
  chr22:50009663-50009732
  hypo
ggcggaggggaatacacgcaaaatataccagggcggaggggaatacacggaaaatataccagggcagag

SEQ ID NO: 220973 - DNA, 173 bp, Homo sapiens
  chr22:50025148-50025321
  hypo
cggggcacacgtgtttcaggacacacggaatgcaggtatttcggggcacatgtgtgtgcttcagggcacaccgggtgcaggtgttttggggcacacgtgtatttcaggacacacagtgtgcaggtgttttggggcacacgcgtgtttcagggcacgccgggtgcaggtgtttc

SEQ ID NO: 220974 - DNA, 123 bp, Homo sapiens
  chr22:50054264-50054387
  hypo
cagcctgcacagcgcagccccacaggaatctgttcaggcaaaggttctaattatcaagacatttttatttcaagcagagctcaatatttcaagttcattctgtgcctacgtttcagaaaaaaa

SEQ ID NO: 220975 - DNA, 207 bp, Homo sapiens
  chr22:50054635-50054842
  hypo
caccgcacacggcacgggttacatggaaaaggcactgagtgcggcccacaggagaggcggggatggaaccaggaccccaatgcataggctgggggacgcaccttggccacctcccgtggcgggatggttttcccaatcggagatcccagcagggcccatgctggcggctctgcctgtccctggcacggaccactcctcacctgtgga

SEQ ID NO: 220976 - DNA, 128 bp, Homo sapiens
  chr22:50169707-50169835
  hypo
taggaggggtagccgctgcacttggcccacaccaccttcagaggctccagcaccgaggcggcggcatcagtggagatccacatgctgctctggccgacttctgcggagaggggcgtcagcaggacaca

SEQ ID NO: 220977 - DNA, 73 bp, Homo sapiens; identical to SEQ ID NO: 206182
  chr22:50170510-50170583
  hypo

SEQ ID NO: 220978 - DNA, 181 bp, Homo sapiens
  chr22:50170790-50170971
  hypo
acatttgggcgcattaaagcttcgggaggaagagcagagggagtcaggcgccccgcccctgccttcagcctcactcgggcttcgtcccgtgagctgtccgccaccaagctggccacgcatcctgcctgacacccccgcggccagacgggcctgtgggtgcgcaggtctggagggagtgaac

SEQ ID NO: 220979 - DNA, 566 bp, Homo sapiens
  chr22:50171497-50172063
  hypo
accagggcacactgaagcatgactcaacgacgttacacttggaacacatcttacaaagcacgtttcacagacaggtaagacagcatcttccttttcactcccaagttcccgagcatagtccttacagtaagcagacaccaaagttactcgttaaatgaaatcaacttaacaaactgcagtcggctccgatcgtagtagtttgctgagcaccatgaagatgctcctcttgacaagcccgggtctttagacaggctctgtgaaggcaaagaaaggatgccgtgagcctgccatgggggcagatgtgcaacctgtgagtgcaaacacgggggcggcctgtccacgtgggcaccggccgcgtttgaacggaaacttcaccaggccgaaggggccaccaaagacacaaaaacatgttcacaggagcagagctccagggaataggaaatcaggttttaaaaagaaaaaaccttggttcaaaagacaagtgttaacatgaagtcaaaaatgctgacgaaacactttaaaacacaaaatccggggccatcgccgtgtctgagtgtgtctggcct

SEQ ID NO: 220980 - DNA, 214 bp, Homo sapiens
  chr22:50177742-50177956
  hypo
tgcacatggagactcgcaacaggggtctccgcaacggcagcgagtggacaaagacatccccacactctcaagccccagcacatgcacacagagactcgcagcaggggtctccgcaacggcggtgagtggacaaagacacccccgcgctctcacgccccagcacgtgcacagggagactcgcggcaggggtctccgcaacggcggcgagtagaca

SEQ ID NO: 220981 - DNA, 240 bp, Homo sapiens
  chr22:50191341-50191581
  hypo
catgctagtggctcccggaccatgctgatagggagctggcaacacagagcaggacagagtctgctagaaagagcgtcttccacctcctccggacacggcgccagttcttaccgtcttcccaggagaaaggccgccgcggtgccgcagcaggccgctcaggcaggtgcatccccgaggcctcttccaagccgatgctgtccacctcgcgccgggcctgcctcagaacaacacctccctgat

SEQ ID NO: 220982 - DNA, 95 bp, Homo sapiens
  chr22:50191626-50191721
  hypo
tgtacttcatgcagttatctataatgagatcaaaatcctcctcaaactcatggaggtttttatacccttgagcttctaaccgtttcctcattgtg

SEQ ID NO: 220983 - DNA, 113 bp, Homo sapiens
  chr22:50192075-50192188
  hypo
acgttaaataaaaacgagaattaagaacacaagggatgtactctagccaatcacacgtttcccggtcaaacggcagcacaaatccacagtcacacatgcggcaggacagacga

SEQ ID NO: 220984 - DNA, 37 bp, Homo sapiens
  chr22:50209323-50209360
  hypo
cccagaaaaccaacaaagtcacaggagggcaggaatg

SEQ ID NO: 220985 - DNA, 293 bp, Homo sapiens
  chr22:50209390-50209683
  hypo
ttcctcatacaggagagcaggcgctcctgcaggctgcgtccacccaggtgccctcccgagctcccaggcactggctggacctgccctgcagctcctccttccaatgtgtcgtcctggcgcttccttcccgagtgcccgccactccagacccgatgcaggtcaagcacagggagctgccacctgtggcctcatggcccctgccatgcctcccagtgccacccgcagcagccaactcatgcacccacactgcccgggaggcacccacacagggcctcccggtgccacccgcagca

SEQ ID NO: 220986 - DNA, 401 bp, Homo sapiens; identical to SEQ ID NO: 206186
  chr22:50246433-50246834
  hypo

SEQ ID NO: 220987 - DNA, 77 bp, Homo sapiens
  chr22:50250190-50250267
  hypo
ccaagcgcctgctgctgaagccgcctcccagctcccccgggttgtttcggaattcaggggacatgcagcctaaatga

SEQ ID NO: 220988 - DNA, 229 bp, Homo sapiens
  chr22:50250297-50250526
  hypo
ccctcgttctaggtgaaggccgcgctggaatcccggccggcttcccatccctcgttctaggtgaaggccgcgctggaatcccggccggcttcccacctctcgttctaggtgaaggccgcgctggaatcccggccggcttcccacccctcgttctaggtgaaggccgcgctggaatcccggccggcttcccacccctcgttctaggtgaaggccgcgctgcaatgccagc

SEQ ID NO: 220989 - DNA, 121 bp, Homo sapiens
  chr22:50296995-50297116
  hypo
cagggtgggggggtgcggccggggccaccatggtctcccctgagagggggtgctgtcttaggtgccccaagaggccctcgggcagcaagcgtggggtgctgccaaaatacagctccccctg

SEQ ID NO: 220990 - DNA, 86 bp, Homo sapiens
  chr22:50297146-50297232
  hypo
gacaggtgcctgggtgagcccgctgctcctgattagtcatgaatggcacctggtctgggcgacagtcacccgcaggaagccctgag

SEQ ID NO: 220991 - DNA, 322 bp, Homo sapiens
  chr22:50343413-50343735
  hypo
ccaccaggacccaggttctccgagcagaggatcagatttccggcattgctgcccgggctccacgcatccgggcctcgctcacgggtctctctatacacgggtctccactatacagaaggccgatcagtggcccctgcccctggagcagagcccctcaaccggcagggacacaggcttcccactggaggggccctggggagaagtccttggctggagaggggggtgggccgtcagaaactccccaggcgggtccagcatgctggggggcagcacaggcccagggctgggaccctctgcagtgtgggtctcgcagtgtcccccc

SEQ ID NO: 220992 - DNA, 189 bp, Homo sapiens
  chr22:50433174-50433363
  hypo
agcactcaggtgagacgatgtccaggctccagagggtggctcagcggggaagccggagagcctacgtgacccacacgagaagtcttcaagggccgaccccatggcccactgcacaggccactgctgggcacccctggctgggacctggatgtgccacttggaatgtctgagaaccgcacatcccagcag

SEQ ID NO: 220993 - DNA, 232 bp, Homo sapiens
  chr22:50529625-50529857
  hypo
tagaacacgcgctcagcggtagctggagctccagctcttggcagcgctcagatcctatgcctgtactgtaaccgtcgccccaggttcctcccgtggctgggaagctgcagtaaaggcacgttcaggactcaggaccgtggctgcagcagtggccagacggctgagggcgtgcgctgctcctgggccagacttgtctgcccagccccgaaccttttccagcaccgtgtttgtt

SEQ ID NO: 220994 - DNA, 59 bp, Homo sapiens
  chr22:50656965-50657024
  hypo
cttcagctgcagcaggaaggagaagacgccgctgtacttgctcacgcagccctcggtga

SEQ ID NO: 220995 - DNA, 566 bp, Homo sapiens
  chr22:50720225-50720791
  hypo
cagctctcagcccagacccgagcaggacccagacacccggggctgcaccgtcctcacccgggcgtggatgagcttgttgacctgcttcttgacgccacctgtgaagttctcaaaggtggggtcaggcacgtactcgaaggccccggcctctgttctgagcagggcacggtgcccgtccatctcgatcagcaccgtgaggttgtaggcctctggctcctcaggcacagccggggacaggaagacgaccttggtgtcattgtggaacacgtagtctgtacccaccacctgcaggcaagtcccagctgtcagcccccgggcgcagaccccgcccttcctgggcacgatcccatgggccggtgccagagctgagcccacgccaggactgaccgtcatgggctgcagggattcagcctcccgcggcggctgccaggactgcaggggctccgcgatgaccaccatggcaaacctctggatcaggctgaagccctgacccgtgacgttgatgctgcggccaccactgcggagggcagtgccttcgtgggctcggctggcaggggtggtccctg

SEQ ID NO: 220996 - DNA, 463 bp, Homo sapiens
  chr22:50721365-50721828
  hypo
cccgaccaggctggccccgccatcccctcagggccactcaggtctcagtaagtgcccccctccatacccagggccagggccaaccagactcagcagctggcggtgacacccacactttacacgggacgccgttgagggtcacccgcacgtcctcctgggagcccgtgtccaggtgggtgccgtggatggtcagtgtggtgccgcccgcctgcggtccctgctgcggctccacactgagaggcttgggctgctgaaagagccgcaggggcactcgggtgaggacggggcacaggacgccctcggtcctgggctggatggtaactgtcgtggggaggcggcgggcagagcccctcctcccggtcctcccgggttcggcaggtccccgaggccgggtgcttacttggaaggtgaactggacattgggaggcgaacggcccagtttcccgaagacgtccacctcgac

SEQ ID NO: 220997 - DNA, 220 bp, Homo sapiens
  chr22:50721872-50722092
  hypo
tcctggcgggcgacaggcagtgtggcccaggcactccccgacccaccccacaccctgacaccctcaccccctcagcctccccacccacccagtcacccggaaccccagcgtgggtactgacccagctgacagggcccagaccagggccgtccactcaccgggtggacacggagtaacgttccggctgaaaggagcagttccggccggccacagagatcct

SEQ ID NO: 220998 - DNA, 84 bp, Homo sapiens; identical to SEQ ID NO: 206187
  chr22:50745645-50745729
  hypo

SEQ ID NO: 220999 - DNA, 183 bp, Homo sapiens; identical to SEQ ID NO: 206188
  chr22:50765110-50765293
  hypo

SEQ ID NO: 221000 - DNA, 76 bp, Homo sapiens
  chr22:50853285-50853361
  hypo
ccttttccactgtcccgacttaactcgctcagaagcacagagcagagaggtcccttctccccgcagtctccagcct

SEQ ID NO: 221001 - DNA, 125 bp, Homo sapiens
  chr22:50864103-50864228
  hypo
cttcttctgatgctcgtcatctgatgtgcgtgtggaacggtgtctccgtgtggctgatgctcgtcatctgatgtgcgtgtggaacagtgtctccgtgtgacaagtgatgtcgagcatcttctcgt

SEQ ID NO: 221002 - DNA, 149 bp, Homo sapiens
  chr22:50873266-50873415
  hypo
cactgggcaggggccgggcacttgctctccgaagtgaacctggaggcctctgccacttggctctctgggtcgtgggtctggcaaggtcggggccaggaggccgccccgatggtgcctgttgctttcagggcagcgggtggcatgagacg

SEQ ID NO: 221003 - DNA, 307 bp, Homo sapiens; identical to SEQ ID NO: 206189
  chr22:50874004-50874311
  hypo

SEQ ID NO: 221004 - DNA, 72 bp, Homo sapiens
  chr22:50874675-50874747
  hypo
tgaccacagtagcagcgccccatcctcccggacccaggatgcacctgccggagcccccgggtgccctgcacc

SEQ ID NO: 221005 - DNA, 197 bp, Homo sapiens
  chr22:50884059-50884256
  hypo
aggtgccaggaacttcggtcaggcgccatctgtccggcctgagggaagacctggctggtttcagtggctcaagtgagcccaccctcacatctcgcccaggtgtcccaacaccacctgtggggtgggggaggtggcgggaccatgctgggcctgacagggtccaaggccatccttggcttcaacgtcccaccagggga

SEQ ID NO: 221006 - DNA, 360 bp, Homo sapiens
  chr22:50885486-50885846
  hypo
ctgtaaacatggccggggcggccctgcccacccctagtggtcggtaacgaccggaagcagagcagccgggcagggctgggaggctcaggcgtccgacaggcagctctggatccggtccacccactgctgggccgagggcacgtcctgggcacagaagttgtaaacgcgacgcgttgtcttcacctggggaagggcgggttactgactccgcagcccccacaccgcagagcccctcccctctcccaagccccggccaaggctcacgtcaaagaaggccttctcgtccacagtcttaggggcacccatagtgggcgtgccaggtgccacagcctccacctccgccaagtcgatgacaccctt

SEQ ID NO: 221007 - DNA, 344 bp, Homo sapiens
  chr22:50894558-50894902
  hypo
aagcaaacctagacccgtccacttggctctacccaaggggagggcccagcaccaaggcgggcagagggacggggcagtgcagagacctggatcagccactctgagtcctccagtgagcgcaggaaggaggctgggctgggctcagcagcggggcagcctgggacacatgctttcagcagcttcttgaagctagccttcacctgccgtgcctcgaatacctcaatgggcaccagctcccactgctgcagggggtctgaccgcacaccctgaaaagaatccggacaagtcccgtgagacacatgaggccccaagccccctgccgagcccccaccctcaccccccac

SEQ ID NO: 221008 - DNA, 404 bp, Homo sapiens
  chr22:50894962-50895366
  hypo
ctgcggacgcaggaagcccgggtcgggagggcccccgttggcctggggtggggccagcgcgtctctgccagctagccgggagcccacatcggtgccaaggccactgctgcgtccactggtccggacactgccccacttacctgtgaaggagatgccaggtaagcacccaaagggggccagggcaccacttacctggggctggctgggcccggcctccagggagggggctgagctcccagggcaggggtggttggcaggaccccagcagggccgtgcgagaggagggctggaacacacagattctgagacgtggggtggcagccagtgttagtttctagggcaggactcacgggtcagggaggtaaggactggggctcgggagacgggtcgttagtgtcaggtgt

SEQ ID NO: 221009 - DNA, 147 bp, Homo sapiens
  chr22:50899708-50899855
  hypo
tccccaacttaggacaggccaggcagagtcagaagcaaggaaggtaagggggggggggtcccagaatctcagggtaccacagttatggggaatcccaagtgggtggggaaggagcagacaaaggcccgtttcccacgggcacccaga

SEQ ID NO: 221010 - DNA, 287 bp, Homo sapiens
  chr22:50899915-50900202
  hypo
gagggggcgacagggccagagagtctgcaggctcacccagggggtccgtgggcatccccgtgaagatgacccggtacgtggtgaggaagacggcgccctcagctgggagcaatgctggtcccccagcactgccccccgcgccctcctcacgcccatccggcagcaggtagacgcgcaggccgtccagcacacactcctcacccggcagcaggcgcggccgcagcagcttgggctgctcgaaaacaagagcaggagctcaggatgcagcccgggccttgggcccccgc

SEQ ID NO: 221011 - DNA, 43 bp, Homo sapiens
  chr22:50900232-50900275
  hypo
tgggcggcagcctccggctctcccgctgcacggcctccagggt

SEQ ID NO: 221012 - DNA, 214 bp, Homo sapiens
  chr22:50922391-50922605
  hypo
tctgctatttagcgaacactgagcatttaatttacaaatgtttgctagggtcaccctctcggccatcccacgagggtcgccatgatcaccccaactctagaggccgcagcagagctcaggacattcccccacagagcttgcccctcagttcctacctccaagggggagggtcctggaagcgcccacccaggcgccgcccctgtgcttgctcccc

SEQ ID NO: 221013 - DNA, 116 bp, Homo sapiens
  chr22:50922663-50922779
  hypo
acggtccaggctggtcctgccctgtggaggcctccgtgcactgagagatgtactaggattgcagcaaaggtggtcagggtgatgggccgcacagcgaggcagtcaaggccagctcc

SEQ ID NO: 221014 - DNA, 374 bp, Homo sapiens
  chr22:50942719-50943093
  hypo
cttacccctgcaccccgggctccacaccccacccggtgcccagccttacccctgctccccaggctgggagaaccagtacttgtagcgctgggctcggacgtaggtgggcggctgcttgtggaagggatacctggccacttggctctggacaaggcggatcactgcagcgagaggcatcagcgtggcccccacagtacccgccctgcccctcccctccccaccccgctccaccccagcccactccacaccccccaagcccgctccgcacctggctccttgccctgcagcaggcgcaagaccaggcttgtgaaccacgggctgtgcgtgtgtgggcccagggctgcaaaccacatctgccagtccaggcgtggctg

SEQ ID NO: 221015 - DNA, 175 bp, Homo sapiens
  chr22:50943412-50943587
  hypo
cctggagacaggtgggaggttctcagggctgccctgcccccagcccatcccccagccctgcagcgctacccaccaggctaatcaggaacaaggccacggtcgcagtgcccacaagggacagttggactacagcactgagcttccgtagccagccccgcacctgggtccacctgtg

SEQ ID NO: 221016 - DNA, 204 bp, Homo sapiens
  chr22:50944161-50944365
  hypo
agcagcgcagtggtaagcaccagcgtcatcaggttgaagaagttgtagttgccggtgatgataatcaggacctgcagcagcacctgggggcggcccgctctcagtgctcccggagactgacgcctggccccgtggcaggcacccacctccaccctgcagggtgcatccctctgctacaaggccttcccaacagcggttgccagc

SEQ ID NO: 221017 - DNA, 124 bp, Homo sapiens
  chr22:50944716-50944840
  hypo
tgagcccccaccacgcagggcagcggctggtcagcttgaccacgcctgaggcgaacatgaggcggaacagcagccatcgcaccagccagaaggggaggtcttcgtggggcagggcccctgcctg

SEQ ID NO: 221018 - DNA, 639 bp, Homo sapiens; identical to SEQ ID NO: 206191
  chr22:50970392-50971031
  hypo

SEQ ID NO: 221019 - DNA, 78 bp, Homo sapiens
  chr22:51023316-51023394
  hypo
ttacctagcagagggcggagcgtatacattgatcccaggcctttggtaccatatgtaaggaagcgcaaagtagaaacc

SEQ ID NO: 221020 - DNA, 77 bp, Homo sapiens; identical to SEQ ID NO: 206194
  chr22:51112317-51112394
  hypo

SEQ ID NO: 221021 - DNA, 269 bp, Homo sapiens
  chr22:51149171-51149440
  hypo
caccttaattttcagcgacacctgaacttgttttctatggggttttgccttttttctgaacaaacgtttgactgagccaagcatgatggagttgtgcatatctgtgtgtgtgtgcgtgtctgtgcgttggtgagcggacacgcgctgtctgcacctgcgtgcatgcggcacacatgtctgtgcgtgggtgagtggacacgtgctgtgtgcacctgcatgcgtgtggcacacgtgtgtgcatgggtgagcggatacgcactgtgtgcgcc

SEQ ID NO: 221022 - DNA, 218 bp, Homo sapiens
  chr22:51160332-51160550
  hypo
gaggaggctgacacacgcagctccagcgacccccacctggagaccacaagcaccatctccacggtgtccagcatgtccaccttgagctcggagagcggggaactcactgacacccacacctccttcgctgacggacacacttttctactcgagaagccaccagtgcctcccaagcccaagctcaagtccccgctggggaaggggccggtgaccttcag

SEQ ID NO: 221023 - DNA, 198 bp, Homo sapiens
  chr22:51171376-51171574
  hypo
cagactgccacatacacactcggtctcacactcacctgtgggttttggttccgttcaatttgggtttttaactttacagggtcagttccgcttcacctccttttgtatggagttccatccggggggtttcaccccctgctccagtcctgaggcctcctgaccctgacgttgtgatacgccccacagagatctatgttt

SEQ ID NO: 221024 - DNA, 129 bp, Homo sapiens; identical to SEQ ID NO: 206196
  chrX:2846678-2846807
  hypo

SEQ ID NO: 221025 - DNA, 156 bp, Homo sapiens; identical to SEQ ID NO: 206197
  chrX:2846856-2847012
  hypo

SEQ ID NO: 221026 - DNA, 241 bp, Homo sapiens; identical to SEQ ID NO: 206206
  chrX:9433471-9433712
  hypo

SEQ ID NO: 221027 - DNA, 44 bp, Homo sapiens; identical to SEQ ID NO: 206208
  chrX:10023769-10023813
  hypo

SEQ ID NO: 221028 - DNA, 715 bp, Homo sapiens
  chrX:10085163-10085878
  hypo
cctgtgtgccagcaccctgacggtgtcctcggggagcagccgcgggtccctagcctccagccgtgggtctctggcctccagccggggctccctgagctcggtcagcttcacggacatctacggcctcccgcagtacgagaagcccgacgctgagggcagccagcttctacgcttcgacctcattcccttcgactctctggggcgagatgctcccttttcagagcccccaggcccctcgggcttccacaagcagaggcggtccctggacacgccccagtccctggcatcgctgtcctcccgctcctcgctgtcctcgctgtcgcccccaagctcgcccctggacacgcccttcctccctgcctcacgggactcgccgctggcgcagctggcggacagctgtgaggggccaggcctgggcgccctagacagactgcgggcacacgcctcggctatgggggacgaagacttaccaggcatggcggcccttcagccacacggggtccccggggatggggaagggccgcacgagcgaggacccccaccagccagcgctcccgtgggtggaagtaagtgcggatgtggcctcctgcggggcgagggttacctgcagggcggaaactgtggggtccagagtgaggatggctggctttccaggtccatggtgagctttacgtttaggaatattgatgtgatcgggaagagcacacacctgctc

SEQ ID NO: 221029 - DNA, 115 bp, Homo sapiens
  chrX:11783710-11783825
  hypo
tgcagtctctgaggcggtccacgcgccacagtgccaactgtgacaggctttctgagagcagcgcttcacctcagcccaagcgccggcagcaggacacatccgccagcatgcccaa

SEQ ID NO: 221030 - DNA, 42 bp, Homo sapiens
  chrX:13062333-13062375
  hypo
cagggactgcccattcgccagcctggacgcccaggggacccc

SEQ ID NO: 221031 - DNA, 134 bp, Homo sapiens; identical to SEQ ID NO: 206213
  chrX:15808573-15808707
  hypo

SEQ ID NO: 221032 - DNA, 99 bp, Homo sapiens; identical to SEQ ID NO: 206214
  chrX:15809046-15809145
  hypo

SEQ ID NO: 221033 - DNA, 82 bp, Homo sapiens; identical to SEQ ID NO: 206215
  chrX:15817994-15818076
  hypo

SEQ ID NO: 221034 - DNA, 122 bp, Homo sapiens; identical to SEQ ID NO: 206216
  chrX:15821797-15821919
  hypo

SEQ ID NO: 221035 - DNA, 87 bp, Homo sapiens; identical to SEQ ID NO: 206217
  chrX:15822233-15822320
  hypo

SEQ ID NO: 221036 - DNA, 39 bp, Homo sapiens; identical to SEQ ID NO: 206218
  chrX:15826355-15826394
  hypo

SEQ ID NO: 221037 - DNA, 122 bp, Homo sapiens; identical to SEQ ID NO: 206219
  chrX:15827322-15827444
  hypo

SEQ ID NO: 221038 - DNA, 214 bp, Homo sapiens; identical to SEQ ID NO: 206220
  chrX:15833799-15834013
  hypo

SEQ ID NO: 221039 - DNA, 56 bp, Homo sapiens; identical to SEQ ID NO: 206221
  chrX:15836709-15836765
  hypo

SEQ ID NO: 221040 - DNA, 110 bp, Homo sapiens; identical to SEQ ID NO: 206222
  chrX:15838329-15838439
  hypo

SEQ ID NO: 221041 - DNA, 535 bp, Homo sapiens; identical to SEQ ID NO: 206223
  chrX:15840848-15841383
  hypo

SEQ ID NO: 221042 - DNA, 224 bp, Homo sapiens; identical to SEQ ID NO: 206224
  chrX:16730628-16730852
  hypo

SEQ ID NO: 221043 - DNA, 56 bp, Homo sapiens; identical to SEQ ID NO: 206225
  chrX:16730902-16730958
  hypo

SEQ ID NO: 221044 - DNA, 36 bp, Homo sapiens
  chrX:16736864-16736900
  hypo
tgagccaccgcactcggactatttttcattctttta

SEQ ID NO: 221045 - DNA, 92 bp, Homo sapiens
  chrX:18239018-18239110
  hypo
ggagcctggaccacgtctccgcggctgcgcagtagcgcttggcatgcgtgcgtgactcctgggggtcaaagggcctcgccctctcccccact

SEQ ID NO: 221046 - DNA, 31 bp, Homo sapiens
  chrX:19530839-19530870
  hypo
gggctgggattacaggcgtgagccactgcac

SEQ ID NO: 221047 - DNA, 221 bp, Homo sapiens
  chrX:20135284-20135505
  hypo
cgtacgggcgtgcacgcgtccttacacgctgctgtacacagtgcacacacagaaggcgtgcgtacgcacacagttcttcatacgatgcttacatgcaacatgcacacacaacgtgcacacccagcgtaaatgcatcttctcacagtagcagatacacactcaaagcgtgtgtagatgtagggtgcagtttctcagacaccgtgcacacacatcctcactca

SEQ ID NO: 221048 - DNA, 52 bp, Homo sapiens
  chrX:20160884-20160936
  hypo
tgctgggattacaggcgtcagccaccgtgcccagccggttagctcataacgc

SEQ ID NO: 221049 - DNA, 70 bp, Homo sapiens; identical to SEQ ID NO: 206227
  chrX:27999798-27999868
  hypo

SEQ ID NO: 221050 - DNA, 1155 bp, Homo sapiens; identical to SEQ ID NO: 206230
  chrX:39910498-39911653
  hypo

SEQ ID NO: 221051 - DNA, 157 bp, Homo sapiens; identical to SEQ ID NO: 206231
  chrX:39913138-39913295
  hypo

SEQ ID NO: 221052 - DNA, 78 bp, Homo sapiens; identical to SEQ ID NO: 206232
  chrX:39913508-39913586
  hypo

SEQ ID NO: 221053 - DNA, 146 bp, Homo sapiens; identical to SEQ ID NO: 206233
  chrX:39914620-39914766
  hypo

SEQ ID NO: 221054 - DNA, 167 bp, Homo sapiens; identical to SEQ ID NO: 206234
  chrX:39916407-39916574
  hypo

SEQ ID NO: 221055 - DNA, 273 bp, Homo sapiens; identical to SEQ ID NO: 206235
  chrX:39921382-39921655
  hypo

SEQ ID NO: 221056 - DNA, 326 bp, Homo sapiens; identical to SEQ ID NO: 206236
  chrX:39921998-39922324
  hypo

SEQ ID NO: 221057 - DNA, 345 bp, Homo sapiens; identical to SEQ ID NO: 206237
  chrX:39922860-39923205
  hypo

SEQ ID NO: 221058 - DNA, 264 bp, Homo sapiens; identical to SEQ ID NO: 206238
  chrX:39923588-39923852
  hypo

SEQ ID NO: 221059 - DNA, 187 bp, Homo sapiens; identical to SEQ ID NO: 206239
  chrX:39930225-39930412
  hypo

SEQ ID NO: 221060 - DNA, 54 bp, Homo sapiens; identical to SEQ ID NO: 206240
  chrX:39930889-39930943
  hypo

SEQ ID NO: 221061 - DNA, 2832 bp, Homo sapiens; identical to SEQ ID NO: 206241
  chrX:39931601-39934433
  hypo

SEQ ID NO: 221062 - DNA, 79 bp, Homo sapiens; identical to SEQ ID NO: 206242
  chrX:39935706-39935785
  hypo

SEQ ID NO: 221063 - DNA, 126 bp, Homo sapiens; identical to SEQ ID NO: 206243
  chrX:39937096-39937222
  hypo

SEQ ID NO: 221064 - DNA, 1847 bp, Homo sapiens; identical to SEQ ID NO: 206245
  chrX:39955009-39956856
  hypo

SEQ ID NO: 221065 - DNA, 464 bp, Homo sapiens; identical to SEQ ID NO: 206259
  chrX:40035057-40035521
  hypo

SEQ ID NO: 221066 - DNA, 461 bp, Homo sapiens; identical to SEQ ID NO: 206260
  chrX:40036121-40036582
  hypo

SEQ ID NO: 221067 - DNA, 43 bp, Homo sapiens
  chrX:40631517-40631560
  hypo
cgacagagtgcccagagactccgtctcaaaaaaaaaaaaaaaa

SEQ ID NO: 221068 - DNA, 310 bp, Homo sapiens
  chrX:41331751-41332061
  hypo
tccaaggattcttgagctatggaacactcctggatttcaagaacctctgactacaggggggctctgcgtccatcaggggcaaagccacggctgagaccatcagggcctcggggcagccggagcacaggcacaggaaaggtcactggagcctgcattgtcttggcgaggtccgtggctactgtgcgcgcccccacttccgccggcaccccgcagtagaggccagggcaggccccgagccgcggagcctgggttccgcctgcgccaccgccaccaacccacgtgtcacgggcaaatttatttatttatttat

SEQ ID NO: 221069 - DNA, 32 bp, Homo sapiens
  chrX:44730007-44730039
  hypo
ctgagacggagtctcgctctgtcacccaggct

SEQ ID NO: 221070 - DNA, 36 bp, Homo sapiens
  chrX:44760627-44760663
  hypo
ggacttgttttagtggcctaacgtggtttgtcacgg

SEQ ID NO: 221071 - DNA, 88 bp, Homo sapiens
  chrX:44922874-44922962
  hypo
gtagcacatcaagaacgctgggaagtacagacactattttgataggcaataatcatataacaggaagtggaagtaatggaaacgtgcc

SEQ ID NO: 221072 - DNA, 31 bp, Homo sapiens
  chrX:44923014-44923045
  hypo
agcagcgcagaggagccgtggaaaaaccaac

SEQ ID NO: 221073 - DNA, 218 bp, Homo sapiens
  chrX:70797924-70798142
  hypo
aacaaggctcgcttatccaagttctcgcaggataaaagtttgttatgaacgatttcacatggtttctctttatcagaaagttgttagggacttttaatcgcagaattggcctcgggtgcccacgctctagtattgaaatggcggttttgggacaaataagcaacatccgtgggagtggaaagcgacagacctgatcccggaagcgttacagctaggcg

SEQ ID NO: 221074 - DNA, 76 bp, Homo sapiens
  chrX:71485135-71485211
  hypo
aaaaacaaaaattcaaaaaaaaaaccccacaaaaaacatatatatgtaagttttgacagagcgagactgtctcaaa

SEQ ID NO: 221075 - DNA, 562 bp, Homo sapiens; identical to SEQ ID NO: 206269
  chrX:73163983-73164545
  hypo

SEQ ID NO: 221076 - DNA, 98 bp, Homo sapiens; identical to SEQ ID NO: 134582
  chrX:123094335-123094433
  hypo

SEQ ID NO: 221077 - DNA, 223 bp, Homo sapiens; identical to SEQ ID NO: 206276
  chrX:123094493-123094716
  hypo

SEQ ID NO: 221078 - DNA, 124 bp, Homo sapiens; identical to SEQ ID NO: 206277
  chrX:123095161-123095285
  hypo

SEQ ID NO: 221079 - DNA, 151 bp, Homo sapiens; identical to SEQ ID NO: 206278
  chrX:123095555-123095706
  hypo

SEQ ID NO: 221080 - DNA, 65 bp, Homo sapiens; identical to SEQ ID NO: 206279
  chrX:123155216-123155281
  hypo

SEQ ID NO: 221081 - DNA, 141 bp, Homo sapiens; identical to SEQ ID NO: 206280
  chrX:123156380-123156521
  hypo

SEQ ID NO: 221082 - DNA, 79 bp, Homo sapiens; identical to SEQ ID NO: 206281
  chrX:123159689-123159768
  hypo

SEQ ID NO: 221083 - DNA, 165 bp, Homo sapiens; identical to SEQ ID NO: 206282
  chrX:123164810-123164975
  hypo

SEQ ID NO: 221084 - DNA, 97 bp, Homo sapiens; identical to SEQ ID NO: 206283
  chrX:123171376-123171473
  hypo

SEQ ID NO: 221085 - DNA, 77 bp, Homo sapiens; identical to SEQ ID NO: 206284
  chrX:123176418-123176495
  hypo

SEQ ID NO: 221086 - DNA, 205 bp, Homo sapiens; identical to SEQ ID NO: 206285
  chrX:123179013-123179218
  hypo

SEQ ID NO: 221087 - DNA, 152 bp, Homo sapiens; identical to SEQ ID NO: 206286
  chrX:123181203-123181355
  hypo

SEQ ID NO: 221088 - DNA, 74 bp, Homo sapiens; identical to SEQ ID NO: 206287
  chrX:123182854-123182928
  hypo

SEQ ID NO: 221089 - DNA, 135 bp, Homo sapiens; identical to SEQ ID NO: 206288
  chrX:123184024-123184159
  hypo

SEQ ID NO: 221090 - DNA, 278 bp, Homo sapiens; identical to SEQ ID NO: 206289
  chrX:123184966-123185244
  hypo

SEQ ID NO: 221091 - DNA, 108 bp, Homo sapiens; identical to SEQ ID NO: 206290
  chrX:123189977-123190085
  hypo

SEQ ID NO: 221092 - DNA, 112 bp, Homo sapiens; identical to SEQ ID NO: 206291
  chrX:123191715-123191827
  hypo

SEQ ID NO: 221093 - DNA, 131 bp, Homo sapiens; identical to SEQ ID NO: 206292
  chrX:123195073-123195204
  hypo

SEQ ID NO: 221094 - DNA, 104 bp, Homo sapiens; identical to SEQ ID NO: 206293
  chrX:123195620-123195724
  hypo

SEQ ID NO: 221095 - DNA, 306 bp, Homo sapiens; identical to SEQ ID NO: 206294
  chrX:123196749-123197055
  hypo

SEQ ID NO: 221096 - DNA, 213 bp, Homo sapiens; identical to SEQ ID NO: 206295
  chrX:123197688-123197901
  hypo

SEQ ID NO: 221097 - DNA, 71 bp, Homo sapiens; identical to SEQ ID NO: 206296
  chrX:123199725-123199796
  hypo

SEQ ID NO: 221098 - DNA, 262 bp, Homo sapiens; identical to SEQ ID NO: 206297
  chrX:123200024-123200286
  hypo

SEQ ID NO: 221099 - DNA, 93 bp, Homo sapiens; identical to SEQ ID NO: 206298
  chrX:123202413-123202506
  hypo

SEQ ID NO: 221100 - DNA, 175 bp, Homo sapiens; identical to SEQ ID NO: 206299
  chrX:123204998-123205173
  hypo

SEQ ID NO: 221101 - DNA, 140 bp, Homo sapiens; identical to SEQ ID NO: 206300
  chrX:123210181-123210321
  hypo

SEQ ID NO: 221102 - DNA, 102 bp, Homo sapiens; identical to SEQ ID NO: 206301
  chrX:123211806-123211908
  hypo

SEQ ID NO: 221103 - DNA, 150 bp, Homo sapiens; identical to SEQ ID NO: 206302
  chrX:123215228-123215378
  hypo

SEQ ID NO: 221104 - DNA, 133 bp, Homo sapiens; identical to SEQ ID NO: 206303
  chrX:123217270-123217403
  hypo

SEQ ID NO: 221105 - DNA, 224 bp, Homo sapiens; identical to SEQ ID NO: 206304
  chrX:123220396-123220620
  hypo

SEQ ID NO: 221106 - DNA, 390 bp, Homo sapiens; identical to SEQ ID NO: 206305
  chrX:123224424-123224814
  hypo

SEQ ID NO: 221107 - DNA, 127 bp, Homo sapiens; identical to SEQ ID NO: 206306
  chrX:123227867-123227994
  hypo

SEQ ID NO: 221108 - DNA, 78 bp, Homo sapiens; identical to SEQ ID NO: 206307
  chrX:123229221-123229299
  hypo

SEQ ID NO: 221109 - DNA, 2083 bp, Homo sapiens; identical to SEQ ID NO: 206308
  chrX:123234423-123236506
  hypo

SEQ ID NO: 221110 - DNA, 136 bp, Homo sapiens; identical to SEQ ID NO: 206309
  chrX:129139163-129139299
  hypo

SEQ ID NO: 221111 - DNA, 91 bp, Homo sapiens; identical to SEQ ID NO: 206310
  chrX:129146553-129146644
  hypo

SEQ ID NO: 221112 - DNA, 3264 bp, Homo sapiens; identical to SEQ ID NO: 206311
  chrX:129146925-129150189
  hypo

SEQ ID NO: 221113 - DNA, 177 bp, Homo sapiens; identical to SEQ ID NO: 206312
  chrX:129154948-129155125
  hypo

SEQ ID NO: 221114 - DNA, 81 bp, Homo sapiens; identical to SEQ ID NO: 206313
  chrX:129156871-129156952
  hypo

SEQ ID NO: 221115 - DNA, 392 bp, Homo sapiens; identical to SEQ ID NO: 206314
  chrX:129158962-129159354
  hypo

SEQ ID NO: 221116 - DNA, 227 bp, Homo sapiens; identical to SEQ ID NO: 206315
  chrX:129162609-129162836
  hypo

SEQ ID NO: 221117 - DNA, 222 bp, Homo sapiens; identical to SEQ ID NO: 206316
  chrX:129168429-129168651
  hypo

SEQ ID NO: 221118 - DNA, 167 bp, Homo sapiens; identical to SEQ ID NO: 206317
  chrX:129171341-129171508
  hypo

SEQ ID NO: 221119 - DNA, 148 bp, Homo sapiens; identical to SEQ ID NO: 206318
  chrX:129173111-129173259
  hypo

SEQ ID NO: 221120 - DNA, 78 bp, Homo sapiens; identical to SEQ ID NO: 206319
  chrX:129184691-129184769
  hypo

SEQ ID NO: 221121 - DNA, 157 bp, Homo sapiens; identical to SEQ ID NO: 206320
  chrX:129185834-129185991
  hypo

SEQ ID NO: 221122 - DNA, 2230 bp, Homo sapiens; identical to SEQ ID NO: 206321
  chrX:129189828-129192058
  hypo

SEQ ID NO: 221123 - DNA, 156 bp, Homo sapiens; identical to SEQ ID NO: 206323
  chrX:133507341-133507497
  hypo

SEQ ID NO: 221124 - DNA, 184 bp, Homo sapiens; identical to SEQ ID NO: 206324
  chrX:133511601-133511785
  hypo

SEQ ID NO: 221125 - DNA, 102 bp, Homo sapiens; identical to SEQ ID NO: 206325
  chrX:133512034-133512136
  hypo

SEQ ID NO: 221126 - DNA, 134 bp, Homo sapiens; identical to SEQ ID NO: 206326
  chrX:133527530-133527664
  hypo

SEQ ID NO: 221127 - DNA, 44 bp, Homo sapiens; identical to SEQ ID NO: 206327
  chrX:133527938-133527982
  hypo

SEQ ID NO: 221128 - DNA, 479 bp, Homo sapiens; identical to SEQ ID NO: 206328
  chrX:133547517-133547996
  hypo

SEQ ID NO: 221129 - DNA, 277 bp, Homo sapiens; identical to SEQ ID NO: 206329
  chrX:133549045-133549322
  hypo

SEQ ID NO: 221130 - DNA, 134 bp, Homo sapiens; identical to SEQ ID NO: 206330
  chrX:133551198-133551332
  hypo

SEQ ID NO: 221131 - DNA, 130 bp, Homo sapiens; identical to SEQ ID NO: 206331
  chrX:133559230-133559360
  hypo

SEQ ID NO: 221132 - DNA, 3132 bp, Homo sapiens; identical to SEQ ID NO: 206332
  chrX:133559690-133562822
  hypo

SEQ ID NO: 221133 - DNA, 40 bp, Homo sapiens
  chrY:5077817-5077857
  hypo
tttaatttgtcaggccgggtgtggtggctcacgcttgtaa

SEQ ID NO: 221134 - DNA, 79 bp, Homo sapiens
  chrY:7525418-7525497
  hypo
ggcagcagggggtgcgcgacgggctacagggggcggggaacaggggatccagtccaggggcacacggggtcagccagga

SEQ ID NO: 221135 - DNA, 148 bp, Homo sapiens
  chrY:14777103-14777251
  hypo
tatgtatatatgacttttcatctacacttggagaaaatttttataatgactacataatggcaaaaacattgtatttgagaatctacgtaataaagaagtgatttttaacagattttatttaacttattgagaccgtaaaccacccgtg

SEQ ID NO: 221136 - DNA, 135 bp, Homo sapiens
  chrY:15015981-15016116
  hypo
tatgctcataaagcgcaggcacaccggtagaaaaactagaggggtctggagttcctaggtgaaccccagcagcctaaccctgtcaagtctgtcgagcctctggctggtcacacgtgctgcggaatccactcagct

SEQ ID NO: 221137 - DNA, 180 bp, Homo sapiens
  chrY:15446038-15446218
  hypo
agaccagagctctaagcctttgcagcctccacattttgcactggccccctggctcccacctttatgaactcttgtctcttctcatttctttgtcaccattgaacttcaggtacccacgggtggtgatgaggctggaccccaacacgcagcaaaagaaactatcatcggaccgaacaggca

SEQ ID NO: 221138 - DNA, 360 bp, Homo sapiens; identical to SEQ ID NO: 206344
  chrY:16636061-16636421
  hypo

SEQ ID NO: 221139 - DNA, 616 bp, Homo sapiens; identical to SEQ ID NO: 206345
  chrY:16636541-16637157
  hypo

SEQ ID NO: 221140 - DNA, 152 bp, Homo sapiens
  chrY:21226202-21226354
  hypo
aagcagtagcaaggccgggcagaagcagccatggcggcacaatcagggactagcgtcacacgcacatcacacccttctgatccattatatttatttcctttttttttttttgagatgatgtcttcttctgtcccctacgctggagggcaatg

SEQ ID NO: 221141 - DNA, 55 bp, Homo sapiens
  chrY:23568831-23568886
  hypo
cagaccaaaggcctgcggggtagccctgccccacactctccgtgctcttgcaaag

SEQ ID NO: 221142 - DNA, 258 bp, Homo sapiens
  AC153808.1_1-20788:20324-20582
  hypo
tgcccctcacctgcacggcaggtgtcttccctgagaccactcacctctccgccgagcatggtaactgcctggccccaagtccttcctgctaggcagccacagcaacccaagggtggacaccaagctggtgttgttcttcactgagtccttaacgcctagggagggtgtcgccacgtgggcagctctgactacgcgtctactgaatgaacacgtgaaagaatgaagacaggccgggcgcggtggctcacacctataatc

SEQ ID NO: 221143 - DNA, 246 bp, Homo sapiens
  AEKP01149809.1_1-6354:1325-1571
  hypo
aactgtcctggatacagagccgtcccgggtacaacaccgtcctgcgtacagagccgtcccggatacagagccgtcctgggtacagagccttcacgggtacagaactgtcctggacacagagccgtcccaggtacagagccgtcccgggtacagagccgtcccgggtacaacaccatcctgcgtacagagccgtcctggatacagagccatcccggatacagagccgtcctgggtacagagccttca

SEQ ID NO: 221144 - DNA, 116 bp, Homo sapiens
  AEKP01166227.1_44013-111583:41310-41426
  hypo
accagggaaatacaacggaaaacaataagctatctttccttggaagaacggctgaggggctgggccaccttttaattaccttttccctgtgaatggtcctccgctacaagttaccg

SEQ ID NO: 221145 - DNA, 82 bp, Homo sapiens
  AEKP01172922.1_98-3151:2030-2112
  hypo
ctctgtgtgtgccccgcgtgtgttgtgtggatgtgtcatgtgtgttgtgtgtggtgtgtgtgtatcgtgagtggtgtgtgtg

SEQ ID NO: 221146 - DNA, 80 bp, Homo sapiens
  AEKP01221093.1_87-1602:655-735
  hypo
ccaagcaccctacccacctgcggttctcccaccgggggcttttaagagccagggagcgagggccatccccgtgctccagc

SEQ ID NO: 221147 - DNA, 120 bp, Homo sapiens
  AEKP01221093.1_87-1602:855-975
  hypo
ctccgcacctgggcaaaagccgggaggacggggacccgcagcacaaaggcctgccgggaccttgtgtggtgggacagcctgggaatgctcaaacggggccacagggtcaaggtgtgcttg

SEQ ID NO: 221148 - DNA, 32 bp, Homo sapiens
  GL000195.1:80192-80224
  hypo
atcctgttgagaggtgacagcgtgctggcagt

SEQ ID NO: 221149 - DNA, 116 bp, Homo sapiens
  NW_001838014.1_249000-295694:3953-4069
  hypo
ttctagaatgaacaaggctgcgtgtggatcccacagacagacacccttgggtggccccgaggacgcgggagaaagtcccccttcccagaccggtctcgatctcatgggatcaagtt

SEQ ID NO: 221150 - DNA, 54 bp, Homo sapiens
  NW_001838014.1_249000-295694:7052-7106
  hypo
aatgtccttcaaatgcagcccgctccgtcccacacgccactcccagaaatgtat

SEQ ID NO: 221151 - DNA, 158 bp, Homo sapiens
  NW_001838056.1_145425-224902:38581-38739
  hypo
cgctcgcgtctcccgcatgcgcattggttgggccgactggcgctccgctactggctgtcaggctgagtcacctttaaataatgccgccgccacgcagcggcagcgaggctcctgctgcagccgaggcggcagctggatcccgggtccagtttgggtcg

SEQ ID NO: 221152 - DNA, 212 bp, Homo sapiens
  NW_001838286.2_1380778-1470498:80826-81038
  hypo
gcagcaaaaagctgtagctgcgggggcaaaaagccatggcagcgggaggcaaaaagccgcaaaaacagcggcagccagaacaaacaccaaggcggcaaaaagcctcagtggcgggggctaaaagccaaggcggcggggagtaaaatgcctcaaaaagccgtggtggcgagggcagaaagctgtggcttcggggacaagaagccatagcggcg

SEQ ID NO: 221153 - DNA, 780 bp, Homo sapiens
  NW_001838286.2_1380778-1470498:81098-81878
  hypo
tggcggggcaaaaagccacggcggcaagggcaaaaagttgtggcttcgggggcaaaaaaccatagcagcggggcaaaaagcagtggtggcggcggggccagaaaaaccacaaaatcccgcggcgatggggggaaaagctgcaggggcaaaaagccgcagcagcagggggaaaaaagccgtaaaaagcagcagcggcgggggggcaaaaaccgtggcggcaaaaagcctcagcggcaggagcaaaaagccatggcggcaggggcaaaaaccgcagtggaaagaagactcagtggcaggagcaaaaacgatggctgtggggggcaaaaagccatgactgcaaaaactgcggagtgtgagcccaaaaagccatggcggtggggataaaaagccacagctgcaaaaagcagcggtggtggggataaaaagccgtggcggcaaaaacccgcagcagcacaggcaaaaagccgtggcagcaggggcaaaaagccacggtggcaggggcaaaaagccgcggcggtgagggcagaaagctgtggcttcgggggcaaataaacacggcggccaaaagccgtagtggcagggcaaaaagctgcagcagtgggggcaaaaagcagcgggagcgggtgcaaaaacccacaaaaacccatggcaacgggaggaaaaagccatggtggcaaaaagccacagtggcggggggtaaaaagccatggcggtgagggggcaaaaagccacaaaaagcagcgtcggcggggacaaaaaccacggcggcaaaaagcctca

SEQ ID NO: 221154 - DNA, 112 bp, Homo sapiens; identical to SEQ ID NO: 206354
  NW_001838402.2_289580-297926:6069-6181
  hypo

SEQ ID NO: 221155 - DNA, 97 bp, Homo sapiens
  NW_001838987.1_19978397-19979692:120-217
  hypo
acctggccatgaagatatttttctaaacattagttcatctctttattattgaagatgactttgtctgtctttagctgtcttacgaaagtattcttca

SEQ ID NO: 221156 - DNA, 142 bp, Homo sapiens
  NW_001838993.2_42143-59442:15877-16019
  hypo
ttcacacccagaatgcgggttctgggctcaggtgtgctggttgctcctgccccatgacgctcccgggagaggggactgtggcagtgcctctgcctaacgtgggccaccgtcagagcacctgcggccccgatggttgccacgg

SEQ ID NO: 221157 - DNA, 144 bp, Homo sapiens
  NW_001839646.1_1-5206:1404-1548
  hypo
tccatggtggcagctgggaggctgcaggggcacgggcgtgccagcgagggtggcgcggaggcgcagaggatgcaagccaccgaagggatgtcaggaatggacgttgcacgggcccagtgtttcgagggaaaggggtctccacac

SEQ ID NO: 221158 - DNA, 300 bp, Homo sapiens
  NW_001839646.1_1-5206:2128-2428
  hypo
gcacctgggaggacgccgggatgcctagcatctgcccctgacgggcagaggcctctggggcactggctggcgaggtggggcttccccggcttggggttctcacgccgccccagcgacctgcggacaccggccacagccccgcgacggactcccctgggacaccggtggcgcaagcacaacttggccctgtggccccgcctgagcgggcccaggctgtcccaccgagcaatggcccagcaagatatcgcgctgcggatcctggtcctcccggcttttgcccaggtgcggaggctactgaag

SEQ ID NO: 221159 - DNA, 144 bp, Homo sapiens
  NW_001839689.1_34352-41752:1478-1622
  hypo
aaattccagaaggggatgcccgcgatggccctctcgaaaccttctgacggcacccttcccccggaaacccggggacgggaacggcaaaggagactcatttggaccccaaggcaaagcgaggcactgcaagcctgctttgagcgg

SEQ ID NO: 221160 - DNA, 120 bp, Homo sapiens
  NW_001839689.1_34352-41752:1982-2102
  hypo
ggcggcctctgcaatgcggccctcggcgggtgtcatcctgcttcctcgttggtcgccttcgtccacaccagcctgtggggaacggggcttcctcactccacgtgccctgcgcacctgtgt

SEQ ID NO: 221161 - DNA, 120 bp, Homo sapiens
  NW_001839864.1_130-4387:2039-2159
  hypo
ccagggagcgacggccgtccccatactgcagcccagccagggcgcgctggcagaggggatctcagaacctgccccggcacacgggaattttgtgcgcgccaccacggctcctccagaggg

SEQ ID NO: 221162 - DNA, 87 bp, Homo sapiens
  NW_001840841.1_1-4205:1699-1786
  hypo
tggccctcccgacaccttcggacaggaccctacccgcagaagcccgggaacggggaaggtgaaggagacttgtttggacgctgagcc

SEQ ID NO: 221163 - DNA, 103 bp, Homo sapiens
  NW_001840841.1_1-4205:2206-2309
  hypo
gtgtcaccttgctccctcgtgggtcgcattcgcccacaccggcgtttggggaatggggcttcccacacaccatgtgcccttcgctcctggggctctcccacag

SEQ ID NO: 221164 - DNA, 61 bp, Homo sapiens
  NW_001840859.1_1-2890:1537-1598
  hypo
acgcccttggacccttctgtggtggtgccgggtgtcccagggctcatcgccattcatgaag

SEQ ID NO: 221165 - DNA, 120 bp, Homo sapiens
  NW_001841051.1_73730-82666:506-626
  hypo
ccagggaagagctggccagagagactgccttcccgagtacaggattcagatctcgtttcagaatcgaagggccaggccccatcgcaggcaggcggcctgtgcaacacggcccctggcagg

SEQ ID NO: 221166 - DNA, 120 bp, Homo sapiens
  NW_001841051.1_73730-82666:746-866
  hypo
gagcaagggccatccccgtgctccagcccagcaaggccgtgccggcagagtgtatctcccaaccggatccggcacgcgggaatattccctatgctgcccctgctcctccggaaggggcgt

SEQ ID NO: 221167 - DNA, 120 bp, Homo sapiens
  NW_001841145.1_129149-174453:6133-6253
  hypo
tggccctagggccccgcttgagtgggcccaggctgtcccaccgcgcaaaggcccagcaggccatcgcggtgcgggtcccagtcctcccgcctttgcccgggtgcggaggccaacgaggag

SEQ ID NO: 221168 - DNA, 120 bp, Homo sapiens
  NW_001841145.1_63352-67863:4022-4142
  hypo
ggaacgggtcttcccgcaccctacatgacccgcgcacgtggggttctcccacagggagctttcatgagccagggggcgagggccgtccacgtgcttcagccctgccaggccgcgctggca

SEQ ID NO: 221169 - DNA, 120 bp, Homo sapiens
  NW_001841145.1_63352-67863:4202-4322
  hypo
ccggaaggggcgctctcccaccctcagtcccctcggtggcctacgaacccgggaaaaagtcaggaggacagggaccagcagcgcaatggccttccgggcccttgcgccgtgggacagcct

SEQ ID NO: 221170 - DNA, 141 bp, Homo sapiens
  NW_001841145.1_90215-97412:6817-6958
  hypo
ggtggcacagatgtgcagattaggcgagccgctggaagggtgtcaggcctggatgctgcacgggctcagtgtttctcgagacggagttctccacccagcccaggggaggacgcattttccggggtggggggtgggtgtggg

SEQ ID NO: 221171 - DNA, 120 bp, Homo sapiens
  NW_001842224.1_80-3146:1734-1854
  hypo
caggaatctcggccctggccagtgagacgaagcccacaagaaggcaggcgaaagcagacagctgtcaccagaacccagacggccctgctcctccgagatttggagaaggatcgctttcca

SEQ ID NO: 221172 - DNA, 64 bp, Homo sapiens; identical to SEQ ID NO: 197231
  chr1:859736-859800
  hyper

SEQ ID NO: 221173 - DNA, 898 bp, Homo sapiens
  chr1:935362-936260
  hyper
cgcgcctccccgtgccgggtggagcgcgccgccacggaccacgggcgggctggcgggcgagcggcgagcgcgcggcgatccgagcccctagggcggatcccggctccaggcccgcgcgcgcctcaggccgtttccctatttaaggcctcgccgccgcggggtgtgtgaacccggctccgcattctttcccacactcgccccagccaatcgacggccgcgctcctcccccgctcgctgtcagtcacgcctcggctccgggcgcggcctccgcgggcgacaatggcatgcggggcccccgcccgcgcccccctccgacaccgctggggacagggccgggtgatcccgcgctccccgatgcagccggggccgagcaacgcgccgggaggggccgctgggggcgaacggggcccgggacccccggggctgggcggagtctcggggctcactctcccgcccagggggccgggagccggggctggacggagctggggctgtggccgcgcgggaagtcgggaaggaaattcccccagtggcgcagggtccggcggcgccgaggggtgggcgagcctcggtctcgagcctcttggcttcctccgcccgtccccactccggtcccggtttgggccctgctcggtctccgagtttgatccgacaccggctcggcctccgggggtcccaccctcaggtgtgcggcctggagcacggagggctgcagaaagccttgggagcgacagagccgggggaaggtcggcggccgggtcggcaggcgggagggcggagtcagcggacggcgaaggggcgcacgggtggccccgcagagcagggccggtgatggcgcgggccgggccggaccacgaggagcagaacgtgcgcgtgacgcgagcgggctggtgacgtc

SEQ ID NO: 221174 - DNA, 392 bp, Homo sapiens; identical to SEQ ID NO: 197235
  chr1:955508-955900
  hyper

SEQ ID NO: 221175 - DNA, 104 bp, Homo sapiens
  chr1:975838-975942
  hyper
tggcgggaatcctcggcgggcggggtctgcgaggggcagggccggtcctgtgagcgcacgcacgcgtgtccgtgtccgtggtggacccccgatgcggcgcgggg

SEQ ID NO: 221176 - DNA, 61 bp, Homo sapiens
  chr1:994999-995060
  hyper
gaaggccggggggcgtggcctcggggcgtggcccggggcgtggcatcggggcgaggcttcg

SEQ ID NO: 221177 - DNA, 130 bp, Homo sapiens
  chr1:1052182-1052312
  hyper
gccccggggtctgggcggcgtcgctgccccacaggccgggcgcgtgggtttttccggggctctgcctctgagccaccctcggagaaaagacagctctgtgcgtcccgcggcgcccgcagctttcggcaaa

SEQ ID NO: 221178 - DNA, 368 bp, Homo sapiens
  chr1:1181914-1182282
  hyper
ctcgcgggaggacgcgctggcggtggcgttggggggatctgcgcgctggccaggctgctgcgtcctctgtgcctcccgccgggccccgacgcccccgaggagcacgagctgcggcccgaggaggaccacgaccgcggcccaggcccagcgccgcatggctccgtcccgaggcggctcagcgcggcgagtctcggcgccagggcgcagtcatggggacggccggcgctcagagcccccgcgcgggggcgaggcccaggggcgcgcccggcctccgccgctgcatgtctgcgcggacctgcccggaacggcggcgcgacggcgctcaggtccccccggggtcccgctccagcccccgctcccagcccccg

SEQ ID NO: 221179 - DNA, 620 bp, Homo sapiens
  chr1:1713555-1714175
  hyper
cttgctcaaggtcacccagcgaggaaagggagctggggggtgggggtaggggacagggcgaggccagagagtagtgggaggggccgaggcggcctttcccgggagcgctcggttcccggccggcccttctattggccccagtcactcaggctcccaggtccggctcgggggggagcggggggccgcgccaggccgctgaagtgtccccgtttcgcgtgggcagagcgcgcctccccacgcatcctgctgagggccagcctctgctaggtgcgtgacacggaggggacagaacggaaaccttgtcctgctcaagtgtggacgtgcgtgccacgtgctagagtaaaattgaggtggggaacctccatccctgggacatggagcacaggggcgaccccgcgccgcttggtcaaaggaggtccgaggccctgcaggaacagcccacagccggagcgagctgcaggtcactccactgcctgtgtccacctgcgacaggtgcgcccgcgcaagcggggcggagccaggtgacccggacacaggaagcgcgccaggggcccccacaccgcggagctgctggcgacaaagggcgctgctcctgcataggccaggctaatgcaatctac

SEQ ID NO: 221180 - DNA, 148 bp, Homo sapiens
  chr1:1737808-1737956
  hyper
ctgccttccctatcctgtattacgtgatttaacaaaatgaatccagagcttaaaaccctgtttcctgggttggtttttcaaggaagggaatcctccagtccctaccttgttggtggtgtagctgtcccagatgataagtttaccatcc

SEQ ID NO: 221181 - DNA, 44 bp, Homo sapiens; identical to SEQ ID NO: 197244
  chr1:1747214-1747258
  hyper

SEQ ID NO: 221182 - DNA, 1455 bp, Homo sapiens
  chr1:1981169-1982624
  hyper
aggggcctggagggcgattgtccagatcaagcccctcgagtaaggcccgagaggctgtggcttcagaaatgaaggtcatgggcgactcgggccaatgccgcgtccttgacctgggcgaagtgagcggttgcactcacgagtgtggacggcccttccctacaggggaccttggattcgctgggggcggagtgggggctggggcccagagaacccgagtccggacgctcccgtccgtgaccctggccgggttctccgctcctcgcagcttcagtccgcaagtgtgagatgtcaggggacccctggacggcggggccctcgggctggcagcgcgcgccgcaggagtttcgattcggagggtctgggcgaaggccgagaactcgcgtttccagcgagttcccgggggcgccgctccgtcccagaggccggggcccctccggttgccgggcagagccgcgccgcgcgcggtcccattggcgcaggtgcgccgcgccccgcccaacaggtagccccgcccgacaggtagccccgcccgcgcctcgccattgggccgcggccgggtgtcccccgaggattggcccaggtggcggccccgcctcgccctcattggccgcaggtgccaccgcccgccccgggaccgcccgccccgcggattggccgctggctccacctcggtccgccatgttcggacaccgccccccgcccccgccggacggtcccgccccgcgcgccccccgctcccgccccgcgcgccgccggagttccgcggagttgaccgggtcggcgccgtcggtcctgagcgctgccttccgcgttccgccgcggccccacctggagcccccgccccgcgccatggccggagctcccggggcgcagcgctgacggcggcggggggagcgcgccatgcccagcaggaccggccccaagatggaagggagcggcggccgcgtccgcctcaaggcgcattacggggggtgagcggcggagagggcggggagcggcgcgggtgaggcagggagggcggggagggctcagccgtcggggctcctgcgcgagagggagagagggaaggggcggcgaggtcgctgcgggcccggggctgtcgcgggaggtcctcggtccccgcccgtgagcgtcacccgcggacacgtcgtggacagcgcgggctccttccccgggaccgggtttccctggggtcggccccgcgccgcgagctcctcggcccggtcattgtggtagacgttttcgctggaaagttgggcggggacgttccggccgcaaacctgtaaggactgaaagttttcatcaagttgtgaaaactcctggcgggtttcttaaaatcagcgtttcctaaacgttctccacgtttacccggtcgggggtctcgctttagccaaaatccggagacccggggcgcgggcgctgtggctccaatgcagcccccggcagggctcgggg

SEQ ID NO: 221183 - DNA, 317 bp, Homo sapiens
  chr1:2135930-2136247
  hyper
ggggcgtgacttggcgatcccggtggctccgggcgtcagcttggacctcagacgcccctcacagctcacagccctgtggcctgctctgagggccccgcccgccgccgagcccccgggagccggagaacccgcaggacgtcagccgggtggattccctcccactgcccctgaccccactgcccagcgccttcaggactagcggatgatggacttgtgctaaactggctacgacccctccggagcagggtcctgggtaaatcagcagtgagctgcaggctcagccagccgccgcctttggtttcctcccgccgccggct

SEQ ID NO: 221184 - DNA, 480 bp, Homo sapiens
  chr1:2374855-2375335
  hyper
gcaaacgcccagcctggagatgggaagcgctctcggccccgcccccttcccggtcccgccggctggggccacggggagccggagggaggcggagggggaggtgtggggagcggaaggccgcaggagcatctttgcggagaaagtactttggctgcggcgggcgcagggcgggccggctagccccgcgccccacctgttctgtgcgtcgcgctcgcccggttgcgcccgatctgcctccagcccggtgcccgccgcggagcccgcgcccccggccccctcccggcgcggggcgggcagggggtgtggtgcgggcggcacgagtgacagcgcgctcctcgcgcggcgcctccacggggcgcagtgtcaccgcgcacagcccgccgcgggccgcccgagctggcggggcgatgccgcgggagccggagccccagcccgagcccgagcccggccgctgactgcgcctcccggcccgcagccccc

SEQ ID NO: 221185 - DNA, 180 bp, Homo sapiens
  chr1:2375376-2375556
  hyper
gacaatggacgcgggagccgccccgcagaagcacagtaggtgccgctcctgccgctgcgccgctgccaaccgggatgcgcgggtggacgcgcgggggcgccgcagccctggtgcgggtcggggctgagccgcctgggcttcagactcgggagcggaggctcggatcgcggtggcacgggc

SEQ ID NO: 221186 - DNA, 180 bp, Homo sapiens
  chr1:2461364-2461544
  hyper
aactcctgctccagcagcagcttcagctgctcgatgctgctgttgatgcggtcgcggcgcatcttctccaccaccggcttccgcagctgcgggaggagggggtgtcaggctggcccggcacggcgcagggacccccgaggaccggaggccgcggggacagcgcgccgggcgagtctggta

SEQ ID NO: 221187 - DNA, 480 bp, Homo sapiens
  chr1:2461605-2462085
  hyper
ctggcgcggaacaggcgacgaggcgacgcggggaggccgggcgagacgaggcgagcgggcgcgggcaaggccaagcgcgtcccgggctggcgcggacaccggccccgcgcgccgacgccctatataggcgcgggcggcggcctggcgcctggagtccgggcgccgcggccgttcccacactccgcggccaatggccgggcgggccgcacaaaggcgccggcccattagcgcacgctaaattgcctgtgaattggcgcgggcacaatgggcgctccccaaggagcaggtgggccgcgcggcacaatgtccgggctgtgggaacgcgctcgccctcattagcatcccggggcctgatgccgggagccccgcgcctcaatatgctgccttttcccaggccgccaaacgggaggggggcaggaaggagggccccctcccccgccctcccctccgctcccctcccctgcctctccccagcggctt

SEQ ID NO: 221188 - DNA, 71 bp, Homo sapiens; identical to SEQ ID NO: 197256
  chr1:2477791-2477862
  hyper

SEQ ID NO: 221189 - DNA, 105 bp, Homo sapiens
  chr1:2559942-2560047
  hyper
ctacgcacctgccccgggggtgagcattgctccccgatgtgtgcgcgctgcccggtctcagagggaccagggctgtgcctgcggaggggctggcaggggcggctg

SEQ ID NO: 221190 - DNA, 753 bp, Homo sapiens
  chr1:2560142-2560895
  hyper
acagccgggggcggggggagtgttcccgggacagcccgaggttccagcgagcagccctggccacgcctttgtctccgtgggaccccagactggccccttcccgccgtggtcccgtgacctgacccggccttgagcggggcgggggcggcaggaccctcaggtctctccgcaggatggcagcgggggagtgaggcagccaggtgagcccgggcggcgggagggacacggacgccggtggtccccagccggggctgcgcggccaggcagggagggggtgggcggaggggcgggcgacgggtctgcgccccccaccctccgggagtccggcggaggcggaggcggaggcggaggcgggcgggtgcggagctgcagaagcagcgcgcgggagtcggggccggggcagagctttctggaagggaccgcgggctccctgcaggtcagtgcccctcccgccgcctctgagtccgcagctcggccccgggagcccctgggtgcccagtgcagacccacctgccccatctgacgggcgggctcgggctgggggcaggcggaccctgcagcaggtgcagcggggcgagcgcggagagcgggcacggggacaggcgggggcggggcacccgcactcacctctgcggtcggcgtagaggacacccaaggccaccagggcagcggtcaccagcagcagcagcagcagcagccccccctccaggaaccccgggcgcttctgccctgcacggccggcgctctccacca

SEQ ID NO: 221191 - DNA, 420 bp, Homo sapiens
  chr1:2984607-2985027
  hyper
gggggctacaggggaagaggaagcgtctggtcggctcccgtccgagctgctccacctgcgccgctggcctttccgcccgctacgcacctgggccccgagaggccagaggggagtgtccccagtggcccgggtccccgaaggtggcccagctcgggcgctcgcgcagccgggtactcaccttgggggcgcggcggcaggagagcgcgggcggagaggtgcgggcgccctgggacgaccagccgaggacgcctggtgtttggacggctgcccccgcgctgtccccccgtgcgaggcgtgttggcctccgtggcctcgcgagggaccgagggcggcgggtccgagtgccgcccgccggcctgggcagtggcggagcgcggagctggcggcgcctccgctgttgtttttgagccgcgaagcccg

SEQ ID NO: 221192 - DNA, 240 bp, Homo sapiens
  chr1:2985131-2985371
  hyper
gcgcgagccccgacgccccctccagcgatcgcagggcggggacgggggccgaggggagaatgcaggagaaaagcgggccggggcgacggggaacgcaaagcttttaaattagtaatcaaacgcagtaaaacggagcaaaaccagcccggactcgcgtccgaactatcggcgcgtgtgccccgagatccaaggaagtcgtgtggaaaaccgcagccgccgccccatcttcggccccggctg

SEQ ID NO: 221193 - DNA, 180 bp, Homo sapiens
  chr1:2985548-2985728
  hyper
gggggagaggggggagagataagtgagacgaagaccgagaaggccgaggagagccccccaatcccgcgccgaggcggcggcggcggcggcggcggcgcgacgatgaggatgatgaatacattgcaaagtttttttggccccggcgaggggtgtcagattgagtgctctgtgcgcatgtgc

SEQ ID NO: 221194 - DNA, 180 bp, Homo sapiens
  chr1:2985791-2985971
  hyper
ggaggaggagagagattccgcgagccgacaccatgcgatccaaggcgagggcgaggaagctagccaaaagtaagtctcccgcgctcggccgcgccgcgccgccggggcccgggccgccgggccggggcgcccgggccaggggtgcgcgtcggggcgcggccggcgcgcctgcggctccgg

SEQ ID NO: 221195 - DNA, 604 bp, Homo sapiens
  chr1:3325182-3325786
  hyper
catgagtgtgggtgcgtgagctggtgcctgtgttggcatgtgtgagagtgtgtgagtgtgagcacgtgagccggtgcatgtgttggcgtgcatgagagtgtgtgagtgtgggcgcgtgagccggtgcatgtgttggcacacgtgagagtgcatgagtgtgggcgcgtgagccggtgcgtgtgtgtgagcgcgtgtgggcgcgtgagctggtgcgtgtgttggaggatgtgagagcacgagggtgggcacgtgagctggtgcgtgtgtgtgtgagagcgcatgagggtgggcgtgtgagccagtgcttgtgttggcacgcatgagagtgaggggcgtgtgagccagtgcatgtgttggcacgtgtgagagcatgtgagggttggcgtgtgagccggggcatgtcagtgtgtgtgagtgtgggcgtgtgggccggtgcgtgtgtcggcgcacgtgacagcgtgagtgtgggcgcgtgtctgtgagtgcgagtgtgggcgtgtgagttgatgcatgtgagtgtgtgagtgtgggtgtgtgtgagtgagtgtgggcacgtgagttggtgcgtgtgtgtgtgagagtgtgggcgcgtgagttggtgcgt

SEQ ID NO: 221196 - DNA, 341 bp, Homo sapiens
  chr1:3370921-3371262
  hyper
gccgctctggccccacgcctggcaggcgactcccgggccggcctcgagggggcgtgggcgcggggagggaaggcgcaggcaccgggcggcggcggctcggcgggaatcgagaggcgcgatccagtccgggcgatcacgtgggctccagccggcccaggtggggctgtgacctgtgacgcaggcggcgccgccacaggtgcccgggacgcgccccgccccctccccggccctccccgcccgggccctcggacccggagcagccccgcccgcccagcgcccacctgcggggccgcagccgccgccctccagccagaccgcgcaggaagcggaggaggcgcccc

SEQ ID NO: 221197 - DNA, 180 bp, Homo sapiens
  chr1:3447539-3447719
  hyper
agcaggcagcgccctggcgcaaactttaaaaacaggaaacaaagggagcgcgccggggagcgccctggccccgcccgccctgcccaggctcgcccggcgcccacctggcctctggtcaccggcgctcacggggtagccggcctggcccaggtgacatgggtagcagcccctccagaggta

SEQ ID NO: 221198 - DNA, 212 bp, Homo sapiens
  chr1:3447772-3447984
  hyper
agagcgcggccagcccgcggtcccgggacgcccccatggcctggtaggccggcgggcgggagggggcgaggaccaaccgcgctgcgccctaagccggcggccgggcgacggggcaggcggctcgggctggttctgggttccgggcgggcgcgcaatcccagccccgggatccgctccgctcggcgccgcccgggagccgctctgggccgggc

SEQ ID NO: 221199 - DNA, 470 bp, Homo sapiens
  chr1:3567217-3567687
  hyper
tggcccttgcctcacgctccagtgccactgagatcaaggagagaacgaatttgccgctgactgggcagagcgagcgcgtggatcgcggccaccgcccgttcatcacccgcgcgcatctgggctggcaccgggcgaagaatcgtgcgggtctgggacctgggggcccagagggagcgagctcctgcgcgggcgctcggtccgcaggtttcgcaggctcaggggcgtgcctcgttctcacccccactccggaccccggtcctcttccctagacagcggccccctccacccctggctcccgcaggccgctagtagtccgcgccaggccccgccggcgcctctagggccccccagatcgcgcagaccctgacatccccgcctggccctgggttctgggagctgagagccggccagggtcctgctcgtacctccgggcgcccagcctcgggtctgctccccgcggacgccccaac

SEQ ID NO: 221200 - DNA, 360 bp, Homo sapiens
  chr1:3663383-3663743
  hyper
cgagcagaggcgttcgtgtcggagcccccacacctggggagcggggagctgcggtccctggttgtcccacaggagaagggggagggaacggggcaggcggggaggatgagcgcttccgcgtgcagcgggggctggagtgggtccgtccgagctggagtggtctccgaggggcggcggatgctcggagggggcggatcccttagggctgggggccaggacgatcccacccggagaagcctcgcgggcgagaagagggtcccttcctgcgggggcagatggaggcgcgggagccttccccgggaggtgaccgaggccagtcagcggccccggggacccaaggccggggactctcggcggccg

SEQ ID NO: 221201 - DNA, 177 bp, Homo sapiens
  chr1:3663922-3664099
  hyper
agatcccgcaacaacccggatccggaagcgcggggtcgcggctgggcgagggcaggggtggggccttcggtgcagacccagggccaagtcgagggaggctccgggcgcggggcggggtcttgggcgtgggggcggagcctgcgcggggcgtagagatctgacgggtcccagatgcac

SEQ ID NO: 221202 - DNA, 212 bp, Homo sapiens
  chr1:3817882-3818094
  hyper
ccggggccaacgtggactcgcaggggccacgccttttccaatggccacgcccctagcaggcctgggtggacccgcagcggccacgcctcctccaatggccgcgccctatcaggtctggatggacacacggcggccacgcctcctccagcaaacacgcccctagcaggcctgggctgctgtgatgcgtcctctttggccgccgctgagggagg

SEQ ID NO: 221203 - DNA, 1560 bp, Homo sapiens
  chr1:4714747-4716307
  hyper
atccccgcgcgcctcctccgcgcggcgccgccgccgcgcgtccccacgccccgcgctccacggcgccctcgccccgcgcgcctctcgtgcccgcctcctgccagtctccgggccgcggccgtctgcagagcgagcgctcagacggagcccccgggcaacttgagtggcgccgatcggcggcggagcctctggcagagccccccgacccggcagcgcggaggggactcgcgtccgtccgcgtcgcgtcaccccaaaccctaagcagcgccgccccatcggcgcggagctccggctggaggcaagagccgcgcgccgggagacacgcaccgtgagcggcagcgccgccggcctccctcctcgccgccccggagggcgaagccgcggctccccagccctttgctgcgccgcgacagcgccggaacacgccccgcctcgctgccgccttcgctgtgccgccggcggagggggccgcgagccccgcgccccggccggaggatgtgcgcccccgcgggccgcccagcctgagccatgcgccccaacggcggcggcgcgccggccggcatggagccccgcgcggccgcgctctgactcgctgtgcgccccgcggccggcgggcggcgggaggcggcggaccgagagccggagaccggcgccgcgggacggaagcgagcgggcgcgggcgccgcgcagatggcctgggcgagccaggtctgaggccccgctccccgaaacgtgaccatgtggattcaacagcttttaggactcaggtgagcgacccggccggcgccgggtgcgtgtgggcgcgtgggtgccaggctgggcggaagcggcgctttcctctatgttgcaaatcaagggacccctcttcgcttcccgcaagcgggcaacggggtgcaccggtagccggaaaggggcgcccgcccggagcctggagcagcaccgcggccctggcggggagcggccgggtctccagggttccgcgcgtccggggtcggggcagcggcgcccgccccagcaacccgggaagtggggccggccaggcgcgcccgcagctctaggagccagcagcgcagtgtcctggccggctgccccggcgcgcctcctccccggggcccggggcgaggcgccggccgctgggcgcggcgggcgcgggggccggggctgccggggaaagctaaagctccgggctcccagcgagagcttcgcaggcggagttggaggaaaccacagccaaacagccactccgctcccccttctcctttctcggggccccggggctgagcaggggcctcccaggctcccagctgccgacccagctgtttgcgggtgacctccgggcccgacgggcgctcacagctggcgggcagctggggcgggagagctggggttcttggggagctccggcggccaccccgctgtaaacacacacgcacatacgcccgccggcgcgcccggggcttgtctgtgtctgggactccagggccagatggaagagggggttcgagcctagagcccgtggtgggggtgtccagaaagacccttctcggcaaactttgccag

SEQ ID NO: 221204 - DNA, 300 bp, Homo sapiens
  chr1:4716334-4716634
  hyper
cttctgcctggggtggcccagggcccaccagagcacagctgtcgtttttgctgggcaggctgcctctgagccctcgccctcctgccggggcattcaccgagctcgtgcatttgggtcccgggttggaaccgcgagcggggaggacagaggtggaggcggagagcagcgtgcggttctcgagtttgtccactgggatgcactgcgctcccgcgttggggacgaaaaggccagtagttgttagcccgctgcttgagccgcccccactcagggatgaagctgcggggggagtgaggcgaaggg

SEQ ID NO: 221205 - DNA, 924 bp, Homo sapiens
  chr1:6052412-6053336
  hyper
acaagcctgaggaccgaggactggccgaggggcgcgccccgtccgctgccacccgcgggaggagcctcggaaggcggcgcaccgcgccgcacactcagtccaagaacccgcctcgcgtcactgtcgccgtcagggccgcggagccaatcagagcccaagtcgagggctgcgctttgcgagcgccagccaatcggtgcggcggcgggcccatcctgatttgcatgtccgacgacccctcaaccaatggtaatgtgactggcgtgaacaatagccaatcagaagctggaagaggcgtggccccgggcgtcccacgaggtgaagatgctgctggcggaacctgcaggagctagcgggattcgggggcgctaaagtcgcaggggcagggcgggaaggaagatccggcgcggggcacaggatccggagctggagcccccaggtgagtaccggggagaccccggcggggcgcgctttccaccaagctgctccgggacggcggcggcgggtatccgcgaggcccgcgctgcggcaggcgccgcggtcccgtctccatctcttcttccccggccctgcgtccctgcctccgccgctgtctcacctcctctccagcctcctcacctccttctccatcgtctcccttcccccatccctttctgtctttccttccctgtcctcccgcccgcccgacccttcagctcgcatccctgacccctgcccctgccgccgtccctcttcccggtgcacctcttccccatctctgcccgctccggtcctagcagcctcgccctcccctttcctccatcctcctctcatcccctctcccggcctctgcgcagccccaccggggcgctgctgttcccggtcctccccatctctcctcctgatcgcttctcaaggctcatccgtcgttctcgctgcctgtccctg

SEQ ID NO: 221206 - DNA, 107 bp, Homo sapiens
  chr1:6053601-6053708
  hyper
ccccactgctgcaccgcgtcctgcggcattagcagcagccggggtacctgcccaccttcccaccccgccaaccagccgcatcctggtgtccctcctcctggcatttg

SEQ ID NO: 221207 - DNA, 45 bp, Homo sapiens
  chr1:6137261-6137306
  hyper
catgttttgaagaacagcatgggaaaggcccgtgacagccaatgg

SEQ ID NO: 221208 - DNA, 139 bp, Homo sapiens
  chr1:6296163-6296302
  hyper
ccgcccgcccctccccgcccctcggggacatccgggctctgagccagactctgtgccgggcgggggccgggaagtggtgggagaagtcgccgcccgcgtctgtccaaacttagtcccaaactcaggaggttcctgtccc

SEQ ID NO: 221209 - DNA, 156 bp, Homo sapiens
  chr1:6321178-6321334
  hyper
ggcgcatgtctccgccggggcctccgcaccgcccctcggcccgccccgcccccgcccgctcagaggcgcggccgtctgtcggtctgtcagcccgtccgtccttccgtcagtccgtccgtacgcagcccacccgtgtccccgcgtccgcccgcggcc

SEQ ID NO: 221210 - DNA, 360 bp, Homo sapiens
  chr1:6484739-6485099
  hyper
gggcgggcggggaactcgggcggaggctgcggggcggggcggggcggggtgggggcgggcccgagtcttaagccggcgtccgcgggctccggccccagagcgcggcggagcggagcgccaggcagcgcggagcggaggccaggcccacagccgctccgcctcccggcccgcagatccccgacggccgcaccgcgggctcctctggcccgcaagaacacgtgcatggcgtcctggggaaggcgctgagtgcggagtcgcggcgccgcacgcggcaccatggccctggagcaggcgctgcaggcggcgcggcagggcgagctggacgtgctgaggtcgctgcacgccgcaggcctcctgggg

SEQ ID NO: 221211 - DNA, 126 bp, Homo sapiens
  chr1:6485150-6485276
  hyper
gctgggaagctgcactgtctgcgcttcctggtggaggaagccgccctccccgccgcggcccgcgcccgcaacggcgccacaccggcccacgacgcctccgccaccggccacctcgcctgcctgcag

SEQ ID NO: 221212 - DNA, 240 bp, Homo sapiens
  chr1:6507605-6507845
  hyper
gtctttggcccggccgcctcactctccctcactgagctgggcctagttgggggcagctgcgatggggtgggaagccacgctgtcacccgaccccgccttacggcccctgaaatccgaggcttgagcgcgggtgtcggtgtcgctttcgtggatggcgatggtttccagatgcaggaggggaagggtggggacgcgacccggagccgggggccaaatatgagaggcctcctctgcccacag

SEQ ID NO: 221213 - DNA, 180 bp, Homo sapiens
  chr1:6526088-6526268
  hyper
gggctcaaagctgcccctagcctcctgcgtctcaactcaccgccgccaccgccgcgcagccccgcggccgctgctccatagccctccgacgggcgcccaggggcttcccggctccgtgctctctgcccgtcgtggttccgccttcagccccgcgcccgcagggcccgccccgcgccgtcg

SEQ ID NO: 221214 - DNA, 194 bp, Homo sapiens
  chr1:6659237-6659431
  hyper
gccagccagggagccgatggcatagagccggccacggcacgcagtggtggagcagttgtccatggggtaggtcatgggctgcagggcctcccaggagtcagtggtgtggtcatagcgctcggtgctgtcggcggccaccacgtacagcagtccgtccagcacagaggagctgtggtactcgcgggccttcagca

SEQ ID NO: 221215 - DNA, 436 bp, Homo sapiens
  chr1:6675302-6675738
  hyper
cgggtttttgacccacttctgctggttccccgccgaaagaaaagttcttcgcgggagttggaggcccgggtggcggcccgcggttcccgtggctgggcaggctcgccagtgcggggagcgcggtcaacgcgggccttcgcctccgctccgtgggcggccctggggtccaagggggtgggagaggagaaggtttgcttgaaccaggttgagaaaataattttctaagggcaccgactttctcgaaagaaaacccgcgggccgcacgcctgctcctcgcggcgggaggggcggcccgagacccctgccccccatttccccaccggctctcccccagcagagtggcggccgggtaacagcacctcgggaaggatgggggtgggtcggacaaggcactgaaaggaacctcagggaacgtgccgggcgaataaacagcaat

SEQ ID NO: 221216 - DNA, 257 bp, Homo sapiens
  chr1:7764522-7764779
  hyper
gcccggctctcgcgcggggacgcccgggccgcgctccgcccgcaacctccggccgggcccccgccgtccagcgcggctcgggcgcagttccggcgcagtccccgcgccgagcggctccgcgccccgcaccagcctctgcccggctccgggtgacgtcgcatcctccgattggaccacgcggcctggggggcggggtctggtccggtgagctcaccgccgcgccccgccattggtccgggcggcgcactcgggcagtg

SEQ ID NO: 221217 - DNA, 212 bp, Homo sapiens
  chr1:7764990-7765202
  hyper
cgtgcggtcgagggcggcggccggcgggggcgcgcgcggggcgggggcggggccggggcgtggggacacgcgtgctcgcgggccgggggcgtggtgcgcggccacgcgtgtttctggcgcgagtgtgcggggccaggccgggagggcgtgcgcggaccgggcgtgtttacgcgcggcagggaggggccacgagggtgcgcgcgtttctggcg

SEQ ID NO: 221218 - DNA, 79 bp, Homo sapiens
  chr1:7843553-7843632
  hyper
cgatgaggaccgctgccggcagcccgccccaccctgggctcctccccacacccgctcgggcagccgggagccacctaca

SEQ ID NO: 221219 - DNA, 40 bp, Homo sapiens; identical to SEQ ID NO: 197291
  chr1:7843653-7843693
  hyper

SEQ ID NO: 221220 - DNA, 188 bp, Homo sapiens; identical to SEQ ID NO: 197292
  chr1:7844213-7844401
  hyper

SEQ ID NO: 221221 - DNA, 240 bp, Homo sapiens
  chr1:8086064-8086304
  hyper
agactccgcgtcgcggcgaccctccccgcgccctccacgcccccgccctcgcgtcggggagccgcctggatcccggcgcccggcgcggggccccctgagggaacggagcgctgcgtggccctccccaccccctcagcgcgccaggccccttaccccggaggagcggcggctgccccgcggcgccctcccgcgcatgtccgtcccggctggctcagcgccgcgggctcaggggcccggaca

SEQ ID NO: 221222 - DNA, 47 bp, Homo sapiens
  chr1:8762992-8763039
  hyper
atctttctagggtcggctggaacactccgtgcacccaccccgagccc

SEQ ID NO: 221223 - DNA, 268 bp, Homo sapiens
  chr1:9188954-9189222
  hyper
gctgcgcaggtcgggccacagggcgtgcgtggccaccagcaggcccgagccgagcgcggagagtgcgcacgacagcagcaccacggcgcgctccgacggcaccagctcggtgggcggcggggacggctgcatggcgtggggggccaggagccggagcgccgcgaggacagaagccgggccgcgcgtgcggccacgccgccgccgtctgggcaccgaggcgccctaggctcgcgtccaggcgcccgccccgcccgcgtccggccgctcc

SEQ ID NO: 221224 - DNA, 189 bp, Homo sapiens; identical to SEQ ID NO: 197299
  chr1:9352965-9353154
  hyper

SEQ ID NO: 221225 - DNA, 68 bp, Homo sapiens; identical to SEQ ID NO: 197300
  chr1:9353809-9353877
  hyper

SEQ ID NO: 221226 - DNA, 165 bp, Homo sapiens; identical to SEQ ID NO: 197301
  chr1:9489050-9489215
  hyper

SEQ ID NO: 221227 - DNA, 1196 bp, Homo sapiens
  chr1:9711818-9713014
  hyper
ccgcgagcagagccgcccagccctgccagctgcgccgggacggtaagcgatcgccgctggctgcgtcaggggaggtgggaagaggaccgcggccaggggctttgggagctgcggctgcgctcgggggcgcggggctggctggcgggcgtctctccggcacacacagcccgtgcgccctggccctgggcgcctccccgagtctagcgagccgggtcctgggagccccgggggccgggctgctgggacctgggcgggggctgccctagaggcccggggccgtcccccgtgggcccgccgagaggggcgtgcgcagctccccggcgcctgcactgcgcgccttgcccgcctggcccggcagcggggtttcagctgcgctcacagcggcggtgcggcctccggtgcgccggctgaggcgcgaggatactggaagcgctcagcgcgtgcgcccgctccgagcgctgactagaggaccaggggcctcctctgtacggcagcggggtccacagagagcgcgctggtgatgtcgcccgagtgccctggcgcggagagagggctgcgcacagttcgccggcgcccgggtcctgtgcgcccttcccagcctgggcaagtggggagcggggctgcagaggggccggggtggaagttttcggggcttcctcccggctcgtggacccgcgccccgcctcccagtcccgggcctcccgcgttgctcgccgcgtttgctgcagcggcgcaggcgagatcagctccggatctgcggccgagccggggttacgccggcaaaaccgcccccagctttgcatttccggactttttaaaaaaatactcttacccgtaattcagcctgaatgaggctttttaaaaaaatcgagtttcctgtttttatttaggcttcctcatttgcacctcctcctttgaggtagagaagaggggaactgggacgacctttcgtgggcaccaggatgggggcgttgcagggcggggagacgggggtccagagaaccggggaagggccgctgggaggtcccgaaaagtgcgctgtgggtggggcgagggtgaagcaggtaggggcgagatttccggggtcgcgggtggggggcgccctggagcggccaaggtgcagggtcctcgcgtggcacccttgggatctgcccagtttgcggatggagcgcggggctgatcgggcaggtctcact

SEQ ID NO: 221228 - DNA, 175 bp, Homo sapiens; identical to SEQ ID NO: 197307
  chr1:10271266-10271441
  hyper

SEQ ID NO: 221229 - DNA, 540 bp, Homo sapiens
  chr1:10854866-10855406
  hyper
tgttcccttcgcggaggagcttccagcgccggggacagacattcgcccaaacgctccgcagcggcccagcaaccgcccgcccgcccgcgcccggccagcccccgccagcggccccagcgcgcctctgcccgcacctcgccaccccggcggccgccccctccccttccagacccggctgcccggcccgccagctcccggcagtgctggcttcggaaagagagagaaagaacagaaagcaaaacttcctggcggccgacggccatcagctgcacattctgcaaatgccaccgagtaaaaataaaccggccgccgctccgcccgtccggctcaccccgggcgcacgaatcggccccctgccccgggagatccctgactcggtctggcccgatcccccattcccgcgcgccccctggatccccgctccccgacgctcctccgtcagtcaccacgctctcctttgccgttaagccggaccctaagtgaccgggaaaccggctctctccctttggtgttccctgcgcccccacaaactactttttt

SEQ ID NO: 221230 - DNA, 240 bp, Homo sapiens
  chr1:10855534-10855774
  hyper
cacgctgcagagcccccccggagcgcaccactctaccagcccgctagcccgccagcccagcgtcccacgtccccgggcgcaacttctcttctggcgcacacaacagccggcaacaactcgcccgaactttccccgggacccaggcgggctccagccgacagccgggcagctctgggccgatgccccggctccccgtgccctgtgttgccagcccttcagctggggaggcagggggtgggg

SEQ ID NO: 221231 - DNA, 635 bp, Homo sapiens
  chr1:10856315-10856950
  hyper
cctcccccggagccgcgcgccgggcattcccctggccacggcaggcaacgcgccgccccgcgcccgggtgccagccctccgtgccccctgcctccgcacggccggagttgggtggcagccgccgatcgcaggctggctggctggctcgctcgctcgctcgctcgcccgctccctgctgcaagcggcagccccgggggtggggggggtgcaccgggacagggggagagacggggaggcgccccgggaggcccgcggagctgggggacgtgggggggccgcggcggagggagcgccgagtctcttacctgcacttggggcggctttgggtgactttccaagtccgggggaaaaatgtgtgtgtgtttgggatggagcgccgcgggcgcgcatgcgctgcccaaagttgccggatcccggatttttcgctcccagtctccgctctcgcccgctgtgattatggaattctccgcggccgggcgggcgagtgggtggcatgcaaaacccgggccggatcgcggggccgggctccgctccaccctcacacccccagacctgcccctcccggatccttcccacccaccgcccgggctgagctcagcgtgtgcgcgcggcgagtcgcacggcctgcggaggag

SEQ ID NO: 221232 - DNA, 180 bp, Homo sapiens
  chr1:11538709-11538889
  hyper
cctccggagggcgcccggggatgcccgcgagtgtccaggaggctggtgacctgccaaggctgggcgggctggctggagaggagcgggagcgcgggcccgggagagacttgggtatcaggaaactcggaggcggggctggggggtggtgcctggcccggaccgtctgcaggggcggggacc

SEQ ID NO: 221233 - DNA, 1427 bp, Homo sapiens
  chr1:11538924-11540351
  hyper
gcccgcgggcgccagggccgggctgaaccaccgcgcggatcggcagggggagcggcggcgaagacagcgccagacagcgggtcccagagaccgcagcgcgcggcgtggcgcagggtctcgccggccactgattcaaggcgcggcggcgcggagcccgagaggcgccagggattgggcggcagcgcggctccggagcctggctcggacacccccgcgacccgtggtaggagcccggacccaaacaaaggcgggcggcgaataaaaggcggcggcggagcggagtgctcgggttgcgagctgaggactgggattcgcgcgcagcttcccgcggtctgcttgccctggagcggagggggagccccagcctcctgcggctccgagaagcttccccctgcgacttccgcgaggagacgagtctgcgcagcgtggtggccgccgccccccgaccctctgcgcactctctcccgcgccggcggctcagcctagccccgttcggccggccgaggtgagtgcacggccgcggggcgccatccgggcttggtctcggggctgggggatgcattgctaggaggagggggaagtcctccgcgccgtccgcaccccgacctgcttggcgccgcgcgcgaagttctctcgctctccagccagcccgggatgcgggcctcggagccccccgggaaagacggtcaggggtggacagaacccaagcttgccctctacgaccgggccccagctccgcaccatctccccgcgggactgcagcattcttggtcggccaaggggagttggatgttggatgtccaggaacggcaaggcttccgacctctggcccctgcttgtcccctctgagggatatctgggtccataaaagttgagcgtcagtctgaagccgcccttggatcgggctctcgcccatgctagagcggagggaggggacagagtaaggctaatgaccccctccacccactccctacctagcgtactcgtgctctcggagggacatttccccgattaacctggctgcaggtccggccggggagggcgcgtgggggcttggggcgggccgggccagcgatggatccgcgcgcgcgagggtccccaggctctgccgagaacgcgaacgagggtggaggtggagtgggcagccgggcagtggcggcgctgagggtcgggaaagattcccagcgcaaggggcgccaagtcccgggagccaaccccaccgccgggagaacttttcccaactccctggggaggccggcagcagggctgggaaggcgcctccttgggggcttctcttctcggcctctgctccacggccggcgccagcttcccgctgtcccccactcactgcgagactgcgcgcaggtctccgtcagcccactccccgggtcagcaccgcggacagcgcctcgcggccgccctagaaa

SEQ ID NO: 221234 - DNA, 651 bp, Homo sapiens
  chr1:12123218-12123869
  hyper
ggccagaagctgcctgcctccgctccccgcagcccaggtgcggcgggcagcacactccctagagccaggaccactagttccgtcaaatccggggcgggccattcaaacagctaagggaggcgtctcctagtgtgccttttcctgagtcatctctgcacgtgtttgcccccttttttcttcgctgcttgtagctaagtgttcctggaaccaatttgatacgggagaactaaggctgaaacctcggaggaacaaccacttttgaagtgacttcgcggcgtgcgttgggtgcggactaggtggccgcggcgggagtgtgctggagcctgaagtccacgcgcgcggctgagaaccgccgggaccgcacgtgggcgccgcgcgcttcccccgcttcccaggtgggcgccggccgccaggccacctcacgtccggccccggggatgcgcgtcctcctcgccgcgctgggactgctgttcctgggggcgctacgagccttcccacaggtaagcgggtgacgggcgcctggggaggtgccggcggtccagagcccggacagtgtggggtgcgtgggacgcaagggaggacactcctcaccccgttccctgcccagctggagtgagggggcgcgggtgacaagcaggaacaccggaatat

SEQ ID NO: 221235 - DNA, 104 bp, Homo sapiens
  chr1:12123912-12124016
  hyper
gggggcgcctccttctcaccccgcgatggctgggactgattcattcattcagtgtgaattggactgagagcactgccatacgcgggaggcgctctttagcccgc

SEQ ID NO: 221236 - DNA, 1058 bp, Homo sapiens
  chr1:12226890-12227948
  hyper
gacgctggaggtatcggcccagcgatgctggagtggtcgggtcggaggcccagcagcgtctggggaggggcgtgggggaggcgtgtccaaggccggctggccccgccccgccccgccgcctggcctctggcccgctggggcgcgggctttcgctttcagtcgagggctagcgagcgcagcggagcctggagagaaggcgctgggctgcgagggcgcgagggcgcgagggcagggggcaaccggaccccgcccgcacccatggcgcccgtcgccgtctgggccgcgctggccgtcggactggagctctgggctgcggcgcacgccttgcccgcccaggtgggtgactcgcgcggcccacgggggacagccgccccgcatgtccacccggctggtgcgcagccttcgggtgcccgggccgcgctctcccggggcgctgtcacgggctgggaggctgggagtcccagtcgccgccccccatccgcatcagacacgcgcgcctctggggacccgctggggactccgggcccggcacacgtgcgctcggggcacaactctggcccccgaagcccctcttacccgcgtcgtgacaggggcgcaccctggttcctccgcgagcgcaggccggggcatttggggctgagcagcgggtcctgggcagacccccgctagacccgggacccctcttccctcaccccggcgactgccgcgacagcccttccctcccacgcggtggagaaggggctgtgccggggcgctgccccactgcccacgccgggcaccctcttcaaaagacttccttttcctctgggcgacggttttccgatttcttagaaataccagggtcctgtgtctgaagagcaggaccaggtgtgtgtcaggtccactgagggcacagctggagggcgagctgcctgtctgcttcctccgatgcgtccgggggctactgcagagtctgttttctgcggcctctggggacagggcaagcgagggaggtctgggctggtaatcgagcaaggcaaatgaagtctccgggggccgcaggaaaatggagacagcag

SEQ ID NO: 221237 - DNA, 180 bp, Homo sapiens
  chr1:13839617-13839797
  hyper
cagcacctgcagcgactccagggtctcgaaggcgtcctcgtgcacgcccaccaggttgttgttagccaggctaagcttcaccagcctcccggccgagcggaaggcgccggcgcccagctgggtcaagttgttgtagctgaggtcgaggaacacgagcttggccgagccgctgaacgtgcc

SEQ ID NO: 221238 - DNA, 300 bp, Homo sapiens
  chr1:13840000-13840300
  hyper
cggggcacgcgtgcccgggcgcgagcagcagcagaaggctgcagagcccgagcgccgcggcggcgcaggctggggctcgggggcgcatggccggggggcccgcgccggccgcggcgagaaggaagcggctctcggagcgagccctggcgcgggacggcgcggtgaggcactggctgccgggcgcggggagccagagggcggcccgggcggggagggcgtgcgcccgggcgtgcgggggcgatggagcgcggcgcggacggactggggagccgggacagcagggatggagaggggaggggc

SEQ ID NO: 221239 - DNA, 714 bp, Homo sapiens
  chr1:14026482-14027196
  hyper
ggtcggacttgccgcgacgccagccgccggggttccttcccgaggcgccgccatgggatccgcggtgacctacgaggggcggctgggtggtggccattgggcgacggcgcagggtcaagggccgggctctgggatcgtggggagaccgggggtcccggagccccccagccccgcaggccactgcctcgccgcccgacgtcacttccgactggagtcaagatggcggcggcgcggccgcgggcgccggggccggcgaaacagcggcggcggcggcggccctcggtgctctgaggcgctggcgcggcgggcgcgggtaaggagtggcgcgggtgggcggcctctgggctcgcgccgggacgctggtccctccccccgaggagcgcggcggcgacggcggcggcgacacgctggggacccggcgccgcagggatggccgggtcggcggacgcgccccctcagaggtcccgggcgtgccgggggccccgggacgaggcgcgggcctccgggtcggtggccccgcgggtgggtggcggcgccgggctcctccttgtcggccgtggggtccctgcggcgaagttcgggattcggtttgtcgccgtgaagagccgcgcgccccgcgggggacgcgtgcgggctgcagagactggccgggtgcgggcggcggtggggccacctggggccccacgtggggccgggcgccgtcccaattgtcaa

SEQ ID NO: 221240 - DNA, 960 bp, Homo sapiens
  chr1:14925094-14926054
  hyper
gcccccagcctccgaccgagaccccctcccgagccggcggcgaatggtaggctccatttaaagagtgcctggtggcgcgcggtgtccttcttggagcagctctcggcgcccgcccgccggggtctcggcgatcgctgctcctcctcctccttctcctcctcttttttctcctccgcctcctccccccgccgcctcgccaccgccgcggctagggctggaggcgccgctgtcattcctgtgccggaggaaccggcgctgccggtgcctgggggtcggggcgcgggcgaagccgggccgcggaggacacaacaggtagagccgggggtgcccggccgcgcgccccccgcgcatcatgcagctctttgtcacctctctcgcccccaggccaaaatcctgagcatgatggaagacaataagcagctcgcgctccgcatcgatggggcggtccagtcggccagccaggaggtgaccaacctgcgagccgaactcacggccaccaaccggagactggcggaactgagcggcggcggcggccccggcccgggcccgggagccgcggccagcgcctcggcggcgggggactcggcggcgacgaacatggagaacccccagcttggagcgcaaggtaggatcgccccggcgcccagggcggaggaaggcgagcagagcacgcccggcctcggaggtggccggggacccggggtcccccacacccggggcgaaatcgctttgcattctggcttgtaaccctttccgcccggcggtggccaccgctgctctccggctgggagttgcaggctgctgtcattcacgaaaacccgagcgcagtgtgcacggggtcacacggtcacaccggccccggccagcctgagcgaggcgcagccggcgggtcccttccggcatcagaaagtgccctttccgtggcaccagccccctagctccgtgcaaacttttcatgcc

SEQ ID NO: 221241 - DNA, 104 bp, Homo sapiens
  chr1:15905420-15905524
  hyper
cgcttacagtccaggagaccctcatccacacaccggcggaagggcgccccgtggtagagcttctctcctagggccttgtcggtcgtgtccgtgtgcgcatccac

SEQ ID NO: 221242 - DNA, 167 bp, Homo sapiens
  chr1:15928927-15929094
  hyper
tatgatattccaatgatagattcacctaagatgcatttctcatatctctgttaaacaatgcatgactataatttctccggtcatgtttccttatgtctgaaaacaaagggcactgaaacctgtttgttcactttagttcacaggctgattagaaaagtaagtaaaat

SEQ ID NO: 221243 - DNA, 736 bp, Homo sapiens
  chr1:16482059-16482795
  hyper
agtcgccgcctggactgcaaccgcgtggcctgcgccgcgtcctcttctccgcagcctccgaggcccgtgcgaccaagctgaaaccgcttattctccggagcccctatgaccccgggtgggggccagggctcgcctcgatcgcagcccgtgcgccctccggactccagttcgccgggactgggcgacaccaggtaggttccaaagttgcgcgcgtcaaggagcgccgggctctagggggcactggggcccgggggccaggggtccagacgccgcgcgcactcaccttccttgccctgcgccgccgcggccgcggccagcgcacagccccacagcagggcgaagcaggcgcgggctgcctggagctccatgccgcgcttctcgctctcggtccgatccccccgagcccggctcccgcacacccgcacgcctgcacgccggcctcggtgtccgctcccgcccgccggcctgcgcgcaacttctgcccctcctgccccgagtccttaatggaagttgggtgagaaccgactcctgttcattcatgccctgcgtgacgtcaccaacgcccgccctcaggaatgtctttaaaggggccgggctggcacccggaggagagggaggggaagtccggaggggtttggaggaggaccttggggccctctggactcgcgggctccccgcaggccttccaaagtttgagcgtctcaaagcgccagcgcccctacggattagcccccag

SEQ ID NO: 221244 - DNA, 127 bp, Homo sapiens
  chr1:16558626-16558753
  hyper
gagtatgtgggcaacgtcggccagcccagcccgcccgtccagtgtgcgcccatcagccagccgccgccccggcacactcttcacccgtagcaggggcagctcccaggcctgccggaaggctgtgagg

SEQ ID NO: 221245 - DNA, 208 bp, Homo sapiens; identical to SEQ ID NO: 197347
  chr1:17591036-17591244
  hyper

SEQ ID NO: 221246 - DNA, 240 bp, Homo sapiens
  chr1:17865959-17866199
  hyper
gtgtggccggggccgggccccatccccgcgggcctcagtttcccccctgtactgtggggggccggtgggctgccgggaccgctgggggctcgcagcgggtcgggggaggccacgtctccctcgcggcgcgctgggagcagggagggggcgcggcggccgctgccccggccaccaggggttaagcggtgacctcagccgcggcgccccgggaccgggcgggcgggggcggcgccgcgtcgc

SEQ ID NO: 221247 - DNA, 656 bp, Homo sapiens
  chr1:18434194-18434850
  hyper
agggcgggggggcggggagagggggagggacggagggagggcgagaggaggggggtgctcgcgccgccgggagaggcgagcgcgaggcagagagcgcgattcggctccaaactccggcgctgcagccgatcggactctgggccgcggtgggcaccgcgcgcagctagggagccgagaaccgcggcgagccccgaggacgcccagagcgcgagggtcgctgcgcctcgcagagccggagccgagtcgagccgggcgcccgggctgcctggccgcggcggcatgggggcgcccccgcggctctccgcgctgcccgccaccgcctcggccagtggccggaggcaggagcgcgtctgagcccatggcgaggggacccgccgccaccgcctccacccccgccgccccgccaccgccgccagctcccgggcaccatgcgaaccgccccgagcctccgccgctgcgtctgcctgctgctcgccgcgatcctggacctggcgcgcggtgagtgcgcgggcgcctggcgggagccgagcggtgaacgtgcgcggggacggggtgccgggggagggcgctggccggggtcgctccgagaggctcgggctacgagcaccggtcctgcccggggtctgtggagctggttggctcgatgagggagggag

SEQ ID NO: 221248 - DNA, 420 bp, Homo sapiens
  chr1:18436786-18437206
  hyper
cacacgagggtggggtccctccttcctccttccaagtctgtgcccagaatggggggcggggtgcgagaagagtccgtgagagacgcaagaggcgggctgtgccggaggagggcgcccttcctggaggtggccgagagaggtgcacctggcagcggctttgcagggccacctgcctccgagggcgcagagaggagcaacccgcgccggccttcacgaacgtactggcggtcactgctcggggaggggcacggccagaacgccctcgccggttctgcccctttgggtggcagagcaagggtgcccgacgctagagagtcgggtctggcaggaggaaggaggccgctgcccctcgcactggctgggccggaagtccttgccctggctccccacttcccagaatcagaccctccaaaggagaaa

SEQ ID NO: 221249 - DNA, 360 bp, Homo sapiens
  chr1:18437320-18437680
  hyper
gccgggctggggatggaggagtggtccttagccgctgttcagccctgggaaacgttccgctgagagcagggtgggggcagccccagttaggggtagcccacggccccagccgggggtctccgggattgcgcgggcggaggtgggcggccctgcgggttctcgggttctcgggttctctgtctccgcagccgcgtgtcagcaggtggatgggatggaggggctgtctccgctaggccgccgcaaccgcaacgccgagactgcgggggctgtgcgcgcgcgagcgggtgtgacgactttatatatttatcctcccttcacacgcccccttcccactgggcggggcctctggcgcggcagggt

SEQ ID NO: 221250 - DNA, 360 bp, Homo sapiens
  chr1:18967312-18967672
  hyper
cgctggaggggcgcgccgggccgggggctgggggggatggggcgagcggagaggggcgtgcggagctgggaacgtcccggcggagggggctcccggcggagggggctcccggcgaggggccgagcccacactgggctgacaaggctccccttttcttccctccatccccccaaccgaagaagagagagggggaggcgggagcagagactaacgagaaacaacaatgaggagataactattacaaaggcaaacactggcgctcgcgcgctcgcagccccagaacccgcggtaaataaacaaagtctgcaaactgtttgctagataaactcgtgcctaaattgagtgtgacgagcaaggaga

SEQ ID NO: 221251 - DNA, 240 bp, Homo sapiens
  chr1:18967852-18968092
  hyper
cggaagagctgagtgttggggggtgcctttgggactccgtggggagccaagaggggctccccagggcgcgcaagaaaagaggctcggttcccggattgagtgaggttcccgtgctcagccggtcttggaacgcaggcacgtctgaaccgggtggggtcccccgctgcgagggcgtgcgggttttgtgttcccctcggggcacgcaccgccacacttgggctgtttcaaggcgtttgtacc

SEQ ID NO: 221252 - DNA, 291 bp, Homo sapiens
  chr1:19043557-19043848
  hyper
ctttgatccatggcccgaggccgcctgacagtggaaaatgcggggagacaaaaccactcagtcaaagtgattcccaacaactgtctccccgagataaggacgccctcgggctcggcggcctgcttaattcccgctgcccgggcctgggatcccgagcagccgcgcgcctggccgccccccggactgcggagccgccgctcgctcgtccagtcttggtcgcggggcctcggccgtctcgggacggggcaggcggcgaagggacgggcagccggtaagcaagacccttgctgc

SEQ ID NO: 221253 - DNA, 325 bp, Homo sapiens; identical to SEQ ID NO: 197362
  chr1:19639187-19639512
  hyper

SEQ ID NO: 221254 - DNA, 284 bp, Homo sapiens
  chr1:19991372-19991656
  hyper
cggcctctcctccgcgcgtgcgggcccctcgcggcgcctcccgggctcgggagacccggtcccgccgcccgcccggcccgcggccgcctcttcctctcgcagccccgcggcgcttgccgcagtcgcaggcggcggagcagccagagcgccccaggtaccagtgcgggcgggagacggaggcgaccctgctgccgggtggggagggggcgccgcgcggccgctgccctcctcttcccgcggggcctggcggccccggcgaacccccgcgccgcacaggccgtgtg

SEQ ID NO: 221255 - DNA, 138 bp, Homo sapiens
  chr1:20812696-20812834
  hyper
gagaaatgccggccgcggcgccgaggcgaggcgcggggaggagggcgggaggaggcggggaggaggggacccgcgggcctcggggagagatccctgcgagcggagcgacgtcacggggccgcgccggccggcccgggc

SEQ ID NO: 221256 - DNA, 480 bp, Homo sapiens
  chr1:20878791-20879271
  hyper
ccaaataaattagcatggacgaagccctcctgtatatttcaggggattcctagtacttaacagccctctctacccccacccctccactaataatgattaaacccgttccaccgcgcctgtgcagggtcccgggcagcgcgagcctgcgtggggggaggggagaagagggcaaggggaggggacaagagagctagcggtcccgcccggtgatgtaggcagcccggggaggtggagccgcgacgcctgaaggagtccccaccgcagccgcgctctcggtctgccccactaagcagccgccagcggctccggcgacccaaattgcggcggcagggaccgcggaaatcccaccgtttgggcttggtggacgtccagcccacctcacccccagccccggcccctcctcgcttcccagacggctggagacactcccgggaaaagcggtcctcagccactcggccgccgtccgcacctcggctgctg

SEQ ID NO: 221257 - DNA, 1020 bp, Homo sapiens
  chr1:20879450-20880470
  hyper
tttcgccgccgccgcgatgctgccctggagacgtaacaaattcgtgctggtggaggacgaggccaagtgcaaggcgaagagcctgagtccggggctcgcctacacgtcgctgctctccagcttcctgcgctcctgcccggacctgctgcccgactggccgctggagcgcttgggccgtgtgttccgcagccggcgccagaaagtggagctcaacaaggaggacccgacctacaccgtgtggtacctgggcaacgccgtcaccctgcacgccaagggcgacggctgcaccgacgacgccgtgggcaagatctgggctcgctgcgggcctggcgggggcactaagatgaagctgacgctggggccgcacggcatccgcatgcagccgtgcgagcgcagcgccgccgggggttcggggggccgcaggccggcgcacgcctacctgctgccgcgcatcacctactgcacggcggacgggcgccacccgcgcgtcttcgcctgggtctaccgccaccaggcgcgccacaaggccgtggtgctgcgctgccacgctgtgctgctggcgcgggcgcacaaggcgcgcgccctggcccgcctgctccgccagaccgcgctggcggccttcagcgacttcaagcgcctgcagcgccagagcgacgcgcgccacgtgcgccagcagcatctccgcgctgggggcgccgccgcctcggtgccccgcgccccactgcgccgcctgctcaatgccaagtgcgcctaccggccgccgccgagcgagcgcagccgcggggcgccgcgcctcagcagcatccaggaggaggacgaggaggaggaggaggacgacgcggaggagcaagagggaggagtcccccagcgcgagcggccggaggtgctcagcctggcccgggagctgaggacgtgcagcctgcggggcgccccggcgcccccgccgcccgcgcagccccgccgctggaaggccggccccagggagcgggcgggccaggcgcgctgagagccgaaggacag

SEQ ID NO: 221258 - DNA, 92 bp, Homo sapiens; identical to SEQ ID NO: 197376
  chr1:20959849-20959941
  hyper

SEQ ID NO: 221259 - DNA, 240 bp, Homo sapiens
  chr1:21058284-21058524
  hyper
gggcgctgcggggaacggccaggggccccggcagagtccccggacccaggagcgtgctgggctccgctgcaggggacggaggaggctacagtggcagggagggcagatgacgacggagcgggtgacgggcgcccctcactcccgagaccctcccgcgcccgtgtcagcgtaccaagccccccgcccctgcccggctcccggcgctcgctcaccgcctctcgagtccggtcccggccgctc

SEQ ID NO: 221260 - DNA, 370 bp, Homo sapiens; identical to SEQ ID NO: 197378
  chr1:21563147-21563517
  hyper

SEQ ID NO: 221261 - DNA, 1080 bp, Homo sapiens
  chr1:23037200-23038280
  hyper
cggccgccgggggccgggacgcgcgcggggggcggtggcctggcgaggctccccccgcgcccgcggctcaggtgggccgtgcccagcgctggcggagcccgggtccccgttctgcccgggctggatggctcattctgctggctgcgcggtggcggcggctgtgtgtgcgccgcgccttgccgccccccctggccccccgagcccggggcgcgcgctcccgcccgggccgtccgggccccgcggcgccgcggcccgaggccccgggaagcgcagccatggctctgcggaggctgggggccgcgctgctgctgctgccgctgctcgccgccgtggaaggtgagcgagcgggcgggcgggcgggcgatgggggcggggagcggccgggcacgggcggccgccggcgcccacctccgctccgcggcccgcaaagtttgcccgggggccggcgccgggcgcaggtggccgcggggaggtgtgtccggccgcgccgggaggagcgggccccgcgggcgcccggggagcggcgggcgctgattgactgtgccaggaggaggcgaagggaccatcttgccgaggctttgtagccagcccggcgagcgccgcccagggctgggggctgcccacgcgcgctcgccgcccccggctcgggcagccgcctcgcgccggcctggtcttgctccgcacagggtggaggggcgcgggcccggccgtggcggggggcggggggggcgccggcgctcggtcggggctggaaagtttggcagggagcagagggagggaggcaccgcggccggccggggtgggggctcccggcccgcgcccccgagatggggcccggcgccccggagagcagggactggcagagtggaagggagcgcgccagcccccgcgtcggtgcctgcccatcgcccgcggcgtacaatggggtcccctccccgagaggactgcgcgggggatgggtctgtgggcatctctccgccgcgcaaggtctccgggcacccccgccggccaccgccccgcggccgcggcgctcagcgtggcggctggagccccgggaactctccagctgccgccggggcc

SEQ ID NO: 221262 - DNA, 248 bp, Homo sapiens
  chr1:23280132-23280380
  hyper
cggcgtgcccgtctcgttggcgaagtaggcgcccgggcaggccagcagcggcgccagcagcgtcttggccgcgtcgggccgcaggagccgccggggcccgccgcccaggagcgccacggccagcttggccaggtcggcggcggtagagtacatctggcccgacggccggtaccagcccaggtcatagagtggcgccggccgcccgctgccgtagaagcccgcggccaggcgcgcgcgcacgtcgggcg

SEQ ID NO: 221263 - DNA, 105 bp, Homo sapiens
  chr1:23346265-23346370
  hyper
accccgcaagaaagagcctccgcgggcctcgccccccgggggcctggcggaaccgccggggtccgcagggcctcaggccggccctactgtcgtgcctgggtctgc

SEQ ID NO: 221264 - DNA, 143 bp, Homo sapiens
  chr1:23543645-23543788
  hyper
tggcgcgcgcccgtccgagggcacagagaggcgggacgccccgggcccccgaggccccaggaggggcgccgctcccggcctcagttccccgcggacggccgctggggccaggctgcagacgcggccccgagagcttacccgct

SEQ ID NO: 221265 - DNA, 105 bp, Homo sapiens
  chr1:23857853-23857958
  hyper
ccccccggaaagaacgcgtcctcgaggcggcgattgcaacactagcttcgctgcttaaaggggcagccacacctgctgttggtgccgccagccgccggccgcgct

SEQ ID NO: 221266 - DNA, 105 bp, Homo sapiens
  chr1:24126604-24126709
  hyper
agatactagggccagagaggtgaaacagttgcccttcggtcccacagctggcgacagcgggctggaatctggatcgccaggctcgcagcccggccctctccccag

SEQ ID NO: 221267 - DNA, 307 bp, Homo sapiens
  chr1:24229167-24229474
  hyper
gtgcacgtcggccacgagctcgttgttgaacatgagcgcgttcctctcgcgcagcgtgggggaccgcgccatttggggctctccgggtggttgttgccaagtgtgggctgcgcgggcgcgggcgcgggggcgcggtgcaggctgcgctgcccggccttcctgcccacggcggcgccggcgttgctgtgggctaggaccgcggccgcggcgctggcggggacgtagagctccgccgccatcctcgagggcggggcgtcgggggcagcctcggagcctgtggacccccgccccgcgccctcgcgccgcg

SEQ ID NO: 221268 - DNA, 105 bp, Homo sapiens
  chr1:25255277-25255382
  hyper
aatgggagcagggacggcctcagcttccagccacctcgggcagcaccacccccagccgccggcccttcctgccctgcccttttctcacggcagctgtgagaggtt

SEQ ID NO: 221269 - DNA, 1831 bp, Homo sapiens
  chr1:25255443-25257274
  hyper
acagtcgcctactccctggcataaagaaaaaggtcctctaaatggctgggggctgccagggttaggggtcccccaatctcaactcgccattcgggacgcataatatccccgagcaaacgtctggagagcagtgccccgatcccggcctagcgccgtccggtaaaatttcggaagcccgagggtgtgagcaggaagcttttgcgaagcggcgcgggaggaggggtgctggaggcggagggtaggccctttcaccgttcgcaccccacccgcggtgtccttgcccctgtcccgggatcctcttctccgttacccgcagggctgtatctgagcgatccgggttaggggggcgcaaaaccccatccgcccatttccgcaccaacgtctctacgcaaggcgccccaaaacccaggtggagcggggcaaccccgttaaaagtcattcctgcagggcgcatccaaaacggaacgccgaggtcccggagccgagcgcgcagccagactgaaccgggtgcccgggtgtcgccgcggcgtctcgggcacctcccatccccactgctcccgaggctctggctcccgcagctcagacgcccggagccccagggccggcgccctcccgccccgggtcccgcactcaccttgaaggcgacgggcagcgtcttgttgcagcgccagtgcgagggcagcacggagcagaggaagttggggctgtcggtgcgcacgagctcgcctgcgtggtccgccagcacgtccaccatcgagcgcacctcgggccgggcgcgccctccgggccccacggccgcctgcgcgctcagcgcgccgctgttctcgcccatcttgccgccgccgccgccgcaggggaaggccggggagggaggtgtgaagcggcggctggtgcttgggtctacgggaatacgcataacagcggccgtcagggcgccgggcaggcggagacggcgcggcttcccccgggggcggccggcgcgggcgcctcctcggccgccgctgccgcgagaagcgggaaagcagaagcggcggggcccgggcctcagggcgcagggggcggcgcccggccactactcgccagggcccgcccgctgcgaggcctcgctggcccgacggccgcccgcagcctgcccggctagtcccgcatcctcggcgcgcggccccgcgtgcggccgcccctcgtggctgtcccggctgcctgggccgcggcggggcccgcgcggggctgtgccgctgccgccgcctcccgccccgaagctcgcccgcggccgccccgactccgcggccgcagccccagaacaaatcctccagaatcaagtggcggggccgcggccgcccgcgcggggttagtacccccggggcccgcggggcggggctggcggagcgacgcgtcgcacagccaatcggcggagcccccatcgcgggcacctcggtggcgttcgcggggaggaacggggcctgccggaggccgcccaacggggaggggcggaaggcgccaccccgcggaggaggccccagtgccacagcccagggcccccgagagctctgggagcccggggcaaatgctagaaatttgcttagaacgtccgggtcccacggaaggcgcccttgccgccctctctcgggtcgtagctccctgacgctggggcgcaaccccttcgctcctcctccccgctggccgcggccgggcttccccagctcttgctgcttcgggcctgtgacttctgcaaccccgggctgggggccgcggggtctcagggccggtgacgccgcactgggagccgccccaaagaggttactcacctccctcgtcccgcacattattctga

SEQ ID NO: 221270 - DNA, 151 bp, Homo sapiens
  chr1:25870618-25870769
  hyper
ggggaggcaggcgctcgtcgtcggtgcctaggggaggaggagagggcgcaggggcttgggaagacgcccccgtcccgcacccctgcgccccagccagcagctgcggcggtcaggagcccactggcccgttctcccgccccctgcccgaccc

SEQ ID NO: 221271 - DNA, 304 bp, Homo sapiens
  chr1:26663055-26663359
  hyper
ccgccaccggggaggccccgccccccgcggccggcacgcacctgtaggaccggctgcagcgaggcgagggtgctgttgccagcgccccagtcctcgcagttacgatacacgcccttctccagcacgtactgttccccggagaagcccacctcctggtaggccacccacctgcaggaagggcggggcgcgagtcagctgggacggagcctgcacctctcctggaaccgcccccggctcgcccgggcccgccccgctcccggagcccgggtcacttacacgccgctgagcacgtggatggcctgtg

SEQ ID NO: 221272 - DNA, 105 bp, Homo sapiens
  chr1:26735163-26735268
  hyper
gggaatcaagacagcgtgactcaattcagcaccgtggacagagctgctggagccctcaggaccctggacagagaagcaggccgcgcattcccggggaaccgaatt

SEQ ID NO: 221273 - DNA, 300 bp, Homo sapiens
  chr1:26737229-26737529
  hyper
gggagcctttgaaaagccgtgggccctcccaccgctattgtgcgggggaagatgtagcagcttcttctccgaaccaaccctttgccttcggacttctccggggccagcagccgcccgaccaggggcccggggccacgggctcagccgacgaccatgggctccgtgtccaaccagcagtttgcaggttcgagctcgggacttagcggggacactttaggattcaggggcggccaggagccacgtagaagggaggtggggaactgagtcctaggctgcccaaaggaccccaagacggtgcgg

SEQ ID NO: 221274 - DNA, 632 bp, Homo sapiens
  chr1:26737618-26738250
  hyper
aggcttgtcccgccgtgagtctctgggaaacgcgttgtgggaagaggagcaaaactttcggggcactactgtcccggtgtacgctaggggaacgcgggaggcgaccgggataggtttcttctcttctgttgcttggtagctgccccctcctggctgtccacttgtggggctggatactcgggtctccctgcctggggcccgagacggccctccgattccgtgccccccagctaagtgcccggccctccctctctccaggtggctgcgccaaggcggcagaagaggcgcccgaggaggcgccggaggacgcggcccgggcggcggacgagcctcagctgctgcacggtgcgggcatctgtaagtggttcaacgtgcgcatggggttcggcttcctgtccatgaccgcccgcgccggggtcgcgctcgaccccccagtggatgtctttgtgcaccaggtgagactgattccggtaactttgcccagggaagggcgtctaggcgcccatatccacgggtgggctccgggctcgcagttgaattgagggccatcgggagccctcattatgcatccctgtctttgcttcggcaccccaattctgagtccctgttaactatctcgtgggggagtagtg

SEQ ID NO: 221275 - DNA, 106 bp, Homo sapiens; identical to SEQ ID NO: 197405
  chr1:26855980-26856086
  hyper

SEQ ID NO: 221276 - DNA, 125 bp, Homo sapiens; identical to SEQ ID NO: 197408
  chr1:27286497-27286622
  hyper

SEQ ID NO: 221277 - DNA, 450 bp, Homo sapiens
  chr1:27332479-27332929
  hyper
ttgcacgggggtcacgtagtaattgacagtggctggcacaaccccgtcagtgcctggagggcgccaggccagggcggcagtggcagctgggccctgctcagccagtgcctgcagcgccagtgcggcaatgaggtccagcgtctggcggcgctcgtggttcatgaggcacacggtgctctcgttgaccacccggtgcagtgtcaccaggcaggcgtaacggcgggctgcatctgccccaccgaagtgggcctccaggtagcgctctagggtgcgccgctgctccaccaggtctggaaagtcgatgaagaagcgggagcacatgtagcgctgcagggcgcgcacatcggtgctgggccggggccggaagccccgcaccaggaggtggcagtacttgaggaggccaccacctcggatctcctcgggactgcgcgtggcgatgacacggtgccg

SEQ ID NO: 221278 - DNA, 154 bp, Homo sapiens
  chr1:27719062-27719216
  hyper
gccgcgcccattggctgatcggaccgctgacgtcaccgaaccggtggccgggggcggggcggggtgactcacgccgcttctcccgcggccgcgggggcttctcggggtccacgcacgccctgcgccgccaggacccgagcggagcctccccgcg

SEQ ID NO: 221279 - DNA, 705 bp, Homo sapiens
  chr1:27901986-27902691
  hyper
cctcgccgcggaggcgccccctagggtcgggcgccaggcgcccctgcccgagctgcgcgcttagctcgctcccccggccggccgcgctctccagctgcaggaaattccagaagctctccatcatccccgcgcagcgcgcagcccgggctgccaaggctccccgaaggagagccacatgccggccggccgcgcggcccgccctcggcccccacccggtccaacccggccgggtagccacgtctggccgggcgggggccaagccggccgccccttcccgcgccccgggcccggcggaatgcgtggcagccccgaccgggggctattttgagcgggaggggagcggcccggcctcggtgttttcggctttttcctggcccccggcccgccaggccgggccctctgctgcccgctgaatgggagggggggcggggtcacgtggcggggggaggggagggccgtcgcgatccgggtcgggctcgggctctgccccggcccggggactggaggcgcccggcagcggtccggacctgcgctctcggacgcggctgagtggcggggttattaatagcgtgcctggctcgggcagtggctccagggcgcccgctacctgcacgcccctcctgcagagagcactggcggcccggcgctccctccgcagcggcggactgaggcctaactggatagcgccaccgtgaaccggcggcc

SEQ ID NO: 221280 - DNA, 95 bp, Homo sapiens; identical to SEQ ID NO: 197415
  chr1:27928761-27928856
  hyper

SEQ ID NO: 221281 - DNA, 190 bp, Homo sapiens
  chr1:27929167-27929357
  hyper
gggaagagggggccgattcaatcagagccccagaggaaacgcattgataggcgattatttatttatttatgcaaaagtgagccgactttgttcgccaggtaaccgggcacgcggcccaacccctccagccctagccgcccccaaatccctcctccgccccacaccccctccgggtcattaggtccccgcc

SEQ ID NO: 221282 - DNA, 377 bp, Homo sapiens
  chr1:28586875-28587252
  hyper
tcgcgggggccggcgggcagaggacccttcctggggtgcctcccggctcctgtcccccagcgcggggcgtaggcacctgggactggccagtgaaagtcgacctcatcctatgtccaccgcactcctgctttggagggagagcgcaggggctctgggggcttggcgggccgcccggtacgcggcggcggcagccaaagctggggggagaggggacaaccctggtcgcggcttccgaagccaagcgcgggttaggctgcgccctgctaagtaagtggtctgaaggcccagaagtttgttttccagaaattcctcccccaccctcccttcgcgccgctcccctccacccccccgcattcgcatcccggcatagcccgcag

SEQ ID NO: 221283 - DNA, 165 bp, Homo sapiens
  chr1:28879826-28879991
  hyper
aggctaggggtcctggggccccacctgggttcgtgggagggaaaggtggtgctttggggacatagaatgggagcaatccaaggactgaggcgcgctgttctgggaccggaggagtggggtttctaggtccaaggggaggctccctaaagcggggcaagcttgaac

SEQ ID NO: 221284 - DNA, 314 bp, Homo sapiens
  chr1:28919087-28919401
  hyper
agacgtcgctgctgcggagctacgtggcaggcgcgcctggcgccccggagccggagcccgagcccgagcccacggtgggcgccgagtgctaccgccgcgcgctgcagctgcgggccgggccgcgggtcaagctgcaactctgggacaccgcgggccacgagcgcttcaggtgcgggtagccggggcgcgggagggacttctggtggggggctcggtgagcgtgctttaggccacggcaactcccgagaggccaactcagaggtcaggcggagggcgaggtccctgccctgggtcccgcccggtccactggggcc

SEQ ID NO: 221285 - DNA, 280 bp, Homo sapiens
  chr1:29062803-29063083
  hyper
tctccttcctgcaatgctaaggggtgaatctcttttgcgggagactggattctttcggtgtgtgttttgctctctgggtactctttctgtagtcggctaacagaggatgaccaagcccctcgcgggggcgggggcgggtcactcccggacagggcccccatgaagtttccctggggactgtgtgactccctaggggtcgggttacctcccagatgggggtggggtatcacttgcagctggaaggcaggttcattttaaggtctcgcgggcttcggaggcc

SEQ ID NO: 221286 - DNA, 602 bp, Homo sapiens
  chr1:29138558-29139160
  hyper
gcccagctccgagccggtggtgcagcgtccgcccccggtcgcgggcgcagactggcggccgcctccgggccacgtggtgcgcgcggcgggcgcgtccgaggagcctgcggctgctcctggctcacagcgctccgggcgaggagagcgggcggacgccgggggctgggccggtgcgggcggcgaggcaggcggacgaggcgcagagacagcggggcggccggggcgcggcagccggcggcgtcggggccgcggcctctgccttgccgctcccctcgcgtcggatccccgcgcccagggcgcacggtggagagggacgcggcggagccggccggcagccatggaaccggccccctccgccggcgccgagctgcagcccccgctcttcgccaacgcctcggacgcctaccctagcgcctgccccagcgctggcgccaatgcgtcggggccgccaggcgcgcggagcgcctcgtccctcgccctggcaatcgccatcaccgcgctctactcggccgtgtgcgccgtggggctgctgggcaacgtgcttgtcatgttcggcatcgtccggtgagtccgctgcgggccggcgccgcagggctggagcc

SEQ ID NO: 221287 - DNA, 360 bp, Homo sapiens
  chr1:29448433-29448793
  hyper
aatccgggagggaagctccggccgcccagcccaggccgcttggagatccctggcggccacccccggattttcccgggcggcgaggcggggagccgcccgcgctcgggttttccgcagcggagctccgagccaggcacgcgcggcagaagccggagttggcccggccagcgggcggagaggagggaggggggcgcaggctgttccctggcgcatcccgggctgcaaatctgccgcctgcgtccggtccgcaagcccgcgggtcttgggcctcgggaaacgtgcggcccccagctgccgcgtctccagggtaagtacctcccgggctcgaccccacccccgcacgtggctgcaccgtagcaa

SEQ ID NO: 221288 - DNA, 180 bp, Homo sapiens
  chr1:29448958-29449138
  hyper
agctgcagcaggagcgacttgagctagacaccgggaagaccgctcggatcaagaccagccaggcagaggaggagaggcggcgccgacttcgcccaagatttccatcaagtccacgcatgagaggcctctccctcccccagcggtcgtgctggggccacggcagcaggcgggggtgccggt

SEQ ID NO: 221289 - DNA, 140 bp, Homo sapiens; identical to SEQ ID NO: 197428
  chr1:31192212-31192352
  hyper

SEQ ID NO: 221290 - DNA, 121 bp, Homo sapiens
  chr1:32666272-32666393
  hyper
cttgcaccgaagcatcactcgagaccccaaacctccaggtcagtagccccctgagggagtgagggcgggggcggaatgacgcgggtctgacgctctgtcttcgagcgcggctgcggagctg

SEQ ID NO: 221291 - DNA, 137 bp, Homo sapiens
  chr1:32757550-32757687
  hyper
tctccgggctgcccttgccccctgccgagttccgggcccgtgtctgcgcaagctgattggctggagcggtgcccgggctgcgcggctataggtgagcccaggaggggacgggcggggcgggccggaggcccgccccc

SEQ ID NO: 221292 - DNA, 101 bp, Homo sapiens; identical to SEQ ID NO: 197438
  chr1:32852880-32852981
  hyper

SEQ ID NO: 221293 - DNA, 36 bp, Homo sapiens; identical to SEQ ID NO: 197442
  chr1:33005606-33005642
  hyper

SEQ ID NO: 221294 - DNA, 138 bp, Homo sapiens
  chr1:33207544-33207682
  hyper
ccccgcctgccatggcggcccgcgcgccccccgccgcacctgcggccgaggagccggggaacccgggcggccccccgcgcaggaagaagtcccgctccggcgcgtccggcctccgccgcgccttcagctggctgcggg

SEQ ID NO: 221295 - DNA, 169 bp, Homo sapiens
  chr1:33438469-33438638
  hyper
tgcgtttcacactgcggaacgagcacggctcgcgtcttcccttgcccggggcagggccagcgctttccttgggcactcgaacgaggggagggggccgcttagtgcctggaaatccgagcagccttggcttgcttggctgcgcaacccgccaatccggctgcgcccggtg

SEQ ID NO: 221296 - DNA, 498 bp, Homo sapiens; identical to SEQ ID NO: 197450
  chr1:33721208-33721706
  hyper

SEQ ID NO: 221297 - DNA, 333 bp, Homo sapiens
  chr1:33772745-33773078
  hyper
tcggccagcgcctcgggcccaaaagtgccgctgaagtgctggtccacgtccatgcagaacatgaagtgcgcctcgcggcccggcagcccgcccagcgccgcgtgcaacgtgcgcatgcgcgccatcgacacgtcttgccagcgccgctcgcgcgccacgcgctccacgggcagccggcgtcccgggcccagcgccacgcggggcaccgctcccggaagctcggtgaacacgtagtacatcacgctctggcccgccatgaagtgctgctccgccgtctccaggaagcgctccaggtacttctccaggtatctaagggcgcggcgccaccgtcag

SEQ ID NO: 221298 - DNA, 240 bp, Homo sapiens
  chr1:33896473-33896713
  hyper
ctgggtgcccaaagggttaagccggcagcgcggcggccggtgtcccccgcgcgctgcccgtcagccgcgagctggccccagcgcgcacgcgcccgcccgttacctgcggtcgcctccgcgctcctcctccacctggccgctctctcccgggggccgcccctcagcccgccccctcggctcggcgccgcgcaccctgctggctgctcggacgctgcccgcggaggaggggcgagggcgcta

SEQ ID NO: 221299 - DNA, 360 bp, Homo sapiens
  chr1:34629403-34629763
  hyper
ttggacccgtctccacccgggcacacggaactttctagcttgtagctagaactgagcttcggaggggtgctgtgggtaaagcgggagggcaccagtcgcggccagtagcctccacaggggaccgggttccctcgaaggttcgcgtacctcccccgcgcgctgcaagctgcagccagacacccgcgaagttccgggactctccgcacccgctagatctgccccttcccggactcggtcgtcgggagctggtcccgccgcccgcgccgccgctgccgctgccgcagccgaggcgctcggctgcagcagggcgcgggaaagggcactttggcgcggagtgagcaccgaggggaatgtggcagc

SEQ ID NO: 221300 - DNA, 180 bp, Homo sapiens
  chr1:34629809-34629989
  hyper
cccaccccctccttcccatccctcaacaccctccagcccccacctgcaccctcctgcaaggaatgcgcgggacccccaccgtgggcacgcgtccacctgaaccccctcctagctccgagcgccgagggaggggtagcatttgaggagggggatggcggccgcagtctgcagtcggttcca

SEQ ID NO: 221301 - DNA, 180 bp, Homo sapiens
  chr1:34630175-34630355
  hyper
gggctgggaggctggagaaactgaagccacagaccaggtgccccgcaaccccgggcggggatgtctgtctcccaggcccccacaccggccgcatccgtccaagttgcggctggggttggggcagcagtgagggtgagggtggaggtgaggacgtggctgagggtggggtgggagacggag

SEQ ID NO: 221302 - DNA, 660 bp, Homo sapiens
  chr1:34630399-34631059
  hyper
caggcagggatagaggcggggggagggactgggaccgggtcgaggatgggtgggctcggggctcgggtggggcgcgcggcggccgctggctcctcggcgcggctggactcacccgcggcggccgagacgctgagcaacccacagcccagcaacagcagcagaggcggcggcgttggcggcggcgggcggccccagcggctcccggcgcccggcacaagcgccgaaatcccggtttcgccgcgagccctccccgcggggcagccgcagcgccccagctcccgtccccgcgagcgcggcatggcgcggccggcagcgccgagggagaggctccgctcgccgccgaggagaaaggaggtcaggagagctctggagcttttttctgctcggaaaaaatcccggtacgcgggagccctgagcttctgcggctggaatgaaccaagtgtccgcccggccggggagaggcgcgctgcgctctcggaaatgactcgctccaatcccgcttcgcggggttcgcgccggggggcgggagggggtgaattatccccggattaatcactccggagccgcttctccgccgctccaaatgctgggggtggaggcgcagctaaggataaaatattggggggcgggggttcctcttcagcgccacctccacctcca

SEQ ID NO: 221303 - DNA, 84 bp, Homo sapiens
  chr1:35260186-35260270
  hyper
cgggcgctggcggccgtagagcgtcagatggccaagatctcggtggcagaagatggtcgcctgcgcatccgcggagcactgatg

SEQ ID NO: 221304 - DNA, 839 bp, Homo sapiens
  chr1:35394587-35395426
  hyper
ccggcacacacaatcgcccacagacccacacagtgacacactcggcacagacacacagcgacacgcactcacattcacacacctgcagaggaaacttctctccggatctccccagcaccacgacttcccccacaaccagctggctactccctcccagacccgagcctccagccgggcgagggctgggccggggctggcctgtccccgcggccctgaccgggagcgtgggtccgcggtccgcgtggtcccctgcccgcccctcgggtcgggcccgcgggcagccaggccggggcaggagcgggggcagctgaggaggcccagcccctcccccctcccggggccgggagccgagcgccggagcccggggcgtgggcggcgccggggccgcagccgggccgtgcctggggggcgctgcagagggagccgcgagcgcggccccgtccccactcctccccgcggcttacctggcccggctcgggctccggccgggttacatggtgccggcggcccgggccgggggcgctgcggcgttgggcaggcgggcagggaccggggcccggcactgcggagcccccagctgaggggccgcgccggctgcggagccccaagcgagcgccgagcggcagcgggcgcgggagcgggaggcggccaagccacggaggctggatttcccggggaccgggaaggggaggcggggggatcccgcccgcgcgctccgcccccgcccccgcccccgcgcagggcagccgagcagggagagggagagggagaggaagagggagggggaccgagctccccgcccccgcgcggacccaggagggccgaggtcgccgcccgcg

SEQ ID NO: 221305 - DNA, 651 bp, Homo sapiens
  chr1:36173085-36173736
  hyper
gcccctgctggagacggaggttggggagccccgagagtgggtgagaactgaggcctcggggtggaggatatcccaggagtgtggaaggaagcggtcccacgacagcccagggagacatcaaggtctagggagcggccctcaccctgagagctgtcactgaatgttgggggccggtgctaattcgcaccactcaagaacacacccacaaacccagtcccaccaccaggttcccaccccaacaccctacccgcagcagccctctcctccgtgctcccaccccgccctgcagacccgggttaatcctcccctccctgctttgtgcgccctcgcgcctgaggccaaagccctgggcggcgcgggcgctcccggcagctgaggtggcggggcgggggccgcgggggaggagacacaaaagggggaggggcccaggctgcagctgccccgtacccgcggggacaaagggcctgctggcgggccggccccagccgttttcatgcttgttgggattaggggcagtaaagggcgctcgggactgtgcggatcaacagtctgtgcggggcggcgcgtgggggcgggcttggccccgcccgcccctgctttgtgcgcagcccccggcccgcgccactcgaggcgccgcggggctccggggag

SEQ ID NO: 221306 - DNA, 130 bp, Homo sapiens
  chr1:36788084-36788214
  hyper
ctctgcggacagctcggggcccggcagcgtgtcgtcggggcccagccgagtcaccgtgtcctcctcgtcctcgtcgtcgtcctcgggctccagggtgctgctgcgggggtcccggcgctgagccgggccc

SEQ ID NO: 221307 - DNA, 866 bp, Homo sapiens; identical to SEQ ID NO: 197462
  chr1:36931643-36932509
  hyper

SEQ ID NO: 221308 - DNA, 218 bp, Homo sapiens; identical to SEQ ID NO: 197463
  chr1:36933230-36933448
  hyper

SEQ ID NO: 221309 - DNA, 212 bp, Homo sapiens
  chr1:36937029-36937241
  hyper
ttacctctgctttctgagaagaccaccggagtgggacgagaggtcccggctgagttataggccacaagggccacctcctgggcttctgaaggcaggtggaaggtgcagctgagctctgtggtgttgcagaggggcaggatggccccagcctggcctgagggtctccaagaaaccacataaccttggatccgtccgctgtcttcctccagggg

SEQ ID NO: 221310 - DNA, 77 bp, Homo sapiens; identical to SEQ ID NO: 197465
  chr1:36937669-36937746
  hyper

SEQ ID NO: 221311 - DNA, 1020 bp, Homo sapiens
  chr1:37499421-37500441
  hyper
cgtgaccccgactctggaactttgtcctcacagggaggagctcctggtggtcaccgatcggctcagcagctcggagagaggttaggaaaatctctccggaacgcgttgggaggccccctcattcccgccccctcccgggcgcacggagacccccggctccagggagcgcttaccgatccggatgacgtggggcatcccgcgcgagtccgggatccagaaggcgcacacgaggagcccggcccagtattcccaaaccagactccggaggcgccgccagggagcggtcatcgttgggcgccgccgagcgtgcccggggcgcggccgtggcgggctccctggggcggcagctctaggcgcgggcgcgcagcagccccgaaggcgccgcctggcccagccgcccggctcccgagcgccgctgcaagtggggggcgccccgcggcgccgcgcacatcttactggggggccgccccgccggcgcccgccccgcctggctgccgcccacgggctgcccgcgagcgaggctcctgggctccgcccggactccgctcggactcggctccggctccgactcgcgtcggctcggctcccgcgcgggctcccacctgccccggctgccgggctctggcgggcgggctgcacgcgtctccggccgctcctcctccagccgccgccgatgctatcgcccgggctcgcacaaagccccggagtggagttgcacgcgcgcacactctccctcccagccccctcccctgcgccctgcctcccgcctcccgcgccgcccgccgcccgcgctccctccgcgcactcccccgcgcacacacacttcacactcacacttgccgaggcgcacactcgcgcgctcacacctgcgcggggggcggggaaggggaccctggccccattgtagggggacgcccggagaacgaggactctcctcgcttcccagacgtccccacccgccccgccggccccagtcccttctactgcgagggcacggagcccgggagccaggcgtggagc

SEQ ID NO: 221312 - DNA, 240 bp, Homo sapiens
  chr1:37940547-37940787
  hyper
tccccacgggtcaccccagaaacttgccctccccggctccgggagtccggccatgggccttgcgctgcctgggcctgagctctgagtgccggacgggtgggcgaaagtggtggcctcagtggggaagccttgggccccgcaacgcacttccagccccaggattccatctgagagccccgtccctgccttctgggtcccctgggttggcgtgggggttcgaggctttacagctggggtagt

SEQ ID NO: 221313 - DNA, 240 bp, Homo sapiens
  chr1:38510526-38510766
  hyper
aaaggggaaagcggggtggggcgcatccttataggagagaagaggcgtgtagcgaataaagtgacagccccccaccctggacccgcaggctcaggagtccacgcggggagaggggatggagaactctcctcgcttcgtcctctctcccggggaatccctaaccccgcactgcgttacctgtcgctttggggaggccgctgccgggatccggccccgaacagcccgggggggcaggggcgg

SEQ ID NO: 221314 - DNA, 1620 bp, Homo sapiens
  chr1:38510777-38512397
  hyper
gggatgggggcagagagcaggcggcgggcaggatgcccggggtgagttggcgagttccggatcttcgctcctctctcccggggctcgggcgacgcagcctaccgggctgtcttcgccgctcaccggagagggtcgtccgggtgtttggttttgttcgaaagtttctgggcttttttttttttttgtaaaatccaaagcaaccgaacaaaaagagtccaggccgcgcgggcgggctgcgcgcccgcgccctgcagcgcgccggcgggggcccggcccgcggggtcactgcactgagccgggcagtgtgtggtggtggtggtggtgcagcgccgccggcgggggcggtgggggcgcggagggtggcgatgcgccgcccccgccaggccctagctccccaggcgcgtatacatcgtccatgggcgggtggcccgcgccggccgcaggggtcatgcgcttctccttctgccgccggttgcagaaccagacgcgcaccacctccttctccagctgcaggctgtctgccaagccggtgatctcgtgcgccgagggcttggggcacttgagaaagtggctctcgagcgcgcctttgacccccacctcgatggacgtgcgcttcttgcgcttgcggccctgcgccgcgatcttgtccaggttggtggggctgccgctggacgagtcggtctcctccagccacttgttgagcagcggcttgagcttgcacatgttcttgaagctcagctgcagggcctcgaagcggcagatggtggtctgcgagaacacgttaccgtagagcgtgcccagcgccagccccacgtcggcctgcgtaaagcccagcttgatgcgccgctgcttgaactgcttggcgaactgctccaggtcgtccgagctgggcgcatcctcgtccgagtgctcgcccaccgatgagccgccgccgcccgcgcccgggtgcaggtgcgccgccgccgcgtgcaggccgcccgcgtgtgcatgtccgtgtgcgtgtccgtgggcgcccagatgcggcggcggcgacggctccagctgcgcctcgtggccatcctcgtgcagcgcgtggtgcaggcccggccccgcgccgccaccgcccgccgccagcatcccggccaggccgccgccgccgccccccgggtaggccgcctgcgcgtacagcccgagcggctggggctggtggcccccgctggccccgggcgagggcgacatggccgggcccaagtggtgcgctgtgctgccctgcgcccatgccgcgcccgcgtgggccgccccctggtgcaccaggcgcgcgtggaaacctccgccgccgccgccgtcgtcggctcggccggtgccgccgccgcctgccttgccgtgttctaggtgcgggccgccggcccaatcgccgccgccgcctcctcccgtgggtagccactgggggtgcgctaggcccacggggtggcccgcgcccgcgcccagccactcgtggtgcatcagcttctgcacttcgcggtacgcggcccctgcatgcaatcgctccgcggccgccgccgccgccgccgccgccgcggcgtccgggtgcataagcggcccggtgcccccggctccgccaccggggccccgcggcaggta

SEQ ID NO: 221315 - DNA, 411 bp, Homo sapiens
  chr1:38512644-38513055
  hyper
cgctcccggggtcccgcgcgccggccgtgctgattggccgctggggcttcattcacggcccccctaccgtccgcgtacacactcacgccccgggggcgcggccgccacgtggggagtggcgcgggggtggccctgggaccgcaccccctctcgtcctggctgtgtgggccccgctttcccccagcgctggagactccgagcccggccggtcccacattccacgcgagctgaattcccgcccgcatcccgcccgggcagcagggattgccggctccgggaggcgctcgggctccgagaagcggctcagccccgcgcccctccctcctcagtaccgctgccggcggaccaggattcccgcgggtcctggcggctgcgagcgcgaggcggcgcggattcgcggctcggttccgg

SEQ ID NO: 221316 - DNA, 98 bp, Homo sapiens
  chr1:38580185-38580283
  hyper
gttatgcaaactcccgctctcctcattcgccagatgaatattcatgactcaggcaatctgtaccagccagactttcctgagggcggcagcttttcttc

SEQ ID NO: 221317 - DNA, 557 bp, Homo sapiens
  chr1:39043984-39044541
  hyper
gagatggaaggagccgaagggaccagagagagcgtggacgggaggaagacagacacgaagaacttaagaggggagcgcgcccaggatgggagcgagccagagaggagggggcggcggcggcgagagcgggcgggggacacggggaccgggagacgcgatccggagagcggtgggaagtattcgcctccgttcctcaaacacaggatgcgagcgccctttggagaagtcgcgctcggcggaaacgctaactccccggccaagtgcaaatgtaaagaggccctgagagcactttgtgcaaatatcaggccgggaagtgctgcgcccgcggagctgccgggcacctcggcgcccccgcgccctcggctgcgcgctaattcactttgccgtcacctctcgggcggggtcgggcgggcgcgggcagccggagcgcgcagagggcgcagagcgcctcgcagggccaggggccgcggccctgcctaatggagcaaaagacagatcagcagaagcaaggcaggtggggcgggagcgggagcgtggacatccggcacgaagtcaga

SEQ ID NO: 221318 - DNA, 392 bp, Homo sapiens
  chr1:39269715-39270107
  hyper
tcaggggcaggcctcggcggcgtccgggctgggggcgaggcgcccacgccccaccctcccgctgtggccgctggcgccggcccgagcgcgcgcagcccggtgcgcttcggcgcccgctgagcccgcgaacctctccgccgcgccatcagcgcagccatcagccgcgccgcgtgctgtcccgcgccccgctgctcgcggccgcgggccaccggcggtaataatgaggcacagcgccatgaccgcggccctcggctgcgccgccggcagcagcgcgggcgccgcattagcatctccgaagccttcctgtgtgttcttttgtgctcattttccagcccgaatgctcggcacatcccggaccgcggacggagccgcaggagccaccgcggccgaac

SEQ ID NO: 221319 - DNA, 517 bp, Homo sapiens
  chr1:39284066-39284583
  hyper
ggtccgcggctgcgcggcggggttcccagacccgggacttaggcgcaagcttcagagcgagctgtgtgaccctgggcacgcccagccctctttgatcaaccgtcctttctcggtaaaaccgagaggatacaactcctctgctcggggtcgtcgggaaacgcaggaccgagggacggcgccccctccttcccgagaccacccgccccatccactccgcaccgcactcccgtccagggaagtcttaaggaacccagtccccctagacgagaggtggaaggaggcgctggggaaatcctgcaaagcaggaatccgcactgaacagcaggatccttttccaggaattgtaaacccagaattgtaaataaaatgctaatgatttattcgtgctcaaacgccgggggctgcgtcgccgcttttgaagacagctccaagcgtggctttccaggaaggcaggcctccccgcggcgccttccagggctccccggggcctcctccctggccgcgggtccgggctggg

SEQ ID NO: 221320 - DNA, 261 bp, Homo sapiens
  chr1:39874987-39875248
  hyper
gcgaggcggcgcccacagcactcgggactcagctgccggagggacaaactaacttcctgagcgcgggacctgaggctggcgcggccgggagccacctgcagcctgcggtgaggcgaccctggccctcggggcgcgcggcatggcgcggggaagcgggccgtgctgagcgagcccctccgacagacccgcggccgctgctgctgcccgcccgcccgcctgcctttccgaaggcctggcgcggggctccgctcgccttgtttt

SEQ ID NO: 221321 - DNA, 180 bp, Homo sapiens
  chr1:39956732-39956912
  hyper
ctcacgcgggagccaggtgggggacgcagggagaagcagccgagcaggtgccgagaaggaggcgcccgcagaagcgcatgcaggggccacggggaaggcgccaggaggcggtgaggggccgcggtggccggaacccgggccggctgctgcgggcagaggaacaggccccacccgcggggc

SEQ ID NO: 221322 - DNA, 180 bp, Homo sapiens
  chr1:39956976-39957156
  hyper
cggcacaccacggcgaggcagccgggtggcaccactggcgggaccgggacggcgccgcggccttaggatctctgcgccgaggcccgcggcgggagccacgacggccctgaccacgctgacgcccaggctgcgggctcctcgcccggaccaaccgccagccacgccgaggtcgcacctcgg

SEQ ID NO: 221323 - DNA, 447 bp, Homo sapiens
  chr1:39957209-39957656
  hyper
ctccgcgcccaggccccgcccccgcgcccccattggtcagtcccgggggtgggcgggcggcacagacggctgagccggggcaaggactcgcgggaatcgcgccgcccgggtcgctgccggagctcgccggtcgcccctgcgctgcgcggaccgcagccacagccggactggtgggaacggcggcgacagacggattggctgacagtcccagccctcagaacagccccggcctcgaagcgttggcgtctgcgtccgcgtcagcgtccgcttgtcccggagccggggcaggtgcgcgcggggggcgctccagggaccgcgctgaggccgcagacgccgcccgccgagccccgccccctgctcgccgaactcagctccccgttcgccgtcggggcgtccccgggcccaggggcggcggcggagctgatgtgcgcccgctgagcgcccccg

SEQ ID NO: 221324 - DNA, 525 bp, Homo sapiens
  chr1:40105061-40105586
  hyper
gcacacgccccctacgccgacacctgtggcccccgcgctcacctgcctctgcccaggcggtgctggagggctggcccgcctgctcggcgagcccgtcgggccgacccccaccccgctcgccctccgcctgctcggtccccgcatcccggcccttacctcagctggccctcttggcccacgtcgatgggtccgtcggactccccgtcggagccgctcggctccttgggtcgcttcatggcgaacgcaggctgcctggtctcagccccgcggctaaggctcccagtcgggaagtcaggccccgccccggccccgccccggccccgcctcgggggcgccgccaccgccctttcccagggccctttcctgcgccgcagctccgggcgcccaggcgccccctcgcccccgcggtgacgcgccgccgagccgtgggaaggccctaggcggtcgccgccttcatcgacggctgggaggtccggctctgctccgctgtctcggctgccgcgcgctgggtggccttgggcaggt

SEQ ID NO: 221325 - DNA, 229 bp, Homo sapiens
  chr1:40149563-40149792
  hyper
cgaagcgctggcctcgggaacagcagcgcccgcgcggccccgcacctcgatgatctccagcatctccaggcgcgtgatgcgcccgtcgccgtccaggtcgtacatctcaaaggcccagttgagcttctgctcgaagctgccgcgggaggtgaccgacagggcgcagatgaactcccggaagtcgatggtgccgtcgccgttcttgtcgaaggtgcggaaagcgtgctgc

SEQ ID NO: 221326 - DNA, 105 bp, Homo sapiens
  chr1:40254463-40254568
  hyper
cgcggtccgagcagcgcaggggcgatgggcgagctcctgcagccacccgcttggtgcggttcccgcgagtccctgccctgccctgcccagcggtccgcgtcgccc

SEQ ID NO: 221327 - DNA, 497 bp, Homo sapiens
  chr1:40254688-40255185
  hyper
cctgggcgtggcgggtgggcaggcggcccgggcgaggggctcgcagcctgggcgtcagcgtggtcatggccgtcgtggcttccgccgcgggcctcggcgcagagatcctagggccgcggcgcccttccggtcccgccagtggtgccacccggccgccccgccgtcgcgtgcgcgggtcgccatggcatgctgcaggcgcctccttcccggcacctgctcagctgctcctccccgcgcccccacctggctcccgcgtgagcctgggcagcgccccaggcaggccgcccccgccagccctcgctgcgcggcgtgcgccccctgcgcccccagtactgatccagcttcgcgggggagacgcgcacccgcctcctgcctttagccgggccaggagctctggggcccttctggagcacccgggagccacctgtgcacttctcagtcgccacggccccggtgcaggcctggcaggagaaggatccccgcggaaatgcctctac

SEQ ID NO: 221328 - DNA, 203 bp, Homo sapiens
  chr1:40368028-40368231
  hyper
gctgggttcaggtgcgcccgagccgccgcgaggggtagggggagggaaacgcgccacctggcggccctcagccctgaacttgggctggtcccggcgtccgtctggtcacccgtcggcccgtttcttgagctcagtggcccaagcctggatggcatcgaagcgaagattccgggatttagagcccgaaacgtaaccttcctgag

SEQ ID NO: 221329 - DNA, 31 bp, Homo sapiens
  chr1:40420568-40420599
  hyper
ggcctcggtttcctcgcgcgtgtctgggagg

SEQ ID NO: 221330 - DNA, 122 bp, Homo sapiens
  chr1:40420932-40421054
  hyper
taccaggtcccaagcggcgtggcccgcgggtcatggccaaaggagaaggcgccgagagcggctccgcggcggggctgctacccaccagcatcctccaaagcactgaacgcccggcccaggtg

SEQ ID NO: 221331 - DNA, 856 bp, Homo sapiens
  chr1:41326954-41327810
  hyper
agggggagaggacacgatccaagaaccagagtccgaaagctgaagctggtccggtctctttcactttacggccgaggctggggtcagagaagtgaagccaaactgtcctcccgcaggaggcaaggcctggagggacgccagggtcccagtccggtgccgggccctgcgcacacagccgccgcctccaccctcgcggagggcgcgcgcggggcccagtcgctgggtgcagggtccggcgggcagtcgggccctttctcctctccggcacgccgggcgggcgccggccgccctcagcagctcacggagccggcgggcggcgcggaccccaagtccgagaagcagtcgaactcgctctggcccaggaagagctcgggcagctcgcgcacgcggtgcagcccgagctccagctccagcgacgtcagcgcctcctcgtcgatgagttcggcgtccatgccgcccagggcgtgcgcgggcggcggcggggctgcggcgcttggcgccggctgcgggcccggggggcctcccggagcgttggggggcgcggccgcgcggccggggtacggcgtcgccacaggctgcaggtgcgcgatgcccgcggccggcggaggcacggccggaaagggctggaaggaggacggcggcccgaaggccccgtacgccagggccccgggttggcggggcggcggcggccccagcggagccccccgcggcctcagcccactgtccaggcccgggcccgcgtacggcggcagagtccggagcgcatgagggccatgggcggccgcggcggacggcggcctctgcaccaggcggtagccctcggcgagcatcaggtggtcggccatggcggcaggcc

SEQ ID NO: 221332 - DNA, 240 bp, Homo sapiens
  chr1:41832081-41832321
  hyper
gcttcgggcccttccggcttcccgggcctcccggcgcccctcccccgccgccgtgcccagcccccccaccccgctctgctccccgcggaccccctcgctcccttccggccccacggcggccgcccccgccacaccccccgcgcaacttagggagctgaggaggcggggctcagggaggcccctggggcagccacgcggcgggagaggagggggcctggaggcagacagaccgacagacag

SEQ ID NO: 221333 - DNA, 393 bp, Homo sapiens
  chr1:41981697-41982090
  hyper
ctaatgtggaagttgagacccagtgggggtaatggcccgtcctgggcactcagtgcatgaatgctggaagccaagagtcccctgcccagctcggggctggccggggcctccacatctgcgttcctgcagggcgctgagggaatgcccctggctgggcggccccgcccctgctgggatccaggccaacgctccacaaatgagagagcttgagcgcgcggcgggcgccgctgggagaggccacacggtggcgctagcgcccagcctggccagcaccatgggcagggccggggcgcctggctccttccaggcagttctcccacgcgccacctcgcgtcccacagacacgaactcctgccgctccccccggcatctgtctcgtcgcgggaagtggaa

SEQ ID NO: 221334 - DNA, 43 bp, Homo sapiens; identical to SEQ ID NO: 197492
  chr1:43803509-43803552
  hyper

SEQ ID NO: 221335 - DNA, 208 bp, Homo sapiens; identical to SEQ ID NO: 197493
  chr1:43805020-43805228
  hyper

SEQ ID NO: 221336 - DNA, 103 bp, Homo sapiens
  chr1:43814927-43815030
  hyper
tcctagcctggatctccttggtgaccgctctgcatctagtgctgggcctcagcgccgtcctgggcctgctgctgctgaggtggcagtttcctgcacactacag

SEQ ID NO: 221337 - DNA, 268 bp, Homo sapiens; identical to SEQ ID NO: 197495
  chr1:43818177-43818445
  hyper

SEQ ID NO: 221338 - DNA, 138 bp, Homo sapiens
  chr1:43919522-43919660
  hyper
ggcgggcggcgggcgggggcggggctctccttgctggccctgcgaacgaacgagcactgttcgtggttagaaaagcgaagtgctgtaaaaacccgggccttcacgaaaagcgcctacggttagcgagagagggatcac

SEQ ID NO: 221339 - DNA, 404 bp, Homo sapiens
  chr1:44401968-44402372
  hyper
tccagggggacgcacggcccgctggtgcagtggaagagcccggcggccgccgccgcagccttctcggcccgcgcccccgccgcctgcacccccatctgctcttccccgcgggggccgcgcggcgcgggctgggggcccgggcagccgcgctcgggcagcgggggcgcggggctgccgcctgcgctcgcagctggtgccggtgcgcgcgctcggcctgggccaccgctccgacgagctggtgcgtttccgcttctgcagcggctcctgccgccgcgcgcgctctccacacgacctcagcctggccagcctactgggcgccggggccctgcgaccgcccccgggctcccggcccgtcagccagccctgctgccgacccacgcgctacgaagcggtctccttcatgg

SEQ ID NO: 221340 - DNA, 120 bp, Homo sapiens; identical to SEQ ID NO: 197500
  chr1:44444589-44444709
  hyper

SEQ ID NO: 221341 - DNA, 581 bp, Homo sapiens
  chr1:44873068-44873649
  hyper
tcttcctgcaaaggggaatgagcagaggggggaaaggcagaaagagcgtcgaggaagagcggtgctggcgtcttccgtgccgatccctcctggcccgcagagacccggcaaaagtggcgtgagttcgcttgctgcgcttcgaggcaaggctggggaaggccgaggacggggcggcgccgcgtcgcgccgctggtggccgacagggccggggccgggcgcggagcgagcggggacacacacctgttctgcgagccgcgcggtgtgcggcggccggacggccgcggtgcgggccgcagaaccctccctcccgcactgcgcatccgcagtccaggagctggaagggcccggcagccccgcgccggtccgtatttgcaggagaagcgggagtggaggagtccgcggctgcccgctgaagcggtggtgcgcgcggcggcgggacccgggtgacccccggggcggggctgctcgggggctggaggtccttggactttggtcgaaggctggcagctctgagcccctgccccgcgggccccgcgcggctgcggaccaggggcccttgcacgtgtcggttcttcctggac

SEQ ID NO: 221342 - DNA, 767 bp, Homo sapiens
  chr1:44883116-44883883
  hyper
tggcctggcttggcttggctcggcgcgccgctcgcctggcggctgggctcgctgtagttgtgctcccgctcttcccctgccctcgctccacgccgcgccgctctgtgcggcggctgcctcctcttacggccggaatgcctaatcaccatggtgagaaaacggacaccgcagccgtcctccctcctcgccccgcgccctccctcccatcaattgtcatgcagaagtgatccgggctgccgttttctcgcggccgcccgccagcccctcgccgctgccggcagaagggtggctggtaattgatcttctgggggagggggcgcggagaggcgcgagaactggccccggggaggccaggccacggggtgggccccgttcgcttacttgcaagggacccccagcctccgccaccgaggcggcttgcaagtggtttcagaaatgttggtgatctcgccgtcgctctgcagcacttggaggccgcaggaggactccgcgcgccgcctcgagggccgggagcgcccagcccgcggccgcacacacgagggcccgtcgcgccccccgccctgccccgcctcgccctccacgtccctgcacccccaagtcgcactaagaacccagtccccgatcggtttcctctacgccgtctgagcagaagagagtgggaaccggggtgacggataaggggggggcgcccacgcgacgtcggggtgcatgggagcgcgcgggaggcgctagtgggtgcacggggcgtgagggggacacagcgcggg

SEQ ID NO: 221343 - DNA, 156 bp, Homo sapiens
  chr1:46632789-46632945
  hyper
acccccaattctgggccctggcgaccttgggtcagggccaggaaaggcacttccagccaagcgctggcgccgggtgcgcctcgctttacggaaagaacgccccgcgaataaatccggagcggatttgcatcacagcagccgcgagaaggctagctg

SEQ ID NO: 221344 - DNA, 597 bp, Homo sapiens
  chr1:46913766-46914363
  hyper
aaggggtgcccacatgcccccgcccgcattcagttcgaaggaccagccagtaggccctgcgccgcccagggaccgcccggcctttgcgtccggcccagctcaagccccttccgccgcgcgcggcctcgggagcgctgggcaggcagcccgggtgggagcgcccacgtctcccgcggacacggacggacggatggacgggcggccgcgcaggcccgcgccccgctcccgccccgcctgccgcgcctcccggggcgcccgcattaaagcgcatatgcaagccatgaattatcaactgaaaggagtcaattaccggctctaaaaacgagtgtctgcgctcgcagcgccccgggccatccgcctatttacggagcgatctaccccgcccggctggggagggggcctcgggagggagagagacggagaaacggagcccgagaccgggagagagccggagaggcagggactggagagtctgggacacgaaggagaggcggggagagaccgagattcagcgagacgcgcggagggccggacgggagccaaggcggctcagttcctcttctcccccgagcaggcgaggagaggtggggtctcagg

SEQ ID NO: 221345 - DNA, 513 bp, Homo sapiens
  chr1:46932222-46932735
  hyper
gcccccgcgccgccggcgctttgaagtcccaatccggcaaatagagtcaatcaattatgaagggaacaatctggcggcccctcggggagcggcggccgagcgatcccgggggattaggccgcaaatcgcgctgagcctccctaagtgacagcgagagaatcgcgcgcggcggcgacggcggcggcgggagcgggagggagcgcggccgctaacccgattatgcagatccgcggggggcgcggattaggcctcgggggcggcttcgccctaagcggctctcggatttgggaaaagtttactcgggcggagggggcggagactcccccgggcgggcggccgggacttctcccagccgggtgaatggaggacccgcctgcaggagcagccgcgaaagagtggagcgggcgcgcctgctgagccacagccacagcaacactttgcaggcgtgcacactcacacgcacacccaggccacaacagccgtgtctgcaccagcccacgggcgcacgcgcgc

SEQ ID NO: 221346 - DNA, 212 bp, Homo sapiens
  chr1:47078615-47078827
  hyper
ttcgatccagtccatgagcaatgccatatagcgcggcgcagagagcttggcgggccgccggtactggcgctcgtcctgccagcggtactcgtagcggggcccgccggccatgaccgggcagctggtctcactgcagcgctccgccatagtgccgtagatgaggttgatgcggttgaagaagtccaccacgtgcacggcgatccagtcgtcga

SEQ ID NO: 221347 - DNA, 329 bp, Homo sapiens
  chr1:47903680-47904009
  hyper
cctgcctcagtcccccgccccctccccgcccgcgcgcaaaacgcactcgccccagaggcagcgcggccgagcccgagccgctgccggagcggagccggagagtggcggcggcggcggcagcggcaccatgaccctgggcagctgctgctgcgagatcatgtcctccgagagctccccggccgcgctgtccgaggccgacgcagacatagacgtggtgggcggcggcagcggcgggggggagctcccagctcgctccgggccccgcgccccccgggacgtgctcccccacggccacgagcctcccgcggaggaagccgaggcagacttag

SEQ ID NO: 221348 - DNA, 180 bp, Homo sapiens
  chr1:47910659-47910839
  hyper
gtttctggcgctccctctgctctcagcctcgagtcctgggtccctgcggagcgctgtcttttcgctccacgcggactctgagcggaagtcgctcgctgtccgcgactttgcatttctcctgcagcaggggtctctacccggtgccttcctcccggcacgctagcctcctcgccgaaattt

SEQ ID NO: 221349 - DNA, 293 bp, Homo sapiens
  chr1:48190695-48190988
  hyper
tcccaagcacatctaccctgcggttcccctgggccaagccgagtcctccccagcacaacagcgcggcccctcggcctccgcttaacctgggcgcgcgggctggctgggccggggccattatgcgggcgcatggccggccgcgccggggcgcagagcaaacttaaccttcatttgggagcgcccagcggccggagcgcgcggcgcagccatcgatcgcggctaatggcctcgtctaaatgcggagccgctgcctccgccccccgggtcagggcgcccccgccctcgccccccgc

SEQ ID NO: 221350 - DNA, 105 bp, Homo sapiens
  chr1:48463067-48463172
  hyper
gagcggcgcggagccgggccgggctgggggctggggccgctggggcgggggaggggaggacctggcgcggggggcgggggggcgaggggccggggccgcgccggg

SEQ ID NO: 221351 - DNA, 59 bp, Homo sapiens; identical to SEQ ID NO: 197523
  chr1:48463406-48463465
  hyper

SEQ ID NO: 221352 - DNA, 240 bp, Homo sapiens
  chr1:49242421-49242661
  hyper
agcgggggctgaagtcgcgcacgcacgacacgggcagcgcgtagcagacgttgtcctccaggaaccgcacaaaggcgtacatggtgggcgccgggggcgggccccggtcgggcagctcagcccgcggggcgggcgcggaggtggggatccggcggggggcgcgagtctcgctacggtgctggggggggcgggggcggctccccaggacccaggctccccccactgttattgttcctgaaa

SEQ ID NO: 221353 - DNA, 480 bp, Homo sapiens
  chr1:50798672-50799152
  hyper
gacgactcgccctgccccgtcgacgccccagacggtgttgccgacctccgccccgcagcgctggtgtgggcgcggccggacctcactcagcctgcactgccccgcgccgctcgccgcgtccacactgtccttgggaggacgcgcggggaagccgcgcacgatgcggcagcgccccctgccgggctccgggcgctccgctcccagccggctcggcgagtgctccgggaaaggggtccggaccccacacgcactgggttccaggacaggctctcgctcgggctgggccgactctggcccgcctaggccccgggcacgctgcagtgaaggcggtaccctcaccacagtcacagaacgtgtcggctgcccgcgcgtcctcccaaggacagtggacgggagctggggctggagagggtaacgacctgcccaaggtcacacagcaccgcagtggcacagccaggactggcacccacacctcccgcg

SEQ ID NO: 221354 - DNA, 300 bp, Homo sapiens
  chr1:52195004-52195304
  hyper
acagctgccataaactggatggcacgttagaagccggtgggtgtaggtgaggcacgctggcgcccgcgggcccttctccagccgctacccagtgggaatccgcggggctgaagccccgaaaccaggctgagcgtcccagagcgcaacctccctttcccccagcagcgccggcgccgcagaagccgcgtgtccccaggcgcactcccccaaggtgaacccccgccccccacggaggcggctgggtcgcgggtctgggcggggcgctccggacgccctcccgccgctgcgcacccctcccgc

SEQ ID NO: 221355 - DNA, 180 bp, Homo sapiens
  chr1:52608469-52608649
  hyper
cccataccgagtccctcagaatcccggttgtggcggggaaagggggaggagaggaaggccagggtgagaattgggggtgcagagagtgcgggaccaagagagcccctgctactcctggagtgtcattcatggatctggcttgctcgagaacaaccttttgcgtcttatttgaggtgaaat

SEQ ID NO: 221356 - DNA, 727 bp, Homo sapiens
  chr1:53067878-53068605
  hyper
tccggggcaggggtgcgctgcctcaggacagacggtgaaactgaggtccagagccggacatccaccgcctgcggagggaacgagaacgcggcgcgtcctgccttgcgggccgagcggcgccagagccgcctcctcccgccccccgcgctagatccccccgccccgtctttgccctcgcgacgccgccacctccggaacaagccatggtggcggcgacggtggcagcggcgtggctgctcctgtgggctgcggcctgcgcgcagcaggagcaggacttctacgacttcaaggcggtcaacatccggggcaaactggtgtcgctggagaagtaccgcggatcggtgagtgcgcggggtctggcggcgccgctgggcccggcctcgccctggcggggcctgctggggacgccccgcagcccggtcccccgcgcggtgtggctccgaggacgctccagccgcgcggccgccaaaccccggcccccgccccgctcggccgtgacctctggcgcggcgcccccatcccgcgcccggcccggcccggcccgcggctacgtggcacggccttggcgcggaggaacccgaagcgctcgcagtcggcgcccacttcgctaccggcacctttgggcagcggggtccagaccttcgccgggaggccgggcaccactgcccagcctttgccattcacgggtgaaaaaagtaaccgtagcatcgtgcggcctttccctctc

SEQ ID NO: 221357 - DNA, 180 bp, Homo sapiens
  chr1:53098688-53098868
  hyper
ctcccggcgccggctcggtgcaggtaaggcgcccgcgccctggcctcgaattcccgccccgccactctggccgcgtcgtgctgtcgttgcgcacccagcgccctcgtgcaggcagggggagcgcagtggggagggggcaggaagcgcaggcagagccaggcgagcacgcggctcccggcc

SEQ ID NO: 221358 - DNA, 283 bp, Homo sapiens
  chr1:53098990-53099273
  hyper
tcggtcctcggggccccgcgctgctgtctctgtctcggcttctctcggcccctgggtctcttcgtctctgccgttctcaggctcagctccgtctcgctcggtccctcgcttccccgccgggctctagccggccgtctggtggcccgaggtggcggcgggctgggcgcggggcgcgatgagcggcgcctgcacgagctacgtgagcgcagagcaggaggtggtgcgcggcttcagctgcccgcggccggggggcgaggcggccgctgtcttctgctgcggcttc

SEQ ID NO: 221359 - DNA, 417 bp, Homo sapiens
  chr1:53308366-53308783
  hyper
cgggccggcccccgcgtgcgcgtcgcctcgccgggcatttcaaaagctcgccggcagggcgcggcgctagctccgtgtgcctcgcaggcgtggtgggcgcgtcctggcagccgcccgcttggttctcgcgggatccgggctccggctcgacgccggctctctttttgacgccccgccgccggggttgccatggttcatttcttgcacccgggccacacgccccggaacatcgtccctcctgacgctcagaaggatgccctgggctgctgcgtggtacaggtgagcaccggggtgcgggcggcgacgcggacctcggcgccacgtccagctccggcgagcgcggcgagtctcctgggacgctgccgaggcacttgctggggagtgtggcccgcgcggggctgcggtctagatgccgag

SEQ ID NO: 221360 - DNA, 1080 bp, Homo sapiens
  chr1:54203899-54204979
  hyper
gcaccacgacacctagcccaatcagaggtcaaacccacctgattccacgcaaaagccccctcgctcaggagcggttcgcccttccctggtgtggggaggaccccaggcccccgcgccgcggcgcattaccgcgaagtcccacccaaatcctcctccaccgaaaccagcctcctttgcacgaatggtgaaactgaggcctggagcgggtaaggcgcctgttccgcgtcccccagtggaacacggagccggcggcaacgaggattcccagagcagggctcgggcgaagccccggagacggctccgggtaggtcacgggctgcgcgcttcgtcgactctccggggccgagctgcgcgcagaagctggggacccgaacccaaaggcccgagggaaacccccagagactcacccgcgaccacccgaacctggaaaacaggagtcccaagctgggcgctgaatcctgcgacgcgaacccatcacgcgcagccgggacacccacattcctatgcgcagcggaggaatcgagcccgtcgcgcgcgcaaaccggcacagtgggcaatgcccacgcggccgccgccacacacccgcacacccgccgaggcacgcccggggacggacacgccacccacactgccgctggtcagacgctcagcagcgcacaaccacacagtcccacgctctcgccacacgcgcgtgcgatgggggccgcgacagagcctccctcagcccttccatcaggggcccccaaactctccgttcccctccgcgctccctgcgccatccccaagctgccggggttcgagcgtcgccgggacgccagcctcggatctcgggccccgcacacgcccctccctcggccgcgggccgcgccccctctcacctcgcagcggcagctgcagatcgctgggcgcccggctcggcgcgcctccactggcgcagcagcccccgcagccgccgcagccgccgccgccgccgccgcgtcctgcggggcggttccccgggggacgggggcgggcccgcgtctgcccaacagccgctccagccactggctggccgcggccgcccggctcaggccaatcgcg

SEQ ID NO: 221361 - DNA, 236 bp, Homo sapiens; identical to SEQ ID NO: 197543
  chr1:55352448-55352684
  hyper

SEQ ID NO: 221362 - DNA, 244 bp, Homo sapiens
  chr1:55462664-55462908
  hyper
tacatggggctgggaggggaggtgcggtcaccgctcagccgccgactcagccgagggagaccttggccagcccctgccactccgcaggctcggtttcctcgcctgtgaaatgcgggcgatgactcccctccccgccgcgactgctcatcaccgggtccgagcccagccgctgaccccgggggaagcgccttgctcagcgccgggcggcccacgaggccctgcaggaccgcggctgcggagaccg

SEQ ID NO: 221363 - DNA, 331 bp, Homo sapiens
  chr1:56943370-56943701
  hyper
cgcccccacctcacaggctgaatcccaggcccgagacgtggggcgtccggagcagcccccgccgcggaggaacggccgaggcgcgcccacctccggggccgtccgagcctcgtcgggctcggtggactggccccgcccgagcgcgcaagcttcccatctctgctttctctcctccagggtgaaaggacggacggccccgacccgcagacccggcagagccccgcggggagggcaccaggccaaaactaggaggaaaccgaccaagtgggctgcggcggccgggaaagaaaccacgtgcgctgatgtcctcagaaacgcagggagatgttcc

SEQ ID NO: 221364 - DNA, 747 bp, Homo sapiens
  chr1:57044295-57045042
  hyper
tgagctggtttaacagttgcccacgaacgcttaagcacgcccagacccactcaagtacaggccaagaagtcggtgggatcggggagggcgggggcttcgggcctgggcggcgcaaaggctccccaggaaggctgcgggggccccccggagctgacggcgcggcgcggcgcggcgctgcgcggccccggactgggctgggacgcgcgccgagggacgaggggccgaggggccgagggacagcggggctgggctcacccatgaagaggcagaagaggtcgaggcagatgagcagcacccgcttgctgccgctcctcctcgggttgttgttgagcgccgggctgccgccgttcttgctctccgggacgatcgctttgtcgtacttgtagttttgcatggcgctggctgcggcgcgagcctcccgccccgcgaagacgtcccgcaacagcagccacacacccaggcgcccgggtcgcctcctggccgaggctgctgcggatagtggcgggtcggccccggctccgggcgcggcggctagagtgcagccggggctgcctgcctccaactgcagaaggtggtgttttctgctcctcctgcgcgcctctgctttcctctgtcaaccctaaatcgttctaaagtccaaggggaagagagccagatcccgagcagaaacttttgcagagctgcgcagcttggggcgcgctgttgtggcgcgcgtctgagtgcgcgagcgagcgagtgggcagcgcg

SEQ ID NO: 221365 - DNA, 780 bp, Homo sapiens
  chr1:57110641-57111421
  hyper
agaaagggcctcctgcctccctcggcaccctcgcctacccccctcgcagcacctgtcgcctccgcccctcactcggaccccgcgcatctggcgcagcccctcccgcactcccgcccagcgccccgcgtccccggcccccgctgtcgctgcttcgggttccgccgcaggagcctctcactcccgggagcgggcgcctcgcgctccctccctcggccccgccccgcccgccgctcgcccgttgcttcccacctgggcccgaagcgcccagcgccctctcccgggaccccgcgcccgccccgcgcccctcgcggctcggggtccgccccctcgcccgcagggcccgctgcactgtgggtaggcggcggcggcggcggctacgcggagcggcaggcggtggagcgaggccgcgcgcgccgaagatggctgagaagcagaagcacgacgggcgggtgaagatcggacactacgtgctgggcgacacgctgggcgtcggcaccttcggcaaagtgaagagttgagtacgcgctccggaccgctgtgcggggctgcctgacttgcgggaggccgaggggagaggcgggagccccgggcctccggcgggcgcggggctcggcggcaggtggagcggtcccgggtcgcgcggagctggggccccgggagggtggcgcgcaccgcctcgcctggcaccggcgcccgggccccacagggtccagggaagagggcgggggtgtgagctgaggatgggcgtcctgggttccaggttccgcgcccatctgcctt

SEQ ID NO: 221366 - DNA, 300 bp, Homo sapiens
  chr1:58715449-58715749
  hyper
cgcttgtctcgggggattccgcttggggggttcccaggggtcgccctggcgctccggccacaacttgggcggctctgtgcggcggccctcgcctgcgcctttgcgcgccacccaaaactttgcgcacactgcagccgccgccttcccgctcttcgcggtgagacgcgcgccgccaagtgccgcaggcagccctccacagccgccgcggcagccgctgcctggcttctggctccagacttttcccccactgcctccagttcccacccaggaggctccctcgcggccgcgagagctcggcgc

SEQ ID NO: 221367 - DNA, 180 bp, Homo sapiens
  chr1:58715804-58715984
  hyper
ccgggcagcgcccactagacggacaggcgcccgcggccgcccctaccccggcgcgcccacctcgagcctctcacgccgcggcgggcgggcgcaacatattctcctacctccagccgccgaggaccacactctccgctcagccctctcgactcatcctccggctgcagtagagggcgagcg

SEQ ID NO: 221368 - DNA, 121 bp, Homo sapiens; identical to SEQ ID NO: 197553
  chr1:59369443-59369564
  hyper

SEQ ID NO: 221369 - DNA, 171 bp, Homo sapiens
  chr1:59369797-59369968
  hyper
tcgggctcggggcgaggagccggctccaccctcccagtctgggcccatcctccggcctcggccagccccttccctccctctctttggcgttcgcgttccctcggcctagcagacctcttagaatgtttgttttccttctgagaaagagcggagggacgtggccaagaccaa

SEQ ID NO: 221370 - DNA, 190 bp, Homo sapiens; identical to SEQ ID NO: 197554
  chr1:59762030-59762220
  hyper

SEQ ID NO: 221371 - DNA, 105 bp, Homo sapiens
  chr1:60280122-60280227
  hyper
cgcctgagcccagccggtgccctgctgcccctctgcctcttcggccactggggctgagcttcagccttaccaatccccgccgcgcacgcgcgctcgcttcccgcg

SEQ ID NO: 221372 - DNA, 615 bp, Homo sapiens
  chr1:60280476-60281091
  hyper
ggcgaggtgtgcgggagtgggcaggacgggtgggaggaggggaggggtgggagaaggcggggctcaggtgcctggcagcgcggccggggcccaggaaggggagggggcgaacgctggagcgaggcgggggcgggtgaggagggggtgacgccggacgcgtcgacagcgcgagggttcgcgcgtgagctgcgcgggtcgggcctggtaccgagctttcctgggggctagcaggtcgtggacgccggctcctggaggagagccggtaggagggagtgtgaaggtgtccgcggcgtcgtcgacggcggcgccggccatggaggagacgcagccgccgccgcagcctaagctgcccctgtgcgacagcctcatgatctgggtgagtgcgaggaggcgagagggcgagggggccagggggccgaggcgaggagcctggggcgcccggttctcccaggtgagctggggctacctgcacagggtcccggcgcaccctgcccttctcacctcgtgcccttgaccgagagaatgccacctgcgggtcgacgggcaggtgtgtgggcgcgggttggtgtccgggggtgggggtaaaggaagctctgggagcgtaacagtggaggc

SEQ ID NO: 221373 - DNA, 522 bp, Homo sapiens
  chr1:61508554-61509076
  hyper
ggccactcctcctcctcacccggacggctgcaaggaaccctcattctgtgcaaagccagggcgcaatcctgtgcagtaaacctcccctcgcgaagagggaagcggggttcgctgttgcaccccaggccgagcgccctaggggagagggcgccgcagcgagtcccgagatccgagcccggcctcgacgccggagcgctcccggagctggtccttgcccgaagcgcattaaaacggcgccctctggtgtcagctcgcggcggccgggtaaaagcagtggcgctgggggtagagttctactcgccaccctgttcgcaaactgaaagatccccgagtttagaaagtgtcttgccgctctgcggacgctgtgtccgcggccccgctgtcgcgcagagctgggctgcgatcagaaagtccggctcccctggccccagacagtggctcccgggggaaccagcgtggagggtgaggagggacctggccttcgaaggcaggaaggacagaacccccaagccacgacggcag

SEQ ID NO: 221374 - DNA, 40 bp, Homo sapiens; identical to SEQ ID NO: 197558
  chr1:61516034-61516074
  hyper

SEQ ID NO: 221375 - DNA, 359 bp, Homo sapiens; identical to SEQ ID NO: 197560
  chr1:61547845-61548204
  hyper

SEQ ID NO: 221376 - DNA, 1140 bp, Homo sapiens
  chr1:61548437-61549577
  hyper
cacgcataccccagcgcccggcagttatgtattctccgctctgtctcacccaggtaagccgcggcgtggatgcggagggcttgggggccggggcgccgggggcagggctggggctgggtggggggcaccggggccgtcgctccggccgggcccagggcgtgcgtctcggtgtgtgtctgtgtctgcgcgtgtttctgtgtgtgtgcgcgcgtgtgcccgcgggtggggggggggatcccgcttaaagaaagtaactttgtttccatgcgggtgcattcctcttgcacggccatttgtgtgggcacatggctaatggcgccctcttattaatgcgttaattaatatcggggcgacggactgcggaacagcagtgttttcggacaccccgcacgtgtttcggcggggttgcagtccatgacacgcagaaatctggctcagcgtttctgctgccgggagcagggattccgtagtgccgcagcgcccggggagggggccgccgacggagcccaccgctcaccccgcacgctcgggccggctgcagtcctcgggtgcggggagacctcgggtgcctgcgcccaacggcccgctccccgcagcctgcgctgccgcagccccccgccgtcttcccgaactcttacttttgtttattgtttgtcagccttcggggtccggccgcggaaaggacgcgggctcccgtcccggccccggcccggacagcgcccctcggacgcgggcaggctgcggctagccctcggctgagcggggctacgtggacgcgcgttcccccgcgccggccgggtggagcctgcgtcctcgccgcgcgccggtggcccgttggctctcccggagtgaaagtttcggggccgagacgagcccacgttgtgcagggcgccgaacgccggaggccgcgggccgcgggccgggtagcgccgggcagagttgggctcctagccgggagccggagcggcggcccgggccggacacggctccccccgccgccgccgccgccaccaccaccaccgccaccgcgcgactccggccgctccgcgcgcaggacgggggcaacttttcccctccgactcaactcagagcatggggctcttgcgccccaccgcctctcctttccgtgcccccctgtcc

SEQ ID NO: 221377 - DNA, 240 bp, Homo sapiens
  chr1:62207847-62208087
  hyper
aaccacaccggtctgtccggatctccctccccgtcagtggcggctgtccccaccacgcgcggtctgatccgccaccccgcccccacagcccacttttcccaggcccttggccatcccgcgcccggtaggaattcacctgcacgtaaacagccagggcaaccgtcctccctccttggagcccgcctcccgcggccccgggctccctcccccgccccctgcgccaccccggtgccccgcccc

SEQ ID NO: 221378 - DNA, 327 bp, Homo sapiens
  chr1:62208483-62208810
  hyper
cctcctgcgtcgggcccgggtgaccccacggtggtccccgccccgccgcgcagggctcgccgaggccgcgggcagggaggggcgccgccccgcctccccaggcctttcgggcctcgaatctcggcccactggtattcgggggtggcacggatcctattttgcgcccagatcggtgcccctgtttcgctcccagagctgggcggagtctttccctccatcggtggccgtggaaggagggaacggggtgaggggacaaagaggagggggtgctcagagccgggctgagggggcgacttgggcccggccgcgtcgcggcgcctggtcatc

SEQ ID NO: 221379 - DNA, 105 bp, Homo sapiens
  chr1:62784145-62784250
  hyper
caaagcgccctcggcggcgtctagagcactcggagctgccccattgcctccgcccaaggtcgcggcccaaagggagccctggaaagttcagccaggggccgagga

SEQ ID NO: 221380 - DNA, 300 bp, Homo sapiens
  chr1:63539498-63539798
  hyper
gggaaaaaaacaaaaacaaagccaagcgaagtgggcctgccagagttaactatgttcacagagtgcaattaagtgtttggaaggttctgtgccgtgtgctctgatttacggccgcgttcctgggacgcccctttagccgggcgaacgtggagggggccaggcccggccgtgcgcaccctgggagcggagccgggccgctggcgctccgggtcttgggcttggcaccgcggcgcaccgggtggcaagcacagcgcttagcggaggccacacctgcacctcatttgcttctgagcagtgcca

SEQ ID NO: 221381 - DNA, 480 bp, Homo sapiens
  chr1:63788329-63788809
  hyper
agctgctcggcgcccggcgtcccgcgcccgcctggaccgctcctgcgccccacgccagggccagaggccgaggaaggcgggctaagtgagggggcgcggcgtggagaaccgccggggccgggagcggtagcgagcgcctagtaccgagcgccagggacggcaggagttcgcggagcgcggccgctgggggcggacggcagagcccgcgccacgcgatgcggggccgccgagtgtgagctgagcccagcgggccccaagccacctgcggccccctcccctctccctgccccccatctttcgggggcactcaaaccctcttcccctgagctccgtggcagcccccgaacaccctcatcgcccgctgccccctccccgccgccgctaccaaccccgaggagggatgaccctctccggcggcggcagcgccagcgacatgtccggccagacggtgctgacggccgaggacgtggacatcgatgt

SEQ ID NO: 221382 - DNA, 900 bp, Homo sapiens
  chr1:63789249-63790149
  hyper
gcttcccctactacagggagaagttccccgcctggcagaacagcatccgccacaacctctcactcaacgactgcttcgtcaagatcccccgcgagccgggcaacccgggcaagggcaactactggaccctggacccgcagtccgaggacatgttcgacaacggcagcttcctgcggcgccggaaacgcttcaagcgccaccagcaggagcacctgcgcgagcagacggcgctcatgatgcagagcttcggcgcttacagcctggcggcggcggccggcgccgcgggaccctacggccgcccctacggcctgcaccctgcggcggcggccggtgcctattcgcacccggcagcggcggcggccgcggctgctgcggcggcgctccagtacccgtacgcgctgccgccggtggcaccggtgctgcctcccgctgtgccgctgctgccctcgggcgagctgggccgcaaagcggccgccttcggctcacagctcggcccgggcctgcagctgcagctcaatagcctgggcgccgccgcggccgctgcgggcacagcgggcgccgcgggcaccaccgcgtcgctcatcaagtccgagccaagcgcgcggccgtcgttcagcatcgagaacatcataggtgggggccccgcggctcctgggggctcggcggtgggcgctggggtcgccggcggcactgggggttcagggggcggcagcacggcgcagtcgtttctgcggccacccgggaccgtgcagtcggcagcgctcatggccacccaccaaccgctgtcgctgagccggacgactgccaccatcgcgcccattcttagcgtgccactctccggacagtttctgcagcccgcagcctcggccgccgccgctgctgcggccgccgctcaagcca

SEQ ID NO: 221383 - DNA, 137 bp, Homo sapiens
  chr1:65210894-65211031
  hyper
gcgggcctgggcagcgcggcggggctggggccggggccggggctgcgcgggcagggcccctcagccgaagcgcacgagggcgccccggacccgatgcccgccgcgctgcaccctgaggaggtcgccgcgcgactgca

SEQ ID NO: 221384 - DNA, 39 bp, Homo sapiens; identical to SEQ ID NO: 197579
  chr1:65720329-65720368
  hyper

SEQ ID NO: 221385 - DNA, 240 bp, Homo sapiens
  chr1:66258652-66258892
  hyper
gctggcccgtccgcgcgcgcgcccccggcccgcgcgccccttcccggggctcctggcctcgcctcagcggctgcaggctcttcgtcgcgggccgggctgcacgcgagcgccctccgggcagactttcgtcccccacccccgggagcgcggaaggctcactcgcagcgcatggtctacccgcgccgggcggagccccggcgtccagagcgctgcggccgcggcggtgcagcagaggcgcct

SEQ ID NO: 221386 - DNA, 144 bp, Homo sapiens
  chr1:66259003-66259147
  hyper
tggagagtgtagggtgctgtggggctgatgtggggcaaagagggaatggggccgccgggcctggatggtcgtcttgacggcgtcattgtcgccccttgtaggaaatccgccaaccggcccctagcctttcgccctcatcttctc

SEQ ID NO: 221387 - DNA, 332 bp, Homo sapiens
  chr1:67773095-67773427
  hyper
tcaacaaagtgccacgtctctatggctgtgaacgctgagcacacgattttatcgcgcctatcatatcttggtgcataaacgcacctcacctcggtcaacccttgctccgtcttatgagacaggctttattatccgcattttatatgaggggaaactgacggtggagagagaattatcttgctcaaggcgacacagcagagcccacaggtggcagaatcccacccgagcccgcttcgacccgcggggtggaaaccacgggcgcccgcccggctgcgcttccagagctgaactgagaagcgagtcctctccgccctgcggccaccgcccagccc

SEQ ID NO: 221388 - DNA, 180 bp, Homo sapiens
  chr1:67773635-67773815
  hyper
ggcaggcgacacgtggtgagtgaccagtgactcggggtcggggacagagagagccccaggatcccggaccagcggggtgtctgcgtgcccgggattccgtgtctcgcgtctcccgagggggcttcggcgacggcttctctctttatatatatatatgtatatatatatttttaaagtctt

SEQ ID NO: 221389 - DNA, 408 bp, Homo sapiens
  chr1:75601918-75602326
  hyper
ggtgttccccgctccgctatgattgacgtctggaaagaaagagctttgtgaggggatgattgttattaacttgttatccccggcgggggggcggggaaccgacgtgcccgggtgagcgccggagacccggagcccggggagcgcgggacgagctaccagcgctcgggtggcggccgccagcggccagcgaaggaggctgcgcgccagcccgcccgcggcgcccgggctcaggcgccgtgacggctgcacgcgctgccccgcactctgagggccttcattagctcgctccccgcgccgaggctggggcgggcagcacgctcggaacttctgatctgtttctccatactttctccccctcctactccgcagtgtcaggggctcatgtcagaggagtgcgggcggactaca

SEQ ID NO: 221390 - DNA, 817 bp, Homo sapiens
  chr1:78511528-78512345
  hyper
ggtgataggatgagggactacgtaactttctttctctccagatccatcccgggggaggctgggcgggcgggcggctgctccggtccaggggtggaggtcggggccctgacccgacgcagccaggcggaagcgcggctgccattggaggctgcttttacctgcgcggggcccggggcgcaaagtccgaggcgccggggggaggaggcggcggacggcagcgcaggtgggcccgcgctctcggccctgcaagatgcccctgaagctgcgggggaagaagaaggccaagtccaaggagaccgccgggctggtggagggcgagccgacgggcgcgggcggcgggagcctctcagcgtcccgggctcccgcacgcaggctggtcttccacgcgcagctggcgcacggtagtgccacgggccgagtggagggcttctccagcatccaggagctctacgcccagatcgcgggcgcgtttgaaatctcgccgtcggaggtaaggcgccaggtgctcaggctctcccgcctctccgccgcgccgcgccgcgccgcgcgtatttctgtgggcccaggagggttgagcggcgtttcccggagcgcgaaatccgatgccgtgttgagtccgccgggggcgtcccgggggaaagtgagtgtgccttccctggaagggaaaatttaacttggcaggaccgcagaaagtcacagtcccccttgctccgagatctggcctttgggaagcgggttgagggaggcaacctttcttccgcttgcaaatgtgtttgctccagatgtcccggattccgccggccgttcaaggcgtgag

SEQ ID NO: 221391 - DNA, 332 bp, Homo sapiens
  chr1:84544158-84544490
  hyper
gcagcggccgccgggagtcgttctggggggccgggagaccagctgcctttctcctccattccgaccccccagctccgcgttgagagctgaacgcgaagggccggatgtggggatcctgggaagagcgttccctgggattccctttctcactctagcgaggaggacttgcacacgttctggaacacttccccaaatatggtccgaggaaagaagtccctagtgccatcccacccctgctttcccccctcgccgactctttgggagctacaggtagtgctgtgggtaaggttggctcttctccctccatcacttgggtccgacccaaccttatc

SEQ ID NO: 221392 - DNA, 660 bp, Homo sapiens
  chr1:85358282-85358942
  hyper
tatccctaggcttcacgagagaaccccagtttcctaatcaccatcgatggcaatgagactgagtttggaaagaaccacgtgtgcaaaggcagacgcaacccgtgcggcgctctcctggcctctgcgcccagcccgccagccctcagcagcggacgcaacgccgattttgcatctagattgctttttgctcctagcggggaaaaaggtgggaaaagagcaagttgtgccatacacccgccgggagagtcttgtcccggggtttggagtgggtctggagcccaggcttgcacgccaggcaaccccgaaaagccgcaggctagagccctgcaggcgccgctgcgccccggcctccccacgacgcacgccctggtgactgcggctcggggtaccctccctgcgcccggaccctcactcaccgctcacgttcacccgcgccgccgagcccgggagcgggggcccctgcggctgccgcatgccctcggggtcgagcgcgacggggcgaccgggcgccgggctccagccgggcgcggagaagcagcggaggacgcggcgggcgggcggagcgcctcctctccagcgacccctgcgacgcgtccagagccaaaggaaagtttggcggtgcgagggagggacctagggacagcggcccctccctgcccc

SEQ ID NO: 221393 - DNA, 743 bp, Homo sapiens
  chr1:85462636-85463379
  hyper
cgtaacgcgtccgccgaagttggagccctgcaaagcggggttcccttctcttaccctttctgccggccgcgtggtgcgcgcagaccccggcccgagagcaggcgccgcagtcgtggagtgcggcgggcagttctcgggcggctgaaaggcggctctgtgtgcaccctgcaggatgcggcgcgtggccaggcgctcccgccccgcccccaaggggctgccccgccccgccccgccccgccgcctcctaccggggaccggagcttccccagttggggtcctaggggacttattccacgcttcagcggaccagcctccccgcgctcccggagaagggggtcggcgacgcggaggcggggtgggggccgtaggggatggaaccgaggcgcgcgcgagaagagccgaggaagtaagcagtcccaaaagggggcggcggtggggcccccagggaggcgtggggcacgccaagggcgccgtggggcactgacctgtggtgcggcccccaggacaggcccgaggcgcggttgcacaccggcaggtccagcacctccatgcctcgaggcatggcgcggccagggagcggcaggaggacacctagcgtgggacggctacacctgtctgggcgcaggcccgccgcccttgcactctccacccaagtgcccaacgctgcggtacggcccgctttggctcggggtgtctgccggagaagcgccttacagagggacccgggcggtgggccctgcggc

SEQ ID NO: 221394 - DNA, 395 bp, Homo sapiens
  chr1:85666768-85667163
  hyper
ccgccgctgggggaggcgggggacgccgttccgcctccgccccctcaggctcgggcgcagactgcgagccgccgggcaggttttcgtagtagtcggcgtcgtagtcgtcttcgtccttgtcgtcttcctcctcctctccgctgtcctcggagccctccggggagtgcggaggggcgtgagcgagcccatggctctggggggcggcctcctgcccgccgcgcggccgaggcccgagcgcccccaactgctccgggtgccctccggggacccgcgccccgggaccccacgcctcaggtgacggcgagggctgctgtaggctccgcccgtgtcccccggcgtgctcacgtgggagggtgtctgcggcaccccaggcgtctcccgcggctgccgaagag

SEQ ID NO: 221395 - DNA, 720 bp, Homo sapiens
  chr1:85930313-85931033
  hyper
tgtgaactactagcccgagggccaatggcgcgactccccaggcaacacggcggccggcggcgggggagggcctggcgcgcgccccggccgcgcccctcgagtcggcagttacctccttcctccggctcggcgccccgggtcgggtgatgagggccgtctcctcgcacaccacggccacgtcctccacgaagacgcagtccggaaggctctcgtcggccggcagctccaccacctgcagccccagcttgctgcccagcacgcccacgtagagctggtgctgccgttccgcgcgggcgacgtccacctcctcgcccttggcgcttctcagcgcgtgctggccgagcgactcgggtagcgcccgcaccacggcgtgggtggcccggccgaaggcggcggggtggccgagcccggccatggcttcgggaggcttaggggcggcggcggcggcggaggcggccgggtcctgccgcgggcagcgcgcgctgagcctgcgagcgcccgtcggctcctcttggcagccgctgaatgtggtgcagaaggagcccagctcgcgcccggagccctgcccgcgcgactgagcatgcccagagctccgggcgccggcccgcgcgcatcccgcgcgcccactccggcgctcgcgggtctcgcgccagcccaggcgggagttgtagcggcgagcgccgggcgaggagtggggccaggagaggcggccggggaagc

SEQ ID NO: 221396 - DNA, 159 bp, Homo sapiens
  chr1:86042081-86042240
  hyper
gggctccccacacgcggaacttctcgaggaggaagaggggaaggggtcgtgggaggccaggagaaaccgagagccagctttaccatgtgtcccttctggggataatggaatccaggcccttcggggcttttccccagagctggctacacgtcccgctct

SEQ ID NO: 221397 - DNA, 127 bp, Homo sapiens; identical to SEQ ID NO: 197623
  chr1:87793799-87793926
  hyper

SEQ ID NO: 221398 - DNA, 697 bp, Homo sapiens
  chr1:90098146-90098843
  hyper
ctgaccctggccttcggaggagttcccagaagggctatttttagtggtggctgctcccctctaacttacccaggggaggagctgcggtggctgagccgacgctgcgcgcacagccgcctgtggttttccgcgcattgtgagggatgaggggtggaggtggtattagacgcagccgaatcctccctcagagtccgccaggtgggcgtctcaggggtgggagtggccgcgtcgtgaagcggagagaggatttctctcctggtcctggagaaggcccccggcggccggcggcatccctcgctggcgagtcccgggagcgaggtggtctctgcaggggaggaagttcccgggcggcgcggcctgcgtcacagcggggctggcaccgcggagtcgactcggcgggcggtggcgaccccggggccgggcgctgggcggcgctggctgccgctagccgggctgcgtgcggggcggcgctggaggcggctccgtccgcggccggggaggcggaggggaggagggcttgcggggctggggcgttagctgcgtcccggctggaagcccgcgaagagaagtaggaggaaggcgccgccgtggccgcggccgcagtgctcgggcgcgacaagccatgagcagcgaccccgcgggcgacgccgccgtccctggcagccgctgagcccgacccccaggcagctcgccgctc

SEQ ID NO: 221399 - DNA, 143 bp, Homo sapiens
  chr1:90228347-90228490
  hyper
acgttgggaatttccggaagcacaatccccctggccagcactggtgttaattaagggcgctgctggtgttttgcaggcagctgtttcctcctccggccctcctgttccccgggccgcctgggcaccggcgcctgcactctggc

SEQ ID NO: 221400 - DNA, 178 bp, Homo sapiens
  chr1:90228948-90229126
  hyper
gaatccatgcacctcgctgccaattcgtcttccggacgctcgttgtcagtcctctgtgatctctaattaaggctctgctgagtctcctctttatctatagggagaatcctcaagcggggagacacacccttcctgcagaggcgtatcgccagccacgacaaggcgagccgcgtttctc

SEQ ID NO: 221401 - DNA, 240 bp, Homo sapiens
  chr1:90309191-90309431
  hyper
aacaggaagtgcacggctgtctataacgtgctgccgggtctcaggatggaggagtgaagtctcctgtcgccgtggttccagcctccggagctcgcccaagccgcgtccccagagagcgccctgagagaacagggtggccgcttggtccaggtgcgcggggtcgggtctgggtccagggagcgggtcgggaagtctgcggcacggagcactgctagtgtcggatctgcatctccagctctg

SEQ ID NO: 221402 - DNA, 540 bp, Homo sapiens
  chr1:91183207-91183747
  hyper
ggtggcggcggcggacgcggcaggtgcagcgaccgcgaagcccgggcggccgcgcgccctcggaactcccccgcggctcccgaggtggcagccgcgcgccactcggcagccccgtagccgagtttctgaactttcttggaaagttgcggggcagacacggccgcagcggttgcggcaacccgaggaggaggaggaagaggaggacgacgagaaggagcaggcacagaaggaggaagcggcggagacgcgatgccgggcgactccggccgctgccgggcgcgttcgcttgtaatccggctgctggcgggcggcgccgaccccctcccgtgacgtcacggccactaccgccgctccccgcgccgcgccgcgccgggcccgcgcccccgccaccgaggccgcgcgtccggccccgcgcccctattggccgcgcccgcgcgagcgagggacgccgacgtgccagggagccaataggcgcagcgctcgtgagcccgtcagcggactcggctcggactccgctgctcttttgagaacccgcacatc

SEQ ID NO: 221403 - DNA, 180 bp, Homo sapiens
  chr1:91184053-91184233
  hyper
acagaaaagtgtgtcacttcaggcgccggagccttgcataagcgggcgggtcggctctgggctctgatttctcgcccgacgaacccaggcgctcgggctcagcccggcgggaggcggatccctgagagggacacagccgggtccgcgtccaccaggcgctctcggggaggacgaggcctg

SEQ ID NO: 221404 - DNA, 248 bp, Homo sapiens
  chr1:91195118-91195366
  hyper
aggagctgcaggctcgggtccccagccaggcgggggactgcgggccgcccgcgctgcagggccgcgggtcaccgcagggggcgccggggcgctacgggtcctcgggcctggtcttttccggtccctgcccgagcccgcgcctttcccgcctttcgggggagaaacctgcctggacactggaactgggagaaagcagcagcctaattgctcttccgatcgtcgcttgggaaaggggggcttcacattta

SEQ ID NO: 221405 - DNA, 35 bp, Homo sapiens
  chr1:92946278-92946313
  hyper
tacagcaagcccgccgctgccgtgggcctctcata

SEQ ID NO: 221406 - DNA, 1087 bp, Homo sapiens
  chr1:92946605-92947692
  hyper
tgggcttcgtccagcgatgggcacattgacttctccgaggctgtggaggcacaaggggagcgtccggtcaggcttcagacggcagagcggaggccgccgggctgcggctgcgagcgtggcgtgttcgcggactgcggggcacccagcgcttgtagaacactgcgtgcgccaggtgccaggctcgccccagggtaaaacgtggcccgggccctggggcctcgcaggccactataggaggcagaacagtaaacagatcattgaaaagacctcgggagaggaggtcgtaaattctgtgcgagtgcagcggaggcgctcggcgttccgaggatcttttctggctggacccgcgcacctggagatcctacagggaagggcgcatctataaatgcccgtagttgagctgttaagaaggagaaggtggcggccgttcggcccctcacagcactcaagggcggaagggtccagccaccagcgcaggcactctcccagcccctacatgttcccattcaattctttttcttcccagaatccaagaggaaggagggagaaggtccataaatgcggccccgaactacccgaaaggctgctgtctgaataaacccgaaggtattaagatttcacgaagttaagtgcccagtgtacgtagcaaaggagcagcaggaaaggggcttttgggcttaaattgacagccaaatactccccattcctgttacagtttgatggaggcggggaacctgaatttctcagagaataactataactcataaggtttagccaccacctgcaaggagacagctctgaattctcggcctgctacgcccccacccacgtgaattttgctaaaactagtgaccccaacgcatgtgagtgcatacggcatttacaaatgtgtgtgtgtgtgtgtgcgcacaacactccagttcaggctggccacttcagtgagaggctgtacccggagtttcgttcggaggggttcggggcgcgcccaatccttgtctggccacttgacgccctggcaggaagaatcctcccgccgccggctcccagacacacttgctggagctatggttttcgccaagtcaactca

SEQ ID NO: 221407 - DNA, 360 bp, Homo sapiens
  chr1:92951331-92951691
  hyper
gctcccctgccgaaccaccagaccgcctgctgcgcgcccccagctccagatttccagtcacactgcgcgggtcgcgccctaacccagctgccggagctctctgggctcccgcacggcggtccgcagcaggtgggaaaccgcccgcgccctctgatcgcccccgcagtgccagtgctctgcgagtccccgcggccgcccccaccagggcaggaggcgcagaacaggctcggcggacctacctgcggagtcacggcgcgggcaccgcgctaggagagttttcaaacggaatcttgctttcgggagagaccgctctatctctctgacttaaaaaaaaaaaaaattctccttccgagctcagcc

SEQ ID NO: 221408 - DNA, 689 bp, Homo sapiens
  chr1:92951927-92952616
  hyper
aatgacttgaaagaaaatgaactattcttggctccagggagacttccgcagcgagagaagccacagattgaggacacagattgactggcgagagaggggtggggggcgccccgctccgaggaccctccccgcccctcaggcctcggtcacccgccccccccacccccgaccccgccgcctcctagggctgcaccacccccgggtcgggaccgtgaatcaccggcccgcggtgccgccggcctggagcccggcgagtggccacggcgtccgcagagcgaaacctgccccgcaggccccgaaatagcttgttgtggaaacacttggggataaatacgcccaacgaggctgaaaataccttgacacccaatccgagaggtttgctcatttcccttcggatttaggtaatggttaaatttggaagaggtgggcgagcgccgagcccccggcggagagggccctggcggcgcgtcccgcgggcgcccggcgggaccggtgggcgcaccctccctgcgcggagctcgccggctctcgaccgggtccgctcagccttcgactaatttccggtggtcggagctgcaaaattaaaggccgcgcgggggcagcgccggcggctgctaggctgactccgccctgccggggcaagccagggagagcgggacctcgcacgcgggctctgccaccgcctgagg

SEQ ID NO: 221409 - DNA, 300 bp, Homo sapiens
  chr1:93250632-93250932
  hyper
ccggggtccggcccggccgcgtcaggagagcccaaggcgcaggcgcgggagggccttaaagagacccggcagcctctaccgcagaatgggttggagcaggttaggggccgggcgggccggccgagaaaaggagaaggcgaagggattggacggagtgcagaggaggcggggaaatcgctctcgccctccgcctctctttcaaagcaccagccttcagtcctgcaagtcgccgacttccccggccactggaaccgccccttccatgttaaaacggtagaagacacaccccctcgggggccc

SEQ ID NO: 221410 - DNA, 149 bp, Homo sapiens
  chr1:93913410-93913559
  hyper
gtccgactggcagcggagtgggggcagtccaagctccggggtacctgcaggaggagactcgaccagcgagaggggccagcgagggtgaccaggtgcccgcttggggaccccgccggcggtggccaggctagcccaggtcctccccgatc

SEQ ID NO: 221411 - DNA, 240 bp, Homo sapiens
  chr1:93913750-93913990
  hyper
cgccggccagcgagtgagaggtcggacagactgtggagccgacagactgaaggacagcggcaccgccagacggccagaaagttccgccatgagctggggcacggagctgtgggtgagtcggggagaggggcgccccgcacggaccccggcccctgagaagcgcgggttgggcgggcgccgcggaccctcggcggtgaaagcgcgctccgccgtcctcggtccggcgctggcggagggtga

SEQ ID NO: 221412 - DNA, 300 bp, Homo sapiens
  chr1:93914141-93914441
  hyper
gccgtgatcccctcttgttccttctccctcctccaccttcacttttcccgacgcctggcttcgcgcccggcggctcctctcttcctttgtatctctcctcccggaggcgggggagggggcccattgtccccaaggggcgctgttcgagggcggggaggggaccggccgcgattcctcgcccgggccaggtccgcggggctagggcgtcgcccgtctggggcggcgccgcccagagccctcgccccaggtatggggacccaggcggctttgttcggagcccggcctcgggccagccaggcc

SEQ ID NO: 221413 - DNA, 458 bp, Homo sapiens
  chr1:94146398-94146856
  hyper
acacctgattacaccgttttaaagcggcggcgccctcagcggcctaagtgggtaaggacagttgggctgtacgatctatcggaacctccttcccaccgtccctcccttcctttgccttccctcgcctctccccaccgcgacgcagagggagcaacacaaccaactattcattctttctcaacaaagggagagagggagggagatgttgtcaacagttacagggcaggctccttcgctttctttgcaaacttcccaagagattaccggagaaactcgcctcctcggagccttgggcttccaccagagcgctctgggccctcgcatctgcccgaccccggccggcttctgcgaagaggggacgggcgggacagggcggggtggccggcagagcagctccgacgggcagggggtcgggcgaggccagcgcccgggaagatgccgctcgagtgccaccgagc

SEQ ID NO: 221414 - DNA, 720 bp, Homo sapiens
  chr1:94702652-94703372
  hyper
gcggacccgttgtacgcgctgtgtgctaactttaattacgatcgtcaccgtctgctcccggccaccgctggcgtcctccccagctcgtccgcgcctccctcgccgggcgcgcccctagccccggccggacccttcccgtggactccagtcctggctcgaggacacccgtccctagcgcagcctgccaccgcttccactcggggccgccccgcgggcctcccggaccctggacggcaattcgcgggcgctcgcgcgggcaaccccagcccggagccacgaccgccgcggccggagcaagcgccacctcctcacactcaccacggcgctccatctcgcgtgccggacgcggacgcccgccccacacctacggccgccgccaccgccgagggctggagctcgctgcccccatcccccacggcctgcggacgcccggccaaatctcagccgcagccgcagccgcagccacagccacaggcaccaccaccactgcagccgccaccgcccctgcagctaccgccacggccgcaccgcccgcccgccagccccgccccctggagcccagcccattggcccgcgctcccgggggcggggccggcgaccgcggcaggtacgggaggcaactagctcgcgcgcagaacgcgaccgtcagttgcgcgcggccggacgctgtcccagcatcacgggctgcgtcggctgcccttttggcttgcaggggacagg

SEQ ID NO: 221415 - DNA, 240 bp, Homo sapiens
  chr1:95007280-95007520
  hyper
gggagtgcgagggggtgcggggagctcgcagtcttggggagccggtgccccgcgcgctataaagggccggcggcgcgctctcccgcgcctctgcccgcccccggcgcccgcccccgccgctcctcccgactccccgcccccggcccgggtcacttgccgtcgcggtgggcggcccccggcgagtccacacccctgccccgcctcctcccggtaggaaactccgggaccctgcaagggatg

SEQ ID NO: 221416 - DNA, 105 bp, Homo sapiens
  chr1:95391395-95391500
  hyper
ttctgtgcacagttccgcgccgattggctggtctctccccccagaaacccctgatgtcatgggcttggaatgcagggagggaggaaggaaggagaggatttgggg

SEQ ID NO: 221417 - DNA, 600 bp, Homo sapiens
  chr1:95582790-95583390
  hyper
ggacccaagttccagggcaagaaggtctgctcggcggcccgcctcggggccccgcccactttggccagggtcggagccgcccggagcgggagccggagcccgagcggccgcggcccctttaaggagcagctctgcggtaacccgagcccgcagtccgggcgggcgcgacggccgccgcggtagctggagcctccgcgactgcacctccaagcggcccggaacccgcggcttccctggctcccgtgagcatctcaccgggcggcactggccagcgccagccctcgggccggcccggatgagcagactcctgtagacacccgccgccctctcccggctcggcgcagccgccgcccgcgcgcgactcgccccgggacccggcacaggtgacgccgtttggagggggggttggggaggaaggcgggcttgcctcgccccgcggctcccccgcgccagccgccaagcgcagcccgcggagaggggtgccgcggcttcccgcccctggcctagcgcggccgagagctcctgcgcctggaggctgggtgggcgtccggcgcgcgggaggcggcccggggctcccgggcgggctccggcaggtgtgtg

SEQ ID NO: 221418 - DNA, 475 bp, Homo sapiens
  chr1:98386195-98386670
  hyper
aaacaggtcccgacgcaaagggcaacccctccagtagcggaaagtcctcccctgagctccccgcctgcccacgcgggcctgtggctccgcgctcctccgctcccccgcagagctcccacgggggaaactttcccgcgtctctcactctccggggtgcgggggccgcgggggcctccccggcacctacccgcagagcactccccaccaccccgccaccaccgacgagccggcgcgaagtccgtacctcgatgtccgccgagtccttactgagcacaggggccatggcagtgcctacagtctcgagtctgccagtgacaaaccctccttgcgtcctcaagctccagccagagagccaagtgacagcagccggagcgcgagtcgaaaacaggcagactagggccggcggcgcgggggcggagcgggcgcggggcggcaacgcccccggggcggggctgcgctctcggtcctgcggctc

SEQ ID NO: 221419 - DNA, 152 bp, Homo sapiens
  chr1:98386776-98386928
  hyper
ctggcctttaatctctaaactgctaaaaacagagctaggcaggcggggccagataggagggatccccaggcaaaggtaaaagcagtccgcgctccaagcaacaacttgcactttttcttttcttccacagaaaccccgcgagatgtagatac

SEQ ID NO: 221420 - DNA, 1036 bp, Homo sapiens
  chr1:99126875-99127911
  hyper
gtgccttccagcctcgctgtggatcccgcgaagtggacggttcgcttcgtggcttcttcccagaccccgccactgcggaaaccgtcactcggtggcccccgactgggtcaatgcgaggacgcccacctcctacctttgagtctctcctcttctccagggtacagccaaccctttctccaacgtagccggagtccgagagtcccagttccgcccctccagcccgccccaggccaggtggggatgcgcccggcccgggccagcgctggtcccggcagttccgcgtctgcgcagcgggcgaggggctggagcggggccggccggggaggtgcaggagacgtgggagccaatgggcacgctcgggggagccgggctggcggcggcggtggcggccggctgggcgcgcactctcgggatggagggcgagcgccgggcatcgcaggcgccctcctcgggcctcccggccgggggcgccaacggggagagcccggggggcggcgccccctttccgggcagcagtggctcttccgccctgctgcaggcggaggtgctggatctggacgaggacgaggacgacctggaggtgttcagcaaggtgagggcggcggcggcgagtcccgggaaacttccaaggcaactccgggcgttgccagcattgcgccgacggctgcctctggcgcgcttgccctcccggggcggtggctctgagctggggacgagtgaggtcccccgggctgctggaccccgcctgccagctctggccgcacccggggccgcgtcgcctcggggcctcaaaccgcagccgctccctcctccgcactttgaccttccgttcggcggggctgtggcttagtggagtctgcaaagttgtgatttgttttccctttctgcttctctgacacagacatcttcctcgcggcagctcccgaacctgggaggctggtggctcaaaaccgctcccgccagctgcttttcgggcgaggccagccctgaactctgggagagcagccaagtttagagaaattattcttaatttagt

SEQ ID NO: 221421 - DNA, 180 bp, Homo sapiens
  chr1:101004610-101004790
  hyper
ggcgcatcccggtgtcactcctgtattcgggcctggccatcgggggcacgctggccaacggcatggtcatctatctcgtgtcgtccttccgaaagctgcagaccaccagcaacgccttcatcgtgaacggctgcgccgccgacctcagcgtctgcgccctctggatgccgcaggaggcgg

SEQ ID NO: 221422 - DNA, 974 bp, Homo sapiens
  chr1:101004860-101005834
  hyper
cctgctacggggtgggctgctgggcctcggactcacggtgtccctcctctcccactgcctcgtggccctgaaccgctacctgctcatcacccgggcgcccgccacctaccaggcgctgtaccagaggcgccacacggcgggcatgctggcgctgtcctgggcgctcgccctgggcctcgtgctgctgctcccgccctgggcaccgcggcccggcgccgcgccaccgcgagtccactacccggcgctgctggccgccgcggcgctgctggcgcagacagctctgctgctgcactgctacctgggcatcgtgcgccgcgtgcgtgtcagcgtcaagcgggtcagcgtgctcaacttccacctgctgcaccagttgcccggctgcgccgccgccgccgccgccttcccgggcgcccagcacgcgccgggccccggtggcgccgcgcacccggcgcaggcccagcccctgccgcccgcgctgcacccgcggcgggcacagcggcgtctcagcggcctgtcggtgctgctgctctgctgcgtcttcctgctggccacgcagccactggtgtgggtgagcctggccagcggcttctcgctgccggtgccctggggagtgcaggcggccagctggctcctgtgctgcgccctgtccgcgctcaatccgctgctctacacgtggaggaacgaggagttccgccgctccgtgcgctcagtcctgccgggcgtcggcgacgcggcggccgctgccgttgccgccacagccgtgcccgcagtgtcccaggcgcaactgggcacccgcgccgcgggccagcactggtaacctagccggggcccgagggaagcggagatccccggcttccgacgtccttgggcaccgtcgcctccttccctcctagggcatcccctgcctgaacgaagacttccgccgcgaagcccgatagatcgggggaaaatggggccttcgaccccagcgggct

SEQ ID NO: 221423 - DNA, 240 bp, Homo sapiens
  chr1:101701938-101702178
  hyper
gcggctcaggttttctgctgctcgcgcgaaagtggctcggggagctcctggccacaagctcagcacaccgatcctcctagggctgcggggggtgtgggaccagggcggtgcgctacgagactccgggccgtcctctgcctcctcagacttttcgagagaaaagttttcaaagtctctccaccttttttttttttcaggggctcgggagaatcctctccacagccagggatcagcgtctat

SEQ ID NO: 221424 - DNA, 988 bp, Homo sapiens
  chr1:101702279-101703267
  hyper
gggttcttttttttttttttttttttttttttgcttctgccccagatctttcctggacagtgcgtctcagcagttcagatccgggggcccccagctgacagagggcgtggggggttaaggcattaacccctcccagcctcttcctgaagaaaccacccagccttggcgcggcgctgggtgacttcgcgtagcaggcagggaactggccgcggcgagcgggactggccattggagtgctccgctgcggagggaggggaccccgactcgagtaagtttgcgagagcactacgcagtcagtcgggggcagcagcaagatgcgaagcgagccgtacagatcccgggctctccgaacgcaacttcgccctgcttgagcgaggtagggggcggcgaatggcgggggtcgcgggcgcggggagcccggttgtggtagggcttaggtgtcagaaacgaatttttaagtcgaacgaggcaaacaaaaacttagaaaacatgcatctccgggcgctgaaaatttgcatctctgggctactaaggagcccatctcgatcagattgttcttgggcacttgtgatttatggagttcagaaaaaaggttaattcccaactgtggaacctacgggtgtaggggcagtgaaaattgcagttggtcggaggaataggagggaaggcgttaaattttggaaatcctatagacaaagaatatggtgggtggtgtggagcgtgggtaatggcttaaattagtactgcccaggagcagggtataaaattagttgggggaaaatgcggagcttcttggcttgagcagcctctgctgttcgcggagttgctgggattgttctcatctctattacctcattttattgcattgctgcattaccttgaaatatttaagcaacttagaagtagacttctgctgaccagtgccgtcttagaaagtttctttgtaactttctagtcctaggagaggagtcaacgtgttgggggactg

SEQ ID NO: 221425 - DNA, 240 bp, Homo sapiens
  chr1:107600016-107600256
  hyper
cgcgctgtctcatgggccactcggagatcgttgtgcagggattgtccggcgaggacgtgctggcccggccgcagcgctttgctcagctagagctctcccgcgccggcttggagcaggagctggaggccggagtgggcgggcgcttccgctgcagctgctatggctcggcgcccatgcatggctttgccatctggttccaggtgaccttccctggaggggagtcggagaaacccctggtgc

SEQ ID NO: 221426 - DNA, 1260 bp, Homo sapiens
  chr1:107683249-107684509
  hyper
tgatttatgccccttctgactaagctcaacgtcttcatctgaaataaaatgaaagcggtgccaagcggcatagaaccgcctggccgctggttctgatccccgggaaccagaaaatcgtcctgcggcttgaaaaaaaaaaaaagaggaaaaaaaaaagaaatagaaatagaaaaaagaaaaaatatccctcagtaaaagtttaaggcgagaagtgtcagaggcagcggagcgaggaggcgcggaggagagccggcgagcaggggactgggctggcacgacctccgaaggctgagatctcattattaatatcactatatttttggagggagaggcacctttctcatcctctcttcctctccgcccacccttactccctccccctcatctacctgtcaaagtcactgatcttttgcatttcggaagaggacgtcaacgggaaggaattccccctctgggtgcgggctccgagagggggcgacttgcaggaggctccccccgggggcggaggcgaaggtaattaagcggcggggagtggcgggccggcgctgggttctcggtcctcggggtcctctcccgccggcggccgggcgcgatcggaatccccgggctgcggcggtggcggcggctcgggtcctcacgcccacccctcccgctccgcccgctcccgcctggggaggaggctccgcgggagctgccgccctccgcccgtacgccgcccgcgggctccgctgctgcggccgccgcccgaggcggaccaggctggctgcgcagggccgccgccccgcgccgtcggctcggctcccgcccggcgcaagggcaaacgagccacacggtaagtgcctgcggctcgcctctcctactgcgacccgagcctctcgcccgtgcccctctcccccgggtttccccaccccccgccgccccccgccccacccgctgcgatgcacaggcgggagggaaggctccgggtgggcgaggaactttgtaaagcgccccgaggaggcagcgcgcggagccctacgcgcacacacagcggcacacgctcacacccacacacaagtcttcccgggggtgcgccccgggccggtgatgcgtcctcttgttgtgtccggagcccaggcgtggggtctgagcctccatccgccgactgacaggggccccgcgctctccctctctcacgcacacctggccacacacatcgctcaggcggcttgtcgttattttttctttctttcgccaattatatttgtttggggaaaagca

SEQ ID NO: 221427 - DNA, 1483 bp, Homo sapiens
  chr1:108507104-108508587
  hyper
agctaaaccatttcaagccaaggtaggaaacgccaaagtggtgccgaagtggtcccaaagcagaaggctgggaagcagggcaagctcagcgcacctagacgtttgcatttacacaaagaaattagccgcatgattaatgggagctgccggctggaggcggggcgcccgtgccggcctcctcacctgggacatctgcggcctcaggttgatctccttcaggttgatggagtgcgcccggaggttgttaagcagctggcagagcaggactccatcgcggagggtctgcgcaaggtcgaacacctgagccgagtcccaggtcacccggtggttggtgggcagcaccttgcaatggatgagccactgcgcgcactgcttccacggctccatgcccgacggctccgggacgcggctgggccggggcgggcggcaaggatgcggccgccgccgccgccgccgcggttcctccgcgccccgccgacgccaacagccgccggccctttccccgcgcgggatcgagggagcaggagccgcggctgacgggtcgcgggcgccgcgctaggctcggctccggtcccggcccgggtgcgccgcgacccggccgccgctgcagcgagtcccgcgcgctctccgtgcgccccggccggctcggcggcggctgccgcgcacaggcttccgactccagcgcccggcccgccactgagcatgcccagcacgccggccggtctcgctgcggtccgcaagtccccagacgcgcgggtgggagcgcgccggcggccggggctggggtctgtggccgagggcggggcgcgggggaggggccggcggaggggggcggcggccagaaaggggatcccgcgcccccgcctgcagccttgcggggctcacgcagcccccggcgtcctggggtcttctctcggggcggcttcccggctttgcggggagtgtggctgaatactgtaatacgatggggtcccccaggaccccctaaacaacaaatgctcaaaggagcgacggattaattggggcacccagactccccagagcaatgaaaaaagtgcctagagcatcagtagagcacggcgctgaaagttttagagatcgtcgccccctcgccccttgcagctctatcccctccattctctatagctgattcctcagcctattcctcctagttgcccctagtggtgttttggcaccctcaaagtgagtgagagtgcgtgtgtggagacgcctgcggaaaccgccccgatccctgagcctatttcctcgcgaggtgattttcacttggagctggtttgcccctgcactgtcaggctcggaactgtttgccgttgctgttctggcccttttgctgaccccacaaaaacctgcttgagaaaggcctgtgccacggtgctagactgcgcatgcgtcggcgactggcggccgggtttgagagcaaagcgcgttagccctgggcagctcctgccgggctgttctggga

SEQ ID NO: 221428 - DNA, 650 bp, Homo sapiens
  chr1:109203573-109204223
  hyper
accctgctcactgaaaccaacgcttctgtctttgtacgggccgtcgcttccatcatcctgcggtaagcagcatgcccaaccgaaaaaacaaagctcgtcgcggagccgccagcgtcctcaactcagcgccgccctgacgcccgcgcacgcacggcctcgctgcgtgacgctaccgccgcggctacgccggcgcccgcacccgcgcctcggcctccccgcggggctcgccaacctcgtgcgctctcacggtcggccttgggccccgggagcctcatggtgcgccgagctccgtccctctaggctctcagttccaaggcgtcggttttgcgtctcgtaacggccgctgtggcgcatgcccagaagccattttcaaggtcctcttccgaaccttggcgaggacccctgcgcctgccgcgccgttgaccccgctagcgtgcggctgcgacgcggcacggtacggcagctgttggcgaaggcccccaactccgagcgcgtccgcagaccgcgagccggaaggcggcttgggcggctgttgagttcgtggcgctcccgaggcgtggcaaaggcctaaaaacggtcctggccagcggaaggcggcaagaggagcagcaaggctccacgcgaggcggccggcggctggagtcccagtc

SEQ ID NO: 221429 - DNA, 534 bp, Homo sapiens
  chr1:109940219-109940753
  hyper
tgttggccagcttggcgacgaagtcccggacccggccgcactcctcgtcctcgcccggcgcgctgcgacgccaacggccgccgcggggaaacgcgcccccggctgcggccgcccgcagcccccagctcaccccgatggggccagaccagcgcggcagcggcgcagcgggcggcggcggcgcgtccagccggtcctggctgagggtcgacggcggcagcagctgcaggaggaggaggaggccgaggccatggggccagcgcgagaggccgtccgcagctccccagggccgctccatcgccgccgaatgccgccgacgccgacacctgccgcccggcgcgcccgcccacccccgccggcgcgcgccacacccccgagccgagcgcggcgctccttggatacgcgcggccgggcctctccgccccataggctggccgcctgtccctcttccccggcccactcctcattggctcgcgtcgcctccggcttcgggggtcctggattcggatgctaagatgcgggactgattggctggaa

SEQ ID NO: 221430 - DNA, 113 bp, Homo sapiens
  chr1:110025979-110026092
  hyper
gaggaggcacgacacgggagccgaggccctcccccacaccacccctgtgtccttcagcacctcctacagactccctccccttgcccttctgattcacagcgcccacctccctg

SEQ ID NO: 221431 - DNA, 105 bp, Homo sapiens
  chr1:110052180-110052285
  hyper
gacttgcggggccccgctccgctcaccctgccaccgcctcgaccgctgagcccgccggagcccaccgaccgcggtcgctgcctccaggtccgcaggcctggcgcg

SEQ ID NO: 221432 - DNA, 147 bp, Homo sapiens; identical to SEQ ID NO: 197694
  chr1:110453160-110453307
  hyper

SEQ ID NO: 221433 - DNA, 333 bp, Homo sapiens
  chr1:110453531-110453864
  hyper
cgcatcccaggacagcggtgcggccctcggccggggcgcccactccgcagcagccagcgagcgagcgagcgagcgagggcggccgacgcgcccggccgggacccagctgcccgtatgaccgcgccgggcgccgccgggcgctgccctcccacggtaagcgacggccgcggcgctgggcccgggacgggctggggcgggggctcggcggccaggcggccgggagcggcccctcggagccgacagcctgggcgcgccggctgcactggcccggcgttcccgccgcggacgaaccgcctttgcgcacggactgggccctggcgccagggcggaggc

SEQ ID NO: 221434 - DNA, 360 bp, Homo sapiens
  chr1:110626586-110626946
  hyper
ggctctcagctcctctccagcttcgcaccctgtgcctccgggcgccctagtctccccgccacgccgcgacctttcctcggcctcccgctcccgctttgcggaaaggtccggggcgcgtgtaggggaaggagagagaggtatgtggggcgagcgggagttgagcgtggatgtggggaagggggtgcgtcctgcgtcgcccccgcaccctcgcgtggccgggcgcagatccccgtgcacgggtcctccgcacacccttgccagcccgcagggattgttcgccgcgttggtgactccttcccaaaatgggaataaaagatcgaaatagctagtaagcatgcaaagtttattgtcaacctcaag

SEQ ID NO: 221435 - DNA, 660 bp, Homo sapiens
  chr1:110626993-110627653
  hyper
gatcgctggggggcctcggggctcaggaagccccaggagtccagcccgctgccgctcactgcgctcttctctccagccgggtccaagggctcgagcatcgcaacctgcggcctgagttggccccgggcgcacgcgagggaaatggatgcagtgcccgtgaacttggggcctgaataattgataacaacccgctgggtgcccgtcgcgcggccaggcctgcggggagcggagccggaggcagcaagcaaaggaaacgcacgagccgggagcgcgggcgcgcggggccacgaaagaccgaccgactgtccgacgggcggtgggacaagaggacggatgctgtgggggggccccggaacccgccgccacaactcgcggcccacgcgggtcgcagccgccagccgtagggagctgccgagcagcgacgttccgcattccatcgggttcccgcgccctactgggcttgtgcggcgcagtgcctgcgtgtgctttcgttttctcaaggccattctgataaaacatacgtgctggttccctttcttttctcagaatgattcttcaaggcgaatgactcgaaatggagatttcttctaacaccgcgtgatcaccgacaacttttgcaggacgggatgaaactcctctgggtttccagtcagatgtgcg

SEQ ID NO: 221436 - DNA, 1069 bp, Homo sapiens
  chr1:110692968-110694037
  hyper
ccccttgcaactccctctcccgccccacgcccaccctctccgcctacgtcggccatcagagcctcgctcgctgcccgagagcctcgcattgacgccggcccgcgcgtgagtcaagcctgcgtcacggcgccccgccgccagggtggcctttcggaaagcgagggaacagtgcgcgcagcgctccgcccagctccgttctgctccgcagagccggcgctgccagggcgcagggagggcggcactcggccccagtcttcgcaatcccgcgcgctctctccgccgtgggacctgggtccccgcgccgctcccctgagccccgagcgcgcggcgggcgggagccaggttgggactggtggtgaggcagggagtgaggagcgagcggagtcgcgtgcgccggcgcgcagctccgggtcgccccagccccagccgggggcctgtggcccgggggaggagctgtgcgtccgcgacccgtcggggatcgcagctgctcggccggagtgcacgggccgagtctgcgcgactacccacgcgtgacaggtgagtcgctggccgcgccccgcctggctttaccgggccggccactgcaactttccctgttctggccccgccccagccagggagggctgaggaccaaggtgtgaggcggcgctgcccccgcatccgcccgaccctgcgctcgtcccgggctcctctcgccgctccagccgccgttgcctggcgacggagccccggggcccgctctccttcgcgcatcggggtccccagcggcgtacgcacgggttggacaccgggcttcagcttctggtgctcagaagggcccaagaactccggaggaaattgggcttagctgcggaggcaagcgcccgcggagaaccggagggggcctgtccggcccatccgcggcttgaaactgcgcgcccagggcgcagttccactgggagcctcttacgcagctggagaccccagccccagccgctcggcctcaggcctgtgaccttgacagtaacattggcaagcgaagcagaactgtcacgcccgagatgaatatttaattctcagtcctggggct

SEQ ID NO: 221437 - DNA, 180 bp, Homo sapiens
  chr1:110753627-110753807
  hyper
cttgttgctgctgcgctgccgccgctgcggggaagccggctattccggggcttggtgcggtcttggagccggagggtggcccgtgtgagcgcgagcgccccggaccttcgcggtgcgcgtggactgtgcgcttcctcgtctttggtcggggtgaaggcgggggcgtgtccccggcccaga

SEQ ID NO: 221438 - DNA, 660 bp, Homo sapiens
  chr1:110753909-110754569
  hyper
taaccccaaccacctgtgtaccggagaaatccaactcctcccgctccgcgtcctagggggataggcaggggcaagcccaagccgcagagggggccgccaccgcctcctgcctcctcttcgtctcctccccctcccccgtctgacgctgcctcctcgggaagggtgtttggagggcagcggccgccccaagccggagccccgcagcgcttcttatgatcagctcggtgtgtgtctcctcctaccgcgggcgcaagtcggggaacaagcctccgtccaaaacatgtctgaaggaggagatggccaagggcgaggcgtcggagaagatcatcatcaacgtgggcggcacgcgacatgagacctaccgcagcaccctgcgcaccctaccgggaacccgcctcgcctggctggccgaccccgacggcgggggccggcccgagaccgatggcggcggtgtgggtagcagcggcagcagcggcggcgggggctgcgagttcttcttcgacaggcacccgggcgtcttcgcctacgtgctcaactactaccgcaccggcaagctgcactgccccgcggacgtgtgcgggccgctcttcgaagaggagctcaccttctggggcatcgacgagaccgacgtggaaccctgctgctggatgacctaccggc

SEQ ID NO: 221439 - DNA, 280 bp, Homo sapiens
  chr1:111148988-111149268
  hyper
cgcctgcctagctgcgaggcggcttggcagcagcgagagggggagcctggaggaagccggcttccggactggccccctgccgacccaatcccgccggccccagggcggggaggggtctgggccctctccccatcgccccgggctccggccgggattccgttcggcgcactcagcgctcgcctccgcgcagaggaccagaccctcccgctggccgcggccgctagcgccaccttaaccccctcctgcccgcgcggtcggctcctgctgcgggcccaagcgc

SEQ ID NO: 221440 - DNA, 240 bp, Homo sapiens
  chr1:111149371-111149611
  hyper
gccaggctgccgccccagatctcagcttccttttaagcgcgggggctcggcggcagcccacggccccagcgaaggggaaagccctctctgcagcaaagccgtttgttattctgtgccgaagaggcgaatgcagcccggccgtcccaagtggttcaggtcctaccaacccgcgctatttaccagacatggttatgctgccagctgcacttcccaccacccaccagctcctctccgtgccct

SEQ ID NO: 221441 - DNA, 1170 bp, Homo sapiens
  chr1:111216812-111217982
  hyper
cctcccgcaggaagccctcgtcctcgcggaacttctccatggcctcctcgcccagctggtagaagcggatctcctcggagaaaatgtcgatgggcacgttgaccggccggcggatgcggcccccggactgatagtagtagaggatggcgtcgaagctgggccggttgcggtcgaagaagtactcgttgcggagcgggtcgaagtacctcatgcgccgcttggggtcgcccagcagcgtctcggggaactggcaaagggtcttcagctgcgtctcgaagcgcagcccggagatgttgatgaccacgcgctccccgcagcagtcctgctcgcccgcggccggcagtgagggcggcagcggctcgtagcggtcgcagccgccgccgccacagccgccttgaggcggggcccctccaccatcggccacctccggctccagcaggtggtccccgggcaccacggtcatgtcgggcggcagctcgcggcctgcggcgggctccgcgtagccgtggttcaccagcgtgtgggcaccgccgctgctcgctgggcgctgaggagggtgggcgcggtggcgggctgagggcggcggcggcgagcgcagaaggctgaggcgctcgtccatgcggcggggaagaggcggcagcggtgaggccaggtcgctcctcctcgcgctccccgccctttcgccgcctccgcccccgagccgagcccaccgcctgttgcagccaaagccgcgatgctctgtctgggtctggcgcggtcagccgggctcccgcacggggacgcctcctccctccttctcgcgctctccgccccctcccctgcggggcgcgcgcccgcctccgcgtccccttaggattcccgcccaccgcgcgggcgcgcgtcccgctctcgggggcagccgccgggcctgcatttcttgcagccctcaaggcccctcggtgtcagcgaaagagccctcatgttgtacctcggcgccccgcgggaatgcccacccagcagagccggcccacggggagtcaggctgccggcccgggcccctaggctccgcccgcttctggtcagcgcccctcgcccccggcccgcctggccgcgtcccagtcgccagggttttcggcccgtgggccgggagagctcccgccgcggccccgcgggcgccggccccctggcctc

SEQ ID NO: 221442 - DNA, 856 bp, Homo sapiens
  chr1:113051157-113052013
  hyper
catttcacagaagcgcaaggatggaggaaatgagtgcatcctccgtgctcagcgccggtgtcactgtaggttggggacaggagggaagtgcccgcatccccttcccgctccgccagcctggccgtcacccatagaagtggggctgctgagtgaagggcgctaggacccggtggcgcggtgtcggcagggactgggcgcttggggcgcaggagggagccgcggcgtcccgtcgcagcgtgcgggagcaggtgggggtgcagcgcggtggcgcgcgggagccccgaggggcggaggcggctgctacacctagggcgtcgcggagcgccccgggcttggcgcgggcggagccgccctaagggccgcgcgtgtccccggcctcggccccgccccgtcccgtccaatgagagcccgcggccgaaggggctgtccgcacactaggcccgcagctcccttcagcgccgcagaccccctgacaccgcacccggtcctcaggcagcgcgccccagaccccgggttcggcacgccgtcgtcggcttccggacatcgcaacttgcgcccctctcggggatcctcctcccgggctctggaccccaggtgatcctaggtccccagccgccggcgaacaccatggccccccaggggggtgaggtaggagcagcctgagtacccccagaaggtgccccgtccacgcccctccgggctgcgcggcgggagtcttcggggagctatgctgagaccgggtggtgcggaggaagctgcgcagctcccgcttcggcgcgccagcgccccggtccctgtgccgtcgcccgcggcccccgacggctcccgggcttcggcccgcctaggtcttgcctgc

SEQ ID NO: 221443 - DNA, 190 bp, Homo sapiens; identical to SEQ ID NO: 197708
  chr1:113249226-113249416
  hyper

SEQ ID NO: 221444 - DNA, 360 bp, Homo sapiens
  chr1:113498606-113498966
  hyper
agggcaccgtggggtccgcgccgcgtgccgccggctgttacccaactaaccgttatatgcgcggatcgcagcgccgagcgtgtgcgtgacgtggtggcgcaggctggagttccacggggcccagggtccggctcccgtccttcgctcgctgcctcgtttgcttgttccagtacccacgcagctagccagtcacgtcgcagctcaccactttgtctggccgggccagcgaggctgccttataacccgccggggccggagcatgcgcgcagggggcggagtcgtctctcccggccgccgccccctccccgccacacagacatccgaactgcagcccgcgcctccacacgctttcagccgcgc

SEQ ID NO: 221445 - DNA, 510 bp, Homo sapiens
  chr1:113499030-113499540
  hyper
cgacccgcgcgctgcgcccctgctgagcggcgcggagctaccacgccctgccagactcgcccttgggtccctgtctgacgagctctaggcaatctgccctcgttcgggacacaaccatcggtctcacccctcagtttctgccagagaaaaaggaaaagtcaccgagaggcctgaccctgacgggtgggggagatgcgcgtgcggagtagcgggaagcgactgaggagcggggaatgggcagcatttgaatggatgcgggtgccgctggcacccgggaagacgctgggggccggcgctgtagagccgggcatgggctgggatgtgtttggattccaatccgggcctgacaccagttcagtgacctcgggaagttccccaaccctccgggcctgtttcctccctctgaagtggcgacagtagtagaaccgacctcgtaggctcatcgggaggtcctgatgggagaacccatgcaacttgccaccatagagccaggcccgcggcggttggcgc

SEQ ID NO: 221446 - DNA, 1510 bp, Homo sapiens
  chr1:113932573-113934083
  hyper
aaggccccggaacctcggccggctcaggactccgcacgttgtcttccaatctaagcacaccggcccctctctgcgccccgcacaggctcagaggctccgcccgcgtctccgcctaactcgccggccacgcccccacttcggggagctcggtccctctcggattcgagttttcctcggctccagccgccgcgcagagggcctctcccggccctgcgacctacagccccttccactcccctgcccctcctctgcgccctccctcactctccaaacttcttttttccaccctctctaaacttcagtcattctagtgcccgcctcctccactcgcaccgaccaaccagtggtccccattctcgttggcggtccgcctcctgcccgccgggggccaatccctggcgcgagagtccagggccggggctcgttcccaagcgcccagcctgtgacggcagcgcgccgggcgccgcgcggcgggagggggcggggctctggatgagggatgggcgagggccgggggaagggaaaagggaggaggaggaggttgcggctggtttgaaagcggcagtttcctggcagcttgggcaggcgttggtctccgcgctacagctccgcagcggccacgatcgatcccgcgacgggtctacgcgcgcttctgcgcgccccccacggatttttcccgttcccggctcttcccccttcacctccccgcccccccgcctcagcctttcccgccgctcgggcgctgagcccagggaccagccggcggcagtgaccccgcccgaagccccttctggaacctcctggggacaattcccttttcctttcttcagcctaacccgcggtggccctcgcggagtccggtcagccccggggagcgcagccgggaggggcgtccaaggggcgtctcgcgtctgggaacggccgggcccccagcgggctgtggtcgcggggtgggggccggagcggcgaggccccccttaccgggctgcgcgggccgcccagggcccccgggctgagacggggccggagcggcgccccggccgcccgcgcggggtctcccccatggtgcagcggggttcgggatgtcgaagacgctgaagaagaagaagcactggctcagcaaggtgcaggagtgcgccgtgtcctgggccgggcccccgggcgacttcggcgcggagatccgcggtggcgcggagcgtggcgagttcccctacctggggcggctccgcgaggagcccggcgggggcacctgctgcgtcgtctcgggcaaggcgcccagcccaggcgatgtgctgctggaggtaaacgggacgcctgtcagcgggctcaccaaccgggacaccctggctgtcatccgccacttccgcgagcccatccgtctcaagactgtgaaaccaggtacgccggccctgcgtatctgtctcggggtgttggggagaggggcttcagggtgggcgtcctgggagcggcggcacctccccaccgcgtattgtcccgggtaatcttagac

SEQ ID NO: 221447 - DNA, 203 bp, Homo sapiens
  chr1:114302510-114302713
  hyper
gtttgttgagcgaacgaatcaatgtttgcgtgaatttacgctgccctgggaggaagggccaggctgcggcttagtgactcccttcctctcccgcccctcagcagctctgggtctggagctttctagtgctcaaaggtgtagggggaaaagaggaacaagtattgggcagtcacagctttttccaaattagggtaaagttaggt

SEQ ID NO: 221448 - DNA, 149 bp, Homo sapiens
  chr1:114695147-114695296
  hyper
actccctcccgccccggaccctccagatatcgggacaaagaagccccgcggcagccggcgagcgtggctgccgggcactggtgcagcaggtaaataccctgggccggccgccacgtcgccgaccctcccgcagctcccgccgccagggc

SEQ ID NO: 221449 - DNA, 180 bp, Homo sapiens
  chr1:114695413-114695593
  hyper
gggctcccgcctcggctaggcagccgcctggggctgcgtcccgcgcagggtcagcgcggatcgggcaggaggcgccctcttggcaaagtcggctagaggcgccagctcagtcgcgcaccggccccgagtccgagtccgagagggacggagggagcgagttataggggcgagagggggtgg

SEQ ID NO: 221450 - DNA, 300 bp, Homo sapiens
  chr1:114695706-114696006
  hyper
cctcgtgccagccgcagacccaagtttctcccggagagactgggggtccgcccgcgttcaccgcgagaacacacaaacggacggacagaccgacgcacggacccggggacctcgacactcgctaggaggcaagccctattcctcagccgggcgcccctcgtctcccgctctctccatggacccctctcctggcaaatcgcccgcagagcgagcttggagatgcgagggaaactgaagccccaagggtgccccgtcctgggagcctggctgtctgcggggtcccccgcattccgcagtagt

SEQ ID NO: 221451 - DNA, 105 bp, Homo sapiens
  chr1:114697920-114698025
  hyper
ttgaaggttcgcagcttccaccctgacccctgtgcctgtgatagcagaaggctaggaactcaggcagggaccaagcagacacgacgcaggcgatactgtgcaatc

SEQ ID NO: 221452 - DNA, 71 bp, Homo sapiens
  chr1:115256506-115256577
  hyper
tctcatggcactgtactcttcttgtccagctgtatccagtatgtccaacaaacaggtttcaccatctataa

SEQ ID NO: 221453 - DNA, 94 bp, Homo sapiens
  chr1:115258668-115258762
  hyper
acctctatggtgggatcatattcatctacaaagtggttctggattagctggattgtcagtgcgcttttcccaacaccacctgctccaaccacca

SEQ ID NO: 221454 - DNA, 326 bp, Homo sapiens
  chr1:115880147-115880473
  hyper
ctctacctgaggttgtccaacgcggctccgtggagggccccggtacgccggacggaccccggcgttggctcgcagacttcctgcgttaacccccggggccctcagtcacgactcccagcccttccgagacgcgctgagggaactgccccaggtctagcgcgccccgttccgctcctccccctacctgggggccgcgcagcactttccctactcggcgctcacctcagccagcgcgctctgcgctccccccgcggtgctggccgccactcctcccgccctggcgcgccagctgccggcgcatccctctccgcgcccattcgctctcc

SEQ ID NO: 221455 - DNA, 180 bp, Homo sapiens
  chr1:115880640-115880820
  hyper
tcccgcgcccccacacccactcgggacatttctcagggctgctcttcggcctgcgggagcctcgggggtaaccagagagctcgccagaccggtatccttgcaaactctcccgcgaagcccagccacccctgcccgcgcccgcgctgcgcccctctcgggatcggctcggggcagcctgac

SEQ ID NO: 221456 - DNA, 1114 bp, Homo sapiens
  chr1:116184427-116185541
  hyper
acgaggtgagggggacgccggccgagccccgccctccgctgcaggtgggccggccccgcggcggggccggcagcgctagctgttcttggctcgcggccgcgccgggctcgcagggctgggctcgggctgcggggcggcgccgggacaggaagcggaaagcagcagtgcagcggcggcggcggcggggctctgcctctccaggagcccagcgcaggccgcagagccggggccgctgtgagccgagaccgcgggccgcggagctcgggcggccggcgcggaggtgagtcccgcgagaggccgagcgctgcgcggcggcggtccccggggcagaccgttggctgggagacgcccccacctcggaccccgcgtgcccctgcgccctcctcccgcattcgccccgccggacttcgaccccgggtggccggctcccgcctcgggccgggggctccctcccctcctccggagcgctccgggtagtgcttcctctgactccactcttctccccatgcgttgcgcccctcctggccctgccgtgcgatctccgccgcaccccactccttggggtcccggggttccctgctcacacctcggacgtccctttctccccgggctggcctttggagtgcgccccttcggtgcgcgtgccggggcggcgggcaggccggcagggagtggccgagcgttggaggcaccgggcggctgcagcagccgtgcagggcgggagccgggcgcgcaccggggttcccacccctggcggggctcgacccgggcgccgcctggcccttcgccaggaaccgggacagagctggtctgtgtgcacacctcgctcacaaaaaattgagccggccctggaggcctggggggcgagtccggttgcgcctcggagagcgcaacaggcaggtaggagtttactttcaaaaacgccggggtggagcagaggcgcctggcgggtctctgcccaaggtgtccctgctggaggaaatctcaccgcgccggggcagccttcgccaccggcaggacctcatttccttctgcagtctttgaactgccccaagcatcgcgcctagagaagtgtgaagctttataaaaatttaaacgcgtccgtggtggcggc

SEQ ID NO: 221457 - DNA, 280 bp, Homo sapiens
  chr1:116380295-116380575
  hyper
gccccagaagtggctcatctcgggtgtctccacgaggttctcctggcctggaaaatcccccctgcgagcccccgggctcgccagacaaccccacctgcctgcgtcggaaaccttccctcgtcgccctgctgaccagagagaacaggtagcgagcttcttccccggccgtctctcgaggcggccgtctcgctgggccaccgcagcctccgccacccgagcgacggcgcccgtccggatccgtagcgtttcgcggacgccgggacaggcggccccccgcggc

SEQ ID NO: 221458 - DNA, 360 bp, Homo sapiens
  chr1:116380632-116380992
  hyper
ggcgcaggatctcgatcttggagagcttcttgtccgggggcagcgtgggcagcaatttgcggagctcggcgaaggccaagttgaaggcttccacgcggatgcgctcgcgggtggcgtgggccgagcggtacttggccgtggcgcgccggcggcggcgcttctcctcgcggctcagctgctgcgggtgcgggtagagcgcggctcggctgccgcccttgccgtcgccctcggcctcctccaccggctccaggtccgacacgctgccgagcaccttggtgtccgtgccgcccagggactccggatccgagtgcgccgagctgggatggtccgaatctgctgcttggtccggactcagcatca

SEQ ID NO: 221459 - DNA, 180 bp, Homo sapiens
  chr1:116381108-116381288
  hyper
ggccccctccccacagcaggccggcgcgcgacgcgggagggcgccgataggatctggcccgagggcgcgagccctgcgcctcgccctggcgcgggagccggcggggacgcggttgacccaggccgcatactagactggacacctcgacttgcagacggccacagcgggcctgtggccctg

SEQ ID NO: 221460 - DNA, 147 bp, Homo sapiens
  chr1:117210000-117210147
  hyper
ctcgctgattggaaagaaaagaaaccggggaagaagggagtccggagctccgctttcagctgccggagcgcgctcgcagcgcgcccgcccagccaggggaggggtctcgggcccgacccggagctcagccggcgcgggcccgctccc

SEQ ID NO: 221461 - DNA, 504 bp, Homo sapiens
  chr1:117664751-117665255
  hyper
tcccacgaacgcagactgggttctcccattggtggatggcactgtcagttggctctgcgctgggagtgggagacgtttttcgggctcccgaggtctcggccgctcgggggcgccagacgtttctcctccacgcgggtttgaggctgcgaggctcccctctgtcctcaggcgcttactgtagctcacaggtccctcaggcctagcgtgctgggtacaagcactcccgcggctccccgactttgggtatttttcgggggtgagggcatctcaggctcgcgttacggggaccggttcgggagaccgtggagccgaggtgtcgaatggagggcttacttcggccgggccagggagcgccaccctccttgtcgggctcgggaaggctttgttttccggtccggggggagtgcagatgacctaaggagttgaatgtcacccgggattccacagtcctgtgtaacagaaacgagctgagcgagttggacccgctgtttttatcagtcaatc

SEQ ID NO: 221462 - DNA, 360 bp, Homo sapiens
  chr1:120190433-120190793
  hyper
ctcagcctcctcctccccgcccctcgccacatacccctgagggagctcagtcctggctttgggggcgcgagagcaccccataagcccggggccctgcgccccaggggagcggacaacggtccactttacgaggcacaacttcgcccagccgttccgccaccgcactcgaacacacaccccatccccgcagcggtcgggtctggtcccgatcagccccatccccgggaggcggttgagcccagccacagccacgctcctacctgcgaggcggctggcgcggcgaggagctagggcaccgagcgccccggcccgagccccgcaccgcagcgcgtctgcccttgtgcggcggcggcggctgca

SEQ ID NO: 221463 - DNA, 567 bp, Homo sapiens
  chr1:151693822-151694389
  hyper
atcagtcccccaatccgggaaaggcgatcctttagagacccaccccccaagcccccgccccggagctcacccctcagttccctcagcccctagcccctgcttcgctgaaggggccgggcttgggggcagggcggggccgggggcggggcctcgccggctcgcggccggtcgccttgacgaccgcagcaagatggagacgctgccaggcttgctgcagcggcccgaccccggggcgcttagcgcagcgcagctggagcagctgcgaaaattcaaggtgggtgcgcccgcgcccccatccagcgtccaccaaagtgtagctgccccaggactggggccccagactgggaagagagccgccgagagaaggggagcgggagcctgttccctgataaagtggggagggcgcaggggagacccccggcggacctctaggcgtctgatcccagcacagagcgcgacgggcatctgagagtgcaggaagaactaactcagggactcggccagagaaatgggccgaaattactgccagacacatccgaccttagtaaaggcccctcatcctgaaca

SEQ ID NO: 221464 - DNA, 256 bp, Homo sapiens
  chr1:151763859-151764115
  hyper
agggagcgggtctccgcaggcggaagtttgctttggaagattttattccagacgctgtcctggtccctggacggttaggaacggttgggtcctgctactgcctccgtggggcagggagcctcgcgagaccagcactgcgccctactcggtccaccctgtccccgctccgcgctaggggctcaccctgggaacaggggtcgggcgatcctggtcattgggggatcttccgcactagcttccatcacaatacctggca

SEQ ID NO: 221465 - DNA, 390 bp, Homo sapiens
  chr1:152083936-152084326
  hyper
gcctctcctcctcgcgcttcagcagctgatcgcgcctctcctcctgctcgcgcttcagccgctgctctcgcctctcctgctcgagcctcttctcctcctcgcgcttcagcagctgctcgcgcctctcctcctgctcgcgtcttagttgttgctcgctcctcaaccgctgctggagcctctcttcctcctcctggcgcttcagccgctgctcgcgcctctcctcttgctcccgccttagttgctgctcgcgcctctcctgctgctcgcgcctctcctcctcctcgagcttcagccaacgttcgcgcctctcctcctcctggtcgcgcttcagctgctgcttgcgcctctcctgctcgtgcctctccgtctcctcctcgcgcttcagccaat

SEQ ID NO: 221466 - DNA, 143 bp, Homo sapiens
  chr1:152084599-152084742
  hyper
tcagctgctgctcgcgcctctcctcctcctgctcgcgcctcagctgctgctcgcgcctctcctcctgctcgcgcctcagctgctgctcgcgcctctcctcctgctgctcgcgcctctcctgctgctcgcgcctctcctcctgc

SEQ ID NO: 221467 - DNA, 240 bp, Homo sapiens
  chr1:153651265-153651505
  hyper
cctttctctctctctctctctctctctaacacgcacgcacactcccagttgttcacactcgggtcctctccagcccgacgttctcctggcacccacctgctccgcggcgccctgcgcgcccccctcggtcgcgccccttgcgctctcggcccagaccgtcgcagctacagggggcctcgagccccggggtgagcgtccccgtcccgctcctgctccttcccatagggacgcgcctgatgc

SEQ ID NO: 221468 - DNA, 780 bp, Homo sapiens
  chr1:153651645-153652425
  hyper
cgccgctgctgctgctgctccggggcagccacgcgggcaacctgacggtagccgtggtactgccgctggccaatacctcgtacccctggtcgtgggcgcgcgtgggacccgccgtggagctggccctggcccaggtgaaggcgcgccccgacttgctgccgggctggacggtccgcacggtgctgggcagcagcgaaaacgcgctgggcgtctgctccgacaccgcagcgcccctggccgcggtggacctcaagtgggagcacaaccccgctgtgttcctgggccccggctgcgtgtacgccgccgccccagtggggcgcttcaccgcgcactggcgggtcccgctgctgaccgccggcgccccggcgctgggcttcggtgtcaaggacgagtatgcgctgaccacccgcgcggggcccagctacgccaagctgggggacttcgtggcggcgctgcaccgacggctgggctgggagcgccaagcgctcatgctctacgcctaccggccgggtgacgaagagcactgcttcttcctcgtggaggggctgttcatgcgggtccgcgaccgcctcaatattacggtggaccacctggagttcgccgaggacgacctcagccactacaccaggctgctgcggaccatgccgcgcaaaggccgaggtgagacgctggcacaccccgtcccgccgcttagccgcagggcctcccctctgacctgccggaggcatcgggactttctctctcatctgggggcactcttctttctcctcgccgttcttc

SEQ ID NO: 221469 - DNA, 176 bp, Homo sapiens; identical to SEQ ID NO: 197756
  chr1:153936615-153936791
  hyper

SEQ ID NO: 221470 - DNA, 330 bp, Homo sapiens; identical to SEQ ID NO: 197758
  chr1:153958647-153958977
  hyper

SEQ ID NO: 221471 - DNA, 105 bp, Homo sapiens
  chr1:153963225-153963330
  hyper
tccgctttcgctcctttccggcggtgacgacctacgcacacgagaacatgcctgtgagtgctttggtccaggtttcggcggagatctcgctgttctgtccgaact

SEQ ID NO: 221472 - DNA, 660 bp, Homo sapiens
  chr1:154297774-154298434
  hyper
cgaattaaaaataccccctcagagcgatctagcctcccgaattgttttttcttttaagatgcggatggacgtacgtgtgggggcatcccagcccagccacgccgaggctcggaagggctaagaccctcccactgccccgcacaaagatggctgctccctcctccccgctccttctcccctccccaaaaccccctcccgccccccggcccccgccgccggctccgtcacttccgccccgccgtggccgaaactgacacaaagtagcgggccgaggccccgggggagcggggccgcagctgggggggcgggagcccgtggggagccgagccgagcgccccccgccccagcccccggcatgggcagtacggggccgccggggcgggcgccgagcgctgagcgctgaggtgaggcgaggcgaggcgaagcgggggcgcccgggagcgcggggccaggagggcagagggagatgcggccgcagccgcggggctggaggggccggggagcgggtgtagactggggagcaccgggggccaagatttgggagctgcggccagacggggcggggatggcggccgactggagacgaggggctgtcgggttcccggggacggggcagagcgggggtctgcgtacaggatgggaggatggggtgccgaaggg

SEQ ID NO: 221473 - DNA, 499 bp, Homo sapiens
  chr1:154474301-154474800
  hyper
cttgcgcaatttgccgccgccgcccccgggcttggcccgctccgacacggtcttcaggttcagggggaactccttgaaccacttggccgccatgagggggccccggccggctcggcccaggagcgtcggggccgtggagcaggcgagcgaggaagcccagcccagacacgcagaggcgccaggggtcggggaccactgcattccccgtgactggggcgctggaggccgcggcgaggccccgcgacggctgctccgtgcgcccccggccggccgtcgcccacgcccggcagggtggggttctcacggctcggggcgccgagcgggcgggcgctagcctctgctccggacacggcaggcgacaggcacgacgcgcggggggccccgcccgggctcgtcttcaacgcctgcccggcccgaggacaccgtggctctcggaggcggcgggcgccgggggcttccccctgctctttcctcctgcggtgggagaggccaggcccac

SEQ ID NO: 221474 - DNA, 636 bp, Homo sapiens
  chr1:154474802-154475438
  hyper
aagccccctgcggcccagcccacgctcccagggaccagagaggaccgagcggaggcggcgggagtatccccggcgcagcgacagacggtggacggacggcgagcggcccatcaactccgcgcgcccctcccctccgcggctggcgcctcccagccccgccacctcctgcccagagctgggggcggcggggtgagcgccatggcagaggcgggtcgggctgcgagctctggagaaaggggcggcggccgcacgtgcggatcggccgcgccccactgagcagagagcccccttctgccgccgacagcccgcgtctgcaccgagccggtctcggccgggcgctgccttcacacgcgcccaggagtgtcacgtgcgccgctcacccccgggaaggaagcccctcgcccacccactccgctctactccactctttctgcagacgttatttttggcggtagggcagaggttgcggcccgaggtccgggcgcagggacaacggtcgccagctcctgcgctagttccgttactcttcggtggcacacggtcctgggcagcgcgaggctcttcccgccgtggccgccggggattggctgccggcaagccccgccccgtgcccccgggctcagagggggcggagcg

SEQ ID NO: 221475 - DNA, 180 bp, Homo sapiens
  chr1:155099753-155099933
  hyper
aaagcgttgcactttattcccggcatctaggcgatgacacaatctccagaacaaagacaacattgacaaacccaacaaaaacaaacagccgcgtgtgtgtggggaggggcagtcaagcgcagagtccgggaaggggatgggggaggaggagagtgtgggaacgcgggcgcccgagcctgg

SEQ ID NO: 221476 - DNA, 180 bp, Homo sapiens
  chr1:155152251-155152431
  hyper
ccacccgctggcagcggcgggaggaggtgaggggcaccagtgccctgcttgagaaccccgacacgggctctgtgtatgtgctgcgtgtccgcggctgcaacaaggccggctacggcgaatacagtgaagatgtgcacctgcacacgcccccggcacctggtgagtgggcaggcacaggtg

SEQ ID NO: 221477 - DNA, 897 bp, Homo sapiens
  chr1:155164155-155165052
  hyper
aactatcctttggggagcagagtggtattggggacaggtaggcacgtagcggggggcaaaagcacacgtgaggtgcgtaatgcgcgacagccaagaggtgtgtgcggcagcagtgcacgaggggaggaagctatcccaggccgcggcagcacgtggaacttgggtcccgcagtcgcaggctgcgctctaggccgacggaagcagttccgcctgtattcagaaaacagttctcagccccaaagacacaggttggaaagaacactttaaaaacacttcggcgaggcacgggattggagcgcatcagatcagcaggcgagagaccaccgctctcgcccgcgcgccgcgcggcgcccgaggcgcagctttgtgtgcggcgagaccctggggcaggcgctgggcggggtggggacatctgacgtcagcgcgcccgggagcgcgggccggggaggcggggagccccccaactcgcaggccggagaaaacacgagtagctaggtgggcggccccaaacctcaactcccggcattgccaagcaacagccattcagttcggttgctgggacacgcgtcaccatggcgacggctccgcgccgcgcagtctgagtacttaaagagcaagcgcgcgcaacgcccgggcgtcggaaagcggccttctgggactccgcaaactcccgttctccctcccccctcccccttgccattccctttgccttccgggcgccaagtctctctggcctccaaggtgaacccaactccccagcgcgccccgggttcccgggtcgggccggcttcaggcggtggggagcgggatcccgggccccgggcgggcgggagggacgggacgcggtgcagtgttgttttttcccccgccaatattgcactcgtcccggcctccggc

SEQ ID NO: 221478 - DNA, 457 bp, Homo sapiens
  chr1:155294652-155295109
  hyper
ttcgccggtgtccccggagcccagcggctgtggatggcagaagcccagagtgggactggtcagctgcaggagcagaagaaaggtagggcaccctgactcccgaccccgcgcttccgaataaactgcccttcgcccccggccctgctctcaggctgtccgaaggcagtctctccacgcccctcgggcaagcctgggtaggggcgcggcctcctagcgtcttccctttcccactcctcccaggtcttctgatagccgtcagcgtctccgttgataaaatcatctcgcatttcggggccgcccggaacttggtgcagaaggtgaaggtggctggggggaggctgttgggatgaggagagtaatggagctccgcggggggtgcgggaatggttggcgggaggtggctgggaggtgtctggagggatctctggagccatcggcatcgcgccacctccaggcc

SEQ ID NO: 221479 - DNA, 419 bp, Homo sapiens
  chr1:155830090-155830509
  hyper
ggggaaagaggggtgcggggtggggagcaaaaaggaagccactccttaagccggtcagctggatgctggggctaggaggaaacgtgagccctgcaagctccattccgcatcgtaatggtggggtccctccgatgctaccaaatggcgcttggcgctgctgggctgggggatgacgtgatgtctatttctgggcctcctggcagcgccgacgctctccttccggggcctttgttccctgtttccctgggccgccttttcaaaaagggggactgaccagcgttgatgctggcgggggcgcgatccaggccggagggggaggggcgaaagaggcccagcccgggggaggccgctttgtgtaccgcagaaagcattacgtcatttcagagcggctggtccccgacccagccctgtgggctcca

SEQ ID NO: 221480 - DNA, 105 bp, Homo sapiens
  chr1:156084256-156084361
  hyper
ggcaagcttggagccgacagtgctgagcaggcaggagccaagagaggggaagcttgagcctcacgcagttaggggtgcgctggagagggtggggcccgactccgc

SEQ ID NO: 221481 - DNA, 331 bp, Homo sapiens
  chr1:156084629-156084960
  hyper
gcagtctctgtccttcgacccgagccccgcgccctttccgggacccctgccccgcgggcagcgctgccaacctgccggccatggagaccccgtcccagcggcgcgccacccgcagcggggcgcaggccagctccactccgctgtcgcccacccgcatcacccggctgcaggagaaggaggacctgcaggagctcaatgatcgcttggcggtctacatcgaccgtgtgcgctcgctggaaacggagaacgcagggctgcgccttcgcatcaccgagtctgaagaggtggtcagccgcgaggtgtccggcatcaaggccgcctacgaggccga

SEQ ID NO: 221482 - DNA, 690 bp, Homo sapiens
  chr1:156357856-156358546
  hyper
gagggaaggttctccggaagcagccgctgttctggcttggcgcaagtgcgtgtggacgacagcaggatttcctgcccagggacatctggataagaggcccaaggtccccaggagcccccaggtgcttctgccctgtgtggccagagccccctcggccaggagttagaagctgctcctctgacctctggaggacccggcactccgaaccccgcgcagcctgggaaaggcctgagattccccgctattgggattcacatcacgacgcggcggccccaactcggggaggaattagacacggcgtgagtgtcccaagtgcggggcggtggccgtcccggggcagacgagcgcggctgccgcgtccccccacctcaccccgatattccgctcccaccgtcgggaactcccccaccgccgcctccggccctgcgcgccccttctcctttgtctggcccgcccactcccagccggtccgccgcgccgccccgcgcgccccggcccgtgcgcccgccgccgccgcccaggaacaatgcgggccaatgtctccgggcgggcgagccggctatgcaaatgcccaacggcctgtgagaatccccttcgccgccgcctgggcttccacggcctgaaaagggctggcggccgggcctgggtgggggaggcggccactgcatagggatgagctgttgtcccgga

SEQ ID NO: 221483 - DNA, 480 bp, Homo sapiens
  chr1:156390359-156390839
  hyper
gagaaatgaagtccgagacaaaacaacaacaaaaacctcagacacggagatacagacacgacagagaccgaaaaaggcgtggaaaggacgcgatgacccgtggcgtcgaagtcggggagttgaccccgatccagacccaaaaagtttctggtgccccatttcccgctctcccattcgggccaggagcaggagttccgctggtcccaggtggaagggacgcgcgggcttttcgtgccacccgggaagaccgcagcgacccaggcagaggcctccccagcctcgccgggtctccactgcccttctctggaagatcgagggcgcatccgacagccagagccctgccttcggcggagcccgagcctggcgcgggatggaaatggggagccgcggtgccggcccggccacgtcgccaactcagaaaggcgttggaagcgaagcggagcccttgtgggggaaagagccggattcaagaggccgact

SEQ ID NO: 221484 - DNA, 360 bp, Homo sapiens
  chr1:156391189-156391549
  hyper
cggtgctctaggggtgggaaaggggtgcgatcaggaacgggaaaccgcagccccgaagagggtgggggctcggccggcccctcgtggcggacgcgcgggcacgccggattccgaggcgctcgcccacctcgtgctccacgctggccaggccacttacatcgagcccagggtgcccatccgtgctctcccgcgcggtcctcccggccagttcccgcccctggagcgccagggccctgagttccagatgccggggctcagcgggcgccgggcagaggaggctgccctgctcttagcctccgccgagcctaggcgagcagggtggagcgggtctcacctcctagctccctcctctgcctctgc

SEQ ID NO: 221485 - DNA, 1080 bp, Homo sapiens
  chr1:156405350-156406430
  hyper
aaaaccaggctggaacccgccggcagggcccccgaggcgcctctgcctgctctctccgttcttgccggcggcagcgattcggactcccgctttcgacaaagtctcagctccgcagcagcacccggcgcggactcgctgggcgcgcggactgagctccgggtggaaccaggaccctcgcgccctcgccctcgccctcgccctcgccctcgcccgagctggaccaccgcgagcaccgccgacgccagccgcagagccgcgggtgcgcggggaagaggaaacgaaagcgcgggctccggagctgaggtgagaagtgagcagaaagtgaaaagagaatccatcggaaacagataaaaaaggaaaaacaaaacccactcgaaaagaaagaaaacgttacaacaaaaaggataaagtaacgctaaatgaaataaaaaggagacatactaaaaacgttaaagttgttaaactaagtgatagaaaaggcgaagaaacaacagggctaggaaagggctccgaggcgcccgcagggaagggggccctagacggggcgatgaggcttttgggagcctccggccgcgggcgcggcggggtccggcgggtgcgcagcggccggggctcctccgcgcgctgcccgccgccggcacccggctcgggcgaagagccggctggacggtcagccagccccacccacagagagtcgcgggagcccgagggccgggagctgcgggactccttcgcccccacctctgccgcccgccgaacccgaccccgggaaatcctcctagccgccgcctcccagcgccgggtctccccgagcgtgtgctctcggctgcgaggccctgcatgcgcagtgtctgggttcgcggcgtcaagcggagcctcggtccagcctgggcagccgagagcgcggggactgctgaacgcggtccgctccccgccagccgttcgggaccccagcctgggggaaagccgacagcgtccctctccgcgcaaactccacgcggcagcctggactgggatgtggggccagggggctgaataattaacaaccaggagaagccggggagagcgggaagcctggca

SEQ ID NO: 221486 - DNA, 220 bp, Homo sapiens
  chr1:156406488-156406708
  hyper
agagagggggctaagagcgacgcgggcgagagaggaagaaaggctggggagaaggaaaaatgagataaataaaggaaaaaagagaagcgaagggcggtgggagaggcagccgggcctctctgggagcttagccagaggcgcccgtacccccctcccctgcgcgtttgctgggagccgctccctttcccttttctttccaagctgccgaattctgtcccta

SEQ ID NO: 221487 - DNA, 240 bp, Homo sapiens
  chr1:156541982-156542222
  hyper
tttcaaggagccattaggatcacctacattctcccgactccggaaccccagaacttggaaataggaagaaagttctttgtaagctttaaagcgcagcacattagtcaggggacaatgcgccgctcacagttccactcgggcccacggcgcccgggctgaggattcccgtcccactgagcagtcccaccgccctcgcccctcaggcttcacgcccgacacacgccccaatctctcccggga

SEQ ID NO: 221488 - DNA, 113 bp, Homo sapiens
  chr1:156542391-156542504
  hyper
aggacacttcccgtccacaccgctgagaatcctgggatttgtagttcccggccgcggagccgggccgcccaggtgctgggagaagaggcgccccaggccggggcagtaccgct

SEQ ID NO: 221489 - DNA, 991 bp, Homo sapiens
  chr1:156594312-156595303
  hyper
cgagagagggcgccaggcgagctcagtctggctcctgcctatgacgcctcttatccccgacctccgccgtctcccgccagcttggaccgagggtctggactggtgtaacgcgggctggctgctcgagggctccgtgcgctaccctgtgctcaccgcacgcgccccgtgcggcggccgaggccggcccgggatccgcagctacggaccccgcgaccggatgcgcgaccgctacgacgccttctgcttcacctccgcgctggcgggtgaggcgcgggacgaaggcagggtcttggggaggggtctgaaaaatgtgggggacgaggagtggacctcagcttgagatcagggcagggtctccgggtccctccaaggcaccgcccccccatcagcccgcccgcccgcccaggctccagctcacctctccaaaccctccctgcacttttgcctcgatcccccaactcctcttacccaagctcgatccagcacctctgcggtcccgcaccccaactccgcctcctgggtgtcagccgcccctctccgcccaccctgccctcggtcggtgacccgctgtggtccccaggccaagtgttcttcgtgcccgggcggctgacgctgtctgaagcccacgcggcgtgccggcgacgcggcgccgtggtggccaaggttgggcacctctacgccgcctggaagttttcggggctagaccagtgcgacggcggctggctggctgacggcagtgtgcgcttcccaatcaccacgccgaggccgcgctgcggggggctcccggatcccggagtgcgcagtttcggcttccccaggccccaacaggcagcctatgggacctactgctacgccgagaattaggcgcccaccgtgtcccctccagcgcgcgcgaagaagcttgggagtcgtggcgggggtctctcgccacccctttccggagagcctcccctccctccagacccggagcggcctctccagacctgccttc

SEQ ID NO: 221490 - DNA, 180 bp, Homo sapiens
  chr1:156675967-156676147
  hyper
cccacccctccaccctgcttcgggctcacgtaatgcctggggactctggaagtagtcgccaggcgactcgctccccttaatgcgctgggcggacattgaagggttaagcaggagcccagggcgcgaggctgggagggcagaggtcacagccaatcacttgacgcaaggtctttattaaaa

SEQ ID NO: 221491 - DNA, 418 bp, Homo sapiens
  chr1:156676256-156676674
  hyper
ataggcgggaggatgggtgccgggggagaaggcggagcagggtctcaggtgtcaccatcctgagctgtaaaacgggcggaaggagcgacctcccctcccttggagagcggctttgaaacgggagatcaaagagggtgggaggagggcacggcttcctgcagagacccgagtgggagtgggcgagaccccagtggagatggcagggagacggagaaacagaaacggaggtcaggcggggagcctcggggacaggcctgggacccgaggccggaaaccgcagaggagcgaagcctggcgggatgcagtgattggagccaaaggaaccgtcccggcctgtccaacgcgggggggccttcggcccggtggccctgagcgaaccgatgcacgtggccccgccgcatcccatcccccaccctcc

SEQ ID NO: 221492 - DNA, 429 bp, Homo sapiens
  chr1:156897224-156897653
  hyper
catattccggcggacgccctgtaccttttccagcgacccacattctccctccggctgccccaggattgcgcacttgtctctgcggaacaataacatcgacgaccgcggggcgcaactcctgggccaggcgctgtccacgctgcacagctgcaaccggaccctcgtctcgctcaacctgggtttcaaccacatcggtgacgagggcgcaggctacatcgcggacgtgagtgcacggcggggagggacctgctgggagcaggggcggcttgggcggctcacgcgtccctgcccgcctcttagggcctccggctgaaccgttccctgctctggctgtccctggcccacaaccgcatccaggacaagggcgccctgaagctggctgaggtgggtgtgccgatcaggtggggcaggggcgtgggcgggccgagg

SEQ ID NO: 221493 - DNA, 441 bp, Homo sapiens
  chr1:158150551-158150992
  hyper
cataaataatggttgtaaagcgtcccacacgttgacccaaagtctcctttgaaacaggaaattgagacacgccggttgtgaaacctactgaagtgagcggcggcgccaggattcctgggaccccgacctctttgcagctcgcacagctaagggcgagggcgcccttcggcagaagcagcaaaccgccggcaagcccagcgaggagggctgccggggtctgggcttgggaattggctggcacccagcggaaagggacgtgagctgagcggcgggggagaagagtgcgcaggtcagagggcggcgcgcagcggcgctccgcgaggtccccacgccgggcgatatggggtgcctgctgtttctgctgctctgggcgctcctccaggcttggggaagcgctgaaggtgggtggaacgagggcgcttgagtgcactcgcgggaggg

SEQ ID NO: 221494 - DNA, 113 bp, Homo sapiens
  chr1:158151025-158151138
  hyper
caacgcctgatggggactggtgagacccgggacgcactggcgcgatctaggtagaaaactcgctgctccctggctccggggagaggcagcgcggcacagagttcgctggcatc

SEQ ID NO: 221495 - DNA, 818 bp, Homo sapiens
  chr1:159141372-159142190
  hyper
ccctatttaatccccgcgactgcagcagcgccggctccctcccggtccccacctcggccccgggctccgaagcggctcgggggcgccctttcggtcaacatcgtagtccaccccctccccatccccagcccccggggattcaggctcgccagcgcccagccagggagccggccgggaagcgcgatgggggccccagccgcctcgctcctgctcctgctcctgctgttcgcctgctgctgggcgcccggcggggccaacctctcccaggacggtgagtgagggagggggcggcgcctggggaggtggggagtgacccgaggcgggggctgggatcgggagtctcgcggaaggagcctgttggctttgtttggaaccggggttaaagtcaccagccgctgctaatacccttgtgtctgtctctgagcatccgtgtctctgtggactgtgggtgtgccggtgtgtgcacccttctgtgtacaccactgagcgtgtgtctgcgtgtgcaccggggtttggctctcggggctgatgtccgttaggagcagcccggggtctggatgtgttgctgtccgtgtgcgcgcgcgtctgtgttggtgtctggctctgcgtttctgtgtcagtatctgtgtgtatgtctgtgtcagtgtgtgttgggggcggagtgagatttgtcgctgtttcagtcagggcgtgtgtcgggtgtttgtgtatgtatgtctgtaggggttgggtagccagtgcaatcccccaaactgctgtatgcaaacatttctgctcccccgcccgtcccccaccacccgcggcgcagctccgagtgg

SEQ ID NO: 221496 - DNA, 570 bp, Homo sapiens
  chr1:159750347-159750917
  hyper
cctgggagaaagccgatttgtcatctcttaaaccccagggcatccagcgtgaaggaggtagaactaggccggcccgcgaggaggcaggggcaggcgccagtgacgcaatgactgcaacatgccgccagggtgcagcagagcccgaccccgggttgttccatccgcagcaaacaattcctaactcgctccaggtcttccttcttagctgagtgggttgaaccccgtggaagtaaccccccgcccattatgatgatccagccaatcaccgcgtgatctgctcggacggggcgggatcgcggcgcttccctcggtcgctcagagactgggttccgcgttccagccccgccccaggttctgggccaatccccgcggctgggcagagcgacccgagggcggcgccctgcagaccacgtggcccgggaggcgccgaggccaggtaggtggtgagttacttggctcggagcgggcgaggggacgcgtgggcggagcggggctggccagcctcggcccccatgacccgctgtcctgtgccctttcccagcgatgggcgtgcagccccccaacttctcc

SEQ ID NO: 221497 - DNA, 518 bp, Homo sapiens
  chr1:159824506-159825024
  hyper
tcctggctggggcgcagcccggcccggcgcgcgcgctcacaccaagaggccgttcttgcactgcaccggcccctcggcgcagtcagccggctccgcgctcttgaccttgacgtagaccggggaggggcccgcttcgcaggcggcggcggcggtgcagggcgccagggccacgtcctcggggccgccgcaggggggaggcgcgtacttgcggcgcagggagcggctgacgttctgcgtcgggtaccccaggaggtgggtgacgcggctgccgcgcccgctggccttgcacccgggcgccacggcgtcctctctgtggaaaacaacaggcgggcgggtgagcgggctgctccgcagcggggcgtgggcacggcctgggcagagccgggggctcttggcaacctcttgtctcccgcgcctccctccacctgccctcgtctctctccctcggcctcgacctactgtcctttgtgacccttcctgggtcggcgaccctgcagcggtcccggagccagcatccc

SEQ ID NO: 221498 - DNA, 199 bp, Homo sapiens
  chr1:160370125-160370324
  hyper
agtgtcagccccaccgcggattcccaggatcggggagggccgctgggcatctgaaggcgcagggctgggggagcggcgactccgggaagagcggggccgcagacaatggacgcggcggtaggaggggcggcggctgtgggaacagccgggaggcggcacccgggagctcgcgctcccccgccccctgcaccccccaccc

SEQ ID NO: 221499 - DNA, 360 bp, Homo sapiens
  chr1:160370387-160370747
  hyper
ttgattccttgatccttggtcccgccatgggagcctgagcgccccctattcccccctggcccccagcccccggggccttgagggggaagaggcagcggtctgggacggagcagggggtgaccagactcaagaacccccccctcaacatcccccatcgcgcgcgctgcctgtccaggagcgccgagttcggagcgacccggagcgctgcggatacaaaggcgacgggccgagcggggcgcccgcggagcccacccggcagttcgcagcggcgggtgagtgccgggccgcgggggcgcgggcaaagtttgaaaaaaaaagaagaaagaaagagagagaaaaaaagaaatggaaaaggaggaa

SEQ ID NO: 221500 - DNA, 177 bp, Homo sapiens
  chr1:160526926-160527103
  hyper
attacgatctacattctataagtgaggaaactttggaacagagaggttaaacaacttgcccaagatcatacagctggcaaagtatgcctaatcccaacattagcgttctttccgctatgctgtccatcggtatagaaactgattcaatcatcttatattaatcgaacattcacaatt

SEQ ID NO: 221501 - DNA, 284 bp, Homo sapiens
  chr1:161068442-161068726
  hyper
ttctatctcgtaggtggtctcctagcaggaggagcgagagagcccagcagcgatacggtggttttcgacccagctaggggccaggccgtacgattgggagcccggggcagccccccgcgcagtcaccacgacgcggcacccgtggacgggcgttggctctgcgtggtgggcggctgggacgggtctcgccgcttggccacagtgaccgcactggacacagagcgcggtgtgtgggaggcgtggacagggacccctggtgactgcccccccgccggcctcagtag

SEQ ID NO: 221502 - DNA, 405 bp, Homo sapiens
  chr1:161369853-161370258
  hyper
gtggagttttcctgatcctgtcgggtccctaaggaacgcttggcggggagcgtggacgccctggggccaggccaccgcggtcactgagagccacccccccggaaactggagaaaaacggagtagaagagacctaggggacagacttggccgggtcaagggaaaccagctcatatttggaacaaaatacgccttatgtttgcccagcactgaatttagaagcattttcacattctcgagtttaactagttttgcaacagtgccacgagcaaattattaaacgtgttttaaagatgaagagactgaagctaggtaaattggacttgggtaagatggaagcgctacttaacgttaaggagagtctgcgaccctgatgttctcaggctgtatctcgcttagtgggacta

SEQ ID NO: 221503 - DNA, 139 bp, Homo sapiens
  chr1:161410565-161410704
  hyper
gagggcccacaggctgggtccgaggcggcggcccaaaaagcacggctgcctccccgtcggggaatcgaaccccggtctcccgcgtgacaggcggggatactcaccactatactaacgaggacgacggcgacggtcgccg

SEQ ID NO: 221504 - DNA, 840 bp, Homo sapiens
  chr1:162039213-162040053
  hyper
catgccgccgcggccatcagtagctccggctcagaatttgaccgttaaaaaaaggaaactaggctgagctagggcacctcagatcccggcagtctggggccggggcgaagttgccggcgtcgcgcggccgggggcgcgggcagggccgggcgcgactctcccggggactttcacctgctcggctggcagcgcgggcagcgcgggggcggacccggcggcgggcggggcctctgagcccggcgggaggagccggcctgggcccgccccacaggaggagccgctcgctggcggctgatccagcgtctccgtgacaggcaccctgctccgccgccaccgccaccgccaccgccaccgtcgccttttcttcttcgtcccgggcggtgcgttccactgctctggggccggcgccgcgcccagtcccgcttcgggccgcaagccccaccgctcccctccccgggcaggggcgccgcgcagcccgctcccgccgccacctcctcccctgccgccctcctagccggcaggaattgcgcgaccacagcgccgctcgcgtcgcccgcatcagctcagcccgctgccgctcggccctcggcaccgctccgggtccggccgccgcgcggccagggctccccctgcccagcgctcccaggccccgccacgcgtcgccgcgcccagctccagtctcccctccccggggtctcgccagccccttcctgcagccgccgcctccgaaggagcgggtccgccgcgggtaaccatgcctagcaaaaccaagtacaaccttgtggacgatgggcacgacctgcggatccccttgcacaacgaggacgccttccagcacgg

SEQ ID NO: 221505 - DNA, 57 bp, Homo sapiens
  chr1:163378383-163378440
  hyper
acacgctttttaaaaaacagaaatggctcggaaagcgcatgttgtttttaactcttg

SEQ ID NO: 221506 - DNA, 485 bp, Homo sapiens
  chr1:165204497-165204982
  hyper
gtagcgacggtgtccgtgcgtttcttcactagtgcatgtgcgaggagggctggaggcatgagcgaaagagggaaggcaatctcggtctccaaaaaatccaggggactctccctttcagcacaagcgctcacacgtgcgctcgcgcggacacacacacacacactcacactcacacacaaataaatccccagcacctgcctcggaaagccctctctcgcaggctggcccgaaggcgcggctccgccagcggagagcctttggatttaccgtggcattacttttaattaactctgcggcgcggcgcggggagcgcagggtgggccctaatcccgggcccgcctgacgtcacctgggaacgcgcggcggcgcggggcggcgcggacccgggacgacctcgccgcgacctggcctcgcctccgcccgcgcggggctttgctccgcgggaattaaaggaaggagaaatgttagtacacttttaattggaa

SEQ ID NO: 221507 - DNA, 360 bp, Homo sapiens
  chr1:165325157-165325517
  hyper
ggccctcgggacgtctctgcaggaacgcagctactggggtatattgggtatataaagagtgggtaccctccctcgagcgaccgggtccaggcacgcgggacgatggggtttgcaatcccgcgtcccagccgccccgttgcggccctcacctgccccaggtcgagaaggggcactgtaagggacccggagggcgtcccgcccgcttctggactcctggcgctgcgctctgttggggtgcgcgcaggagccggtgtgcggggcgcgcggggaggtcctcccgccagtcggccagtgccgggaatgtctgcagaagcaaaagagtcgcctcggggaggagccccggctggcccggctcactct

SEQ ID NO: 221508 - DNA, 540 bp, Homo sapiens
  chr1:165325554-165326094
  hyper
cccgagccacagcctaggcacgggcagccttacttacctggtaggcgagctctctcccagtgactggagcagagagaagttgcggagcgctgctggaagcttctgcccgggaaggcgtcgcccccgagactgcagccggaggagccgccctcggcttcggagcgccggggagggagccggagcgaacgccggccgctggctctgctcctcggcgcgcccaggctgggccgggacgtggtcgcgagctgccggccttcccgggacgtcctaccagcccgcgtcgctcctcagcgggaggagagggccagttgcttctccaaggctaggagggaaggcagaggcccagggtcctgggtgcgagtcggccctgcttcgccggggcggatcctgcagcttctgacaggggccgcggcgctgcgtgcgcggcggcggagagggggtggggtgcgctgggcggggggctggcagcgcgtcccgtggcggggccgtggtgctccctttcccagcctggctgcgcggccaccacacggccgctgccct

SEQ ID NO: 221509 - DNA, 225 bp, Homo sapiens
  chr1:165345284-165345509
  hyper
tgctctgcccgaaccgcaggctgcctgggccggggacgcgcggaggggccccccgcagagggcgggctcagccgggcagagctctcgggggcgccccgcgcccagccccgccggctcctgctctccccgagcacgcggcgttagctaatcttctcagggactgccgaggccctttctccgccaaaccgcagggagggaacagcccgagaagggagggggctggga

SEQ ID NO: 221510 - DNA, 1532 bp, Homo sapiens
  chr1:166134697-166136229
  hyper
tcgaaacttcaacagtcgcgagggcaaggacagaactaccaactcccgctcggatgcccgggacctgctcttccaagcccgctccggtttctccaaaggacgcgcggcacagcccatgcgcccccggcactccactccactcctctatggtttcccccaaactcttcccggggagccccacaaagcacagacggcgccctgaaactcgccaggcactcgccagccatccccacctccgcctctcgaaccctccttgtcgcgttcttcccgccccgcacctttctcctcgcgtttctgggaagtcagaagcaaaccacgagaaaatgccttcgcaaggagcctccctacacccgccctgtcactgaaacaaaagcgtagggaggagggaggtgggagaggaggcgggaggaaggtttagaaagacgatggggacagcagtaggaaggagctggggaggggggtcaaggtggcaagcagagctgggggcccagagtccgctcccgtgccgcgcggcgagtcgcttacatgcccaggtcgctgtaggtgttgaagaactccatctgattgcacgcctgaatccagcccaccacccaggtctcgtggcgggggatggggggcatgaccacgcgggcggaggctttgaagtagggggtcttgtagcgcaggacgatgggcgaggtctcctcgatgcgcgtggggcactggtcgatggtggcgcacacatcgtacaccacgatgttctcgcgccggatccgcgccttgcaggtgatgctttggatacagcccatcctgcagcccggtgccggcacggcgcggcgtggggcagcgcgggggcccgcgcgggcagccgggggcgcccgtcacgccggcatggcgacgcgccgctcgctcccggtcagactcagctcgcacctaggagcggggagccgccgggcatccttggggaagccccctcctcttgcagccgcgcggggtccccgctgccccgacgtccgcccacgcccgccccctcgctccggcagggcgcgcggagggtgcactcctaggaggcggcgggtgccctcgccggctccagcgcccgggcggagggcagggaggggagcggcgctgcgaggaatggtgcccaccccgggccggagccccccgcccctcgccggagaggaggaggcggcagcggcggcggcatggagccgggggagggcggcggtggcagcgcccggtctgtctgcctccgcggcggcagcagcagcagccgccgccgccgccgccgctgcatgaacctctgcaccacggctgccccccgcgtgcagcgcacccagcggcgggcgagcgggcggcccaagaggcaggcggaggcagcagcggcggcggcggcgaccggagctcccgccggccccgccccgtagccggaccacaccgacactcctcggcccggctgcctcggcccggggggcgccaggaggctgtggcccggggtggagagccccaacggctggagcagcacaggacgtgctccgcggaggaaactggct

SEQ ID NO: 221511 - DNA, 238 bp, Homo sapiens
  chr1:167090627-167090865
  hyper
agtgtgtcccacctcgctcgcaggtcctggagcgcaccggcagacctcgaggcggagcgggtacgctcgcaatagctccaggcgtgtggacacggccacgagccggcggtcccccgcagcatcccagggcggatgaggcagatcccagaatgtggaacgcatcccagaagcgatagccagccttggagggtggagggaggaagaacgagcccaaacgcggaggcggagtcggtgccag

SEQ ID NO: 221512 - DNA, 141 bp, Homo sapiens
  chr1:167190260-167190401
  hyper
gcgacttagcataatttattagtactcaggattattataattaacggcggggagatggggggccggggagcattgagcccccgccgggcgctgagcggagggggaaagaggctcggagcggccaggcggagggggaagaca

SEQ ID NO: 221513 - DNA, 150 bp, Homo sapiens
  chr1:167423964-167424114
  hyper
cgcttttccgatccaccgaatcagtcccactgcaactgtaagctggagaccctctgggccttgggagctcaggctgcctgggcaacgcaagggaggacaggggcggagggggagccaggagggccgcacctgcctcgctcgctggtcgcc

SEQ ID NO: 221514 - DNA, 720 bp, Homo sapiens
  chr1:167599158-167599878
  hyper
ctctaattcttgaagggacaggaaaaagaaagaaggcgcattaagggagggagacgttgagaaggactgagaccgtggcaaagcccagggtcctgagaaacttcgcgagacagaggggcccggtggctgcccatccccatgtttgggcacatggagtcgtggctcccgctcttgagtcctgccctgggagggacagtatctgtttagatttgcgtctaaatttaaaccctgatcgtcggcctccctccccgctccccaccctcccctcccctccccttcctccctccctccctcctcctccttcctcgttctctcgcgcagggcccccgcggccggggcagtcccgcagccgagcgcagccgggcgcgcgccaccgcccactcgccctgtgcccgccgcagcccgaaactggccacggccgggagcggaggggacagcggggatcgtgagctccggcccgggcgagcgggtgcgtctgccgcagagtcggcacctgaaggacatggaggtaaaggaccccggagggagacgcggggctgagcggtgagcggtgtatcgggcgccccttccccgggcggctgcccctgccctgagcatggagcacgcggctcatcgctgctgccaactagaagggcaaatgcctgctgttccgacgcctccttgaccaactccgaaggatcgtccctggtcccacctaggacacccgggttgggaggctgg

SEQ ID NO: 221515 - DNA, 332 bp, Homo sapiens; identical to SEQ ID NO: 197845
  chr1:169076042-169076374
  hyper

SEQ ID NO: 221516 - DNA, 1440 bp, Homo sapiens
  chr1:171810202-171811642
  hyper
tgggaggagtcatcgcggattctggagaagggcgtgacagaggagatttcctttcgggaagtgtagtctggcagcggtgccccggtggtggcggcggcggtgctgctgttgctggtgatcgtgtggtggtgttagcggcgatagtgctttccactgggctttggcttggtagccgctgaaagagaacaacgctgccgctgctgctgatttcatgccatttcctgacccggcgctgtaacttggcctctgagccttggccacagaacgcagaggccgtggcatctggccgcagctgggctgcagtgcgtgcgcgcctggcctggtggtccgatgggaagcccggggcggggcagccgcggggcgggggcggggcgtcgcggagataggccacgcccctgcccgcccgcgcaggcgcgctgcgggtcgttagctgtcagagccaagcggcgggctggcggcgggctccgacgtctgcgccaggacctggctggctgagcccggcgcagcagcagcagccagggcagcgcggcccctactccctgtcaggtcgtagaggcgagcagggaccagctggtcgccggcccctcgggcaagatggggaaccgggagatggaggagctgatcccgctggtgaaccgtctgcaggacgcgttttcggcgctgggacagagctgcctgctggagctgccgcagatcgccgtggtgggcggccagagcgccggcaagagctcggtgctcgagaacttcgtgggcaggtaagcgcgcagggcgcggagtaaggatgcggcagtggggcgaccccgctgcgggccgttggaacgtggacgggcagcgggagccagagggtggatggaccaggcgctgcggtggaatggggggcagagtggaatggggggcagagtggcggtgtccgtggggcgggcggggtcctccagctctgggcatcctccgtcccctgccaccccccgcctggtggccctcctgcctgcctttcatcgtgcgatacaaagccatttcctccctgtcctccagtcggggagtcgggggaggggtccgccccgggctcgacccccaccccctcggtgcgcgccagccccgggcagcctccctgcgtagcgcgccgaaagcttcccagtgcccctctcctgttttcccagctcaacacccccctccttttcctgtcgccctccgtgaggctccctgtgaggctgtggggctttatcccccgagccccctcccttaggtggagatgctttccttctcgccagggttctcgttcctctcagctgtctactgttgcctgcctctagctggggaggcggggtgcgaggagaaagacgtcgtttgttgtggtgaagctttatccagagacgcttccccaccattctcctcccggagagtcgaagaataaaaggtggtgtgtttgcgtgtgcacctatt

SEQ ID NO: 221517 - DNA, 222 bp, Homo sapiens
  chr1:175048456-175048678
  hyper
tctccctcccagatctaagccgccactgcagcggccacgggaccttctccctggagacctgcagctgccactgcgaagagggcagggagggccccgcctgcgagcggctggcctgccccggggcgtgcagcggccacgggcgttgcgtggacgggcgctgcctgtgccatgagccctacgtgggtgccgactgcggctacccggcctgccctgagaactgca

SEQ ID NO: 221518 - DNA, 720 bp, Homo sapiens
  chr1:178062572-178063292
  hyper
ggcccataaagaaagaaagaaacaaataaataggaaaggtgtgagaaggaagggaagctcctttcttttctgtttaaatttcccgcacccttttacctccccgccttctcaaacggtctttactttgagcagcagagacccggaccgctcaatacccggctatccctgggagggtacttggaaagtaggcgggacaggccggatgaataattcggtgtccgacttttcctgcctgcggcgcagtccctccccggcttcgttactcgagtgcacacgcggccgggctctcggccctcgattgcttcagcctatcaccctgggatgccgcctgccgctgccgccgccgccgccgccgccaccgccaccgccaccgccaccgccaccgccgtggctgccgggtttgtgggatccgccgcggagcaggagccagagctgtggccggagctgtggcctgagagtcagggggcgggcaggctcattccagaagtgggggccgaggacaggcgggctagaacccggggccaccgccccctacccctcctcaggctgagggaacgggcactcggagcttctgaggcggcggcggcgggagccggtcagagggggcggcccctggcggcgacgcccccaagcccagccctgcccggccccgctccatccccagccagagcctggtctgaccgcgagagacgccggcggggctgaagaaggcggctccga

SEQ ID NO: 221519 - DNA, 519 bp, Homo sapiens
  chr1:178063324-178063843
  hyper
tcttctgcgtcctctcccgggagggacccacacacacctgagcccggacccacccttggtcggggccacgctggatcctcctcccggcctgggtcccgcccgccgactgcaggtgggctgcatcgcccgagcctcgggcagtgggcgacggggaaggaggtgagaggtgtccgcgccggctgccgctcgggtccctgccctcgctgcgcgctctcctcctccccttaccgcaggcagggcgcggagccgcgcgccagcccgccccgaagccgccgcctcgtccccctcccgcctcggggcaccatggagctctctccgtcgtccggaggagccgcggaggcgctgtcctggccggagatgttcccggcgctggagtccgactcgccgctgcccccggaggacctggacgcggttgtcccagtcagtggagccgtcgccggtggcatgttggatcggatccttctggagtccgtgtgccagcaacagagctgggtccgggtgtacggtaaggaccacagg

SEQ ID NO: 221520 - DNA, 212 bp, Homo sapiens
  chr1:178693954-178694166
  hyper
aaaggtgaagagcccggcgctgaaggccacagacatcacggcggatttcacagagggccgcgttccgggagcgggtggccaggcggtggcggacgccccacctgtccatcctcctaccccttcccccccccgttgtttggccggtgggagcccctcctttcagcaggcgccgggcggtggggttgcggatggctgcgcgcgctgcgggcacc

SEQ ID NO: 221521 - DNA, 632 bp, Homo sapiens
  chr1:179544700-179545332
  hyper
gcagatagtggtgctgaatccgtaccttcctcgggccgctcgctctccaacagcgccaccacctcggtgccctcctcgccggagcctcggacctcatccacgtccaccaccgtggcggcgggcgctcggggctcccccggggtccccgcccgtccggagcccgacggctcgggcccagcctcctggcgcccgcggcctccgccgctcctctcggcctttgccctcttgttctccttgtgcggagtcctgccgcctcgcccgcgggactccctggaggagctccgcgccctcctctccatcctcagagctgccgggcggctggagcagcagcgcgggagcgctaggggcacgggagcgcagtccctgtggagtcgctgcgggtccgcgtggcgtgcccgggggaccctaaagaccgtcgggtgggggctgagggcgaggggcgggacaccggggccgcgggcggggcgcacccggaaccccgacagctgtgtcttggtggagctgtggactgcgcccgccgactcccacggccggggcggcgctgaagcagagagaggcctgggtgggagagccggccccgggcagggtgcgggcgttgaaaagtgcgtgtctgcaggtgccaacccgggctg

SEQ ID NO: 221522 - DNA, 1117 bp, Homo sapiens
  chr1:180123473-180124590
  hyper
atcagcaggggtgggtgcatcgatcctgtggggtcttggtggtcgcagaccaagcgtccctcttctcacatctaattcacaacgtctcatcgctccgcgggagcccaggaactgccctacaacagccgaaatccgggtcgtctattccaacggactcctcttccgttggatacgggggccgtgagaggccaaacaacctccgcgaggctacccccgcagcgaccgctcggcgggcgctccattcctttaccggactgtacacctcgcctcctggggcctgaggcgggaacccgggtcgcgctgctccgaggcctcggcggaccgcgaaaggatggctcaccacccggccagggccagcccctgcaacaagctcagccccgcccgctcccgcgcccaggagcggccggcggggcggggtggctgggccggcctcgggggcgggggctcgggggcgggggctcaggggcggggccacgtggctcctccttgcgggcggaggcaggcggtgccgcggcgccgggacccgactcatccggtgcttgcgtgtggtggtgagcgcagcgccgaggatgaggaggtgcaacagcggctccgggccgccgccgtcgctgctgctgctgctgctgtggctgctcgcggttcccggcgctaacgcggccccgcggtcggcgctctattcgccttccgacccgctgacgctgctgcaggcggacacggtgcgcggcgcggtgctgggctcccgcagcgcctgggccgtggagttcttcgcctcctggtgcggccactgcatcgccttcgccccgacgtggaaggcgctggccgaagacgtcaaaggtgagaagcgggggcggcccgctcccccgtgccccgccgcccggacccctccacctgcccggtgggcagcctcctactccgggagcgcgtccctcttccagtcacctccgcccacctcttcctctccgcgcatcccacgcccaccaccttcatgtttctcagctccatttttgcctcccgctcccttgccttttcctcttggccctcatcccgagcttctttccctctccgcggcctgggcccccagacctgccctgctcgcccggttcgtcccccgccaggt

SEQ ID NO: 221523 - DNA, 480 bp, Homo sapiens
  chr1:180202541-180203021
  hyper
acagctcgtccccgccacctccctccgggctgtagggacgtcgagatccgaatcctcacagcgcctgacccggggccgtgttgggtacgggtacggcgagagccttccgagccgcctccaaaactctccccgcggacctcagcagtccctccacgcgtcggggccctgctggccggccatgccctctgaggagacgcggaaaagagcgaggcatataggaaggtggggcgttttatccgcctcggttttgacccatctgccatgtagtctccccaggcaccgagggaaaggacgacggaagcccgccgcccggatcgctggcgggagagagggcagcccgcacgggagaaggaggagccccgcggggtctccgctgggggtggtaattggaatgcaggcctgggggtctctgtccccctccttgtctcctaaaatgcttccggcaagctctggcgaaccccgaagctgtaggaaaaaggt

SEQ ID NO: 221524 - DNA, 638 bp, Homo sapiens
  chr1:180881296-180881934
  hyper
tggaaggagaaagcaagctccgtcggtttgggccgcggctgcagggaatgcccctggttgcgacccccgtcccgcgctggggaaagtgatctgctcgagagcccccaggaccctgagaaccggtccccacccaaggcggcggcgggcaattccggcaccgcggcagacgggatgcgcggagcgcgttccctccgggtttccctcacgcctctggagagcgggaaccaacgaccttgacctcggaggaaacggctctacggagcgatggacggccccacagagagggcggccggctcctctggaaaacttgtccacacaaaaggcattcctcagcttccaccccgaaaggcgagccctgggtgtagggttaccagcggcgcgcggagcccgccgagaacgtggtgcgcccccagctcctgcccgcgctccccggcctccgtgcgccccgcgcgcctccgctcttgcgcccgctttcccgcggggaaggggccaccgccctgcgaggctggcggccgccccgtcgtccccaagctcggggccgccctggacttccatcccgcgcctctgacggccggggacactcgctccctgggccgcggctcaggagaggcggccccgcggggctccgggcggggtgg

SEQ ID NO: 221525 - DNA, 180 bp, Homo sapiens
  chr1:182359608-182359788
  hyper
gtcctccctgccccctcactcaccccagccacagaaagtcaagcgtatcgttagggttgccctctttaacccttctctttttggagtggcgttcgcgcctctcctctttctcagactctagctggtccaagcaccggagctttctgggagagggcgatggagaaggggacagacagcggc

SEQ ID NO: 221526 - DNA, 132 bp, Homo sapiens
  chr1:182361439-182361571
  hyper
gcttgagagggagcgcggggcgcgggacccgagggaactttgggcgggcctgggctagggcgggtgccgcgcgggcctggggacaggccggggttcccaaggcctggaagagccgcccgctccggctctctt

SEQ ID NO: 221527 - DNA, 826 bp, Homo sapiens
  chr1:182583797-182584623
  hyper
tccgtctccaaaaaaaaaataaaataaaataaaaggaaagtgtttgaaaagtgcttaagtgctctgaaaagtctgagatgctgtgcaaatagtgcggcattatccttatttttgttattaaaatgagcgagacttgccctgaccagcgacgaattgactcactcagttttgggggagggggcggaggagtgggaggagcgggaggagaggggccacgcttgtcttctccgagggatgggaatttccacccagctggaagtaataagcgcccgaggctcgggcctcactgtctccacccccgctttccctttcctctgaccaagtgacaactgctcggaaacagacaggacagagaatcttaaaatagagcagcaaatatccgcggctcgccgccccgggctctgtggcaccatcagcagcttgcgcaggacacagacgtcggctcacgcgccgcagccctcggccccggaagagccgcggccgcggagcagcgaacgcgtgcctgccagggaaaagcagtcaccaggaacgcggcgttttggtcggctgcccatcgccagccctgtccgcgcgagatgccctgctccgaagctcttgtgagctccgcggcctgcggctccggaaggcgaagctcttccaggaagcagcggcggccccactggccctctcaggctgcggagaaagggcgggaggccgcggggctctccaggactcagtggtttcggagaaactcgacttcccaggctcggagggccagtttgggattgttatagaacaaaacgtgggcggcataaagtgctccgaagtggagatcaccttgaagact

SEQ ID NO: 221528 - DNA, 289 bp, Homo sapiens
  chr1:182992844-182993133
  hyper
cggcgggatgagagggagccatcgggccgcgccggccctgcggccccgggggcggctctggcccgtgctggccgtgctggcggcggccgccgcggcgggctgtgcccaggcagccatggacgagtgcacggacgagggcgggcggccgcagcgctgcatgcccgagttcgtcaacgccgccttcaacgtgactgtggtggccaccaacacgtgtgggactccgcccgaggaatactgtgtgcagaccggggtgaccggggtcaccaagtcctgtcacctgtgcgacgcc

SEQ ID NO: 221529 - DNA, 291 bp, Homo sapiens
  chr1:183155179-183155470
  hyper
ccgggccaggtgtgcgccctcctcgctgcgagggggagcgggcggctgcggggagcgattttccagcccggtttgtgctctgtgtgtttgtctgcctctggagggctgggtcctccttattcacaggtgagtcacaccctgaaacacaggctctcttcctgtcaggactgagtcaggtagaagagtcgataaaaccacctgatcaaggaaaaggaaggcacagcggagcgcagagtgagaaccaccaaccgaggcgccgggcagcgacccctgcagcggagacagagactg

SEQ ID NO: 221530 - DNA, 600 bp, Homo sapiens
  chr1:184005634-184006234
  hyper
gcgggctccgcccaatctccacccctaggtccaggtccccctaggagagctaggagcacatttccagcctggagcaggagcccggcaccggaaagtcagagcagcgcactgcggcgccccagccactgcggagcccctggccaaccgcagttacgttccatctgtcgtatctacatgggaatacggcgacaggcaccctatcccctcacgtcagggctagcagtatgaggtggggaaagaggaaacctcgagagttaaaagcgagggaactgaaagtccccttgaggggtgtcccccatgccccttgtgggacaaagccccaattcgcaggctaccctccagagctccagcggtccggttctccccatcagcaccctctgcgcacactgacccgcgcgtccctccgcagcctgaccgcccgatccgccagccaccggcgcgggcagcgagggggtgtgtgcgccagattttccgcgtgcccccccgcccctccagcggctccctcgccctgcagctgctgctccgggcgctgtccgcgctgggcaggccgcccccgcgtcccgccgcggcggcccggggcccgtgcgcgctcaccagatg

SEQ ID NO: 221531 - DNA, 180 bp, Homo sapiens
  chr1:184006276-184006456
  hyper
aggaagtgcggcagcgtgtgcgccgcgttgcgggcgaggaccgccacgagcaccgtggggctctgcaggggcgactccgggaaaaccaccggctcctctccgtcgtcctccgagtcccgctcggcgacgaagcgcgctcggcagccttcgcggagcagggctgaggagaggagcagtagc

SEQ ID NO: 221532 - DNA, 266 bp, Homo sapiens
  chr1:184355948-184356214
  hyper
acacactgccgcctccttcccgccccgcagccctagcagcccccaacccgctccccagcgcgctgcgccccggcggcctccgcaggccccgccccggggaggagagccaggcgcgcgcgggagctaggctcggggaggggccggcggtgggggagtgtctgctgcccccgcccctcgagtgagtgactgagcgaggagctcccctccctcgctcgctcctcgcaagctcccgctcgctccctgcccactcccggggggacgttccg

SEQ ID NO: 221533 - DNA, 146 bp, Homo sapiens; identical to SEQ ID NO: 197880
  chr1:184356541-184356687
  hyper

SEQ ID NO: 221534 - DNA, 225 bp, Homo sapiens; identical to SEQ ID NO: 197881
  chr1:184722805-184723030
  hyper

SEQ ID NO: 221535 - DNA, 418 bp, Homo sapiens
  chr1:197886902-197887320
  hyper
ggtcccttgcctccttcactcggatgagctgaaagccccgggcgtgtgtatatggaaatagtggggtgccgagcagaagacaactcgtgtcctttccgccccccagccatgctctttcacgggatctccggaggccacatccaaggcatcatggaggagatggagcgcagatccaagactgaggcccgtctggccaaaggcgcccagctcaacggccgcgacgcggtaaggaagggctccgccgcggcggtagccgggcacccctgcgccctctgttaaaccaagccgactccctggccggtggagaaccggagcggcgggtcgtagagacgtccgcttgagggtggcgggtgagttttctcccgtccacctatgcctacagggctaagaaacggtcgtttttctgaatcgaaatgtc

SEQ ID NO: 221536 - DNA, 254 bp, Homo sapiens
  chr1:200379703-200379957
  hyper
gcactaataatgggcgcatatcctttgcatttatgggaggagcctgctttgaaaccgcaattagtggtaccgttgcaacaaaaaaaaaaaaaagaaaaagaaaaaaacttgtcttactgccaaccttcctgaaggctactggaagaggaaaccgagcgtaatccaggtgcagcagtcctgtaaaacacgcccacacacatacttcattatcattacatcttatttaaatgcccccgtaccttagcctggctaat

SEQ ID NO: 221537 - DNA, 235 bp, Homo sapiens; identical to SEQ ID NO: 197899
  chr1:200708632-200708867
  hyper

SEQ ID NO: 221538 - DNA, 691 bp, Homo sapiens
  chr1:201083391-201084082
  hyper
gtaagcgtgctcccaaagaagtcgctagtatctgaggccatctggtggagagcagtggcatggtaaccgagggctcaaagtcgggctcgcatcccggggactcgcagagactggactgcgcctgcggcaaggaaggacggagcagagccacctgaggccgagcgggagccagacccagggatgaccgtcctggggagcccctctgcaccccggaggggacgcaggacgcccggagcagtcccaggccctgcccctcgcttcacccacggagctcctaggtctctatcgtgcccatcgtacccgctgccctgcacttccgccccaagctggtggaggagggagggtgtcgcagacacgggagcgccgcggacctcctacagtcaccgtcctgcggcgcatcgcgggtgacccaacagcctcccgctgctcccgaaagtgggacggggccggcggatcatcctccaagccgggggcggccacaggcccgatcaatgccaggattcctccgactccaagaaaggcgacggggagaagcaggaggactcggatgactccggcaccagggaggagggcgcccgggcctcgccgtcgccagggcggtcgggacggggggtggcgggcggcgcggggcagggcccggtgcccgggaggccgcgggaagcggggggcgtcgagccgtcgggggccgagc

SEQ ID NO: 221539 - DNA, 101 bp, Homo sapiens
  chr1:201977862-201977963
  hyper
tttttttttttgagacgcagtgattacaggtgtgagccaccggatcctacatttcaaatgcataaaaatctagatatgggctgggcgcagtagctcatgcc

SEQ ID NO: 221540 - DNA, 549 bp, Homo sapiens
  chr1:202162904-202163453
  hyper
gtgaaactgaataacgaagatcactcaacaatgcctgcccctctctgactgcaccgtcccggcgctcccaccgccgccgccgccgcccaatagagcccctggggcggtccccaccgacggtgcagcccgccgggaccgggaggaagcagctgcggccatcgcgccgtgcgtccgcgcccggccgccaggtgccccagtagcccgaccgccgagatgcccagcccgccggggctccgggcgctatggctttgcgccgcgctgtgcgcttcccggagggccggcggcgccccccagcccggcccggggcccaccgcctgcccggccccctgccactgccaggaggacggcatcatgctgtctgccgactgctctgagctcgggctgtccgccgttccgggggacctggaccccctgacggcttacctgtgagtactgcccgcctgtccccgcctggtcctgcgggctgctggctagcgcccagtcccggcctcagcagggcacctgcttgcttggtgccctggggcatgggcatcccggagagggtttgcc

SEQ ID NO: 221541 - DNA, 606 bp, Homo sapiens
  chr1:202611678-202612284
  hyper
cttcctccaatgcacagagccgtggcgcgtgtcaaagtgtgggaaagttcccgggagaggaaggggtggaaaatgcagccgctcatctcaaccctggacggctgcggcaaggcgggggcgctcagaaaggcagccagtcctgcaaaccgcccgtgcctccggcacacccccctctgcgccaggggctccccagtgtcgcgcgagcatggtcttccagctcctcctcagcgaggcaggcgctgcagggtcccatgcgccccgcacccacttctctccgcacgcccacttcatgcacctccccgcgcccttcccacggcttctctgcggcgagtcgccttcgcttcaccgcaggtccctggtcccagcgctaaggcaccgcggcttctctcgccttctctccgctttggacccgggctctccgcggggagagataggttgggggctaggggttcccgaaataattcaggacacctcccccgggtctagccaggtaattccgacgcccatggatttccggattacagttcccaccgcgggctcagtcctacctactcttagtttaccccgcagtgagcaccaagtcccaaaagtcggagtgtcaccgtt

SEQ ID NO: 221542 - DNA, 190 bp, Homo sapiens
  chr1:202612832-202613022
  hyper
aggtgtgtgcgggagggactaggctgggggagaggggtttaaactggcgcggtcctacagaagtttgaggagggcggggccggctccgagcccccggagccctacgggactcccccgattctgccgaggagtccccgccagctccgtgcactcctgcaacactccccaccccacccgccagctccgagtt

SEQ ID NO: 221543 - DNA, 297 bp, Homo sapiens
  chr1:202830569-202830866
  hyper
cttcaccatggttgatccagtagttgaagttggagggtcgctgactgcagacaccatacgggtctccagcaacaccacgaatcccaacgcgcggttgctggcgggaccttataaatccccggagagccgccggttgtgtctcctggcggggactcccattgggtcgcagctggacagagatcggatcgtcccccgcgcgactctcactgggccaggcccccaccgaggcccgcccctctctccgctattggccagccgcttacgaaacagccccgccgcagcggtcattgggcagtt

SEQ ID NO: 221544 - DNA, 291 bp, Homo sapiens
  chr1:203598469-203598760
  hyper
ctcgaaaatcacgccgctttcgccgcggcctcccatcgtggaggctcagagtgcagctattcctgcagccggccttcctattttcagtaatctgattaggggtcgatgttggtgggctcggggacggcttctccgtgaggtcgttatttagcgcgcaccgggtcgcctgagcccggggtcgcggccaaaggggtaatcggctcccgcagtctcagcccttcccccggggctcggggcaggattgactgcgcaaccctgcggcccctgtgctctccgcggcctctgcgaccc

SEQ ID NO: 221545 - DNA, 240 bp, Homo sapiens
  chr1:204043425-204043665
  hyper
tttgttttctgctccggctgctcctgtcccacccccacccccaccgcaggctgcttcttgctacccccacctcccgccctgggatatcgtaggtgagccttttcatcccgattccgctgcaaacgctgatcgcgcctaggggtagggagatgcggagcgggtagtcgttcagttcccagcggctcgccattgttttcccaccccgcgcgttccgtacgtaaacacacacgcacacacaag

SEQ ID NO: 221546 - DNA, 380 bp, Homo sapiens
  chr1:204347106-204347486
  hyper
gacgggcaattagcgcggtgagtaattacgatgcctctcctgccgggactgttaacgggcagcgctgggtctccgttcctcctggctctgctgccctccagcctggcggagcccggagagcagaagctggagcggggaggatccctccccgaagggagcaggttgcagtgcgagcaggggtgttgcctctccgctcccagctccgatcttgcacttgaaccaccggcggggccgggggcggagccgcgccgccgcctcggaaggtaattcacagccccgagaactcgccggcagcgccaagtcccccagtccaggcgcaccgcgcagagaaccagtttgactaaaagagctttgaatcaggaacctggtggacatgtcca

SEQ ID NO: 221547 - DNA, 94 bp, Homo sapiens
  chr1:204487763-204487857
  hyper
ggtcagcctactccacgtgttttctttccaccccaacctttcactcagatggctttagcatcccctacccctgccactggagtgaagtggtatg

SEQ ID NO: 221548 - DNA, 104 bp, Homo sapiens
  chr1:204518752-204518856
  hyper
ttcatgccctatttgcaagaaagagattcagctggttattaaggtttttatagcataatggtagtacgaacataaaaatgcatttattccgttcacttaccaca

SEQ ID NO: 221549 - DNA, 420 bp, Homo sapiens
  chr1:205312651-205313071
  hyper
cagcagggagcagtagacccggcggctgggcagtggcgccaggcgcttccactggaagtccttgacgttaggcacctccatggcagccttggggagcgcccgggcgccgggagaggtgcgagcgcgggggtccaccggctacttggcgccggctcccacggcccctatcgccacctccatctggctcccgagcgccggacccagccagaccccggccagtgcttcaccgtgccccgagtctcagcggtccggcggcgtccacgcctggccctgcggggggaacgcggtgaatcaagggcagctggggccacgcgccctccggcgggcagcggatgggctccgcagcccctggtcaacttcactgggaagacgcggcggcggagggcgccccccgggggcagcaccacaccctgcactgct

SEQ ID NO: 221550 - DNA, 180 bp, Homo sapiens
  chr1:205313104-205313284
  hyper
cactgccgaagcaagccgcaggccggggctttcaggggttcggggtgccgggcagtccccgggcggaggaaggagttagcgtctctcggcgtcgacgcctctctttccccgcgccccctccccgcagtctcggcgcccccgcccccgcatcacttacgctgccaggcccggggagcgcgg

SEQ ID NO: 221551 - DNA, 360 bp, Homo sapiens
  chr1:205399716-205400076
  hyper
ggaatggcagaccacgcggacgccaacagtttacgcagctccccagctaggtgcaaagtggccaaaggaagagccggtcttccacacgcacacctccgcgcccacactgccccaggagcttcccactcagccgggggacccccaagcagccggcgaggcgcactgcgcacgcgcactcaggccgcggctccagccgccctccctccgcagtggggcgccccgcccccgcgccgctcagttttaaactcgcagcagacggaactcgacttaaaaataactattttgacagttcagatgtaaatatgtgagtgacgcgtggggctgtttttccttcacacttcccctcacccctcgctccct

SEQ ID NO: 221552 - DNA, 360 bp, Homo sapiens
  chr1:205425118-205425478
  hyper
ctcaccaatctctttcttccctccttgtccgattctctgctgtagcttccagtggagaaaaataattattcttcaatgggttagcacggggcgcacgcacacacgcgcgcgcacacacaccccgccgaggtacccaatcaatgcacaaatcttcggggtccctttaacctctgcggatgactccgggagttaattatgaagcctatttcggcgcggcataaatatgcattaaggtaggaaataatcgatacgctgaacttctgggaactggcatttagacggactccgtctcgccgccccccactccctccatggccccacgagccacctccacagcctcgcgccttcccggggtcgcaa

SEQ ID NO: 221553 - DNA, 300 bp, Homo sapiens
  chr1:205425541-205425841
  hyper
gtgccgggagaccccctcgtgcgccctctgcggtcggggcagaccctcagccggagcttcttcctcccccacccctgcaggccgggcccaagctgcgacacccccagcacgggctcagcctgtgaacaaactccgagctcagtactcggaggaactggcgagagcgggacggctacctgcccgcacgcccgatttccgggcacagctagaaagaccgggacgcgattcaactcccaatccggtgaatccgcctagcgccttcgggtcctgccgcccccggccagtcccgacccgcacaca

SEQ ID NO: 221554 - DNA, 120 bp, Homo sapiens
  chr1:205425901-205426021
  hyper
cacaccctcgcgcacacagacactcccgcgcgcgctcacgcccgcacacactcagggttataacaaaggaagaggggccagcgctgccttacttttgtctctcttctctcttttgcagcc

SEQ ID NO: 221555 - DNA, 180 bp, Homo sapiens
  chr1:205426108-205426288
  hyper
tcggagctgcaacttcgcgcctaagcgcccgcacctcgcagcccggcgggcgggagacaaaagctgcggcgccgccgccggaggccgcgcggccaaggtgtgttcgctaattgtcaggaaatgtgtgtgtgtgcggccgggagcccgcaggggcgggggaggggacggaggaagaggaga

SEQ ID NO: 221556 - DNA, 104 bp, Homo sapiens
  chr1:205426347-205426451
  hyper
taaattatctgctctcttctcattgggctgtggctgaggacgccgtcggcggcgccgggctgggagctctcccggctctttgcattcaccgcacagctccggct

SEQ ID NO: 221557 - DNA, 105 bp, Homo sapiens
  chr1:205721778-205721883
  hyper
tttttgaagaattgccgtatggattctccatcagctgtatcattttacactcctaccagcaatgtgcaagtgttccaatttccccatgtccttgccaacagtaag

SEQ ID NO: 221558 - DNA, 772 bp, Homo sapiens
  chr1:207669309-207670081
  hyper
cagggcctcacacgcgggatccatcggaagcccgagcattgtcaagctctgctgctgcacctgggtcagcaaggtgggctctgccagcgaaactcgttagaaacaatgcaaatggggagtaaacatgacctcgcccatgaaggggaagctgtggtcaaaagcattttgtcccggaaccccgcagccctccccacactctgggcgcggagcacaatgattggtcactcctattttcgctgagcttttcctcttatttcagttttcttcgagatcaaatctggtttgtagatgtgcttggggagaatgggggcctcttctccaagaagcccggagcctgtcgggccgccggcgcccggtctccccttctgctgcggaggatccctgctggcggttgtggtgctgcttgcgctgccggtggcctggggtgagaggcgggcgggcgtggggaggcgcccgggcggacgaggaacccggggccccgcagagaactcgcgtgcagcgctgagctgcgctgctctgcgcgcccgggtccgaaggcagcgcgatgggtgggctgagcgcgcgacccggcagggcggcgggtgtaggatccttctgcgcactggagaccctcgctgcttctgggtaagcgtggagttcccaggtgcaggggcttaagtcgtgacgagcgcagtggaaggcgcagatgctgagcgggtgccgcacgaaattccttgcctttgtgtattcacagcctcggctggctatagccaagacgtggcgttgatcctag

SEQ ID NO: 221559 - DNA, 105 bp, Homo sapiens; identical to SEQ ID NO: 197930
  chr1:207995292-207995397
  hyper

SEQ ID NO: 221560 - DNA, 632 bp, Homo sapiens
  chr1:208084078-208084710
  hyper
ctcagtccattggaaccagtcgtgctgaccgattcacacctcggctaacgcacactcgcgggggtgatggccttcccttcccctcccacccccgtcagctcccaggtgaggcgctggccccggggggaagcagctgtgggcggcagtgcgtgggttgggcaggggtcccttccctccgtgagactctgctctgctgttcagcctcccagaaagcctccaccctccccgcggcgaagccaagcggccgcggcgcgcgggcggtactcacgcagcaaactcagcaagcaaagcgcggtccagccccgcggcatcctgggccctgcgcgcgcgcccctgcggaccagcatccttcccgcgcggctcctagagagacgcaccgagtggaagacactactcggcttggccaggacgcgctcttcccgccccctccgcccgggagaggggtgggggattcttgcttttttcctctcttctcccctccctttttagtcttggcaaggcagcgcctctccttggctgctactaacttgagctcccctggttggtcccaaaggcggagggcgttaggagggaggctgggttgccgccgtcgaggccaaaaaaggtggaggtttgttcgggctccagatgcc

SEQ ID NO: 221561 - DNA, 257 bp, Homo sapiens
  chr1:208416772-208417029
  hyper
gctccagtgagcctgcgatcgcgcgcacgccgcgctccagcccgcgaaagtggccgagcccacgcggggactcgcccgccgcggccaagccgggtcttctggggccgggaccccaaagaggcgggcgcgggagaagccgccacgggtgtgcgcgcctgtggggagagggcggagggcgctgccgactccgagcgcccggcccagccgccgcttacccagctcggcgacgtcggtctgtccttccgtccccgctcggt

SEQ ID NO: 221562 - DNA, 140 bp, Homo sapiens
  chr1:208417162-208417302
  hyper
atctgtattcctgaagtcgctcctcggtctccgctccgcgcgcccctcagtcctccgtcgccccgcagcagcccggctgggcgctgtcgccggctctcagggggcacccggaggcgccgagggggcgtgtgggggcggcc

SEQ ID NO: 221563 - DNA, 55 bp, Homo sapiens
  chr1:208418731-208418786
  hyper
ctgtccaagtattctgataagcttcctctactgccctctcgtggccacagtcctc

SEQ ID NO: 221564 - DNA, 923 bp, Homo sapiens
  chr1:210111151-210112074
  hyper
atttgccactcgcctccttcatggacaccgtttgctccaagtaccggacgggagggcgcccggcgccaggaagcttgggcttgggcccccacacgagctcggcgcgcttcgggcgggtctcgggcgcgggcccgtggctctccgggccgggcacctgtttcgaatcgaggcgcgaggcgcggtggggcggtggggtggggtggggtaggttggggtgggggcggggtggcgtcacgtgccagcggcggccccgggaaggttccatttcttccgcggcccgcactcgcggcgctcggggcccctccctcgccccgcccgcggcgcccctcgcggccgcacagccgggcgactccgggccgggccccgcccctctcgctggcggactcagcgcgtcctccgccagccctcgcgtctgctgcccccgccatccagttggtgcggtccatggcgagcgcatcatggcgattgaaggtaagtggaggctgacagcggggagcgaggaccgggaccacccagctggcggggggctcggaggtgcgccggcaggccgaggcgctgacggggccgcctcctgtggtctggagccggctgaagacgcgcgggggtcctggccgcgtctcgggaggcgggtgggcggagcggcgccgctgggacgccgggcccgactggctcgctcgccccggccttcgtggttttgccggcctcccggcggccgcacgcggggcaaagcgggctggcgggcaggtacagcgtccgggccgccgcctcctgccggccgcgcggagtggaggtcggggtgaggccctgcagaccccacgggacgggctgggaggagcgaggggccacggggggctcaggctgccctttcttttctttccccggccgcggcaaaccatccttccgcaatacccaccttcctgcca

SEQ ID NO: 221565 - DNA, 240 bp, Homo sapiens
  chr1:210465778-210466018
  hyper
gctgggagccagagctggccgggtctgacacccgccccagactttccacgatcaggtttcagctcgactaacgagggggaaagaaagaacgcgcgacttccgcgggccggagccgcgcgggggcccgggggaaacgccggcctggtctgggtgggaggggacgcgaagaggctccgggctcggccagtgtctgccccgggactgggccctgggactaggcggggcacaggtgtcccagga

SEQ ID NO: 221566 - DNA, 735 bp, Homo sapiens
  chr1:212003416-212004151
  hyper
ggggcagagaagaggcgaccgcagcgcggggagccggtggagcctgcagcggtttccgcggatgtggaagggtcgtggcggcgggcgcggcccgcgcgccgggctcacctcggcgggcgcggacggcgggcggctgcggagagcgggggcgggtgtcccccgccgaggggtcgcggtcatggacgcggtggcggcccaagcggcccgaggcgctgcgcgagcgggcgcgctggcgccctactcccctcgcggctgcctgcggacagagggacggcggggactcagaggccggacctgtcacccgggcgggtcccggggaggcgggcggatgccccgcgcccccgcctcctccccggggcctaccgcgccctcgtccctcaggccgctgccgcctccccgggccacgcgacgacgacacccccttccccgcccccagcgcctcccctggcccggctccgctgccgctctggggcctgcgaccgcggagccggaggttacctcgggctggccgggccccagccggggctttgggagtcagaggagccggaagaatgcatggccggcggcggggccggcggaagaaggcggtggcggggccctgccccgctccggctgtggcgcggcccgcgcccgttccccggcggcgccgagactcggtccccaagggcccggccgcgttcgcccggactggcggggaggggcggcgggaggaagcggcgggagtcgggactgcgg

SEQ ID NO: 221567 - DNA, 480 bp, Homo sapiens
  chr1:212873622-212874102
  hyper
catcgcggcatcttcctgcgcctcagccacgccctgcgtccgccccccggcgcgggggtcacagtcccgggggactttctccgcggcgatcagtcatccgggcgccactctcgctcctccagcggccccgaagccgcggctctggggtgaagacgccggcttcaccgagtcccaccgcgcaccccgagccacgggcgccccagggactctgcagggagtgcctgcccttcccgtctcgggtccgccgggctgtgggagggaacgaggcggggcggccccgagggtgaattcccggagcggagggtgggcatggggaggatgtcccggacaaaaacggtgacgggcttccctgagagcgaatctgccacgtgggacgtcactagtgacaggtttggggatctggacccgccatgccacggttaaacggcccagatcatttttctttttcaagatttatctgctcgtgccaagctggggacc

SEQ ID NO: 221568 - DNA, 295 bp, Homo sapiens
  chr1:214453830-214454125
  hyper
ggcttcctctgcaacgttcgcagcatgcctcagagactcggtgagctgggccggccaatgcatttcctcttccgtccatgtaattccactagaggagcagagggcaaactacgttcccattaaagccacaaggtttaaaaacctctaaccttggaaaagcacacttcaaccctctgcacaccaaacttctctactgtggtttcccctctgccgctttctccttggcgttccccgatcactgcctctagggtctttacaagggacagcgaacgtaaggtttcggagctggcttcgc

SEQ ID NO: 221569 - DNA, 205 bp, Homo sapiens
  chr1:215740833-215741038
  hyper
acccgggaaggggcagaagctagcgagccccgcccggccgccgggaaggtgggggaagccccgtgcaccccccgccctccggccgccgccgccccgctggccctgcagccgtcgccgctgcctcgggctacagccccgggctcggcggtcccggctggggaaggagggcggcgagcgcgtccggagccgccggagatggcgggag

SEQ ID NO: 221570 - DNA, 180 bp, Homo sapiens
  chr1:216774334-216774514
  hyper
tgcttcggcgttcctccccggttctctgcctggattgggctcccgtgggttgctgaggccctcgcggaggcctaggaagcccggcagcgcgggcggcagcagcgggttggggagcaaggccggcttggaacgcgggctcctgcccactgccacccgcaggctgccccgggctcccgggcg

SEQ ID NO: 221571 - DNA, 227 bp, Homo sapiens
  chr1:216774586-216774813
  hyper
ccgtcggaccgcgcccacccctgggcctcccaggggctccctccgcagactcccagggacttcctgggagccaccgcggagggcgctgcgcgcgtccggagccgacgccgggcttcaaacagaaaccaaagcccgctccaacgccgcgaaggaggggggctccaagcatcctagaaaagaaagctggagggagcgcatcagagacacaagtgcggataagacttaac

SEQ ID NO: 221572 - DNA, 237 bp, Homo sapiens
  chr1:219347355-219347592
  hyper
agctcgggaaacatcctcccctcggttaccccagtattgcccaagtggaggtgtcgccgggcccaaatagggcccagtgggtggctcccccgtcgccagccccggctgtagatgcacgggcagcgccacctgcccccagcctcccccgttagtcttcctctttctatcgggcggtcactggtccaccaccctcgctttggggccttgtgtcccgccgctcagccagccctccatccc

SEQ ID NO: 221573 - DNA, 1123 bp, Homo sapiens
  chr1:220101044-220102167
  hyper
catgcagaagaaaaagagggcgtggggtgagaagaaagggaccgggtgggaggaggaaggaagggccaagcggtccaaaggatgcaaccgaaaggcacctgctacgtttgcgaacacggtcgcccccttctcccgcttcctttccaccgaggtcccccggagggttacggccgagtccgagcctggggctgtcgggtccgccgcgcgccgcgggtcctccgcgccctgaggccccccgaaagcgccggggacacagccctccgccagctgctgccgctgctgcaggcggcgactgcgtccccggaggcagcacgcgaaccaggcggcgcagtcctggaagatgagcagccccaccacgttgaccaacagccccaggacgccgacgatgagcaccagctcggggtcatcgatgcgctcgggccgggccaggcgcagcacggcctccacgaagatggtgaagcagagcgcggtgaggaagaccgcgttgctcagcgcgcccaccacctcggcgcgggcgtagccgtaggtggcgctgaagccccgggtggggcgccgggcgatgtagccggcgctcaggcccacgcacagcgagatcaggtcggagagcatgttgaaggagtcggagagcagcgcgatggagttgcccaggtagccggagaccagctccgccacgaagaaggcgacggtgagcaccagcatgaagagcagccggcacgtcttgccagagtagcggcccatctcgccaccagccccgggcgcccggcgccgcccaggggagcgcagcccaccccgcgcgcagccacaggtggggggcgcggcgcggatccgtgaggcccggtacccgcctcccagattgtctcgccggccctgccccaccgctttttataacgcgaggccgagcgccaccagtccccgcacgtccagagtctaaaggagtggcgggggcagtatctgaacagcccgtgcaccgcctcccgcggcccttttcccctccctcgcggcctgggcctgacttggcaggtggccacgagccgatgtctctctttgtgggacaggactgtgcagagaggggcgctgcggaggagagggggcgtgtctggacgtcaatcttcacagactccct

SEQ ID NO: 221574 - DNA, 679 bp, Homo sapiens
  chr1:220701813-220702492
  hyper
gtccggagagcctagcggggctcgccaccgcctcccggctccccttccacgcctcatcctgccagcctcgccgccccgccagcgccgggcaaccgcctcgcccgaagccctccctcgttactgtccgcataccccggcggcgccgccgcgggaagcggctccccctcctcttcctccgcgtcctcttccctctttcccccgccggggccgcttgttgcaccgccccgcggcctgcgggagccgctcgccccggccttgtgctcgcgtccgcacccctttcctgtcgccccccggggcccgcaccacagcccggccggcgagaccccggccagaccccgctgcccgcacaaaatgtcggcccggacgccattgccgacggtgaacgagcgggacacggaaaatgtgagtaaccggagcctccctcgggagcagtgggggcgagaccctcctctgatccccacttcacccgcgcttgggccgtcccccgtgcctcggcgcggccacccgcggcagggtctccacctggagcccggcgtgaccctcacccactgctcagccctattcttcattccaaccccatttcgcttgtttcccctcaagggtgagggtagggaaccgtaagtggcgccctctcgctcggaggtggtcctccaggggcggatggggtgatggagggcag

SEQ ID NO: 221575 - DNA, 536 bp, Homo sapiens
  chr1:220921312-220921848
  hyper
gagtgcagaggtttagactgtgtctttgtgtgcagaaagtcctgcagttctcacagcgacctgccagaaaaagtcgttcccaaatgtttgtaaatcctccgttgggcaacccgccttcacgttctgcggtgatcttgtcgagcgactaagcgtgcagtattagcagagaagggggtggcagagtgctggcgctgaaggtcatgttgcatgggtaactgtcgtgttgtaggggcggggaagagggaggagacactgaccaccccagaggccgccccattagctcgcttgctttgggcggcgtcgctcccacggcgcccagggtacccccgccgctgtctgcctgtcttcctccattaccgcgcaggcttggtcaccgcattaaggcattcccgctctccgcggaactgctctgccgtctcggcggtgaaagtgtgagagggtccgtagttgggtcaactttgactcctctcgcctgcccggatccttaagggcctcctcgtcctcccggtctccggtcgctgccgggtctgtgcgcc

SEQ ID NO: 221576 - DNA, 780 bp, Homo sapiens
  chr1:221052090-221052870
  hyper
actcgttcaatttgtcactgtgtgacagctcagaataaaaccaatttgcggccgcccctcctcctcgcttcccggaggatctcctgggaggcacgaggcggacgcggtgctgagttgggccgggactcagggcggcaacatttgggcaagggcccaggaaagatgaggggctttgccgaggacacggactcctggaataaaagcagaatgaggtcaagagaagggaagcaaaggggccaaagcgcgctccgctctccaccgggaggcgggctttgcagagccctaaagagtgagattaccgtcccttccccacgcccccaactcgccccgggtgacaagcgcttcaggaaagctcctgtgatcaaccctccttgccccgtggcggttcggagctgcagaagttagaagagagtcagagccctccggagcggctgcctggcccctacgcagagtagcaagaagcactgcgatgtgcgctactaagcccacgcggccgcagcaaaaactttggcgtggccggggcgtggctagggtccggccaggcccccttgttcctaattcccctccactccccgctcccattggtcacgaggatgaccaatgagcgctcggatcgaggtcctaccccgggcctgactcgaaagctcctgccaaaactttgggagtttttagagacgagtttttttttttttctattacttttccccccccctaactaacggactattattgttgttgttttaaatttagctcttagggcttagctatttgggttttctt

SEQ ID NO: 221577 - DNA, 180 bp, Homo sapiens
  chr1:221052914-221053094
  hyper
ggccccagcgcccctcgctctcatccagcccgcgaggagtgcgggcgccgcgccgcctttaaagcgaggccagggagcgaggcggtgaccggccgagatccggccctcgcctcctccctcggtggcgctagggctcccggcctctcttcctcagtgcgggcggagaagcgaaagcggatc

SEQ ID NO: 221578 - DNA, 592 bp, Homo sapiens
  chr1:221053166-221053758
  hyper
gactgcggcagccgcgcggctcaccccggcaggatgttcgcagccgggctggctcccttctacgcctccaacttcagcctctggtcggccgcttactgctcctcggccggcccaggcggctgctccttccccttggaccccgccgccgtcaaaaagccctccttctgcatcgcagacattctgcacgccggcgtgggggatctgggggcggccccggagggcctggcaggggcctcggccgccgccctcaccgcgcacttgggctcggttcacccgcacgcctctttccaagcggcggccagatccccgcttcgacccaccccagtggtggcgccctccgaagtcccggctggcttcccgcagcggctgtctccgctctcagccgcctaccaccaccatcacccgcaacaacaacagcagcagcaacagccgcagcagcaacagcctccgcctccgccccgggctggcgccctgcagcccccggcctcggggacgcgagtggttccgaacccccaccacagtggctctgccccggccccctccagcaaagacctcaaatttggaattgaccgcattttatctgcagaatttg

SEQ ID NO: 221579 - DNA, 198 bp, Homo sapiens; identical to SEQ ID NO: 197968
  chr1:223307128-223307326
  hyper

SEQ ID NO: 221580 - DNA, 720 bp, Homo sapiens
  chr1:223537982-223538702
  hyper
cggcctccgcgcggcctctggtgcccccagcccgcggcgcggcgcgggagagcgctccgccctagaactaccgccgcggcggtggctgcagacccggggcgagtgcgcggccggcagctcccaaccccagaactctcgccacagacccggttaacttgagcaccgccaattgcccgagtctcttaatttcccgcgttaacccctccccgctcccatctccgccgaagctctgcgcgtccccagggagcccgaaggaccatctgaggcggctgagagacactctccccctcccccacacccttggtattttccctctgccagccgcaggtgttgcgagtgaggacccctgtccggtcttggagatgcgcggggccctcggagccttggcctgggaggcgctcccgggggcggggaggcgggggtagcgggtgattggtgacacgcagaaggttgggtacctggaggaggggaggcttccggggtcgtagatgggaagccaagggggtcggtggtaattgccctcccagccccaagtggagagagttggcctggtcggtcccctgtctctgcgccgattctggtgtcggagctcagcccgcagtggttgcagctctcactcgccgccggctctgatcgcccgcggtcggtttcaagatagggaagcccacattccagccacagtgattaagaggtgtcagctaatgaggtggcgtccaccgg

SEQ ID NO: 221581 - DNA, 420 bp, Homo sapiens
  chr1:223899995-223900415
  hyper
tccggtgggagccccaactctggaccgcgattcgcgagcctccccggcgccgggccgcgccatcccgggagctgtccgcagatggcagcaccggccccgggtcgcggcgttcccggcgctcggcaggccgcaggatggcctggtcccgggccgggagcccagcaggccgggagcggctgaggccacaccccgcgggccgggccgcttccctccggtgaatcatcgctcgcagcggcggcgcccgcagtggccgcagcagcgcgccgggccctggccgcgccccagccgagcgcagcgcggagtcgccccgacctttctctgcgcagtacggccgccgggaccgcagcatggcgggcatcgcggccaagctggcgaaggaccgggaggcggccgaggggctgggctcccacgacagggcca

SEQ ID NO: 221582 - DNA, 540 bp, Homo sapiens
  chr1:223936605-223937145
  hyper
agcctcccaccccaggcctcggccgctgcgctagtgcgtccggcggtcccgcccggcagtaggacagagggagcgagggagtccgggaggaagggagagcgggtgcggccagtctgacggttgctgtgtttgcagatcaccagcgccgcggactcggaggccatcacgtttcagaagctggtgaaggggcacgcgtactcggtcaccggagccgaggaggtaacggccggcgcggatgtgcaggggtcctgctgtcctgacacgatggccacaggcacagtttgtggtgatgcccaggggcccgcgcggccccacggtggtccagtttacactcgggccccgcactcctgaagttccgcgcgggaggagaagggcgtccctttcgcagctcgggcgccgggtgcgccgcgctgccacctggtggccgcagtggccggcgccaggggccctggttttacttgttttagatgttaccctgttttacagttacaaccttactattttgataagctaaaaataataaaacaatgcatcttcata

SEQ ID NO: 221583 - DNA, 85 bp, Homo sapiens
  chr1:224481061-224481146
  hyper
tgcctggcccagaacatttcttaactagatttccactctaccacctcaacagtgcttcctgagatagtctcgcttatgaagttat

SEQ ID NO: 221584 - DNA, 34 bp, Homo sapiens; identical to SEQ ID NO: 197974
  chr1:224622766-224622800
  hyper

SEQ ID NO: 221585 - DNA, 198 bp, Homo sapiens
  chr1:224691180-224691378
  hyper
caggaggagggctgtcgctgctgtctgcaaccccaccgggcctcccagagccgaggtgacagcctgggcctcggggaagcccgtgtctcatgggcggttgtccagctgctcaggcctgcacaggggcgggtcccctcctaatcttatcctcacacaaccctggcaaccgcacagggctgcctggtgtttagcaagggg

SEQ ID NO: 221586 - DNA, 960 bp, Homo sapiens
  chr1:224803726-224804686
  hyper
tccagacgcacgtgtttaaagagtccctgctccaaccggtcccgccccacctccgctcggcctccagccctgcttgtactgctggcttcaagtttcctccgagaggcgggcgtgcacagctgcagtggcggcggcagcggccaccaagcgcccggcggcgcttcgccacccacctttcctcagcccccggcgctgcagtctccgcccgccggggagggcgcgctcagcggaacaggagtcgagggtggggcgccgagaggagggaatcccgggtcgcaccgctacagttctcgcagtggcaaaggcggcggcggcggcggcggcagcggcagcagcaggtggagcgagctacagcgtttggcctgaaacccactgctgcagccacccgggctggagttggcccgttgggtggagccagtgctcgccccggtccgacccccggtttccgggacacttgggttgcggaggccggctggccggagtcacggttggggacgggcgcgcctcggagcgcacggctgcgctggaagccgcgtctggggcgcaggaccaacgggacctacctcctcccggctacctaaagactccttctctcgggaaagagcgctgcccggctctgggatttgggaggagctcggaggccgctcgggcacctcgctggacactatccgtttgcgccccggtggcgcgggagggtccggagcggagcgctcgtctctcctcagcggtttagtggagaaaagcagagagctcttcctggggcgaatgggacctcctccctcggtcctccgtggagtcgtcgcatcgcttgtcgtgttggtctcgaggggctcacagcttggcactaatttgcaggtgttcgctgctgatttggtttcttcttcgatttgcggacggttccctccagcgactctcgacacacgttttcctgtcttcgccggagggccgggtctggggtcg

SEQ ID NO: 221587 - DNA, 341 bp, Homo sapiens
  chr1:225117497-225117838
  hyper
caggaagggccacaacggccgtcggaccacggcgcggcgggtaaggtcgtcagcgtcttcctgtcagcggtcggcagagcctcggcgggcgggcggcgcgtggggcagccggtgtcgcactgggagggctgcgtgggcgcggagggcctgggcgctccccacccagctgctgtgggagcgcctccgagtccccgcgcggaaccctcaccaggcagatgctggcgcatccaccaggcgccggcgccgccacgccggtagccccgaccgcaggagctctcaacgcgaggttcttcttagttgctctccctcaggcaggccgcgttcccttctagtcctatatt

SEQ ID NO: 221588 - DNA, 338 bp, Homo sapiens
  chr1:225614954-225615292
  hyper
gaacatttttctgaaccctcaaaaaggtgaaaaagcaggaccgtgctttagcaggaacacgcacacccgcctaaatacccgatttttgagactgtccgggcgaaggaattcaacgcataggagcgagcagccatgcagtgtgcctggagaatcaccaaaccgcgacgaccacgaccctcaaagccagtgacaagcagcgcgaatctaagcccacctcggccgcagacccttccccgtcccgccaggccgccgcgccctgtcagcctcctactgcaggaccgcggggccgcctgctcatctgtcagacgggcgctcggaggggccgggagccaggctgc

SEQ ID NO: 221589 - DNA, 50 bp, Homo sapiens
  chr1:225998107-225998157
  hyper
tcgcagggaattccgcgtcccagactgtgggcggacgccgcagggaggga

SEQ ID NO: 221590 - DNA, 171 bp, Homo sapiens; identical to SEQ ID NO: 197982
  chr1:226297380-226297551
  hyper

SEQ ID NO: 221591 - DNA, 415 bp, Homo sapiens
  chr1:226411104-226411519
  hyper
tccttcggggatgtggattgcgccgtccgggcgggtgggcggggaagaacacggagggggccgggacccaagttcacgcctccctcctgcatcccgcagccggcggaagcgattattccccggcgtctggcggggccgggggcgggctcgcacccggaggagacacgggtctccccgagcccacctttgatcgcaccgccccgccttcccagcccctggcccgggagggtataagtgcggcccgcgcccctccgagcggcgcgctgggttccggagcgatggccacagccgagtcccgtgcgctccagtttgccgagggcgccgcgtttccagcgtaccgggccccccacgccggcggggcgctcctgccgcccccgagccctgcggcagccctgctccctgcgccgcccgcggg

SEQ ID NO: 221592 - DNA, 420 bp, Homo sapiens
  chr1:226411561-226411981
  hyper
cgggccggccccgccgccccccgccagcctgggctcgcctgcgccccccaaaggcgcggccgccccgtcggcgtcgcagcgccgcaagcgcacgtctttcagcgccgaacagctgcagctgctggagctcgtcttccgccggacccggtaccccgacatccacttgcgcgagcgcctggccgcgctcaccctgctccccgagtccaggatccaggtgagggcccgctgcgttcgcaagtgcgcgctggagcggaggcgctgcggactctaggtctggactgcgggctcctgaggccacacccgggacgttgcaggcacggtgcttcccctgaggctctgcgtactagactgaaatagggggtgatatcggcacctgctgcatagggtggttgcgaggcctgtgtgaaataatttaggcct

SEQ ID NO: 221593 - DNA, 62 bp, Homo sapiens
  chr1:226497312-226497374
  hyper
agtgaaatactcacagttcccgaaacccacgttgcttgggcgcctccgtcccctcacttttc

SEQ ID NO: 221594 - DNA, 56 bp, Homo sapiens
  chr1:226497394-226497450
  hyper
agccccctgcgcgtcgcgacgtccgggactcggtcccagcggcccctcgcgatccg

SEQ ID NO: 221595 - DNA, 764 bp, Homo sapiens
  chr1:226736766-226737530
  hyper
cgtcatctgcctcttcctcaacactttcgtgccgggactgggtaagacacggctgccgcgacccttgcgacccccaccccgccgcgggagggcgtggggggagagaagggcgcggccggagacctcctggcggggccgcgcgctccaagtgctgcgaccacgcgccaccgcccgctcctggcgtccccgggcaggtggcagaagcgcgtggagtgtgcaccccagaggggagaggctgcgctggggtctccgacccgcaggcggggccccaaagagccggaaactttgcggccaatgttggagcccgcagcggcggccggaatggctctgccggcttcggagtagggctcccgtcccggcgccccgatttctgctccttctctccgtcgtgtgcatccgtccgcgagcccacttccccgagaggaatggggtcggatcagaatgagctctagggcctcggcggcgaggatcaaactcccgggcgtcgaagtcagctgagccggggaaagaggacgagccgggctagatatacctgcagccccctttggttcgcggagtgcggaccgcgtggggacgagaactctagccagagtctcctccgcctcattcaggggtacctgcacttccgccagcaccccgcagggcgccagggggatgggggatgattttattagtttggatgcatgtggccagagatgaacccatagctccctcggatcccttctgttcctgagaagtagagagtgcgccgatgtaattctgtg

SEQ ID NO: 221596 - DNA, 43 bp, Homo sapiens
  chr1:226737790-226737833
  hyper
tctccgggagaaagcgtgcccctgtcggcgagcctgttgccaa

SEQ ID NO: 221597 - DNA, 897 bp, Homo sapiens
  chr1:226926124-226927021
  hyper
gctgcccccctgccgtcgtcccctatgggggggtgtctgtgagtgtgtgtgtatacacgcgtgtgtgtatacgccgcacgcgcgcggagcgagtccgctctcagcgcgccctgttgccgaggacgcgactgcccctgcgggctcccggacccgcgcccactcggaggaacttaggggcgtgcatggctgcagccgggcagcagccctaggtgcacagagcctctagctctgcaaacctcccaggagccggcgctctaacaccccagggcagcgccgcggagcgcagggcttctccgcatcccgggcagcctcgcccggcgccagcagagccgccccgagaccccagcctggggactcctggagcgcgctgagggaggcggcgcggagtgagcggcccggaaggcgggtaggagaaatgcggagacctcgtctctccctattttctccccaccgccactccatgtcaccctccaaaatcaaacccccttccctgcctccccagcccacccctttgccctgtttcggaaccaggaacgccgagattcgctccagagcagaaagtgagggaaaagagggttgttcagaggcgagagccattaaaaggccgccaaacttacctgcagtttctcagattctcaggtcctgtgtagactacatgcccagaggcgcaaacctcgtagggacgagatggctttaaaagtaaaaatgctcagaaattattttctcacaagctatggaagacaaaaaagaggagtgcgaaagaggggggaaagctcttcggttcaggggcccggcgatcccggcagtggcgacgccaagccggccctgcacgcccttttcgaccgtggagatactgcccctgtcagtgtctgctccgggctacttcagtgtttgttc

SEQ ID NO: 221598 - DNA, 71 bp, Homo sapiens
  chr1:227058816-227058887
  hyper
tccattcggcctctagcaccgggtcctgggcatgctttccccgggaaggaggcgcgcgggggctctgcccg

SEQ ID NO: 221599 - DNA, 205 bp, Homo sapiens; identical to SEQ ID NO: 197990
  chr1:227652539-227652744
  hyper

SEQ ID NO: 221600 - DNA, 360 bp, Homo sapiens
  chr1:227729783-227730143
  hyper
agacccacgcagcgggccaggcgccagcggccgctaggtctgggcgcggggccgggccggcgagagaagggtccggggcacccagtgggctcggatctcgagcggtccccgtgacggccccgcgactgcgcgacttcccgctctagagagtttatggaccctgtcccaggagggctccgcagccgccagggaggtaccggagggaccgcggcgctgggagagggtggcgccaggcggccctggagccctgggcgacgcggccgggccggccagagggcggagaagtccaaagcagcagcccggacagccgcttccgcccctgcgccgccctcccggcccaggtgaccggtcgccctaccc

SEQ ID NO: 221601 - DNA, 323 bp, Homo sapiens
  chr1:227730173-227730496
  hyper
gagccgggcgtgggggtcgcaggctggtgccacagcctgaggacaccgcggcctctgccccggggagcacgccaaatgccggacggagcggctgttgcagacggtgaggccgcagccccgcttgagggtagggtcgggcggggtgtcggggtcctggcagaggccgcggcgagggcaggagccggtgcgctggccgctgcacatgcgccgcccggcaccgggaccctgcgggcgcgccccctggtggcagccagcgggaggtggcgtccctgtccccagccaggcggcagcgcgaagctgcctccccgcggggggagcggaag

SEQ ID NO: 221602 - DNA, 300 bp, Homo sapiens
  chr1:228134738-228135038
  hyper
ggtcgcaggactgggcatcccagacctcagagagggggagggaagaaggaagggaaagaaaggaagagagagacgcgccgacagcccggcaaagcgctgctgcagagacacgtgagcacgggcaatgacaccgcgggacgccccggccgggccctgcgctcccggccaggttccatggacgcgctcccgcgggccggggcccgggccacagagtcagaagcaaagcgcaagaaaaataaattcctccagcttggaggatttctctctttctctctctctctccgtttggggctcagcgcg

SEQ ID NO: 221603 - DNA, 1179 bp, Homo sapiens
  chr1:228135092-228136271
  hyper
aagagaaagggggggaagctgctaggtgggcgatggccaggggctgaggactcaggctccagccttttggcaaggacacggcggcccaaggaagtcgggacctgatcccagtccctaagcgcgaggcagtcctgctcacggcggcgactacgacgacgacgactctgcggtcacggaggaccgcggcccggcgcaagccggacgggtccacccgcctctctagccgtgccgcgcagcggacggagcgacgcgcgcgccgcaaacaaacagcgccaggcaacccggcggccccgccgcgccccggccccagccaccccgggtgcctcggggactccggacgaccccgccccggccccgccgcccccgcccaccagtgcgcgccggccgccgaaggcacctacccgaagtaggcggccgaagggcgcagcgcggcgagcagcagcgtcagcccgaaggccgcggccagccagcgcgccagcggggacccatccagcatcttgccgcgcctcggcggccgaccatcgcgctcccagctccgcgcagggcgcgccgcggccgccgccctcttatagcgcccggagcgcggccagctgggcccggccccgccccgcgcccgggaggggatcacgccggcgccgggggcgggccgaaacccgagccgcgcgcgccagcccgccagcccctcccggccactcggggccccggccgccgctcccggcgcgggtctcgggcgcgccctgcccggcggggatggaggaaggggaggcggagagcggtgggaaccgagggcggggcgtgcgagaacccggggcgaccacggcgggacggcattggggggccggaggcgggcatcgggaagcgggtagagcgttgggggcgctgcagtgggagcttggggcggcccccggggcgggattgagggggaggggaggggaggcgttggccgccgggctagccgccggcggggctccaggccgggacggtcggggatggttccacagaggacccagccgtctgccccgagctgggcgctgcgcggctgctccgggggaagcttggtgaggaggagtcgggccagccggtgatgcctgcgcctcttgcgcatgctgaccccctcaaggagcggggccagagaatcgctcctttctggcagggactgtggccgctttcggcctggga

SEQ ID NO: 221604 - DNA, 557 bp, Homo sapiens
  chr1:228193977-228194534
  hyper
ggggtcaatccctgcgccacagagagagtcccactcgtccccagctgtgacccacagacgcgtggctgcaccttggaggtccacctggccgctgtccccattgcaggctgcacccatcccggaccctttctatccgccgaaggcgcaggcagctctggtctcagcggaaggagtccggccgcaggcagacggggccaaaggacgtgcacccgacaaccgtccgctccctccccaaacccccgccccgagaaggttgatggatgaaggggagccctagcccagccacctcgggggcaagagacggagctcgccacagaccaggagcgagagggggactgcgggtcccaccgtgagcgcagggcgcgcggggctggaaacccaggacgcggcccgggagctccaggagggcgcctgcggatcgcgcggccccgggccggccgcctgcccatctggcgcaccccagcgcgccgcgcacacctgggggcccgcacaccagcacgtcctcagacacaccgacacccacggcagcaggcgggggccaacgccgccgccgcggt

SEQ ID NO: 221605 - DNA, 180 bp, Homo sapiens
  chr1:228194738-228194918
  hyper
acgccgccgcgccagctcccagggcccggccccccccggcgctcacgctctcggggcggactcccggccctccgcgccctctcgcgcggcgatggccccactcggatacttcttactcctctgcagcctgaagcaggctctgggcagctacccgatctggtggtgagtgagcctcctcgc

SEQ ID NO: 221606 - DNA, 300 bp, Homo sapiens
  chr1:228195243-228195543
  hyper
aggccaggggacaggcgagggaagagggccagcgagagagaattcgccggagactttcctcaaaaaccgtatcttacacacaaacacacacacacgttttaaaacaaagtcgatgagacaagactgaacagctcggagcagcgtggttacgtaaagaaagctgggacccggcggggagtggcgcagagccggcggcggggcgcactgggggccggccctgggccccgcgcgcctccccgccgcagtccgggcacgggggtttccaggggccctctctgcgagccctccgcatgggtccac

SEQ ID NO: 221607 - DNA, 35 bp, Homo sapiens
  chr1:228238539-228238574
  hyper
ctcgggagttcgccgacgcccgggagaaccggcca

SEQ ID NO: 221608 - DNA, 105 bp, Homo sapiens
  chr1:228444665-228444770
  hyper
ggtgatgatgagactggctgatggactccacggcctccagtgccctttccatgagactccacctctccacttctccatgccctcacttcccggtttcataccctt

SEQ ID NO: 221609 - DNA, 359 bp, Homo sapiens
  chr1:228566697-228567056
  hyper
tagaaggcgtccttaggggtcgctccctcactccgatgctccgcgcgttcagcccctcggggcgtctccgtcctcacacccatgcgcgtttattccacccgccgtgcgccttcctctcttccatcacgctgacctgcagccccgcagcccgctttctccgccgtcgggccagccgcttgtttccacaacttctctgccccgggaagagttcttgggcaaagcgtgcaagcgagggcgagaagccgcgggccacgatccgctggaggagaggaggcttcagagtcgctggcgcgtggcctcggtgaaaagcaacccagtgtttgagattccatgggcaatgactacgctggccgagcccc

SEQ ID NO: 221610 - DNA, 300 bp, Homo sapiens
  chr1:228644943-228645243
  hyper
agggtctcggttcccgttgcgcccttccccatggccactgcgctcattcatgagcctagggtgatcaggcctccggcctataaagaactgcaggatcagtgcggctcttttctcgagatagtaggtggctctgaaaagagcctttatgtccatcaaaggggccccgggggcggcgggcggcctcacttgcccttggccttgtggtggctctccgtcttcttgggcagcagtacggcctggatgttgggcaggacgccaccctgcgcgatggtcacgcggcccagcagcttgttgagctcc

SEQ ID NO: 221611 - DNA, 597 bp, Homo sapiens
  chr1:228645306-228645903
  hyper
gccgcgttgccggcaagctccaggatctcggcagtcaagtactcgagcaccgcggccagatagaccggggcgccggcgcccacgcgctccgaatagttgcccttgcggagcaaccggtgcacgcggcccacggggaactgcagccccgcgcgcgacgagcgcgacttagccttggcgcgcgccttgccaccctgcttaccacgaccggacatttccgagtcaaggaaaaaagacaacggcaaccgaaaagcgagactaaaaacaagagggcagtgaaggccagcgagcccttatgtatggtacagaggtaggctagaccgcggcgttcgattggatggctatggtagccaatcagaaaaagaacctggcactcctaatttgcgtattcctttcccagcgatgacgtagaacaacgtttgatccaatcagaagtgagcaaatcctgagccttcatttgaatacaaaacgtacaaatagagttactccgagcgccgcgcgtttctgtttggagagactcagccatcatgccagacccgtccaaatcggctcctgcgcccaagaagggttctaaaaaggctgtcaccaaggcacagaaga

SEQ ID NO: 221612 - DNA, 180 bp, Homo sapiens
  chr1:228647148-228647328
  hyper
gacagacatgtttagatttaagcaatgaacattccgggaggatattttcctggcaggataccgcgatggcaggatgtttgataccgaatcgaagcacggcgtcaaagcagcgtcctgcgcgggggagccggatgtaataagcgaccccagctgccggtaactttaacccttatgggagtg

SEQ ID NO: 221613 - DNA, 180 bp, Homo sapiens
  chr1:228871074-228871254
  hyper
gggtgcaggcgcgcggcgcgcaggcggggggcgctgtggtcttggcgcggggaccgagccgctcggccagacccgcctcttttccctccccgccagcccgcccgcctgcccgccccccacgcgtcgtgtcgccgggaagccgggcggagacagagcgcttgggatccacggcgctcggac

SEQ ID NO: 221614 - DNA, 219 bp, Homo sapiens; identical to SEQ ID NO: 198009
  chr1:230223230-230223449
  hyper

SEQ ID NO: 221615 - DNA, 1334 bp, Homo sapiens
  chr1:231175065-231176399
  hyper
ggggctgagggacccggccgcctccctcgcccggggtgcgcgtctgctttcgcagccatctgtgcgccggggccatcccgcggtaatcggatcacggacgcgcggcctggggcgccggaaagggggccgggctgttccaatctgctgtctacactggcggcggacaaaagttgtcctcttcgtggtaggaaaacgcaatcgcgttaatccgttgggccgctgtgaaagcctttcccccaccgggaaggtctgtttcactcggggagaggtgacaaggccgcccccgcccccaggccaggcacgaaccccgcacagcgcttccgggcgcccaggtttccgagccagcggggccggactgagggcgccgggcataagaaagccgccctctgcgcgcggggctctcccgcgggggttccaatcgtgggcacggagcacgcgagaaaaatgggggtcgttgggaggacggcgccggcgcctggggcggaggagcccgaaagggcgggtgggcgcggggacttccggacagagcgcggtccccgcgaactttcccgggacggcgagcccggccgggaagagccccagctcgcggagccccactcaccatctctttgcggagcagcgccagagcggcgtccaggttgggaggcttggcgggcagcgctgccgcccgggccccgccgccgcccgggcccccgcggctcagctcgtcctggatgcgcgacttctgcgcgtacagccgctccaggtgccgccagcccccagacgcgccgccgcccgacgccgagtgcagcagcccgctcaagctctttggcagcgggggcagcccgtccacccgcagcccccggaccgcgccgttgcccgcggccccgggcgccgcccgggccccactcatcgcgccgcggcccggccacgcgcctgccccgctgcagcgaaccaaggctttcccccggcccgcccccttcccggcggtgccccgcccacttcccctcccgcgccacgcccccccggccccgccccctctcctcgaggcccctgcgcgggccccgggtccgggtggcgtccgcgtccagcagccgggctcgcctccacccgggtctcctcctccctcgcgcccctccagcgccctaattcatctccaactccgcgtgactaccctctaaccccccgactcacctccagccccgtcacgaacccttctgtgccactccctagctccgaacctactaagccccccgcgacccgcagcttcccggttcacccccatctctgtccccacctcctctgaaccacctcccagcttcccggctcacccctagctccgaaccctctcaccc

SEQ ID NO: 221616 - DNA, 1020 bp, Homo sapiens
  chr1:231297739-231298759
  hyper
gcccttattcgctgagctgaagcctcctcccccctcctccccattactctctgctctggaaattacaactcctcggcgcgccgcgcggggaggcagcggcagcggcgggagggaggcggggaggggattcccgagccagccggacgctcgccctccgcccgccggctgcagcgtcgcgcggcccaaggtcagaggcgccgcaggagcagcagctgggaaccagggaagcgggtcaatcccggccgcagggagaaagccccagggcgcagtcagccggcgtccacagccgcccaggagtagggtgagcggctgtctccgggccggtcgggtcccgccgaggtggccgcggccccagcgacccggcgggtggcggcccaggggtcggcgagcaggcagctggagccccaccttcggctcccgggcgctgtccgccgcctcgtggtgctgatcccagccccacggctgagcggccttcgcacctgcctgtctcacctcgctatcaccccgataaggagttgggccggggcagaaggggggcctcggggtagccgcccaccggagccaggggctgaagcagcgagcgcacagcagcccggccgctggtcctggggtggagaggaggcgcgcgctgcagccggcggcggcgctggtgctgattcatcacctaaagctcctcgcaggccaccgcgagggcagccgaccggctccggaatctggccgcaggttgaagccgctggtgcgggaccctcgggcaggaggtgaggaccccctcccttctctcgcccctcaatcatcttagggcggtggctacaggacagagagaggggcgtgcccctcggctgtgaagtgggcatgcccgtgtgatgcccccgcccgtcgtctcaccggggcgcaccgcgctggtcctcctccgccagtctcccgagctccggccattcatccccagcgcagagcagcgctggcagccggcgccgcgatggaggaagagctgaagtgtcccgtgtgcggctctctgtttcg

SEQ ID NO: 221617 - DNA, 240 bp, Homo sapiens
  chr1:232765857-232766097
  hyper
gctcctcccgggctcccagtctgccgcgccggctcccgatgccaccgcccgcccgcccagcggcaccgccccccgcccgctctgcgggctcccattggtcgctgcctgcaggccccctcggccccgccccacgattgggcgcggacgccgtcagtctcaccgtccgcccggctccgggcgcagccggtgcgctgttcccaggccccgcggcgcgcgggagctgcgcgtccaggaggggcc

SEQ ID NO: 221618 - DNA, 180 bp, Homo sapiens
  chr1:232766241-232766421
  hyper
taagttaaaaaccgcgagtctggttctgagccgccccctggcgcaggcgcgaccccacccggccctcccgtctcccaacttgggacagacgcggcggccgggcggtcggatccgtgagcctcggccgctggggctacatacacagcccaggacgccacagaatcgccgaggccccgcgaa

SEQ ID NO: 221619 - DNA, 180 bp, Homo sapiens
  chr1:233749754-233749934
  hyper
aagacggcgctgcccggaggagcggggcgggcgggcgcgcgggggagcgggcggcgggcgggagccaggcccgggcgggggcgggggcggcggggccagaagaggcggcgggccgcgctccggccggtctgcggcgttggccttggcggcggcggtggagaagatgctgcagtccctggc

SEQ ID NO: 221620 - DNA, 180 bp, Homo sapiens
  chr1:234040448-234040628
  hyper
tgcctcgagagcgcacagctgggagggctctcccggtcgcggcgagactcacgcctgcggtgtgctagggcggcggcgacggtgacgggcgtggggcgcggcgctgcctcggctgccgggtcgttgcggcgagcgcgcgggccggcctggagtcaccgggctgaaccgccgcgcctgcat

SEQ ID NO: 221621 - DNA, 480 bp, Homo sapiens
  chr1:234040788-234041268
  hyper
gtctgggagctgccggtcccactctgtctttgcctatggggattcgagagtttcccagcggcgcacccaggggcaagagcattgccgtgtgagtagcgccccgggcgtgggtgagcgagccggcgggcgggaggccggagcgccggggtagccctttgcagctgggacactgggcagtctgaggctcggggaagggcggcgcgcgcggtggagctgctcgggaagtttcagtcattctttccctcgccactcgccccaacccgcactgccccgagacgcccaggatagggcactggggacagctgcccggggaagtgggtgagtggcggcgggaagggaggagcgcgggctctgccgcggcgctcgcccccggagggccccggccgcgctcttgctctcgccctgggatctgctcctcacgaatcccctcctctctgtccatgctccccctgcccacccacctgcccgtggcgcctgcga

SEQ ID NO: 221622 - DNA, 159 bp, Homo sapiens
  chr1:234736279-234736438
  hyper
taaaaaagaaagggaaaaactacaatttgaccattctgaccagcctccttgttccaactggcctcttgatttgtataaagataatggggtccggcggcccccttgatgcatgaattgcacgctgggcataatgaacttattgtgcgaaagcactttgga

SEQ ID NO: 221623 - DNA, 640 bp, Homo sapiens
  chr1:235812705-235813345
  hyper
gcgctccgagggggctgtccacacccgcgcgcgggcttccccggggcccggcgggaggtcccgggagaggaggccgagggaaccacaggtctttgtgtcgcgtgcagcagcagctggcggcgtgaggaccacaccggcgccagagccgtctccctaggtccggagactttcaccccgagtttcccttccgcgtctggctgcaccgggctgggctctccccgcggacacccggggctccggccgggcgcccacttacccggagcgggatcacgcgcgggcttcgtctgcagcgcggtgctcgcggggggcggccaggccgagcggcatcgctccgcatcggggcgcgggccgggctcgggtgcaaacgcgcgcctcgtgcccctcccgccgcccgcggggtctccgcgtcccgtcaccggccccgccccgcgccgcgcctcccgccctgcagggcccgaccacgcgggcctgggggcgcaggcggaccctcccccggccctggacgctgggggcttctgctcggccccctgtgccgtgggggcccagactggggaagggagagccggcgactctgcgaccctcgcccccgttccacgctggccgcgcccactccgccgcggggtctcgcccgggaaatccc

SEQ ID NO: 221624 - DNA, 248 bp, Homo sapiens
  chr1:235813668-235813916
  hyper
gaggggtctggggacggggccgcggtcagcgcgggctccccgaagcctcaggtaccgccctcgctcggggtgagctccagcgcctgggccgttggggcgcgggccgcttcccaccctgcaccaagggacgcctcggaagcctccggccaaggcggggaacggcggagaaacgcggaatacctgtgcgaattcgcgcggccgcgtcgccactaacccggcgaaggctgacccgacgttgctgagtgacg

SEQ ID NO: 221625 - DNA, 660 bp, Homo sapiens
  chr1:236444239-236444899
  hyper
atttctagcacactgagaacacttgtaatcatcgcttcacatcaacaaccagccagcacctcacgactgccagagccagagcctccatccacgagccacaacgccccactcagacccccccagtctcgtattgggacttacctggcgatgccacttggcagacacagctcagctgggtaaaaataaagcaatcttgagcaagggaaggtgctcgaggaagagtaaaagcccagaaagctctagtccgacagttcgagtgaagtcttgccccctcccaatcccctgcgcctggcggggcctcgggggtctgcggagtgcccccaactctcagtctccctccctcactaactcctgaagggaaggacgtcaccgtttctctgggcgctcgctcccttcgcaagacagccgaggtggttcatgcccgtcccatctcccgccacactcccagccgcttaacacatccgagaggaaaaaacgaaaacagctcagggggaccgtcaccatcttcctcttttgactgccattacccggagtgtcgccgtccccccaccctgcgggcggttcgcagatgtttcccgcactggacggtcaggtctctgctccccgggttttctgctcgccagaaatcacctcttttctggcccggccctgcccggccct

SEQ ID NO: 221626 - DNA, 300 bp, Homo sapiens
  chr1:236445200-236445500
  hyper
gtctgcactccagtccggaggcaggcgactctttccccaacacccggcagctgcgagtgaggcaggaaaggcgagcgcccccacttcatcccccaggcggccccgcccccggctcgcttggctcctcggccacgcccccaagcgcggggccttgtgggagttgtggtcctgggcggtcgcctaggcgccgcggcaggaaggcggagccgctgaacgagaggactcgggaactacaactgcgaaggccgccccgcctccccgaggcctcgggctccgcggcggccaatgaggcgggaccac

SEQ ID NO: 221627 - DNA, 1006 bp, Homo sapiens
  chr1:236558369-236559375
  hyper
tatcagatcgccggcgggcatctcagcccaggcctgtgtaaggggagttctggtgtctcagctgagggcgtgagtagggagccaggaaagcgacccgcgactgcagccgtttcttaaggccagtccttcgctcgcagtctgtcccgggcggcagtcgtgtcagccccccgctaggacccgcccagggggacgtgggtaccgggcaggacgcgcgctctgggcgctggggacgcccgggacactcggggccccgccttgcgtcccagccccgggtcgcggcaccccggctcccgccccgcgcctctggagggaggtaccgagggacgcgcagcgaaggggctttgctaattgccaaagcaggaagtgagctcgtggaagaagcgaaggaggagaagaagaagggaggggaaggcggaggagggcaggggcgcgcagagccacggtttgctccaggcgcgtcggaaccgcaggacttttcatccccgtggtcccacggtcctcccgcgccccggaggcctgccagccccgctcggacgctcgtttgcccctaacccgccgccatggcttcaccggacgaccctctgcgcgcaggtaaagggacacagcgccgcgcccgctcctggagcgagcaccgcggggcgggagctcgggaggcgctcgcagcagccgcagggctatcgaggccgggcctcggcgacccccgagggaggcccgggaaccacccccgacccaggcgccagacccggagtcgcacggggctcccagtccagccccgcgagcggctgctgaccgcccctcccgcgctcgccagggcccctgccccgcgtcagccaccgcgcgccttccccctgcccatgccgcagcccccgtggcttttgttctggactcgggatgccaggttgagacacgtcctgcaaacctctggcagaaatgggcgcaagggggtggatttcgttttcgcctcccgggctttttctttctccccgctcacatgccttctcattac

SEQ ID NO: 221628 - DNA, 794 bp, Homo sapiens
  chr1:236849524-236850318
  hyper
ctcagagcgtgggtggcaggcgtggctctgctcggggccggccgctcccctcacgttcccggaggcctcggcggaaggcgtgcaggcggcctctgggcggcggctgcaggggagacagtggaggggcccggcgcccttgtccgcccgcacgtgctcggggcggggcggctggggcccgacgggcggggccgggggcggtggcggcgggggcgtggccgggcggccacgtgacgggcggcgcggctattaagccgcgcggcagctgctcgcagccggagctggtgcttcgcccgagacccagcgcccaggcgtgtcgccccgagaggagccgcgcgaaggtcaccccgcgcccgccgcccgccgcccgccgcctccgtgggtccgtttgccagtcagcccgtgcgtccgagcccctcgcgccccgccgcagccccggccaaccgagcgccatgaaccagatagagcccggcgtgcagtacaactacgtgtacgacgaggatgagtacatgatccaggaggaggagtgggaccgcgacctgctcctggacccagcctgggagaagcagcagaggaaggtcagcaggggcccgcgggccgcccgcgcgtggtggggccgggtcccccgcggggctcccgtgcgcgtggccgcgtggcctggcgactggcgagagggcgctttgtggaggtgctgtgctgtcctgtgccctcgcagccccgggggccccttaggaaagaggacacgtccggggacaggcaggacactgggcgtcgtgtgtgtgcgcgcgcgctagcag

SEQ ID NO: 221629 - DNA, 1522 bp, Homo sapiens
  chr1:237205142-237206664
  hyper
agatatcattcttccgtgcgatccgaagtgccgtggaagttagtgccctagcccagtccaggaggaaggggcgtcgtgccggcggttttaagctcggaaggggcaggggaatgagcccagggaccccagcggggcgcaggtaggaggctgtgcgctcgccgggtgcgctccggccccgattcccagcgcagccagtaagtggcgctgggcctcgggtttggcggcccggaggagcgggctgcggattacctgcagcagcggggagccgccgagctcctccccgcccgcccccacaccccacccccaccgctgcactaaccccggctcagctggctccgcgcacttgctcggaggagccggggccgagcggaccgccggctgcaggcagcgagcgcggctgggctgcggggctgcttccccgcgtcctccgggcccgggccgccctcctcccgcacagtgcggagcagggaggccccgcgcctcgaccacccgcgcccgagcgtccgcgcctcctcctccgctctgcaggcggggaccgcccggcgctcggcacccggcagcgcggccccctccagcccccggctcccggcagcagaagcagaaggcagcgccaggggccgccgccgccgccgagctccgcggggctcgggagccggccccggcgaggaggcgcggaaccatggccgatgggggcgagggcgaagacgagatccagttcctgcgaactgtaagcgccgtgcgtcgcgtgtgctgtcaggggaagggggcgtcagggcatccactagcggggtccgggcagagtgacagcgggcagcggggactcgcgggcggggcgagggggtgccccctgaggatgcgggaggagcgggcatcaccaagtgtgtgcaggtgtgcgtgttggggcgagggaaggcaagggcgcgtgtctgtgcgcgcgtgtggaaagctagaggatggagcgcggctagccggcggcaggcgcccgggctcggacccggggcaccggggacaggagcgtcggagctgcgggaaccgggagaggaggggacggccggtccggcctgcctggtggcacggctgggacctcccgggcggccgggggcagggtgcagagcagggtggcccgtgggggcgcggggagcggcgggaactcgggctgtttctgggaataccgccgccgggaggtttcttgggctttcgggctggacccgcgcgttgtcacggagcgaagacgttggttcgcttactccgtgtagcgtgcggcgcagctgaccgggggcgggggtgatggtgcaggacgctgcgcggaggtttcccccaagtcaaggtgctgcgaaagcggaggaggagtcgcctccgtggtccccgcggttcccggggctggtgccatccgtggtggtgctgtgaccgcttgcaaagcgtggaaggcatgggaagcgagcgtgtgtttgcgtgtgtgcgcgcgcgcgggtggtggtggggagaacatcgtgaacgtgtcgttctctaaatgctggcttat

SEQ ID NO: 221630 - DNA, 897 bp, Homo sapiens
  chr1:240254939-240255836
  hyper
agagtgcatcttccagctgacgatctcttcggtcggggacaatgcattcgattcgcacggtggagattaaagtccccgagatagaggaaacgtttttcgcgcccaggttcagcgaggagccgcgcgggggcagagggggcggcggcggcgggcggggagccaggcccgagctgcgttctgcgcagccattggtgggcgccgcgctctgcactgagcatgttcgcgccccgccggcccctagccgcagccgcagccgcagcgacggcagccacgggagccgccgcgcattatgcaaagcggcggcagatgcgagcggggccagccgggcgcgcgtcggcctcccctcccagcggctccccccgccgccgcctgactctcccgggagactccctaggcccggacctggggccgaggagggccgggatggcctgagtgcccgcggcgcggcggcgcagcagcgggattgcaccatggggaaccaggatgggaagctgaagaggagcgcaggtgatgctttgcacgaaggcggcggtggcgccgaggatgcgctggggcccagggatgtggaagccacaaagaaggggagcgggggcaagaaggcgctaggcaagcacggcaaggggggagggggcggcggcggcggcggggagtcgggcaagaagaagagcaagtccgactccagagcctcggtgttttccaacctgcggatcaggaagaatctgtccaaggggaaaggcgccggcggctcccgcgaagatgtactggattcccaggccctgcagaccggggagctggacagcgctcactccctgctcaccaagactccagacctcagcctctcggcggacgaggccggcctgtcggataccgagtgtgcggacccttttgaggtgaccg

SEQ ID NO: 221631 - DNA, 720 bp, Homo sapiens
  chr1:241520124-241520844
  hyper
gggctgggtgcgggccgggggccgggagggctctgggtggcgctgcctcctccccgcccgccttccctatttacctcctccgccaaggtcacggccccgcggcgtctcccctcccgggcgggctgggtgcaggcggtgtcagctggcggcaagcggagcagcgaggcagggtagcttcatcacactcgcggcggatgcggattccgcgccgccccggctctagctgctcaggcgaccgccaccctcgcctcgccgccgcccgtgcacaggcggctccggcagccgccactcgcgcccgctcccctgggccgcctcgctggctctctccctcctccgcttcttctcccggggactgggaccagccgagcgcgcgcgggagtcgagacgcccggcccgtgcgcgcgactgggaggagggaggaggggacagtcacgtgggacaggggcgtccgaaggtgccggctcggatgggctcggctcggccgccgccacaccgcccgggcctcccgggcctccccggcctcccgccctcgcgcccctcgggaggctgtagtcctgcccccggcgcggccagcccgcgctcccgcacaccccgcccgctcgcccgcgcgtgtgtacgtgcgccggaggcctggagagaccggagtttaacgcccagtgtaagccggaaagggaggaaggctgtgcgatgggtgggtgggtggtaggtgggtgggtggtc

SEQ ID NO: 221632 - DNA, 404 bp, Homo sapiens
  chr1:241587450-241587854
  hyper
gggctgaggcacctgccggcggggtagcagggcagtcgagcacggagggaggggcgggcctccaggggacttcagcgggagccgggcctggggcggtgccgcacttgcacacggagtgtggggggccaggcctgggaccaggagctggggccgggcttcggcgcagaggcaggaagaggaagcggcacccgcttcggggacccagccggcggccaggccaccgcgcccacccggccgatggcaccgtgttcctgcgcctcgggagggaggaggctctgcgcgggactgcaggttctgccccgcatcggagtgatcgctgagcctgacgctctcgaaggctgggcctggggcccgcaatctactccggaggctttcccactgggcagggtcgctagcagggtgag

SEQ ID NO: 221633 - DNA, 33 bp, Homo sapiens
  chr1:241588237-241588270
  hyper
gtcacctgccacctcggccgcctccggaccttg

SEQ ID NO: 221634 - DNA, 900 bp, Homo sapiens
  chr1:242687470-242688370
  hyper
cactcgggtcaggcttggggagggctccttggggcggcttttgagcctcatctgctcgaagccctcatggggggaggccgagagccactcgtgctgccggatctccatcctgacatgaccgggcggccgccggcgagcagcggactcgggacgggcgcgcggggagccgggcgcggagggcgagcgggaggcccagcgggagccggaggtggagctggagactgagctggaggagctggaggagcgagcgggcgcggggagcgcggggtgctgagcgccagctgggagcgcggccgggcgggagggggcgatcgcgggaggcgcggggcggaaggagggagggcgaggtgcgggcgggggcgggggcgggggcggagggggacggacggggagaagggggacgagaggggacagggagggaaaggaacctgctccggggagacagaagtgcccggtgcggcggcgacgtcgcccggcggctgcggtcccgagcgggcgctccgctcgccggctccttgcggcacctactgggacccgggccggctcccggggcggcggcggcggcgggggtggggtgcggtgggaggggccgcggctggcccagccagcccgcgcctgcaggttggtgcagtgaggagccgccgccgcccctcccgccgcgcccaggcccgggcggccgcgctcccgctccgcacccgcctttcccgagcaggctacacctctccctggcgcatctttactggaaagccggcaggcgaggggagaagtgagcgccgtctccgcgcctcctcggtcctgctggctgagcgcggggatggctccggagggagacactcaggaaaccacctccgcccttcccccatctctatccagcggcgccccctcaccctgcccccggct

SEQ ID NO: 221635 - DNA, 360 bp, Homo sapiens
  chr1:244012286-244012646
  hyper
aaacagtaaataccggtattggaaaaacctggccccaacgagattctttatctctaggctaactgtagattcccgggaaatcccaaacaagggatggtgaccccgcctcggcgtcagggtcaacacagcaaccagctaggcttcaactttgggctctgaagggccccaccggcatcatggctgatgcggaccgatgcgccggaggaggtggacaaggaagaggctggtctgtttacttgcagccagagctgccgccgccgccagcagcgacagcatcactggatcagccaaacccagcatcttccgcacatttctattcttagcacacaactcccaagcggatcaaaaccccactactat

SEQ ID NO: 221636 - DNA, 396 bp, Homo sapiens
  chr1:244012739-244013135
  hyper
gaagggtgggggaaggaaggagaccccggggacgcctgtgcatcctcgccttcaccccaccccacgcgcagacagcctcagcgccagggcgcgcggcagacggctccctccccccaacccaaacacactgacaccggcgctccacgcgttatataacctcgccgccgcccccggtccaggcgggcgccccctccccacgccgcgcggcccgggcggggaggggcgaggggaaggagcgagagttgcgcagacagcaggcgccgggccggggcagcccagacacagacggtaccgctaggccgggaacacccctcccccggcccgctgcgcaccgccgccccccagctttccccggaaagcggggggtgtcggtgtcaaccgcgctgggcatccccc

SEQ ID NO: 221637 - DNA, 645 bp, Homo sapiens
  chr1:244080520-244081165
  hyper
cttttccttctcactctccccgcacgcccacgcccacccgcttctgcaccgagaacctcgaggcgcgcacgcacgtggaggtgacgccaagcccagcggcgaggtcggggctgggggtggggggagccggcgtcccgcgggcccccgaggccggggagctccgccagcgcattgtgcgagcgagctgaatgcagccgaggggcgagcgcgcgggctcgcacggattagccgtgctttcccatgagccacaaaagaatgcccgaatctgggacatctgtcatcaaggggcaggctgctcaggatgcaaggtaaccagagctttcctcggactgcttcagtctttggggacgtggggtcaccctaatccttcctgtttatattgtgaacgcgtaggcagcgagacttaagctctgcgtcggtcaataagcatcacgacgcaggcattcctgagcggctacgtcctccggttgctttctcggttttttggaagaggcagcgttgcctcccatttattcagtcccctcacagcagcgcggctgtagcgcgccgcagaagagcgccccaacgctgccggcccctgttttgtttcttctttctgcattcatccactttgtcctcccattatggcgacgagttcagaagatt

SEQ ID NO: 221638 - DNA, 83 bp, Homo sapiens
  chr1:244893209-244893292
  hyper
gctcagcatcctgctttaaacgatttttttatttttttgacggggcgtggtagctcacgcctgcaatcccaacgcttgggagg

SEQ ID NO: 221639 - DNA, 396 bp, Homo sapiens
  chr1:244893352-244893748
  hyper
tttttttctcctgtctcaaaaaaaaggcattgcagagattgaaaaccgtttcccaccttctcccctgcagtgtttaggaagagacaatccgcccccgattcagcgcttcccagcccgcagcaactgcgcagcggggggaacccagggctccgcggcacccgcaggctttagttactgctccgaggccctcggaccaaagagaggctgcgaggaggacgcggctcgtttagctcgctgcgaacctcaagataacccttggtttccatgcacatccccccaacattgcatgtgctttcattcctacggtgctggggttactttcatttattgcttttgttgaccaaaaagaaaaaaacaatcctgagcgtgcacagggggcgcaacgggggaccggct

SEQ ID NO: 221640 - DNA, 411 bp, Homo sapiens
  chr1:244893804-244894215
  hyper
cggggacgctgctctggggtccggccgcggcctcgtggccgccctgcgcgcggtccagcaccagcagcgggatctcctccagccggtccggccgctccttgcgccgcaggtagcgccgcctccacgtcgccagcctctgaagcagcctctgcaggctcgaggggccccacaggccgcgctccggggcctccttgcctgcgcgcgcgtgagcttgcctgagcttcttcctgcgcgggccgcggaacagccgccgccagcaccagcacccagagcaggagccgccgtcgccggccaccgcgcgccgcccgaccgcctccggatccccgcgcggaggggggccccgctccaggcgcgccgccttctccagcagctcgtgctgcgcgccgccgcgccgggggccaccaaaccggg

SEQ ID NO: 221641 - DNA, 330 bp, Homo sapiens
  chr1:246887311-246887641
  hyper
tgctccacccccacgtgcaacaaggacaaccggctgccgcctccagcttccagcagggctagaagatgcgctgcccggggcggccagagccctgcagaacaaaccgccgcacggaattaggggccgccgtccgcgcctgccaggcttggaagcggactcgcccccagggccaccgccctaggaaacctcccgtcggaagcctcccaagcaagccgctcacccgcggctcccgcgcgaggcggcgtgggcgtgggcgcggccctggcgcggcggcgcgcgcggggtgaagggagcccggcgcgctggctgcggcgacggcggccgttgctg

SEQ ID NO: 221642 - DNA, 420 bp, Homo sapiens
  chr1:247170818-247171238
  hyper
aggagaaaggaacccacagaccacagctcctcccacccaggaacctttcacgggagtcgggactctcccgacaacccctccgtcatcacagcacaatccagggaagacgcggcgctgcgggcgcggggctgccccgggagggctctgggccgtgccgaagtcaccaggcagagaccggacagtcacccagcggccgggatcccgctgccggcccggcccccacctgcgcgggacgggactgagggccgagctgcgccagcgggactcggccgcacactccggagccgaccgccgggaggcccggggccgccagcgctggttccagccaattccaaccgattccaaccaccccctctcccttctcgggacaccctgctccgcacactcaccatttcccagcttttgggggtcccagcgtcc

SEQ ID NO: 221643 - DNA, 510 bp, Homo sapiens
  chr1:247495329-247495839
  hyper
ggcctggccgccgggccgggggctttgtgggtcagccacgtcgccgcgcccgggcttccccgcgggcccgccggtccggaaggtcggcccggggctcttttctccgctgttctccttctctggcgcccccaggacacgcggccagtggacgcccggaacggccgaccgggagtcgcggctggggatggaagctggaattgggggtgcgggatggagcggagagaggaggccccgcgcgccgtcggccgcctcatttcagactcccctgcgaccccccccccgccgccagccgaagcccgggccgcccagcccctcctgccgctgcgggacgccgaaggtagcgctcacatccgcgccttccgggcctggcgcccacgtgcggagtccccgggttaggaaaggccgcgcatccggaggccacgcagagcctcggggcttgcgcagaggggctgcggtgagtcctgaccctgagtgggggtcacggggctcgttgctcgctgaagtgaacac

SEQ ID NO: 221644 - DNA, 1012 bp, Homo sapiens
  chr1:248020310-248021322
  hyper
tttcctgggtgtgtgtgtgacgggggcggggaaccacaacgttaattttatccccgacatagggagcgcctgagtggtggcttttcaccgggtgtggctcgtctgagctcttgaactgaagccagcggacaccacccgtcggcgcctgctttcctggggcgtgggctcctccccctgtgcagaccgcgaggggagacggtgcgggcggccgggagcgcagccctccgggaggcgggtcatggcctgggcgccgcccggggagcggctgcgcgaggatgcgcggtgcccggtgtgcctggatttcctgcaggagccggtcagcgtggactgcggccacagcttctgcctcaggtgcatctccgagttctgcgagaagtcggacggcgcgcagggcggcgtctacgcctgtccgcagtgccggggccccttccggccctcgggctttcgccccaaccggcagctggcgggcctggtggagagcgtgcggcggctggggttgggcgcggggcccggggcgcggcgatgcgcgcggcacggcgaggacctgagccgcttctgcgaggaggacgaggcggcgctgtgctgggtgtgcgacgccggccccgagcacaggacgcaccgcacggcgccgctgcaggaggccgccggcagctaccaggtgaggcgccccccggcgggggctgcgggcgctgcggtgaccgggaagcgggcgacagtccggagcggagccgccgaggccacccgtctcctgagcggctcccacggccgctccccccaccgcgcgccgtcccccccgcccacgcggctcactcagtgtgggtctctttgccttggctgtggtaaccccctttgcgacacacacccattattttacaccgtccgcccctcccccaagcactctcctgtcgtcgaactcgcgctgggctggtttctcccgatgcggatagtctggtccctcagctgggctctggtcgggagggctgtgtggtccagttcattcttggtaacaatt

SEQ ID NO: 221645 - DNA, 111 bp, Homo sapiens
  chr1:249167777-249167888
  hyper
tctcaggcattgtcctgcgtttgcggggccaggcgctggcacacggtcactaacccctggtcgttagcttcgattcccggcctgggagagcgctatcggccactcctggct

SEQ ID NO: 221646 - DNA, 269 bp, Homo sapiens
  chr2:264202-264471
  hyper
ccgtcctcaagatcgaaaagcccagagccccgcggcggctccaagcacggtgttgggggtgggggtctcagggagcgcccaggcccaaggccgccctggtccggcgtggaccccgcggggctcaaggcaggttccccgcgtgacccgcccagcccctctatgcgaactcgaacgacaggcaccacagcccgccacgtgcgcgagactcgcgctgtgccccaacccaggtgggcggcccgcggagccgcgaggcctgagcccgccctgca

SEQ ID NO: 221647 - DNA, 105 bp, Homo sapiens
  chr2:288757-288862
  hyper
gtcaggcgggtccccaagggctccgagcggggctttaattagaagccgctgaagtgttagtacccccatgcggatcttcgtcagtccccccgcctcacctcgctc

SEQ ID NO: 221648 - DNA, 660 bp, Homo sapiens
  chr2:945675-946335
  hyper
tgaatgaacagcgggaaacgccgtctcccctggcgtctgagatctggggtcccctccccacctggtctcctcgctcccgccccagccccgtgcgccccaggagggcaccgccgagcgccgggtccccgcagggttcgggagactccgcggaccggaggagggataggacccccgagctttgggggcgggaagggagggtggaaggaggaggggagcggggttggggaaagttggagcttcggtatcttttctccgggccaggccgtcctcggggccctgcgctgcgtctccaagtgctgggaagactccgcggggaaaggtctgaggacgcggccggctggcacaggtgtggcggcttcagagggccggggagaacccatggcttcgaggctgtggactagaaatgtccctgattagaagctgagaacctttggccagggaggtggggcggcggggaggggtcgtcaagccggtccagagcgcgcccacctgcgccacaagggagaagaggtgccccccgcccccctccgcccaccgccgccacgatgcgccgcggacctcggcgacccagcccgggtagaagcgcgcgctcccctcctccagcctcgtgcgccggcccctgccccgccagccccgctatggtcccccatccacccccgc

SEQ ID NO: 221649 - DNA, 283 bp, Homo sapiens
  chr2:946391-946674
  hyper
cgccccgtggaagcgcccctctcccgacttcggctgatccccgctcgccgccctccccgcgggtgcgcgcccggcccctccctcgcccggggcgggtctgcgtgggcggtgctccgggtcggcgggcggagctccggttccccagccctgcgccccggtggagcccgagccggagccggcagaggggcgcgggcgcggacgcggcgcctggcggggccctgggaggctcggacggggtcctggcgttgagctcggccggcccggagcgcggacccagccgcag

SEQ ID NO: 221650 - DNA, 922 bp, Homo sapiens
  chr2:1747628-1748550
  hyper
cggaggaggggccgcgaaccagggggaagcgggaggccggcggagcatgagagggggcggcgggaggcgagcggggggagccccggaggctccaacaacttcccagtcctgcggggattccgagttccgaacaaaggcggctacgaaggccgcgcgcacagcgctctgttccgcccctcggcgtctcccgcagggcgaacaaaggcccagcgggtccccgcgcccaggtccccccacgtcccccttcggaggttcccttctgcgtcccaagtccccaggccccccgcgcgcccgatgccccctccaccctccgcgccccccacctccgatcacccctgcgctcccggatctccacgaagccccggaccccgcgcccccggcgtcccccgcggcactcacaggatggaggtctgcggcgccacggcgggcacggcctccagcagcagatgcatgcagcgcacggtggtgcggaagcacaggcagcggctcggacaccctgcgcccggcttctgggccaccacggccagcgtcccccaggcgcagaacagcacgagcgccaacaggcagcggcgcccggggcccctggagcgcttggccatggccgacggcgcggacggacgctcggacgcacggagccaccacggccggctcccgactgcgcccgcccggccgcggcccacgtcccagctgtgcgcggggggcggggggcgccagctgtgcacatgcgcgaggctcctcccggcccctctgaatccccgagggcggggcggggcgagaacccggggccccagcgtccggcctgagcgccctcatcccggtggggcggcccgcatggccaaggcgagcgctcgggggcgcggaggagagcattggcacccctgattctgcgctcgagactcggggctcgggaccctggggccta

SEQ ID NO: 221651 - DNA, 161 bp, Homo sapiens
  chr2:3465103-3465264
  hyper
gtgcagcccgcaccccggctttagcgcagccccagtgcccagtgcggggccgctgcctttgcgcttctgcgtctacgtcaggctggacgcacaaggagactcggcgtcctgttcatcctcggtagcaagcgaccgtgacgcagcctcgcactactgcaagc

SEQ ID NO: 221652 - DNA, 119 bp, Homo sapiens
  chr2:3751274-3751393
  hyper
ctgcaggcgtcgctgcccgcgctgccgcagcctctcggccccggcgagcgaggagcggggcgcggctatgggaacccgcgggccctccgcgccggtggacaccacgcccgccaagacca

SEQ ID NO: 221653 - DNA, 947 bp, Homo sapiens
  chr2:7005251-7006198
  hyper
gacctgtgcgcagcccacctgcagccgcctgccgtcttgcacctcccagaggcgctgccacagctggccgcgcgggtcggcctcgaactcgcccaagtgcgggcgtggtgcctcctgacaggcgcccagcagctcgagcagcgcttgccgggtgtcagggtcatccagggggtcgcgcagcaggaagccttgctgtgcgccgccggcctggccgcccgggcagtagcagagcagcctgagcagctggcaccgctggaaggggccgcggcgcagctggtgcagcaggcgctggtgcagccgcgccgcccggacccgggccccgcagccggcgtccggggtcacgggcacgcacagcgagtagctgcgctccgggggccccagcagcgccgccaggcgggggtcgggggcgtctgcgtcgccgggggcgtcggcgcctagggcgaagtgagccagggtgcagtcgggaagctccaggacgaagcggcgcggcggagccatggccccagcgcagaccccgcgccgcccgagcagcggccccgacagtggcccgcgcaggagccggcgggcgaaggccatgggcgcctcagcgacgccgccctcggccccgcctcggaaacgaaacctggcgggagccaggcgccggcgggaaacgaaacccggagggagccaggcgccagcgggaaacgaaagcgaagcgttgcggggaaacgaaagccggaggcccaggcggggcaggagccctggggctggggcgcccttccggcctctcctcctcgccgcgagatgtgcgcgataaacggccggcgctcgggagcagacgcttggccccggggccccaggtgcgcggctccgcgggcctgcgcggtccccaggcgccggctcccggggctgacaccgaatgaggccccgcgccgtcggccccaaggtagctccgtgtgcgttctgcg

SEQ ID NO: 221654 - DNA, 563 bp, Homo sapiens
  chr2:7057876-7058439
  hyper
tgggtcctgccccggcgcccggtggcagcgggcggggggcagcgtcccgggcggggactcgcgggctccgttcagaggacgcccgccctgccctgcccgtgtccctgacctcgtccctgctctgctcctgccctgccctgcctctcgcaggcggcgcccgcgccccagggcagtgggcgcttagggacctggcgtccccctgcctgccctgcgcggtcgcgggtctgcgctgcggcgcgggacagggcgccccgggccagggtcccgcgggcgagctggcggcgggggctttcaaggttcgcggccccgcccgcagaccctggggctggagcctcggccccaagaggaggtctgggaaaggacgacgcgtccggggcatcgccaccggcggggaaggtcggaactggccaagaggatgccccgcacatcccctgcgcgcggggtccgcggctgctactgcccctggtccccaccgcgagccctttcccggggaatgagccgccgcccgagccccggagttccctgcgggtcttacccaccccagcctccggccgccgacccca

SEQ ID NO: 221655 - DNA, 571 bp, Homo sapiens
  chr2:7571091-7571662
  hyper
gggctgcaggcctgcgagtggcaggcgcagcccggctgcaggagcgcggctggggctggccgctctcgctgccctctctccggaactgtttttttctgtcctggtctctgaaagccttattgattgctcaaagtgaacttctcagcccacggtttcctcacccccggggcagcttgcatttcctctgccgcggcctctgtcgcctcccctcccgcgcgcctcggccttttacatttcaaatgctcgacagctgggccaacttctgcttccgcccaaagaagggctctttgccgctcacaatggccggccagtggcgcgggggctcttttctctccagctgtgagagaggctttttcaaaggccggggggaagctgccgtccagctgcgcgcctggccgcgggggccctgcatgctaatcagcggcgcgcagagccgggctccgtggggccgcgcagatgcgccctctccgcccgcagagccttccgggcaggtgaggccaggccggccgggcgtcaccgcaggtgtgcactccgcgcgcgcactcagctcgctttggtgtttctccaggcc

SEQ ID NO: 221656 - DNA, 302 bp, Homo sapiens
  chr2:8818278-8818580
  hyper
ggattggtctggcccgcgctttgtagtagtaatgagggcgcgaatcgcgctaggctctgcgcgcgcgaggctccgccgagcaggaggactggggctgcacatcctcccggctcccccagggcggagaggggggccgttctggaagaaaaaattgtttatgcgcaacctccgagggttccgaggagttaggcagtaagacggtgtggaggttgggggggcggggcgagtctttcaatctttcaaaggtatttttaggaatccaggatcaaagccattcggcgagaaaccgaaataatccaaag

SEQ ID NO: 221657 - DNA, 665 bp, Homo sapiens
  chr2:8818829-8819494
  hyper
cttttcttttcttctcggtcctctttccttccccaaatcactcgaaacttaagacgtgcagcgtctgcaggtgcgcgcgggccggcggccgggcctgggcgagcctgggactgccgggcctcgcaggcattgatcagctgggcgcgcgcgctgagtgacggcgcggttgccatggcagccgcctgagcggcgccgcgaggacaaggctgcagggcggcgtgaatgggcggcgtcacgcgcctggcgccagagagtctgctccggggctccggctccggccccgccgcggcctggcccgcgcgccgccgccgccgccaccgccgccgccaattcatcacctgtcagggatcactcgcggggtcacgggcggaatggacacagctgtgagaacaaaacccgggaaagaaaggcgaacgctccccattgcgccagatgtgcagggaggaccttgagacgcgccccccgcccccgcaggctcctcccgccccccggcgcatcacgcgggggtggcaaaggcggcctggccagcgcggagctcccggcccggagctgcttctgattaccgcgaggggcccggacgcgagagccgccgcggggcctgccctagaggcggagtgagtgagtcctggagccaggctgggggaccttacgggccggtctgtcgc

SEQ ID NO: 221658 - DNA, 169 bp, Homo sapiens; identical to SEQ ID NO: 198061
  chr2:8821592-8821761
  hyper

SEQ ID NO: 221659 - DNA, 709 bp, Homo sapiens; identical to SEQ ID NO: 198062
  chr2:8821976-8822685
  hyper

SEQ ID NO: 221660 - DNA, 141 bp, Homo sapiens
  chr2:8825702-8825843
  hyper
gtcgccagccgcggccccggccgacctctgcgcggcggggagggaagcgcgctctggtcccaacccgacccccgcctcgcctccgggagaggcgcagacgccggccgcacgctcgccccccagccacggggacccgcgcgt

SEQ ID NO: 221661 - DNA, 202 bp, Homo sapiens
  chr2:9143666-9143868
  hyper
acctggtcgatgggcagctgcacggcgttgctgaggggctgcagcagggtggagcccgtggtgctggtggtggccatggccgggcctcggcgctccggccgcccgcgccgctcgcccgctcgcgctgtgccgggcgacgacgaggatggggatgcagcggcgcgcccgcccctgggccgcccgcggtcggagctctgcgcgg

SEQ ID NO: 221662 - DNA, 459 bp, Homo sapiens
  chr2:9144090-9144549
  hyper
ctgcgcgacccaatcgcggcgcgacgccctgacgcccgcagccaatcagagagcgccggccgcgccacgcccctcccccgtgccgaggacccgggcgagggcgccgaggcgcggcccgggccgtcgccggagaacggctggccagcgtcgtggggcgcgctcctcgggtgagagcatggaagagcgtctttgcccctcactcctcggtttctcctccctggaatgtcgcggccccccacccctctctgggagagacggcagacaacaaaggggcccggggtggcggccggagggacgatgtgagggacgccgccgagccagcgccaggggaagttggggacgaaggtgggggctgggaggacgacaaaccaaaacagcgacctggctgagaagcccctttgtctgggagagtgccgggtgaaagcccaaagctgagagcagccccggggtctgacgctt

SEQ ID NO: 221663 - DNA, 1260 bp, Homo sapiens
  chr2:9346435-9347695
  hyper
ggcgtccggctgtggtccccgcagggtgcccgccggcggagcgcatcctccggcagggggcgagctccgcaccccgctttcctcatgggccggcgcggcccgccgttcaagtggggagcccagaggtgctccgcgccgtgggcggggggcggttggcgcgcacaaggccggactccggcggggcgcacctccacacgcaccctcgcgggcagcgggtcggagtcggggcctcgggccggctgggggcggggcatgggcgcggcgcgcggggcccggaacgccgagacaatgcggcgcgcggcggccaggaacggctcggcgggccggggcgcgcgccgccttccttcctgcgggatccgcttcccggcggcgcggcagcggcgagcgcgccgattggcggcccggtcctcccgccgccccgccccacgcccggccggccgccgcccccggcccggacccgcccctctccgcgggaggcgtcggggcccgcggctgggtggcgggtagttcccgccggctgtgcgcgcccgcctcggggctcgctctgagaggacgcggcggcagcggactcggagccctcggcgcgcaggcgggcggaccggccgagctgcgcggggctgcgcgccgcccctgctccgccgccaggccccgcgcggctcccgcgcccggcgctcccctttgtccgcgggccggagcggcggcggcagcggcggtgtccgagcggcggtcggagcctgctgcggcagttgaggcggcggcgcccctgcggctgtgcgccagcgccctcgcgccgaggcgatgccggaccagatctccgtgtcggaattcgtggccgagacccatgaggactacaaggcgcccacggcctccagcttcaccacccgcacggcgcagtgccggaacactgtggcggccatcgaggaggtgaggcggcctgcgcggcggctccggccgcaggtatcccgcgccccagccccgcccgccgctcccgcatccgcatcccgagaaaactttctttgctccgaagccggacgcggccgggccaaccctgcccgagacagaagccctttgttcccgcctaggtggctcggaggagatgggtgatggccaccttgggcctctttaagacctcccctctctcggcctcgtggccctcgcggggttccgcggcctggtcttttccccgcagcgcggccaactttgtccagagtcggggtccgcggcgagcgggggatcccgctgcccgccgccgcccgccgc

SEQ ID NO: 221664 - DNA, 175 bp, Homo sapiens
  chr2:10151695-10151870
  hyper
gggtcaggtggacagtattggcgtgcgtacgggcgggtcagatggacaggatcgcgtacgggcgggtcaggtggacagtattggcgtgcatacgggcaggtcagatggacaggatcgcgtacaggcgggtcaggtggacaggcatgcgtacaggcgggtcaggtggacaggcgtg

SEQ ID NO: 221665 - DNA, 175 bp, Homo sapiens
  chr2:10152415-10152590
  hyper
ggtgtgcgtatgagtgtgcgtatgggcgagtcaggtgggcagacgtgcatatgagtgtgcatatgggtgattcaggtggacacgcgtgggtatgggtggctcacgtggacaggcgtgcgtgtcagcgtgtcacgtggacaggcgtgtgtgtgggcgggtcaggtgggcaggcgtg

SEQ ID NO: 221666 - DNA, 516 bp, Homo sapiens
  chr2:10183604-10184120
  hyper
cggtgtattttggttcgcctccgcgccccgccccgccagccgctccctccgcggccgccccgcccctcccgcgccgcgagggccgcgccggggcagagccgcgcgggcgggcgaggcgcgtgccggccgcaggagctccgggttgccgccgccgccgccgcccgcagcccacgtgcggccgctgctgcgcccgagctcacgccccgcggccgctttgttgctcccggccggcctgcacgatgcacacgccggacttcgcaggcccagacgacgcgcgcgcagtgagtggtggggctgccgcggcgggactactcgtctgagcgaggggcgaggcgggggaagtggtgcggcactcgcgcgcctgtaaatgcgggaggtggggcgtgcagggcttcgctgcggccgcgccggtaggggcctgggcgggctccggagccgggcggggcggcggccgcgacgggcgcgcccgggtcggcgggggcgaggagggggcgtgttccccgcgcagctttgtct

SEQ ID NO: 221667 - DNA, 180 bp, Homo sapiens
  chr2:10443826-10444006
  hyper
gcttctgccaagggtgggggcccacgcggaggcgatccgctcgttcctcccagggccatggggcgacgaggagagccctggcctccccgcgacccgcactgcgacctgggccagacgcgccaccttccccggtcgcggtttgcttctctttaaaatgaggacagctcctcccttgggggc

SEQ ID NO: 221668 - DNA, 360 bp, Homo sapiens
  chr2:10444228-10444588
  hyper
agctgcgctgcctcctgcagcacctcccgggcggcgccgcctccgcgagtgcccgagagcgccgcgctgggcgccggccctgccccagcccccaggctcccgcgcaagcgtgggggtccctctcctggccgggaggcagcgactgcggagttgagaaccctttggttcaacaagttcctagtccgggaggatgcagctcagctcgtggagtccgagagtcacggcgtaaaattggcgcttcccgcacatgcagatctcgggctcccggggtgtcccggccgccaaaggccacccctttcctcctggctgaccccaattccaccagaggaggatgtttgccagggacgccgagtccagctg

SEQ ID NO: 221669 - DNA, 226 bp, Homo sapiens
  chr2:10587833-10588059
  hyper
ggccggggcccgctcgtctgtaccaaggcgagcccgggctctgcgcccctgcacctgctgcgcggccgccagggcctccccaacggctccccggccagcgcgcggccgccgaagggttgggaaagaggccggcgcggggccgcagggtctccgggtgggtctcccctaggcccctccagccccgagctgtgaagacgggggcagaacgaggcgcccggatcaccct

SEQ ID NO: 221670 - DNA, 240 bp, Homo sapiens
  chr2:10588915-10589155
  hyper
gcgagcggaggaccgatgtgctggccacgtgggccccgccgggccgactccggaccctgctgccgcccattcctccggtgcaagggacctggaagtgatcccggtgccgctctgctcccaccagctagggagcagaggcgcgggagggaaggggcgtcccgggggtcgccagcacgctgcgggcagggctggcagccgcctccacgcccccgcgctggaagcctcgtctttgtaacatcg

SEQ ID NO: 221671 - DNA, 345 bp, Homo sapiens
  chr2:10862070-10862415
  hyper
ctgcgttgggtctgcgcggggttaggagagaacaaaatgccctcggattggagcgggaccgggagtccgaaaggaagaggttccaccaggggtctctggctcctcagagcttatcctgctttcccccagccgtccggagacgccgcggggaggcaagcggaaagggggaacctggccgagggggaaaggtgcgggtgtggacacctgtgaaggagcagcacgaatcgaatcggccgtagaggctgcagacgcggccgcgaaaccaccggccacgccgggcaagggacccagcactgctgagcgggcacctcgcctagtggaaaaaagactttagtagttcccctc

SEQ ID NO: 221672 - DNA, 57 bp, Homo sapiens
  chr2:10953251-10953308
  hyper
tgtgtgcgcccccaccctctttatcccgggggagcgtgactcggcctcagggcaccc

SEQ ID NO: 221673 - DNA, 51 bp, Homo sapiens
  chr2:10953334-10953385
  hyper
cctcttgtgcccgacgaatattccgtggacacacatttgctccgcacgcgc

SEQ ID NO: 221674 - DNA, 325 bp, Homo sapiens
  chr2:11622660-11622985
  hyper
tggggttccaggcccggggcgcgaacccgggtgggagggcgcagggggctcccctctgtccctgtcacctccacccatcgccggccgccgctaggggttccggccccgcgccctcccccgacccttccccggcggaggtcctggggcagccaagcccaccgcccggccctcctccgcggccgtcccgaagacccggagaagtggaccacagggggcggccagtgtcaggggtcgagtcctccgcgctggccgcggttccggagatccgggctttgccgagcgccccgcgccgtggccggggccggggccaggtccgggtgcgggg

SEQ ID NO: 221675 - DNA, 460 bp, Homo sapiens
  chr2:12858142-12858602
  hyper
agtaactaaaagtgcggcgattctgcacatcgccgactgctttggggtaacaaaaagacccgagttgcctgccgaccgaggacccccgggagccgggctcggagcagacgaggtatccggcggcgcccatttgggggcttctaactctttctccacgcagcccctcttctgtcccctcccctctcgctcccttttaaaatcagtggcaccgaggcgcctgcagccgcactcgccagcgactcatctctccagcgggtttttttttgtttgtcgtgtgcgatcctcacactcatgaacatacacaggtctacccccatcacaatagcgagatatgggagatcgcggaacaaaacccaggatttcgaagagttgtcgtctataaggtccgcggagcccagccagagtttcagcccgaacctcggctccccgagcccgcccgagactccgaacttgtcgcatt

SEQ ID NO: 221676 - DNA, 180 bp, Homo sapiens
  chr2:14774569-14774749
  hyper
tgcaccaaggcgagatccgccaggacagcctgtatgaggcgggcgcggccaacgtgggccgggtggtgaatagctggtaccgctaccgcccgctggtggccgagctggtggtgcagaacgcctgcggccacctgggcctcaagagcgaggagatctgctggacgaactcggagagcttcg

SEQ ID NO: 221677 - DNA, 178 bp, Homo sapiens
  chr2:16079905-16080083
  hyper
gacctgcggagtggccgcactccaggtccgcgccaaggccgggcagctccgctttctgctcagtctccgcgaggtgtcgccttcggccgaagaaaccaccgcggcgccaccctcgtagctcgcacttatttatttatttattttcaaacaaggggggcgcccctcttctttcaatttg

SEQ ID NO: 221678 - DNA, 101 bp, Homo sapiens
  chr2:16080290-16080391
  hyper
cccccggagccctccgtaatttttttttcttttaatgacaagcaattgccaggctcgcagggtgggtgctgcattgcaccgctccgcgcgcagctggttct

SEQ ID NO: 221679 - DNA, 152 bp, Homo sapiens
  chr2:16080622-16080774
  hyper
gggtgtgtcagatttttcagttaataatatcccccgagcttcaaagcgcaggctgtgacagtcatctgtctggacgcgctgggtggatgcggggggctcctgggaactgtgttggagccgagcaagcgctagccaggcgcaagcgcgcacag

SEQ ID NO: 221680 - DNA, 420 bp, Homo sapiens
  chr2:16081991-16082411
  hyper
gttagagggggcgcccattgcctatcccctcggtctgccccgtttgcccaccctctccggtgtgtctgtcggttgcagtgttggaggtcggcgccggcccccgccttccgcgccccccacgggaaggaagcacccccggtattaaaacgaacggggcggaaagaagccctcagtcgccggccgggaggcgagccgatgccgagctgctccacgtccaccatgccgggcatgatctgcaagaacccagacctcgagtttgactcgctacagccctgcttctacccggacgaagatgacttctacttcggcggccccgactcgacccccccgggggaggacatctggaagaagtttgagctgctgcccacgcccccgctgtcgcccagccgtggcttcgcggagcacagctccgagcccccg

SEQ ID NO: 221681 - DNA, 104 bp, Homo sapiens
  chr2:16082831-16082935
  hyper
ggccctgcggtcgcctcgggggcgggtattgccgccccagccggggccccgggggtcgcccctccgcgcccaggcggccgccagaccagcggcggcgaccacaa

SEQ ID NO: 221682 - DNA, 667 bp, Homo sapiens
  chr2:17719770-17720437
  hyper
tacaaaagcgcacgcgtcgatatcaatcgtaccctacaacagagcatggtttaaagtatcagtgtacattttttcctaaacacaagttgcaagtaagttatctaaaatcgaacaccgccacgaaagagacctccagggtgcaataaataggtatatctcgttgaagtggagaaatggcatcatgaccctttgggttgatgcagattacagtgcggaggctgttctcgagagagaaactagaactcagcgtaaaatgctgtagtaggggaaatcgaccaaagacgagattttgaaagccttttgaaagtcgtttttctagctaaaaagaaaaagtgacttattcaggactgactccccctgccagtcccaggaaacaggagcagcccggcgcgcccgggagccccgcagcgcagtgcgcactgcggctccagagcgaagggctggcgcccgccagattctaaacgtgctcggctgccgcagcccgccggggccgcgcgccgtggtccgcgcgactccgcgctccgggtttccgcggtcaccagcactggcggaagagccctgccgagaggggacagccgcgggcggtgtcccgggagtcccgagagcgcgctccccctttgcgcaaccttcccgaggcgtcctgcccgggaagccagttcctgggttc

SEQ ID NO: 221683 - DNA, 119 bp, Homo sapiens; identical to SEQ ID NO: 198102
  chr2:20101402-20101521
  hyper

SEQ ID NO: 221684 - DNA, 140 bp, Homo sapiens
  chr2:20424156-20424296
  hyper
ggtctgcagggggggcgttgtggccgcggtcactgcatccccccgggtcaccgacgggggcccggccgccgcggtggccggggcgaggagggtgggaacgggcgaccccgggcgccgctgtgggctggcgggctccgaca

SEQ ID NO: 221685 - DNA, 399 bp, Homo sapiens
  chr2:20646413-20646812
  hyper
cctcccccacaggcccgaccacccgccgggagtttgccaggaagaggggcaattctgaatgggagtcgccaacgccccactgagtgaagcctgtctcggaaccgctcgcccagaccctggaggctccagacagccagctcccggaccccgcgcgcaaacgctgcggcgaaggaggggacccgggtaccgccagagccccgcagcggcagcagcagcgcggactccccggtcgctgcctctcccagcccggcggcctgggccgtcaatcaagctggccctgccccgccctcgggctgcagggggcggccaatcagagctaagctccgcagcgatgagctcagccggctggtttcccattggacggctatattaagaaagtggccggactctttaaatagc

SEQ ID NO: 221686 - DNA, 240 bp, Homo sapiens
  chr2:20646936-20647176
  hyper
cccgagcccgcgttacgcacaaagccgccgatccccggcctggggtgagcagagcgaccaccgcccgggagcagcgcggcgagacgcacggtgcgccctatgcccccgcgcccccaccgcccccgccgcggcagccgaagcgcagcgagagaacgcgccaccgcggggcccgggtgcagctagcgaccctctcgccacctgcgcgcagcccgaggtgagcagtgagcggcgagcgggagg

SEQ ID NO: 221687 - DNA, 660 bp, Homo sapiens
  chr2:20865715-20866375
  hyper
aaaggaaaaggacccgcctgcccttcttcggcagttcgtttggcccaggccttcgatcagctgaaagtttccgatctagggggatgtccaggctgccggcggagcagagccgataacccccctctcctgcgcgttcccctgagacttggcctccgcaacctgtcccagccgcggagcaaactgctctgcggcccgcgcgagtgcgccccagggcttcgccgctgccgggcgtcccctccatccacctcgggacccgcgccatcaccgcggcggggtaagaagctcggaggcgccatcccggggctctgcgccgtccgctctcccggctcctggccgctcacgcacacagccggtagctggttttcgttagccgctgccctcgcccagaaggcgggtggaaggtcgccagttggacgcacagccaaactcttagcgcactcccgcgcgagatcccccatcacccggggctgccgtcctcatttcgagctctttctagagcttggctcccgctgaagcgcaacttccgcgcccaaaccttgcttttacgacgggcggtccgcgtccaaaggtctcttacaggcctgccctttcagctcctcgccctcccttcctcccctaccggccccctcccctgctctggccgcccgctgcaatcctttg

SEQ ID NO: 221688 - DNA, 207 bp, Homo sapiens
  chr2:21022856-21023063
  hyper
gaagtgcccccctcaggtgacgtcacagtaccgcgccggagctgatccgggaagccgatgtcagcctggcgcgcggcgcacagctggctgggagatttcttactggcttggagccggtggtccagatcagagagacctcttggagggtgtcggggttttcctttctttttcatttgaattttatccgccttttattttctgtcatcc

SEQ ID NO: 221689 - DNA, 256 bp, Homo sapiens
  chr2:24714925-24715181
  hyper
ggaatctcgcctgccgggaccgcgaaatgggggcgaccgcggcgtccctctccgtcggcgcagccctcgacggcgcttgggtttgaccccggcgcgcttgctcgccccttctcccgagaaggggtttcggaggtagacatgggatggatactggacatgttcctgtcgcggcccgggtttggtccccttcctgggattcagccgaaagggccgaggaagggaagcaaacatgttgacgaggcgattgggaggtggg

SEQ ID NO: 221690 - DNA, 79 bp, Homo sapiens; identical to SEQ ID NO: 198120
  chr2:25265055-25265134
  hyper

SEQ ID NO: 221691 - DNA, 713 bp, Homo sapiens
  chr2:25391043-25391756
  hyper
ggttgtcccaagacctcctagcaagctctcggagcctccggaccgccgcgagcccctgggggagaggaggccgccggctccctggagacagcgcctgcagcttcgcggccgtccgcccaggggccggacgtgggccctccagctcagctactggcggcttctcatgccgcagtcggcgcagaaagtttgtcgagaactcgggaccgcggagagccagaggcgcccaggtccgccttcggagccggagccggccgactgcatcgcgaggacggggacaggggatcccggggaaagagcacgggtcccccacgctgcgcccttacctgtctcgggaggctgctctctgagggcggggacgctcggcggcctctctcggtcgcggctcttcttcccctccttcgccgccgcttggtcccgcgctcctctgtccttatatacttgccgagctctcctggtgggcgcgggactttgaccttcccggcagcacaaggagcagctccccgggccaggggaaggggggccgcggggcgtgggaggggggcttccagacgggggacgagcgcggggagacgcgctggaaaggggctggaattagcactgtcctgccgaaggcgcacctggccgctcgccctcaggaagaacttaattatggatggcgttgggtctccgcttagaacgggcgggaggcttagcacccccgtgtggggcaggcc

SEQ ID NO: 221692 - DNA, 455 bp, Homo sapiens
  chr2:25438912-25439367
  hyper
ccgcgccaccccggcgagcagagccgcggagggcgccacgtcggtgcgctggccccgcccgagcggggcgggaccttcctgtacccccggaagcccccgcgggcagctggggaggaaaccgcggccacgcgctcggggggcccggctcgggaagggcagtgcgcgcgcatgcgttggggcggggcgcctgggacctgcgggccccaggcccagcgcgccgccagccggagtgcccggcgcccgtcgaaaggcccctgcgccggttcaggacccgcacccagctacgctgcggagccccagctcgcagcaccctcccacccaccgctcctggctgcttttctcctgagtctgcggggcggggtcgtttttgttttttacaaaaatgtatgtaaaggtatttcgatgagtgaaggaacacgctataatgctcactcaatgcagcatcggtgataatt

SEQ ID NO: 221693 - DNA, 149 bp, Homo sapiens; identical to SEQ ID NO: 198122
  chr2:25457152-25457301
  hyper

SEQ ID NO: 221694 - DNA, 139 bp, Homo sapiens; identical to SEQ ID NO: 198123
  chr2:25458563-25458702
  hyper

SEQ ID NO: 221695 - DNA, 95 bp, Homo sapiens; identical to SEQ ID NO: 198124
  chr2:25459791-25459886
  hyper

SEQ ID NO: 221696 - DNA, 108 bp, Homo sapiens; identical to SEQ ID NO: 198125
  chr2:25461984-25462092
  hyper

SEQ ID NO: 221697 - DNA, 448 bp, Homo sapiens; identical to SEQ ID NO: 198126
  chr2:25463164-25463612
  hyper

SEQ ID NO: 221698 - DNA, 172 bp, Homo sapiens; identical to SEQ ID NO: 198127
  chr2:25464417-25464589
  hyper

SEQ ID NO: 221699 - DNA, 774 bp, Homo sapiens; identical to SEQ ID NO: 198128
  chr2:25466755-25467529
  hyper

SEQ ID NO: 221700 - DNA, 98 bp, Homo sapiens; identical to SEQ ID NO: 198129
  chr2:25468111-25468209
  hyper

SEQ ID NO: 221701 - DNA, 310 bp, Homo sapiens; identical to SEQ ID NO: 198130
  chr2:25468877-25469187
  hyper

SEQ ID NO: 221702 - DNA, 173 bp, Homo sapiens; identical to SEQ ID NO: 198131
  chr2:25469474-25469647
  hyper

SEQ ID NO: 221703 - DNA, 123 bp, Homo sapiens; identical to SEQ ID NO: 198132
  chr2:25469906-25470029
  hyper

SEQ ID NO: 221704 - DNA, 162 bp, Homo sapiens; identical to SEQ ID NO: 198133
  chr2:25470449-25470611
  hyper

SEQ ID NO: 221705 - DNA, 192 bp, Homo sapiens; identical to SEQ ID NO: 198134
  chr2:25470892-25471084
  hyper

SEQ ID NO: 221706 - DNA, 90 bp, Homo sapiens; identical to SEQ ID NO: 198135
  chr2:25497816-25497906
  hyper

SEQ ID NO: 221707 - DNA, 237 bp, Homo sapiens; identical to SEQ ID NO: 198136
  chr2:25505304-25505541
  hyper

SEQ ID NO: 221708 - DNA, 160 bp, Homo sapiens
  chr2:26395433-26395593
  hyper
agcaggacagggcgcgggtgggcgcggcctccgggaggccagcacgagggggagcggcggggcccggacacacccagccagaaggaggaggccgaccccgcgccgactccgcagatgccgctcgggacttcgttgtccctccaggcgcccgccctggggt

SEQ ID NO: 221709 - DNA, 330 bp, Homo sapiens
  chr2:26395999-26396329
  hyper
gccccgggaggtggcggcgggcgcgagagcctgggccgcgcgggactgaccgtcggggccccgggacggcggccccggggcgcccatgccatggagaagctggcggccgggctggccggcctgcgctggagcatgggcgccttcccgctcgacctcatcgtcagccgctgccgcctgcccacgctcgcctgccttgggccaggtaccggggtcgctggagatggggaccggggtccgcggggaaatggtgggctctccagccaggggccagagggatcgtgaggagggtgcggcacccgcaccctcccagctccccggcgtgggccccga

SEQ ID NO: 221710 - DNA, 1357 bp, Homo sapiens
  chr2:27070261-27071618
  hyper
agacaggcactgggcctgagcgctctggacagggaagcacccgcgtggcgctgggcaaaatcttctcagtggagagaacgcactccgggttcgagacctccccgggtgcagatgcgaactgcggtggccccaagtggccgtccactttgttcatgagaacagttttcctataacgcccacccggccctttgcatcccgcaatcccgcgggcgtcggagcgggtcttggcgcgaaccaggcggcctcggcggggtcctgcggcggagggcagcgcggccgcagcccgggagaggcggccgcggcattgtttcagcccctggggtgggatccagctgggggaggggaggcggggtgtcctccggaaccgcccccggccctccctggggacccgtgcctcagcgcgtccaggctttgtggtgtcctgagtcgccatggaaacccgagggaacgcggagccgggtgctaggggggtcggtgagttctccggccgcgccctccgtccgctctcggaccccggccctgcagcagggcctgccgggagttgtagtccccaggcggcggcggcgcgcggcgccaaggatgcgggacgccgcctgtccccgcctccccttaacctgctagctgaggtggggagcggcgggaggagccggccgcgcggtgattggcggaggccgctcccagcccccgacacgcgcccctcccccgctccccactctggactcccgcgctgggcgcgctgaggcggcccccgagcgagcgcgcgtgcagccgccgccgccccgagcacccgcagctccggcgccgcggcgagacggagacggaccgagccacgggcccccgcggccgcagcatctcggaggagtgggtgatggcaggggggtcggtgggcttacccctcccgggctaggacatcctcctctcccccttctgtttctgcgtgaggcgcacaaaagggcggggagccgggtgagcctggggcccggccgcaggggacgcggcgggaggtgtggtttggggttgggaggtggccatcggggctaagccggggcgctcttggggtcctctttgtacgcccgcgaagcgccgtgccgggccttgctcatagtaagcgtttaatgcgtgctcgcggggttgcaaagccctggggtgaggaggcggctcggccgaggggtttcgcgcctagcacgcagtgggccgctttcctagccgggcgcggtgcagtggaccgctggagggctgggcgggggcgcctctggccgggggccagtcctgccggtcccaggatctgcgctgtccccggtcccacacaccacccagatacacaccctccgtccttctcgcctccgagctgggatct

SEQ ID NO: 221711 - DNA, 180 bp, Homo sapiens
  chr2:27071675-27071855
  hyper
cctgcagaggactcgcccgccgcctccgagcctcccgcctgagccacaaaggcctcctgcggctgcccagcccggagcgggcgccgagccgggtccctcggctggagcccagcgcgggagcccgccttgcagcatcgatctcagcgggcaccgacgtcgacgccccgggcctggggacgg

SEQ ID NO: 221712 - DNA, 932 bp, Homo sapiens
  chr2:27072010-27072942
  hyper
ggggcgggggcgggtccgaagaacgagggaaggagctcggtgcaggtggcgcccggcgaggctggttctgctgaagaatggggaggggaggagggatgcaggcgggtggaggccgcctgggtttgaggagggaggacgggagcgaggagaagacccgcgctgtgcgggggaggggggcctcctgggaaggggagcctcccgaggagggaggggcaagcagctgagaggcggtctcgggcccgaggatcctcagctccaggcgcggggccccgcggcccaggtggccggctgggcgtggccctcggaccggggttagggacccaggatggcagatccgggaccgggctgggctggcttggtgaggagctttgtctccaggcttgaaaccagccggtagcgactcgcttagggttttgtgatcttccgcggcgcccacggcacgcccttttctcgaggagctgaaaggctttgcccagcagcaggtgctgccagggaggcggatctcccttcggggagacccggagaacaatagccgaccctggtgtccatccgacgacaaaccagggccacccaggacgcgagggtgcagttttctggtgctgggaatactccctgcggaacctccgggcacgtgctggctttggggttttatgggggcctggccacgccgggaatcccgtgtgggaggcgctcccccggcctgggggcctgcagacagccacccccccactccggctcgggtgccttctggtgcagcgccgccgcccgccccgcgctgtccacccgctgccgagacgcggcgtggttagcggcgcggagctgccgggcggcgacgcaggtgccaaagactggaggtcgcctcggtgcagcgcgggttcccccgagcagcggctttgtctgccgaggcggccgtagtctaggggctgcagctg

SEQ ID NO: 221713 - DNA, 214 bp, Homo sapiens
  chr2:27309103-27309317
  hyper
aagaacccctccagggccggcctgcggaggagccgatcctcgcaccctccgctccctccactggccctccaggtcgattccctgggctccaggctcccccgcgcgggcgccgcccaccgccatactaaacgatcgaggaataaagacacttggtttttctaaaaaaaactaaacgaaccgttctgctacggtacggggtcgggggctgccgggc

SEQ ID NO: 221714 - DNA, 1078 bp, Homo sapiens
  chr2:27484881-27485959
  hyper
aacggacggtcagccgacagacaagatggcccacgggggtgggcagggaggtcggacggccgctcagaggggcaggtggacggtggcggcaggcgcgggggccggcggggcgcgttggcggttctcctgccacccccggcccgctgtcccggccgctccgcgcgcctcatttcacacctcgccgcccccggccccgtctgtgcggagccgggaatacccccgctgcccagaccgcacctgctccttcctcgccgccccctcgcttcccggcggccgcccgccccccaggggcccgcaagacccgcgcggagcccggcccatcctcgggccccggcgcccacagctggccgcggctggagggggcgcgcggaggggagcccccggggcctacagagggagctctgaagcctgggcagcgaggcgctcccgccctgggcccggggcaatgcggaccttggcgcaccgggcgagggctccggcccgaccgagcggcagctgctcccagggaaggcaggcgccgcgggggtggcggaggggtccggcggcctgggacgccggccggaggggagtgagaggccgcttcacccgaggaagtcaggcggccgggaggaggcgtagccggctgtgtagggctgggcgctccgtgtggccagaggggatgaagcggggtgcagcggagcgagggacccgcggtgcgctggggcggccgccggggcccgcgccgagagagacaacgaaatggacggagggtagtagggtggcgcccccgggccgagggccagcccaggtctgtcctacctcttcaaacgcaggctgcctccggcgccaccgcggtcccgggggctcaccaggcgagtggtctccaagcccccagcggctggagagggctccatgttcccggtgccccgaccgtctaggccccaccgaggaagagagaggccgggccggccccgcgccaagtccgagcagcccgccgacccccgggatccccgcagggcggcggggccaccagagtggagcgaactgcagcgactgtggcgcgcggagtccgaactgcagatcccgctgccgccggagc

SEQ ID NO: 221715 - DNA, 91 bp, Homo sapiens
  chr2:27937851-27937942
  hyper
aaaaacaacaaacaaacaaacaaaagtaaagaggccgatagagggagaggagaccgagacgtagggagcagtgagtcggtttgggatgaga

SEQ ID NO: 221716 - DNA, 276 bp, Homo sapiens
  chr2:27938253-27938529
  hyper
gcctagaaatccctcgtgctggactctttcaccctgcacgggggagaagccctcctcccgggagcctgtttggggggcaggcctggccgagtggctccgtgaagacgcaggcgcggccggagggcgcggggctcgggcaggatcgcgccgccgggccgggagggggctgcgggcgcgcggcggatgtcacggcttacctcagagcccaaattagaaggctgaaaaaatcacagcaggaaataatgtgctgcctaaaatagaagcatcaactgggag

SEQ ID NO: 221717 - DNA, 121 bp, Homo sapiens
  chr2:29033265-29033386
  hyper
cccttctcacaagaagccaccgtattcacacgttgtgcttttctcagttcaagcggcctcttccttttgagtaaccagggtaaccacgctgtgcccgcgtgtgccgggcggggaggggagg

SEQ ID NO: 221718 - DNA, 1117 bp, Homo sapiens
  chr2:29337889-29339006
  hyper
gatatgaactaattgctcaacgtgggtgtagcacggattaggccttttacagcaagcgctgccagcagggaactggtggatgtactcttgaccacgctcggctggactctggggagcccaagacgggtaagactaggtccccggccccagcagctggtgggggcgccgcaggttagagacgtgaggccgcgaggctgagggctgtgaaggcggtgggcacgcacggcgtgccggggccgcctggcttcgcggcgggggaggtaacactgcgacaccccgcagacgctgtcagccggggtcgcggccccgcgtgcgcccgatcatctgactgctggggagtgcgggggcgcgggagccaggcgagccagcgcaggcgcgcgctgcctcctccgtccccaccgagtccccagcgcgtgcgcggggccgtggccgaggcctgcgcgccgcccggccgcctgcactgcgcgcgcgcccaccccgcgtgggaggcagcgggaggggcccggagaggtgtggagcggcgcggcgggaggctccgtgggcggccacgggagacagcgccggcgggagcgcgcctctcggcctttcctccgcgcccccgcgtccccagccggccgctccgagaggacccggaggaggcaggtgggccgggggcgcgcggggcccccccgggccgcgggctggccggcggcggggttggggccggggtgggcggccctgggggcccgcggggaggtcagtggccccgggagggtcgcgcagaggcgctgggggctgtggaagccccgcggccgcctcccgtgggcaccggtgtcgctggccgcggggaggccttctcggggcggagcggcccacccggcggggatggggactcctcgtggcggccgctgacggacggcccaactttaggttgaggggcgcggggtgtgcgggacccggcggcggagctgggctctgggccacgaccgccagccgcggctgccccgagagtccccgcacgcgcagtggctttccaacgcggcctcttcccatttctcacttgactccccttgcgcattaaattgtcgagaaacctttggccagtgggtcttcaaagctaaaccaaatggctgtcctt

SEQ ID NO: 221719 - DNA, 300 bp, Homo sapiens
  chr2:30144244-30144544
  hyper
ccggcggcagcagctgagggcgttcagggcaggggcgcccgaaatcttgccgccccctcctcacccatcatcagcgcccgcggctttgggtggccgaccagagggcggccggaaagcacctcggtgccccgcgaccctccgaacagaggcggcgggaggtaccagctgctaccaccgctgccgcccccagagccgctggatcgcatctgcctgggcgcccgccacttgcagctggctgagccgcgcgagcgcgcgcagggagggggcggggcccggagggggcggggctcacaagccaac

SEQ ID NO: 221720 - DNA, 180 bp, Homo sapiens; identical to SEQ ID NO: 198152
  chr2:30369411-30369591
  hyper

SEQ ID NO: 221721 - DNA, 1020 bp, Homo sapiens
  chr2:30453559-30454579
  hyper
tcatgagcgactcctcggagaagacgtgggagtcaaggatggggggcggcgtgcacaccgcccgcccacaccttctgcccccgctgcagaccgggcgtatgtgtgtctccaatggaaaaatcctacccaggacgacaccacatccttgctcccacaaataaaaccttccacggaactcagggctgcagaccagcccttcgcaagccaacgcgccccgtgggcactcggtcccccggctccgcgtctctgccaccttcccaccgcttcttctttaaccatgctcttgtttcccctcgctgatcgcaaggctgcgggcgaggattccagagagaggcctagtatggggaacaaacgcttcagaggggtccgaggtgggctggggacagccagtggatgggaaggagggcgctggcgccgggcggctggggtggaggagtggcgggtgccctaccccggcgcagagcagccgccgagctgtcatgtcccgagcggcccccgcgccctccttgcgcccacctccgccgcgctggagttcggggtgtgcgtggagggggctgtgagcgggaagcggcgcggacgcggagtccgggccggtgcgagtgagcgcgtgtgcgcgtgggagagcggcgggagggggccgggctcgcagccgcagcgaaccacggccccgggagcagagccgagcgcgcccccgagccgccgcccgccggagctgcgagcgctgaagccattcatgattttggtgacgttattccaggagtgggcgagggagggcggggcctctcggggccaagccccgcccccgcccctataaatacggcttcccgggctctttgtggggctgagtgctcagtggagagcggggagttgtgtccaccttgccgacgtcgctagccgtggggctgtcctgggaaggcggacggcgagcgcccggtgtccgcactcggccgcctgccgtgcccgtctgcgcccgtgtcatcctcactcgggacgcagggaccgtttttaaatcacaggggc

SEQ ID NO: 221722 - DNA, 180 bp, Homo sapiens
  chr2:30454635-30454815
  hyper
taccctgcgcctgcggcgggcgtctgtctcgcggcggtggctgcgggcccgggcgcctgcttcgtgccggctccgggtgcgagggcagccggcggcgcgggcgctcagcgctaacccgccgcccgagcccgtgcaggagtcaacgtcaaggttgcaaaggtgggggtggggggagggggt

SEQ ID NO: 221723 - DNA, 1523 bp, Homo sapiens
  chr2:31360251-31361774
  hyper
tgttctgggcacattcaacttccaatgcagctgagagggtcgggaacagttagagaacaggggtggcagccgcccgggaggctgcaaggcgctcgcccgcaacgcacaggcgcgcgcggcgcacccggcctccggcctccccaggtcgggcctggcagctgcgggaaggaggtcagcgcagccgccacacttcgcccgggcgctggcccgacccgaccgccggcgactctctggcagcgcccggagaccgccagcccctgggccgcccgtccgcagagccccctccgccccgggaccctcgcgcgcagctcaagttgggagccccgctccgcaggcgagcgcgcgcccaccacccacacccactgccactcatgcacaccgcgggtccggagatgcccccgagcgttttaaaatccagaaacatcacatggtagccacatccggcggctgttacctgctcgcagcacccagaccctcgccctggtttcccgggagcccgcaaacccggcacgcgggctgcgcgccctcccgcaagccaccgctcagcgccagcgcgccggcaagccgcctaccttaggggtctgcacttcaggtcccgtcggcacctccaacttcctcttggttacccagaagaacagcagcaccgtgatccagagcaccccgaagactggcagaaccagccgacgagtcaggcgccgcatggtcccctttgccgcttcctctccgcggcgctacgtcccgggggcaccccccggcggtcagggttggcggggcaggagtcctggcgagcgcctcgctctggggagctctagacccaggatccggttggaggggcggcaggatcctgcaaggcgcccttcccgcttcgaagagaagcgagcctgggtggggggtgcagggcgacccgaaacgtggcagggaaggaccgagggcagccaagctggacgcccgctccagcgggagaagcgcggtggctgccgagatgttccccacgccgccaccgcggctgccgccgccgccgccgccgccttgcccgctgccgccgatagggaaactgactcgagcagcgagagggaggaatccgaggctgtgccaagcaccccgggaggagcacgagggcggagggagtgagcggggagggcgggcccgacagacaggccgactcggagcgagcccaggtgggagtgagcggggctctgagagggggcgctaccgccgcccgccgaccgaaacgctcggtgctgttgcggggccgccagcgccaagccctgggcgcagctcccagaccatcgtgggttggggcaaggcggggcggggcgggagcggtgcactcgggatgcccgccacccccagctgccagctgggacccaagggccggccctcgccaggcggcgctgtgcctgggaggactttcccgctcatcgcgggggctgcacgtggcgctgaagccggggtcccacccccaatgtgctcgtcctaccacagccaaggctgggattccagggcgccggcagggctgctgc

SEQ ID NO: 221724 - DNA, 720 bp, Homo sapiens
  chr2:37899014-37899734
  hyper
ctccccagcgccaccccccagtaggcgacttctctcggagaagatgccgctttcgactccctaagcacaaagaaaggtcgccggacgctcggtttaaagagggacccggaggtgctgccgcccgggtgcacggggacaataggactccgcccgcaccccggactcccgcactaaaactcgtgcgcccacctctcccgatcccaacaggccgacctagctgtgcgagtggcgggcggtgacccgcagggaagcgaggccacctgagtgcgccgccccggccaggccgcagctccccaggtccctctcagcccgggctccggtgggcgcggagggggagggtcgcgttctgtcagtttctagctcgctcccctcagagctgcagccaaaacccggagagtggaataagcgccctgaagatgccggagctcccggctgagcaactggacacgcgacgaacagcagacgctacaggttctcctacccagagggaggcgtttcttctccctcagggtctttcaaaaggatttgcctaaagctggggcaagccggtggcggctgccccagacgcgcgacgaggcgcaagtggcgcagctgccggcccgagagagtaaaattcaggccgcggtggcacctgcgcccgccggtcacccggccaccgccagcgccgccgcccggcgcgcccctcccctccgccggggccggagcgtgaaccgggttaat

SEQ ID NO: 221725 - DNA, 48 bp, Homo sapiens
  chr2:38152927-38152975
  hyper
gctgggctctcgctcggctttcagccttgcgcaaacattttgtttttg

SEQ ID NO: 221726 - DNA, 227 bp, Homo sapiens
  chr2:39663571-39663798
  hyper
ataataactaccaccgaggcctggtgggcagcagctcccaacctagagcggacgaccccaggttggcgtgaagcaggcaggtttgacaacaccagacccctgctgtccggttcgtcgcgctgaccctgccaacgcaacaaacgcccagaccttctctgcactatggatgagcagtgtggcctgctctcgttctgcccttccctggaaatgcgcgcaagaagggaggt

SEQ ID NO: 221727 - DNA, 995 bp, Homo sapiens
  chr2:39893064-39894059
  hyper
tctggcggcggcgcgcgagcccaccggcggctgcggcggggcgggaagccatggagccgcgggcgctcgtcacggcgctcagcctcggcctcagcctgtgctccctggggctgctcgtcacggccatcttcaccgaccactggtacgagaccgacccccggcgccacaaggagagctgcgagcgcagccgcgcgggcgccgaccccccggaccagaagaaccgcctgatgccgctgtcgcacctgccgctgcgggactcgcccccgctggggcgccggctgctcccgggcggcccggggcgcgccgaccccgagtcctggcgctcgctcctggggctcggcgggctggacgccgagtgcggccggcccctcttcgccacctactcgggcctctggaggaagtgctacttcctgggcatcgaccgggacatcgacaccctcatcctgaaaggtgagcggcgggcgcaccccgcgtccccggcgcccgcgcgtggagcgcagcccgcggcttcccaggggcgcgccggtccccgcagccccctcccagccgcggccccgcgcctgggcattcttgcatccttcccgccgcctccagtctttatctcttccctttctttccccactgcctcccttcttctccctctccttgactctcttctttcgtccacatcctgcgcgtcctttcaagtccgtgccgcacctcccgcctctgtctccttctttcctgccttcgcctcccattccccggttctctctctctccccgtccttctctgcctttgtacacctgcctgacatgtgtgtcttttcttgacgctgctccccgtgagggggactaaccgtcaaagactcgacttttctcacccgggctccttccttcaagttgtgctccttttggaaataccgtttggaagaaaagtggtgccgacctccgaagagagggaaggggctttgcctgtattgtgcggatgctggtgtcagacggaactgatgtggt

SEQ ID NO: 221728 - DNA, 573 bp, Homo sapiens
  chr2:40679145-40679718
  hyper
gctcccatcttctgtgggaagcacaaagcaggcggcggcggcgggctgactaccgtgcagcgccggcgcgagcgggagccgcggcagcgggcagcggtgcgcgcgggcgggaggcaggcgcggaggccgggaggctgggagggccggggcccgggcgcgcgcgcgctccccctccctcccgcgcacactcgcccgcccgccgcccgcagcctcgcactcgctcacacgcgcgctcggccccgcggctgccgggcgccccggggccccctgcgcgccccttgggctccccaggcgatcgcgtcggggcaaagccggcgcgtttctggagcaccgagcgggtggggagcccttccagcctcccagcctctgccggcgagcagctttttcgatttcctgccggctctcggccccgcagtgcgttgtggccgcgcgctagcgctgtctctcgcacccagcccatcgatgacacgcgcacacaggcgctgcaacttttcttttgaaccctcttcttctcttccgcagacagaaccctgacccccaattcgcctacccgtttctcacctctgactttgt

SEQ ID NO: 221729 - DNA, 240 bp, Homo sapiens
  chr2:42274761-42275001
  hyper
gttatccacctcccaatcccgttatccggccgccccggccccgttatccgccctcgcgttgggcgcggagcccccgcgcgcctcctggccgccgccgccccctcccccgctcccagacggagctcgggggaccgcgggctgggcgggaccgcgggctgggcaggaccggagccgcctccgcgccgcttcccaggcccggacggccgcgggaggaggtcccgctgtcagtcagcggggaag

SEQ ID NO: 221730 - DNA, 240 bp, Homo sapiens
  chr2:42275215-42275455
  hyper
ggccatgcgcgcgggctgggcagggggccggcggggcgcagagcggagccgcctcggagcctgagccgcccggggccggggccggggagccgcgcggggccggccggccggggggaggggagcgatgcggcgccggcgggcggcagtggccgcgggtttctgcgcctccttcctgctgggctccgtcctcaacgtgctcttcgctccgggctcggagcctccgaggccaggccagtcccc

SEQ ID NO: 221731 - DNA, 162 bp, Homo sapiens
  chr2:42396181-42396343
  hyper
gggccacatagggagaggatccttcatgcatcagagtatcgcaggccagagtctatgccttatccccacctgtttggaaccagcttccaaaccgtggtccccagccttcagcaggcctaccgcgcaggcgcaaccaccagcctggcgcgaggcggacaaacg

SEQ ID NO: 221732 - DNA, 720 bp, Homo sapiens
  chr2:42720571-42721291
  hyper
gggacagcgaataccgggcgccgcccacgttcagcaccaccgaggccgccccgctgcgcccgaaggtcatggctggccgcccgggggactttcggcccgagggccccgctgcagccccccaccccaagccgccacgcggggcctgcctgcccgtggctgacgggggagcgcgccgtcggggcccgcgctccctcggggctccgctcctgccctccgctggcccgggggtccctgggctcgagtatctccggcgctgctagtagcgcgccctccgcccggcggtacctgcgggtggccggggagtcctcgccggcgccagcgctgagccccaccggctgggaacgcggctgtgtccgcgccgccgaccctcgcgcccgagggctgcgcacaccgaggccgcggtgccctctcccaagccgcggggccgaccccctgagggctgcgggcgccgaatggagccgccggggcggaatagctccccgtctccggcgctccctgcggccgcgaatccggcggccgccccgccgccgtccagaggcgagaggcaaagtgagcgggttcggaggcggcgaagagccggctcgcggcggcgggggcggggcctctgtgcagtcctcctcctcgcccgccggctccgcgcgcgccgctcacctccctccgcgccgccctccgcttcccgcccgcgcccgcacctccccggcttgctcgggctgggattcc

SEQ ID NO: 221733 - DNA, 900 bp, Homo sapiens
  chr2:43451684-43452584
  hyper
cggcggggagggtcgcgctgggcggcgccggcggctgcgcggggggcgccaggccctgctgctgctgctgctgctgactgcggtagtaggcggcggcggccacggcggcaaagttgtgggtctggatggcgagcggcgtgatgaggctgctgagctccggaccgaaggcgaaggcgttgttggcgcacgaggccgacgagcaggccgcgcacggggcccccggcgccagcaggtcctcggcgcccccggtgccgtacagcagagcggccgcagccgcggccgccgcggaggcgcagcatgtcggggcgcccgagggcgtggaggccgcggaggccgaggaacaggaggaggcggaggaggagcaggacgaggccgaagagcaggagggcggcggcggcgtgcgcgacgtggggctgtcgagcagcagcggcgactcgaggccgcccgggggctgatggtggcccgacgggaagcccgagaagctgaggctgtggtgcaacttgggccgcggctcccgcgggaagcccaggtgcaacgcatcgcgcgtgccaaaggcacgcaggtccccggaggcgccccccgacggcgcgggccgccgctcgtccgcgttgtggatgaagtggcagcgcggcccataggggcagaagccgatggtatgaaaggtgcggcacagctcggtcttgtacttcggatggcgagtcaggctgcgcagctcgtggaagccatgcgcgaactggcacttttcgccgtacttgcacgtgccgctctcctcgaagggccggcacagctcggtcttgtagcgcgtggagttgatctgggagccgccgccccccttctgctgctgctgcaggtgcaggaggtgctggctgcgatcgccgttctcgctaaacgagcggtccc

SEQ ID NO: 221734 - DNA, 354 bp, Homo sapiens
  chr2:45029730-45030084
  hyper
ctcagccgcggtggcggggcccgcgcggtccctccgcagactcgcgggccgggggaggccctgctgcggcgccgcggcgtaccaagggttaagcggcgcggctcgcggccctcccggctcccctcccctgcgtgttgattttcaggcccaccgagccgcccgagaaagttttcaattcgatggggctgcagcgtctcaggggctgagctccttagaaagcttcgggggcccccgagggccgccttgcggggagggggcggctgccccgtccgggacccgctaattacagggattcggtttccccgctctgaaggaatgcattacctgcagcaaaggaggcgcggcctctcagga

SEQ ID NO: 221735 - DNA, 180 bp, Homo sapiens
  chr2:45231905-45232085
  hyper
actgcaaccaccgccaaggagtacgcgcggcaggaaacttctgcggcccaatttcttccccagctttggcatctccgaaggcacgtacccgccctcggcacaagctctctcgtcttccacttcgacctcgaggtggagaaagaggctggcaagggctgtgcgcgtcgctggtgtggggag

SEQ ID NO: 221736 - DNA, 420 bp, Homo sapiens
  chr2:45232136-45232556
  hyper
aagggagggagctgtttcaggaatttcagtgccttcacctagcgactgacacaagtcgtgtgtataggaaggcgtctggctgtttcgggactcaccagagagcatcgccaaccagaacggcccacccggggtgtcgagtcttggtagggaaatcagacacagctgcactcccggcccgcgggccttgtggcatataaccatttatatatttatgatttctaattttattataaaataaaagcagaaatatttcccgaagaacattcacatgagggcattacggggagacggcaagtcggcggctcggggggcgcgctcagccgggagcgctgtagtcacagtcccgggaggaagagcgcggtgtggcggggcctcgccaagagagaaggaggaggggcgtatgacgaggcggcgtttagg

SEQ ID NO: 221737 - DNA, 420 bp, Homo sapiens
  chr2:45240425-45240845
  hyper
tccggcctggatggaggctctccgccctctcccagctccgagcgccccagccgacatgggcctggcgcgttccccagacagtcccggagttctctgggcctgggcgacgtgtttcgttgaaagcgggcaggtggtgccgggcggggctgcgctgaggctccggtgcctccccacctgcccctcgtacctgccggtctgtcgggtcccggcggacgcaaccagctactcgcaaaccctgcaccagcggttttccgtgttgtcctaagaggggcaggtcagggcgaggccagtcggctcacacgaattctctgtgtcggagaacacgccccgcgacgttccgagcccgggcaaggttgagaggcgctgggctccgggcggtcgcactcttggaaccgcgcgaaccgcggcgtcgcccgcgcc

SEQ ID NO: 221738 - DNA, 559 bp, Homo sapiens; identical to SEQ ID NO: 198187
  chr2:46524134-46524693
  hyper

SEQ ID NO: 221739 - DNA, 240 bp, Homo sapiens
  chr2:46524986-46525226
  hyper
gccccccacccgccagggagcccaggtgctcggcgtctgaacgtctcaaagggccacagcgacaatgacagctgacaaggagaagaaaaggtaagcgggcgtccgggccgatcagggggccggtccgaggccagggccgggctgcgcggggcaggcgcgaccgagagtggttgggagaagagtgctgagaggtcttcggagctcgaggctcggtttggagggctgtgagggggagagcat

SEQ ID NO: 221740 - DNA, 323 bp, Homo sapiens
  chr2:46770636-46770959
  hyper
atattcgaggggaccgagcgagacgtggctacgggacttgggagaagggggtggacggctggggaccacatcacaccccggccctttgccggttcacagtgagctggccgcacgggaaaagggggtgacatctcgcggggagcgcccccacgcctctagctgggttgggagaggagggtccgggtggggagcgaaattgccccagagcccaggtcactgtgagcttctctccccgcccccacttctgtccttgcagtcagcgtcaccgtggggggcaagcagtacctcctaggactctatgacacggccggacaggtgagtgt

SEQ ID NO: 221741 - DNA, 81 bp, Homo sapiens; identical to SEQ ID NO: 198192
  chr2:47167906-47167987
  hyper

SEQ ID NO: 221742 - DNA, 806 bp, Homo sapiens
  chr2:47596176-47596982
  hyper
aacctcctcggaggccaccaaagatccctaacgccgccatggagacgaagcacctggggcggggcggagcggggcgcgcgggcccacacctgtggagagggccgcgccccaactgcagcgccggggctgggggaggggagcctactcactcccccaactcccgggcggtgactcatcaacgagcaccagcggccagaggtgagcagtcccgggaaggggccgagaggcggggccgccaggtcgggcaggtgtgcgctccgccccgccgcgcgcacagagcgctagtccttcggcgagcgagcaccttcgacgcggtccggggaccccctcgtcgctgtcctcccgacgcggacccgcgtgccccaggcctcgcgctgcccggccggctcctcgtgtcccactcccggcgcacgccctcccgcgagtcccgggcccctcccgcgcccctcttctcggcgcgcgcgcagcatggcgcccccgcaggtcctcgcgttcgggcttctgcttgccgcggcgacggcgacttttgccgcagctcaggaaggtgaggcgcggattggagcagagttgtggagctgggctgggctggggggcagcggcccccggccctcggcccccgaaacgggcataatagggaggggaccaagaggccgcgctttccagcgtggagaccggacggtgcggccgtgctccggctcaggccctccgcgcggtaggaaacggcgagggccgtcccggggagcagcctcacttcgcagctttgctcgccttggtagggaaatggccttgggcggaggcgggggaca

SEQ ID NO: 221743 - DNA, 438 bp, Homo sapiens
  chr2:47630103-47630541
  hyper
atgcgcagtagctaaagtcaccagcgtgcgcgggaagctgggccgcgtctgcttatgattggttgccgcggcagactcccacccaccgaaacgcagccctggaagctgattgggtgtggtcgccgtggccggacgccgctcgggggacgtgggaggggaggcgggaaacagcttagtgggtgtggggtcgcgcattttcttcaaccaggaggtgaggaggtttcgacatggcggtgcagccgaaggagacgctgcagttggagagcgcggccgaggtcggcttcgtgcgcttctttcagggcatgccggagaagccgaccaccacagtgcgccttttcgaccggggcgacttctatacggcgcacggcgaggacgcgctgctggccgcccgggaggtgttcaagacccagggggtgatcaagtacatggggccggcag

SEQ ID NO: 221744 - DNA, 155 bp, Homo sapiens
  chr2:47635539-47635694
  hyper
gagcaaagaatctgcagagtgttgtgcttagtaaaatgaattttgaatcttttgtaaaagatcttcttctggttcgtcagtatagagttgaagtttataagaatagagctggaaataaggcatccaaggagaatgattggtatttggcatataag

SEQ ID NO: 221745 - DNA, 279 bp, Homo sapiens
  chr2:47637232-47637511
  hyper
gcttctcctggcaatctctctcagtttgaagacattctctttggtaacaatgatatgtcagcttccattggtgttgtgggtgttaaaatgtccgcagttgatggccagagacaggttggagttgggtatgtggattccatacagaggaaactaggactgtgtgaattccctgataatgatcagttctccaatcttgaggctctcctcatccagattggaccaaaggaatgtgttttacccggaggagagactgctggagacatggggaaactgagacag

SEQ ID NO: 221746 - DNA, 147 bp, Homo sapiens
  chr2:47639552-47639699
  hyper
ataattcaaagaggaggaattctgatcacagaaagaaaaaaagctgacttttccacaaaagacatttatcaggacctcaaccggttgttgaaaggcaaaaagggagagcagatgaatagtgctgtattgccagaaatggagaatcag

SEQ ID NO: 221747 - DNA, 150 bp, Homo sapiens
  chr2:47641407-47641557
  hyper
gttgcagtttcatcactgtctgcggtaatcaagtttttagaactcttatcagatgattccaactttggacagtttgaactgactacttttgacttcagccagtatatgaaattggatattgcagcagtcagagcccttaacctttttcag

SEQ ID NO: 221748 - DNA, 134 bp, Homo sapiens
  chr2:47643434-47643568
  hyper
ggttctgttgaagataccactggctctcagtctctggctgccttgctgaataagtgtaaaacccctcaaggacaaagacttgttaaccagtggattaagcagcctctcatggataagaacagaatagaggagag

SEQ ID NO: 221749 - DNA, 200 bp, Homo sapiens
  chr2:47656880-47657080
  hyper
attgaatttagtggaagcttttgtagaagatgcagaattgaggcagactttacaagaagatttacttcgtcgattcccagatcttaaccgacttgccaagaagtttcaaagacaagcagcaaacttacaagattgttaccgactctatcagggtataaatcaactacctaatgttatacaggctctggaaaaacatgaag

SEQ ID NO: 221750 - DNA, 110 bp, Homo sapiens
  chr2:47672686-47672796
  hyper
gaaaacaccagaaattattgttggcagtttttgtgactcctcttactgatcttcgttctgacttctccaagtttcaggaaatgatagaaacaactttagatatggatcag

SEQ ID NO: 221751 - DNA, 124 bp, Homo sapiens
  chr2:47690169-47690293
  hyper
gtggaaaaccatgaattccttgtaaaaccttcatttgatcctaatctcagtgaattaagagaaataatgaatgacttggaaaagaagatgcagtcaacattaataagtgcagccagagatcttg

SEQ ID NO: 221752 - DNA, 151 bp, Homo sapiens
  chr2:47693796-47693947
  hyper
gcttggaccctggcaaacagattaaactggattccagtgcacagtttggatattactttcgtgtaacctgtaaggaagaaaaagtccttcgtaacaataaaaactttagtactgtagatatccagaagaatggtgttaaatttaccaacag

SEQ ID NO: 221753 - DNA, 98 bp, Homo sapiens
  chr2:47698103-47698201
  hyper
caaattgacttctttaaatgaagagtataccaaaaataaaacagaatatgaagaagcccaggatgccattgttaaagaaattgtcaatatttcttcag

SEQ ID NO: 221754 - DNA, 246 bp, Homo sapiens
  chr2:47702163-47702409
  hyper
gctatgtagaaccaatgcagacactcaatgatgtgttagctcagctagatgctgttgtcagctttgctcacgtgtcaaatggagcacctgttccatatgtacgaccagccattttggagaaaggacaaggaagaattatattaaaagcatccaggcatgcttgtgttgaagttcaagatgaaattgcatttattcctaatgacgtatactttgaaaaagataaacagatgttccacatcattactg

SEQ ID NO: 221755 - DNA, 205 bp, Homo sapiens
  chr2:47703505-47703710
  hyper
gccccaatatgggaggtaaatcaacatatattcgacaaactggggtgatagtactcatggcccaaattgggtgttttgtgccatgtgagtcagcagaagtgtccattgtggactgcatcttagcccgagtaggggctggtgacagtcaattgaaaggagtctccacgttcatggctgaaatgttggaaactgcttctatcctcag

SEQ ID NO: 221756 - DNA, 248 bp, Homo sapiens
  chr2:47705410-47705658
  hyper
gtctgcaaccaaagattcattaataatcatagatgaattgggaagaggaacttctacctacgatggatttgggttagcatgggctatatcagaatacattgcaacaaagattggtgctttttgcatgtttgcaacccattttcatgaacttactgccttggccaatcagataccaactgttaataatctacatgtcacagcactcaccactgaagagaccttaactatgctttatcaggtgaagaaag

SEQ ID NO: 221757 - DNA, 176 bp, Homo sapiens
  chr2:47707834-47708010
  hyper
gtgtctgtgatcaaagttttgggattcatgttgcagagcttgctaatttccctaagcatgtaatagagtgtgctaaacagaaagccctggaacttgaggagtttcagtatattggagaatcgcaaggatatgatatcatggaaccagcagcaaagaagtgctatctggaaagagag

SEQ ID NO: 221758 - DNA, 450 bp, Homo sapiens
  chr2:47709917-47710367
  hyper
caaggtgaaaaaattattcaggagttcctgtccaaggtgaaacaaatgccctttactgaaatgtcagaagaaaacatcacaataaagttaaaacagctaaaagctgaagtaatagcaaagaataatagctttgtaaatgaaatcatttcacgaataaaagttactacgtgaaaaatcccagtaatggaatgaaggtaatattgataagctattgtctgtaatagttttatattgttttatattaaccctttttccatagtgttaactgtcagtgcccatgggctatcaacttaataagatatttagtaatattttactttgaggacattttcaaagatttttattttgaaaaatgagagctgtaactgaggactgtttgcaattgacataggcaataataagtgatgtgctgaattttataaataaaatcatgtagtttgtggaatttga

SEQ ID NO: 221759 - DNA, 735 bp, Homo sapiens
  chr2:47748015-47748750
  hyper
gagggtccccggcgcgggcggacgggcggtctacctggaggcgctggtctcggccagccggttgttcatgatgcccagcgcgcccacgccgcccgagaagccgttctggcgcgtgttgacgcacacgctgcgcgggtagccgttggccgtctccgacagctgcttctgcagcagcgccagcgacaccttgttggaggccgtgaggtcgcgcatggagatgagctcgcccgagaggcggcggccctcggcgtcgctgtcgcgggccgcggggtcggcaccgagcgcggccaggcggcggcgcagccgggagcctggggtgatggcattgcgccgggccaggggcgcgccaggagccgggcagcagcgcgcgcagcagcggcagctcagcttgcgcagcatccagttgagcacctgcttgatgaggatggagatgacgttgaagagcgagtaaatgcagcacacgccgagcaggatgaagaggaagttgcccaggcggtagagcccctggttccggtaggcggcgtgctggctgctcaccaggtccccgaagccgatggtgctgaaggtgacgaagcagaagtagagcgagtccacgtagtcccagccctccacgctggtgtacatggccgaggcgcagcaggacagcagcacggcgaacaggcccaggatgagcagcacgtggtacaccgagggcttccagcccgccaggctgtcggcctccgagagcgcggagcc

SEQ ID NO: 221760 - DNA, 2266 bp, Homo sapiens
  chr2:47796745-47799011
  hyper
ggtggaaaacaggaaggaaccggtagcccttggcacgtattcttagaggagaaaacggaggctcacaaaggtcagatcacagagccggccagtgttggagcacaggcggcccggggtgagcgccagaggtgggctttcttccctcactgaaagccgggagggagagagagagagagaacgggggccggcggagaagagggcgagacgaaagtaagcaaagggacattagaagggaaggcagagccgagggacgcggaccgagcggccgagcagtggaaagggcggcaggtgaaaggcacagagaggaaagatgcgcgggggacgcgccgctcacctatggttgacaccacggtgcccacgaagtagaaggcgccggggaagtcccagcgcgggcgcagcgcgtcggcgcggacgccggcggccagcgcggcctcgtagtgccggaggaaggcgcgcagctctggctcggccacgccgtgcgcagcgctgaagttgcgcagcgtggcgccccagcgcgcccgcgcctccgcctcgccggggctctcgagcgccgagaagactgtggcacccgccaccaggtagaggccgatgagcgccgccagcagcacgaagcggccggtgtcctcgttgaggtgcgaacggcggcagcagcagcagcagcaggaggggcgcggcaggcggcggcggctacggcggggcgggggccgggggctgcgggaggacatggtccggagctcagccccggggccggggcggcgctcggggcccgggccacgacatccccccggcgggagcaggagcgtgaggatggtggccaggggtccggggccgccgcggagcccctcgccgccttcgcagagcccctcgtcgccttcccagagcccggacagaggggcgcctccgcctcctccccggcgctcaggccacacgcgagtcccgtggcccagcgggtgcccgggcaggggcgctcctctgcgcgccccgacgcctcgccggctcccgcggctccttacccgccgctctcgggcgcggggctccgcagctaggcccctgccgcccggtggccggcgtccgcggggccccgggcctcatactcctctccagacaggccgcgggctgcgggcggggtgggccgtggatcccgggcgcctaggaccgggacgcggcagcaaggcgtggagagagcccccgggggcgtcccatgaggcgttcgggatcggcgcctcctaggtgcgggctgtgcgggcagtcctgctcccgcccccggggctgagctggcggcgtcggcttcagagcctcggagccgagccgagtccggggaagcgctcctttctcagctccagccgaagagccgcccggcagggagaggcggagtcactggcgcccggggcggggtgttggggaggggtgagtagggacaggagggagggggtggagagttgggctgctgcgacgcctcccggtggctctggcggcaccaatgcggggcaccggagcaggtgtccgactgcggtgcgggctaccactccgccggggaacctcgtcttgctcctccctgcgcttcgcctctggaatctctcccttatctcatgccgcggtgaaactttgctcaagttggtggtgctctgaggtctccagggctggaggccgcgcgacgcgaatcgccgacactggattctcgggcgttagtccgaagtttaagttcccttcgttcactcctttgccctggatcgaaccgcagccccaggacgcagcgggttccactggaaacggggaatcggggagaggcggtcgctgggctccgggcgacctgggaacgagggcgtttgctccccctcccgaccgagcgggcggccggcgtcagcaccgcggacagcgcatcggtgccgcagccgcgggcgggcgccgctagggctgccaggggtccgaggcgcgggcaaggctgctcaccccgctgtgctgtgcaccccaaaccttccctgttttcctttctacctcccgtgtgcacccccctacccgccacccgaggcaggtgcggtcgctgaagcaggctgctgacagggcggggacgctgcggaatagagacgggggaggagtcaagcgcgggtagggggccaaggtgccacagggagaaagagcccaggcccggcggactgccgggctcctcgcgccaccccagctcaccgacccctctagcccggggcggggaataacaccctgggtgcggtagagagtagaggaatagaggaggtgtaggggaagctca

SEQ ID NO: 221761 - DNA, 412 bp, Homo sapiens
  chr2:48010220-48010632
  hyper
ggcgaggcgcctgttgattggccactggggcccgggttcctccggcggagcgcgcctccccccagatttcccgccagcaggagccgcgcggtagatgcggtgcttttaggagctccgtccgacagaacggttgggccttgccggctgtcggtatgtcgcgacagagcaccctgtacagcttcttccccaagtctccggcgctgagtgatgccaacaaggcctcggccagggcctcacgcgaaggcggccgtgccgccgctgcccccggggcctctccttccccaggcggggatgcggcctggagcgaggctgggcctgggcccaggcccttggcgcgctccgcgtcaccgcccaaggcgaagaacctcaacggagggctgcggagatcggtagcgcctgctgcccccaccag

SEQ ID NO: 221762 - DNA, 197 bp, Homo sapiens
  chr2:48018065-48018262
  hyper
ttgtgacttctcaccaggagatttggtttgggccaagatggagggttacccctggtggccttgtctggtttacaaccacccctttgatggaacattcatccgcgagaaagggaaatcagtccgtgttcatgtacagttttttgatgacagcccaacaaggggctgggttagcaaaaggcttttaaagccatatacag

SEQ ID NO: 221763 - DNA, 170 bp, Homo sapiens
  chr2:48023032-48023202
  hyper
gttcaaaatcaaaggaagcccagaagggaggtcatttttacagtgcaaagcctgaaatactgagagcaatgcaacgtgcagatgaagccttaaataaagacaagattaagaggcttgaattggcagtttgtgatgagccctcagagccagaagaggaagaagagatggag

SEQ ID NO: 221764 - DNA, 2545 bp, Homo sapiens
  chr2:48025749-48028294
  hyper
gtaggcacaacttacgtaacagataagagtgaagaagataatgaaattgagagtgaagaggaagtacagcctaagacacaaggatctaggcgaagtagccgccaaataaaaaaacgaagggtcatatcagattctgagagtgacattggtggctctgatgtggaatttaagccagacactaaggaggaaggaagcagtgatgaaataagcagtggagtgggggatagtgagagtgaaggcctgaacagccctgtcaaagttgctcgaaagcggaagagaatggtgactggaaatggctctcttaaaaggaaaagctctaggaaggaaacgccctcagccaccaaacaagcaactagcatttcatcagaaaccaagaatactttgagagctttctctgcccctcaaaattctgaatcccaagcccacgttagtggaggtggtgatgacagtagtcgccctactgtttggtatcatgaaactttagaatggcttaaggaggaaaagagaagagatgagcacaggaggaggcctgatcaccccgattttgatgcatctacactctatgtgcctgaggatttcctcaattcttgtactcctgggatgaggaagtggtggcagattaagtctcagaactttgatcttgtcatctgttacaaggtggggaaattttatgagctgtaccacatggatgctcttattggagtcagtgaactggggctggtattcatgaaaggcaactgggcccattctggctttcctgaaattgcatttggccgttattcagattccctggtgcagaagggctataaagtagcacgagtggaacagactgagactccagaaatgatggaggcacgatgtagaaagatggcacatatatccaagtatgatagagtggtgaggagggagatctgtaggatcattaccaagggtacacagacttacagtgtgctggaaggtgatccctctgagaactacagtaagtatcttcttagcctcaaagaaaaagaggaagattcttctggccatactcgtgcatatggtgtgtgctttgttgatacttcactgggaaagtttttcataggtcagttttcagatgatcgccattgttcgagatttaggactctagtggcacactatcccccagtacaagttttatttgaaaaaggaaatctctcaaaggaaactaaaacaattctaaagagttcattgtcctgttctcttcaggaaggtctgatacccggctcccagttttgggatgcatccaaaactttgagaactctccttgaggaagaatattttagggaaaagctaagtgatggcattggggtgatgttaccccaggtgcttaaaggtatgacttcagagtctgattccattgggttgacaccaggagagaaaagtgaattggccctctctgctctaggtggttgtgtcttctacctcaaaaaatgccttattgatcaggagcttttatcaatggctaattttgaagaatatattcccttggattctgacacagtcagcactacaagatctggtgctatcttcaccaaagcctatcaacgaatggtgctagatgcagtgacattaaacaacttggagatttttctgaatggaacaaatggttctactgaaggaaccctactagagagggttgatacttgccatactccttttggtaagcggctcctaaagcaatggctttgtgccccactctgtaaccattatgctattaatgatcgtctagatgccatagaagacctcatggttgtgcctgacaaaatctccgaagttgtagagcttctaaagaagcttccagatcttgagaggctactcagtaaaattcataatgttgggtctcccctgaagagtcagaaccacccagacagcagggctataatgtatgaagaaactacatacagcaagaagaagattattgattttctttctgctctggaaggattcaaagtaatgtgtaaaattatagggatcatggaagaagttgctgatggttttaagtctaaaatccttaagcaggtcatctctctgcagacaaaaaatcctgaaggtcgttttcctgatttgactgtagaattgaaccgatgggatacagcctttgaccatgaaaaggctcgaaagactggacttattactcccaaagcaggctttgactctgattatgaccaagctcttgctgacataagagaaaatgaacagagcctcctggaatacctagagaaacagcgcaacagaattggctgtaggaccatagtctattgggggattggtaggaaccgttaccagctggaaattcctgagaatttcaccactcgcaatttgccagaagaatacgagttgaaatctaccaagaagggctgtaaacgatactggaccaaaactattgaaaagaagttggctaatctcataaatgctgaagaacggagggatgtatcattgaaggactgcatgcggcgactgttctataactttgataaaaattacaaggactggcagtctgctgtagagtgtatcgcagtgttgg

SEQ ID NO: 221765 - DNA, 266 bp, Homo sapiens
  chr2:48030558-48030824
  hyper
atgttttactgtgcctggctaactatagtcgagggggtgatggtcctatgtgtcgcccagtaattctgttgccggaagataccccccccttcttagagcttaaaggatcacgccatccttgcattacgaagactttttttggagatgattttattcctaatgacattctaataggctgtgaggaagaggagcaggaaaatggcaaagcctattgtgtgcttgttactggaccaaatatggggggcaagtctacgcttatgagacag

SEQ ID NO: 221766 - DNA, 118 bp, Homo sapiens
  chr2:48032048-48032166
  hyper
gctggcttattagctgtaatggcccagatgggttgttacgtccctgctgaagtgtgcaggctcacaccaattgatagagtgtttactagacttggtgcctcagacagaataatgtcag

SEQ ID NO: 221767 - DNA, 90 bp, Homo sapiens
  chr2:48032756-48032846
  hyper
gtgaaagtacattttttgttgaattaagtgaaactgccagcatactcatgcatgcaacagcacattctctggtgcttgtggatgaattag

SEQ ID NO: 221768 - DNA, 750 bp, Homo sapiens
  chr2:48033342-48034092
  hyper
gaagaggtactgcaacatttgatgggacggcaatagcaaatgcagttgttaaagaacttgctgagactataaaatgtcgtacattattttcaactcactaccattcattagtagaagattattctcaaaatgttgctgtgcgcctaggacatatggtatgtgcaaattgtttttttccacaaattcggttttttgagagggcacttctcttgctagcacatgtatcgctaatatttttctttcttaaggcatgcatggtagaaaatgaatgtgaagaccccagccaggagactattacgttcctctataaattcattaagggagcttgtcctaaaagctatggctttaatgcagcaaggcttgctaatctcccagaggaagttattcaaaagggacatagaaaagcaagagaatttgagaagatgaatcagtcactacgattatttcggtaactaactaactataatggaattataactaactgaccttaagtttcaaagaaacagtaaaaggggaagggatgatgcactatgaaaaaacaaaaaaacttttttttttttttttttaattttaagggaagtttgcctggctagtgaaaggtcaactgtagatgctgaagctgtccataaattgctgactttgattaaggaattatagactgactacattggaagctttgagttgacttctgacaaaggtggtaaattcagacaacattatgatctaataaactttattttttaaaaatga

SEQ ID NO: 221769 - DNA, 140 bp, Homo sapiens
  chr2:54683032-54683172
  hyper
ccctattgtcctgctcgggtagcggcagcagcagtgcccaccccgccccggccagcctggtcggtccccgccgctgggaggatgaggtccgggctggacccgggaagagcctcagctggagaggacgtggacgcgcccga

SEQ ID NO: 221770 - DNA, 209 bp, Homo sapiens
  chr2:55646327-55646536
  hyper
aaaaatcccatcgtggaggaggggggcactctccctcctcaaaaaacaccccagagtgaaacgagccgaaatcccaagaagtggcttcgacgacggacaccacgagcagcagcctgcgctggaaatgtctgtaccgggcgaggaggggcagagaaaaggcatctggaggaggaggaagggaaagggggctggaacccaagacaaaaagc

SEQ ID NO: 221771 - DNA, 180 bp, Homo sapiens
  chr2:58655408-58655588
  hyper
gcgcgaggggggaaggggagagaagggagagggagcgcctgggactcgagacggcggcaggttcaattagctaaacaaagaaatcatggcggattgtttacatttggcagcgcccgggctgcgccgaccgccggccccgagccgccgcgggctccgaggagtcggccgagctgctcccgc

SEQ ID NO: 221772 - DNA, 231 bp, Homo sapiens
  chr2:58655901-58656132
  hyper
ttgcctcttggggtcaggacctccccgcctgggccagcccagcggacggccccggtgcgcgctcgccttgcgccaccgcctccgggacccaggcggagcgcgccactcagcccgggaggtggggccgggcagtgaccccgcgcgaagtgccagtgcggagggcgggggtggttaccgaaagatgtaatcccaggaggggccgccgccttcgctgtcccctacctgtaccct

SEQ ID NO: 221773 - DNA, 101 bp, Homo sapiens; identical to SEQ ID NO: 198220
  chr2:58776940-58777041
  hyper

SEQ ID NO: 221774 - DNA, 300 bp, Homo sapiens
  chr2:60784483-60784783
  hyper
tgatctccgtacttaatagccaagtcctagtttatgctttataatgtgttgacaagttttctaacagactttctgaaataatgcacatatattcacgtcggttagaaacccaccgtatttttagagttgagtagatctataccctaatgcagtgagagagtgtaaatcatacaggatttcatagtcctttcagtagttttcggtatgaagtatgagccgcgtggcctccagacgtaaccttttagaaaaaaaaaaagacagtgcttttattttatggtgtaaagtgcttttagctcaagg

SEQ ID NO: 221775 - DNA, 319 bp, Homo sapiens
  chr2:61175661-61175980
  hyper
gagtttgcgtgttttagggagaaccacatacctactgtcaggggtgggttgttttggtttttttttggtgaaggaaaagggttatacaaaaggatatgtctggaaaagttatgaatacatcttgtttagggtgacatttcaatataataattacaaatcgatgtgcataataaaccgggacctttcaatgtttgttagcccagcttgcaactaataataccgcatgtctttttacatttcagattttttagggacacaggcttgtttttctcacaattcgttagagattttcttttatgtcacaagataaaaattaaga

SEQ ID NO: 221776 - DNA, 95 bp, Homo sapiens
  chr2:61921788-61921883
  hyper
gaagaggaagtggccgtacaggccgaagccttgtggagcctcagtgcggggcttggccaggtcctagggggcgtggcctcggaggcgaaagcgca

SEQ ID NO: 221777 - DNA, 342 bp, Homo sapiens
  chr2:61990960-61991302
  hyper
ggcgaagacagggctcgctgacgcccccggtcgcccgcgcctcttcccacagctctccgaggagcccagctaccggaaacacgccacatcaggcctcggaattctgggcatcggacggacagctcgtgacctcagaaggaggaaaacggtcaccttctgaaagaaacacgaactcctctttcctgtatcagaacatttctcattcacctgagcgcggcgtttctatcctgagatgttgggaggaggttcgaggtgggcggggtgacggttttctcttggaaatgaaaaacagcctttcctgctacccctgcccgctcacacaggcgagacttggagtctgcc

SEQ ID NO: 221778 - DNA, 240 bp, Homo sapiens
  chr2:61991468-61991708
  hyper
cgatgggcgggacggggcagaagtgtgggcgagctggggcgtcaccgcgcgccgggtagtctctctcacgccctggcgggtgcgcaggtctctaaactgggcggagcaagggaagtgatgtgtggcctccggaaggacgcgcgtaaatcctcacccataagtaacgagtcgccgtggtcaaacaaggccctcctacgataccaatcgcgtggcgggtgtggtactgccgaacccgaggaa

SEQ ID NO: 221779 - DNA, 582 bp, Homo sapiens
  chr2:64836250-64836832
  hyper
cggccgtccctcctcgcgcctctgccccgggggacgcacgaggaccagaaagccgagggggcgcagggcctgctctggccgccgggcccgggatgccaggatgcggggggccggggctgccggtgctcttgggggcagggggaagctccgctccctctacagaggacaaccgccccgccgccccggcagcctccgaggcgccctctccgcgcttcactctcggccgctcccccggagccacgcgagccggtcgtggcggctggacccgagcctgggagcctgcaggcggccgcgccgcgctgcgctgccgaaccgcccggagccgcaggtccgccgcccgcccgctcgggggcgccccagcttccggcctccggcggcttccgcgtcgcgctcccaaggcccggcggccgcgccaggtcccctcggcgccccccgtcccctctgccgggcgctcgcccccgcctccaccctgggatctgagcccgggccgtctccccgcggcgccgcgcctgacggtcactctctctgacctcctgggcccagtcctggggccaagagccgcatccccggggaccttggtag

SEQ ID NO: 221780 - DNA, 142 bp, Homo sapiens
  chr2:64872367-64872509
  hyper
gccggcgcctcctccgggctctcccgctgcgcaccggccgcgcgggggcccgcagggcaacgcagcctaggctgtttgtgcaagatgagaccctgcatttgacgaagacctgcaggagcaatcctcccggctttcttgacag

SEQ ID NO: 221781 - DNA, 357 bp, Homo sapiens
  chr2:65086836-65087193
  hyper
gaggccgccgtctgcgactgcccgggcgccctggggcggcagcctggcctcctgggctcgaggcagggggcagaggtgtcccggcggggccggggccgggacacgaagagggaggcgagcaggggctaggaactggagccggtttgtgctcgcgcgcctgcaggccctttgcctcgggcacccccgctccagcccagcgggggcggcgccgagaggggcccatggcccagacggaggctcgggctgcgtccattggcggccgcagccccggggcgggagggggagcggcccggcgtcgggttaccggggaccagcacggcagctggccccgggaggcagccgcggggtgagggtgca

SEQ ID NO: 221782 - DNA, 482 bp, Homo sapiens
  chr2:65215348-65215830
  hyper
tcccttgtaactcgcgtggccaaagcagatatcaaataaaagatgaaataaacaggaaatccatagaacgtgaacaataaggaaccgttcaggatggccaaaccgccgtctgcgctgttttctcgccagggctcaggcctgggaacggaagaggttaaaatccagtggcttgtgtttcagctttggttacgtggcagaaaccaactggaagtggtggcgtgagagctctgtttcttctagaagagctttgcgtcttaaacgcccataccgcagacagctgcctggcgggcgacccagccccatcctgatggccccaggacacaagcccaggagcgccccggtgcgcgcggttccgcggcccaggggcgccgggtttggtggcacagcgagccccctttctctagcggtatggctgcgttagagccctaatgagcgcgtgcgaaggctccccttattcatccatcctccggtccgtcctttgt

SEQ ID NO: 221783 - DNA, 180 bp, Homo sapiens; identical to SEQ ID NO: 198249
  chr2:66661524-66661704
  hyper

SEQ ID NO: 221784 - DNA, 650 bp, Homo sapiens
  chr2:68546319-68546969
  hyper
gggaccctgctgccaccaggcgccccgcactcactcgacctgcagcgtgctgggtttaatcttcacctcaaccttgtaggaggagccggtgagcagcttgatggtgcggttctggccgaagcgctgcccgtccaccttgtaaaagaccgggccgtcattaggctggatgcgcagcgcgatggagaggcgcacgaggcccggcaggtcccccatgtctgggcgagggtctggcgcggcggctccggggggcggaggacagcgccggctgcggccgagtggctggagcgcgaggggcggagaggaagcgcggggagggtgagggaggtggtggagctgaggctgccgctaggaacccgcgccgtcgccgccgtccgcccgggcttttgaggagcagctccttaggctgtggcccccctccccactcggcgaggaagcgggcccaagagacggctccaaggccgcgcgcttccccatcccccgctccagtgctgcgccctccacgcacccgaaggctcgctctggcccgcaggccgccgcgcagatccgcgcagctgggggcgagggagttaatcctgtttacgcaccacaatccccttcagctggggaagcggacatttaggctcctcctagaacagccccgggcaggagga

SEQ ID NO: 221785 - DNA, 180 bp, Homo sapiens
  chr2:68546998-68547178
  hyper
ctggagttaagcgaccactatgccaaggagcgagacccccggaatctggataccgcctcggccagctacgtgaggtggacactgctgctcgcggatccggcgccagccaggcgggaggaggctgagggggggtaaagggaggcgggaaggggggacaggaaaccgctagccggtgattta

SEQ ID NO: 221786 - DNA, 161 bp, Homo sapiens
  chr2:69240028-69240189
  hyper
gagtaagaaaacacgcacagctcacatgagaatggtaaggacaaggaaatttatacgcgaagcctggaagcgcccccgcccccgacgcactcccgcgggtcccacgcgtgctttcgccgcctttgtccacaaggtggcagcctttgaactttcttccccgt

SEQ ID NO: 221787 - DNA, 420 bp, Homo sapiens
  chr2:69240245-69240665
  hyper
aagaacaatttgaaacccccccccccccccatcatatttaaaatctgggacaaagaaccgtcgggacggaactccttccattgcaaaagctcggcgcggcctcgggagctgcccggcggccccggaccgaggcagccctcccctttaaaagaagcggaggacaggattgggatccttgaaacccgaaacccagaaacagcatcggagcggaaaccagaggggaaaccttgaactcctccagacaattgcttccggggagttgcgagggagcgagggggaataaaggacccgcgaggaagggcccgcggatggcgcgtccctgagggtcgtggcgagttcgcggagcgtgggaaggagcggaccctgctctccccgggctgcgggccatggccacggcggagcggagagccctcggcatcg

SEQ ID NO: 221788 - DNA, 180 bp, Homo sapiens
  chr2:69240736-69240916
  hyper
ggtccagcctgctacggcggatttgacctgtacttcattttggacaagtaagtgccgcgagttgtcccccccaccccaggctaagcgggcgaaaacgctttcgccccgggccgggctcgttggcagggtcgcctggggacaggagcgcatctccagggccacagagggaccgcgcggcag

SEQ ID NO: 221789 - DNA, 142 bp, Homo sapiens
  chr2:69968661-69968803
  hyper
gggaagtgctggaaacttttgggaatgtgtgttttcatgtgaaagaggggaatgaaatgtatccttcagatttcactttctacttttccggccacgggctcggcacgacctgccgttgggagacgaacggtttcccgaggtg

SEQ ID NO: 221790 - DNA, 360 bp, Homo sapiens
  chr2:70351201-70351561
  hyper
gtggagagtgggcgccttgggaagacgaaattgagtatgtgcgggggaggggtcatatgaaacaaggtcgggaagggggcggggagagctggggctctggaggagcttggggctcgcgctgcgggggaggaagcgccttccgcggtcgctggggggaagtggttaggaggaagcacgggcagtggaggggactgctggagggtcccatctgggaaagcaggcacggatgcggggacatttccgcccgtcaccctggcaaagcgctcgcagggctggagggacagagttctcagatccaagtagagaaaaccgggaacggttccggctctggggactgacattcatcgcggcagtttctgg

SEQ ID NO: 221791 - DNA, 105 bp, Homo sapiens
  chr2:70369226-70369331
  hyper
gcgcgtgccctcctcctccccgacctggccggagctgaccggggcgggtgtaggcccgggggcgggagggctactggatcccaggtggggcgggtgtaggcccgg

SEQ ID NO: 221792 - DNA, 180 bp, Homo sapiens; identical to SEQ ID NO: 198265
  chr2:70418116-70418296
  hyper

SEQ ID NO: 221793 - DNA, 53 bp, Homo sapiens
  chr2:71502836-71502889
  hyper
atgaacgtgcattgttctccattgcgaataacggccaccagaattccagggta

SEQ ID NO: 221794 - DNA, 180 bp, Homo sapiens
  chr2:71503490-71503670
  hyper
aacaccttaggcctcacagaccttctatttgaggaatgtgctcccccaatcccagaccgctcctggtggggcgggcgcgagcgcaggaccgcggagcctgctgcgttgctcggctgcaggggaggagctgggccccgcccccggcttcccgcgctccgcgtccattggctggcctcgggg

SEQ ID NO: 221795 - DNA, 600 bp, Homo sapiens
  chr2:71503734-71504334
  hyper
tgaggcgcgtagagagccgcgcgcgccgtctgcgatgccccgggacggcgttcctgccgggaataccaccccggcggcagcccaggctgccgcgcagagcccggattccgcgactgccggggcaccgcaggttttggactcgctgaagcggtgagctctgcctttgccctatatgccgcgctctcgcccgtgctctggggcagttggcagtgggtgggcaggaaggggcgggccggcagggcgtcgcacgttggcgtccccgcgtcgcgggaatggggttcggattccccccgtgaatgtcattccccaggctaccggtctttagcgctaagttgcatgggctggtgtgccagtcggtcagcgaatagcggcagaacgcctggccgggccggcgttttccgggacactcgtttcggcctcgcagtggcagcgcctcctgcgagcctagaccggctcagtggacgcgccgcgctgtgcacgcgggtctggggagacggcggttcttgaatgatccctcacactgcagggtatctgggagcggtggattgagggggcacaacgtggcttctgtgtcggtgaaatcgcttggaccagctccag

SEQ ID NO: 221796 - DNA, 720 bp, Homo sapiens
  chr2:72374294-72375014
  hyper
agctgccaccagccccctcctctcccgactcaattttcggctcccagcgacacagccaaccccagaaagccgagggcgactgggggcttgcagcaccgaggggaggcgaaagcggctcaggaccggaccctcccccgggaccgcgcctcgctaggcgcccccggggcgctccacgccccctgccaggccagccgcgacccaggcaagtccatcttgggagccccctcaggtccgggaacccctcttaccagccccctgaacctgcgccgcgggcgccagtggtcccggaaccgcgctgccggcgggctggggaagcccgggctgctgcggcagagaggagggaaggggcggggcggggaccagtgccttcaggctcccggcgccccctggccggcccgccgctccgtctgccccgcgctcgcagctagcggaccccggagtgcagcggagcgagcgcgcccttacctgcagcagccagtggccggtctctccgatgagcgggaagcccatggatcccttggggatgggcagcttgcagctcttgtcgcgagtggcggcccagcgcagctgccacagctgctgcgacacggccagcagcagcgtcacggacaccaggcacgcggcgagggtggccagcgccgacaccagatccaagccctcaaagagcatgttggcggccgctcgggggattggctgtgccggccgcggcgggggagggga

SEQ ID NO: 221797 - DNA, 240 bp, Homo sapiens
  chr2:72375575-72375815
  hyper
gaggccggagcctaaaagtccctgggctgcccggggcggcgcgctcgagccccagagccgccgcagcacccccgaggcaggagcggcgggcgaggcggcgaggcgggcgctgcggcccgagcgcgggtgcggagccggcgggccgcggccgggacgggacgcagccggcgacagagccccgggcgggcgatggggcggcggcggcggcggcggcggcggcggcggcggcagcgggcggga

SEQ ID NO: 221798 - DNA, 240 bp, Homo sapiens
  chr2:73052815-73053055
  hyper
aagggaggggccggcgccggacctggggacagccggccggaggcccgacccagaggagcctgccccgtcccgcccgttcccgcccctctgtggtcccggcacccggggtacctgagcgtgggcccgatgcaggccgtgtcagtgctctcgatctctcgcaggatccgctcgtgctctgccgctgtctccaggctctccgcctccgccatcttaccccgctccatagactgggggcgcccc

SEQ ID NO: 221799 - DNA, 198 bp, Homo sapiens
  chr2:73114304-73114502
  hyper
cgcgcctgccggccctctctgttgtcccacttggcacggactgggctaccgccacggtttgacttccgccaccagcaaccaagggaaccagatcccaagggaaccagcacccctgggcgctcgcggcccgaagcctgaggttcccgccccgccccggcagggcggccccgccgacacccgtagcggtcccgccccccg

SEQ ID NO: 221800 - DNA, 720 bp, Homo sapiens
  chr2:73143409-73144129
  hyper
ccgtggccttggggcgtcaggaggcccaacccagatctgcgcgcccaggcagcgctcaggccgctagaatggaccccggcagcggcgaggaagcggaactctctgcggctccctctccgcagtgcgccggcaaggtccaggtcccagcctccccaccgccgcccgcgccctcctaggcctcggagcggcgcctttctgcggcctcgaaggtggggtgggaaagtttggggagtcccggctctcacagcctgtcgtgagaactgcccccggggaattcgtccgccgtacggaaaaactggccggagcagagtcgtccgcggttccgcggtcgcgggtggaaggtgaaggtcgagggaggtcaggctgcttctgcgtgtcctgacggctggcgtgttctcttgagatgggctcgggctacttggccagcttcaatttaagccacagtgtctccgaggccctgacctggtccggcccgccgacacttgagcccccagagcctcagagaaggcgagggggtggatctcccagtgccgaggcccgccgtcctggtccaagccggtcgcggcaccgtgtctgggcactggagctgcttccagccccgcgaacagctggagggtggcagtgggaccgctccggcggcttctcccgcgcagtgccccgcctggccccttgtgaagggagtgagcgtcccctttccagagctgtcccccgtgacatcca

SEQ ID NO: 221801 - DNA, 946 bp, Homo sapiens
  chr2:73520105-73521051
  hyper
ggcgctccgataaccgcacaggttcctgcggaggcgctggcggcccagtgtgggtgggaatgggggtgcgcaccccaggactcctaagcttcccatcgcccctattctcatagctccaatgtcccagtccctcctggttctcaggtatggtgcgcccccgcgctgcgccgtcgtcgtctgagcacccctgctcgccctccttacctccagggtagccggtggccgcgggagcgtccctggcaggcagccggggcaattcagcgctgggttcggcgcaacagccttcagtggacttgacgaggagcgcgtcgggttcggaaaactcgctaaggtggagcatggcgcggcgccggctgtggggcgcccggggcctcgcccgctgggcttgggggcgcgcgggtggcggggaggctggcggtaggggttccccgcagcgcacagacctaggcgcccgggctcctggcttcgggcactcacctctgggaaaggagtcggggagccgcggcgccctcgctcgcccgcaccggcctcgggcggcggctcctcgcctctccaaagcgctgccgggctcccccagcccacagcccccccacttatatagctgcggcggcgctggctccgggcttccgactccccgggccactgccattttgggaggccccggccctgccgccgtgacgtaaatgcccaaacatggacacaggatgtgtgccggggactcccgaaaaggaaagctcgagctgtgacgttgttgttgtcgccgccgccgccaggctcgcgccgctgcgtgcgcgcgcgctccccaggcgtggagcgctggggccgcggatgcgccagtctggggcgctgcgcctcaccgggccgaccgtccggtagatgcgcttcccacctggaggcagaggccgaggggcagcaggggaggaccgtgttgggtttgaatctgccc

SEQ ID NO: 221802 - DNA, 252 bp, Homo sapiens
  chr2:74211285-74211537
  hyper
cctcagttaccctccgcgacgcgcccgttccccctcctctgggaggcagggcgggggtatcggattagtctttgttttcgacgcgaaagaatcgagcgcggcgcgggggaggctggtgatggcagggccgtggggtccacctggacagggcattcggccgtgacccctgcgagggtgcccttagcctctgcccccgagcaaccccttcttgccggccaggctgactcggtacgcaaacgcgcgatgtccccc

SEQ ID NO: 221803 - DNA, 240 bp, Homo sapiens
  chr2:74405791-74406031
  hyper
ggaagctcatcttcggtcctcagaggggaggcgaggggcccctggcccccgcctggatcaggattcggagctggctagagggagcggaccgtccttagctcacgggcagcggaagccgggccgccgccgctcggagccgggtttctggccgctgcgagcctttgcaaacctcggcgcccgccttgcccgcctaccccacctcgcagacccgaaatgcggaaccaacaaaatctcgcgagc

SEQ ID NO: 221804 - DNA, 840 bp, Homo sapiens
  chr2:74425591-74426431
  hyper
acgtttaataaagaaaaccggttggccccttcggctccacctggctcaacagacagccagtggcatgcggcagggaccaatgggtggcggagggaggcggggcctgccacgaggccgcagtataaccgcgtggcccgcgcgcgcgcttccctcccggcgcagtcaccggcgcggtctatggctgcgacttctctaatgtctgctttggctgcccggctgctgcagcccgcgcacagctgctcccttcgccttcgccctttccacctcgcggcagttcggtaagagggtcacagagctcggtcagcgcggaaagctgaggggaacggagggcgaggggcacgccgggcccccgagggacaccgagggaagtccttcccgaacatctccgccccggcggtggtggccgctgaggggtgtggcggggcgacgtggcaccgagcgccgccgcagctctcgactggggcgcttcctcggcgcggagggctggtacccgaagcccgcctttcggagggagccgctctcctgcgactcggggcgtcgccggggcccgtggccagtcggcgggcgggacgggggtggcgtgcggaacgcgaaggcatcagtttacgcggagccttccgacagcgccggccgcctctggctgggatgctgagagtcgtctgggggagaacaggcgagggttccaaaagagcagccctcggcgagttgtccttgcggggaccctagcggcggagggcgctgctgcagctgatgaaatcgcggagccgacttgctcggggtccccgcgccgccctcctccctccgccggtgggagtggcccgcgctgcctccgctctgcca

SEQ ID NO: 221805 - DNA, 540 bp, Homo sapiens
  chr2:74740950-74741490
  hyper
aatcgaaattctaggaaacacaggacaccaattaccggtgcgcatgaacagggctggggggacctacaggagaggccagaaggcgcaccacgatcgccagcccaaagcggccgttccccgcccttagcccctgccgtccccttcccacacctgttctcttcctgggcctgcagctcaccgggcgccgttccccagccgcttcttacgcagccgggaaaccacaacgagatttggtcttcgagagcatttaggcggggaccacaacgaatccgggagttggccagaaggatccatcgagaggcgaagagtgggggctgggggaggaggcacctgcggaggaagccggtgaggcggaggcagcccaaaggcggaggccgcccaaaggcggaggccagcaaggatggaggcgcggtgagcatctccgctgactcagcggcccatgctcgggcccctcccgcgctgagcctggctcctaacaccctggccccctgtccccctccccgcacatctccgccagccagccttccccctgcgcttggc

SEQ ID NO: 221806 - DNA, 660 bp, Homo sapiens
  chr2:74741711-74742371
  hyper
gatgcaagtccctgcgctgacgcccggcagcggctggcacgggcgcggctgctccgggtgcacagggatgctgctgtttcggggaccccggcgccctgccttggccagccccgcgggcccctgaggccactctccggagcgcgccgccgctgggcttctggcgctgcctgaggcatcctccccaaccaccgaacctccggcggttctcctcggcccagaccgatggagccggggatgctgggtccacacaacctcccacaccacgagccaatcagcttcggcatcgatcagatcctgagcggccccgaaaccccagggggcggtctaggcctgggtcgcgggggccagggtcatggggagaatggggcgttctcgggtggataccacggagcctcgggctacggtcccgccggctcacttgccccgctgcccggcagctccggagtgggcccaggcggcgtgatccgcgtccctgcgcaccgcccgctgcctgtgccgccgcccgctgggggggcgcctgcagtgcctgggccctcgggtttgggcggcgccggaggcctagcgggactcaccttcccctggatggacagcggccgccgctttgccaaggaccggctcacgggtgaggttgtctgacccctccagcgtcacgcccgactc

SEQ ID NO: 221807 - DNA, 36 bp, Homo sapiens; identical to SEQ ID NO: 198305
  chr2:74776040-74776076
  hyper

SEQ ID NO: 221808 - DNA, 635 bp, Homo sapiens
  chr2:74781686-74782321
  hyper
ggtgctgcagctcccggctaatccgggggtctccaccattccttctcgctcctctccctcaccccaccgcgacccccccagcggctgccggcgggggccggggaggggcggaaactcctccagggaacccggccccgcctcccgccccgcctcccgccgcagggccaggaagcgcggaaggaaccgccgggggccatggacggagcagtgatggaagggccgctttttttgcagagtcagcgctttgggaccaaggtagtctggcgcatggatgccgaaccttatccgggctagtagtgggtgagagagcccagaaacagggagaggtgggcagcgggctggagagcggcgccgggagttggagagcctgtgactttcccgtgaagttgctttgcacactcccgggaagcgtctgtagtctaggggttctggtcctggggagacggagtggcatcgtccttgggaaacttcgcccccaaccccgtttggaagccccagatcccaaatcgacttgcgccgcaacctccttccccgtcgggacccgggccgcctgcgcacgccactccctctcgagcactctctctctctccctagaggtggaggaagacctgggccgtgctctacccggccagtcc

SEQ ID NO: 221809 - DNA, 1360 bp, Homo sapiens
  chr2:75060918-75062278
  hyper
gtcgccccacaccccgggtccgcgatcacgctccccccacccatagccgagcctgacgcggcggtggctcatgcgcctttccgtcccagcctttagccacggaccacacgtcccatctcaggcgccccgcccctcccccgccccccgcccccggcgcgcctccccaggctgccggctccggtgtctgagcggccgcgcccgcgagccgtgagcgatgattggctgcgccacggcggcgggcggtccgtgggcgcacacaccctccccgcgcagccaatgggcgtgcgcacgtcactgatccggaggcccgcgggccggcagcccctcaataagccacattgttgcatgaaactccggcgcaggagtcccgggctgccgctggcaacatcgtgtcacccagctaagaaaatccgcgggcccgagccacgcgcctgtgaatcggagaggtcccactgcccgagtggagccgggctgagattcttctcaagttgagcctcagtgatcctgtggccgaagttagcgccttgacgtgggacaaccggacacgtcgccaggagagaactgaggcgccttctagcagttgtgacgccaaaatcacgtctccggagacccgcgccctccgccagccgggcgcaccctcgccggtagccttctttgtgcgccgtccggactcccagctcccggcccggcagccgagccccagcacaaagcagtcggaccgcgccgcccgcctcccctctcgcgtctccgcctcggtttcccaactctgcgccgtcgggccgcggcaggatgattgcctcgcatctgcttgcctacttcttcacggagctcaaccatgaccaagtgcagaaggtaagtcagcgcgggcggggcggcaggctgggctctggcaaagtggtctggcctccatcagtctcttcctcgaccctgcggggacccgcttcctccctactccgggcctgggagcggaaaaagtttgggcagccgggacactcctgggcgccaggagccacgtccgctaagcacagccggcgagtgcgcgcgggcggggagccgaggtcgcgctccgccgggcgccctccctccctgagctccggcacgcgctcacgctctctcccccagtccctttttccctgttactggaggggcgggtcaccccgcaggtagtcagggattgctgcgcccacgtgggagggagcccccttctgcagcgcgagttccggcgagagcacgtggagagaatcgtggctgcgggaggctgctccgctgccgcgtggggccgccgggggccgtccgcgctcgcggaccgcgtgtaggagacgagcggttcccttctccttccccgcggccctgcgggggt

SEQ ID NO: 221810 - DNA, 180 bp, Homo sapiens
  chr2:85107380-85107560
  hyper
caggtcactgagcctcccttgcctgggtttccctcacccacaaaacgttgatgcgaacatctaaagcgcccggctggacacgcaaggctcggacagtggtcactccgcgaacgcactctgtgacctggagcacacaggtcccccgctgagtgtcagtttcccagatcggtaaaaacaagg

SEQ ID NO: 221811 - DNA, 275 bp, Homo sapiens
  chr2:85107659-85107934
  hyper
gcaggtgaaattaaactcttaaggaagagagggaagaagaaacttcaaataaatgtgcccaagttcctggtccggtactccctggcggatccgtcccccgaaagctcgcgaaaatggctggcgagaccccagaggctctctcggacgcccttgggctggcggagggcaaaggccagggcactgagtcgcttggagcctgcgggctgcgcccccgcgggaaaggggaacccgagggcacggagaggagagcgagcaaggagcgccgcggtgctagg

SEQ ID NO: 221812 - DNA, 511 bp, Homo sapiens
  chr2:85361137-85361648
  hyper
ggcggagaggcgcccgcagcccgtccgggacactttccagaagccgcgggactatttcgccgaaggtatgtgcccgctgggacagccccccactctcgattcccgctgcgctccgctgctcagcccgggcggcccaccgtcccccttgcttgggtggacgcacccttgccctccgcctttattggcggcagcccccgtggggcgcgcgtggggggcgctggggtccccagctcccgcctcgagccccctgccgcggcgctgtcagtcccgggggcctgggcctcacctcgccttggtcttgttcgcagtgagaaggcctcaggacagcgcgttctttaaaggacccccgtaccctgggtaccccttcctgatgatcccggacctgagcagcccgtacctctccaacggacccctgtctcccggaggagcgcgcaccgtgagtgcccgtcgggcgcgccggggagggtgggaggccgcggcccgcaggatgcgcccccgggcttggccatgg

SEQ ID NO: 221813 - DNA, 224 bp, Homo sapiens
  chr2:85829251-85829475
  hyper
caacaccttatccagcgctcccgttgggtctctgagcgtccaaagtttgggctgagcccacggcagaacgtgaacaccctctggcactgggggcctccgcggtcaacccaaatgccaccggcgtgctgagagacgcaggcggaccgtaacatctggaagggagttaccctccttctgagggaccagggctgggagaagggctggacaaccgaagaggccacgcc

SEQ ID NO: 221814 - DNA, 973 bp, Homo sapiens
  chr2:85980727-85981700
  hyper
tcacgtgctcggggcggttgtgcaggagcggactgtcctctgggaacatagaagcgcccccgactagagtaggggcggggagggagcgccggaggaggcaggttctgggccaaggggatgggggtgggggggaggtagggagcccgcggacaaaggaggcggccggcggcccagctgttttgaaaaatgcttcctgtttctttaaaggcgctcgcggctcgggcggcccgggctggggaggcggtggcggcgggagctgcctcctctccgggcggcggcgctgactgatctcgcgaactgggcttctgtgtaaactgaggctaaacaaacacagatggagcgcagcgggcgttctccagaaatgctggcaaggaggcagcgacttcagatgacactctgagcgctccgggaacggacagcccggcggcttcccgaagccggcggcgcagctgcccggggcgagggggagaaagggagagagggagggggagggcgggcgaagcgggagagccagagactcctcggcgctgagcgcggcggcggcccgggcagccccacgcccctgcctcgcgcgccgcccgcgccatgaagcacatcccggtcctcgaggacgggccgtggaagaccgtgtgcgtgaaggagctgaacggccttaagaagctcaagcggaaaggcaaggagccggcgcggcgcgcgaacggctataaaactttccgactggacttggaagcgcccgagccccgcgccgtagccaccaacgggctgcgggacaggacccatcggctgcagccggtcccggtaccggtgccggtgccagtcccagtggcgccggccgttcccccaagagggggcacggacacagccggggagcgcgggggctctcgggcgcccgaggtctccgacgcgcggaaacgctgcttcgccctaggcgcagtggggccaggactccccacgccgccgccgccgccgcctc

SEQ ID NO: 221815 - DNA, 53 bp, Homo sapiens; identical to SEQ ID NO: 198319
  chr2:86850368-86850421
  hyper

SEQ ID NO: 221816 - DNA, 367 bp, Homo sapiens
  chr2:87016717-87017084
  hyper
cccgcggtgcgtgccgcccccgccccgggcccccgcacgcctcacctgcgccccccgccgctggccggcacgcctctgggcgcagggacaggggctgcgacgcgatggtgggcgccggtgttggtggtcgcggcgctggcgtcgtggtgggcttcgctgcaagagcaacagagcgtggttgggggccaggctggggttatggaggcgccccagccccggcctcgcgcacctttccccacggggacgcctccccccggttttcctgggagaagggatagcagaggagacaggatggggaccccgggatgcgcgcggacccctgtgctcgggcctcggctcagcccagcgcacccggcgcccagagccg

SEQ ID NO: 221817 - DNA, 788 bp, Homo sapiens
  chr2:87017491-87018279
  hyper
gagttgctcagggccgagcagaaatagtagccctcgttctctcggcggaagtcgctcagggtgaggacgaaggtgtcccccaacctcttgcccgagaaccgctgggtgtccagcccctcggccgccttgggcttgttttgggagaggtataggaggaaggtgggactggcggcggcgccgcgcggctggaagagccacgagcagcccgacgtcgggttggacagcagcacctggcacttcagctccactgtctcgcccaggttccaggtccgatccagcggcgacacccggaactggctcggcctggcggcgtctgcaggcggcaagcagcgaggctgagcccgcagtcccgcgccccccgccccccgcccgccccatcccctgccttcccgggcgtctcaaactcacggagcagcaaggccagcggcaggagcaaggcggtcactggtaaggccatgacgcgctccccaggacgctgcttggctcgaagctcgggcgcgaggggaggcgcgcgggagccggtggggcgccgaggggggaaagttgcgcccttcggccggcccggagcctgatttcgcatttggaggatgtgatgtcacccgaagcccccgccgaggagagtcaccctccttttcgcggttgtcgccttccagcccggcgaggaggctggggcccgtgaatagggccgtcgaggcagcctggccaggcaactgggggcagctgaaaactgcgggtttggggatgaggaaaagggcttggaaatagtccttggaaatggttgtcttgtg

SEQ ID NO: 221818 - DNA, 198 bp, Homo sapiens
  chr2:87018365-87018563
  hyper
ttgccttcactaaaggcgtctcttgtactgtcaccttgggactttttattggcaaaatgggcactgagggctgaaaaggaagaggaactagcgacctgcccgcttctgaggaactcgctagagcagccccagttttcaccgaggaaggaccctctcccttcccccaggagatttccatgagagcggcagcagccgaag

SEQ ID NO: 221819 - DNA, 1014 bp, Homo sapiens
  chr2:88751266-88752280
  hyper
tgggtggttattcctccatccgctcccacccgcagcctggacaagaagactcctggcagatcttccagccgcacaccgacccctgcgccggcccttgcgacccgcgtccgccctccccggctgggaagcacctgccagcggccctcacctgggtcgtcctcgtcgcggggcaccttcttgaagcagtcgttgagcgacaggttgtggcggatggagttctgccagccggccttgctgcgctggtagaaggggaagctatcggcgacgaactggtagatgtggctgagagtgagtttgcgctcgggcgcgctctgaatggccatggcgatgagcgccgaatacgagtagggcggccgcaccatcttcatcaggtcctcgcggctggccatggacagccagcccagctccccgggccccgcgggcgcggcgggcgaggcgggcgcggcgggcgcgggctgcgcgaagggccgctgagagcagccgaagtgccggcggcaggcggtggctgcagaaagggcccggccgcggccccggggggcggcggcggcggcggagcgcccaggtacgcggcggcggctgcggcggcggcggagggcgggcctcccacgccgggcccgttgagccacaggtaggggttggcggcggcggccggcggcgcggcgtagtcggccagcccgtaaggcgccctggctgccgggggggcgcccggggcggcggcggtggcggcgggcgggggcaggccgggctgcgaatacactccgaagttgtcgccgcagtagagggccatgtcggcggccgtgggcggctgcggcgcggccgcggcgaggggcgagcggggctggtctcgccgctcgggcgagagcatccctttgggggccaaccctgcggctccgccttcacccgcgctgggcgcccggtgctccgggccggggtcgggcgggtgctagcggagcgcctgctagccggcctcttataaccgagcccggcgcggctcctcctgggccggcccggagc

SEQ ID NO: 221820 - DNA, 180 bp, Homo sapiens
  chr2:88752398-88752578
  hyper
gtctgggaggccggcgcctccaggtttcgggcaaaaagcagcaccccattcctagcccacgtttcttaacatcataataagtaaagccacgaatattaaagagaagataacccgaacagtacgaatgatttctaaaaagttaacttggggtggccgctcgggccacctgcctagtcatcc

SEQ ID NO: 221821 - DNA, 311 bp, Homo sapiens
  chr2:89065111-89065422
  hyper
cagcgcggagggctccgcgcgtcgggagccggtggaagaggagaagagcgcgcgggcgacagtcatacaggccttggggcagggcgcgcctcgcgctccagggagccacgccagcccgctgcgcctccgcagcaaccgccgcctgcacgtggcggggcgagagagctgctagggcggtttctccgcctcgggcctgttgggcggggccggctaaggtgcgcgtgctcgctggtcctaacggttctgttgggcgtttctgctgagaggcgggaggggctgagagtctgtgcgaaggtaggtggacagactgc

SEQ ID NO: 221822 - DNA, 392 bp, Homo sapiens
  chr2:95690867-95691259
  hyper
caagcagagaggcccggtgcaggatcccagcgccgaaccagcgccggctcagtggacgcggaaggggccggcggccgcggccggtcccatcccccactgcagacccccagcctgtggcggtggtccagttccgccaggaaaccgccgcctggagctgtgggtcgcgcacattaacgcatccagcggaaaaatgaaggagacccaaattcaaagttaaagtaatggtgacccgagaggtgccttgatgagaaggtttggggtcccggttactgatggttatcattcttacgagatgctggtcacctacgaagggagaaaggcacgaggagcgcctgaccaaagtggttttgccctgcttcccgcaagaggtggcacccacggctggaacgcag

SEQ ID NO: 221823 - DNA, 420 bp, Homo sapiens
  chr2:95691398-95691818
  hyper
ctcttctgccccgggctcccctgctcttaacccgcgcgcgggggcgcccaggccactgggctccgcggagccagcgagaggtctgcgcggagtctgagcggcgctcgtcccgtcccaaggccgacgccagcacgccgtcatggcccccgcagcggcgacggggggcagcaccctgcccagtggcttctcggtcttcaccaccttgcccgacttgctcttcatctttgagtttgtgagtggctcctggccggggaagggacggggtgggctgagccgtgcgctctctcgggcgcccagcacagctgtcggacgggatccgctagctgcgcaggttctgggagcatcggggcagcaggcgcagggcggggactaagccagggaagtcccctcccacctccggtcctttgtgcccttctagac

SEQ ID NO: 221824 - DNA, 420 bp, Homo sapiens
  chr2:95691853-95692273
  hyper
aggaaaaactgggttcccaactggggtcagatgtaggcagcggggcagggggggacggctcttggttcgctggtcccaaagctgcgcgcggggcccacttgacgcgcgcagcgccaccgaagctcccgccgcgctttgcgcggttgggtagaagtgcgcagcttttacaagggagaaggtttcgttaaaaaagaaaaaaaaatcagcaagagaaacattagtattaccaaccgagatttggagatgagagggagctgaatccggtttattttcttctggccttttaaagtttctggcgagggaacgtatttgcgaccaattcgatctggaaatgaggccatcgtttgcttggccgcagtccttctgccccgtgtgcggggtgggggtggaggagatggggggtggggggtggggggtggc

SEQ ID NO: 221825 - DNA, 324 bp, Homo sapiens
  chr2:95825283-95825607
  hyper
cagtacaggtctgcgcgcccgcagtctccgaacgctcacaggaccaggccccgcccgccaccccgcgccagcccccgcccgccaccccgcgccagcccccgcccgccaccccgcgccagcccccgcccgccaccccgcgccagcccccgcgtccgccccgcgccagcccccgcgtccgccccgcgccagcccccgcgtccgccccgcgccagccccgcctcccgaggccgtcccgagcttgcgcagacgcggccgccgccggggcccttcagagccagcgccggtggcggggtgctggcgcggcgaagctggagaggcggggct

SEQ ID NO: 221826 - DNA, 863 bp, Homo sapiens
  chr2:96011867-96012730
  hyper
aacttctgcattttcaaagggggccagcctgggcccagtttaatctccggcggaggaccggggttgcgggaaatgcgccggggagtgagggcttcccggatcccccgccgccgactccgcgcgggccagcggcgcggggcgggccgggatcagcgcctccccgggagagcgcagccgccgccccctcctctcgggctcccggcccctccccagcccctcggcccccatcctgcgcgtgggagaaaccgccgaccgcgcggcctccaggggctggcggagcagcggtggcgacgcgccagactccgtcctgggctggcccgtgccgggcggggcggggccggctccctccgcccttcccgggcaggcgcgggggggccgcagggacgcctcccggagtggccgccgcgcctaggccaatgagcgcgcggggagcggcgatggaggctggggcggccgggagcgcccgggacccccgccgccgcgccgccgccgccgcgcccccgcgccccggcgcccgcggggctggagagggggcgacagaggcgcagcgcccgcgccgggcatggaggcgccgctggcccgcgctggccgtccgcgctgcgtttcgcgccgccgccgccgccgcgcctcgaagtttgccggctgactcggaaagttgcgctcgggctcggccgccgcgtccggtccccgcgtccagcctccggcctgacccgctcgccgccgccgccgccctccacggggccccggcccagccaacccagcagccccgcctgccgggggcatgtgagccgtcgccgcccccgagaggccgtgcgggctgcaggggccccggtgcctccgaggcagcgcgtgggcgaggggtg

SEQ ID NO: 221827 - DNA, 360 bp, Homo sapiens
  chr2:96987063-96987423
  hyper
ggcagcggcaaaggagagctttttcctgtccgctcggggaagagcgcccaggggaaaggggttgtgggtcccggcacgcggcactacgctccccgtcccccgcctcgtctttcttcggctcggcccgtggggcttccgccgccctgggcttgcagctgggactcatttccagatcggtcgaaggcaggtcttccttctagggaccggtagctcagaggaaggaccggcggcaaccgctgccctgtccgaaagtgcgtctcctttttcattccgaaatgaaattcgtagttggttaaaacggggcttgccagcacgatttacaaacaagacgagcgctcgctgcaatcacatgaggagaaa

SEQ ID NO: 221828 - DNA, 319 bp, Homo sapiens
  chr2:96987527-96987846
  hyper
gtggcccctccgcaggcgcgtgcacaggctcgcattctggagggcagcgcatctcagccgtgcgcccggtccttgccaccccaaactccggcagcgaacaacgcgtcctgggggcggccccgcggctgctcttggaggcggcggaaaaggcgcgtccgcggcttgggggacggaggcggggtcgggggcgaagggaggcggctcctggggcccagaaagctggcgaggatgaggaacctccccccacctccactcccagctctccgaaccgtgaagacactgccccggcgcaaagcgtctctagcggtcctaggcgcac

SEQ ID NO: 221829 - DNA, 210 bp, Homo sapiens; identical to SEQ ID NO: 198323
  chr2:97171202-97171412
  hyper

SEQ ID NO: 221830 - DNA, 226 bp, Homo sapiens; identical to SEQ ID NO: 198325
  chr2:97175214-97175440
  hyper

SEQ ID NO: 221831 - DNA, 268 bp, Homo sapiens
  chr2:97203314-97203582
  hyper
tgtgtccccttgtcttccctcggtctgcagaagggacggggtggcggctggggagcgtcaggggaagagggcaagagcgtgggctacgagcttgcaggcgatgcccggcttcgcgctcggcgggagctgcgggccaacccgggcccgcgctccgtccctccgcggtgtctaggggtcgcccgggctggggtcgcgtcaccctccgcccagcgccggcgtggtggggcttgcgcggtgcaggacccccgagggcccagggggtcccaag

SEQ ID NO: 221832 - DNA, 105 bp, Homo sapiens
  chr2:97304096-97304201
  hyper
ctgcgggcaccgagtaaaacgcggaagcgggttacggcctgggaagggagaggcggtgagcggcaaagcccggaacggatgaagctccggcgcctctgtccggaa

SEQ ID NO: 221833 - DNA, 156 bp, Homo sapiens
  chr2:97482863-97483019
  hyper
gggcggctgcgggagcgggtgctggagctggcgcgcggcggcggcgacccctacagcgatctcagcaagggcgtgctgcgctgccggaccgtggaggacgtgctcacgcccctcgaagactgcttcatgctggacgccagcaccgtgctggacttc

SEQ ID NO: 221834 - DNA, 156 bp, Homo sapiens; identical to SEQ ID NO: 198330
  chr2:97535760-97535916
  hyper

SEQ ID NO: 221835 - DNA, 103 bp, Homo sapiens; identical to SEQ ID NO: 198331
  chr2:97779476-97779579
  hyper

SEQ ID NO: 221836 - DNA, 937 bp, Homo sapiens
  chr2:100720968-100721905
  hyper
gccgcccgcgcgctgcaacgaaaggcgccgctcaaggtgcatcccagccgcgccagagcggccgccgcccgcccaccgcccacccccaggtcggggctcccgacgccccccgcccccgactccgggccggccgggctggctgcagcggccggcgcactcacccgctccccggcttgcgcgcaggcacactcaagagagagcagcgagctcgccgcgccgccgccgccccccgcccccggccctgcgcccgcccctcctcccctccctcgcggcggcccggcccgctgctgcagccgccgccgccgccgccgccgccgcggtgctctgcgcccgcccgcccgcctctttctcctccgggaggcgcgtgtgcgcgggcgaggccgaggcgcgcgcgcaccgtgagccccgcgccgcgcccgccccgcgcgcccctgtactccccgcgccgctcctcggggtcccgcggcgctcgcaggccgcgccgccctgccgcccctctctcgtggcttttacggcccgcccgcccctcagcagccctggggtgcccggggcggccctgcaagcgggagagagcggcgaggcggcggcgccgagtgcggggggatgcggagccgtgcccggccctgtcgcatccctcggccgcccgcccgcgcccggccccgcccggccttgcccgggctgcacgcacttctcccgcggcccagaatccacttgaccctgctgggcgctcccgcgggcggcggacccgggtgggtgcgggggaattccccggccgcccaggcgcggggagagtgagctgtgccgcccgcagcagcgccccaaacaaaccgtttaaggtctctggagcccgcaagttcagcgaaataaagcggcggcgcggaggaaacctcttccacccggacctgctctccgttgcggtttggcctccagtggtggt

SEQ ID NO: 221837 - DNA, 391 bp, Homo sapiens
  chr2:100898414-100898805
  hyper
cccggttcctgatgcgtgatgtttctaagtgctcagtaagtaccaatctactcccacactgcagtatgtgggcgtgtgatgctgaacagagagagcacgatgtgatcatagttaattccctctggtatcaaaaaaataaaaacctatcaaaaaataaaaacgtatgttgctctcgtctgcgtcatcattgttgttcagacttttacataacatgccgaaggagaagactcagaaagccaggcagaatcatgaagaaataactgaatagttctgattccaagaactgtgtgaccttatgacatttaaagagtgaggaagagaaagcaacaggttccaagtattatagcaagcataccagctttacttcaggaaggctcgtggagaagctgtg

SEQ ID NO: 221838 - DNA, 779 bp, Homo sapiens
  chr2:101033518-101034297
  hyper
cttcctctctccatctacaattacaaacgcaaattctcagccaaggatgaaagaagtaaattgtaggctcgcacaatatcaataattccgcgggtcacagcatcccgcacaaggacgccttcttattgcataattaacgcgaggaaggctcttcccgctactcccgcgaactagggaggtcttcaagtcgccaaaacacaccgggatgtggctcgccaggacaaaacccgcgggttccccggtttttccgtgcgccccgcggcggggagaggggcccaggcgctgaaacccacccgcctgcgcgtccccgagctcaccctactggagcggcgctcgtccgggtccttaggctcctcccctggccctgggggcgccgcgcgggtcgggcttcgccgggcctgtgggcgaagcgcgcggggtcctgggagctcgggaggcccgccccaccttgccccgaggcctccgcgccgcggcccgtcgggtcccgggatgtggcggcggcggcagcggaagtaaggaagacgcccggcgcgctagaccggctttgggggccagaacgccggcaccgcctcacgcggccccctcgcgcctatccggccgtgcgcgccgcctgcccgcgcgcgtccccgccgccgtccccggccgtgcgcgttccagcgggtcgcggggagtggggaggggcgcggccgcgggaccccaggcccggatcccgagtctccctttctgccgctgcaaaagcgttctttctgaccgagacctgcggccggaacaagtcccgc

SEQ ID NO: 221839 - DNA, 365 bp, Homo sapiens
  chr2:101767478-101767843
  hyper
tctcccaagaaatcgcctctggcgacgcagcccgggactgggggccgcgggcccggcggggtgcgaggccccgggcccggccgccgcgcccgccccggcgagccccttaccggtgaggcggccgcccccctcgccgtgcccgcggcgccgctgcaggatgaagtagcagctgctcttctgggtcacccagagcttcagcgcgttcttcagcagcacctcctcgggcttgagccacatcgcggcggtccggccgcgcccgccggccccagctcacatctccccggccgccggtcgctgtgagccgagcccgctcgagaggcgacggcggcgcgcggggaccacagcccggccggtgcccagcgctc

SEQ ID NO: 221840 - DNA, 720 bp, Homo sapiens
  chr2:101924734-101925454
  hyper
cccctcggccgccgggctcgggcacgaagaagcgcgtgtcgggcgcgcagccctcgaggtctccgccgggcgcccacgggacgcccaccaggccatgcgcgccctccttgggcgagctgtcgccgaagcggccactctccgagacgctccacaccgtcaggttggtctgcgggtccacgtactcgatgtttaccacggccgagaaccactcgagagcccggccccgggccccgggcacgcacagggccagggcgagcaacgccagagccaacacgccgcgagccccgacgctggcttcgcgccgccgccacgccatggcagcaccgctgagctgactagggggagtcagggtcacgcgcgagtgcggtgcagtcgaagagcagagagaagcggacacccaccgccgccctggaagactgaggcggggtcggggccgctgcgcacgcgcacctggcggagtggacgaagggcgtgatcggccctggctccgcccccgtccgaccggccgcgttgtgcgcaggcgtaagctccgcggagcctcggaccgcgatccgtcccgggatctcaggcgcctgtgggccgaggcggggcgcgcagcctgtaccacagcttgcgccacggcggaccctgtggccaggggccaagtttgcgcaataggacgtctagcacccccaaagtgaagggaagtaactccagagaaacgggaagcttccctgaaag

SEQ ID NO: 221841 - DNA, 494 bp, Homo sapiens
  chr2:102313750-102314244
  hyper
accccagctcctccccggggaaatcccagcccgcttcctccccgctcctgcagttttcgggagcgccgtgcggggtcgagcgcggaggccgcaccctgggcgccgggcgtcgtgtcgggaccgctgcccgcgctgcccgccggcgcggccattgttcgagccccacccctgatgaatattcacgccgcgcgggcgcctcggcccgcgccctacccggcagggctcggggtgtgagtgcgtttccgccggtttttcctgcctgaggaggaaagggggagctgttttctctctcctcagaatatatttttggtgtcccgtttctcctcctccagcgccgccgccgccccctccctccccacctcgctccccgcctccgcctccgcctcccgggttatctttgtctcgctgcctcgcgctcactcgctcaactcggcgccgccgcggccccacgctccgggcccgtcctcgaggcgcgcggcgcggggcgcgggcgc

SEQ ID NO: 221842 - DNA, 344 bp, Homo sapiens
  chr2:102759154-102759498
  hyper
cccgttccccgcccccgcagcggcggggctagagccagagccgcgcccggcagttcccggccgcgagggcgggcgcagcttgtggccggcggccggagccgactcggagcgcgcggcgccggccgggaggagccggagagcggccgggccgggcggtgggggcgccggcctgccccgcgcgccccagggagcggcaggaatgtgacaatcgcgcgcccgcgcaccgaagcactcctcgctcggctcctagggctctcgcccctctgagctgagccgggttccgcccggggctgggatcccatcaccctccacggccgtccgtccaggtacggggaagctggagc

SEQ ID NO: 221843 - DNA, 1140 bp, Homo sapiens
  chr2:105459064-105460204
  hyper
aaaggataagcttccaccagagcatcctgtagcgcctcctgtcctgccctgccctgccctgcgcgcgcaccgcactcacacgtacacccggtcctcgcacgcgcacacacgcacactgttccccgccgctctaccctctagactgcaagggaaacggctcctctggggcgcgctcaccggaggtgaggcgacccagcccggcccaggccagcctggtacccagcgctggtcgctgcccctgtggggaggcagcgcggccttcggggctccagagcgcgcgggcccggaacgaggcgcgcggccgctggcacatgcggggactgcccagcgcggactggagaaggggagcgaaggggtggggagggggtgacgccggctgcccaccccgctccgcgcctccctctgtggccctctctcccttcttcccctcccaccctgccgctcccagccgcgtatggaactcgcgtttggaaaaggcacggagcaggcgggcagctgtgcgtgtgcgcgccggtggcctcggacgcagccagcgcgaggacctcggcgcggcggtagcgccccggcgggccctccaagtgccggcctgcagggggcgccggcgcgctcgcgccccgcgggttctccaccgccccgccttcgcccaccgaggaagggtcggagggaggacccggacgggagcaggttcccttcgcgcctctctggagggtcggcggggccctcaggctggtgctcacccgtaggaccgggacggtgttgtcacacttgtcaccaacgacggccggcgtggcgtcgcaagtccgctttccagtctcagcggctggaggaggcctcggggcggcagggggagtttgcctcccggctggctagcttcgctagactcagtcattactaaggggttgggagggggagcttgtctcttctctcctggcagagccgcgggaggcgtcggaaagtttcctaccacttgagggacgaaggtggatggatcgagagccttgtttccctgctgggatggccgaatgtaccagaagtctcgctggcgagcagcgccctcggcttccccggcaatcatcccaaacgcacacccttcccctggccgaaggaaccccaggttgcctaggaaacggccccgcggac

SEQ ID NO: 221844 - DNA, 180 bp, Homo sapiens
  chr2:105461092-105461272
  hyper
gcccgccctttgcttgctcggggtgtccgcctttgtcccccgccgcgggcctccacggtgggatctgcgcgcggccggtgggcagccctcgacccggggcgcgtccacagcgcccacccgcggcccccaaacacctcgagagcagatcttaggggttaaccaggcaccgacctgaggcgc

SEQ ID NO: 221845 - DNA, 540 bp, Homo sapiens
  chr2:105461314-105461854
  hyper
acccaattcatcggttttcctcgtccatacatgcatccatccatccctgcatgcgtacatgcatgcaatacaaatcccgggacgccggcacggagagctgcgcctcgcccttgctgcgggctgagagcgggtacccccccttccagctcttcctcctcccgcgcagccgcggccccctccccgaaggaagaacagctcaattacgaagaggagccaaggaacgaaatcccaggctcagaggcgcccgccgttgctcctctgttcccggtccctgtagtgcagtccccacccccaccgtccccagctcggggagggcggggacgcggcggtgcgaggggtcctgccctgctccgccggaacaaagcccgccgcaggagcccgcggccgcgcaccgaatcagtgacaaaggcaagcgggcggcgccgagctccaagccggcgctcctacggcttggcgggaaggaggcccagaagatggggtgcgatttgcacccggattttcctgggctgcagcatctcgctcctgtgtacccaatgacct

SEQ ID NO: 221846 - DNA, 720 bp, Homo sapiens
  chr2:105468539-105469259
  hyper
tcaatgaaatctgtgttccatcttttatatatacatatacgcatacgtaaatataaaaagcaacctttgggggccgcagaggaaaaaaatccgttctgtttggggtttggttaccaccgcctttggtatctataccttggcaataatggctttgctaaaacctacctacgatggtatctcacccggcaagcaggagctggacaagagcctacataaattctacgcgtctagtgttaatcttgagatcacgcgggggctgcctggctgcggctgggcaggagaactcctgctttcactgagttcacttaactgcgctcggcagaggcacgatacagcgggagagaagggcaggcccgttcacattttaatcggagcgcaccggcggccgctcctcggctgcgtcctgggctgccgctcgggctcgggactgccagatgcaggctctggctgggggcggcgggcgcaagcgggcgcacccgcagctaggggtgcggggtgcacgcacacgcacgctcattaagagccatgtatttattgaatgtccgagttgggttagttcattggaaatccccgaggagggctcaatttgcccttgttttcgttgccactttctcttttttcttggttcgctgaggttcctctgtgcagcgtttccgcttggccgcgtccccccaccccaccccaccccacccccgcttctctcgcctaccgggtgcactc

SEQ ID NO: 221847 - DNA, 540 bp, Homo sapiens
  chr2:105471153-105471693
  hyper
agaacaaaacttgaaacgagaggaccagagggggagagcaggagccagcctcccctctccgcactcgcgagcagccagcagcaccacgccttcaaggacgaaaaagttttactactctaagggaaaacgagtgaaatgtgttcctgaggaggagaggagaggagaggagagagcggacaagagaaggagcgggccggttgctggtcatccgtaatttggctaaggaagaaaggagcagcttctttctttgttatctcccgtgaaaccttcacttagcaggtggacggagccccgcgaccgggcagagtccgggctcgcccgaggacaggaggaggagcgggagcccgcgcgtcccgggagagcgccccgagtgcaggtccccgccccgcccggcgagccccgctggagcgagcccagcgcgccggggctggggggcggccacgaccccccctgaagggggtggccacggagcgcaccccgagaagcgagcccccctccccagagcgctgctcctgcggctgctgctgctgctggtgacca

SEQ ID NO: 221848 - DNA, 360 bp, Homo sapiens
  chr2:105478550-105478910
  hyper
ctctttcattcttgatttcacatccgtgtttgttcctgtatcctaaaatgcgggcgcgagcttggcgagcaggagcctatgatgtcactgccggccagaggcggccgcctggccttctggcgggctgtgcgctgcgttcttgatgagtccggtcttcctcaaggaagagttggctctggaagtgacctcagaggggtctgggaagagggcaacagtcattctcttggcggcacgatgtgtgcgctagtgtgtgcgcgcgcgtgccgtgtgcatgtgggtgcgcgtgaggggagggggaagcggaaattcgcagtctggaccccgaagccctaggggtacaggcgacggggtcaggtgtaa

SEQ ID NO: 221849 - DNA, 180 bp, Homo sapiens
  chr2:105479044-105479224
  hyper
gcggtggggcggccgggtccctgctcggcccggcacggccgggcggccagactgtggcagctgctgtgggtcccacaagttgttttcctcgtggcgaccattcagcaaaacgcacgaacctttctcaaagatttaaatttcgcggatgaattaccatacacccgttgcttagcaactaaa

SEQ ID NO: 221850 - DNA, 898 bp, Homo sapiens
  chr2:105760095-105760993
  hyper
atggttggaccatccgaaagcgaggtgtgcgggcgggtggaaggaggaaggtgagggttcttcctagaggtgaccaggtgaggccgggagtcgagcattttcataagattgctcgcggacgcgggggtgggtggagagcatcacgattaagaaggaacacacgcacgcacacacacacctccttcctccttcccctcctcttcctctcaccccgccccccggggggcggtaccctagtctcccgggggaggttttggggcggaggaccgcggaggactgcgcccaggagggtggccggccgcgggaggaggacttggggtcgggctgctgcagctgggtggccagcgccgcggcggcccctcccccgctctccctggccgccgccccctcctcctcccgtcctcctcctcctctccctcctcccggtcccccatcctcctcccggcccccggcagctgcggctcggggagcagccggcggcgccgcggccgcgcagcctttgtctcgggccgccgggcgcgcggggcccagcgcaggcgtaagtgaccggtggccgggccgcggggggtcggcggggagcgggctgggggtcgcgggcgctccctgcagtggggaggccgggccggccagatcctcccgccacgcgtgtcccgggatgctcgggcggtgccggcgcgcgggggcgcgaggagagccgagcggggccaccgcccgggagggcgcgggacgcagagaggggctcggggcccgccgggccgcggggtcgggggagggggtgcaggctcgcggggcgccgcagcttggcgcccacagacgtgcggcttgggtgcaaatcctgtttctctgggcagaggccacgcggggacggaggaggcagagaggacgggctgtgatggag

SEQ ID NO: 221851 - DNA, 162 bp, Homo sapiens
  chr2:106362018-106362180
  hyper
ccagggcgcgtgtgccggggaagaatagccgcggatcgcagggccccggcgcagggacgggggaggccgcgatcggccgggagaacttaaccgtgtttattacaactatttatgttcgcgcacaaagctgctgtcacattgcataaaggaggtcctcgcttc

SEQ ID NO: 221852 - DNA, 170 bp, Homo sapiens
  chr2:109335510-109335680
  hyper
cacgcctggccctcatttaataagatatgaatttaaaaatgtatgctttagtattcacacatgtccgatgcaacgtatttaaccagtcatctccagaaactttgttccaatttacacgttcaccaaattggcctgagtgctttttttcttccaatgcattgcgcacttat

SEQ ID NO: 221853 - DNA, 336 bp, Homo sapiens
  chr2:109647969-109648305
  hyper
gcagtcggctctgcccgcctcgccgggctgcaccgagtccgcgggtctctagcgcacggcctggccccacgtgcggcgaggagggcgcagtgaagttctgctgtgtgcaccccctgcagctcggccgggaagcgcccgctggaggaacggagagcgccgcttcagcgtcggccacgtgggccgggctctgccggtggcaacctggacgcgctgcgggcgccggcgagacctgcgccaacgcctacctccgggccacaggcgggataaagctgccccactttgcccccagcgaagagaaccctccttcctctaagtattttcttcagcaactaagct

SEQ ID NO: 221854 - DNA, 180 bp, Homo sapiens
  chr2:111490277-111490457
  hyper
cctggacggcgacttctggagcctcaagaacgagctgcgcggactcctcggcggcgcccgctcttccggcaaaggtaccgcgctgcggccgtcgcccctgcccgcgcccccgaagccgccgagcgtgtcccctcggtccccggagcgtcgctgcggacaacgccctggcgagggcgaggt

SEQ ID NO: 221855 - DNA, 258 bp, Homo sapiens
  chr2:111490601-111490859
  hyper
cgaagagtcgggtgcagggctgggccccgcggtgacaggcgcggtgtctacgaagaccgtgtggctggaagatcggccttgctggtttgttgaacctgtttcttgagtccccgccccgcgatgtcccacccttggtggggagaaggggacagaaaaccgcgatgggatgggcgcacagggatggagtggccctgtccagggcgtgtctgggcgtcggggtgggacaggcttacaggaccccctcggagtgcaggtgtg

SEQ ID NO: 221856 - DNA, 85 bp, Homo sapiens
  chr2:111880646-111880731
  hyper
gagatgtgcacctcacggtgtgcacctcagagaagttctgtctgattcggtgcggcgtgcggtacgggagcgggagggagggagc

SEQ ID NO: 221857 - DNA, 635 bp, Homo sapiens
  chr2:112656487-112657122
  hyper
caaacaccctccacccactgcggtgccagaggagggggcgtaggcgaacctaccgtccactgaccgcggcgcctcaagcgtcccgagggcacccagcctggcttgcgggtgcgcatcgtggtgaagccgggtcggggtcggcgttgcaggctcccctcttcaccgcagaggaggaaatcgagctcggccgggcgcgctgcaagtcctgaagttccgacgagtggaacgtaggtagcaggtctggtctgggatgcgacgagaactttccactagagttgcatggtggggccccgctctggccggagtcccgggggccacagatccggtctcccgagggaccggcgcggggcgaacgaacgggctgcgggagtcggagccgcagtccgggagccgcgatagactgaggccgagcgacgggccagggggggacggcagtcctggctgctcccaatgggcccttacgggcattattagtatccctttttaggggcacccagagagtgtgggaaaaggggagcgttcttttcactcctgttatggcagaacagaacttacagtgctcggcagcgtttacgtttatctggattcagcgaagtgttgttacaggcttttttttttttaatttgagaccgagt

SEQ ID NO: 221858 - DNA, 420 bp, Homo sapiens
  chr2:115918841-115919261
  hyper
tcccacggggctccgggaccccggtccccgggctgccccctgccttctggggcgctggagcgcgcgcagtggcggagctggagccacccagtgcttcgcacgggcgcgctccgcttctccgggttttagcggaagcctgcggggggcggggtaaccgcggaagccggcggccgtgggcgcgcgggttgggggctctcgcgccgctccgggctctccccccccccggctgcggttgccgaagagaggccggagcgcggcgcccggctgctccacctggcgcgctgagcaccgcgcggggagcccccgggggcgggcggtggggggcgcggactgcgggaagaaggcacgaggcgtcgccgcagctcggtcaggggccggggccccgccgctcgccgctgcactaacttgccgcttggtctc

SEQ ID NO: 221859 - DNA, 180 bp, Homo sapiens
  chr2:115919439-115919619
  hyper
cgacgggcgcccgtgacctgcgaacgctgccaagtgacggtccccgagtctgaagcgcccgcgaggaagcgagcgccagcgcgggccgccggcgatgacggccgcgaagcaggagccgcagcccaccccgggggccagggcgagccaggcgcagccggcggaccaggtgagagtcggcag

SEQ ID NO: 221860 - DNA, 252 bp, Homo sapiens
  chr2:119613017-119613269
  hyper
ctggggctggcagccgaggaggctgcagggacgcgcatggaagagccggtgcgtgggagggtttgcgggggggacatcgcgccccctaggggtgaccccagtgggtcccgtgtgctctccgcggagccggcggagccttgtcctctgcacccggcgcgcagcggccccttaaacagtggaaccgtgaggccgctctaagccgaagggctggaatctgggtttctcgggttttattttagaccattcggcacc

SEQ ID NO: 221861 - DNA, 180 bp, Homo sapiens
  chr2:119613353-119613533
  hyper
agtctgatgagctcgcgggcggctgaaggccggcttccctgtggggaacgcgccacctgtcggcgccagtgagaactgcgtctgtgtggcgccctcggggtattcggggctgcggggagatgtgtgcctgaagccctgcgcttgcggtggggacgtccggcctctttcctggcaattgac

SEQ ID NO: 221862 - DNA, 276 bp, Homo sapiens
  chr2:119769120-119769396
  hyper
agaaggggggcttagtccagtggcggccgcgccgcaggaggttgctttctctctcccggcacgcggggtcgctgcaggccgtgctcagccctccaggagccggccggtgtccgcgctcgcgggcggctctgggaccgggagaggctgcggctccccgctaaggctcctgcggccggcgcctcctggacccacccacccacctcggaagacagacgcctctcttcagctgtaccggccccaggctccgccaaactccctcctcgccctctccttccg

SEQ ID NO: 221863 - DNA, 929 bp, Homo sapiens
  chr2:119915696-119916625
  hyper
tgcgcctttgcacccgggggctccccgccgggcgcggcagtgtaagggtcgcagatcatgcggcaggtgcccatcatctcatagtgcgcggcgcctcggggcgccgcctgcagcagcagcggcacggcgatgagcagcccgagcgccatggccaagagtacgccgacggccgccaggcaggcacgccgccgccgctgccacagccgggaggcgaccgccaccagctcctccttgccgcccggggaggtaatggtggggcggcgcgggcggccccgctccccgcgctcggggaccggctccgcgggtcctggccgcgcccccgacgtggcgacccccagccccggctacccaactacttcagcgagaggcgccgggacctctgagcctgggcccaccgcgctggggctggtcgggagagccgcggacgcccgcgcgcatgacgtggggcacacaagacgaatccggcgccccgagggtccggcgccggccagggagtgcttgcgctggccggggagtctgcttgcggcgtccggcgctggctccgcggcgctgcctcccgccaggctccgctccgctgggtttagtggggctcctagcgcagtgagggcgccccggctccgcggcgcgctctgctgtgctctctcgctgttcgctggctcccgcgcggaggggggaccccgctaccctgacgtaaggagtccggggctgagcggcggaggcggcgaagcagcgcgcgctgccatcactcgggagacggagccctcatgtcatcagcctcctatctggcggcgtcctcggcagaggcggtgaaggcgcggttccccctggcggctcccaggagccacaagtgggcgcagcgggcgcggtcccaagccggggcacatcggacacacccacccgcggccacactcacgcgccccccaccgata

SEQ ID NO: 221864 - DNA, 342 bp, Homo sapiens
  chr2:120770809-120771151
  hyper
cgccgcagtacagtccgctgcgctcctagccgagtggacccttcctcgcccgcgcctgcggtagcggccttgtccccggggaggcgggcgggggccgcacccagaccctagggcggccggcccctctctcgtcgggccggcagggcattaatcccgccggagggaggggcggcggcggccaatgaggcagggccgccgagtttcggtcgataccgcgcgacgggccggggcggagggcccggggcagccgggttaatgtttgccgagcggacgcgctccccgagccgcgggtacccctcgctggtccgctgggctgccgtccagcgggagagacaaaagtcg

SEQ ID NO: 221865 - DNA, 660 bp, Homo sapiens
  chr2:127413624-127414284
  hyper
aaccccaccagccaagtctgcagaaaaaaaataaatgaagtctgcctatctccgggccagagcccctcccctcggcccgcgcgggaggagtgtgacccaggtgccgcttcctctcgccgccgagggtcaggagcccgggagcgcgaccctcccccggcccggcctggcccggcctggccagtccccgcggtctctgcccgggctgacgcccaggaatgtggtcgacgagaagccccaacagcacggcgtggcctctcagcctcggtgagtacccgccgtggggaagggtcctggggacccactggaggccgcggcccgcagcagccaggggccgagccacggccacggacgccctggtgtcccggtccgtgccgggcctccaggcggaggaggcgtccgctgggctcagatccccgactccagccccggttccccggcgcctgggctgcgcggagtccctgtcccgcgtcccggacccctacgcgcagcctccacgcgctccgagctggagaagccgccagcccgccctcccagggcgtgtcgcccgctttctgtttctttgtgcggggcatgtgaaatgtgtggggccagaattgtctccctaaagaacagttaggtgagagttcacatcacaagttgcttctgtgctgctccccagcc

SEQ ID NO: 221866 - DNA, 769 bp, Homo sapiens
  chr2:127534437-127535206
  hyper
ggagggaagcccgccgggaagctgaagacagtggtcaccgccctcggtcattacttcccgggacccggaccctaaccctgcgccacatctccacccgcccccagccgtgtcctggctgcgcagctggaaaggttgagcagctcactgctgtccctctgttcggccttggacacatcgcctgaactcctgggcgcctctgctgttaagtgggggacagcactatttactggggaggaaaactccaggaatgtggaccctggggccacgcaggggttgggaagtgaagggcagggaacgcgggcggcgcccggggtctgcgggtaggcaggcggcctggccgcggaggcttccccgagtcctgcgccttcctagagagggaggggctcatatcggctggcacagccaccacgggtaccgaaacttggggacgtgcccgaccatgcctcctccggtggcccgggggccaccccgcattgcttagaagtctcgcttcccgttcctcctctctggttcagctcattactcttccggtgaccctgggtatgccacgcttattctccaggcctcagtttccccatctgtgctgtgaggagtggaaggaacgggatgactaggagccttttaagaccgagtattcgaggttctttccggccccgcggagccaggaggtgccagccgagatgcgcgtgccgcgcgcgccctccagtgcccggttcccgcttctgcacggtcctcgctgggcaagggcgtcccaagaaaggaggaaagg

SEQ ID NO: 221867 - DNA, 753 bp, Homo sapiens
  chr2:127863362-127864115
  hyper
ccacccggcggccgcgcagcgggtgggagagggggcaggcctggccgcggggcactggggggccaccctggcagaaacacagattctgcaatctcagatttcagagttggagtcgtcaggggaagtggcgtcagcagctggcgtgatccaattcaataaaccagaggtggcttgggatagacaactgaccgggtgcagacccccgcccctcaatctctgcatttcctgcacgctctgggcaccctgggaggccccggctccatcccccattccagctctccgcgaggaggggtcgggtttcctgtggcgccttccacgcgcctcctccaggccagctccccacccggccgtgggctcccaaagccagtgccgccacccgctccccggccgccggaaacgctaagcccctgctggggcgagggcacctccttgcggggtgcgtagccctgggctcccggtggggccgggctgggcgggagcttccaggccgcaggcacctctcgggaaaggaaacccaatccctccttcggcccacggagaacgaaagtggagaagcagtgggaaggaaggaactgtgggtgccggttcgagaagcagccttgggagtccgggggaatagtgtccccaggggcagagggacatactccctctcgccccgagcgccggcccagcctaggttgcctgcatgggcctggagagctgagggtcaccacctggcctcccagcctcccggcccttggcctccaaagcggg

SEQ ID NO: 221868 - DNA, 105 bp, Homo sapiens; identical to SEQ ID NO: 198431
  chr2:128459399-128459504
  hyper

SEQ ID NO: 221869 - DNA, 429 bp, Homo sapiens
  chr2:130737208-130737637
  hyper
cctggctcgccctgcgccagaggctcgcgcactcagcaggttgggctgcggcggcggcggctggggaagccgaagcgccgcgcgtgagagatcccggatacatctgcggtttgggctccgccaccctccgtctctctcccgcaggtctctgagccgggtgcggaaggagggaacggccctagccttgggaagccaaagcacacccctggctcctgccgacaccgccctccttcccttcccagccgcgggcctcgctccgtgctcggctactctgccgggaggcggcggcggctgccagtctgtggcgagccctgctgccctccagccgggctcctccagccgggctcctccaccggcccttgcaggggcgcagagagctcggcgcccgcccttccgctcgcctttttcgtcagccggctggaggagcat

SEQ ID NO: 221870 - DNA, 209 bp, Homo sapiens
  chr2:131113001-131113210
  hyper
cctggtgccccagcgcatccgggaaaaaggaaccacaaattcctcgggaaatacacagagaagatcccgctgccacttggcctttcccacggcgtggctgcccctccccggcctcccttgggcccggctggagcgcacagcgcgggacgcccccgacccggggtcctctggcacgaggggcagcctgatctcggcgaccgtctccaccc

SEQ ID NO: 221871 - DNA, 213 bp, Homo sapiens
  chr2:131114254-131114467
  hyper
tccgggcccgaatccgcttcccgtcccgaatccgcgtcccggccatccgcgtgtggtccaggcggtctacctggcccctctgacctcggcttctcccttggtgaaatggggacatgaatgaccaaactggtctaaggattaaatgatgtgggtgaaaagcacttagtacatattgggcgcacacttcgtaggggcgttcgtcactgcctataa

SEQ ID NO: 221872 - DNA, 514 bp, Homo sapiens
  chr2:131513377-131513891
  hyper
ggtaagactcgtgacgaggctccgggtggccgagcccttccgagagtgctgcggtcggcagggctgggctggctctctgggctgagggggaggggctcccacacctgtgcgctcccggaagaggggacagcggcgggggcgccgtgcgcacgggggcgaggggagacgactgcacctgagggaggcgcagccgcaaccgggtgggaggcagagacacccagaaacagagacggggcgatacgaacagacaaagccggctcgagcgcggcccgagcggcggcgcagggaggcggcagcctggcggagcagcccccaccgcggccggcgcgccccctcgccacccctgcgcgccagcgccggcccgcccctcccgctggcctctggcggcttaaccctcgcctgcccgaccccgcggggcccctggagccgcggtgggtgggtgcgggcgccgggcctccccctcccggccgcggcgcgcggcgccgggagctgaccgtggtgctgagcgcggctc

SEQ ID NO: 221873 - DNA, 300 bp, Homo sapiens
  chr2:131720734-131721034
  hyper
gtcactgaactcttccacacgctttctaaaatcgtttggcatggactttcctcggccccttaatcaccacagggtgtgtcctgcccgggctgtcaggagggtcgcaggcgcccggtggtccacgctcaccgtgcgcctggctgagcgcagatgagggtcgtgtcccgtctgagcgcgctccccccgccggcgcgcacgcctgcccgccgggtctctgccctgggccgagcggggccacctgcttgcgtcctcgccctggatggcgtgggaggcgccgccaaccgtctgagctggaatcct

SEQ ID NO: 221874 - DNA, 105 bp, Homo sapiens
  chr2:132088694-132088799
  hyper
gggcacgtctgggccggcggtcagggcagcagctggcggcggcggcggcgggcgctggggacgcgcgatagcggggaaggcgctgctgggacgccaggggactga

SEQ ID NO: 221875 - DNA, 239 bp, Homo sapiens
  chr2:132182876-132183115
  hyper
gcctcggcccgcctcgctccccgagccgccgccgccgccgccgcctgccgaggccccctacgccgtgcccctggcagcgagaactcatccaccggggtgtccccgcagcgagcggccgctgaaggctccccgcgcccgctcctcgccgccgcctgacacggctcccgggcgccctcggccctgtccgcgcccaccgcccggctggcgcgcagacccggttccccgcccgcccggcaacc

SEQ ID NO: 221876 - DNA, 269 bp, Homo sapiens
  chr2:132767360-132767629
  hyper
aggcggagggggcaaaaagccgcggcggcgggggcaaaaaggagcgggggcaaaaaccccacaaaaacccgcggcgacggggggaaaaaaccgcggcggcaaaaagcctcagcggcaggagcaaaaagccgccgcagtggggataaaaagctgcggtggaaaaaacccgtggcggcaggggcaaaaagccgtggcttcgggggcaaaaagccacagcagcaaaaaccctcagcggcgggggcaaaaagctgtaaaaagccgcggcggcg

SEQ ID NO: 221877 - DNA, 234 bp, Homo sapiens
  chr2:132767695-132767929
  hyper
gggcaaaaagccgcggcgggaaaaaaccgcagcggcgggggcaaaaagctgccgcagcggtgacgaaaagccacaggggcgggggcaaaaagccgcaaaaagccccgacggcgggtcaaagagccgcaaaaagccccagcgtcgggggcaaaaagccgcggctgccggggcaaaaagcagcggaggcaaaaacccgcggcggtggctgcaaaaagcagcggcggcaaaaagccg

SEQ ID NO: 221878 - DNA, 82 bp, Homo sapiens
  chr2:132795884-132795966
  hyper
cgggggcaaaaaaccacagaaagccgaggcggcgaggggaaagagccgcggcggcagggggcaaaaagctgcaaaaagcagc

SEQ ID NO: 221879 - DNA, 98 bp, Homo sapiens
  chr2:132796086-132796184
  hyper
gcggcaaaaagccgcgctaacgggggtaaaaagccgcggcgacaaaaagccgctgagagggggcaaaaagcagcgggagcgggggcaaaacacaaaaa

SEQ ID NO: 221880 - DNA, 100 bp, Homo sapiens; identical to SEQ ID NO: 198436
  chr2:132796304-132796404
  hyper

SEQ ID NO: 221881 - DNA, 821 bp, Homo sapiens
  chr2:135475591-135476412
  hyper
agggtctgcagacgcgccctccggaaacatcaggtttcagtggcatccatccagatgaggttggtggcccaaatccaaatgtcccattcctctgccccatcatgagacgacggggcagggacccactgtgacccgcgtccgcgattagaatcggggactgcccgagaccagaggccgcccgagtcccggctcgctcccctccttgcgcccttcgccggggcgggcagccgggcggccgccgagggacatctcgcggctacacccgcagagggaagttctcccaggcagccggcggagccgcaggggactacggaaaggaggatgcaacgagcctgggtccctccgagctgagtagggcccggagtggcccagaagcgctcgactccgaacgcaaaaaatgcctcccgcaaacttttcccgtgggcgccggagggcctggagctggcggagaggagggcgcgagtccaggcggggtcggcctgaaggcagctggggtctgggcttcgagggaaggaaccgcagccgaggcggtgccggccgcagaaggtggggctgccgctctcggctagcggcgttctcgccgggaagtcggggctccgcgcccccgcgcgctccgagccccgcgcctcgcccagcgcggcccgcgagtggggagaggcgggccccgagcagccaccccggtcgccggccgggtcgggcagctcgcgctcacctcggtcctccagcccgtcgctgaactggccgctctcgctgatccgcacctgccgctcctcctccagctggggcggctcgcgcaccggggagctcagcggggccgggcc

SEQ ID NO: 221882 - DNA, 88 bp, Homo sapiens; identical to SEQ ID NO: 198446
  chr2:136288366-136288454
  hyper

SEQ ID NO: 221883 - DNA, 360 bp, Homo sapiens
  chr2:136873992-136874352
  hyper
cattctcctaaagcgcaaaaacttaattttcccacgcctgcctaaatacaaaccattctgggcttcaagcaacttgtagtgggtaaagagaatgcggtcttaaaacgaaggcccttcggtgcttggggtatattgggcgggagtgtcagaaaatgaacaaacggcacctcctcccccaagcgggcgctcctccggtgtgtgggtctcttgccatcctcgtgtttatcacttggcgcgtttgggacgttagggagcggggcattttcctgggtggagaaggtaacggggtctgcacccgtggtcctcgccccaagtttcatttcctcactctcccgggtggcttcccattaccccgccact

SEQ ID NO: 221884 - DNA, 1680 bp, Homo sapiens
  chr2:136874441-136876121
  hyper
cggctgcccactacacccacgccaaccgcccgcaagcagcgctgcaggggctccgctgggcgacacgccaggctctgtcccacagggtgctggggagcgactgggcggctccgccgcgagcgtctttgaattgcgcgccgctgcaggaaaccaaaaactccctagcaagagggtttcaaaaggtttctggaaaccaccgacggttaaacatcacaactggactcggagagagccaaacggtttccccacttgcacctgccagtcttcgcggcggcgacctggcagcccaggtgcggtcttaaccgcccccgcccctcaccccgtacccgctcctatccccggagcgcaaatctcagggctggcagctgcgcggtgtcaaaggggaggtcaaaccactccgctgacctctgcacgaccccaaactctcgaactgcaggacccactcgcggccgtggggaagaggcgcgcttcggacggcgggaaggttttccccctcaaacccaaagcgcgcgggcggatcaactcctagctgctgccaccactcgatcccctcagaggatcggcgcggtgggtccacccgcctctcccgccctctgcctactgtgctgggagactggcacagctccgtcggccgcacagagtttaacaaacacgcacccagtgtcaagaacagtcaccaggcgcttaaccccgaagttaaagcgggcgcaatctcctcctgggaactcagcccaggcacgccgccctccgcctctaaattcagacaatgtaactcgctccaagacatccccgcttccccaaggaagagaccggtggtctgagtcccgaggcagcgcgcacgccttctctgcacttgtgcacagaatgttcttacgtttgcaaacagcgtgcaagccgccgcgcgcggcgggactcaagggggagacacatgcagccactggaacgctctttccagtcgtttctcctcgactcacagagaaaaagattccaatcctgctccccccccacccacccgcactatataggcatggtcaagaaaactcctttcggtgacccttttttggagtacgggtacctccaatgtcctggccgcttctgcccgctcggagaggggctgcgctctaagttcaaacgtttgtacatttatgacaaagcaggttgaaactggacttacactgatcccctccatggtaaccgctggttctccagatgcggtggctactggagcactcaggccctcggcgtcactttgctacctgctgccgcagccaacaaactgaagtttctggccgcggccggacttttataaaaacacgctccgagcgcggcgcatgcgccgctggggcggggagggagaaggcggggtgggggagaggggcagacgcgaggaaggagggcgcaggggcggggcggagaggtgcgcggcttgggaagcccaggggaccctgctgtttgcgggtggtcggtagtgagtccggagccggacaggacctcccagaggcatttcctaagtttgagggaagcgggatgcgcctgaagacaggtgggaagcgcgggctaggaacgcgtctctctgtggcgcgtccatccttgctaaagtggatggaattccagacctgggaatgctacagtagagacactgaggcccagggaaggggagtgacttgctggagtaaccca

SEQ ID NO: 221885 - DNA, 240 bp, Homo sapiens
  chr2:136876822-136877062
  hyper
gtttaaagcgatctcagactggctgaggtttgcagtgggcgcgcagacagtgctttccccctcgcgccacttccctccggcgcggagactgggtggggcgggggagcgagtgtggggcggggccgagaaactgcgtccgcaggcggggtggccgctgcggagatagctgggaccgaggcgcgtgcgtcgcgacacggaccccagaggcccccaccccgaaatggtcccgaggagagggat

SEQ ID NO: 221886 - DNA, 420 bp, Homo sapiens
  chr2:137522444-137522864
  hyper
tttctcctagtaacaccgaagccctctcgtgcccggggactgcagaggaacgccagaccatccggaccttgcgggatggctcggtgtgtgtgttttactgtgtgtcggagtgtcgcgcatgtgtgcgtgttggggcgcgttatcaacaggggcctagggcacccccactctttcttgctctcttcccccatcacttcatggacctccgaggcgcaaagcgctcgaccctctcctgggctcagtggcttgggtactccgggctgagctcagctggggagtccccttacccagcccgcaccggcaccccgaagcttcaaagttgcggcaaacagttgcggggagcagaggaactgaggtccaggccagcgcgcccgcggtcgctcgccttggggagcaggctgagccgagggtcgtgcgggt

SEQ ID NO: 221887 - DNA, 180 bp, Homo sapiens
  chr2:137522920-137523100
  hyper
gaacagctgccggggtaggcgaggcgcaaggtggctccccgcggccccgcgccccgcggctctcggacgcaccaggcagccaatggctgcgcagaggtgtacagcagatggcgtctgactgcgccgttccttcctcctcctcctcctcctccttctcttcctcctcctccttctcttcct

SEQ ID NO: 221888 - DNA, 360 bp, Homo sapiens
  chr2:137523130-137523490
  hyper
agtcgccgccgggttgccagacgctggaatgggtggtcttccgacacacaccaccatctttcttgcgctcgggaagctcggggctcagcggctcccagaggttacggcggcggctctggcgagacgggtgagtgcaagcacgcggagccccgagtcggggatgccgggccccctggccggccgactggggcgcggggtggcagcgccggggaagggggcgcgctgccggcgcagactttgctctttcctcgccggacagccatcgtcgccccttctcccagccagacgcgggaacttggaagcggatcttctcggacgcctctggcttggggctgcgggaagcgtgggctgcccggggcg

SEQ ID NO: 221889 - DNA, 600 bp, Homo sapiens
  chr2:139537456-139538056
  hyper
accgcttatcaataaaccgcttccttctcccggacctacttcccggccaccttctgcctactttaccccagcgctcaagtcccaacccgtgctaagcccctgagtcgcctgtagatcccgtctattccgttcttcaattcttccctttcgacctctaaggcaacccaaaactccttgccctccgcgcgcccccaaccccacttcccaagcaggcccaggctgggctccaagtcagccgcctgcgcggttttcccgccgaaacgcgtccccggcgtgtgggacggcgcgcgggccgggcactcaccagctgcagcaagccagggaccaccacgaggggcagcggccgcaggcgcatggtgccggctggcgcggcttttcacgagctgcgcgccctcgcctgcctctcgcgcatctccacttcgcggggcaggactgaggacgccagggacacagcgcggcgcttccctcccggaatccgagcgctgcgccgtgccgcgcagctctggccgggtgggcgggcagggaagggggagggtgggcggaccggaggtgcctctcccggccccccgcgcgcccctcctcggagggggccggcaaaga

SEQ ID NO: 221890 - DNA, 149 bp, Homo sapiens
  chr2:139538087-139538236
  hyper
gcggggggcttcagtcgcgccttggactctcccgcttggccgggcttggggtgagcgcgtggggcgcctgcgggagggaggcggcggctcgggcgcttgggtgatgggttcagtgcgaggctgccctccagatccgatcccgccgggcg

SEQ ID NO: 221891 - DNA, 1039 bp, Homo sapiens
  chr2:144694286-144695325
  hyper
tttgaaaaggtagtaggcatcggtgtttctggttttgcttagtgcgtcttcatcgtattccctcgctgaggactgagcctggccgactcagggaaccgagttcaatgaaatcctcagacgcataaagcacagggtgccggcccaccgagctgcgctcccttcccgggggtgcccgagagagagcacgcgagcccggcgcagccaaacccgggcaggggtgggtccccaccgcgtgtgcgtgtgccagcctgggagtgtcggcgcgagcgtggcgggtgcgtgccggtgtgtgtgcgtgacagcgcgcgcgtggcagggagttcgcgcgccagggtgcgcgtgccagcgcgggtgtgcgagggagtgcgcgcgggtgggagcgccaggggctggcggggcccgcgccctgggacgagcccctcgtgctccggctctgcgctcccgcagcgcccacgcagccgagaggagtgggtgatgacttcgtgacctcaacgtcctcccccgtccctcgacatgttcccgcgcctgaaaggtgcagaaaactccccccaccgctctggacgagactgagctaggcgtcgagggcgggcgccgccgcagaccggagctcgggctcgctggccgctcaggcgcagcggtgtggagggaacggacgcgcggcaaggcgacccgctctgggcaacgcgggcgcagctgccccgacgcaaggcactagctggtcgggggctcgggcgagccggggccggcgtgccggggcgtgcgctctctcggcaggcgagcgccgggctccgcggaggtccctgcgcccactgcctgcttctccgcccggcgacccggagtccccaggctgcggtgcgccaggccagacctgaccgagggcggaagacccgagcggcagggaggcagaaagaaaagaggtagcaagccccagacaagggatccttaattacagataaaaggcaaacaaaaccgtacaccacattttccacgtgtcagctgacggccgcgacaaaaggaaacagaacgctggggggtgggg

SEQ ID NO: 221892 - DNA, 33 bp, Homo sapiens; identical to SEQ ID NO: 198457
  chr2:145090080-145090113
  hyper

SEQ ID NO: 221893 - DNA, 515 bp, Homo sapiens
  chr2:145273318-145273833
  hyper
aaaagacacacacacgcacacacacgcgtacacacacacaaaacctagagagagagagagagagagagaaaagcatcatttgtctctaatcaaaattctctcgtctttgtgttttgctccttccagcacctcacactgcgcccccagccgccccctccccgcgccgcgcagctctggggcaggccgggggcgcgcacaattgtcttctctagaggaaagttgctccaagtgggcccgggcggtccccgcgaggcgcgggctggggctgcggaggccgggaggccgggtgggcgctgcgtcccagcgcctgcctcgggagcgtctacgcggccccgcgccgggtgatcgggctgagagcgaggggagcgagaagtttcctttccgagtctgggctggcgctcgttcgcttgtttgttttcgggggttggtttctttctttttaaactcagttatcctccgtcagctcccccacccccccccggcaccctcgctagtccccagccctctcccctccc

SEQ ID NO: 221894 - DNA, 1380 bp, Homo sapiens
  chr2:145274038-145275418
  hyper
tgcccctcgaacccccatctcctttctccttcctccttcctgactcagcctggataacgggctcctccagaccatgtagaaactgccgggaaaagtctcgctgcgccctgcgactccttcagtccccggcctgggggcagagcctgctggagaggagtcatccgtccccgagccatcatcgaccccaccggaccccgcgcggggccggccgactccctcccaccccggggtctgggcgcgatgggccgggccccgctgcccgcggaccgttacttggcgcaccgagaagcggccgggcgactccggcaagaaactttaagcctcgctgaggcgcagacccggttcccctctcctgccttcgcagtctctctgccacccccgcccccgccccgggatcctgcgcgatccagcgcctgggcccccgccctgccccaggcggacgctcccgaagcccggccggagacccggcgggccgggcgcgagcggagcgggaggcggaggcggagggagggcggaggcaggggctcgaggggggcagcggggctgggggcgcggggccccggccggacccccgcgctcggacccccgggtgcctgacgctcactttgcccggcacttccccaacaccccccggtccagccgccgcgcgcgccgggctccggcgccggccgcggagggaggctcgccctagagccctgggcgccgccgccgccgccgcctcggttccttttccctttccccctccttctccctgggtctcgagccgcgtagtggcccggaaaagtttggttcgggctgcttcttaccgtttttcctcctgggattggcttgtttgcgcctcttgcaccgggggccatccgccatgatcggctgcttcattgataagagcggatcagatggcagttcgcatggactcggcgccctgcttcggcagcacgcaggctcgatctagcaaccaaacacagcgacaatgtgggcatcgcccgcgcccattgaaacgcgcgcgggccgcccaggggagccgggccagggccccggcgagcacccatccgcgccccccaacgccaaagcgaaacttcggcggccccctccccgccccccacccccagccttggccccgaggcgctttgtgtttgttactgtttggtgtgttgcacccgcgaggggatcagagagacaagaattacatcttcaaaatgagtcataactcctgaccgtatgagggaatgcacacggcggtacagtaagaccgcttgactcagggctaggcggaccctttccttcgaaaagtcctcagcccccggctcgggaacttggggtgaggcgaggttttcttttcgttctcatcttttctcatccccccaccccccaattcccaga

SEQ ID NO: 221895 - DNA, 180 bp, Homo sapiens
  chr2:145275510-145275690
  hyper
gcgccccctcccctccccttttggagtttatcgaggcactgtctcttcctccccccaccctcgcccccaaattaagatttcccgttttacgccgcaatgataaatataattataagcctctttggacactgtcctttaccccaccccccctcgccactttgacaatatttacttaagtat

SEQ ID NO: 221896 - DNA, 240 bp, Homo sapiens
  chr2:145281791-145282031
  hyper
ttcggtccctgcatttgatctccaggaagggccccgctgcacaggcggaggagcgcgtcgcgggggggggcggtgttcggccccctcccaccagaccgccctcccccagacctgtccccgcccgggatcctgcgacccccgcccgccgcccggtcagctgacctggctcgctcgcctgctccccgcccgccgccctgtttccggtccccggggtccgcgagccgcgctccgagcgggcgc

SEQ ID NO: 221897 - DNA, 900 bp, Homo sapiens
  chr2:148601601-148602501
  hyper
tccctggccactcgccccacctcggggtcctcttcctcttgggcttctcctgaccctttgggtgggcgctccagacaggcccgtcggacgcgatttggaaacgggtcgtgcccggcctagcccgcatctactcgcccggccacagcccagccacagcttagggactttgaggcgcccgcgcccctttgtcgcggtatctctagcccaagcaggccggacgccgaggcctcgcggtatcgagcctccgtccgccccgcctcctcgccctccactccgccccgccctcgctctctcacccctcccccgctcccgcctcgcttccccgacaatctcctcgcgctcccggcccggcacgcgcgctgcgcccggccgccgctgccgccgccgccgccgccgccgctgccgccgagcgttcctccgctgcgcctggcttccagcttcgggccggaaccggaagtttggggggcggagcccggcggaggccaggagaccgaaaacgcggccgagcccggagcccggagctggagccagagcctggaccagaacttggccgccgcctgcaccgccgccgccgctgccgcccgccgccccttccccgcgccgcagccgcctcgccgccaccgccgcgagctcggccgccagtggtcctcggactttaggtgtctgggttgaaggtcggtccggacatcggacccagtcagttcccagactgtccgggcggcagcggacgccgctgccgccgccgcctcttcgtcgcctcagcctggcgttttgttccgagagacgggagaggcgagcggagctgacagtgattttgacagtgatttaaacccgcttttgttgttgttggcttttcgttgtttggttttgtgtgttgtgcgtgtgtgtggcggtttttcc

SEQ ID NO: 221898 - DNA, 215 bp, Homo sapiens; identical to SEQ ID NO: 198460
  chr2:148602728-148602943
  hyper

SEQ ID NO: 221899 - DNA, 1439 bp, Homo sapiens
  chr2:149632585-149634024
  hyper
ctccatccggttccggcttgggcagccagaccggacttgcaggctcttggaggtcgcatcctgtccttcccccggcaggtagagtgactacaagtcccgggatgcgcagcgctcggagtcgggcgggggccgggcggacctctacggtgacgtcaccgtcccggggcgggccaggggagggcggggcggaggggcgggtctcaaggcggcagagcgcgctggtgctgatgcaggatggctgagcgcgcaggagcccgggaggtctgagccgggcgaggctcgctccctgcgcatcgcctcctccgcccgccgcgtggtcgcgggcaggtgggccggggggcgctgggcaggggcggggcagggccagggcaggccggtctgcagccggaggggccggagcggagaagctgcccaccttcccgggctcggagcggccggggctgctcagccggccgggctcgcgatgacctgctgagaagcgtcgtcggaggctgcaggaggcggcctagctgtgggcggtgcagctcgcggcctcctccctcgtcgttcccggccccggccccccacccatccccgtgccccctccctaccgccggccgagatggcggatccagccgaatgcagcatcaaagtgatgtgccggttccggcccctcaacgaagcggagatcctccgcggggacaaattcatccccaaatttaaaggcgatgagaccgtggtgatcggggtaagtggctggggcgtctgccttccctgctgctccgcgccgcagctgggcgccccgacgccccagacgcagcggaggtgtttaggccgccccctcggacattcccgcggggctggcctctcgggtggacctgaccagagacccctcgccccgcgcactatggttccctcccgggcgggtggagaggcggccgggagcggcgggccgggcgggggtggcgggggtggggatggggggcgaagacgggctcggcgccgccattgttcgccgggtgggggcccgggtgggcccattgttccccacgctcgcctcgccgcgtgggtagtgtgttcgggtgaccctcaagccgggtgcccaggccccctttaaagtgtgagctctgcaacccgcaaatgcttctgggcatcaatcaattcgatttaccaaacgccttgcctcttcttctcacgaccctagcaaaaaagaaagaaaaaggggtacaggaaaatttctagtcgcgtctcggagctcccgcggcagtgtagacgcggctccccgcggtgttacacctggctccgcgcgcggaaggcggagggttgggggagtactggtggcctcggtgtcccctggaggcctggtgtgtctcccgcttcctctcacgcctggctgccctggatgtggagtcccggcttgatccctcccctctgggatgacctccctcccatgtctgcag

SEQ ID NO: 221900 - DNA, 720 bp, Homo sapiens
  chr2:150186614-150187334
  hyper
cagggtcatttcacactgccgggcctgcagccacgcacgcagctgctggcccggctgaggctggcggctagggagaggcgccagggggtcgcgcacaggaaggtatcggtgcaccctgagcaaacactgctcgcttccaacgctcactgggaacaggcttcccgggaaggtcccaaatctctccagttccgctcaccctgcgggcgggagcgcggcgcccgggtgccccacctgcgccgggcggtcggctcccgctggccggagtttgcagacttggcgctcaggccgattctcccggagttgggccgcgcgcgccgggccaatgagcgcgccccgcggagggctccgctccccccgcgcgcgctgattggtcccgcggccctcgaggccgggccggccgcggctgcgggcggcggccagtgcccggcgcgagtgggagtggcgcgcgcgcccctagccgccccccgcctctccccgctgcgctccctcgctccttccctgagctcccgggctccggcagcgggctggcggggcgccgcattgcacactctgggggcgccgcagtgttcgtgggatggggcagcgggctgcagctggcggccggaatccgcgcgcagcccgggtgagtagaggcgggcttcccgggagagcacaaaagaacaggggattggtgccagcggccccggcttaggcggggcctggccaaggcagggagtgcgc

SEQ ID NO: 221901 - DNA, 131 bp, Homo sapiens
  chr2:152955667-152955798
  hyper
gcacttcggagagcgcggcaccttaaagggaccgaggcgcttcccccgcgctcgcggcggggtcccggggagggggcttctcggaaactcgcctacccgagcggattgggagaagcgctctcccacctagc

SEQ ID NO: 221902 - DNA, 130 bp, Homo sapiens
  chr2:152956020-152956150
  hyper
cagagccaccttccgcgacttcactcatcagcctaatgtgtaaggcatggggttttgtggcttgcttttcgtccgtgtttttgtattgctttggcaattctgtccttagagctgcgagtcacacacatcc

SEQ ID NO: 221903 - DNA, 180 bp, Homo sapiens
  chr2:153192268-153192448
  hyper
ggggccccgggccgggcggcgcagctgacccccgcccctccccttcaccccgtgccgggagcgagcctccattcccgagggggaggctcccgctttcccctttgtggccccccagcactcctcttcacccccctggcagtcccccgcgctcagtctctcggggtcccgggatggggatgg

SEQ ID NO: 221904 - DNA, 720 bp, Homo sapiens
  chr2:155553998-155554718
  hyper
ggacaggcggggctagcgcggctctgcagctgatcacacgcaccaccacacacaccacattcctgctgccccggcttgcgcctcgcatcttccacccggggccaccgaggcgctgacaaggagtgggggaccgaagaaggaagaggcagaggaaaagctagagcggcgctactgtttaacctgaaagtctgaccggcagcccaaggctcgaaccccgtccagcagcaccgctgtcgcctggaaggagggcacagcgccaaggaacccacgagcccccgctcgagtcattctgtgctctgtgcgccaaggatctttctggcagggacagcgcggtgccctcagggaggtgcggagcttgggggacctgcattggcgcccatcgtggtacaccaggaaaagtgggaacgaggaaaacagccgtgagcgcagagtgcgaggccaggctgccgctaccgcccgctgcgccgcctcctgccctctcccgctgggtgagtgcccaggcttcgcgcactgccgtgtctcagctgagcgcgggggcggcctgcgggcccttgagggtccgccggagggccccggtggcgcccgcggaaactcggcggtcgggggacgccaggcggacaggtctctggagtccggaacccgggaatctgagcccggagggcgtgggtagggggcgttgcaccagtgcccggcagacatgcctttgggcgggattttggc

SEQ ID NO: 221905 - DNA, 180 bp, Homo sapiens
  chr2:155555061-155555241
  hyper
actttttaaagactcaccttggaaagaaggcctccgtcccaggggagaaggagaggcgtctgcagggggcagagaccgcagctacctgccgggtgcgccccccacccaggagcgctcgcttcgccccctttcctcccccgcccccacctccttattggtgctagtttgcagcgcccagct

SEQ ID NO: 221906 - DNA, 148 bp, Homo sapiens
  chr2:157189365-157189513
  hyper
cgtcacgagcagggccgattttaaggtgggaaccgctctgcgttcaccttggtagccagcttgggtggtttttggtgttttttttcttttctttttttttttccgaaagaggtgtgacctctcccaggtctgcgcagcccgcagcgtc

SEQ ID NO: 221907 - DNA, 459 bp, Homo sapiens
  chr2:157292163-157292622
  hyper
ccgggggagccgggcgagggttctgggctctgacggcggggtcgcagggtcgcccgcctcctggacacgtctgtaggcctagggaagcctgccggccgggaggtacagagtaggagaagccagatcccagggcggacaacgagaagtcgtcaggtaagccagccccgccagcgtgccggcggacgagtgtctcctctcccgcaggcagatggccagggcggcccgcatgggcgagggcacaggaaatcggacaccgccaccgtcttccccagcctggcctagctcaggctttccagtccgccagcccgctggcaaggcggggcggaggtctggagtccggcatcgccgaggcacaaagcaggaactgcagccaggggcgagggcccttgcgtgtggcgctgcgcgaccccacccggcggcaggacccgcgtccccgtctagtcacgttcattgggccac

SEQ ID NO: 221908 - DNA, 206 bp, Homo sapiens
  chr2:158485092-158485298
  hyper
gctcggcggccgctgcgagcagcaggagagcctggcggagcgctgagcagagcgcccgggtcatcgccaccaggcggccgcgccggggctgcgaggccccagagcagagcgaggcagccggggcagcacggcccgctttgaagttcccgggccgcgggaggggagcgcggcaccgacacccttttgaagtgcgcggttggctctag

SEQ ID NO: 221909 - DNA, 1713 bp, Homo sapiens
  chr2:159313066-159314779
  hyper
tgacgccagggacaaaccctaccaggcacagttgggattggcagtaaggcaaggaaagcctgccccagatttcagagccagcgctggggaatctccctgtcctctccgccaccccctcccgcgcccgagacctgagacaccttctctctcacacccaccctctccaggccctctcgcgctgaacagcatcggtctctatggcgacctgaaaccgcagctcccattggcctgttcaatatgagggccgggccaatggggagggccagccctctccttcccgccaatggggtggcgggagctggcccggggacggcggcgtgctgacgttcccgggagcccggggctggccgggcgggagggctggcagcggggcgggcggcggcggcggcctctgggcagtagagggggctccggggctgagtccgcgtcgacgccggccgcggaggcggcaccatgggcaaggggtagaggggcaagttggccaccgccgccgccgggggtggtgggagagccgctccgggggcgggggccggtgggggagggaggggcgggcagccgcgccgccgcggcacttttttaattttttcgggtgccgcagcggcgacccctcggcgccgatgtccctgatccctggagcgacgacggccgctgcctaagctggaaagtaagtgtgtgggctcgcgggagggcgcggagactcctgcccacgagaccctcggccctcgccccgaacacgcgccagggccaggacctgcgcgccgggggccgggggcctccctcccgctgccgcgtccccagcgcctcgcggccgccgcggctttcctgccccgcctcgtgttcctgcccgcactcgcctgctgctcccctccccccggcaggcgcacaagtttcaccctccatttgcttttcccggcgattcctctccccggtctcccgtacgcgcagcgcacgacctctgcccacgctgggctgttcggattcagagctcccagccccgaacttgagcgccgcgctgagccctgctggacgccctcgcggcggcttccccgctgcctgccgccgcgcgccccaagtcgccctcgacaccactgggcgcccgccctcctcagcactcggggccggctgtctgtccttctagccccagatcctgcaccttggtcccctccccgtcttcccacgcccctgctgcccgcgcggtcttgcgtttgtccccgaagtcctgtactccttgccggtcctgcccacccctctgcctagtgcgcccctctctaccggccgcggatcctcacgctccacccctcccggctccccagcgccgagcctcgccgctgccctcctgcgccgccgcttcctcctctccctgccaggagttgaagcggagctgcggcacctccctggcggatctggtatccccgcccgctgccgaggctgccggccctctcccctggaccgctacccggagagcgagcggcggggccgggatttggctgcgtgttggctgagtgcgacacaccgcgagcgcgggcagtggaggtgccgcggcggccgtggccgctcggggcgcagcggtagtcaggtgtgtgtgtacagcgggggacgcgcgctgccggctcctgggctggcgacagattgtgcaggaatgcgaggaatgcaccaggggcagagtccacacagcccgccgcggctgccctagcgccttccctccccagctct

SEQ ID NO: 221910 - DNA, 506 bp, Homo sapiens; identical to SEQ ID NO: 198493
  chr2:160142449-160142955
  hyper

SEQ ID NO: 221911 - DNA, 503 bp, Homo sapiens
  chr2:160654215-160654718
  hyper
cagcaaccccactccggccgcgcaccagcaggggaaatcgccaccaacgtccccgcttctcatttcagcccgaaattgccctgaaacggcgcccgtcgtgcgactccaagtccctcagttctccggccaactggcctaatttgggggttccctccccgcggagtggggtctgcggtgaggatgtggactccgaggaagacagagccctcccttattctcggccacctcccctccccgagggcaggcgggtgagaggtgacccggagccaggacccacgggggacgggcgtgcagggaagggcgggatggccggccgggtgttgcgtctgcgggccgccctcgggtgcgcggggacgaagagcgtgcgttgggaagggggcgaaggcggtcgcgcacggtcccggcgagggactacgtaagggcttacccgcgacggcagcagcggcgaggcccagcaacggcagcaggagcgcgggcagcgcggcccggagcatgacggcggg

SEQ ID NO: 221912 - DNA, 104 bp, Homo sapiens
  chr2:160654789-160654893
  hyper
gcgtgcgagtttaatcccccccccgggcggaacgtgaacggcactgggggctcccaccaggagaacccgggtgtcccgtcccgcaggagcggctggcgcgcggc

SEQ ID NO: 221913 - DNA, 759 bp, Homo sapiens
  chr2:160760623-160761382
  hyper
aatccgggaatcgtggggaatccttggcgctgtgggtggaggctcctcttggccctgtggccaaggtgaccaagggccgaaggaaaagcgagaacgggagggacgggacgcaagagggcagatggggaaccccatactccagcaacattatataagagaggcgacgatggagcagcgcacccggccaaaaaagcctccgtgcgcctactctacggtgcaccgcgtcccctctgcaccagaagggccctgtcctcccacatccaccgcgccctcctccgggcccccgagggcactggggcgcttcctctgccagacctcccctgcgactcactcttccggctccagagcccccccgccccaacagcaaagcagccgtgacctgccccaggggcgcagccctgccccaggctggaaggcagcagagctgtggcgtcgaggcacccagcggactgcggggctggcgtgcccgcggttacctgcgcggccagagggctccgcgagatcgaagaaccagaagagcagcatgaggagccccgccgggcggcgaggggtcgcccagcctgtcctcatcctgagctggcgcaagccttccggccgggtcctcgggcgcacgcggctcccgccccgcctgctgagcgcggcctgccccgcccgcacctctgtctaggcctctgggggcgccccggccccgcccccgccgccctcggccaatcagacgtgcgtctcctcggccccggggcggagcgggccaggtgtggg

SEQ ID NO: 221914 - DNA, 228 bp, Homo sapiens
  chr2:161126710-161126938
  hyper
accctcttgccttccgcagccaccgagcgagtcacgggagacactctggagccattttgcggggctggaattccttcgcccggcggagctcggcgcgcacccgtcagctgtgccgaggaccctgcgcccggggggccccgcggccacgtgacccccatctggctctcggcctggactgagggggctgagctcatcgcgttgctattcgaggggcagagactgcctggc

SEQ ID NO: 221915 - DNA, 747 bp, Homo sapiens
  chr2:161263704-161264451
  hyper
cccccggcccggcgcgcttctgccctcgccggctctccgctcctgcccctgccccttcctccacttcccaccctgcccggcccgggcggcggcggcgagggcatctcccctgctcaggtcgccggccgagcagtccccgcggccgccttcctgggaaacaaggtcaccgcccagccggtccctccgaggaggcgcggagcccctgagcgcggccccctttgtaacgcggggctcgccgacctcggcgcggcatcccggccgccgcctcacctgcttgcgatagggcgtccggcagttgctgctgcccccggggttgccactgctgctggggaagatcatcgctgcgggcggcggcggcgggtgcgggcgcgggcgcgggcgcggggcagcctcgccgcgagggggagggcgcaaggaggtggccggccgggcccggggccgcggcagctctgggaactccctctcgccgcgcggcggcggccggcgggggctgcagctccgcgctgacttcccctccgccttcgacctccgcactcgcctaaaagtacggcgcggcagcgggcgagactcgagcagctcgggcagccgccgccctgcgtgccatggacgggagttcgcgcgcggagctggcggcgtcgccgactctcccggcggcagcggaggagcagcgccgccgcgtccccacctaccgcggcctcaaccaccgccctgagagcgcgccggccgggggcggggaggcggcagcgc

SEQ ID NO: 221916 - DNA, 287 bp, Homo sapiens
  chr2:162271679-162271966
  hyper
tacacacacacacacgttttcagtagcgattactgtgttgacaccacttccactctgtctccccagatcagcgcttctgacgagcccatttgcacggggactcggccctctcttttcctggcgaggcttttgaacctgtcgccaagccagtacctcagagagaaggaaatgcagagggacgagaaggatgcatggcgcctgcccccagttagatgttcttcagataatctgcaaccaagtgcgctgataaaatatttaataaagagccggtaaacatcactgcaaat

SEQ ID NO: 221917 - DNA, 480 bp, Homo sapiens
  chr2:162275161-162275641
  hyper
cgggcggtcggcttcccccttttttccggtgccccggcttatcttcgctcccagaggtgcgaaagccggtctgccccagccagccagccgccagccaggcgagtcccgcggtcagttagcctggaaggcgggctgcaggctgcctccgccggcccgggcgcgcagccgggcgcacacagccacgcgcacagcgaccgcgttaacacgccacccggcgctcccctttcttcccgccggacagatggtggttttacagtccttgcacaagtaccagccccgcctgcatgtggtggaagtgaacgaggacggcacggaggacactagccagcccggccgcgtgcagacgttcactttccctgagactcagttcatcgccgtcaccgcctaccagaacacggatgtaaggagacctaggggctgggggcgaggcgggcggcacagacatctctcccaccctctcacattctcccgccatgcaag

SEQ ID NO: 221918 - DNA, 448 bp, Homo sapiens
  chr2:162279833-162280281
  hyper
tccgcgccacccctcggctctctctctctctctccctaccccgcaggatctacaccggctgtgacatggaccgcctgaccccctcgcccaacgactcgccgcgctcgcagatcgtgcccggggcccgctacgccatggccggctctttcctgcaggaccagttcgtgagcaactacgccaaggcccgcttccacccgggcgcgggcgcgggccccgggccgggtacggaccgcagcgtgccgcacaccaacgggctgctgtcgccgcagcaggccgaggacccgggcgcgccctcgccgcaacgctggtttgtgacgccggccaacaaccggctggacttcgcggcctcggcctatgacacggccacggacttcgcgggcaacgcggccacgctgctctcttacgcggcggcgggcgtgaaggcgctgccgctgcaggctgcaggctg

SEQ ID NO: 221919 - DNA, 540 bp, Homo sapiens
  chr2:162930215-162930755
  hyper
ggtttctctacccctgcccgggttcgggcgtgcgttctgtgagtggctctccgggacattcaaagctcgacgccagggtcctagcagaagccagggtccgaaagctaagcgagagctctgggacgtcccttcacctgtcagagggtggccttggggcttccgcctaaggggagtccctggtccggtttcgccagcttttgggccatttggggagtttggcgaagaggtccccacagctcgccccggggacgtacgtggcgcggcactcaccttcatcgtcggcgtctcctcggaagtgagcgttcagagaaggagcgcaggcagaagtcaccgcgggcggcggagacgcgcgtcctgcaccgctgctccgggcggtggagtcactcgccgctggcaagtttcggccccgagttaaacattagtgagcgccgagcccgctgggtataaaggcgccgcgggcaggctgcagggcaggcggcgcgggagcaggcgcgcgtggcgcggggcactggcatcccggccggggggagcccgcgaggg

SEQ ID NO: 221920 - DNA, 130 bp, Homo sapiens
  chr2:162930847-162930977
  hyper
ctcggatgcgcagaccctgggccggcgactcggggaccctgctccctcttagctaaaaatgacgtcggcgttcagctcctccaacctcacgtggacaggcgagggaaccgagacccagagagggcagggg

SEQ ID NO: 221921 - DNA, 480 bp, Homo sapiens
  chr2:165477548-165478028
  hyper
tcaccccctaggaccgcctcctcaccccctcgccggctgcccagccaggacactcccccgcgccctccagggttgcctacctgtctgcagcacagccgcgggtcccgtccggaaggggcaggagcgctcgcgcgtgcagccagggggccggcgccaggtcgtgggcgtcgcccctcccctgggcagcgccacacacctgggcggccagcggcgaatcccgggcagccgccctgctcgcggcgctctgcccatcttgcagggaagtggtcattgtcgccggccggggggctcgggcgtcatgggagactcggcgcgtggggagaaggggtttgcgcggcgggaggcgaggtgccggctaggcagcccgagcgctctgcaggtgtggtggcctcgccgcctgcgctcggggccccggcggctgagacgcgcggccgagctatctgcgaggcggcgggggaggggagggggcggaggaggagg

SEQ ID NO: 221922 - DNA, 180 bp, Homo sapiens
  chr2:165478091-165478271
  hyper
gggcggggagggcgcgagagcggctggccggccccgcgcgtggcccggggcgctcggggccactggcattgctcccgcgccgtcccatccgggacgcgaggccgggaccgctgcctcctcaggtgggcaccggggcgcgaggctgagcccagggtctgggcggccccggcgccgctggag

SEQ ID NO: 221923 - DNA, 1225 bp, Homo sapiens
  chr2:165697145-165698370
  hyper
agaggcgcgcaccccgctcgctcccggaactgtcatgcgggctgacagctggcacaccctcctgtcgccctccacccgcctgcagaaagcccactccctacagtcaccttgacattgctcacctgcctgggcctcagcccatgaccaaggaaacttttgccctccctccccaggagctcacttacaggtatcgtccaccgctcccccagagcccaaacaagggtccctttgttacaatttttgctcccggactcctcacccaattcctggcattcagctggcctgtagcaacccagggcagccccggtaggaaggcaaccaaaaacgacccgagccctccgcccgggcggcctccgagaaggccgggaggaagcagcctccccggccgcgtggaggacagtcagtgagtcaggccgccggcagggcagcgagttgccagccaggtgaaacggccgaggcctcgctgtcctcgccggcctcgccctccccggtgagaggcggcgcggcgctctgggcttacctggctggggcgtcctgcgggcgcggggttcggccgtccatcgccctgcggggcgctgcgcgggctccagctcccaggcggcgcgtcactgctggggtgggagaggccggcgggtcagggcgggacgcgcgccttcccgaggccggagcgaagctggctgagcgtcaagagcccgcccgagccgctccagccccggccggcccgcctcccgggtgcgcttccacctgcgggccccggctcccagcccgcgggcgccgccgccgtctctacaaggtctagcgggcgcccagagcacggcggaggaggcggtggcgctgcagcccccgccccgtggggtttactgggtagccatttggcgcctctcggagggagaggagccgccggggctggaaaaggaggaggagcggggccgggcgcacgggcaccgctgccacgccggcagcgcactcccaggctcctccggccgagtttgcacaaacaaaacgccctaggaaaacttttcccgaagagaagttgggagggctgatctctcttttcccacccaaggctcctacgttcttttccaaaggagacagtagctcgcctgttctccctcgcggcttcctctcctactcttcccttccccggcccgcgctcttgccgctcggctctcaagccaggacttgaatggagaagcggcaacccctgcgaggctcagcccagcgc

SEQ ID NO: 221924 - DNA, 269 bp, Homo sapiens
  chr2:165698400-165698669
  hyper
ccgcgggcggggtgcgggcgctggctgggcgctgggggcctcgctggagcccgctctctcactcaccctgccccatttccctgcccggagtccgggagctcgccgccgcctctgcagcacggccgcacataagtggggaccagctcggcggcattggagcgagggaagcagcgagccggagagaggaacggggcgggggtgggccgggagcaagttggaatttccttcccccagggcttcgggtctttggggtccggctggggaagctg

SEQ ID NO: 221925 - DNA, 1080 bp, Homo sapiens
  chr2:166650131-166651211
  hyper
aacctgctagccggagtggaagcgcgcccgcctcccgccgggccctccctctcagggtccccacgctgcgaccctcccaagggcaagtccggggccaccaggtctttggtctccgtccagctcctcaggggccgccccatagggactggcgggggcaccgtgggcgagagggtgtgaccgggctcccccccgaggcgccacctgccccttggcccagggcgcccctttcgggatctctccaggggcaaccgacacactgctctcgagaccgtctccaaccggccacctggaccgtagccctgtccccaacacgtgaacccctgcggccgtcctcccgcctgctctaacgcagcccaggggtaccgcgtctccctccgcctgccgccggcttacctggcgggtgggcagggcagggtggcgggaagcggcggccgggcaggcgctggacgtgggctaggcgccaggtgcaggtggcggcggctgcgactccggttgctgtcgccacagttgcggctcagtagagctcctcctccgccgccgcctcctgccttcccgctgggcctcccgcgttgcctggagaggcagaaccgaggctcggcttccacttggagtctcccaggtgagctccagcctgcgacgtcggcaggggcgaggccccacttccgcgcctgcgcgccagcctcccgccccgccccagccctacctgagcgctccaggtgagaaccttggatcgcgcgcgcagggtgggggcgccgtccgggccaagcctggctgtcgcgcggcttctctctgagtggtcggcgaggctgctgctccgcgcaagttgtggctcccggcccatctacattggaggaatcctgcactgacctggtggcagtgatcaccttgtagccagaacacagtctgctgggtccttggggaaccagaagttctagatttcccccacacggttcctcccttcctcctcggttcgccaaaatgaaggggtgcgctgcctccgaggaccacttcgggagggcagcaactgctggctcatgtggtttcttcgggcagggttcagcagcttctgtcaccagttag

SEQ ID NO: 221926 - DNA, 1580 bp, Homo sapiens
  chr2:168148857-168150437
  hyper
ggggaggtgaggggcgtttatttggagggaagacggggaaggtccactctgcctacaactccgacatttctccgtgtgcctctttgctagctggggacacttcgtggctgattactatgaggagtggttcgaagcctaagaagtagtactcttttcagctgccaaagggagaaggacgggggcgctgtctggtgactgttcgcgtgattccttcaaggcggcgaccacctcctgggattcgctctccagccgcgccgttcgtactcgggtcccgcgacccctccccgctcccccctcgccccagcgatgccaagacgctgaaccgcagggacgaggctctggggacaaagtcaccccgcggcgccctttcctgccaagccgcgggctcctggcggtcagaaagcgccccaggcccacccctgcgggcccggctttccctcctcacctaaggctccggggccacgagtcccccatcctgcgcccctcccgcgcctcccccatcccaaaccccagcagcgtcgctgcctctcccggaaacaagcccgctgagcaaaggcggaggaaaaccttgggccttccgctctgattggtctccccccgccgagcggggcgaggcagcgattggctgccgggcgttgtcagtcgccgaggccagagccatcgccggggaagcgcagccgggctcgggtgcttcggctgccgccgcggctgctcggctagtgcagctgggcgagctcgcgcgggcgccgccgccgcctctgctgctgcccaccccgccgcgccgccggcgctgccggtcttgcaggcggccgccggggaggggcggccgagagagcggagcacgaggaggcgggggcggcagagaagtgatgctggcgccggggatcggggcagcggcagcggagcagcagcatcttcgggaccctggctgcagcgtccctgtggcccgcgcgccagcccagcggccggagaccacgcgccccgcgggtaaggttctgtccggcagcgcccgcgacgcccccgggacggctggcgtggtctttgggggttacgaggcgcgtggtggccggggcatcccgacgaaggtgttgggacccggactgcgtgtcccgacgctgggctgtgctactgcccgcgcccgtgcggctccagctggtgcgttctcccttccgcgctcacagactttgacagcgcggggatggcattgtgtgagtgtggatgtggatgcgtgtgtgcgcgcgcgcggcttggggcactttgcagcgagaacagtgggtcccctctgcgtggcccgacgtccttcaaggacccaagctgggctggagtgagtaggatgctgttggctcggcgggaggtagaacgcacggagcgcacgggaaagtccaccgtggctcgtaaagagccgagcaaattgaactttattgcggtgattaaaaggagctgtggacctggcgcgccaggggagaggcgcgttccacgaggctccccaaagtcccactttgccccggggacttcggaggggaagggaagagagggaaaagtaactgttggtccacattgctgaagaaaaggaggaaaga

SEQ ID NO: 221927 - DNA, 300 bp, Homo sapiens
  chr2:168150565-168150865
  hyper
tctgaggtactggtagcggctcctcctgcctggtggcggcgtagggcgcagcgggacagcttggtggaggcagagcggggctccgacgcccgacggcccggcgtccaggtggggccactgcctccccaggccgctttggcccgctgacctcccaggttgagacccggcctggtgcgcctctggcagctgccaaatgcctggcggctccgctttccgacaaagttcaggcccgctggggtctggtccatcagacctaggacacgttaaccacgcagagtaaccaggttagggtacccagct

SEQ ID NO: 221928 - DNA, 240 bp, Homo sapiens
  chr2:169312731-169312971
  hyper
acgggcaaggcggcccctttccccagcgcggccagagggaggagagaaccggggctcgccgcgagccttcgagagcagcggccgcggaggaggcggcggcggcgggcgggagcagcggcggcggcggcacaggctcggggccagccgggcgcgcatccccgggcgccctgcgcggtggagagcttggcgggctgcgggtgccgcaggacaggagtggacaaagcaagatggcagggatct

SEQ ID NO: 221929 - DNA, 1080 bp, Homo sapiens
  chr2:170218392-170219472
  hyper
aagggatcccgggaggggcgctgcaggtggaaagctgcgctctgagcagagcccgggaccgcgccgcccagcagagaactccgctagggagggcaggctgcaaacggcggagaacctcgttctcccgcaaagtgctttccaggagcatcggaccaacgcccgtgggaacaaagacagggtctccgtggggtgcgctgtcaccgaaactggcggggctgctttctcaagtttgctgccgctcagttcctggcgagcgaagaggggcgctcccgctccggcttcgcgaagcaacctgagcgccccaccgggagcagctcccgcgccgccgcccggccctagcccctgcccggacgctctcccctccggcctcccgcggacccgaccctgccacagccggggaagtgggggctccacgagaggctctggctgggctcttaccttggccactggccggcgctaggcaggcgacgagagccaggagcagcgtgcacgccactgctgccggcccgcgatccatctccgcgacggtccccggcctcgccgttccttccccgggaggtgggcgcgcgtagcacaccgcaccggcagcgcctctgctagcgaacgctcctttaggtctgcacctccgccagctcctagtggccaaaagcctgcccccacgcccgaggcatcccgttttctacccgcgccagtccccaccctccagacagtgcataaagccctttagacccgaccgccccggaacaagcatgcgggaatccagcgggcaggccccctgccgcccggcccgccccctgcactttgcagcgcggggaggagtgggcactcgaacacacgcgtgctcacacagggacactcacacaggcgtgtgcacactcacacacgcactcatacaggcgcatgcactcctaagtgtcacaccaactgacacagattcactcatacacgccagtcacacacgcgcgcacattccacagtcacacttcaacgccgacatacacagtcccctttacgcgtgcatacaagagcacactcctgtgcgcacactctcacaggcacactcacacgtgcacacgcgct

SEQ ID NO: 221930 - DNA, 105 bp, Homo sapiens
  chr2:170430355-170430460
  hyper
agaccttgcccccaaaccaggaaaaaatgcccggcaggcgcagcgtgcactgcggaagtcacgcactacatatcccagggtgggtcgcggcgaggtgggtgaaat

SEQ ID NO: 221931 - DNA, 682 bp, Homo sapiens
  chr2:171627264-171627946
  hyper
atccgagggtgtgtgcgcccagtttccggcgccgcgggacacccacaaccgcggggctgtccctcagctcggccgcccgccccgccccgcccccccggacccgcctcccagccccgccccgggccctcctcgccgcgcccgctccgtcccgcgccctccaccgccctacggcctgggcccgcctccaccctgcctctccgtggttccccgggctgcccctgcccccgcccccgcccccgccacctcccccgccgtcgcccaattcccccagcccccaccctcggctgctgcccgagcttcctccacgcgccgtgcagtctccacggcgacgctgcgttcccgactcggagcccccagctccgcgcgagcagctagccgggctggctctcggtgtgtgcccttcggatggtctgctgaagagggccgccagctggtaagacactccgaggcaacgaccggtctccctctccctagcccggtgtgcagtctgacccagcccccacagcagaccacccccagaccgggcgcccgagtctgcggaccgctctaccgcacctggttctggctctgggccccgggccccgtggctgccaggggccgccgggaagggaggatgcgcgccactggggtgcgcctggcttgcggcaccctcctcccgcagtggtcggaagaggtgaggaag

SEQ ID NO: 221932 - DNA, 171 bp, Homo sapiens
  chr2:172378955-172379126
  hyper
gaagtcgacgccccggtcccgccgcccggccactacccagagggctgccgccgcctctccaagttcttgtggcccccgcggtgcggagtatggggcgctgatggccatggagggctactggcgcttcctggcgctgctggggtcggcactgctcgtcggcttcctgtcggt

SEQ ID NO: 221933 - DNA, 439 bp, Homo sapiens
  chr2:172379339-172379778
  hyper
gtgctggaggatcgcggggcccggaggagtgcggtgaggagcgcgcgggaagccaagtcggctgggcgggagggaggctggctggctctggggcgggacagagctgcggttcaggaggatcgccgcgagcgcggggccgggggtgcgcggtggagacgcgctgctgggggcggcggagcggggccggccccacttggttaactctttgcggcgactggctaggacgcactggaggggcctccaagacccagaaacttgagcccgggcgcgatgccggagcgccgcgcagtcgggccgctgcagcccacgcgccccggaaagtcgcccctgtggaccgagcctgcgcgatcgggggcgcggaaacactttcgcctcagccttttgctgaacttgcttccaggctgcagatgaggaggggaaggcagcggggaaaagattg

SEQ ID NO: 221934 - DNA, 240 bp, Homo sapiens
  chr2:172379834-172380074
  hyper
gccaaggggggcgagtgaagcatccgccctgggttcctctcctcctagagtgttaaactcagtcgagtccgggaagctgccaggacttccaagtgtgtttcgccgccctgcccagtcattggacggtcttgagcccgacttgtttatgtggcagaagagtggcgaaagttcccccgcggggcttcctattgggcactggcccagcactccgggtgggagatgcccggagagggcccgcgg

SEQ ID NO: 221935 - DNA, 319 bp, Homo sapiens; identical to SEQ ID NO: 198551
  chr2:173940416-173940735
  hyper

SEQ ID NO: 221936 - DNA, 103 bp, Homo sapiens
  chr2:174147823-174147926
  hyper
ggaggcaccgcaagcgaggggtgcaagggctgccagcacactgccacctctcgccttcacagctcactgcagcctcagcctcccgggctcaagcctcagcctc

SEQ ID NO: 221937 - DNA, 217 bp, Homo sapiens; identical to SEQ ID NO: 198553
  chr2:174349951-174350168
  hyper

SEQ ID NO: 221938 - DNA, 1440 bp, Homo sapiens
  chr2:175200381-175201821
  hyper
tgggagagctgcaagtttcgcccgtccctggcagctgtttcggccgcctccgccctcacccggtgtttgttgtctctggtctctgtgtttaccttcgcgcttcaccccgaagggcgacttggggtcttctgggagatgagccggtttacggcgacaacccaagtccggttgtaggcagggttgcagcggggaacacggaggcatctttgatttatagcctcagcgaagtgcaactttccggcgcctggaccttcgcccgggtgatcgcccctgctccgcgcccggtgcggcgactcctccgcgggcgcgtggggaggaggcgcgaggcggggagccaggaccccccgggagcagccgcaggggacgaggctgctcacgggtgcactttgtttcttcccccacttcctcttgccctcctccttcttgctccctcccccatcccacccactctaggaagagccgcgcttcggaacgaccccgttggccatgctggcggcgacctgcaacaagatcggcaacacgagcccgctgacgacgctgccagagtcgagcgccttcgccaaaggcggctttcacccctggaagcgctcctcgtccagctgcaacctcggctccagcctctcgggcttcgcggtggccaccgggggccgtggctcgggcggcctggcgggcggctcgggcgccgccaacagcgccttctgcctggcctccacgtcgcccacgtcgtccgccttcagcagcgactacggcggcctcttctccaactcggcggctgccgcggcggcagcggccggggtgtccccgcaggaggcgggtggccagtcggccttcatttccaaggtgcacacgacggcagccgacgggctgtacccgcgcgtgggcatggcgcacccgtacgagtcctggtacaagtcgggcttccattcgacgctggcggccggcgaggtgaccaacggcgcggcgtcgtcgtggtgggacgtgcacagcagcccgggctcgtggctggaagtgcagaaccccgctggggggctccagagctcgctgcactcgggcgccccccaggcctcgctgcactcgcagctgggcacctacaaccccgacttcagctcgctcacgcactccgccttcagctccacgggcctcggctcctccgccgccgccgcctcccacctgctctccaccagccagcacctgctggcccaggacggcttcaagccggtgttgccctcctattcggactccagcgccgccgtggcagccgccgccgccagcgccatgatatcgggcgccgcggctgccgccgccggggggagctcggcacgctctgcccgccgctactcgggccgcgccacctgcgactgccccaactgccaggaggcggagcggctgggcccggccggggcgagcctgcggcgcaagggcctgcacagctgccacatt

SEQ ID NO: 221939 - DNA, 240 bp, Homo sapiens
  chr2:175546811-175547051
  hyper
tgaagtgaagctgtctctggagagttcgggggatcaccccccctcaacccccgtccccactccgggcgaaaagcactgaccgggactggagatgtctctaaggtcgacgcagacccctaacgcgcgcgtctacgccgacctggggcgagcgggccgcccgggagggccgggagggaggcgggctggagcgcgggaggggcacggttcccatagacaggcaggcgggcggtgccagaactt

SEQ ID NO: 221940 - DNA, 236 bp, Homo sapiens
  chr2:176936543-176936779
  hyper
gagtccctgcagagcgtggacaccagccgtcttctcccgcccacggcgttacacccgtctcggctgctccgaagagacccctcgctgccatcgcagaaaggctgggccaaccctgagggccctctcgcctggccgtccctcctcgggtgcgaaattaggggaggagggtgtcggggtgtgcatctccaggctgcggagctcccgggcatgaaagccagggccgaacccgagaaagc

SEQ ID NO: 221941 - DNA, 960 bp, Homo sapiens
  chr2:176944605-176945565
  hyper
gggtggcaaatacaaaaatagaaataatttagggggatgcccgccaggcttttgcgcctgctccttctcccccaattcggagcaggttcccttcggcctcccgcgccccggggcgccccctggcggcagcggcagcagcgggcaacgcgcggagggctcagggggcgcacaggggactcccgggcacactcagagaggcgggcgcggccccctggcggtggcgacgtagttatctggtgagcggagcctcgtccctctggtccggcgggctcacggccgtcttactaagcaccgcggccgagtagggcaggaagccgctctcggaacgcggcgccgccgcgctgcagccgaagtccgagcctcccccggccccggcgcccccgccgccgccgccaccaccaccaccgccgccgccaccgccaccccgggaacccagggctgcggcagctgctgccgcggctgccgccgccgactgactgctgtggcaactgaggcacgagcagggtgcagagccgccgctggggggcgcgccggccgccgccgccgaggaggccgcagccgctgcggctgccgcggctgccgcggcagaggccgcgctgttgagccccgcggcggccgcgggagcctggtagagaccagggtggcggaagctacacagcagctccggccgagagtaggggtgcgagagggcgcggaaggtgtccagtggccggatggaagtagcgaagggcgacgaagccgcggccgccgcgcctgaggctgcagccgcggccgccgccgccgtgacgcccacgtgcgggtagtagtgcagcggcacgtgcgagtggaaggggtagggcaggcttccggtggcggccgcgtgcgtcatcatgtaggtgtagaagctggggtcggctgggtgcggccaggacatggccaggcgctgccgcttgtccttcatgcgccggttctggaaccaca

SEQ ID NO: 221942 - DNA, 780 bp, Homo sapiens
  chr2:176957464-176958244
  hyper
gccggaggcgggaggctcacagagggagagagggctagaggaagagggcgggagcgagcgaaccagagagaaaggagaggagggaggaggcgcgccgcgccatggtgtcctgcgcggggccagggccagggccggggccgggccaggccgggccatgagccgcgccgggagctgggacatggacgggctgcgggcagacggcgggggcgccggtggcgccccggcctcttcctcctcctcatcggtggcggcggcggcggcgtcaggccagtgccgcggctttctctccgcgcctgtgttcgccgggacgcattcggggcgggcggcggcggcggcagcggcggctgcggcggcggcggcggcagcctccggctttgcgtaccccgggacctctgagcgcacgggctcttcctcgtcgtcgtcctcttctgccgttgtagcggcgcgcccggaggctcccccagccaaagagtgcccagcacccacgcctgcagcggccgctgcagcgcccccgagcgctccagcgctgggctacggctaccacttcggcaacggctactacagctgccgtatgtcgcacggcgtgggcttacagcagaatgcgctcaagtcatcgccgcacgcctcgctgggaggctttcccgtggagaagtacatggacgtgtcaggcctggcgagcagcagcgtaccggccaacgaggtgccagcgcgagccaaggaggtatccttctaccagggctatacgagcccttaccagcacgtgcccggctatatcgacat

SEQ ID NO: 221943 - DNA, 138 bp, Homo sapiens
  chr2:177022459-177022597
  hyper
gtgtgtgtgcgaggcgctagggtgccagggggcgaggggtgaggggcgaggtgcacgcgggctgctccaagacaacaggagttgtaaaaaaccggcccggctggcggacgcgcctggcgcacgcgggccgaggttgcc

SEQ ID NO: 221944 - DNA, 180 bp, Homo sapiens
  chr2:177042543-177042723
  hyper
acagcgctgccctacaaataccatatccgtccccacctcctctgcaagggtcgagcggaagagtaggtctggtgagctgagctctagggagctggtaccatcttccctcaatccccctcggttaccccttggggcagcaacgacgccatcccagccccttccagagaacacacaaaggaa

SEQ ID NO: 221945 - DNA, 180 bp, Homo sapiens
  chr2:177043136-177043316
  hyper
acttttcgctcgacagcggttcctcctacttcagagcaagtctgggccagctgggatccgaccagaaatcgcaagcggaggagacgcagtagcgcaggctgagcgctaactgaaggcgcgacctgagcccggcgcctgctggggagctgcgcagccaggacagcggtcggcagcacaggg

SEQ ID NO: 221946 - DNA, 900 bp, Homo sapiens
  chr2:177052895-177053795
  hyper
ccgaaagcgcagaggactcagaagaggggaagaggaataactttatctgtcctggaggtgggcgaagagcagtctccaccggccgcgcgtcacgctcccatttaaccttttccatgccgcgacgcccacactccgccctcgagggactagccccccccacgatccagagcagaagcggctcgccccgctgcatccacgggccctcacccaagcgtccagtcctgcctttctccccccacctcgcccaatacctgtccgagagcaggcgttctgccctctcgccccgcccttgcccaggcagcccccggtcgcgacggctctcctcggggctcgggggcgctgggcggcggccctgggctgctttggctaacttggctgcggggcaggcgcgaggagcggcgcgccgaccgggccgagcggagaggccgcccattggccggccagcgccacgtggccgcccccgccggtatattaggccactatttacctccggctcactcgccatgggttggagagggcagctcgggtagagagggctggcggagcggcgcagacggcggcagtcctgctcagcctctgcccggctccgtactccggccccggcctgcgccctcagaaaggtggggcccgaaccatgagctcctacctggagtacgtgtcatgcagcagcagcggcggggtcggcggcgacgtgctcagcttggcacccaagttctgccgctccgacgcccggcccgtggctctgcagcccgccttccctctgggcaacggcgacggcgccttcgtcagctgtctgcccctggccgccgcccgaccctcgccttcgcccccggccgcccccgcgcggccgtccgtaccgcctccggccgcgccccagtacgcgcagtgcaccctggaggg

SEQ ID NO: 221947 - DNA, 1011 bp, Homo sapiens
  chr2:177502175-177503186
  hyper
ccctctttacaaacctgagcggggctttcggggtaaggggaggcaagactttggtgggagctgctcgtcttcagcaaagcgagggccggctgcaaaggcgcaggctggcagttcgggtcatttcctgccgattccccattcccctcggagcagcttggagaggaagtcggacttcttttccaggcggagcctccacgatgggcgtgggcgcctcgtgcgtgggccgggggcctcgtgcgtgggcggggatcggggcctgggaaaaacgggaacccggtacccgcccgcgccctcgcgcgtcggccaggaacctcggccccatgcgggcgggccagcgcggccaggagggccgggaagaggggtccccggggccccggatgcgctgaactccggggaggggatgggcaggagagagagcacactcctggagccgcgacgtccaaacccggacgcacttgaacccgcagcgaggcccgtggctcgcggccttcggagagcacccgcgccccgcgcagaccggacgccggccttgcccgatcctcggcatccttcggcggggcggccagtcccagggcgctcgctgagggccacaccctggccccagagtttagcaccgccgcgggcagggcgctccgctcccggaccccgaatctgaaagcggagaccaagggctgcctgcggcaaagctcgacatacacttgattttcttccgatttggagaaaatgtcacgggcgagagcaaaaaaaaaaaaaaaaaaaaaaaaaaaaaccctaactgtaaatattatttggaggtgggcgagggcgcggcgtgcgcgcggcggcgggtggcgggcggcgcgggcgcccttgcggggattcccggtctctcagcgcgccctagtggacgccctgcctttcgctggctccccgtgctcgttacaatctgcaatatattatttcttccgaagtattgacaatgtgtgagactccagtaaccccggagctctcgtctgtaatcagcacatttat

SEQ ID NO: 221948 - DNA, 816 bp, Homo sapiens
  chr2:178257219-178258035
  hyper
ggacacctcgagggcggacgtggtttggctctcggtccagctggaccgggctgggccaaccgggagtcagctcgaactcacctgcttggcaggtgcgcgcttcccgaggcgtgacaagggagcgccggcgcggtgggtggggggcagagaatgtgaagctccagacgcatggcacccgccgccaagtcgccgcggtggctgccgggatgcgccgcagcgaatggtcgcgccgggcgccgctctgagtgacctttcacccgcgcccagcggttccgggcggcagcacaaggcggtagccatggcggaggcggcggctgcagcgggtgggactggcttgggcgcgggcgcgagctacgggtctgcagcggaccgggaccgggacccggacccggaccgcgccgggcggaggctgcgggttctctctggccatctgctgggccggccccgggaggctctgagtaccaatgagtgcaaagcgcggagagccgcgtcggcggccacggcagcgcccacggccactcccgccgcgcaggagtcgggcaccatcccaaagaagcggtgagtagcggtatgtggaaggagttagcgtcgagggaccaggccgggcctgtgctgcaggagggcacaggcgaggtgggaagggaagtgacacgggtgggcggaaggcatcccggtccctgaaagtagggacccacctctctttcgagagagtggactagaccctggattctgtcaggaagggggcgggatgggatggtggattttggtcactatgtgagggtaacaggcttgaagaactctcgttggagaagggtt

SEQ ID NO: 221949 - DNA, 640 bp, Homo sapiens
  chr2:179316084-179316724
  hyper
cgcccgcccctgccggccctgaccagcctgtagtaactggcccctaggccgcagttctttgtccttagcaggaggccgtttcttgccgggagagagggattagagggattgtccggcgtgggtctagggtcgttgaggcctaaagttaagcctttgtggggaggacggattgggggctgggtcactttaagaaaaagattctaaaattacgaaggcagaattccagggagtctcccgggcctggtcctgaagcttgagaccccggatatatacgctccagggggctgcggtgcgctcttcgggtccccgagccctgtgtttaggaacacgcggggacgtccaaacacccgctcctctcccgccgggcgggctcctttgtcttctgggctttcgtcgcgagatggaacgctgggtcagtgcatcccagcaaaacacgttaggagtaaacgaaggcctttccggggacctgggtagtcggttgtaatggcgtttgcctgggatgcagcacctttggtgggccattagatgacgtgtcgcttctccaggggcttgctaggcactagcagaaatgctcccctgtgcttactcggtgttatggaagattgcttgcacaatgctattcgtacgaaaggatattatt

SEQ ID NO: 221950 - DNA, 85 bp, Homo sapiens; identical to SEQ ID NO: 198592
  chr2:180129611-180129696
  hyper

SEQ ID NO: 221951 - DNA, 1500 bp, Homo sapiens
  chr2:182321530-182323030
  hyper
gcatgcagcccgggctgcagaggaagtgtggggaggaaggaagtgggtatagaagggtgctgagatgtgggtcttgaagagaatagccataacgtctttgtcactaaaatgttccccaggggccttcggcgagtctttttgtttggttttttgtttttaatctgtggctcttgataatttatctagtggttgcctacacctgaaaaacaagacacagtgtttaactatcaacgaaagaactggacggctccccgccgcagtcccactccccgagtttgtggctggcatttgggccacgccgggctgggcggtcacagcgaggggcgcgcagtttggggtcacacagctccgcttctaggccccaaccaccgttaaaaggggaagcccgtgccccatcaggtccgctcttgctgagcccagagccatcccgcgctctgcgggctgggaggcccgggccaggacgcgagtcctgcgcagccgaggttccccagcgccccctgcagccgcgcgtaggcagagacggagcccggccctgcgcctccgcaccacgcccgggaccccacccagcggcccgtacccggagaagcagcgcgagcacccgaagctcccggctggcggcagaaaccgggagtggggccgggcgagtgcgcggcatcccaggccggcccgaacgctccgcccgcggtgggccgacttcccctcctcttccctctctccttcctttagcccgctggcgccggacacgctgcgcctcatctcttggggcgttcttccccgttggccaaccgtcgcatcccgtgcaactttggggtagtggccgtttagtgttgaatgttccccaccgagagcgcatggcttgggaagcgaggcgcgaacccggcccccgaagggccgccgtccgggagacggtgatgctgttgctgtgcctgggggtcccgaccggccgcccctacaacgtggacactgagagcgcgctgctttaccagggcccccacaacacgctgttcggctactcggtcgtgctgcacagccacggggcgaaccgatggtgagtagagttggactgatgcgccctcagcagctcagagcggcgtgagaatggcgccctagggattccctgcccgattcaaactttcctccctcccaaggaggcaggagggaaacgctgcgagagccagctcgctggaaatctgccagggaaactaacttatcttggggcggcagcgccccgggtgcgttatggtgcaaggtcttggagcttcgagtcgggggtggtgggcggaggaggaggtggggaagctgccctgctgcggactgcacatctgtggcgacagggagctcagtgggcagcacagctcacgtctgagcgcacgtgcacgtgtctcgctttaggctcctagtgggtgcgcccactgccaactggctcgccaacgcttcagtgatcaatcccggggcgatttacagatgcaggatcggaaagaatcccggccagacgtgcga

SEQ ID NO: 221952 - DNA, 1280 bp, Homo sapiens
  chr2:183902358-183903638
  hyper
gcccacccaccaccctccctttcctatgggccccatcatgggggcgggggcgccgaggaggggacagctcccggctcccagcggcgcccccaccccgtgcgaggcccagcgcccgatcccgccgccgggagccgggaaatggcttctctgccttcggccggccggcgaaccacagggagaggcgcccgggactccgcattaggccgcggcgcatccaggcgaccccgggccgggcctcgggcggcgacgccgagatttctacacccggcgcctcctgccgcccccaccccacggcctcccttgcccttcatccctcccgggcccgcccgcctccgccgcggcctccccggcccgtgcgcaccttcttgatgttgtagaggcgggtgagcatgccgacgccccggtcgttgaggatggtgagcttctccgccagcttctgctgactgggctgcagcactgagcgcgacatggtggtgctggtgccgccgccgccgccggccgcctcgcgcccagtcacgggcccgcggccttcgcagcagcctctctcgggcctcctcccctcccgcccgcgacctccgccttaggagagcgcgcccatggccctcgcgccccaatcccgcgccggcgacagagcgagccgcggcggactcctcggagccccttctcccgcagcagcccgcgccccggcagcctcctgccttccgcccgccgcccttccgcccccacccccggcgctctccgccccagcccccaacgagccgccttccccggctgctccactaggtgtggcggcggcggcggcggcggcggcgtctccggcggctgagaacgaggccgcttcccgcagccccggacgggccctcggtcacctgatcggcagcgccggcgcccccgcgaggccggacggggaactgcggccgacgggccctcggcatggcctcgccgccgccgctctggccctggccctggcccggaccgcccactacgcctgatgccgggatgggagtcccaagcggggactgagtggggtcgcgttgtgtgctctttccacttcgccccacaccccactccttcaagttcccaaaagttgcttttccgcaccacccttctaaagaaaccggcagaaactctgctgggaggcggggtgttttccaggcgagtttcgcttaagagtgggctggtggctccaagcgctttttcctcccactgcttgacaggcgctcgccgcagaacacagcagatgttgtgctccgcgaggtggggatcgcctctgccagcct

SEQ ID NO: 221953 - DNA, 960 bp, Homo sapiens
  chr2:185462785-185463745
  hyper
attaaataacaaaatcaaataagccaaacccagtggatagcaattatcttgagaaagaagccgctgctggcaccggcctggattcgctgcagtcggaagcgggtggctttcggtattgaattattaatttatttatccccctcgcccccacccccacgccgactgccaggcaagaaatcgcggcctcttcgcttcctctccgcccccaccttccaggagtctcccacttggcggtggccgtcgcgtccccggccctctgcggcagcggcgccgcgcggggcgctcccactcgcgctcgggctggcgcggccgcgggtcccggcggcggggtgggcgggggaggcagcgggtgacagatgtactcctctgacagctctcagtatcagcccagtggctccctgccattggctcagtgcaatggaccggcaacgccgctcactataataacactcatgcctgccagcagcagcaactccgagtgcaggcgccgagcgcgggggatgctgccgccgccgccgcttctgctgccgcgcgggcggctcccgcagccccgctccgcccggccaccgcgcgggcactgactcccgctcggttccgtttcgccggcccggccccctcctaggctggaatcctcccgcggggctcgtcgtcccgacgcgaatctgaggagaaacaggagcgagagactgaggggagagcgcggcgagcatgcggaggcgggggagcctcggcgctcaccacagaggggtgcagtgagccagtctccagaggacgtgccgggggtggctgcgtgccctcgtggcgggttcccagcccaccgtcgccggccccggcgcgctgcggctgtgggcgcggggtgcgtggaagcggcggctgcggcggaggaggcggcggctgccccatggagtgttactacattgtcatcagctccacgcatctcagcaacggacactttcgcaa

SEQ ID NO: 221954 - DNA, 284 bp, Homo sapiens; identical to SEQ ID NO: 198604
  chr2:187454990-187455274
  hyper

SEQ ID NO: 221955 - DNA, 1029 bp, Homo sapiens
  chr2:191044992-191046021
  hyper
gaacccttagctgggaaggccgcggccaggctgcggggccccctgcaggcgggctcagtgccccggcccagcacctgttgtcccaaggcaggccccgcgggggagaggccttggagggcagcgccccctctcaccagggcggagctcaggagagttcgcagcccagggggccgagaccaggggcagggccagcgaaatgcctcgctggctcttactttcattgacctctgcgatgcctcgctggcttctgctttcattgacctttgcgggtctgttcccgctgcggcgccggcagctgcttggtagttgcggggggcgtgagggcggtggcccagaccaaccggctggcagcccagctccgctccgcccgcccctgcctcggaccctgcgcctgaggaagtatcgaggcaaccctctgccacccgaagttcgtgggtcgctcccagagggcgcgccctggagccgagcgcccttgggcggccatctggaggccaggtgcgggccgcgaacccgcgaggagcgcgcggcgggcgcggcggcgacggcaggaggaggggccgggagcccgggcgccgccgaaggacgccccgtcctccacatgctgccacttggctgagccgggcgccggcgagaaggcggcgccgctgccctggcagctggactgcactttgcccccgcccggcctcagctgccgcccgcccagacgccagcaagcccccctcccacgacagggctgctccgggagcttcggagacccgccccgggcctgagcgcaggctgcctccgggaccccacggctgtccggacgtgccatgggcgcgcagctgccgggcaacgtgttgtgtaagtgaacatctgggaggtgggtgactggtgaagggcgggtgtctgtcggtctttgcttgtcagctgtgccttttagatttttcaatggcagaaacccatgagttacaggaggctttaattaaacgagaccgttctcagccagctgccgtggatagagcctcacatctccgtcccctaatcgag

SEQ ID NO: 221956 - DNA, 139 bp, Homo sapiens; identical to SEQ ID NO: 198615
  chr2:191512982-191513121
  hyper

SEQ ID NO: 221957 - DNA, 900 bp, Homo sapiens
  chr2:192109726-192110626
  hyper
ttgccggaatgtgaccccaggctggcttcgagttgtcaaatgttgtatttctcattttatgtcagtgagtctggaagcaaaaaaggtagaaagactgccttccgtgggggccgcgacgatcgcccctccttccctcaagcctcgtcccatccaggctcgccccgggtgcggagggtcgggccgcaaacccgcaaggcgcggaggccgccgcgacgctcaccggggggcgctgtgaagccggcaccgggcggacagaggtgagtcggctcggaggcggtggctcccgttcctgcccgcgcgccgaggggcgaatcccaggcagcgaggtcgccgcccccgcccctcggccggcccctccgccagcgggcgagaggggagtggccgggctcctcccgccgccgctgagcactccgcagctgggtgcgcacgggagcctcaaccgcggcgcgtggaggcagtaccagagcgcgcggcgcgcagtcggccggcagccgcgggacagccttggcagaacagccgcggcgggagccccgcagccccgggctgggcccgcgtcccggagcgccaccggagagcgaggacgacgtggaggcggagtggcgcccggcgaggtagcgccaggcgaggtagcgcgagcgctttctctctctctcccctgcccttccctctgcgtccgtcgtcggcccccgaggcgcctgctccgcgcctttgtgcccgcggtccctggccccgtcgcaccctgcgggcgggggtcagcgggctctgccgctctcttgggagacgcggcgctgcggcgggaacggcgcacgctgtaggttgcggagggtggtcgtgactccgcagtggcttcgggggtggcgggagggaagaagggcttgtaaactaagttgctcttacttt

SEQ ID NO: 221958 - DNA, 756 bp, Homo sapiens
  chr2:193058975-193059731
  hyper
gaggtgaggggctgaggaggcgcgctagggtaggctggtctgtgctggatacgcgtgttcttctgcggagttaaagggtcggggacgggggttctggacttaccagagcaattccagccggtgggcgtttggcagtcacttaaggaggtagggaaagcagcgagcttcaccgggcgggctacgatgagtagcatgacgggcagcagcagcagccagcaaaagccctcgcaaagtgtccagctgctgcactgccgcggggactcccacagcaccatgactagttcgtgcaactctgcagcagcaaacggcttccgaggaacacaggatcgcgggggccgggcagcgggctactgagcatcccgcggacggcggcagcagaggcggcggcggtggcagtggcacccggcggggaagcagcagccaaacccgcgcatgatctcgagagtttcagcaacatccagggactgggctcagccccggagcgagagggtcgtccgctgagaagctgcgccggagacgcgggaagctgctgccataaggagggagctctgggaagccggaggacaggaggagacgggagtccaggggcagacgagtggagcccgaggaggcagggtggagggagagtcaaggcgccccgcagcccggcagccgcctctcgagctctgccgcccgcatccctctggcgtttgggaagcagcaggtcctcagcccgcccggggtcacgtgggaagaggcagtcgggctctgattggt

SEQ ID NO: 221959 - DNA, 171 bp, Homo sapiens
  chr2:197035576-197035747
  hyper
gctgggagcaggacgcgtccacgagtcccgatgggaacgcgcccacgccgcagctgggactcgggagaggctagggggaccgcgtggccttgctgtggaagggacccgcgcgggcccgccgcgaagggggccctgcctggcgcgacctggggagagccggggccggccggg

SEQ ID NO: 221960 - DNA, 1177 bp, Homo sapiens
  chr2:197457184-197458361
  hyper
gacctctgcagtctcgcgtcctcggaaacgtctacgtctaaatctgcagccccagtttgctccaggccccaagctccagcagaggatgttcacggcacattcccaaccaaaaaggaaatgaagcgtcctctccctcaactgatgctcaaatagaccccaaagtcccagtttccctggagaaccaaaccatccaacacatcctgggcagcggaaaccgaaatggcaaatgaatgaccgcgccggggcgcaagggaggaaaaacaaagccacctcccgccgtccgctacctgcggcgagggccgcgcgctcacctgggctttgcgcccgtcgccacaagctgcgggtggggacccggccgcggggcgggagggcgcccccaaagtcgcccggacccgcggccccggcgccctgcggccggtccgtgcgcgccgaggagaaagcaggcggccgggggcgccgccgcgcgttgcatgcagctcacggctgctgcggccgctgccacggagccgagagtctctgcgctgcagtccccgaccccgagaccgcgagaagcgcccggagagacgcggcgcaggggcagagcgcgctcggcgcgcccctcagcggctcttcccgccgccctccgcagcgggctgggtctcggctcgcctttgtgctggcatcttcctagctcccagcgacacccagagctctcgaggcggctccgcgccgccacccacccccgggttacgccacggcccccgcgcgacccgccgattgtgtcgagtcagcagcggcagcggggacgcgcgaagccatggctcccgcccgcgctcgggagggcgccgggggtcctgcgcctccgggaggtttgtggccgagcgcggcgcggccccgagcggccccgcagcgcccggctccccgccgctcgctctccaggcgccgacccgcctgcgtcgccaccctctcgccgctccctgccgccaccttcctcccgcccgggtgccgggcgtccgctccagccgcggtgccccggtccgcggagagcgaagagtccggcctcctcacctccagccgcgccggcgcccttcccgctagacgcttcggcggcatctgcccgcaccgccctgcgggacgctgggctgggagctggcggcacgtcggggaccggtggaagggaggcgggggcagaggacag

SEQ ID NO: 221961 - DNA, 121 bp, Homo sapiens; identical to SEQ ID NO: 198631
  chr2:198257786-198257907
  hyper

SEQ ID NO: 221962 - DNA, 106 bp, Homo sapiens; identical to SEQ ID NO: 198632
  chr2:198262740-198262846
  hyper

SEQ ID NO: 221963 - DNA, 148 bp, Homo sapiens; identical to SEQ ID NO: 198633
  chr2:198265015-198265163
  hyper

SEQ ID NO: 221964 - DNA, 178 bp, Homo sapiens; identical to SEQ ID NO: 198634
  chr2:198265429-198265607
  hyper

SEQ ID NO: 221965 - DNA, 370 bp, Homo sapiens
  chr2:198266479-198266849
  hyper
ttttcatttcctcatcaggagactggaattctcgaataaggattaacatcacttctctagtatagtagttggcatattctgcatccataagaggaataagatacccaatagccttcaagaaagcagccaaaccctatttttaaataaaaaatatatgtactttagtaatttagatttatgtcgccttaactttaatgaagataaatcaaaaggtaattggtggatttacctttcctctgtgttggcggatacccttccataaaggctttaacacagaatcaaaagattcgataccataaggagttgctgcttcagccaaggcagcaatggccaaagcactgatggtccgaactttctgctgctcatccac

SEQ ID NO: 221966 - DNA, 432 bp, Homo sapiens
  chr2:198267318-198267750
  hyper
agatggcacagcccataagaatagctatctgttgtacaatcttaataccagtgtgtctcgcttgccaggacttcttgcttttgcacacagcttttaagaagggcaataaagaaggaatgcccagggcagaggctacaacagcaaaagctctagctgttgtgttacggacatactcatccatgttatctatatcaggtctcatggtagagatcatagtagccagaccagcagcctaaaatgtaaacaaagaaaggacagtcatgagttggtaatattaatcttcaaccatttctttccataatcaattccataaacagatataaattttcttctctagaaattaaatgtaaatacctttgccaaattagaaatgatctctcggccttccactctagcatagtaatcttcatcaatcaatagcggttcaatgac

SEQ ID NO: 221967 - DNA, 70 bp, Homo sapiens; identical to SEQ ID NO: 198637
  chr2:198268366-198268436
  hyper

SEQ ID NO: 221968 - DNA, 93 bp, Homo sapiens; identical to SEQ ID NO: 198638
  chr2:198269812-198269905
  hyper

SEQ ID NO: 221969 - DNA, 81 bp, Homo sapiens; identical to SEQ ID NO: 198639
  chr2:198272718-198272799
  hyper

SEQ ID NO: 221970 - DNA, 147 bp, Homo sapiens; identical to SEQ ID NO: 198640
  chr2:198273117-198273264
  hyper

SEQ ID NO: 221971 - DNA, 1113 bp, Homo sapiens
  chr2:198669064-198670177
  hyper
ttcctaaaatatacacggagcgcctccgggtttgcacacgcgcgcgcgcgggtacaccctggctcgagtacattagccccgctgggccggctcccagttgcagaacacattccattcttcgcgctcgggcacacccctccgcagtgaggattggtcgggccgagccccctcggcgaggcgaggctcctaagaggcccagacgcctgccaatccccaagggctgtcaaaacaagtctccctccctgtcacaacagagctgagtggaggccgccgccgccgccgcacttcctgggaccgctgcgccgcagtccgcgggcaggtggcgggtgcgcccggccgcagtcgcccggctctggcccctatcgggccgccggcgtccgggctccagaggccgcctggctgggcgcccggtgccttttgtctggcgcagggccggcgtttgcatcacatttcggatacctccctctctttttcgcctctccttctgcctcccgctcacatcgcctccccactcccgccaccgtcccccgccggactgctagcctcctagaccgaagcccgaggacgtctctgcccgagcgatgtcccctctccagaaagttgccgccgccgccgccgccgccgccactgccgccgctgggcggtgaaacaaagtctggcggggccgcctcccggtgcaggagcgcaccggtgcctagcggctggactccgctgccgggcgtcccgctttcccccggggagccctaaacgctccaggccatggccgagggcgcggccggcagggaggatccggcgccgcccgacgcggcggggggcgaagacgacccccgagtgggcccggatgccgccggggactgcgtgacggcggcctctgggggccggatgagggaccgtcgcagcggggtcgcactgccaggcgccgcggggaccccagcggacagcgaggcgggcctcctggaggcagcacgggcgaccccccggcgcagcagcatcatcaaggtaagcaaagccgcgccgcaccgggagcgtggctgtgggtgatgggtgggtcagggacccgggcaggatgtgcggtgtccggaggcatccgggctcagcattgttttctcccac

SEQ ID NO: 221972 - DNA, 180 bp, Homo sapiens
  chr2:200321178-200321358
  hyper
gcggaataagtgaacttcagaaaaagacgttccacccacatgggaagggagttgggggtgtgcgcaagtccataaccgaattaaccacccggtaaatgcgctgtgaatggccaggcaggagccaaaggccgggcgaaagaaccccttgaatacccgctttttacctatacggagcaagtc

SEQ ID NO: 221973 - DNA, 342 bp, Homo sapiens
  chr2:200321708-200322050
  hyper
ggggaaggaggggaaacacctgatgaaacggcgctcgcgttgtcactgacacccgcaagaagcaagaccccggcaccgtactgcgtgcgcgctgggaatcctcgtgggcgctctggccgcgcgagcagtgtcggcgccacgggtcaaggagacaaggtgggggtggcagggggaggtgaaaggaaggatgcgagatgaagacacggagcaggagggctgagggcgaggcttccgcctgcattccccgacttcgcggtccgagaggccgagagcggcggggaggggacttcgttggccctgggcttccccgaactcccgagcgcggcgcgggagccctcgccc

SEQ ID NO: 221974 - DNA, 104 bp, Homo sapiens
  chr2:200322566-200322670
  hyper
gggaccgcgcgcgggaggaaacgcggcggccgcccaagctgtcacctccagcctctcccctctcggccgcctctgccagcagccagagccggactcactgacaa

SEQ ID NO: 221975 - DNA, 781 bp, Homo sapiens
  chr2:200323016-200323797
  hyper
cgacccaacggcggcggggctgcgaaggaggcagagggacaggcgaggggcgggtgggaggcagggaggagggaagaggaaggggagagtcggcggtcggagcggggtgacgaggacctcatgcacgaggcggcgaaggaccgatggcagagaaccgagtgcggcgcgaggcggtggccgcggccagcgggtgggtgcgtctgggcgcaggcgggcaccggggcccagggtctggtcctcctccttgtggcgggtccagggcgcggccgcctcgcccagcccctaggcgcactcgtcccggcgcggaggcggcggcgacaaggcagtcgctgggtgccgcgtctgccggcggagacgcagaccgacgcgcaagaggcgaccgcggctgcctcggctcccagctctgttaactgcgcggagtactttcgactttggagataggagggcgatcgcctcccccacccaccgcctccgcccaccacccaccgcctccgcccctccgagcaacttttcccggtgcctgcgagctccccctccgcgccgagccgaacgtcccggcccgccgcgcttcgtgccgccgcgcgcgcagggaaggccgcttctccttcaaagctggcacggccgcgagtccggaacaatagtcggggtgtcccgaatgccaggagcacggccactgcccgccgggctgtgggtggcacaggaatgggggttgcgtggtggatgcagagcggggtgcatccctggatggcatcgctggagcgctcgccgctccggcgacatc

SEQ ID NO: 221976 - DNA, 582 bp, Homo sapiens
  chr2:200324029-200324611
  hyper
cttttgccgactcccgcggccgcggccgccggcagcccgactccggccgcggtgctcatttaaggtggcgcgggcactagccgagcaggctggcctctggccgcgcttttgtccctgcgattccgcttgggcgcgctgcctccttaaggaaaagcacgtgggcaggggccgcagcccccgcgagatacccggggcgtcggcggacattagccgctaggaccttaggcgagaaaatgtggacgcatccccgccggccctgaggccagagaatcccccctcaactggttgcacctcatgtccctcccgcacacgttgactctccctcctaatccccaggaccccgagggctctcccacatctcccgcagcaagagccaccgatcccccttaagaagcgttgactgtacggcggcgccagagggccaaactaagttcggtttcgggaaacgctctcgggagcagttctgtaaatccctgctgggagcagagactgcgaaaagctgagtccgccgatcgtgcccgggacaaggctgccttccactcgccctcgccgcatctacctggtaggcggcatgcgcacggg

SEQ ID NO: 221977 - DNA, 1449 bp, Homo sapiens
  chr2:201171150-201172599
  hyper
ctgtactgggattcttctagaaagtggggtgggaaaggagctagggagggcgtgtggagggacgagatctgtgtcagaacgtgcgtgtgagcggatacaaaacccgagagaggcgtgagcagcgctgtgtttgcgagcgggagcgaggggcgccggctggggtgtgtgctcctggtgagtgacaccgaggggaaggcgggcgggtcggcgggcgggggcagcctgcgaggggcgggagtgtccctgcgtggggcggccgagccggagttgtgtcagtgaaggaatccagtccgggggccgagctggctgcgccctccgctgcaagcgccggcagcgcggggcgagctccggacggcgcgcggcccaggcagcggctcccgctcggcccgccctccgagccgcaggggccgccaccgccgcggcgcctcccctggcgaccgcgcccccgggccccggctccggcccgggacggaggagccggcgctcgacacagaggtaagcccaggaccccctccacgccgggccggctggggatgcagggcgcgggcggacgcggaggggcctgcgcggccgggacggagactcggctgggccgagcattccgcagcccgggccgcccagcctccgccgcctcccggagcgctgggtgtggcccgcgctcggcgccgaggcgggctggtggcgcggaccggacgcgaaggtcgccgtccttcctttctccagccggcgcgggcaagcgggaggaggcgccggctgggacgcacagtggcgctccccgggcgagcgtgtggccgccgcgctccgacgtgtacccgcccgccccggatctgaatcgcccgcggccgccgtccctcgcctgccgtcctcccgcgcgggcgcccccgttccctcccaagccggaaagagacccaccgtcccccaggctgctctctggcccggagccgcaaagcccacgtcagccgcgaccaccccgccctcggatcccagccgggtgcgggggccgcggccccactgaaccccgcgcccctggcgcccagcgggagtgggatgcgttggcgtccgcgctgcgcgggtgggctggggtggccggagcagacgcggagcgccctggccgcgggacgaagcggtcgcgccgccgcatttgggcggggggaccccggagtccgcgggctgcggaccccagcgggagacggggttgtcgtaggatgcgctcgcgctggacgccggcgcactctgaatatcatgctgccgcacacgcggggctgaagggccgagtcttcacctgcgcggggatgcggcggaagcgtcgcgtcttcgcgagtggaggtttcgtgttcccgcggggttggtgtgtttttgaacttcacgagcttctcatcccccccgcaatcctggttttagcagatgtcggggttttggagacctgacacttttcgtgaaagattcttt

SEQ ID NO: 221978 - DNA, 204 bp, Homo sapiens
  chr2:202644945-202645149
  hyper
aggacgaacaccagcgtcaaggacctgtgttatttttctggcttcgcttctcaaaataacttatcttctcctcttgatgaattacttgataggctcaaagacttgcctaaactactaattcttattatcaaagctattttctttctccgcaaccgccttttcaagtagcccttggtccactcttcaacgcgatttgcaccctgt

SEQ ID NO: 221979 - DNA, 830 bp, Homo sapiens
  chr2:202899281-202900111
  hyper
gcgcggcggcgcctccccgcatccaagcctctcccaaccgcctcgtcgcactcctcaggctgagagcaccgctgcactcgcggccggcgatgcgggaccccggcgcggccgctccgctttcgtccctgggcctctgtgccctggtgctggcgctgctgggcgcactgtccgcgggcgccggggcgcagccgtaccacggagagaagggcatctccgtgccggaccacggcttctgccagcccatctccatcccgctgtgcacggacatcgcctacaaccagaccatcctgcccaacctgctgggccacacgaaccaagaggacgcgggcctcgaggtgcaccagttctacccgctggtgaaggtgcagtgttctcccgaactccgctttttcttatgctccatgtatgcgcccgtgtgcaccgtgctcgatcaggccatcccgccgtgtcgttctctgtgcgagcgcgcccgccagggctgcgaggcgctcatgaacaagttcggcttccagtggcccgagcggctgcgctgcgagaacttcccggtgcacggtgcgggcgagatctgcgtgggccagaacacgtcggacggctccgggggcccaggcggcggccccactgcctaccctaccgcgccctacctgccggacctgcccttcaccgcgctgcccccgggggcctcagatggcagggggcgtcccgccttccccttctcatgcccccgtcagctcaaggtgcccccgtacctgggctaccgcttcctgggtgagcgcgattgtggcgccccgtgcgaaccgggccgtgccaacggcctgatgtactttaaggag

SEQ ID NO: 221980 - DNA, 104 bp, Homo sapiens
  chr2:203242328-203242432
  hyper
ggagcccgcagaggccgaggcctgtgcttgcccttcgccatgcgtccccccgatcgcggtgcagcggagctgcgacccggtgcctgcgcgcctgccccatgcct

SEQ ID NO: 221981 - DNA, 160 bp, Homo sapiens
  chr2:204399803-204399963
  hyper
ctggccccgagggcgaggctaaccactcaccgcggcagtcggtcggccttcccgcggccccgggcaaggaaaccgccgctcgcgctcctccagccgctgcctccgcctcctccccaggcgcggcgctccctcgccagagacgcagcgactgccagcagct

SEQ ID NO: 221982 - DNA, 362 bp, Homo sapiens
  chr2:206546583-206546945
  hyper
caaaggatctgagtagtaaacgcagcgagtgtttggggttttattcagaccgggctgacggtgtgtgtcgccgccacgcaccgctgcctgttcgaacgcatggctgagctgccgaccggctcgctaccccaaacaccgtacgccacccaactcctcttgtaacgccatcgcgcgtggcattgtgttgggttctgcgtgtgtggcatcggagtcgtggaatttagggggaacaaggcttttccccccgtccccccggggtctcccttgggtgggggcgacacggccaaggcggcgcgccctgggggtgcccgggggcgcttcttccccagggcgttacgcaccggcggcccggcgcggaggtg

SEQ ID NO: 221983 - DNA, 840 bp, Homo sapiens
  chr2:207139278-207140118
  hyper
gggctcctccgcccgggtgggagagtgagtgagtgggtgggcgggcagggggcggtcccgccgctcctgcgtcagaaggggtctggttttcgcaccttccctgacgtcaaacctccatcagggttgcaacgccacgttgccttggatgcctgcgtgagtggagtcgcgactcggggcccgcgtcctgagagacgcgctcccgcgccgcttctcgcctccggaccgcaggggccgaagtcgcctatttctggctccgcgggcagcggggccgtggcgctcggacggtctgggattcgggcgccgccgcggaaccggaataagaagggagagcgcccggctcggtcctcggtctccaccgcggcccggaaggaatccgggcagcctccgcggaggtgagtgccgcggcgggggcggggcgcggccggggcgacgcccgcgggcggggcctgctcgccgggcgcccggggcgccttcttcccgagggacgccaggaccgctcgctgggctcccgcggccgcctcgcaggtcctcggcttccccccaccccgcgtccctttctgcccctgctgcgtgagaggtgtcggcggctccgggccgggatcgaggtggcggggcgagggaaggaggtggggcgcaggctgcattgcgcttctgtccggggccctgggtcagaggggccggcggacgaggcctcgggtccgggcttggggagggggcggtctgcggggtcggattgagggccgggaacccgcggagtcttgcccctgggcacctgtggggccgagatcccgagccacctgtccacacacccccttcccccagtgccctgcgttgggtcca

SEQ ID NO: 221984 - DNA, 1837 bp, Homo sapiens
  chr2:207307398-207309235
  hyper
cccatccccgtggttgacaaacaacggatttcccaagatagctgccacacacttggtttctaatctctgtattgcttccccgccagaatgtcgaagtccttcccgaatatgcccagtcatactttctgaacttttgagcaaacaccgtccggcttcttgtgctttcctcaaagaccccaggcaccggcagggaggacacaggccggggcagagcgcccctgcgcgggggattcctgccactccgcgccagcctgcggcgcaaacgctcttctcagccgcagtcccacccgctgctggcaatctgaatgaggagccgcgctatttttacctccccggctgcaatcctttatatttacatgcaggaagcaaatatataagggattaagaaggagatgcgtggccttagtttatccagagcaggaagaggttggaataggagagggtatgtgaagtctggggtggtggaaaaggcaggtggacttcggctggttgttttctcccgatcatccctgtctctggcctggaaacccccgtactctctttcttctggcttatccgtgactgccggctccccctccaccgcccccatcttttgaggtaccacccgtcacctccgatgctgcttgggctgctgcatcactctgctgctttacccccttccccgccccccaacaaagcatgcgcagtgcgttccgggccaggcaacagcagcagcacagcatccagcaacagcatcagcacccgaagccccgctcgggcgcgctctcggggggcggggcgcacgcccgctccgcgcgtccccgcgccgctcgctcccgcgcgtccccgcgccgctcgctcccgcgcgccgcctcagcatcctcaggcccggcggcagcccccgcagtcgctgaagcggccgcgcccgccgggggagggagtagccgctggggaggctccaagttggcggagcggcgaggacccctggactcctctgcgtcccgccccgggagtggctgcgaggctaggcgagccgggaaagggggcgccgcccagccccgagccccgcgccccgtgccccgagcccggagccccctgcccgccgcggcaccatgcgcgccgagccggcgtgaccggctccgcccgcggccgccccgcagctagcccggcgctctcgccggccacacggagcggcgcccgggagctatgagccatgaagccgcccggcagcagctcgcggcagccgcccctggcgggctgcagccttgccggcgcttcctgcggcccccaacgcggccccgccggctcggtgcctgccagcgccccggcccgcacgccgccctgccgcctgcttctcgtccttctcctgctgcctccgctcgccgcctcgtcccggccccgcgcctggggggctgctgcgcccagcggtgggtatggccccgtgccctttgcgttggctttcccgcggggccctgcagaggaaagcgaagggcgcgcgggtccgtgtgctccgggcttgtccccggctcggcctttccttccctccctgcctgtctttccacccttctcgttcccaaacccccattcatcccagttcacttttggaagtccatttctgttgcattcgcgaaaaacccattccaattcttgttggttccactgggaggtgtttagtggatcctgggtccctcagcgatctctgtgcaacttgcggaggggcaaccagtggatgggaaatacagcgagggagcaagttgctacttgcgtggtggaaccttaatgtgaatgcggggaggatgtagtgataatagtggtaatgggctgtttcctcaaatttcgtatccggcgcattcagtgc

SEQ ID NO: 221985 - DNA, 78 bp, Homo sapiens; identical to SEQ ID NO: 198673
  chr2:209108240-209108318
  hyper

SEQ ID NO: 221986 - DNA, 308 bp, Homo sapiens
  chr2:209113081-209113389
  hyper
acatgacttacttgatccccataagcatgacgacctatgatgataggttttacccatccactcacaagccgggggatatttttgcagataatggcttctctgaagaccgtgccacccagaatatttcgtatggtgccatttggtgatttccacatttgtttcaacttgaactcctcaaccctcttctcatcaggagtgatagtggcacatttgacgccaacattatgcttctttatagcttctgcagcatccttggtgacttggtcgttggtggcatcacgattctctatgcctaaatcatagcttga

SEQ ID NO: 221987 - DNA, 211 bp, Homo sapiens; identical to SEQ ID NO: 198675
  chr2:209118761-209118972
  hyper

SEQ ID NO: 221988 - DNA, 33 bp, Homo sapiens
  chr2:217008385-217008418
  hyper
actaacaatgaaccacgtgcgaaagatactata

SEQ ID NO: 221989 - DNA, 408 bp, Homo sapiens
  chr2:217236005-217236413
  hyper
cagcccacccctgctgcagtcggcaaatccgtggcgccctcccctcggttccatcaaaggtcccttcggtcgaggggcaagagccgagagaagggcaggtccgggcgggcgagtggcctcgccttctcctcctcttcctcctctgggtcgcggtcgccctcctcctccggctccgggtcggcccgcgcccgcagctgctgctgcggcggcggaggcgactgctgctcggcgtccgggtgtctccggggcgggggctgctccggctcgtcctctggctgctgcccgccgtccggcgcggtcgcgactccggccttcatgatcctcctcctcctcccccttccctgggggccagccctgagcccccgcgcccgggcagcgctgccatgcaaccagaggcgaggccggcgt

SEQ ID NO: 221990 - DNA, 660 bp, Homo sapiens
  chr2:217558911-217559571
  hyper
ggagggggcgggcaacgtgtgggtaggaggaaggagaaagagcgaaagctgggatagactcggctagacagttcccccgggtagcaggatcctccagggctccaattccggggtgcaaggaccctccccgactactcccgagctgcaccccagctcgaagccacttgctgcgcaaagcgcgcgggcccagccggtctcgtgtcccccgcccgtgcgccgcgtaactgactggcacactgagcgcgctcaccgatcttgacttgctcgcggtagctcttttcgttgaggcaaaccccgcggccgtgcagcagggcgtgcagcggcttctcctcgtcctgccgggggaggcagcgcagcccctgggcgcagcgctcggtgtagacgccgcacgactgcccctcggccagggcgcaggtcatgcagcagccgcagcccggctccttgaccagctcgcagcccagggggctgggggggcacatggagagggctttctcgtcgcagggctcgcagtgcacgaaggagcccaggctctgggccggccccgcataggcggccagcagcaggaggaccgcggtgagcaacaccatcttctcttagtcgccccctttacctcggggtggggcaggagagcgagagtgcagggataaaggggccaagagg

SEQ ID NO: 221991 - DNA, 582 bp, Homo sapiens
  chr2:219232308-219232890
  hyper
tgcacctgattgaaatgcacacccgtaggggctagaaggctccagcgccccttagctctccttggagcgagcggctgggggctcctggggcgcgggggtcccgtccggctgaggctcgggctctgtcccctgccaggaggagctccggctcggccacgccagctatctgcggcagcaccccgaagcccacgcgctcatctccgacttcctgctcttcctgctgctgcgccagccggaggacgtggtcaccttcgccgccgagttcttcggccccttcgacccgtggcgtccgtcgtcaccggccttgggctcctcccaccggcccaaccctttccgctccctggagccggagggagacgcccgctcgggggcggcctaagcggggcccaggcccggacagggcaggaaaccaggggtcgggctgggacgcgggcgggacgcgccggggcgggtgcgctttccgggctgcggttttgggggaataaatggggccctcccgcttctctgcagcgcccgtcgacagcgtccctggctagcgtctagtgtctcgggctagaaataggaaccgttaccgtcgtacct

SEQ ID NO: 221992 - DNA, 241 bp, Homo sapiens
  chr2:219262922-219263163
  hyper
gagacagatgtcccgctcccaggctggaatcccgcctttgcccttgccggtagacccgaagcacgtcgcttcctttcttgaaactcagtttcctcatctgtgaaatgggttaagaaggaggccgttctaaggggtaaatgagattagggggcgcagccagagcaggcctaggaaaacgccagcagcgtgtggcgatcacggtgatgaagcgcaatggtggccgccccgtgggctacccagg

SEQ ID NO: 221993 - DNA, 537 bp, Homo sapiens
  chr2:219263453-219263990
  hyper
gaggggtgtttgtcgggcttggcattattaatttttaaatggtgaacttacaaaatagtaacgacgagtgaaaagaacttcataaacgaggaaaaagaccaacccgcagacccacggcgcgcaccacggaggggcttgcagcgagaagacagggacctccgttcccaagtgcccagcactgcgccacaggccgggtggaacgggccttgagggcctctggtttgaggtcccccacggtcgggctttgggcccaccgcgtgcggcgccgtgctgggctcctaggatcggcagcgagtccagtgactcccaccgcacccccagtaatcacagggcggccgtcgaccgcgggcaggggagggggtctgggaaggcccctggagaaggtggcatttcctcgaggtcggtggaatttggctacgcgaaaggaacagcgcgtacgaaaacttcaggcgggaacgcgcggtggcccgtgcgcggcgggtagacgtgcggggccccgggtggggccgtggggagaggtcggcagggggctttccc

SEQ ID NO: 221994 - DNA, 328 bp, Homo sapiens
  chr2:219264114-219264442
  hyper
agagccttcgctggctcttgacgtccttgcgaggtgatctctgcgaccaccagacaggagagaagacccattttacagatgaggtagtgctatctccaagtcctcaacgaggaaaccgagaagcctctagtcccgggtcttcagaaaacgcagaggtggagccgcgccgcactcgggcactccccggcgtgggcgctcccggcgggcgggccttggccgagggcgctcggcggcctggaacggtgagccgggtgccgggcctgccacgcagccgcagagactcagccccgccggcgggcggcaggaagggaggcgacgccccctggag

SEQ ID NO: 221995 - DNA, 180 bp, Homo sapiens
  chr2:219735819-219735999
  hyper
aggccgagttgtgccaggctgagccggaagtggtggcagagctagctcggggcgcccggctcggggtgcgagagtgccagttccagttccgcttccgccgctggaattgctccagccacagcaaggcctttggacgcatcctgcaacagggtcagtgtggggagggggcggaagtggggc

SEQ ID NO: 221996 - DNA, 600 bp, Homo sapiens
  chr2:219736056-219736656
  hyper
gagccccacttccccctcacatgtgtctgggcaccctgcaaggaccctgcctcccaggcccctggggcagccctcccgccgcaggtttcaggtcccaggccccagctgaccgccccagcccgcgctgattgcacctgtctgcattcacagacattcgggagacggccttcgtgttcgccatcactgcggccggcgccagccacgccgtcacgcaggcctgttctatgggcgagctgctgcagtgcggctgccaggcgccccgcgggcgggcccctccccggccctccggcctgcccggcacccccggaccccctggccccgcgggctccccggaaggcagcgccgcctgggagtggggaggctgcggcgacgacgtggacttcggggacgagaagtcgaggctctttatggacgcgcggcacaagcggggacgcggagacatccgcgcgttggtgcaactgcacaacaacgaggcgggcaggctggtgcgtacgggcaggatggagtgagtgtgtgcggaaatgtgagtgtgcgcgcaggagtgtgcttgaggaagtgttggcaggagtgagggtgtgtaggtggaggggggcgttaatg

SEQ ID NO: 221997 - DNA, 320 bp, Homo sapiens
  chr2:219748456-219748776
  hyper
cccctcccgccccaccgccgcccgggcccctccagccgtccagaagcggctgcccgggacccccgggtcctgcccagctcgggccacacgctcctccctgtcccgccgcctgcgcgccgacacgaacggacgggcctctgcaccattcatgccccggctgggccgggccggcgctcaccgccgccgcgggcccgctcctaccctcgggtttctaggtcgtccgcgctgcccgcagccgcgtttcccttcggggccctcgggtaccccatgaggactccgtagccctggctttggtttctgcccgccggggactgggatag

SEQ ID NO: 221998 - DNA, 300 bp, Homo sapiens
  chr2:219757678-219757978
  hyper
ccagcgggggcaccctcgccggctccgggcgctcccgggccgcgccgacgggccagccccgccgacctggtctacttcgaaaagtctcccgacttctgcgagcgcgagccgcgcctggactcggcgggcaccgtgggccgcctgtgcaacaagagcagcgccggctcggatggctgcggcagcatgtgctgcggccgcggccacaacatcctgcgccagacgcgcagcgagcgctgccactgccgcttccactggtgctgtttcgtggtctgcgaagagtgccgcatcaccgagtgggtc

SEQ ID NO: 221999 - DNA, 1200 bp, Homo sapiens
  chr2:219824741-219825941
  hyper
agcgcctggtggccgcgtccgccaagaagaagaaaggcagcaagaaggtgacacccaagccggcatccacgggccccgaccccctggtccagcaacgcaaccgcgagaaccttctccgcaagggccgggatccccccgacggcggcggcaccgccaagcccctggcggtgccagtgcccaccgtgcccgcggctgccgccacctgcgagccaccgtcggggggcagcgcggccgctcagccgccgggctcgggcgggggaaagcctccgccgccgcctcccccagccccgcaggtggcgccgccggtgcctggcggctcgccgcggcgggtcatcgtgcaggcgtccaccggcgagctgctgcgctgtctgggcgacttcgtgtgccgacgctgctatcgcctcaaggagctgagcccgggcgagctggtgggctggttccgcggtgtggaccgctcgctgctgctgcagggctggcaagaccaggccttcattacgcctgcaaacctggtgttcgtgtacctgctgtgccgcgagtcgctgcgtggggacgagctggcgtcggccgccgagctgcaggccgccttcctcacctgcctctacctcgcctactcctacatgggcaacgagatctcctacccactcaagcccttcctcgtggagcccgacaaggagcgcttctggcagcgctgcctgcgcctcatccagcggctcagcccgcagatgctgcggctcaacgccgacccccacttcttcacgcaggtctttcaagacctcaagaacgagggcgaggccgccgccagcggcgggggcccaccgagcgggggcgcgcccgccgcctcctcggccgccagggacagctgcgcggccggaaccaagcactggactatgaacctggaccgctagggatacccaggggccgcgcccatcccccgccccagcccctgacacacactcggaccccccgggaccacaaagccaccgccgctgttaccgccgctcagcgccccggctgggcggaggaggagacgcccatgcccctcaggggaaagtggagaccgggacaccagaggccgcggtgtttggatttgctgggcgtggagtggggacggaagatgagcgcgggaaaggcactccaacctcactcttcccgtctgtctgcgcccccatttctccatttctgccggggtctcccccttcc

SEQ ID NO: 222000 - DNA, 780 bp, Homo sapiens
  chr2:219846201-219846981
  hyper
agcaaatctagtaccagacaaggattgagggagcttcggtcccgtccccctgctaagtgcggcaggtggagtaaactctggattagaggacggttgacggaggctcccgggccctccccgggatgccgatgggatcgggcgagactctaggcgtgcgggcgaggccgcaggcacccgaccgccccgtctagtggtaatggccccccaagtgcgaggctgcggccacggccccgaagggcccgggcgggggctgcaagctgggactggggtagagcgcggcggtggcggcggcagcggtggcggcggggcccgggcccggccagtaggagaagccggcgggcgcgaccccggccgaggcggccatgaggttgagtttggagaggccggggaagggcagcggggcgaggccggcgggcagcttgtagagcgcgccgtcctgggcggccgcggcggcggcagcagctgcggcggcggcatgagcgtgcgcgggcggcggctggcaggcctgcgccaggccctggaagtcgaagcggtaggcgtagcgcttgccatgcaccttgctcatgatgttcttgtcgtagtagtagcgcagggcgcggctcagcttgtcgtagttcatgttgggcttgctcttgcgctcgccccaccgccgcgccacctcgtccgggtccgtgagcttgaactcgccgtgaccgccctcccacgcgatgcagccggcgttcgcgcggtcagccagcagctccagcagaaactgccacagctggatctgtccgctgcctg

SEQ ID NO: 222001 - DNA, 180 bp, Homo sapiens
  chr2:219847085-219847265
  hyper
ggaaaagtgcaagtcaaactgcagctgcgttcggcgggagaggccggccccggaggggctgatcagcagagtggtgtgtagccttaccgcgcttttgcacaatggaaatgcggcttccactgaagagcacgtagctttccagatgcacggttttgtggaacttgggggttggggggaagg

SEQ ID NO: 222002 - DNA, 321 bp, Homo sapiens
  chr2:219857662-219857983
  hyper
ctgaggctctgagcctaggccggtggaacccagcgcccctcaacccagcccagccgcggccaggcaatcactcacacgccgttttccaccttgaccgagcgcaccctgggcaggcctccgcgctcgcagacgttcgcacagtcgcttagcagccgacagcgacggccctggaagtcctcctcgtcccagagcgtgaggctggcgggcgccgggcccggcgcgggggcgctgctcatgccgctgcggacaggaagggtggcaccacgcgctcagcgtctcaagagccccgtttcgagccacacacagcctgcccaacctggg

SEQ ID NO: 222003 - DNA, 260 bp, Homo sapiens
  chr2:219866310-219866570
  hyper
aggtgcctgcgtggcgatcaggccggcccccgggctggtgctgagaggccgcccctgcctcacgcgagccgaacgaacaaaacgctcaggtccggtttgtgcgaggggctcgtcgcggggcgggagcggagggcccggggcctggcggtcgccctcggtgatctcctggtcctggtcttccgcgagctcagtgctgcacagcgccccgctagcctccgccctcacctgaacgcatctgcggctgacacgtcggcggccgc

SEQ ID NO: 222004 - DNA, 366 bp, Homo sapiens
  chr2:220173937-220174303
  hyper
accgtgggcactaacggcgctgcagccccccgggcggctgctcagcagcaggaggcagaggagcagccggagacccccggatcccccgagacccccaggccgccgcgggcgccgcatctttccgagctccgggcgctcgctcccgggccggagccgcagcgacgctggcgggagcctgccagaggggctgaggcggggcttgccgctccccacctccctacgaggcggggtctacatgcccctctcgctgcaacgcggccaaccgcaggcgggtgctgacgacacctccacccccggctcgtaagctaatttgcgtcacatatggcgtaagagccctgtcggagcgggggacctacctagcccatc

SEQ ID NO: 222005 - DNA, 552 bp, Homo sapiens
  chr2:220349252-220349804
  hyper
ctcggaggagcgcggccccttccgtggggccgaggaggaggatggcatataccggcccagcccggcggggaccccgctggagctggtgcgacggcctgagcgctcacgctcggtgcaggacctcagggctgtcggagagcctggcctcgtccgccgcctctcgctgtcactgtcccagcggctgcggcggacccctcccgcgcagcgccacccggcctgggaggcccgcggcggggacggagagagctcggagggcgggagctcggcgcggggctccccggtgctggcgatgcgcaggcggctgagcttcaccctggagcggctgtccagccgattgcagcgcagtggcagcagcgaggactcggggggcgcgtcgggccgcagcacgccgctgttcggacggcttcgcagggccacgtccgagggcgagagtctgcggcgccttggccttccgcacaaccagttggccgcccaggccggcgccaccacgccttccgccgagtccctgggctccgaggccagcgccacgtcgggctcctcaggtgaggaggg

SEQ ID NO: 222006 - DNA, 293 bp, Homo sapiens
  chr2:220378982-220379275
  hyper
gcctggctcctgacgcccgtgctgccggtgaaacgctgttgacatgtcctgaattattaagcgtggggagggctccggagcacatgctgagcggagcggctggggctgcgcggcgtggcggagcagcgctcgctccctcgctcactcgctcgctcgcagggacacacgcaggggctgacagctgtgctggtgctgataagggaagccacaaggagacgatcgaggagagagacaagcggcagcagaggcagcagcggcagaggcagcaccagggctgcggagctgctgggagt

SEQ ID NO: 222007 - DNA, 105 bp, Homo sapiens
  chr2:220408079-220408184
  hyper
ggcgcgccgcgttggtgttgccgcgcggcggcagctcagagtctccaggttggggcgggcctgggccgcacggctcctccacccaggtgacgctgagcaggctca

SEQ ID NO: 222008 - DNA, 56 bp, Homo sapiens; identical to SEQ ID NO: 198719
  chr2:220408723-220408779
  hyper

SEQ ID NO: 222009 - DNA, 681 bp, Homo sapiens
  chr2:220435309-220435990
  hyper
gtgcgcgttgcgggcgtggcacacgtagacgccggaatccggcagccgagccgccaggatgcgcagtgccaggctcgcgccggggccgtcctcggcgcggcccggctggagcgcgaagtggctgctgtcccacacttcgtccagggccatcccgtccttctcccagtacagtgtgggctcggggaggccccccgcccggcacgtcagcaccacctccgccccccgcagcacccactgggatcgaggccccgtgaggaagaccggggcgccctccccggaccccggcgatggcagcgggcgctcggcgggctgcagctcggggtcggaggccggcggctccagcacggtgacggcggccgccgcgtaggcctcgccggccgcgttgcgggcgcggcacacgtagacccccgcgtcggtgggcagtgcggcggtcagcagcaggccgtgctccgcgccgtccgccgggaagctcaggcgttccgaggccgccagctgctgcccgcccttctcccacaccactacaggcggcggctcccccaggaccacgcacttgagctcggcctcggcgccacttaccacccgcacaggccgcgggaagcgcaggaagcacggggggctcccctgatcccccgagctcgccttcatcgcggcggccgaccgcctgcagcggcgaacggtggg

SEQ ID NO: 222010 - DNA, 180 bp, Homo sapiens
  chr2:220436056-220436236
  hyper
ctgggcgcggggacccgcggagctctcccgggcctcccgctcccggctcgcctccttaccctcggccccgagctgcagctctgcggcggcggcggcggcgattcccgggcccgaagcctggcgctcagggggcagtccttcctgtttgcctctccagcgagtggccccgcagcctcccct

SEQ ID NO: 222011 - DNA, 141 bp, Homo sapiens
  chr2:220492470-220492611
  hyper
ccgcggggcggggcacgccgggcagggcgggggacccgggctgtcccgggcgtggctgggcctcggaggggcgcttgggccgggagcgtgcatccggctcccgggtggggggcgccagcgcaaggaacctgaccccgccct

SEQ ID NO: 222012 - DNA, 1440 bp, Homo sapiens
  chr2:222436048-222437488
  hyper
gccccacctcccgacacagacacacaggcacatacaatcctcccagcacgtccgaacggatgcacagaaaactgagcacccagacgggtcccgtcgaccccgcacgttagctctaaactgtgtgcaattctggggcgaaaagctaaaactcgactgcgttcaacttgccggcgggttccccaagtctgcggggcgaagagctcgggcccctcaggcccgcaatcgcaccctcggggcgctgggcttggcgaggagaaaggtgtctgactccgggtgctagaaatcaggtcactggcgcctgacgagcggcgccacgaccgctgcgctgcggagcaggccccgcagcccggtcccgagaagcgcagggctcgggaaactttgcagaaaccagagctcgaaaggctttcgctagaatccgggagcaccaagccttcactgtgctccaggctgcgttttcccctcgccccgggctggctcaggagaggacgtggttcttgtaattttttttttaaatcccggcgttgtctcccgtgcatcccctcagggcgcctcgagcgggcctctctggcggatgctgataaactttggcctttggttacaaacttggacagacccgccgcgtgcacgggtcaccgcctcggggcaggctgtccggcggttccccgctgccccttcgccgatcccctcgcctcagcccccttctcccgaatcgggacgcaccattcacactgggctccccccgcaccacctggccctgcgctcctgaggacccctcacccgcgatggcccctcgctgtccccgaccacagaaaggccgtcccgctcttaccttcattcgcggggtataccctggaacctgtgacagcgtcgcaaatcccgaagagacacgaaaatagggcgaaatagaaaatcccagccatggttcgccggtgccaacgctgctcctgccgcttctatcccagtggaataaatgcttaagttaggagagcagcgggctgaagacattgccaagggggcgggcccggccggtgacgtgagcccgccagtccggggcccgcggccaatggcggcgcagacagggcggccgagccccgccttcaccgagcagggcccgccccagggttccgccccctccgggctccacggggcgcgcggtctcccggggctctagggggcgagcacggccggtccccgcccccgcctgccggagggagccagcgggatcccccacgttacctcgaaggtcgagcccctggacggcggagggactttggaaaagctcggaattgaccgaggggagccagagaagaggttggaaaccttttctcccaccacgggcggtttaagatggaggaaaacgctcttttattgaaataaaagaagtctaagctgacctgcggttgcttctttaggagagtcgacgtgtctgcgtccagcgcg

SEQ ID NO: 222013 - DNA, 480 bp, Homo sapiens
  chr2:223170494-223170974
  hyper
gtgcggggctggggggcgggggtgcccgccaatgtccgcagaaggcaaggaggcccactcgaggagggctggatggagacagacttgagtcgggccctgagccccagggagtgcggcccggtagatctcggggcgaggggaacaggatcgggtacacttgatccggaacaagaacgcctcggcctggcggttgcccgttagtcccggatcccagcggccgcttcaccactgagcccgagccgccgagggaattttccaaatgcaaatcaaacacccttggcgccccgcttcttcattaattaagaggaacgtttcgacaaaaccggcgtaatctttattaattacgcagcccttagcgcgccgttcgcatcaatcacgcccaaagcgaaagtgcagggggcgcctaatcccttcccagagcgcgtttggagaaggagccgcgtggccggcgtttccaccgtgacttccacctttctgggc

SEQ ID NO: 222014 - DNA, 180 bp, Homo sapiens
  chr2:223171047-223171227
  hyper
ggaccgctctagatcccctgacaggccggaaaataacccccactcactatttgggcacgcgctcgtacgcagaaactcgcacagggactcgcgtggacactttatggcccatttcctccgtcccctcacccttaggctcagtggggaccacgcggttctcagtcctcctcttccctagga

SEQ ID NO: 222015 - DNA, 540 bp, Homo sapiens
  chr2:223183677-223184217
  hyper
ccagaggccccctcttctcccgccacgcggggctggaggtgcaggcgccggttccgcggcgtggcccggctatgtgtcgctcctccgcgcgccgcccgccgcagcccgtgccctcgggccgccgccgccgccgctgccccccgtcgagcccgcggccgcaccctcgggccgatacttgagccagcagatgacccaggtgacaacgaccgagaagagtgccaggatgctggccaccgacaggcagatgggccccacgggcgagggcgagggcgacccggtggccggtgcctcgccagggggcgccccgcctccgggggttcccccgccgccgtagtggttgacgaagatgaggccggtgaagagcagcaccaccatggagaggaaggagaagaccacgcacacgcagccagcggtgagcgccgcgcgcttgcagttctggcagctgtcgtaggcgcccggggcgcgcaggccggggcgggctcgaggcccgggggccgcgtcctcggcaggcggcggcggcggcggctgcggtggggcggg

SEQ ID NO: 222016 - DNA, 560 bp, Homo sapiens
  chr2:223184224-223184784
  hyper
ggcggtggcggggccggggtgggcggcggggcagcagcgggcgcgggcaggcgcgcgggcagcggcgggaggcggtcctggggcagcgggtcgtgcgctgcgcgcaaagccagcgggaaggcctcggctagcttggtgttgttgggcaggccgtgcacgcggctgtcgggcagcggcgtgcggtggcggcacaccgggcacgcgatggcgccgggcgggcagagccagggcggcgggcgcggcgggcgctcaggcgcggcggcagcggcggcggcggcggcggcgcggagctgcagctggctcaggcactcctggcagaaggtgtgcaagcacgccagcagcttgggcgcgcgccggtccgcgtcgaagtagttgtagcagattttgcactcgtagtcctcaagcggagggaggccggagaccgtctccgctgcgtcccgggctcctgcgtctccgcagtccggggctcccttcgcggcgaccccagctccctcccggctcccggggctgctgcttgggctctgctggctgccgccgctgtcgctcgccggcgctgccat

SEQ ID NO: 222017 - DNA, 131 bp, Homo sapiens
  chr2:223185035-223185166
  hyper
tcggccttctcaacgcagctttcccagcagcttaggatatcggtttttgttggacttgaaattgggagttgagggcggcctggaggcgctcgggaaggagatttggggtgcggctgcttataaagatgttg

SEQ ID NO: 222018 - DNA, 383 bp, Homo sapiens
  chr2:224808915-224809298
  hyper
gaagagagcgaaggcggctggagttcctcgcaaagaagcaagccccgggcaccagggtccgcagtgaccagccgccggtcctccacgcttccagaggagacgatttggaactgacccgggagggccaagaaacaccttccgagtaccaggctaaaccccgccagggagagagaccgggacgaaggtcccaggctagtgcgacaccgcaggtcggggttccctggttggaggagcgcggtgggctgggaggggcgcgttggtgcgcactggaacaggggtccccggcttgagcagcgcggtgagacagagttcccgcgctggaggggcgcggtgagacagaggtcctgggctggagaggtgcgttggggcgcactggaaccggg

SEQ ID NO: 222019 - DNA, 180 bp, Homo sapiens
  chr2:224904144-224904324
  hyper
gcccggcctccaggacgccccctctccgcctgcgacttctcggatgccgccccgccaggggtccgtgtcgtggggctgcgcccggaacgcgccggggagacgcgcagaccccgaggtgcggcgccagcccgggcccagctgcacgtgggtctcccggatgggggtgtgtgaggtggcggg

SEQ ID NO: 222020 - DNA, 265 bp, Homo sapiens
  chr2:224904376-224904641
  hyper
gctgccccctggaagagacagagggcgccctgagacagcgctcagtcctccgggtgatggggaaacggtgccaggacgcggccgggaaggggcagataacccctcgaggcgttttgcagggtgtcctagagctgacttctccctgcctaggggacagaggaacggcggcaagtcgccttaggcaaatacagacgaggggaaccagaaaactggattcccggctatggtgatagcatgaggtacccgcagcgtcctgggaacccag

SEQ ID NO: 222021 - DNA, 1235 bp, Homo sapiens
  chr2:225906386-225907621
  hyper
ggagtattaagtggtttgtgggtttttaccctgcggtgggagggctgttccaagtacatctatttctgcgatagttaacgtcggggggccccagctctaaccagggcgaggaccacggactgcatccctctctctcagcgcactggtctgtttactggagggtgagagggacgcgcagacctccggactcaggggttctgttctgtagatccccccaccccacccggggtctctggcactcgtatcacttagcaccagtgtgactggcggtgcattccggccccctcgcgccccattaaagcccctgcacatcctctcccacgctgcgcttctgctacccacgcagctgctcctctgagcgtcccgcgtgcacaaacgcgcccccggtccttacgcgtcggtggcgctgcctcgctgaggtggcgccgggggagcccgcagaggcggcgggggagggagtgcggaggagaggacccgtgagctgcggggacctgggcccgccgagcttttggggaagctgggctccgttccccccgggcgcctggggcgcgcgggaaggcgcggaggacgcgccgcactcacccgctgctgctgccggctgctgactgccaccgcggcggcggacgcggcgctgtgccggagctcggccgcctgcccaggtctcaacaggctccgggtgaacctgcgggtccgctcaccggccatcgccggtcacgccaatcgcgccgcgggcccggggcgcgcctcccgccggtcttccccgcgccaaccttctctatccacccgccgttcaggaagcggaactcggagccttcccccccctcttcctcgctcaactcgcaagaggcgggtttttctctcttgcacccccactcttcccacccccttccctcctctgaagcttctcgaagactttccaaactctgcgctcccccgggcgcgcgcggccaactcggctggcggccgggccctgcagcggcgcatctggagcgggcgtcgcgggacgcgtgtggggcggctcctgcccgcgccgcccacacgggctcagctggccggccggggctgtccacgccgcccgggggaactgcaggctgcgggggagggcggggggcggccgccgaggggctccgggcggggcctgtccaaggccgtcgcctgtccaaggccgtcagcctcatttggaggttgctgggagagttggagccctggatgcatttgccgtttagacttctatt

SEQ ID NO: 222022 - DNA, 956 bp, Homo sapiens
  chr2:230578042-230578998
  hyper
tcctgaaaaccccaaattcacgggcggctgctggctacatcccatcgtcccatccctcgcaccgcccccacgctttctggcggcttcccggtgccctgctcacgccccggctgccagccccaagcgtgcgccccgtggagcgtccggcaggaagggcggccctgccagcgccacgtacaatgccccctcgaatgcctccgactgttccaacactgctcctaagcttagagagggctggtcgcaggccgaggggaggcagctgccctcctcgtcctctggctgctttgtcacagccctcaagggcgtaggaagagaaggagaaagtgccccaccacctggcacggggcccaccatcacctgcctcccacaccgcacaccctttacacacacagggtccagccggacgtggagcgtggaccacctggacattgaacacctcgccggggacgctcggagccggctcctccgcgctgccaaggcgggcaccgctcaagtggttcttggctcggcccggcctggaggggcgcgccactcagtggccaaccggagcgtctagagccccgcgcgagaagtgccgagccccggagcggcacaccccgagagcccggctggccccgcccgggaaccagggcgggtaagggaatcagggtcggcccgggggtccgcgtccacgcgggccaagagactggatccatcttcttcccaaagtgggaaagcctgtgtcaggcgtgcccattgtcgggcagcagcagcagggccggcgggaagaggctgctggtcccggaccagcgccccgcaccgcgcccgccgcttccactcacctggcagttggcgccggagatcccggcggggcaggtgcagctgtagccaggctcgccggcgggggccgggtgctgcgggtccggctcagggcgcgaggtgcacacacccccattccggcagggctgcgcggcgca

SEQ ID NO: 222023 - DNA, 493 bp, Homo sapiens
  chr2:231692871-231693364
  hyper
gtgaggaccacaccgggaggcgccgtggggggcgggagacctcagccgcggggcggagaagggccaggcgcgcgctcctggaggtacggggcgcgcagccccgaggtgtgcccgggccgaggtgggcgtctcccgggcgcgcccgggcgtatggcggcgtcgctgggatgccagatcccagggagctcaccgaggccacgccgatggccacccgggtggagcctgggctgtgggcttcgcctgcgtccccgcggcctgtccacgcgtccggcacccggagctagggcgtggccaggtcggaagccggcttagcgcgcctttcacccctggccccacccagggctcagcccagcgccgcggcgggcccgggctcccaggtctgcggctttcactgggccgcgtccctgcagagggccccggcgactggggaggaggccgccctttccttccggcccgcgaccgccccgggctgtccctacccaagggagactcc

SEQ ID NO: 222024 - DNA, 158 bp, Homo sapiens
  chr2:231902381-231902539
  hyper
gctggtgggcgagctgtgggagcgcgaacagagccgcgcgctgctgcgggacttcgcacgggcggtgttcccgccggagccaggcgcggccaagccgggcggcgcggcggcagagggcgcggggcccggggcggcgcgcggggcgcagagggcggcga

SEQ ID NO: 222025 - DNA, 454 bp, Homo sapiens
  chr2:232479236-232479690
  hyper
tcagggatcctagccctctctccagacgcgctgctctgtccactgtccccgcctccaggacctgcgtcctcccagccccacatttgtgcgcaaagttgacggtcaccgggcccgcgcgcttcggcatctcgcgaaggcgctgcccgcgccctgagtccttccctggggctgtacgttggaaaggacagaggtctcctctgcttcgcagttgcaaaaggcttcacgttttcaccaaggggcagatggggcagtaggggccctgggaggcctggtccaccaaggagggggaacccgcgcgcgcgcgcgcacgcacgtggcccggcgcgcccgggagacctccgtgtgatcaccgcgcgcagcagctcccgggcggaaacacctcccccctccacgggaaagtgggctcaaccgggggcggaaagcgacacggctgggggacgactacgtgctccct

SEQ ID NO: 222026 - DNA, 626 bp, Homo sapiens
  chr2:232526742-232527368
  hyper
ggaattttcacccccgccagaggaagagggcccagctgcgccattagcgcgtgcgagggaaaatggaggctcctggtcccacccgcgcaccggcgcctgcgccctgggcgcccaccccggcccgcgaggcggccacggccggagagagagggcaagggaaccagtgccgtgtcgcgccccaccctgcgcccgagcgcagtgccggcgagcccggctccggcccttgagagtccgctccaggccgctccacaccacgagccgctccgcaagtttgcagcgctccgtgctttccctccagccctttgtgttctagcgcgcgtcggaaggaacgcgggaacgcgcgccgtgctgtgcgcctgcgcaagggttcaggcggtgcgccaagcctggagtcaagagtgggcgaggctctcggccgctccgccccgggccgccttcgctccgcccctcgcccgccatttcgtgctccgccgcgtctcccgcgtctggggcgcggcttccgcgtgatggacgcccggaagccggcacaacaaatgcccaagcgccagggcttcgctgtctgcaggtccttccgctgcccgcggagcgaagatggcgcctagagcttgcagcgttgcccaaatatg

SEQ ID NO: 222027 - DNA, 551 bp, Homo sapiens
  chr2:232545577-232546128
  hyper
cgtcccgtgcccatcgggcttttcccccacagcggtggcccagcccctgcttggaccccggggactccgagcgcagctgggccgggggtggcagcgggggaggccggtgcacaggttgccggaccgcggcgggggcaggcggcggaggctgggcgggaacccgactctgggcccgcgccccgccccggcgcagatggcggcggcgcgggctggtcccgggccgccgctgggggctcgggtttcggccgagaggggcggggcgagcgcctgggggccccggggaggctgcggcccaatcactgcccggcccggacgctgcccccgaccccggcctccaatcactgcctggccggaccgcccccgctccgctgcgtcctttgttcccgctcccctctgccttcccgggcgccccgctccggccctgcggcttccggcccgcgcggaccctgccgtgtggacgcgtgtgggctgcgcccgccccgggcgcactccgggccccaacgccaggcacaggcccgcttgtggctgggcacgctcgtgtgcccttggcg

SEQ ID NO: 222028 - DNA, 105 bp, Homo sapiens
  chr2:232790016-232790121
  hyper
aacttgagcaaaggcggctcgcgcgcctccgaaggccggctgggcggcgggcggtcccgggccgggctggggctgggcgtcgggtgggccgtactcaccgccgcc

SEQ ID NO: 222029 - DNA, 420 bp, Homo sapiens
  chr2:232790399-232790819
  hyper
tcctctgccggcggggttcgcgggacctgtccgaggaaagagcgggcaggtgaagggacacgcggctgcagcacgggggactctgatgctccagccccacgcgcccgccggcgcggggtgtccctcccaagcccagagccgcccccaccgatgccggccagcttggccccgcatccacctgccacgcggccgccttcgccgctccctccggaagccccctgccctccctttgctgctcgccgggcaggccacactggggtagggggctgcgcatgggccgatgttctccggaggctggagaagtggacccccgaatccgcgcttcgagggctccccggctctcgcccacgcgcatctcggaggagacagccgcctgccttccctctctcctgggtcctgcgcgccgcattctccaagccc

SEQ ID NO: 222030 - DNA, 78 bp, Homo sapiens
  chr2:233251508-233251586
  hyper
agttgaggtcccatcgcgcagcaaccccccggcgctccgccgcgccgcgcaggtcccagcccccgcagtcctcgatga

SEQ ID NO: 222031 - DNA, 105 bp, Homo sapiens
  chr2:233283250-233283355
  hyper
caatgcccagagagcgaccagacatccatgggtagagacccagaagcacgcagaccccagcccctctttccacccagacgagatgaccaaagccccatccctgac

SEQ ID NO: 222032 - DNA, 142 bp, Homo sapiens
  chr2:233284017-233284159
  hyper
ccgccgggcccatccctgggccgtgccagcaggcgcctcaggcgctcctctttctgctcgccgaaggccgcgatggtgccataggtgagcttttcgttgggggtggcatggcgcttcagtcagcagccgcagacgaaaaagt

SEQ ID NO: 222033 - DNA, 82 bp, Homo sapiens
  chr2:233284387-233284469
  hyper
ccaggtcctggtggcgctgctccttgagagaagcctgggcggcagaaaggcccttgcacgatccccgcgccacagcagctta

SEQ ID NO: 222034 - DNA, 565 bp, Homo sapiens
  chr2:233284687-233285252
  hyper
accgcgaggagagacgcaggcctgggtgcagaggccccagctgccggcctcattcactgcggaaaccagggacgaggagagtctggcggggccaccatccccgcgtgcacagtggagtcttctcccctgtcctcctccctgcacacacgtgtcggatgctggattgggaggcctcttatgggaagggggaggcgctgggcacggggcctggcacgtagggggccttcattgcatctctcttcccttcgcctttcttgtccacgacctgtcctagccaaggccaagtggggtgggggaaggagcagaggctggagtgaggaggtgcggtcaggggcgcgtctatgcggcactttcagctctccgagctggacacagacagacgcttcgcaaaacggccaaagaaccaaactttgtcctcgtggaagtctgcgggatctaccacttcaaacccgctcgctggctccttctgctcggtggcccgacggcccacccgccccttcccaaggggaacgcactattgctccagggtcgcggatacacaacccaccccctgcacggcagtgat

SEQ ID NO: 222035 - DNA, 279 bp, Homo sapiens
  chr2:233285964-233286243
  hyper
aaaggagctggagctacgcagctgggggccgtcatggtccagcccacagccctggagcaccacccagggaggactcctcctaaggattgagagggcgctgacggagtgcctgggctgcccgcacagcgcctgcgcagagctcaccttcaccagggagcttcctttacctcctcggaacccctgtccgggatcagctctccccggggtgtctgggcttctggttgtctcgcccccttcccccagcctctgatccacggagagcaacgcagagccctgcca

SEQ ID NO: 222036 - DNA, 900 bp, Homo sapiens
  chr2:233350480-233351380
  hyper
tctcacgcacccgcctcccgcgcgcagggacccctgggcaaggccactgcgccccggatccgcggccgctggcagggcgctcagggggcgcactcacgcggatgacgtagcgcgaggagttcctgtcgtccaggctgaccgtgagcgagaagagcgcggcggcgctgtacacgccctgcgccttgtacagcagccggttgaggtcccatcgcgccgcgacccccggacgctcctccgcgccgcccaggtcccagcccccgcagtcctcgatgacctctagcatgggtcgcgggcccagtcgctcgatctcgcgcatgtcgaggcacgagcggaagaaggcgcgcaccttgcgctgggccgcgccgccaggcccacccccgggccgcgccagcaggcgccgtaggcgctcctcgttttgctcgccgatggccgcgatggtgccataggtgagcttgtcgtcggggatggcgtggcgccgcagccaaccgccgcaggcgaacgagtagaagtcctggcatgggtcgatgctggcgtccaggttggcggccaggaagcgagcggcgcgcgcgaaggccttgcgctcagggcagccctcgggacaggcgccgccgccggccgcgaccgggcccaggtacttgagggccagcatagccgccagaatggcgcagaggccggcggcgaacaccagccccgacagcaggcacacctcgcgccggttccagcgcggcagcccggaccgggccccggtggcgctgcgcgcagcgcccaacgggaagcccgggggcagggaggccccgcgcgcgccccccgcgccgcagcggctcacgtacttgacctcttggaactcatcgtagtgcgccgtcagcgaatacgggggctccatggcgccgaggccgccgc

SEQ ID NO: 222037 - DNA, 240 bp, Homo sapiens
  chr2:233351837-233352077
  hyper
tggagtgaggaggtgcggtcaggggcgcgtctatgcgacactttcagctctccgcgctggacccagacagacgctccgcaaagcggccaaagaaccaaactttgtcctcgcggaagtccgcgggatcgaccacgccaaccccgctccctggctccttctgctcggtggcccgacggcccactcgccccttccctaggggcgcgcgccaacgccccagggtggcggacacacaacccaccc

SEQ ID NO: 222038 - DNA, 582 bp, Homo sapiens
  chr2:233352208-233352790
  hyper
ccggcggggagcgagctggctggcgacccccgagccccggcgccgtgcggcgcagtccgcggagcccgagagccgagcccgggagccgcagccgcagccgcagccggagccgcagccgagaggacgcagacaaagccgggaggctccgcgcagtggcggcggcggcgacggaagtggccgcggtggtggcctcagcggcagggactcgggcgccacttacccggcaggtgcgcgcccgagccggcggtgaccgagcgggtcgggcccgagcgggggcctgagccgcagcgcagccgagcgggcgtccggtgtctcccagcgcccgccgcctcctctgccgccgcgccgagcccgccgcgccgcccgcctgccggcccgagggagggggcgcgccggcggctccaccctcctccgcccgccccgcgcgcccctccttcctcctgcatctctcgggccacctggcagtggggcggcagcgcggacgtgggtcggcggccgcggagacaggctcccgggggtcgtgcgcgggctgcggtcggggactccgggtccagccgcgttccgagacgagtgagggcagcg

SEQ ID NO: 222039 - DNA, 1020 bp, Homo sapiens
  chr2:233498044-233499064
  hyper
gagctgacaggggcagcaaggtcggagttgatccgagggtccctgcctggtcccggggggacggtcagcctcccgcccggagccgcggggagaggaagcaggtcggggtctccgggacgcgcagacacccagacaccggcggcctcctcccaccaggctggcagtcgctgagccctggcgcctccttaaagccgcagctccgccccgaccgccccgcccgccagtccgtcctcagaccctcccaaccgccgggtccccgccgcctcggcggagtgttgtagagcctcgagcctgcgaggagcgcgccgcccgccagctccctgcgtcccgtcccgcgtccccgcgttcccgcgtcctgcgatccgccgccatggccagtgaggagctggcgtgcaagctggagcgccggctgcggcgcgaggaggccgaggagagtggcccccagctggctcccctcggcgccccagccccggagcccaagcccgagcccgagcctcccgcccgtgcgcccacggccagcgccgacgcggagctgagcgcccagctgagccggcggctggacatcaacgagggcgctgcgcggccccggcgctgcagggtcttcaacccctacacggagttcccggagttcagccgccgcctcatcaaggacctggagagcatgttcaaactgtgagctcccgctgcgcgcccttcgcccccgggaccagggagggagcgggagggctttctggtccgaagtcccgggccctgtttgtgtggggaggggtcccggggtgcaggtagcatttggcccaacgcagccagatcttgcgtgctcgggtctatctcggcgcggtgggggacggggccgaagaggggggacaccaggagcaggagctctccgggacggagcccaaaagttctcggcggctgccgggcccgagttccaggtcccccaaccccgaccactggtcccgccccctccgcccgccagtccggagatttgctccgaaagcaacttctaggaaagggagccgt

SEQ ID NO: 222040 - DNA, 180 bp, Homo sapiens
  chr2:233499104-233499284
  hyper
gggaaaaattagcccctgttggccttttatcttttaaaacaaaaggggaaagttaatccttggctgcagcgcggggtctgatgaatgagcggaggccgagaacggggagtttggtaaagtcgttgtaagagattcaggactttcctggagcaggcgcggcccgggagcctcctgggggcg

SEQ ID NO: 222041 - DNA, 360 bp, Homo sapiens
  chr2:235860379-235860739
  hyper
accctggccggctccgggcggaggaagaagaggaggcgcccagactggatacccgcctggacccggagccgcggcaccacccccagcccgccccacgctcgccagcctcagacggccgcgccccgccccgcccctctcccgaagccccgccccggcgcgggaccaccccctccgcggcctcagctccggtcctggccccgccccccgcgcccccgcccccgcccccgcccccgcccccgcccaggcgcgggaccaccctccgcccgccgaggcgggggcccagcgcgcccggcactctcggcggtccgggcccctcgccactaccgccgccgccgccgccgtgagtcccgcggagccgcg

SEQ ID NO: 222042 - DNA, 180 bp, Homo sapiens
  chr2:236402573-236402753
  hyper
agcgccgaggaggacgcagcgccggcggccggagggcggcaagcgcgcgggcaggcggggcgcgggcgcgggcgcgggcgagggcgaaggcgggggcggggccgacgtgggccggagccctgcgtgccagggagggggccggccgggcaggcggcgggcggcgctcggagcgggctccgc

SEQ ID NO: 222043 - DNA, 1020 bp, Homo sapiens
  chr2:237076286-237077306
  hyper
cggggagcgtggccatgagcgtagaggtgagcgccatgccctgcgccaggctggagcagaagcctgtgggcaggctggggatctggtggtgagggtgtgcgggcggcagcgctggctgcagcgcggcctggggcagcgcgggcggcggcggcggcggcggcggcagcactaccggccggtagggcatgaacatggggtagccggtgtagacgaaatggccggggctgggctgcggcgggctgccgatcagcgagtctatgctgaaggcggtgctactccccagcgggcgctgcatcatcatcagcgacggcgggaacgctgcgctcatagacgcgctcggtagaggccagcgagaggcgaaaagtccccgcgccgcgccgccgccgggaagcccgccggacgccgggagcaccgccgggagcgccgggcaggggccgagcgggacccggagagcagacgcctccgcccctcagtcctgggcccgctgcatgccgggcgggtgcagggggtgtgcggggtgaggccgtgcgccccggagtggagagggcgcccgggccccgagggctcgccggagcccccgtccgccgcttgcccgtcggagcccgcgcgcttcgcgggtttggccctcggccccggtaagctgccgtccgtccgtccgtcccgccgtccgtcgcctcccgcgggccgctggggagcgcgcgaagccggcgtacttatctccggcgggcgcagccagcacctttaaatcgcgctcctctttctcattcacattttgcctgccgcctggcccggctcgcctcacgtggggctgggcgcctctggccattggctgagcggggcgggggtggggcgaaagcggggccccgccctttccacccaagctggcctcgagcgggctgcgggcgccaccgtcggagcgcgcgggccggggagccggagcctgcatgcctagcccgtgccgcgcaaacttgagacgggcggatggcacctccaaggctcggaccttggggccctgcagcc

SEQ ID NO: 222044 - DNA, 180 bp, Homo sapiens
  chr2:237077454-237077634
  hyper
cgggcgagggtcctggagttgggggcagggtcctgcccctccggagccacccccggggcgaaggctgggagctggcagcgcctgcccgccgccagaaacccgccgggttgctcgctgtaggtccgcgcaccgggtggggcggggaggctgctgcttcccccatcccgggctgggccctcc

SEQ ID NO: 222045 - DNA, 421 bp, Homo sapiens
  chr2:237476438-237476859
  hyper
ggggccagaattctcgcaggcgcctgggccgggtgcccggccgtgcgtgagtgcggaacaagtctgggcgcggggaagggcgtgggtgcgggccgtgggtgggtgcggggcagggcgcggggctgtgggagggcgcgaggccgtgtgtgggtgcggggctgggtgcaggccgtgggtgggcgcggggccggggctggcggggcagggcgcaggctgctgcaaggcggcctcgtggattctggccccggacgcacgaagcgggttctactttttaaaaaaactgcgttgccttttccttcctctacgttagcatcctgtccggggtccccggcccatgtggcctttcttccagcgacagtacacttagctcagaacggattgacacccactctgtgtttccaccgggcgcgcaggctctgca

SEQ ID NO: 222046 - DNA, 145 bp, Homo sapiens
  chr2:238384223-238384368
  hyper
tctgtcgccccctcccggagcggaggagtcacggcgggaaacagcccgaagccggcggggccccgagggggtccgcgctgcctgcccggggaccccttttcttggcagagaggatactgacatcggtctggaggccgtacgtcag

SEQ ID NO: 222047 - DNA, 736 bp, Homo sapiens
  chr2:238536148-238536884
  hyper
cgcgtccccgcgtccccggcccagcgcccgctgacgccatgacgccgcggcggagggaggggccggggccggggccgggccggggcggcgcgagcggctggagcaacgggccccgcggcagctgcgggcgacgcggtcgatggacatgggcacccagggatcggggcgcaagcggctccccaaccgggagcggctcacggcggaggacgacgcgctcaaccagatcgcgcgggaggtgagcgctccgggagggcagccggggggcgccgggcgggcgcgggggccggacggctgtcagggtctctccggcgtccgtctgtcccgctgtgcgtctgtgccactgcgcgtccggctccaggcgggtgggccgggcaggcgcgcgccggggcgctgatccccaggcgctgcgccccggccccgatctccgaggcctgcggaccccgcacccgttctccagccccgggcccagcccgcgacgctgcgcgccctcccccaccccggccaccgtcggccgctgcgccctcgggagaggagccgggcgccgccagcgcgcgaggtggcccgggctggccgggtgggggcgagcgccccgctttgttgtgcggcatgggaggaggcgggggcttaggcccgacctggaggcagtggacggtcgccggaggccacatggccctgctgaaatggccgagtcgctcaggtgaccatttgtcatccatccatcgatgtcactcaaggt

SEQ ID NO: 222048 - DNA, 176 bp, Homo sapiens
  chr2:238599864-238600040
  hyper
aatccgcgtcatcccgtcgcttctgcccccagcctggcgaggtcgggaaccgtttcccgcaggactttcattgggagttacgagggcgccctgtgcctggaggtggcgcgggctggagccctcccggaggagaccggcgcctggcagggggtcgtcgcggccgcagcctggacggt

SEQ ID NO: 222049 - DNA, 244 bp, Homo sapiens
  chr2:238617174-238617418
  hyper
tgtccgtttcaggcggaagcccggctcgctgcaaaacgggcggcccgcgcggaggctcgcgagatccgcatgaaggagctggagcggcagcagaaggaggtaacgcttggggctccttgttgggtcttttcacagtgatttgcgtgctgggcccagggtgcaagtgcaggcacctgttgctgcagacgcacctggctgtctcacgttgctcacggtcagagtgcgtttgcgcctgtgacttctg

SEQ ID NO: 222050 - DNA, 694 bp, Homo sapiens
  chr2:238864559-238865253
  hyper
ccctggaccccaggcgaggccaccagcgcccaccatccaaagggcgacagggaggcgtccccccaaccccggcggcgatgcctcctgagtcctaaccacacgccgtggacccccgcaccctcagtagccccgcgccgagtgtaaccgcgccccgtgtcctgggatcccgcggcccgggtaaccaggtcccatgtaaccgcagcctggtgaagccgtgcgccctgggcgcggctacttggccctcacggcagggcggagatgcgaggccccagggttcggccccgcagcgccgctgagtccaaggaccgagctgggagtgggggcggagccaagaaggggcgcccctgcgcccacaagccgcagcgcccaggaatcccctgggcgcctccgcgtcccccgcgggctgtcccggcaggcaggcagcccaccccagggctcccctcgtggaaggacacccctgctgaccctggccctggttctggcggtgtctccactcagccctcggagggacgcccacctcccgcggagctgggggactgtggcttcctcctgcgcggggaggtcggtgggcgccgtggacccgtcccgcccctgtctgaggagccgagtcggccacagaggggcagcagactagggagggctgatgggccgtgcacttagctccctccgggctgctggccggggcccttgaacg

SEQ ID NO: 222051 - DNA, 146 bp, Homo sapiens
  chr2:238876150-238876296
  hyper
gctgcctgccttgtacggaggaagcggggcgtccagcgcctggccaaggtcaccggcccgacgtggccgcagaaaccgggactggactcccgatcggggcaggagtcgcgctaggccgtgaggagcgggggaggtgaggggagtga

SEQ ID NO: 222052 - DNA, 708 bp, Homo sapiens
  chr2:239148240-239148948
  hyper
gcgcgctcccggacccgcccgcccgccccgcagccccacggcgcctgcccggccgccgcacctcggcgcccgccagcagcagccgcagctcctgcaggctctcgttgatccgcgcgcgccgcttcttctccaccaggggcttccgggcctgcggggagcggggcactgaatcccagccccgcacggcctcccgcccgcttgctcgcccatggccccggcccgcaccttgcggtcccctcgcgtctcccagccgtcctcatcctcacggcccacacggtcccggccaggcgccgcgggtggcgccatgcccgctccgccggggacgcggcaggggctaggagcagcggggacggggagcggcggggaccggagtgccggcgccctccgctgccccgcggccgcccagcagcagcccagccgtccgcgctcctcgcggcttccggcccgccgcggtcccgccccttttatagccgcttatttgcatctcaatgcgccgattggccgcgcgggcccggggcggccgaccgcgaggcgcgctgcagccaatcggggcagcgcgctttgtccggcccagcggctctggcggtcgggcagctggctgagctaggcggggcccccagcccggccttccctagacccccgcgggggcggcaccggggcggcgaccccgggtagctgcggccctgcccgcgcttgtttctctccgtc

SEQ ID NO: 222053 - DNA, 210 bp, Homo sapiens
  chr2:240294231-240294441
  hyper
actcgcactccacacgctgctctgcagctcccactcctacatcccggcctcccggtacaccaggagctctggtcccctctctctacagagtgtacgcggcaacacgcacaagcaagcagtttatacacagcgacagaacagacacactgcttcatgttcagagcaatagcttctttctctctttcctgctctctccaccatcaaacaccc

SEQ ID NO: 222054 - DNA, 120 bp, Homo sapiens
  chr2:241306336-241306456
  hyper
acacatgaatgcacgcacaaatgcacacacgcacatgcacacgtgaatacacacacgtgaacgcacacacgaatatacacatgcacatgcacacaatgtgaatgcacacacgaatacaca

SEQ ID NO: 222055 - DNA, 138 bp, Homo sapiens
  chr2:241374477-241374615
  hyper
ccagcgcgagacggctggaagggcgcggggagggagccgctgcggggtgcaggcggggagaggggcggcggctcgaggcgcggccggcgggcggagggtacggaggcgccgggagagcgttctcggggcgcgctgcca

SEQ ID NO: 222056 - DNA, 264 bp, Homo sapiens
  chr2:241375298-241375562
  hyper
gcgcgggcgggtggccgggggcgccgccggccccgccatggagctccgggcccgaggctggtggctgctatgtgcggccgcagcgctggtcgcctgcgcccgcggggacccggccagcaagagccggagctgcggcgaggtccgccagatctacggagccaagggcttcagcctgagcgacgtgccccaggcggagatctcgggtgagtgagggcgcggcgccgggaacccgggcctggccgggctttgggctccggaccctgg

SEQ ID NO: 222057 - DNA, 443 bp, Homo sapiens
  chr2:241393136-241393579
  hyper
tgtccagacccctgcgcacccgctccggctgcgcggtttgccgtcttcgtccctggccgcggcggctggcgactggcatcggggcgcccgggacccccagggcggcgacgctgccgccggtgccgccgagcctttgttccgccgccggggccggtttcacgcctgtcgccctcgcaagcagccgcgggtgacaggagccttagccggcctggggcgcggaccctcccacccggggcagaggtgtccctacgacgcccctcggtttcgggtcgcagtgcgcggcggaggttctgcggcggcggaggggctccttggcgacgctgtcatttgggtgaaatggtggcgggggggcttcgggcagacggcaggggtgtggggaggggagggaagcacgatggggtgagtctgggggccgtggatgccgttgacgaggagctgagatg

SEQ ID NO: 222058 - DNA, 92 bp, Homo sapiens
  chr2:242269473-242269565
  hyper
acggggagtaaagcctttaaagaggagcctctactttttacatatacacgagctagacatggacatcttaattaaatcttaccgagtccagc

SEQ ID NO: 222059 - DNA, 240 bp, Homo sapiens
  chr2:242498382-242498622
  hyper
ggcgcccgcgccatgcggcgggagaggtgagcgcggcgggcgtggcgtccgtgccggggtgcccggggtgccacgggaacggcgaggccggggacacgcgcgcaggacgccagcggcggaggtgggcggccccgggccggggcggggagggccgggtcctggcagtcgccgtgggggacgcgctgggctgtgccctccgcccccgccgcccacgcactcgtcttcgagggcgggcccggc

SEQ ID NO: 222060 - DNA, 180 bp, Homo sapiens
  chr3:3840463-3840643
  hyper
aacttccacccctcacaaatcagaaagctgtaatttcaaagtttcagaaacgttttcggaaagcctcctccaatgggaagcgacttcgccgctgagttaagcgtccgaatcctccttcccgcggcagggacaccggcccgggccaggtctgcggaggacgcccccgggcgcgcacacaca

SEQ ID NO: 222061 - DNA, 960 bp, Homo sapiens
  chr3:3840760-3841720
  hyper
ccgcaaagagatggggccccattgtgcctagctggcctcctagcacggacgtgtattttcttttggtctgtcttttgctaaaaaccggcagtgcgcttcgcctccctgcccagccgcagcctgccgtcccctagacaaaaagcggcgaccgcggcccggccacccgagccccgccgcgctgcgcctttgttgggcggtccacagatggtgcccagcacggggccgcgccgagggcgggggcgggaggccgcgaagagggtcgggcgggaggggaggagacggcggagcagccaatccgcgcgcggcccatcagctgaccgcctttgcttacaccaggtgcacgccggctgcggggagcacaaagcggggcgcaccgcgggcgccggcaacgagccggtgaacgaggcgaggcccgtgcgcccgcggctgcaagcgcccgcctggcggggagaggggccgacggcgtcagcccgggcggcggcatccctaggcgcctggggcgccttcctccggacctggccgctcgctgccccgccctctgcaccccacttctccgaccctccttcccagtcctgcctccccctgccctggcctctgagagccgactgagcccagccccgtgcagcagcggttgcctgtgtcgccgcctagtctccggtcttggtgctctcccgggggtgccccaaggagccagtgcgcgctgcgggctgggaaggaggcgccgctcagctagtcctcctcctcctcctcgtctttctcctcctcctgctgctgctgccgccgccgccgccgtgggtgccgggtccgcgcgcaccccaacacccccaccagctgggcctcggggtaagtccctggccggccgcgccgcggcaggaggtgtgggaggcagcgaggggaagtcgaggcaaacttggtggcgtgggagaccctacggggtctggggaacctcagggtaagatc

SEQ ID NO: 222062 - DNA, 420 bp, Homo sapiens
  chr3:4910277-4910697
  hyper
ctccgtgccccgcctcctgtagggagcgcgggaccctcggctggcgcgggcacttcccagcccagcccggggcgccggcttcgccgcgtgcgcgtgcgcatggtggggtttggctggctgcgggatgcggtcgaggccgccgaggccgcaaactccagtgggaaggcggcgtgccgcggccggcttcggtggaggagggggcgtttccccggaaaaggaaggaagtgggtgtcacgggcctcaatacggcccctttgacgtcttgagtgggaaatcacaagatactgctccagattttcccattttatggctaaatccaaatgactcggaccccctgccccatcacatcaggaacttcagcagttccttccaccaaagctcaactattgctgcaagcgctttggtaatcacgagcattat

SEQ ID NO: 222063 - DNA, 105 bp, Homo sapiens
  chr3:5018751-5018856
  hyper
aaccgtggttttgacgcagccgtgacagcccttcatccttattaaaatcacacaatgaagcaggtcgcccaagattgaaagcgcgtttccagggcggaccccggt

SEQ ID NO: 222064 - DNA, 180 bp, Homo sapiens
  chr3:5019028-5019208
  hyper
aatacactgccagtttggtcaacttgtgaatgccagttctctaggtcgtcaagggcactgccagttaagactgatcccctaactgcacccgaggctactactcttcgcccagtctcggcagtgaccccatttttttttcaatccttcccacagccaggtcactcagcagtggggtgactg

SEQ ID NO: 222065 - DNA, 420 bp, Homo sapiens
  chr3:6903108-6903528
  hyper
actttgatgaagttcccctgctgcgtgctggaggtgctcctgtgcgcgctggcggcggcggcgcgcggccaggagatgtacgccccgcactcaatccggatcgagggggacgtcaccctcggggggctgttccccgtgcacgccaagggtcccagcggagtgccctgcggcgacatcaagagggaaaacgggatccacaggctggaagcgatgctctacgccctggaccagatcaacagtgatcccaacctactgcccaacgtgacgctgggcgcgcggatcctggacacttgttccagggacacttacgcgctcgaacagtcgcttactttcgtccaggcgctcatccagaaggacacctccgacgtgcgctgcaccaacggcgaaccgccggttttcgtcaagccggagaaagtagtt

SEQ ID NO: 222066 - DNA, 735 bp, Homo sapiens
  chr3:9956773-9957508
  hyper
ctataggctagggctgttttcggtaccaacccccagagcaaataaggggcgggggcgggggcggagaggcgagcaccctacggtatcccgagagggtggggagaagagggctgagcagtccctcagccgcccagccttcatctgttgcttcccgccaccaggcccgggcccagcgcggccagtgctcctcctgcacgcggcggactcggaggcgcagcggcgcctggtgggagcgctggctgaactgctacgggcagcgctgggcggcgggcgcgacgtgatcgtggacctgtgggaggggaggcacgtggcgcgcgtgggcccgctgccgtggctctgggcggcgcggacgcgcgtagcgcgggagcagggcactgtgctgctgctgtggagcggcgccgaccttcgcccggtcagcggccccgacccccgcgccgcgcccctgctcgccctgctccacgctgccccgcgcccgctgctgctgctcgcttacttcagtcgcctctgcgccaagggcgacatccccccgccgctgcgcgccctgccgcgctaccgcctgctgcgcgacctgccgcgtctgctgcgggcgctggacgcgcggcctttcgcagaggccaccagctggggccgccttggggcgcggcagcgcaggcagagccgcctagagctgtgcagccggctcgaacgagaggccgcccgacttgcagacctaggttgagcagagctccaccgcag

SEQ ID NO: 222067 - DNA, 240 bp, Homo sapiens
  chr3:9993830-9994070
  hyper
ctcctcctcctcctcctcctccgtctcctctctccctggctccgcgccttcccgcagtgtcctggatgggggtgggcgccgtgcaggcctggtcgcctgcgcccgcgacgggggcagcaggccacgctccccgtcggggtcccgccatcgccccctccctgggccagctcctcacctgcgcgccgcagcccccgtgttcaccttgcgcgcgtccctgcagccgatcgccgcgccgcatcc

SEQ ID NO: 222068 - DNA, 442 bp, Homo sapiens
  chr3:10749300-10749742
  hyper
tttcgcgcagcaggcgcaaggcgcgcccccttccctcacccgcaggcgccgggtccgcggacgcccaccccggcccgccccgcccgccgcctggtgcccgctcaaggtcactgctgacaaggcgcctgcctccgcggggcgaagggaccaagacacgctccggctcacgctcccgccctggcccggcgggggtctccggggccgagcgcccgcggaagggaagccagcagggaaagtgacaagagaccgagcgagaggggaagaggcccagagcccgggcccggccgcccctgcctcacctgcgccggctccgagagcgagatgctgccgccgccgctgccgccgccgctgccgctggtgcgcgcccggcccggcccggccccgctgcggctgcggctcctctgccgcggctgccccgcgctcgcctgccccgcggccccgc

SEQ ID NO: 222069 - DNA, 427 bp, Homo sapiens
  chr3:13008720-13009147
  hyper
aacccacagtctggcggacgcaccccgccccgcaggcagctttctctcgcacgccgggcgcccggtcccgacggtcacccgcactcccgcacaggcatccccacagcctgcgccagcccaccgctcagcacccgggaaggccgctcgccccgcgccgcgccctcacccgctgtcaagctctagctccagaagggactgggtcctctccgagttgcagtgcaggcaccacatggcggccgcagtgggagcgggccgggccgggagccgggacccaggcccagcagaggccgccgactcccgccagcgagccgccggatcccggggccgacacccggccacccggagacccgaccacccgccacgcgatcacgtcggggctcctggtccagcgtccgccggctcccgcggctccggccccaagtccgag

SEQ ID NO: 222070 - DNA, 360 bp, Homo sapiens
  chr3:13323690-13324050
  hyper
agggctctgcgcgtcccggactggacacagcgcagagtccattccagggacaccgcaacccgcaagcgacccaggcccgctccagggcgggatccgcgcggcccgcgacccctccctaccggtctcgggatctctgggtcggaagttctcgccctgctgctccgagacctaggtccgctccccggacagacctccgcccggctcgtccgagccccgggggtcgccaaccctgagtccgcgccgcagcgcagagccaggccggcgggagcgctgagcagctccctggagcccttttccagggaacccagtccccacccgagatcgagctccggatctgggcggcgaccccgccagagaatc

SEQ ID NO: 222071 - DNA, 720 bp, Homo sapiens
  chr3:13324084-13324804
  hyper
ggcgctcccgggccggccacgcgccctcccgcacccgcccacctccccgccaagccccgagggaagccgcggaccccaagaagttcccacgtccccgacacgcccgccgccccgggccccgcttacttgtcgcggcggccgccgagctccgggatggcgccgagcggctgcgggccggggccggggcccgggtcggggcggcgggcgcacgcggccaggtgtcgccggtgtcgctccagcaggccggcgttctcccggctcagccgcgccacttggcgctccagctcctcgatgcgccgtcgccggcgcgccagcagctcctgctgcgcggcgacgatccgggtcagctcctgcaggtactcggccgcctggccggggggctcggcggcgctggccatggccccccgcccggaggccggccgcgcctcaggcgagcgggcggcggggcggcggcggcgcggccatggctgcgcggcggggacggcggctcggcgcggcgcggggctgccgcggccccgcctcggctcccgcctccgccggcgccgcccccggggcccccgcgcctcctgctccccgcgccgccgcgctccgccgcccgctgccccgcggacgcgccggggcggcagggcgcggagctgcggccgcagcgggcaggcgaggagttttgcaaagtgccggccgcggcgcgggaagagggcggggagggcgccgcctgctggg

SEQ ID NO: 222072 - DNA, 341 bp, Homo sapiens
  chr3:13590643-13590984
  hyper
ccgggctctcgacgcgccgacggccgggcggacggacggacggacgccgagcgcagtgccccgcggtgagtgcacgcggcccctcccgcccggactcatccccgtcggtccgcgcctcgcagctcaggactcgggggcgctcggacgcaccgacggctcggcggaccctcggacgcgcctcgcgggctgcccgcgcctccacccgcgccgccggtccgaccgggtctcgctctcccggtcccagcgcggggacggcccgcgagcgccgcgacccagtgtacagatgcgggcacagaggccggcgcggggtgggggccaggggtccgcgggcgggttccccc

SEQ ID NO: 222073 - DNA, 642 bp, Homo sapiens
  chr3:13936738-13937380
  hyper
tacccgacgcaacccgctgtgggccgaaacgggagctaagccagatggaacaaacgacccccaacccgagcccggcggggcgaacaggacatcccgcgttgttccacctgccaaagagggcgagcgcgcgggccgatcggagcagagcgagagggcggggccaagcggagcggatggggccaagtggacgagccgagggagtggggcgcagccgaaagtagccgagtgaagccgaacagagacgaggcgcgggtcgggtggtgccaagcggaaatgagtggggccgagcggggcagggtggagccgagcggagccgggtggagccgagcggagccgagcgagtgagaagccggaggccgagagggccgggccgacttgaagaggtggggattgctgagggctggtctgtcggctctggaaatcctgtcatactgtcacttttggattccgccgtttccgtcccaacggaaaactggggctcctggattcccctgacccgagttgtaaccaccgacgagaatctttttcactggcggcctcggcgtcggcattttataaaatgagagcggggagggcggccgaagacgagtgtgcggagccttaggccccccgctcgggtccgcttttcgtatattcgggtag

SEQ ID NO: 222074 - DNA, 105 bp, Homo sapiens
  chr3:14443833-14443938
  hyper
ccgcaggcaggaggcgcccagggcgggctgccgcacctggcaacgaacgttcgccgcgcggcatgagggtgtgcgcgcgcgctcggcgagcccgggttctttgtg

SEQ ID NO: 222075 - DNA, 600 bp, Homo sapiens
  chr3:14443998-14444598
  hyper
cgcgtgtgtccgcacttggggcggggctggaagccccggccccgccccggccccgcccccggcccggccgagctggtatttttccacccagcaggatgggtgatgctgagagctgcctgctcagacaacagacacgcgaggtcaggaagaagccgcttataaattaccgcttccttcgcgccgccgccaacgccgagccccgaggaccgcaagcccagaggacaagctgcgccaagagggagtgctggagctgttcacccagcgggtcagagagcgagccgggcaggccagcccccggccggcggaaccctggcacagcctgagcagatgctgcgggcggcgccgcagccaccccaggtaccggagggaccgggagctgggcgcgcagccggcgctgcccgccgtctgcagcccctccccatccccgcgtcgccgcagtcccggcctcctcccctccgcgtgcgcccatccggcgcccctttcaccaccgcggaagggaccgagagtcgcctgctcagtcccgctggcggggctgttattgtttccccggcaaaagggctccggctcttggtgcgggcggcaggagagtgtgtgtgtgtg

SEQ ID NO: 222076 - DNA, 105 bp, Homo sapiens
  chr3:14444658-14444763
  hyper
ggatgcctacatgtgcctccgtatccctgtgtctgtgtttctgagggtgactgtttcaccgtgtccccagcagcgtgcacatgtgtgttccggtgcatgtctgtt

SEQ ID NO: 222077 - DNA, 180 bp, Homo sapiens
  chr3:14851975-14852155
  hyper
cggaggaaatgtctaggagggggtggaggcgcggctgcggcgcaggcagaggcgcaggcggaggcacggcggccagagcgcagcgcgcccggagccgggagcggacgcgacgcccggcgctgccccagccgccgcccccgcgctcgcgccccctcctcctcccccgccccgcgcccccgc

SEQ ID NO: 222078 - DNA, 442 bp, Homo sapiens
  chr3:14852211-14852653
  hyper
gcggagtccgaggcgcgccggggccgggcgggcgccagggggtgcgggccccgcggggcggccgcggagggaggcggtgtgcggagtcgcactgggacccgcggacggactgaaacgccgacggcggcccgggccccgcgcgctgaagatgaacagagcaggtaggaggcccggcgacctccggcgccgaggcacgagcgcgagggaccccggccgggcgctccaagttggagctcccggggagcccggggctagctgcccgaaatcctccgaccttccagtgccgctcggcctcggccaaagcatgcgcggctccggggtcctctcgccgaggaggctgagaaccgggggtccccgtccgaagcgccctgcctcagggaccttctcagccttggcgaggccgcgccctggccgtgcgcgccagtatcccactcgcacggcg

SEQ ID NO: 222079 - DNA, 1289 bp, Homo sapiens
  chr3:16554229-16555518
  hyper
ccatcctggcgtcccttgagtctagagaagtgggttaagacaagggaagaaaatcccttacagaagaggagatccccgttttcagtgctggggactctcggcacccgcgtccctgtgcttctggtggttccggcgcttcctcggagcgcgcggcatgtctgctcctacacgtccagcacctctgtccccagagcaaacccacctcccagggcacacgcagaggggcagtcaggcaccgcctccaccctgccccacccaggccgcgcgcaccccggaaacctggactccgcgaccagctccctcctgttcttttccgaggaccccagcggcagtgtgtcctggacccacctgtagcctccaagctcccccacctctgcgtccttcctaggcgcttctgagcctgcagagcctacgacccccaacaggctgctccgaagtgcctctccctacatcgctccaggaatgactcccctacacccgttccccgcaaaaaaaagttggcccaagatccaggcgtcccaaggatcagcccaggtccccatccgacgcgggccagggggtgctgctctggcagctccggagccccggcaaagagcaacctgcagggaggcgccacgcgcggttcccactacccgccagagacccggtccatggggccaaacggaggggcctgtgccggtcgacaccccaagccctgtcgcgccccccccgccgcctaccgtatgggaccggcggaggagaaggcgcggtcgcgggctccctgaggcagcgtgttccgtcccgggaggaaagtttgtgccatacagaggaggcggcgcggggaggacttgggcgccggtgggtggaggcgtgggcggtggcgccgcgtggtcgtgtgtctgtccctccggcgatcggtgcgtctgtccctcgccggagcccgcggccgccgcgctctcgctcgctgcgcccagcgcccggcgcgctccggctccagccccgacgcgcccccgccgccgccgccgcgcgtccgccggctacacttcctcttcctctgaactcatgtgcaaaatatgctacgctgcatcttcagggaaagcctcgcggcccctgacagcagccgctggagcggtgggcccgcccagctctccccgcgccccctcggagttccgcccggtcacctccacgcggccgagctgcaagcgaccctggcagcctcagaacccaggggtcaggggctcatcgatcctccctcccagcccctcctaatcaaggttgtgtgctgtcaggaagagcgcctgggagacaag

SEQ ID NO: 222080 - DNA, 34 bp, Homo sapiens
  chr3:16860036-16860070
  hyper
ggtcatcaaaaacaaggaaaatctgggaaactgt

SEQ ID NO: 222081 - DNA, 808 bp, Homo sapiens
  chr3:16925426-16926234
  hyper
gagatcctgagccccgggacccttgttccgggccccgaggcctacttggtagttgcccctcggggttccgggtgggtgactgacagttgcagcagctctggggaggcgaaggataggcaatgacttggggctcccgtccactcggctttgaggtccccgcggcccgatgacccggcctcggtgacagcagccgcgacggcggcaatctcgacagggagctaggcggctcatggtgggtcagggggcgaccgaggagggaccacgcggcctgtagggggcagcgccgagctcgggaggagacagcagccggcgggtggggtgggtctgggctgccccctccgggagctgccccggggccgcacggcgattgtcatacccggccgcccctgcccgccgtgggcttcctctcggcgccgcgggccttaacggggctctgaggggacgtgacagagctcggcacgcggcagcctctggggagttagggtccggagagacccacgcgtcgccccccgcccgcccggggccgggagatcctcgggagccgcctccgcgtgtccagagagtgtcggggcggccgccacttcccctcgcccttcgccggaggtgggcgccttttcctgcgtggcgggtgctccgaccccagttgctctgagccccggggaagcgcgccccgagcccctgacgtgggcgccccgttacctcggggtgggtgcctggggcccctgaggtgggcgcgggttgccccggggtgggcgcccggcccgcgcgggttatttttggcgcccgcagaggcgcgtgtgttggggcg

SEQ ID NO: 222082 - DNA, 240 bp, Homo sapiens
  chr3:16926711-16926951
  hyper
ctgcagcctcggcgtgtccggggacgaagcccgggctagccctaccaggggaccccgcggcgttgcgctcgccccgacccccagcgcggtcgtctgtaccctcccccgggagagcaagccgggcggcctgccccgccggagcagcatcatcaaggtaggtgggagaagggcgctcatcgcccaccctcagccgtccttggattctattttctccctgggggagtggtggtggaaggagga

SEQ ID NO: 222083 - DNA, 840 bp, Homo sapiens
  chr3:18485472-18486312
  hyper
gcgcccgagtagctcccgggatgcagaagttgccacaaacttcccaggcccctcttcgccgatgcttacaatcagccgcgcaggcagggagcggagggaggcggagatggaccgggaaaggatgctgagcagactcgcgatccggtgggggaacattaccactcccgcagcccactcctccaggcaccttactgcccgcccggctccagaacgcaccgagaggctccccttttccccatttgcttccttcggtcttttccactcccctttccttttctaaaaggggccataccggtgacctgaaggagtttgttcagccagggtctattgggcaggtgtggtggtgtgtccacacccagacagaaaacgaatggcatcttcaaatcccccatcccgaccgctctcccctactctaccagcccacccctccaaggtccgtctgcgtgagaaaaggggctcggaagaccgttgaagccctgcgcccacgagaggggagcccagccgccccaataggggacgaggagtgggtgctacggagaagtttggattgattccggaaaaagagggacagagataaaacagcaagagtagcaaggggaaaagggaggcaaaagagcagaactcactcaggcatggacgttgggggcggcggtggctgtcgagtgcgggcctgaaaccaagaacggctccccgggcgggcgcgccggcgtcggacttccgaggcggcggcttctgcctctcctgccgccgccgccgccgccggagctgcggctgccgcggaagttaattgcaacttgacttcaagttgtcctctttccccatacgaagtgggcgtttaaa

SEQ ID NO: 222084 - DNA, 284 bp, Homo sapiens
  chr3:23957824-23958108
  hyper
tgccagcattttctcggcatttcttctctaaaacattcacacctgccaaacaggtcttggcaaataaacattctgctcttctgaaaaactgtggttctcatgttagcaaatttgggacgaaatccgtatgcagaaaaagcgccgggccgcccgcaatccacccactccatgacccttttttaggacaaaatccctgggcgctggggcctgctggaggagcttcacgcagtctggagctgaagggacacagcgagcgccccgacccgcgacgccccgactccgcg

SEQ ID NO: 222085 - DNA, 152 bp, Homo sapiens
  chr3:23986746-23986898
  hyper
gcgggtcacatggtcgcggctgccctccccgtcagccgccctcgccgccgcggtgcgctggctgcaggaagccgccgcgccgccgcttttgttgtcagggacccagcgaggagcgccgctcgccggccgccgccaccctctctcgctgcagc

SEQ ID NO: 222086 - DNA, 180 bp, Homo sapiens
  chr3:24535501-24535681
  hyper
agaagcaaagcgaaggagcgcgacccaggaggctagcgaaatccccgccaagcccccaggaggcggagagaagcccagtcgccaggcaccggccacggcgcacgccaacatccaggataattctcctttccaagcccgggagttccggggcaggcgaaaaaggggggatgggagacccac

SEQ ID NO: 222087 - DNA, 540 bp, Homo sapiens
  chr3:24535814-24536354
  hyper
cagctgggcttggggtttgaggaacagagccgctgcgattggaacagagcccggccaccctgttccaccactgtccactccgtagctcccagcctgccgccgcgcggtgcccgaacacgagagggcacctcctcccagatccggggcgcagaagccccgcggaggcaggtaatcaggctgatgacacccccaccacccacgctcacccgcctgcccgcccgcgcgcgctcggcttagccgcccgcacccctccgggttcttgcgacgctccgtcaccatcccgcccaccctgtggacagttggaactgtcgccccctcctcctctcaccccgctgcctccgcgcggtcctctagccaaattaccagtgccctggagccggttgggttgagcgcccctgcccggggaaggtagcctgcgggctcttgccccgagcccgcggagcaggaggtctcttttccaagcgcactcacattattcatgcaaagttaatccccgccgcgtcacggccgcccgcccgaggatgtgcgccttccttggcc

SEQ ID NO: 222088 - DNA, 978 bp, Homo sapiens
  chr3:24536374-24537352
  hyper
tcctccgccccctcctcccggcggcggggtcccggggagcgccggcgactgggcgtcgcgcgagtcctgcaaaatgtcaactccttgggcgaagagaggcggccgcagccagggccgcgccgcacctccccggtctctccacttttataggcgtaggaagctactgcggctggggcaccagagtccccgcctctccgggtcccccgcgtgcccggcccgccccggcccgcttcccgggcgctgtcttactccgggcccggggcgcctgctccgcgccgcgtctgcgaaccggtgacctggtttcccctccagccctcacggctgtccgacttgcgcggcggtggcggcggcggccaagagcaggcaaacccggctccgccaggggcgcagcgaggaaatggcctcctggcgcacaccccgccgccgccgccagccatcgccaccgccccgggctgcccagccggtacagacgccccctgccaggctccgggccagcgctccgacgcgctcacagcgcccggcttgccgaccccgaccccgaccccgagtcctacgcactcgaggtccccgggccggccgcctccgcacctgcctccccaggtgtgggcgctccccctcctcctaatcccggccgtgccctcccagggttggtgacggtgctgtgggtttggtggccgcgcgtccacccacccgattgcctgcgcgcataggtgcgggtttgggcgtcattactctagttggagaagaggaaagaatggggaacgagtgacaccgggaccggagggcgagtcttccaggagcacgtctcggccttctttgcccggcccgaccggcccgacccgtgccgcagcgctcctccctccgctcctaaaccacttgtggcgcgtgtcgggaatacagggcgctctggctcttcttggggcctccgctggtccgaccatctggcagctctcttaaccaccacggccaccccacgaa

SEQ ID NO: 222089 - DNA, 813 bp, Homo sapiens
  chr3:24562965-24563778
  hyper
aaggggccgcccagcgctctcagccggctcgtagagccagggccgggctcagggagcttcagagcaagaaacaccgaaggtgtaaagcccgagcgagcagctcgagtctcagtcctgcagcctaaggcagcccctccaagccgtgggcgccggccgtccgtctcctcaccgtggcgccctttactcggccacccggggcacagccaggggcttcaccgagccccgggtccaccgtggtcgcggccgccggtcgccgggagcccggagccgggacgcgagggttgggggttggggatgggtcccagtgtcgcgcgggagttcaaagcccggcactggcacggggctccgccgccgcagccgctggagccttgggctcccgccgcggggagagcgggggtagggcgcctgtcccggagtgacccggcggcggaggaagggcgggccgcaggcggcgggcccgggggaccttgagcgggcgggcgaggagcgggtgagaccgaggtcgacagagtgggggccccacgaggcccgcgcctggtcgggaagagagtaggagattcccccgcgagctcagacccggcactgagggaagagacactccgagtcctgcgtctccaagttttgctccaatgcccttgacattgaatgcatgtgtggcgtctatcctggcgcaggcgatttgatattttcaataggcctaacctcaccagtggcgtgcccggcccggctggctagcggctcctgtccccaagacccccgcagtcaccagacctttgcactgcccagcgctggagggggcgaccagagccttac

SEQ ID NO: 222090 - DNA, 998 bp, Homo sapiens
  chr3:27763017-27764015
  hyper
ccccagtcctccgcaagatcccgccgctgcggctccagggtacggcccgtagagcggagccccctggctgtactgataggtgcccgggccgccgcccccgccgctgctaccgcccgcgccactgcccgcaccggctcctgggccgaactgcgccctcccgggtgggcacacagccgcggggaagccgccggggggcagcatggagccgtaggggtagcgcgccccgttaggagccgggtacacaggtccgtggggcgccccagccgccgcctggtacgggaagagtgagcagggcgcagccagctccgacccctgaggaccgggggactggaggtagtaccgctcggagctcaggctgtccatggagtagcgcgcagtggccgcagccgcggcggcggcggcggcggcggctgcagcggcggagggcagctcctcctccccgcagggggagcccttgcggccgtccgggggccccggcttggccactgccgcagcgctggcaaatgcgtccccggcgtcggtgtcactaagcatggccgcgggggcccctgcgctggcggctgcgggctccccgctcaccgcctcgcaggagagactgccggaaaacttcttggacgctttgtctaagtccaacttctgaggagagggggccgcgctggggaggtggccagcgctcccgccgctgccgcctcgcgcactctccagcgggtagaagtgcgcgccaggcaggttcactgagctcaccaagagctgctcccctaactgcatgctttgcaaagcgcagacggcagctggctgcttcctctcctccggtggccttattataaaggcaggatgggggagccagcgccctcttccgaggggaaggtaacttccccttcctcccgcgccggggctacccacctgccgactcgcgggccgctactgcgcgtactggcgcgccctgaatccagcgtcctttccggaaggaaagcgccgtgagttggaaagcaggaggt

SEQ ID NO: 222091 - DNA, 261 bp, Homo sapiens
  chr3:30648804-30649065
  hyper
gcagcggcccggagcggcagcctgagctgccaaagcagccagcgcacctgggccactccgcccatggcgatgccgcgtgcccacccagctctttctgagccacccgttcaaaaggccagctcctcagtccttagctcctggagacggccacgctttccctcaggccggcttcttggcccggagtttttggaaacaagtttcaagaaaataatcgatttccaaaagaaagttagctggctccactgacgccttggcatggat

SEQ ID NO: 222092 - DNA, 255 bp, Homo sapiens
  chr3:32279485-32279740
  hyper
tccggcccaggcgccgtcacccaggctccaccggtccgcgggacagagccgcggagagcgcctggaagcgtcgcgccctcaaagccaagcgattaagttggttcctcaaattgttcccgacaggaggggcaggaaataacaccgggctctggcggcggccgcagcaggagggggagaagagcgggccgtctcccgggcagtgctggcggcctctcatcgatctcgggtctaaggtccggccgggtcatcattcct

SEQ ID NO: 222093 - DNA, 206 bp, Homo sapiens
  chr3:32433047-32433253
  hyper
acacatccgcagccgcacccacacaaaatcccaggaggctcagtaccagctgtggtccgggccttgcccacctcggagaggccacgacccaaggcatccggtttcctctcgctccagtctaacttccgcgcatctacgagggccgggactgccgctacctttctggaaggcgccggccggccagtcaccggagggatcccgccaga

SEQ ID NO: 222094 - DNA, 782 bp, Homo sapiens
  chr3:32433368-32434150
  hyper
gggaggcggccagcgagctggggccgcgcaatgtcgcacggagccgggctcgtccgcaccacgtgcagcagcggcagcgcgctcggacccggggccggcgcggcccagcccagcgcgagccccttggaggggctgctggacctcagctacccccgcacccacgcggccctgctgaaagtggcgcaaatggtaagtgagcgcggggcgcgaggccgaggttctacagggcgtcccgggaaagcaggggtccgggagcggacgcgccgggcgtctggacccggccggagcccagggagcatcgcgcagcgggcggggcaccgcgtcgctaaagttcgcggcaggcttcctccgggaaagttgctgccgcagcccccgcgctggagctcagtccccagagccgccccggcccttgctcccgcggacccaggtcgccagggtcgcaagtttctccggccacccccctgcgaagcctgacccgcctactgactgaaaccacgggcaaagttccttttcgtctttcttcctcttctctgggccgcgccgcttcgaacccgagccgggggtggaagagtcgcccaggcggcggcgctgagggagcgaaacccgacctcttccccgtccacggcctcctctttcctccgaacccagcgcggcagggcttccctgctctgtgtgcagtttcgctcgaaggaggaggtcagagggtcttgtgttccatagtggggaaaaagaactgggaccgttgagacggccgtcctggtcccctgcgccctcaagttccg

SEQ ID NO: 222095 - DNA, 137 bp, Homo sapiens
  chr3:32612639-32612776
  hyper
caaaccctgcggcctgcgcggaattcctgcattgtcattgccggcccacccactgttcaggctgagagcggtcccccgcccaaaccggcgcttcgccggcgccaagatagaaatgggtcgcccggctggtaaagagg

SEQ ID NO: 222096 - DNA, 429 bp, Homo sapiens
  chr3:33259728-33260157
  hyper
ctttcacgtcttcccggaccaagccaaaatatccgagggagttttctaaccatcggcggtgtcctcaggggcacattaatagacgttgagaaactgagggacggcggaaaatcaccccttagcagaggaggttctagggcaccttagaggtgatttcattcgagctttcttggagaccttaggaaagccagcggcgggactgcgggacctacgcgctcggcgctaagggagggtccaggcaccaggcgggcgtttgggcgcacgggcacgcggagacttggtgggccaggagagggatgctgggtcgcaggaccgcggctcgttcgttcctctcaggcttgcgcttgccgcttgccgggccggtcagagggagcagccccggcgagctacgccctccctgcccggaccccacgctccaccccccgcccc

SEQ ID NO: 222097 - DNA, 540 bp, Homo sapiens
  chr3:33260195-33260735
  hyper
ggcgcggcagaccgagcaggagcagcgccgccgcccagagcccggggaggcgtctgtgccaacgggcaggcgggctgggtccctcggcagtcatggtccgggagtgcgcgggccagcggactcgggtgagggctctggctgcgtttggggttgcccaggccactgcccagcgtgcgccactcggctctgcgctctgcgctcggctcacgaatcgcaggcttcgcgccgggcgcgccgagagggaggagcgcggagagccgggggaggctcgggacgcagagccggagcgcctgggccgccgaactcccgggggtcttctctgtggcgccgaggaggcggctgtaacccggctccgccttcgcgctgggcacctggaaacctcggtgccaaaaggggctgcgctgggccgcgcgctctgcgggtacagcggggcggagggcgagggcgcagggaggcggggagagtagctagccggccgcaaggagcccccgcccgtctgggggacccttggcgagagggtgacgcagtctgacaggcgga

SEQ ID NO: 222098 - DNA, 340 bp, Homo sapiens
  chr3:36985557-36985897
  hyper
gagttgggaggaaacgcaacgcgcctcccaggcaacagactccgagctccggttcggaaacgctccgaggcagaagcaagggcttctaagggctccgcttcccagccttgggtccctactactaccttccccctagactcggtgagcccaggctgatggaccgtgcagtccagtttgagccagcccagcagccctcaatcgggcgggcagggaagaaggcctcctactgccgggaagaggccagcgcgctccaagttccccgcaaattccgcccttcccgcctggcacggttcccttgcaccgctgtgctccgctcccaggtttctgcccgccaagaatg

SEQ ID NO: 222099 - DNA, 180 bp, Homo sapiens
  chr3:36985953-36986133
  hyper
ctgaggatgcggaggtgggcccgagagctgcggcttcgatgccggggtgggagctaggcaggccgcgcgccgccgcagtcctgtcgcagcgcgtgccctggtccctccggaccgaaaaggccgaagccgtcccccgcgaccgaccccgcgcaactggctcgggtctgcacctagatggct

SEQ ID NO: 222100 - DNA, 420 bp, Homo sapiens
  chr3:37034197-37034617
  hyper
cactggtatacaaagtccccctcaccccagccgcgacccttcaaggccaagaggcggcagagcccgaggcctgcacgagcagctctctcttcaggagtgaaggaggccacgggcaagtcgccctgacgcagacgctccaccagggccgcgcgctcgccgtccgccacataccgctcgtagtattcgtgctcagcctcgtagtggcgcctgacgtcgcgttcgcgggtagctacgatgaggcggcgacagaccaggcacagggccccatcgccctccggaggctccaccaccaaataacgctgggtccactcgggccggaaaactagagcctcgtcgacttccatcttgcttcttttgggcgtcatccacattctgcgggaggccacaagagcagggccaacgttagaaaggccgcaaggg

SEQ ID NO: 222101 - DNA, 480 bp, Homo sapiens
  chr3:37034757-37035237
  hyper
caataggaagagcggacagcgatctctaacgcgcaagcgcatatccttctaggtagcgggcagtagccgcttcagggagggacgaagagacccagcaacccacagagttgagaaatttgactggcattcaagctgtccaatcaatagctgccgctgaagggtggggctggatggcgtaagctacagctgaaggaagaacgtgagcacgaggcactgaggtgattggctgaaggcacttccgttgagcatctagacgtttccttggctcttctggcgccaaaatgtcgttcgtggcaggggttattcggcggctggacgagacagtggtgaaccgcatcgcggcgggggaagttatccagcggccagctaatgctatcaaagagatgattgagaactggtacggagggagtcgagccgggctcacttaagggctacgacttaacgggccgcgtcactcaatggcgcggacacgcctctttg

SEQ ID NO: 222102 - DNA, 91 bp, Homo sapiens
  chr3:37038109-37038200
  hyper
tttagatgcaaaatccacaagtattcaagtgattgttaaagagggaggcctgaagttgattcagatccaagacaatggcaccgggatcagg

SEQ ID NO: 222103 - DNA, 99 bp, Homo sapiens
  chr3:37042445-37042544
  hyper
aaagaagatctggatattgtatgtgaaaggttcactactagtaaactgcagtcctttgaggatttagccagtatttctacctatggctttcgaggtgag

SEQ ID NO: 222104 - DNA, 74 bp, Homo sapiens
  chr3:37045891-37045965
  hyper
gctttggccagcataagccatgtggctcatgttactattacaacgaaaacagctgatggaaagtgtgcatacag

SEQ ID NO: 222105 - DNA, 73 bp, Homo sapiens
  chr3:37048481-37048554
  hyper
agcaagttactcagatggaaaactgaaagcccctcctaaaccatgtgctggcaatcaagggacccagatcacg

SEQ ID NO: 222106 - DNA, 92 bp, Homo sapiens
  chr3:37050304-37050396
  hyper
gtggaggaccttttttacaacatagccacgaggagaaaagctttaaaaaatccaagtgaagaatatgggaaaattttggaagttgttggcag

SEQ ID NO: 222107 - DNA, 280 bp, Homo sapiens
  chr3:37053310-37053590
  hyper
gtattcagtacacaatgcaggcattagtttctcagttaaaaaagtaagttcttggtttatgggggatggttttgttttatgaaaagaaaaaaggggatttttaatagtttgctggtggagataaggttatgatgtttcagtctcagccatgagacaataaatccttgtgtcttctgctgtttgtttatcagcaaggagagacagtagctgatgttaggacactacccaatgcctcaaccgtggacaatattcgctccatctttggaaatgctgttagtcg

SEQ ID NO: 222108 - DNA, 113 bp, Homo sapiens
  chr3:37055922-37056035
  hyper
agaactgatagaaattggatgtgaggataaaaccctagccttcaaaatgaatggttacatatccaatgcaaactactcagtgaagaagtgcatcttcttactcttcatcaacc

SEQ ID NO: 222109 - DNA, 94 bp, Homo sapiens
  chr3:37058996-37059090
  hyper
atcgtctggtagaatcaacttccttgagaaaagccatagaaacagtgtatgcagcctatttgcccaaaaacacacacccattcctgtacctcag

SEQ ID NO: 222110 - DNA, 154 bp, Homo sapiens
  chr3:37061800-37061954
  hyper
tttagaaatcagtccccagaatgtggatgttaatgtgcaccccacaaagcatgaagttcacttcctgcacgaggagagcatcctggagcgggtgcagcagcacatcgagagcaagctcctgggctccaattcctccaggatgtacttcacccag

SEQ ID NO: 222111 - DNA, 371 bp, Homo sapiens
  chr3:37067127-37067498
  hyper
actttgctaccaggacttgctggcccctctggggagatggttaaatccacaacaagtctgacctcgtcttctacttctggaagtagtgataaggtctatgcccaccagatggttcgtacagattcccgggaacagaagcttgatgcatttctgcagcctctgagcaaacccctgtccagtcagccccaggccattgtcacagaggataagacagatatttctagtggcagggctaggcagcaagatgaggagatgcttgaactcccagcccctgctgaagtggctgccaaaaatcagagcttggagggggatacaacaaaggggacttcagaaatgtcagagaagagaggacctacttccagcaaccccag

SEQ ID NO: 222112 - DNA, 149 bp, Homo sapiens
  chr3:37070274-37070423
  hyper
aaagagacatcgggaagattctgatgtggaaatggtggaagatgattcccgaaaggaaatgactgcagcttgtaccccccggagaaggatcattaacctcactagtgttttgagtctccaggaagaaattaatgagcagggacatgagg

SEQ ID NO: 222113 - DNA, 109 bp, Homo sapiens
  chr3:37081676-37081785
  hyper
ttctccgggagatgttgcataaccactccttcgtgggctgtgtgaatcctcagtgggccttggcacagcatcaaaccaagttataccttctcaacaccaccaagcttag

SEQ ID NO: 222114 - DNA, 64 bp, Homo sapiens
  chr3:37083758-37083822
  hyper
tgaagaactgttctaccagatactcatttatgattttgccaattttggtgttctcaggttatcg

SEQ ID NO: 222115 - DNA, 165 bp, Homo sapiens
  chr3:37089009-37089174
  hyper
gagccagcaccgctctttgaccttgccatgcttgccttagatagtccagagagtggctggacagaggaagatggtcccaaagaaggacttgctgaatacattgttgagtttctgaagaagaaggctgagatgcttgcagactatttctctttggaaattgatgag

SEQ ID NO: 222116 - DNA, 93 bp, Homo sapiens
  chr3:37090007-37090100
  hyper
gaagggaacctgattggattaccccttctgattgacaactatgtgccccctttggagggactgcctatcttcattcttcgactagccactgag

SEQ ID NO: 222117 - DNA, 114 bp, Homo sapiens
  chr3:37090394-37090508
  hyper
gtgaattgggacgaagaaaaggaatgttttgaaagcctcagtaaagaatgcgctatgttctattccatccggaagcagtacatatctgaggagtcgaccctctcaggccagcag

SEQ ID NO: 222118 - DNA, 361 bp, Homo sapiens
  chr3:37091976-37092337
  hyper
agtgaagtgcctggctccattccaaactcctggaagtggactgtggaacacattgtctataaagccttgcgctcacacattctgcctcctaaacatttcacagaagatggaaatatcctgcagcttgctaacctgcctgatctatacaaagtctttgagaggtgttaaatatggttatttatgcactgtgggatgtgttcttctttctctgtattccgatacaaagtgttgtatcaaagtgtgatatacaaagtgtaccaacataagtgttggtagcacttaagacttatacttgccttctgatagtattcctttatacacagtggattgattataaataaatagatgtgtcttaacataa

SEQ ID NO: 222119 - DNA, 300 bp, Homo sapiens
  chr3:37494024-37494324
  hyper
gagcatttccacgacaacacgcgctggtgagtgcccgcccgactccgcgaccctggcccgcgcggccaccgccccggcccccaggccagcgccgccgccgcctttccggtctcttccacgccgccgtcccgagggggcgatttaaatgtctccgttgcgcgcggctcggccgccgggggacggcgggagaagggaggacgccgtccggggcccgctaaggtcggggtcggcgcctggaggcgggcgggggcgtccgggtgcctccctggggtcccagcccagagcgtggggggagagccg

SEQ ID NO: 222120 - DNA, 622 bp, Homo sapiens
  chr3:38080609-38081231
  hyper
atgtttacaatgaccacagcgatgacgggatccgagagaaaggcaaggcggaaggggtgaggccggaagccgaagtgccgcagggagttagcggcgtctcggttgccatggagaccaggagctccaaaacgcggaggtctttagcgtcccggaccaacgagtgccaggggacaatgtgggcgccaacttcgccaccagccgggtccagcagccccagccagcccacctggaagtcctccttgtattcctccctcgcctactctgaggccttccactacagcttcgcagcccggccccgccgcctcacgcagcttgcgctggcgcagcgtcccgagcctcagctgcttcgtctgcgcccctcctcgctgcgcacccaagatatctcgcacttgctcaccggcgtcttccgcaacttgtactcagccgaggtcatcggcgacgaagtgagcgcaagcttgatcaaggcccgcggcagcgagaatgagcgccacgaggagttcgtggaccagctgcagcaggtaacgtggcggtggcgtcgcgtctgcggacggtgccggggtctcagcgctcggcacgcgtcagcacctgccaggtgccaggcgctgttccaggatctggggct

SEQ ID NO: 222121 - DNA, 54 bp, Homo sapiens
  chr3:38182282-38182336
  hyper
acctgcagagcaaggaatgtgacttccagaccaaatttgcactcagcctctctc

SEQ ID NO: 222122 - DNA, 158 bp, Homo sapiens
  chr3:38182626-38182784
  hyper
ccatcagaagcgactgatccccatcaagtacaaggcaatgaagaaagagttccccagcatcctgaggttcatcactgtctgcgactacaccaacccctgcaccaaatcttggttctggactcgccttgccaaggccttgtccctgccctgaagactgt

SEQ ID NO: 222123 - DNA, 168 bp, Homo sapiens
  chr3:38495097-38495265
  hyper
ggggcactaattgcgagtgcagtggccacaggctcccgggcaaagtggtcaggagcccattcccgccacctccgtccgcgcgccccgccctgtcctccagcaagttggtgcacgcgcgtcctcccacagggcgcgggatgggggcggggcctccgtgttgttgtttct

SEQ ID NO: 222124 - DNA, 101 bp, Homo sapiens; identical to SEQ ID NO: 198886
  chr3:38495679-38495780
  hyper

SEQ ID NO: 222125 - DNA, 105 bp, Homo sapiens
  chr3:38496021-38496126
  hyper
gggcgcccggctcgccgaacttgggggcacgatcttgtctgtgcagtcatctgcgggattctggttcctagaggcgcccctgcgatgggggccgggacgcggagc

SEQ ID NO: 222126 - DNA, 240 bp, Homo sapiens
  chr3:38496442-38496682
  hyper
cgggatgcggagtgtggtcgcttcgcgggaccgctttgtttgggcacttgggaggggagggggtgggtaagatggaaaacccaacaggtccctcttccttcgggcctccaggaggcacgtggcggggtgggtgaccagcgctcagctcgcccgcggctgcgggcgtgtggctggaggtgttcggccagcgcatgtgtgtttgggggtatgtgggcgcgggcgtaaacaagcggagttccg

SEQ ID NO: 222127 - DNA, 360 bp, Homo sapiens
  chr3:38496763-38497123
  hyper
cgcgccgggacgtcccctggccagtcctgggaaacgtggggagctgggcattgaagctctggcgagaaggtcggggcggctggtacccggccgccgggtcctgcgcgtctttgttcccagcccccattacacatgcagcgcgggtcccccgccgccctcggtggcagccgcctggagtctgggaaaccctcgaggggcggggccgggcgtgcaggggcggggccggagtccccacgctgctgcgggggtggggatttgggatctgcgtcccattcccaccctggttctaccttctcctgtgcgtcgtcgtgaggcttagtttacaccgaaagcgagtgagttctgtagggtagtagcgcg

SEQ ID NO: 222128 - DNA, 277 bp, Homo sapiens
  chr3:39148232-39148509
  hyper
tctccatccggctgcgggaccctctcctcaccctcacagcacactccgttctaggaaccccactccgtctccactctccggaagcctgctcgcccagacctccatgtagcggcatctaaaggctgggaccctccccagctgcaaacgctctcctcgaggattctgcagcactctcccggccctcccgctccccactatcccgtggctggtttgcaccggtcctctaccctcggaagcccttacgaccctacgactggcaggacgcgcgccgacgggc

SEQ ID NO: 222129 - DNA, 182 bp, Homo sapiens
  chr3:41240161-41240343
  hyper
gcgggcttggcgcccgttctacggagagttcacagccttcgtgagtggggacagaaggcggctcggcccggtgattcaggtcgaaattcaagctgaacagcctgctgagaggtgggatccaccatccggacagtggggggctttgggggtgctgtgagactgggctgcgacccaggtccagc

SEQ ID NO: 222130 - DNA, 41 bp, Homo sapiens
  chr3:41266110-41266151
  hyper
ttctggtgccactaccacagctccttctctgagtggtaaag

SEQ ID NO: 222131 - DNA, 384 bp, Homo sapiens
  chr3:42696177-42696561
  hyper
cggcaccatggtacgcagggccctgcctgtccccccgcttatccgcccacctgccagctctgacctcccaggcacacggcccgcgggcccgggtggaggggctggagggatcttcccccctcccccggtctcccggctccatctgctgggtcccgcgggccgggaatgcggcgctgtggcgctgctctcggtggggagggggttaaattcctgtggtgggggcgccggcgcgcgaggctgaggtcttgctaggcaccggcgaaggggggcgctcccctgcgcccggacggcgccgccctcgggctgggtaatggggggaagagggagtcggattcccgcctgggccttgggccacgtgggcgctggagccgccctgcctgggga

SEQ ID NO: 222132 - DNA, 600 bp, Homo sapiens
  chr3:42814311-42814911
  hyper
tgcgagagggcccagtggcagaggcccagcaaacagcgcttgtcaggcggacctgagttcgagttctgactgtgccatctacgctatgactttggggcaggcgacccaccctctgcgcctcattaacccatgtactgcatggaaaataagcgtctgcctgggttagaagagggctgtgtgtgaagattcaaaggacgaaggggaagagtcctcgctgggcgcccagcacgcggtgagcgcccggccagtggcagcgcgctcgggctggggttgcgctcgggctcggttccgcgcccccggcagctgcgggctttcccagctccggcccgggcccttccgctctccccggcacttacagcggtctctctccacttctcccttctaggaccgcggcggctaggtcacctcctccggacgccgacacgcgctgccctggcaaccgtcaccagggaaacaagcgacgtcacttgcgcgttttcaacgctactctacgggggccgagggggcgccaagagttctgaaagtgacagaggcgctgatggcgcgctgggctggatccaagcgagcacgatctcgagtgcgctggagattttaaatctt

SEQ ID NO: 222133 - DNA, 240 bp, Homo sapiens
  chr3:43147025-43147265
  hyper
gcaagccccagggcgttgcccaggtccccggcccccggcccccgacccccaatccccggcccccgaccctgagggtccacccccgccccgcccacctcccgcgcctccctcagctcgcttcacacgtcacccctcagttctgcaaactctcctggatcccgaaggcgtcctagaacctccccctcaccccggggcccagcaccgcgtcgtcccctccagggggccgagggttcgacacct

SEQ ID NO: 222134 - DNA, 300 bp, Homo sapiens
  chr3:43147369-43147669
  hyper
cgtccaggaggccccacggcggcgccgctttcccaccccgccgccgcccccagcgccagcttctggcccaggaggcccagaaggcccaggcagccagcacaggtttggccgcgccgccgggttcgcagcgaccgccacctccaggctcgcaggtgtccgccgtgcgcctgcccggcgggcgagcccggcgcggagcctgtgcgcctgcgcagagccgcgagttcggttgccctggccccggccacaaccttggctcgcggaatcctgggaggtgtagttttgcgtacgaggacagcccgc

SEQ ID NO: 222135 - DNA, 214 bp, Homo sapiens; identical to SEQ ID NO: 198903
  chr3:43663334-43663548
  hyper

SEQ ID NO: 222136 - DNA, 2268 bp, Homo sapiens
  chr3:44036214-44038482
  hyper
agagttcaagagagagataccggtcctggcctctcggtgttcaggtgtgtgtataggtgggcgttggtgtgagaacgagcgagagaaagcgggagcaagagcgagagctatgcctcccttagtgtcagggagggtggccggctgatgaaggtgctgtgcagaaagccggggaagggcttaaagagggtgctggcgcctcgggaacgccctcccgctgcaccctacaggaggtcgtgggcggtggcttaacagccccagtgcagagcttgaaccccaccgtccagaaggaaaggtgagtgggggacccgggcgggaggtgaggcctgccggcagcggccctcaggcgtgctgggcagcacggctagcagaggcggcgcctggtcttggatgctgcagcggagacgccaaggagactgaatgcagggagcgaggcgtagcggccgcggagggtggggccgcccggaaatccaggcggcgccagccttgtagcatctgcaggccgggggcgcgcacacgaggggcacgtgggtgtggaggaaccggcgcggcggggcctccttcctgcagcgccgcggcggtcgagtgcccgtgctggaggaacggcgagtggggtgcctgccccgcgcaggcggtacccgccgccccagctccgcacacagcaggcacggccagggaccgggaccgtggcccagcgcctggaggcgctctccacgcgcatctttcccgatgccggggcgggaagccgagtggctttgtccggagatgccaggggatgtgggcaggggacgaagaggtttcccaactggccaaaccctggcttgaggaaagactgaggtggtcattgacccgtgggagcgccctggggcttcgagggaacggcagccgagcccgggagactggtgttgggtacccgcgggggccggcgggttccacgtgggtggaccccgagctgagggcagggtagggtcgcggatcgctgacctatgagctcccctactcccgcacaaggacacctgcacatggacccgggcttccacccgcttctggctgggttggcgccgggagcgcgcaggggagggacggcggcggagtgcggggtttggcgggtgaggtgggtgaggtgtggccgcgggggagggggcgaaggcactagaaggctgcggtcgcgctgtcgctgctgttcccaccgtcggcgcggggcgcggagggggcgaagaggtgcctgccagtcgcactgcggtctaggggtgaaaggaaaagggtccatgtaaaggagaaagggcaggcagagactcttgctggtgccagcaggcacggaaggatgtggccgcggggacttggagtttagagggcaacgctgggtgtcataatgccggagatgaccccgggtgcagaggcgattccagttgggtagagctacagagaacgtggcccgagaaggggagcttccttaaattagacatatcctgtgttgtcctaaacctagcatttaccctctcccaccccgctcccacaacctccagggtcctagcggagtcatttaagcgctcagtactaccagcttcattttaggtaaaaatcaagactaattctgcactttattaacctcctcgtacccaagtcaccacggggcagcttttcacagccctaaggcgtggtcacttcaagcccacagcgagttgctcgtgtcctcggcttctgctccgcaaatctcggacgatgccaccggaggacgctgaaggcaaaggctggtggggccaggcgccggcgagactgccgcgctagcacagcttccgcgggagccgagtgctgacgggcctcgcgaccccctcccgagggcaaacggctcggccctccagggacacttggtcagtgtcactctctccctaccgggtgtcgcgcattttctcaacagaacgtgaccccgtagacggatgaactcggaatcggcaaaacccgcctgcccttgtctagtctctctgccccaccacaccactgcccttcactgcggactgcgccgtgtgcgctccgggaccgcccctgcacctttgcccacagcttcccattaccaaggcagccggaggaagacctttccgagttacctgtctcacgtcagcagccacaccgaggcggtccccctcgcaccactccccaagtgcagagcccctgaaagtccgaggctcctgtgccacgcaccctcccccctgcggggcgaccccgcgtatgcgtgtgtgtgtcacgcgtttaatcgcacagagtaattcccag

SEQ ID NO: 222137 - DNA, 50 bp, Homo sapiens; identical to SEQ ID NO: 198908
  chr3:44379864-44379914
  hyper

SEQ ID NO: 222138 - DNA, 141 bp, Homo sapiens
  chr3:44518642-44518783
  hyper
taaaaagcaagagcacgctctcatttcgtaatatatatttatggatgtcagtgtgcagaattatgcacagatattttaaatgtcaggaggcctggagacagatttcaggattgcggctacttttacttttcttctactttc

SEQ ID NO: 222139 - DNA, 805 bp, Homo sapiens
  chr3:44802848-44803653
  hyper
ggtccgagttccaccggaattgggttcgagcgcgggtgaaaagagggacccgacagcacccaccctccaagtagaggcaaaagttgaaagtggcgggctggctgcgcttccgaagaaacacgactggcgaaggctcaccttagtctctacggtgggtccctccctgtagccgacccgttccttgaagcgggccagaaacgccggctcggctggccgcacgtacgatacctggttccgcttgctcatggtagctctgggtaaagacagaagacaggttccgcgacggattcgcgacgatacagaggcgcttagctgtgacgtcactgggccacgcccccgatgcgtaggccgggcaacatggcggcctccatgcgggcgtcaacgtccgatccaagcgccaaattcaaatttgcggccatcttgagcgggcggaattcagtcgcgcgcggtgcagtcgggaggtggaggcaccggctgcattgttttcgggatcgaggggtgagggcgctatggcacccggctgcaaaagtaagtctgggcccccggcttcgttaccctatttttgcccccaaatacagctgtgaaaggatggcagcctcggaccgcccgcaaggttcttgctaggcatgaactgcaggagctgagtgaccggcggggacgtttgggaatcccgctctgtcgctcaaagacaatacgctagccgaaaagctcatcccttccttcagtgtcctgtgcgcatgccaggagtctggcgcagttctaggcgctcgggatgagcagtggacctgacgttcttccctttctt

SEQ ID NO: 222140 - DNA, 406 bp, Homo sapiens
  chr3:45187749-45188155
  hyper
gatagagaccccgcagttcaggccggccatgactccgggacgcctcggcctcggtggggaaaacgacggtggggagcggcggccccaggcgcccaagcccggcgcagctgcgctccgccctggctcactcacctgcgcgcgggcggaccggcccgagccccgccctgcgcagcaggatcgcgagctgacccggtgcgtccctcctctctctcctcctcctcttcctgcctcagcgaccgcctctccctcccagggtgcagggctcccggcaccgggttgctgggtccctactactccccattgcggcgttggagcggacttgtccccacctttccgggcttagtcttccttcccaagtctgagaatgatgaggtctttttctccagagtcgcgaaggtcgcccata

SEQ ID NO: 222141 - DNA, 712 bp, Homo sapiens
  chr3:45837557-45838269
  hyper
cccccgggatggggcgaggggttcccgagggcttgggagggcggcttgggagagagctccggctccggaacgaggtgtcctgggaacactcccgggtctgtaacttcggacaaatcacgctcgctttcccggcctcagtgtgccgttctgtaacttgggtctaaccccggctcgcacacacggcggggacgcgcacagagttgggctggggccggggcgcggtgggcactcacctccgccgtacatctggcacaggtacgggaatcgccacacgttgcccaggcccacggcgtacgagatgcaggcgaacacgaactgtagcgagttggcccacagcggccgcgctttctccatggccccggcctcggcgcgctcggctccggctcgggggtccggcacggcagtctcagtgcgcggtcgccaggcgcgccgtcccaccccggctcggcttgggggtggccccgcgcctccgccgccgacgcagctagctggtttttaaattgctaatctcattaacggcgcgcccgtccgagaggcgaggctggtaaatggatgacggcgagccccaccccgcccgatcgtcgcggccgggaaggcacccgagattgcagaggacagggcggagtcccctggggtcctccggctcggcggggcctttcttcaggctgcggaactcctcgaagtgggcgccttccctcggccactcacctgt

SEQ ID NO: 222142 - DNA, 78 bp, Homo sapiens
  chr3:47050739-47050817
  hyper
ggcggtcctcgcggcgcatctcccaggtgtcctcgggagagacggaatacaaccctactgaggcgcgctgaacctggc

SEQ ID NO: 222143 - DNA, 104 bp, Homo sapiens
  chr3:47051127-47051231
  hyper
gccttaattcctaacggcggccccggttctcccttctcggcaataaaccaggcctagttttgtagctgctccgtctccgagtgtgcgttcgcgcgcagcgtctc

SEQ ID NO: 222144 - DNA, 220 bp, Homo sapiens
  chr3:47891162-47891382
  hyper
gcagtcaagtccaatggcagcgtcttcgtccgggactcctctcaggtgcacccgctagctgtgctgctgctgaccgacggggacgtgcacatccgtggtgggtgcctgcaggcctcccgcccaccccgctctgcagctgctcctccggggcctggcctcaccacagttccccaccatcttttccattccctcagatgacgggcgccgggccaccatctca

SEQ ID NO: 222145 - DNA, 630 bp, Homo sapiens
  chr3:48693500-48694130
  hyper
agtcaggaatctgagtcagggcgggtaggtgggggcggcggggaggcgctcagacacggggcgggcacctacgagagggacagcgtaaggtggaatcgctgccgcaggccgcgaaacatgacgaacgaactgggcgggaaggagcgcgcagccacctcgcagcgcgggccctcgaaggcgccgcctgccgggcactggcagcgaaagccgccgttgggcgcgtcggtgcaggtgcccccgttgcggcagacgcccggcacgcagcggccggcctcggtgtccagctcgcagtcctctcctgggggccaagccgcggtcagaggcggtcacgcccacgcccgcccctgctccggccccttcaaagaccgcgcgcccagaggccgggtgccaagacccccgaaaggtcgccctcttcggtggacacgccccttccgtctggccccgccccctccccagtctcatcgctgcctcggcggcggccccttccggccacgctctacggcttctggcctaagcgcgtccataccaggccgtggcctcagaagtgactcccagtactcactcgcattgtggtcccgcccccagccttggcccgtgcttcccccagctctggcccggcgccctgctcac

SEQ ID NO: 222146 - DNA, 884 bp, Homo sapiens
  chr3:48698890-48699774
  hyper
ggtccagagctgccgccgtacggataaggccgctctgcgggtcgatgctgaacagctccagcgagcggctgttcatgagtgccgccagcgagtagactaggcgcccggcctcgccggcgtccgggtcctgagcaaccacgcgtagcaccgcggtgcctgctgcctcattctccggcaccagcgtctggtagttgtactgcggaaactgcgggtggcggtttgcggcgcgacgaaagcgtgcccggttcgccgaggttactttcctggcttcaggacgggccgggagtcccgggggacgcggcccggggcgctgcgggaggaagcggcagcggaagagaccccgggagcgcatgcgcttgggcgccggctcgggagctgtccgagactcgcggggtgctgaacctgatgcaggagctgtcctcgccgtgcgtggtgctgaatccagctcggggccagatcccgaggcccctggaagacagttccgccggggggctgtcctttctgctccggatgtcgtggctctctcgccctgacccttgctccctgttgcccataattccccacagcagcgcgcggtgcccactcttttgcgggagcctgtcccagcgttccgctgggaggacaccggcttgggaccgtggtgccgaatcaaaaagtctgaagggaggggcgagctgttccccgagcccgggacccctgaggacagagcccctggtgacagactacctctttgcaaaggtcctgtccgcccgcaagaggagacctctgggcgccagtataacacagaccctggtccctgtcctgtctctcgttcgcggctgcccaatggctggacgccgtgttcaatccccagctcctcattcggctgctcagggggccctcga

SEQ ID NO: 222147 - DNA, 796 bp, Homo sapiens
  chr3:48699788-48700584
  hyper
ttgccttctccctcggagccccacgaagataggctccctgacccccaggccaggccccccatcctcccggaccccggaagactccggacaaagagctaaggctccgccaccgatatgcgcccttggccccgtagtggcagctaagcctgggtcccagccctggtgcccaccgccccccagctcctcctggctgagggggaacaaagagaggagaaggagcaggagtatgggggtcgaccgtcccccgaggccccgccacggcggccgcctcgccatcatcccccgcctccctgcacggcctccaccgccccccgccccggtccgggccttgggctggccccgccgctcgggccccctcccgggcccctgccgccgccccgggcccccgcccctccgcctgtctctccgcacccccgccgccctctgggcaccatctactccgcggccggagcccctccggcgtgcggccctggctttttccgcccccaccacagcatccccgacgctgctgccgcctcccgccgctccaacatggctcccggccgccccgatggttcgctccacctctgccccggcgcccgaaacacggtggtacaacccatcgcgcatggcagctctgaggaccgaagatgttgccgccatctttattgaggacgtgagcgttgctcctggtgctgaacagagcgcgaaggttcgccgtcgttgggtccgccctccccactttcggtcgccgccttcacccacctccctccttctagggcgctgtcccagctccgtctcccagcctttttctgtc

SEQ ID NO: 222148 - DNA, 105 bp, Homo sapiens
  chr3:48700956-48701061
  hyper
caggctgcgagtcccgagtgctctgggatgccacgtggagcccggcgttgccccatggctgcgggccccgcttcttcgggtccccgcccctcgtccgtcacgacc

SEQ ID NO: 222149 - DNA, 437 bp, Homo sapiens
  chr3:49592075-49592512
  hyper
ggccgctgccgcccggcggcgccggccccggcccgggccccggccccggccccggcgcaggaaagccgccttcagcaccggccggtggcggacagctccccgcggcgggagcagcgcggtcgaccgcggtaccaccggtccctggccccggccccggccccggtcccggccctggcccgggcaggtaagcgcgtgtctcggcgcccggggggcggtgagctgcagcctgaggccgggacccgggcccaggatcccgcgatctagtgtggacagcgaggttcgacgtccggccgcactctgaaccctgccggattggcgtgaactgggtggtcgcgggaagcggcccttcctttccagctgccccgccttggcgtggcaggatgacgagcgcagggtcagtcggggcctgcagaccgtgactccgtcacgaaccccaa

SEQ ID NO: 222150 - DNA, 624 bp, Homo sapiens
  chr3:49906809-49907433
  hyper
ctgctaagcgggagggaaggggcccggggacagttgggaggggctggaggcggctctgggaacggggagggacggctcagctctcggcccctatcctcacgggggaccacgaatcttcgagggttaatcttttcacaattccgagccgcagaagcttccccccagaacccccaagccgtccgaggtaatggggaactttagcccgaccccgcactccctcccccaaatctgcaaagcccgcgcgctctgaccccgccaggacctcgagccctcgctgcgcccccgcgcactctgcatcccgcacctcgagccagggaaacaatcccccaaggccccacaacctgcgttcgggaagcgcccccagcccggcccgccccgcacctgcagcgccggttggtcacagggaggaagtgatcgcgggctcagcggggcgccgagggctccggggacggcgggcagaatccgctccgagcacgcggggcagacgcggcgccagatgcagccgcttcggctagcgaacctccagcatcgccagccgcttgccggcaccggattcgcaccccgggccgggggcgggctgggggcggggcctcccaaccggccccgccccgaccctggcggagc

SEQ ID NO: 222151 - DNA, 114 bp, Homo sapiens; identical to SEQ ID NO: 198941
  chr3:50192966-50193080
  hyper

SEQ ID NO: 222152 - DNA, 180 bp, Homo sapiens
  chr3:50374389-50374569
  hyper
agaaaccaagggggccccggcacccagcatctaggcggtggaatcggggtcttacgcacggttccgcgggcaggtccccggccaggacccgcggggagccacgtagccaggagggtggggctgcccaccgacccaggacgcggcaacggaccggggagggcggagctccagcgaccgctt

SEQ ID NO: 222153 - DNA, 327 bp, Homo sapiens
  chr3:50375233-50375560
  hyper
tagaacgctccttgcgcgcggcacccaggcagccctcgagaatgcctgcactgtggcctgcccatcctcgcccttcccatacgccctcggccccgcgctcaccacgttcgtgtcccgctccaccgcgggttcccagcccaggtcccggggcccgcaacagtccaggcagacgagcgcgcggcagcggtagtggcaggtgaacttgcaatctgcagagaggcctggcggtgaggcggaggagctccaggtcggggaaatgtcccggagattgaagggaagccccagggagagggccgctgctcgccaggctccgcaggcccgacctat

SEQ ID NO: 222154 - DNA, 180 bp, Homo sapiens
  chr3:50605148-50605328
  hyper
gcagcctcgggggatccccgaagctacagcgccttgcctccctgcacgctccgcgcccccggcctccgattggctgtcgggcctagagcccgcccagaattggaccgttcgcttgtcgctcgggtctggctccacccccagagggagcctagaacctggtcgcagtttttagagactacc

SEQ ID NO: 222155 - DNA, 330 bp, Homo sapiens
  chr3:51990320-51990650
  hyper
actctctggatagccgcctttccatcttgccgccgctccggcctcgcctgcccgggggcaaggcggccctggccccagcgctggccgtgggccaatttgcagcctgctggctgccttatggctgcgcgtgcctggcgcccgcagcgcgggccgcggaagccgaagcggctgtcacctgggtcgcctactcggccttcgcggctcaccccttcctgtacgggctgctgcagcgccccgtgcgcttggcactgggccgcctctctcgccgtgcactgcctggacctgtgcgggcctgcactccgcaagcctggcacccgcgggcactcttgc

SEQ ID NO: 222156 - DNA, 140 bp, Homo sapiens
  chr3:52001297-52001437
  hyper
ccaaacttcgcggcccgccgtgccccgcccggcccgcgccctacctcgctggggctgtcctgcggcggcggcggcggcggcacggcggctgggccgctcagtcccacattgtccccgggagaggcggccgctcacaactg

SEQ ID NO: 222157 - DNA, 282 bp, Homo sapiens
  chr3:52009896-52010178
  hyper
tgcgtgtgtgcacctgtgtgtcattgtcaacgcatattccaatgacctaacccgggcacagtttaccctgccccccgcaaacccccgcaggcggccagctgcaggtccactacaatttcctagtactgcgggcaccctcggttgccaaggcaacagcctaagccccgcccttcccgctttggagaagcgcgggggcgccccgagtgggcagcaaggaaatgtccctcgcgcccggtgggaatctggactaacgcccagttagagacgcgcgtctgaggttgt

SEQ ID NO: 222158 - DNA, 147 bp, Homo sapiens
  chr3:53190592-53190739
  hyper
cgcggctgggcgggcgtctgcgcccccggctcggaaaggcttccctgaggcggggcggggcggggcggggcgggagggtggggcccgggggactttgtgctggtgcacgggggtcgcgccgactggcgtgtacgtggttgtgcggtg

SEQ ID NO: 222159 - DNA, 140 bp, Homo sapiens
  chr3:53195774-53195914
  hyper
gtgttctccccctgcgcgcctctccgagacccgatccttctgtccctcgccacccgatccgtccgtcccttgccctccgcgtgctccatcgccccacccccacccacacccctacccccgcccgccgccccctcgatccc

SEQ ID NO: 222160 - DNA, 445 bp, Homo sapiens
  chr3:53527819-53528264
  hyper
ttgaacaacacgagcggtttgaaagaccttggctttgacttccctgtacctgcctccaaacacacgtgggggcggggtggggtggggggagatattgccccccatccccgttgccttccgcgacgccaggccaggcgcagggcaggggagaagatggggggcgccctggattcgcggttccagctgcaggcagttacctggggtagtgagtgctctctacagacccgggctaccccaacccccccgattccagaaagggccggagaaaagcagggggcgcctgccccgctccggagcagccagggagcccggccgagccttgacgaggatgagctcggagaccgcagcagctaccgcccgctagcacctgagctcccagggggcggggcctcctccaggtgtgcgcagaggaggccggcgcggagtcggggccggcgcgggagcc

SEQ ID NO: 222161 - DNA, 154 bp, Homo sapiens
  chr3:53528643-53528797
  hyper
ggcgtgcggcgcggcgcggcgggcgcggagcgagcgggcgggcgagcgcctccgtccccggatgtgagctccggctgcccgcggtcccgagccagcggcggcgcgggcggcggcggcgggcaccgggcaccgcggcgggcgggcagacgggcgg

SEQ ID NO: 222162 - DNA, 180 bp, Homo sapiens
  chr3:57113275-57113455
  hyper
cctctccaggctggaaaactcaccgcggcggcggcggctgcggcggcggctcccctgggctgggcggggccgggggcggggaggccgggccggccacgtgggcgggaggcgggccggggacccccgcgggcgccggagccgggcgacgcaggacttggacgtggccacgcccggccaccg

SEQ ID NO: 222163 - DNA, 105 bp, Homo sapiens
  chr3:57261348-57261453
  hyper
gggattaagactggacgcttcgagcggagttgggaatgttatcatctgaggaaactaaaaggcgccagcagtaggactttctccaaggtctctgacaaaatatgt

SEQ ID NO: 222164 - DNA, 360 bp, Homo sapiens
  chr3:61546628-61546988
  hyper
caatgaaagcccgaaaaagaaaaaaaaaaaaaattaaatctcaatgtagccggagtgcaaaggccgctcggctttgtttcccggcgggggaatgcgctgtgttggaggcgcgaacaggagccgcagacggtgagcctcaccgctgcaaatgccagggcagtgaagccgaacagaaaaccccatcgctttaaaaaggcagctgtccgccctccccctttcccctcgccagggcgaggggcccctcaagtccgggatccgcgagctgcgcggaggatctcgccaaacccgagcaccgtgcggcgtcttttaagagctcgaacaacgggaatccagcaaaaaacaagccggccccagaaggca

SEQ ID NO: 222165 - DNA, 600 bp, Homo sapiens
  chr3:61547030-61547630
  hyper
tccccaaactgtcccagtagaggccgcgcggagagagcagagccgagggacccagcgcaaggcgggagccaagcgcggctgctttaagaacgcggagagcgcgcgcccgccgccagctggcccgggctgcgcgcccccgccgccaccgcgcgccccctgttcgctcgctccttcgctcgccggctttaaagtctctgccaggatccatgctcacatgttacttcctgtatggaggcatggccagtttccagccccgcgctcttcgttccttcccagcctgcgccggagccacaactttcaggagcatggactgaaggcgccctcgccccagcgcccctctgagatcctttgtgttttcctccgtttcctccggccgtttctattttggggggctctccgctccccctgcctctcccctccccttcccctctcgcaaacatgcctccttccttcccggggccctggaaggagctgcctgcctgaagcccggagacgccgcgccgcgctcagccccgccgccgcccgccggctctcgggctgtgctgcgctgccgactcaagttggggatcctcggctgctcgccgccgccgcccgcggtcc

SEQ ID NO: 222166 - DNA, 90 bp, Homo sapiens; identical to SEQ ID NO: 198973
  chr3:61656126-61656216
  hyper

SEQ ID NO: 222167 - DNA, 813 bp, Homo sapiens
  chr3:64673125-64673938
  hyper
agaagcctccgctgcggggtgcccctgcccaggagcgaggaccgggaggcggcgtcggggccggcggggtcccgggggccggagcctggttaccttgcctcgggtgcagcctgtccttgcgcacggccgccgcggcgtctgggctccccatctcggccaggtcccgcaccaggagcgttagcagtgtggcccaggatacaaactgcatggtgcttcccacccctccctccgctgcccccacccccctccctcctgccctccttggctgcggcggcgacgcgaggcagcggccgtggagagcgcgcggagcccggcgcccgccgccaacttttgactttaggagtcgctgaggtctcgctgcgagggtcccgtctgcgctcggctgagcaacgccgccgcctgccgagagctgagccgctcgggccgcaggaggagccggaggagcaggaggaggaggaggactggggctcggctgcttggccgcataatgcccagcgagcgggcaggagaaggcgaggaacttgcgctccgaggcgcgccgggcgccctgtgctggccgggatagctgagcggcttcttgaatggggggctgggggggcggaggcgggggggccgcgggtccacagcctctcaaatgcccccggtgcacgcctctaagaggaggagaggggaggagaaagcgagacgaacggggaccgcctccttccagaccatgtcccctcctcggccggcccgtgcgggactcgcagccggaggccctgccggctgcaagaggcggaggccagaggcgtcaccagcgccggggcagctgtt

SEQ ID NO: 222168 - DNA, 180 bp, Homo sapiens
  chr3:66024483-66024663
  hyper
agtgctcgcggcccctttaagcagatacaaaggctcggcttgttttgttacagttcattctattccgcgccgcggagcgcagcggccggcgacaggagacgcgcgcgcatgcgccccgcggccgccagccggccggcccacccctcccctcctccccgaagggagagattccaacgtgct

SEQ ID NO: 222169 - DNA, 360 bp, Homo sapiens
  chr3:66024846-66025206
  hyper
ttggcatttgaaaaccatttcaaacaggtgggggttggggaggctgccacactcaccctggcgctcacactcacgcacacgcgcacgcactcgcgccggccctaagcctcctaaccgccctcggccagtggctggccaggctgtcggtcacccagcccggctggttcgccgccccccttgccgcaggtcccactgaaacccccgagacccgccccggggcgctcgccgcctccctgcctgccctgcgcttgcgggttcgggtcctggcgcggggtctgccagggtctctgcgacccgggggagggggacggtgggatcctccggttccccaactgggatccctgtgcgggtcacacgcgc

SEQ ID NO: 222170 - DNA, 180 bp, Homo sapiens
  chr3:66025366-66025546
  hyper
gacccagtcaatcatctgccccggcctcaagttcctggcagggccgagaagcctgcggacctactccggggccaggagataaggatccccgccgggcgcggacatgccctgcgtcctggcgcccgcgggggcgtgagagaactcggaattcgcagcccgggggtagctgcggcctccgga

SEQ ID NO: 222171 - DNA, 1536 bp, Homo sapiens
  chr3:66550298-66551834
  hyper
tcactcacccccagatggcccgcacgacgcgtgctggctaacccccaaatctctacgacccacgctcgctcgtctccagaccccacgaggcacgctcttcttctccaggctctctcgcacgcctactcccccggacctccacgcagaatctcccttccgccactccaacctgacagtcttccaacacgcacaagcacgcacaactccacacacacaacccagtccgcaccccctccctgagtacgaacccccgccgctccatccccaagtgacagagccccggggcgcagagagggcggaaagggcggcactcacaggctccgcgtccaggagggcaggtccccgggcaacgcagccagcccgcgcccaccgcagtccagcgagtccccagcgcaagtgcaggcggccgcgcagggcgcccgcgggccggccgcggcggtcaccggctccagccgaagcaaaagcagccagagaaggagaaggcaaggcgagcggcgcggggccccgagccctccccggaccggccgcgccatcttgtctggagcgcgctgcgaactccgggcgcggggactgtgaggacccgaacggccgcagacgcgggcgggcccgcggggcgctccgctcggctctagactccgcaccggggcatggcccccgccccaagttctctctgcggccgcggctccggcactcagcgtgcccccggtgcccgggccgctccggagcacccggcgggggccgcaaaccccgcgcccatccgggccggccggcccgcccgcgctagctgcgaactccgccgattcgggcaaggtgtacccagcctgcgctcttcgtccgcccggggcacgccgagtgccgctaccgacaccggccgagggcagtgctgccgctgcgcctggaagacaggcgttcagccccgcagcccgagctcggtgccggcaggcatcttcctctgggctcggagcgcaaagccgtagacctcgggctggacggcgcggccggccccgcgctgggaggccccagtgcgcctcgctgtccccacgccgcggccagagagcgcgcgcgcgcgcgcagcctcgggttccgcacggctcctccgcgcagcaagagtcccgccgacctcgcagccgaacaatcagccgcttgctgttcgcctccccgcggcccagccccggccggtcccccaagccccgcccccggccgctcgcccgcacacaccccctaggctccgcgctccgcggccgcctgctggcccacgttggatgctttgcaacagcgccccgccacgcctccccgcctgctgctcattggctgccggagtccaccgtggccagcctcgagggccattggagcgctcgctgtgatcccgcccctcccgcttcaccggctaccccgcccccacactcttttcccacccaaggtgtgaagggcgggagactgggaggagaaagggagggacggcccccgcctcttaaaggagacacgcaggttgttgttggagaacgggaacgcgggctggggaaaggaggcgtgaag

SEQ ID NO: 222172 - DNA, 994 bp, Homo sapiens
  chr3:67048376-67049370
  hyper
ggaaattcgcacttgaagagctttccctaccccagcccctcagaatgacagttctcctccgccagaagactacctctcccggcaggcactgcgcgctcgacggccacaggctggccagctccctgctctccacctccatccgaatcagccaataggaattcccggcttgggcctccgcccgacccggaccacgcgggagccggggcaatcaaactacatttcccgacacgcatgtgctcgcgtcgtggccaatcagcgccaggaattcggaggctaggggtggagccagatgcacaggacaccccattggccaggggaagcttagaagagccggaacccgggagctagagaagcgaaatgacatttcctttttaaatagctggagtcggggccccatcgagaaatggccgcgtcggcaggtgggtcgtgtggtggccagggcggcgtggagggaggtgagggggaaggtgggccggggccggccacaggcagtgggatgaggacgtagcggtgcggagctagagggaaggatgaagcggtggaggggaatgagaagagggaggatgaatggtgcggagggcggtgggcggtccggcgggaccgggatggggaggctgggtacccgccggcgctgcgccccaggaggcagcgggaggcggcttgagggggcaccggcggccgccgttgttcgagcttccctcgtgaggctctgccctcggctctcggcggagtccgcgcagacgcctctcctgggctgcgagcgcgtttcctccgcgagcacgggtgccgggctcgccgggctccgcaggagcaggctggcctttgaacttgttccgccgatcgcgctccgccctctgtctcccagatccttaactcgcggtcccacgaggtcgtgcgtatatccacagacatttgtatatatcttgtagggggaaaaagcctagcaagcagacacacaaacagaaaaatcccgcgatgccgtaactggctcggc

SEQ ID NO: 222173 - DNA, 156 bp, Homo sapiens
  chr3:69062098-69062254
  hyper
aacacgtgagaccccgaatgacacctcaacggctggcccctacttgtgccaaaaagtctctcggcgggtgccaggcagggctcaggaagtgctcggctgccccttgaacgtcagtcccggcagagcccagctgtccgcttgaacgtcagtcccggc

SEQ ID NO: 222174 - DNA, 619 bp, Homo sapiens
  chr3:69435017-69435636
  hyper
ctggtggcaagcccgcagcctctccgtgtaccatctccgcagcgtggacacggtcaagttccatacgaagcggctgccgctgaacagcaggtcctccacgccacacatgaacaccgaagccatgcctcctccttcgctctgaacccgggcgtcccggctctcgtacgtgcagccccgaccccagcggcctgcccgcctgggctcccgacgccggcttctgctggcagccggggggtcaagcctgccaccaaactcgtctttcaccgtgcgtcctggccaggctccggcggcatgccctgggattgggtgcccgccagccaacggctgcgactggcacacagaagcccagtgtccacccccgcccgctcgcagcgccgagcaagctgtgctaagctccaccaagctggccctcgatgctcccggggcacgggaagccctggccggcgaggactccccctggcgcttccccagggcgcggggcagggacggaagcggagcaactctttgcaggcagagaggggagctgcatttcagcacacttggcttccacgtcttgcgcgcgcgcgaacacacacacacacagacacacaccccccacaccggacgagtggtctcctaa

SEQ ID NO: 222175 - DNA, 941 bp, Homo sapiens
  chr3:69590941-69591882
  hyper
ccccccctcttttcgctgccttttagaagtatctctgggggccagatctgggcttcatcagcttttctcccgacctcccacgaacgcgcggcaaccgaagcacgcggtccccggcggcgcgtttgcaaaccccaccaacgccaacgcctcgaaaccgccaaacttcctgtctccataccaccaaagcgaccaaagcgccgtgccaagtgccccagggactccagcggaggctgcactagacctcgagccccagggcggggttttccgctctcccaaactcctgggacccgcacctccgctgggggtctccaaacgtgcgcgctgcgcccggggcgcaccgggcgcgcccgtggccgcgtcttgcggcctcgccctggcagcacgcttggggagcccggggcggtcgcccacctacctgctccgccacctcctccctgcggcgctccggggctgtagacggctactttattgtctcggctgcgcaccgcgcgggacctggggacccggctctgcgccagtcctgcaagtccactctgcgctgtgccttccccggcggcggctgccttcctcttcttcctcttcctctctgtccaagctccagctcagcacgtgagctacgcagcccgactcccgggctctctgggcagccagcgcctgccgcatcccccggcccgggtctgcaggtcgcccccgccaccgccgctcgccgtgcgtcctcgctttgctccacacttacagctgtgccccgggccgcctttctcgcgtccttccgtcctgcctgcctcctctcgctgtcagccggggctttcggctccctctctccccagcagcccccgcccgccgcctctccgggggctggggcggccgctgccaatgaggctcggctgatgcgctgttccggcccagtcattgtatcgggagggaaggaaggggagggggag

SEQ ID NO: 222176 - DNA, 800 bp, Homo sapiens
  chr3:69788414-69789214
  hyper
caggagttgcactagcggtgtccaccacgttgcctctcccccgcctggccttctgggagctgtagttttcgtgggagcggctccccaggcgagctgggaatgccccgcccgggccgaactacagatcccaggcggcgctcggccgccagcccctcccgcccgggtgcgagtgtaaactccccgcgctggggcgggcggccgcgagccggcgagcgggcagagctcggcactgcgccggggcgcacggctcgggggacccaggcccagctaccttccctccgcccccgggctctgttctcactttccagcagtggaaggacgggaagcgggagccatgcagtccgaatcggggatcgtgccggatttcgaagtcggggaggagtttcatgaagagcccaaaacctattacgaactcaaaagtcaaccgctgaagagcaggtgagtggtgacagctgggcagaggcgcaccgggcggctggggggcactgcgtctgccactctggggcgaggagagcgggtcgcgggagctctgggacaaggacccagtgcccttgccccggagcagagggcgaactgcccctcgcagttgggggccgcgcctgcccggcccaagtgcgcctttaggaagctcggatggagcgcacttcgcgggggcgcggcgggtcgccggggacgaagcgtccaggcgcggggaccctcggccgaggatgccagctgctgagactgattgggggctggggagcgacctggcgcgatgtgggggaggaggagcgccgggccgggacgctgtcccggtggga

SEQ ID NO: 222177 - DNA, 1020 bp, Homo sapiens
  chr3:71113726-71114746
  hyper
atctctctccaggacccacaggcctgcagctcctttttcttgcccctccactccctccccgcctccacttccagagcgcaactcctacccaacttggtaaacagcgaggatgaggatgattttttaaaagactcaacttcagaaccctcgggctctcctgccttccccagcgaggcccccaggaagcgggcgccgcggagccgggggaaggagagcgaaaccggcaaagatcaatcagaaggaccaacctgacactctccatgtagccgccaggcgcgcggagccgggctcggggcgcccgcgcgggccgggcgtggggtccggcggcctcggcgtgcaggcggactgcacgcgcgcaggggcgctccggctcgcgggctgacaagacgcgccgcgccgcgcccacccgccccgccctgctccaccaatcacaacccgcctctaaacaccccgcgccgcgccgcgccgcgccgcgccccacacaatgggctccgcggcccgcgccccgcgcccgcgcgccccggccccctccgcgcggcaggtgaaatcacgctcgggtgccaccctgcttttgtctggagagcaactccacttaatagctgttaacccggtgacccgcctccggctgacgtctgggtcggccgggctcggcgcgcaccgctccctctggccggggctctgcggggccggggctgccggcggggcggcgtgtttgtttcgtctttgagactgacaaagagttgtcctaacctttccgagaaacccgggaggccgaagaggggcacccggcgctcgcggcgccaagccgactgctccgagcaactgttcggcttcgggagggtacgcaggtctcctaggcagcgcagaaaagcgcttttcctcgaaaacctccctgggaggagaactttcgcttcacgtcgggggtttcacagagccttggcctccccacacccctttctttcccagagtcggtctcgccaaagtgtgccagtgcgcaccgaggaaaactaagccgacgcg

SEQ ID NO: 222178 - DNA, 420 bp, Homo sapiens
  chr3:71631173-71631593
  hyper
gttacaactgtttatttagtccttattctcacagggggcgggagctgcgcgggaatggggggctgcaggcagcgatttcgaagcaaacacatgggaggggggcatgcgactttgtttccgggagcggagctccccagagcccgtgtgtgtcactgccagtctcccgggaccaaggcggagctcacaacaggtggggaggggggctcgtcgagggccaaaaagaagaaggaatctaagtttccgagcgcgacgttgtctgaaaaggagggaggcgggaggcgggggcgagggaaggcggaggcagcaaatgaccgcgaccccgcggcaactggcaaactcctcggctcccggcgccgccgccaccgccgtggtccccactcgaagcgcacgccgcctcggctcgctggctccagggagtcg

SEQ ID NO: 222179 - DNA, 184 bp, Homo sapiens
  chr3:71631715-71631899
  hyper
ggacaaatcggagcttgggaaatctccccgtcccccaagcttcagaggggggtaaaatcagaaaatgtgtgtgatggtgggagagagatccgggcgcggcgactcctcgcagcgcatccggctcccgcacccacccgtggatctggccacggctgttgcggactcgtctcgggaaagcggaggc

SEQ ID NO: 222180 - DNA, 219 bp, Homo sapiens
  chr3:71833528-71833747
  hyper
gcgggggaaagccccggaacccagaaggaagctcccacaattgcttttcaaagcgctcacatggccctggaccaagcgatttcaaagggtttctgcggaggacgcatcggggagcaaactctttgactgtaggattaagactctgggcacttggggaattcgtcttggtcctttgcatttcaggaaggggccgtcaaattttaaggttcgaggttggag

SEQ ID NO: 222181 - DNA, 180 bp, Homo sapiens
  chr3:71833819-71833999
  hyper
gaggccgtgggtgatgagggagaagtaagcgggagaaggtggtaataaaggtggtgggcgacatccttgtcactgtttcttccaggacgcgcccagtgtccccagccgtctgctgcttttggatctgggtattttcccaagtgcaccaaggggcgacaggggcaggtgtccccgcccagg

SEQ ID NO: 222182 - DNA, 900 bp, Homo sapiens
  chr3:71834033-71834933
  hyper
ggtccccgtcccaagccccctgggcacatcccaggcgcgcatcaggggcagacaggtgcgcccgggccgcttaccccggtgatcacggcggcgtccccagcgcggggcgtgagcagcagcggcggcagcagcaagaggagcaggagtggggcgcagcacaggctcctcatggcgccctcgggactgggcggccgccggaggcagttgggggcgcggggcccgggtgcgctgggtggagcgcggagcggcgggcggacgggcgcggcggctcccgcgagcctccgggccgttataaaggctagccccgccgtgactcacgccggcgcccgcccggcagcacacgcggggggcacggcgcgggcacacaccccacgccccacgcgcacacgcgcgcccgcctcggcccggccggctcccagacgagcacgtgctatgcgcggccccccgcgcccccgcctcgggcgccacgcaggcagcgctcccggcggggcgccccgctctgcgccgttccctccgccgtcgcccagccaccgcctttcgcacgcgccggaaccgcttttgtggtctccgagacactcatttgctgtcctggtttccaaagctccacgtgctcagcgccgaaaacttgcaaatcatttgctgtacagatgtttaggggtcgcctactacgtgcggggcgctgtggacacatagggggcggggggtgggtgagggggacacagcagcccctgaatccattcgtttgttcagcaggtctatactgggcgcccgctgcgtgccaggtactgccaccggctctctcctcacggtggaataacttaacagagaagacagacatcaatcaaataccctggaaacgtggaaggcaggggaaagaacaaagggagagcaaaatcgccc

SEQ ID NO: 222183 - DNA, 272 bp, Homo sapiens
  chr3:72496511-72496783
  hyper
cccggcggggcgcacgtggccgcgcccgggagctggcaactggcttcgggccccgcacggcgccccgtgaggctgttgccgggaccccggccccgaagccgccccggggaagtagttccacgcagtttgcgcgcgccgcgggagcttgcaacagcctcaccgctcgcagcgcctcgaggcttgcagtgcccaggggccgacaaggtccacctttggaccgcgttcccccgcgcccctctgttcctctgccatgcggagctttgtatttgcct

SEQ ID NO: 222184 - DNA, 391 bp, Homo sapiens
  chr3:73673262-73673653
  hyper
gggcggcgcggccacgcagcggctgagcgagtcgaggcgcgcgctgtattcggtgaatttcttctggtagcgcagcgcggtcatctgcagctcaagctgcgccgcggccagctgggccaccagcgacttctcgcgcttcccagcgcgcagcgcctccttcttgagcgccttgtgcagcgcgcccaggcgggcctggagcgcgccgttgtgcgcccgcagcgctcgcgcgcagcagtggccgcccgcgcgctgctcgccgtgcgtcaagggtagcccgcagccctcctggcagcggcccactggccgcgcgtcgcaggcgtcgcgcatgtgcgcctccacgtcgcgccgcagcagcacctggccgcaacccgcgtggcgacagcgcgcgggc

SEQ ID NO: 222185 - DNA, 761 bp, Homo sapiens
  chr3:74663366-74664127
  hyper
ccccagagcaagtccgatgagagaagcatcttttattctcgacccgtcaggtgcatttccctgcaaacaaacttcggggctgaggagccatgaagccagggcgtaaagtttgccctggcaggtggctcatccctgtggcccggccggcgccaggagtcgggcatcccggacttacctggtctctgcagctcgccagacgcccgccccgacggcccactcgccgccgccgccgccgccgccgccgccgccaccgccgccgccgcagttagtccgggcccggggggccgccgtgcgcgcccgcgtaagccgccgccgccgcaggcgcagcaccctcgtccgcacggttcccggcccagtccacggcgccagcccgcccgccgctgccaccgccgccgccgccaagcgccaggctgctgtggctgctgccggcgcctagcgagcactgcccgtgcctccgccactccggctccggctccggctccgacgcggacgctggagggaggggagaccgggcggactggagggagggaggggcggggagcgcggcggagcagccaactgggtcccgagcctcgcgtctgcggcgcccccagcgcctctgcgccggccggaccccgcgcggccctgcgctcggccgcgtgcacccacgtgtgtccggcctccgcagggccctgggcggcggcgcgggctgggcggcggtcaccgtgtcacctccgggtggcctcgtgccacgcagttagggccctcggaacacggggtta

SEQ ID NO: 222186 - DNA, 271 bp, Homo sapiens
  chr3:97690771-97691042
  hyper
tcacagctgtagagcgtgtctcttaggcccgacatgacgcccggcggcgcagcccacgtggaagccgtgctcgcacaggcagttctgccaccaccgggcggaggccggcaccaccctccttgctaagcctccaaactttccgtgcgctcgtcaccggtgtcgcgaccattagcaggccacgtgtgcgactctctgtaaccaaggcttccgcgaccctacccctagatccgggccccacccaccctgccccagtctccggggaggtgggacg

SEQ ID NO: 222187 - DNA, 1410 bp, Homo sapiens
  chr3:98619762-98621172
  hyper
aaaaagtaaagccgcgccaacttgggggacagacgggcaagaccttgcctttgcaactcaaccccgtgagtacccagccaggtccggccacgcacgaaagcgcaccgcgcctccctgcagcgtctgcagatttgttcaggggccaagagacccgcagccccgacggaggttcccccgccgctcactcccctgggaccactcaccttgctgggctccagcgtcctcgagcagcaggagcaggacaagtaagagcaggaggaacagaggcatggagaaggaggaggagttggagcagggagggagggagcgggagagggggagcgcggcccaggcgggggcggcggccgcggcccggacttggggacactgcgggcagcgcctggctctcaccaccgcccggctcgccatcgcggcggccggcagtctgcctgcatagtgcgggtgcctcggcagccccgcgcgcctctggccgcggcacccgaccaggagacggcggcagcggcgggagaacaagaggcagccctcgcctcaccccgcgccgggacccttccgcccctcaccccgctttcacctactcctccttcgtcccttccctccgctccccgcgccgagaccccaggccggagcgcaggggaggggagggaaggaagcggagtcctcgagccgcggaggacggccgcggcggagctaaggaacgtgcctcccgcgccgcgctcctcaccagggtcgccgctcgccgcgctcacccgcggctccggctagctggcaggcaggcccgcagccagctccctcgcgctccctctcgcgcgcgccggccacgccccctaggcaccgcggccaatcctcggccagctctggtccgtctccttccgcgaaacccaatcagcatgctcgctcctcgctcgacccgctagttctccggcccattcctcgagctccaccgccccttacctccctcttccaatccccttcggcctttggaggcgtcccacccgcctcctccaatccaggtcccgccctccagcttcggatccccgcggcccccgcccggcccgggcgcctgttattgttgggccctcagcccaaactgatcccgcagaggcggcagccagctcgtcagtgacttccgggacgtcccccatcccgcgctccctgctcctcaggcccagcttgctccttgctcctttctcctcgctcctccgacgcacatcagaccactggaagggggtgggaaacctggatcctgggttgttttagctgggagctgagtctaagggactttttttttttttttaatggcagagcgtggcttgttttgttaaaactgccgccagttgttgcaacagctccgagttagaataatagatgcagtgttcagtttttaatatatgtgttccctgttttctctgc

SEQ ID NO: 222188 - DNA, 518 bp, Homo sapiens
  chr3:99594803-99595321
  hyper
ctgtctgcagtttgtgatgctgagacagctttaacagccacccacagacttgctacctggctgtctgacagcagtgccccttggtggagcgaagttgctctcccgggcttacctgaactgcctgcgccggggccgggcgggggccgggccggggccgctgtagtgccgcgctgcgagccgactgtgcgcgctccgagagtcgcccgaacaatgcgagcggggcgctgagcgcgcccggcctatgggcgttacgtcactgttctgccttataaggcgctccgcgtgtgcggcgctgtcggcgggggcgccggtgaccgcgggaccctcggccgcggcggcggcgcagccacacaccccagctcccgcggatgttccggccgtgtgaacggaccgtggttcccggctcccagcggagggaatgagtggtgggccggtgggccggggcgccggcgccctcctgtcgggctaacaaagtcattgggaggcagggtcgatccgcttgtaacttttttccctct

SEQ ID NO: 222189 - DNA, 454 bp, Homo sapiens
  chr3:101231926-101232380
  hyper
tttctcaccggatgaagatggccgtcgcccgagctttctcttgtccatcttctcccgctgctgaaatttcagttgcaggcgctgtcacctcaggacccctccggcttggagagggagggggaggggaaaggaaaaaaaaaaaaaaaaaaaaaaaaaaaaaaaagcccgcaaagtgcgaagcgcgcttgcgcaagagccgtcgcctgcccttcgaccggaaatcagccgcccctcccaccttcgaccggaaatcacttcctgggacttttcactgtgggctgcctcttccagcgtttttttggtggcgtttatttcatgatctgagcccctctggggaggtgaaccacctgggtgctcgattttagctttgttgactttgaagattagattgacaaaaattaaaagggaaaaacaggaactcctccggttcactggatctcgcgaggtggccaaa

SEQ ID NO: 222190 - DNA, 464 bp, Homo sapiens
  chr3:101497830-101498294
  hyper
cgtccgaagttcacgaggagttgggtcgtgagaggggccagacctcgatccgcggggcgacagctgcagtgtcgcgtcgcgagcaggagcttggcggcgtagagcgccagggtgccaacttcgcttccaggcctgtgggttccgcccggcgcgtgctgctgtcagtcaacgccctcggcccgcccccgccgaagctccaccaatcgtagccgggggtcggaggtgaggagacgtcgccgggtgaggaagcggggggctagcggcctggcgctgcggcgaccgaccggggcgtcaggatccctggcccccggagagcgaagggcgggcgggtcccggaggtgagtgctggatgtggtctgtgtgcggacgtcgggaggggccgctgcgggcggagcgacccattgcccggctctgccagcgcgctcctagactgcgaagcccctccctccgcgcgcatctgctcc

SEQ ID NO: 222191 - DNA, 103 bp, Homo sapiens; identical to SEQ ID NO: 199031
  chr3:101498504-101498607
  hyper

SEQ ID NO: 222192 - DNA, 397 bp, Homo sapiens
  chr3:105088164-105088561
  hyper
acggtggttcttttggcgccacaggctcgtgtgtccagggggcaccgagctgcgcgctttcggcgagcggctagccccggctcaccgcaaccagccaccgtgaatctgaggatccgatatcggccctggaccctcagatccgtggtttcggtgaattaccgagctggcattgccgaaattctcattgcagtatcagtgtgttttgaaaggaaaggttacagcactaaaggcgccgtgtctacactgaggaagcaagtcttggacagtaagtgcgccttcttcggagccctctgcatagcagagcccggtgggggcgcggtgccaaaggccggcttcatttgagcggggtaactgccttccctgccggccactcttcatttccggagcagttttaata

SEQ ID NO: 222193 - DNA, 325 bp, Homo sapiens
  chr3:107244654-107244979
  hyper
gggtgtttgggagacggcagtggccgcccaggtctgaaaggctgagggcttcgatacctggacccgctgccgccgcggtggcacctcccgccgtctcctgggcaaggcgaggctcgggctgcctatcgatccctatgatttggttactggtgtgtttgtcctgggggcggtgatcacttgtgcaagttgatgaatgatcgcggtgtggtttttgcgtttgcagaatggatcaactttctgctttgtacatgtggggagtaggaagcgagggtacgggagataccctagaatgccagttgggttgccccccagcctctgccctttc

SEQ ID NO: 222194 - DNA, 123 bp, Homo sapiens; identical to SEQ ID NO: 199038
  chr3:111393432-111393555
  hyper

SEQ ID NO: 222195 - DNA, 954 bp, Homo sapiens
  chr3:112930688-112931642
  hyper
tcggtcctcggctcctttgttgctccagccgcggccgctcgcccgtgttgtgtgtccccggtgtcaccgagcgtgttgtgtgtccgtgcggcgcggcgctgtgtggctccctcgcgcccaccacgctggcccccgggccccggctcgcccttcccaggcgccggctgcagcagaggtgagtcacgtcgctgaagtttgttttcttttcataaaaagttgtgtttactgttggttcggggagaggagggggcgggaggcggccgcaggccgaggcagcgccagcgagtggctgccgggggacgtgccggcggcgggagccgggtcccagcgctcggccgggcgcccggggctgggagctgcggccgaggctgggcgcgccgggcgccgggcgaagaagttggggcgaggcgggcagcgggggtcccgggggctgcagccgctacggggcccaggggcgccgcatctcgttccctgccgcagcggtctggccgggcgatggtggtttcgcctcagcggttcccagaagcttctcgggtggaagaaggatccagccagcctcccaaacttccaccgaaggttgacaccagcgccccggccccatgctccaggccgtggggggaacccgaggcgtggcggcaaatgcgtagagtcactcaacacgcactcggcctctttggagggtgagggtttctcatagttggcgtcttctaaaggaaaaacactaaaatgaggaactcagcggaccgggagcgacgcagcttgagggaagcatccctagctgttggcgcagaggggcgaggctgaagccgagtggcccgaggtgtctgaggggctggggcaaaggtgaaagaggtgtgtgtgtgtgtgagagagagagttcgtgtgtgcgtgtacgtgtgtgcgcgcgcgtgtgtgcgtgttcgcgccagcagcgtcctcctggggtttttgttg

SEQ ID NO: 222196 - DNA, 180 bp, Homo sapiens
  chr3:113251565-113251745
  hyper
tctcggcgatgagaaacgggggacttagaagccggaggaaaatcagcagccccacatctccacttctccagtccgccctactctccacccgtgacctccagtggagaccccaggcggcagcatcagtatttgatcggcccttcgtcagcacgctgccagccctggccggctgggttcgcc

SEQ ID NO: 222197 - DNA, 577 bp, Homo sapiens
  chr3:113251787-113252364
  hyper
accgggctttggaaggaccctctctgcgctcgccccctccccagggtggctccgctttcgagcccgggcgcggtgcccaccatgcgcggctgcctgcggctcgcgctgctctgcgcgctgccctggctcctgctggcggcgtcgcccgggcacccggcgaaatcccccaggcagcccccggcaccgcgccgcgaccccttcgacgctgccaggggcgccgatttcgatcatgtctacagcggggtggtgaacctcagcaccgagaacatctactctttcaactacaccagccagcccgaccaggtaagacactcgctcccctcgctcgactcctagaacttgccagatctcagagccccgtcgctgctttggagtcccctgggaattgaccttgggagacttcggggaccaggggactttctttccctttctcctccgaagcaatcgctgccctgccctagctgcctcaacacgcctcggggacaactctgcttcgcctcgcgcctctcctggcctggtcaagggcattgctgggctttgcagaggcaccagttccccgcaccgtctgcgggtcctg

SEQ ID NO: 222198 - DNA, 702 bp, Homo sapiens
  chr3:115377288-115377990
  hyper
tttaggcgttccctcggcggctctgcagtgtgatctcatctctttgtttctccccggctgccgtcagtcaccggctctctgcgcccccacccgcgcgggctcgcggccgtgctgcgggcgtggcctcagccgctgagaccctggggaccgcagggcgtggcgcggcctccgcccgctgcacggagagccccccagaggcagcgacacggcgcttggggtccgcggggctcctcctccaactccgcagacctccggggaggcctcttgctccccgaacacccgggagttcgctttcatttttaacgaatctccacaatctcttgtttgggagataattgcttctttcaggggcttggagaacaaaagcgtcagcccagggccccaggtctctccgcgggaggagggcacccaggggcgatgcgccgggctctctccttcgcccttcttggcccgctcgccttcagctcccacccgcagcagcaaccgcagcctgcttccggggactgagcagccctgggtcagccaaggttaagcagcgggtggggaagaggagagaaagctgggtcaattggaagtaaccttcttgtaccgcccactttttccttgcttggaggcggcaaaaagcactttagcattcttcgggctgtttgcgcctctttctctaacagggccaggggagtggaagagcggccggcaggaagg

SEQ ID NO: 222199 - DNA, 240 bp, Homo sapiens
  chr3:120627018-120627258
  hyper
cacggcgggagggcggagcctgctctggagcctgactgctcggttaggacctcggagagcgccaggcgccgcgaccagagggcccagagaagcggccggagcccgcctacctcggccccctcagcttcccgggctggcaggcggctagaggcgtctgaggaaggtgcctaagtcctgggtcagatagtcatccctctgggacgccgccgccgctgccgccgtccagctgtggctccctcg

SEQ ID NO: 222200 - DNA, 360 bp, Homo sapiens
  chr3:120627318-120627678
  hyper
acagagacagagagcgagcgcaccagcgcgcgaatgcccgtgtgagggtgtttgtgtgtgttctggctgggagcgcgaatgcctcggcgtgaggtgtttgtgtgttcgcgcgcccgcgggcgggcgagagccccgcgcctcagcgctgggcctgggggagggacagcgggagcggcggctctgcgcgcccagcaggctgaggcgggactcgggccgcagccgtcgccgccaccgcttcacgtcccccgagagcggctgccgtgcagcggggagagcggacggcgggcgggcgaacaggcgggagagcgcggcggcggctgcgggcagaggtggagggaggggagcaggagatggggagag

SEQ ID NO: 222201 - DNA, 247 bp, Homo sapiens
  chr3:122296549-122296796
  hyper
gagtccaggggctccgacccccagagaacttatgcacggagttgcaggtgttacttccagagccggacgagatcgggaggcggggagcgtgctgccggccgggaaccgtggggcgcggaaggcctcccggcgctcttcctcccggagtatggtgaggagcgcgggggacgggtgcgggaaggggacagcagggctgagcctggggcccgcaagacccagcagcccgagcgggcgcagagaccccacg

SEQ ID NO: 222202 - DNA, 386 bp, Homo sapiens
  chr3:122514169-122514555
  hyper
ccgggcgggtatacgggcgccgctggctggtgctgctgctcttctcgctgctggcgttcgttcagggcctggtctggaacacctggggtcccatccagaactcggcgcgccaggcctacggcttctccagctgggacatcgcgctgctcgtgctgtgggggcccatcggcttcctgccctgcttcgcgttcatgtggctcctggacaagagaggtgaggggtcgcggagcgccagcccgcgctgtctctcctccgggagcaggcgcctgcccgcgctccaggcctgccagccgcctcccttggccccggcataggggttgtgtgaggtgatagagtgttgctagcattccatttctgacttaggaaccctccgtccccaaagcgac

SEQ ID NO: 222203 - DNA, 155 bp, Homo sapiens
  chr3:122785820-122785975
  hyper
gcgagcacttcttcccggccgcctctccccagctgctgcgcatgctttggcagacgtggcaccgggaactcggaggcggggagcggctgggaagtggccgtggtggttggccgcggtggagctagcaggcgggcgggcgggagcgggcgccggag

SEQ ID NO: 222204 - DNA, 480 bp, Homo sapiens
  chr3:123167524-123168004
  hyper
tgcagcggggcatcttggcacccccgtcctgagcggaggaggagggcacagccccgaggtgagaagtagctgaggatccgcgtcagaagtcccaggtccgaaatggagttgcctccgaggtggggtcgcagggactggtctggctgctgctgcgccgcacgcggagagacgtccgggatcctggctcgcgtcgagctcgacgagggccggagttgcggacgagacgggacggagtggtgtccttgcgggcggtgcctcctcgggccggcagtgcccgggcgcggcgctcgctgattccgcctaagcggagcccagctgctctcggggctcggcggcggcgagggcggctcggcgggggtcccggcgaagagacactgcgggtgcgctttcctcgcagcggactgggagcgactgggaggtgcgggcgccagccagcattattttcttacgaggggtggggaggtgggatgggaggtggag

SEQ ID NO: 222205 - DNA, 300 bp, Homo sapiens
  chr3:123168151-123168451
  hyper
cggcgcgtccgcgcagggggcggggtccgggtcagggaccggctcctgcggtgcggcccttcccctctcgcctctccctttcccgcaaacggagcggggccggccgggacctgccggcccggagagctgtcgcgcccgcttcgcaagccccaagctcctcgtcgccggctgcgggcccaccgcggccggcgcggaacgactaggcggaggacggaatccggcgcagcgctgccgcggttctgccccgacgcaggcaggcttctcccggggagtaaggcatccagagatccagcgccgggg

SEQ ID NO: 222206 - DNA, 180 bp, Homo sapiens
  chr3:123751953-123752133
  hyper
cccggccggagcttcaattcagctcggcgctcccggggtcattgttggccgggactgagggagcgggagccgggggaggagctggggaggcggctgctgcggcggcggcggcggcgggagccagagggggagctagagagcgagcgagcgaaggagggaggtagcgagtgagcgagtgag

SEQ ID NO: 222207 - DNA, 261 bp, Homo sapiens
  chr3:124605642-124605903
  hyper
ctggcccaccagggagtgccccgaaggcgccctccgccctcaggcaccgcctgcgctccccgcccctccgagacgcccgcccgcggctgagtgtgcgacaaagtttctctgggcgccgtgggcggcgcggcttacctgcgagccggggcaggagcgcgcagagccccaggaggcaggcgtacagcggcgccggggcccgcggcatggtggggcgcctccctcagcggcggcgcggtcgctgcactccgcgggggccggcgg

SEQ ID NO: 222208 - DNA, 576 bp, Homo sapiens
  chr3:124773769-124774345
  hyper
ctgcgtgggacaggcggtggctaccacggagcaacagttcattgggaaaggaaaggggagggaggaggctcagggatggtcctgtatcagcctgtgccttgcaggggttcaaccatgcaaccccaaccgcgttcctttgcttttaagtcgaaccagtagagcgttttgtttcaaactacgtacatcctttgtcctttacaatatcccgtcctagaaccccttaaaaatcagttatttagatgagaaagtcgagccctgtacctggagaggccagttctgtatagcggaaaaaatgaaactggggaccggctggccagatatcggaggtgggagagatgctttgcagtctttttccctttcctttccattttttttaaagtggggtggaagagatacagggtaccccataggaaataagttttcttccaaagggttggaggagaacgggatagtcacacccctcagtccagccaactgcgaaagcgtccctccctacccgccgaccctcagggtcccgcacacgccgggcgaggagcccccaccctgggtcgcgccgcgcggaggggcctacggctg

SEQ ID NO: 222209 - DNA, 792 bp, Homo sapiens
  chr3:126074822-126075614
  hyper
gggacacgctgttccgggcacagtccccggctggccgccggactccgccccctcccctggcccggccaggcctgctgtttatcctcccggggacacagcggctgcaggaacaacatgtaattgataacaagcccagcgccggccaagggcttgccattgggtcagcgtgcaaatcacgggggtggcggcgggggctgtccttcaaaataagagtctccggtccctgagccgcccgcaggccccaaagtcgcagagtccgggcgtcctcacacctgtagggcggcagggtctccccaggggccacctggtccggggggacagggggaaggagatttgaggctctcaaacaattgttgattttgtcacctccgagggccgtgggagaaaacagcccctctgtgccctccgtgagaggggggttccatgagtaacaccaaggcggggagggaagagtgaaccggaccaccatatgggatggggacggcctctctgccccgccgccgccatccctcggtcaggccatggctttggtaatgttcggtctgagcggacggggactcagcgtggagtgagacgcgtgaacggtgcgggtgtgcgtgaaggggtgtgagttcctgtcgtgtgactgcgtgtgcggggcgtggtgcgcggcagccgctgtggctgtgcgggaggctgtccgcgaaggactcgcgcgtggagccgccgtgggtgccggcgggtgaggggaaacgtgcgtgggaaatgaagagagccggctcagaccccttctagagtcctggaccgctgccc

SEQ ID NO: 222210 - DNA, 140 bp, Homo sapiens
  chr3:126195083-126195223
  hyper
acctacgagggcgagcggcggggcacgggaccgacaggggacggggtgaggctcccaacgctgagcgattccttctcgttcccgctggcgtggaagacgaggcttgtcttgacttcgaatcgtattaatatttcagacac

SEQ ID NO: 222211 - DNA, 468 bp, Homo sapiens
  chr3:127347862-127348330
  hyper
acgggcggagggacggccgcccgcgcgtccgcttcgtctccgcgggggcgcgcccgcggcacgcggccgggcggggccgggcgtgagtgacggccatgcggaccaatggggcgggcgcgcgccgccgccgccgcccgcgcggcccctgacgcgggcccgggcgccgcgccgctgcggctgcaggcggcgacggctacaccatgggccggctgctgcgggccgcccggctgccgccgctgctttcgccgctgctgcttctgctggttgggggtgagtgcgctccgggcccgagcgcgggagggcgggcggcggcgtgggcgcggtgctggacagctccccgggccgccaacaaaggggccagagtgcggcgccgccgggagcgcgcgtgtcccggccgggccgcggcgccgccccgacacacgcgcacgaggagtgggtgcgtgggggccgcggcgggcgcctggcgtg

SEQ ID NO: 222212 - DNA, 166 bp, Homo sapiens
  chr3:127633987-127634153
  hyper
cctccccgcaggccttcagtcgctctggcacgcgggccagcgcgggaacactctgcgcaggcgcacagcgttccgcgggggacgctcagtagggtacgggacgcgcgcggggagaccctgtgcagcgacaccggggctgtagtcgccgtctggaaccagcgcggga

SEQ ID NO: 222213 - DNA, 281 bp, Homo sapiens
  chr3:127794264-127794545
  hyper
gttttcacggtacacgcctttggcaattttgcatcaaaaaactaagtgtatgcacattttttttaattgaaagcccaactcagccttcccccactgctccttccccgcatgcacggggggacacacgccttcctccctgcctgccgggacttcaacctcgcttgctgggaagtcgcgcactttcgtcgcgacttcccaagtcgtgctgggtgtgacttggaatctcggatccctgggctaggcctggccacgcccccatggggggaggggcagcgcggcgg

SEQ ID NO: 222214 - DNA, 438 bp, Homo sapiens
  chr3:127795664-127796102
  hyper
cgtgtgcggcgtcccagcccgcaccccgcaccccaccatgtccctctgggtgcggggtccgcatgcccgcgccctccccgcagctgccggcgtccccattaatcacgcggcgctgacggcgctgatctgcgtgctggcggcgtgacggtgacggtgacggcgggtgacggagcgggcaatcggcaggcgcccatcggcccatcttatcgcggcggcccagccgccgcccgctgcgcgccgcccattgatcgcgccgggcccctgcccgggggtcagcgcgggccgggccggcctgacagccgcatccgtcgccgagacgcgcgctgatggccgcccagcccgcacggcctggccattaatcaccgtgcctgccgccaagtgacgggaggggcggcagggcagcaggggacgacaggcagcccccgtggccggcccacc

SEQ ID NO: 222215 - DNA, 540 bp, Homo sapiens
  chr3:128273915-128274455
  hyper
agaggggaggcttggtgtgaacgataccctgccggctgcgtgtggaggggaggctgtggcctgggcggaaggcaggagtcccgggaggggcagcggggacggggaccctgaggcccaggggattgggctcaggggccggattcaggatgctttccgcgcagagccagccgcagaaggggcatgggaaagagcctcatctacgcacgagaaaaccgggccgagagtcaagagccaaggcggggctgccgttccagggcgcgagccgggccgtcccccacctcgatcctgtgcgccctgcctcgggcggccagggtgcgcgcggcggccgcgggcgctgcggagagaccggcggaggccggggcacccggcgtgtttttcaggaaggaagccttcgctcctgtaacaggctggggcttggcccggcccgcggccgccccgccaggaagcgccccgtccgccccctcggggcgcgtccgcggcaggcacttttgaggacaggaaggggagaggtgacctgagcatccacgcagctgtggcatt

SEQ ID NO: 222216 - DNA, 104 bp, Homo sapiens
  chr3:128274562-128274666
  hyper
tgcatcgccttacccggccggaattcctgcaggacgctttgttctcagatggcagcgctgctagagccatcggacctgtgaggggggggcgcccggggcaggcc

SEQ ID NO: 222217 - DNA, 1002 bp, Homo sapiens
  chr3:128720263-128721265
  hyper
ccccctaccccaggcccctccaaagcaactggggtaaaccagacgcactgtgaggccagcgcagctgctggacacggtccccggcgccgctccaaccagaccgcgaccgctaagcccctcctttcgagaaactctggggccgcccctggaagtggcggggcgaagggaccggaggagggaccggaggagcgaggcgcgcggcgcagcgatggagccggtcagcacgggcgcggaggccggcatggagggcgcgggaggtgacccgtaccggcgacctgcgcggcgcacgcagtggctgctgagcgccctggcgcaccactacgggctggaccgcggcgtggagaacgagatcgtggtgctggccaccggcctggaccagtacctgcaggaggtcttccaccacctggactgccgcggcgccggccgtctgccccgcgccgacttccgagcgctctgcgctgtgctggggctgcgcgcggagggggccaccacggccgggcaggcagcaggtgacgggaactccagagatgtgacccccggggatgcggccgctgagttggccacggacggggactcagataccgatgaagaggcgcgcctggcgctgcgcgccgagccgccggagctcaccttccgccagttccacgcgcgcctctgtggctacttcggcacccgtgcggggccccggctgccccgcggcgctctcagcgagcacatcgagacgcagatccgcctgcgccgtccgcgccgccgccgccgcccgccctgcgcgcctggccccgacagcggtcctgactgtgagcgcgttgcgcggctggaggaggagaatagcagcttgcgcgagttggtggaggacctgcgcgccgcgctgcagagcagtgatgcgcgctgcctagcactgcaggtgcgcgccggccacgaagggagggtggtaacgcccgggagagggctcgaactaaaagctggctggctgcggagcccgacaggacagagtcagaggaa

SEQ ID NO: 222218 - DNA, 984 bp, Homo sapiens
  chr3:129324048-129325032
  hyper
tctggatctctgcgcgctcccacctgtgacccactcagctcacgacccgctcggttcccgcccgcccccgcccccgcccccgccgccgccgccgccgccgccgccgccaccgcccgggtgtacctggatgttgagcttgcgctcacaggccggtcccgtgccctgcaccacgctgtcgagcaccgccaccacgtcgggcgccggttccacgaagcaggcggtgcgcgcagctcggatggcggctcgcacgtcggcgaagcggaaggcgcagagtgcggccggagcagcgcgggccgcgggggacccctggggccgctcgaagacagcaaagagccgctcccgggctgggaagaccgacaccaggcggctgtagaggtcgccgcggcccgcgccgcccgcgcactgcaagcccaactggatgtaggactcggtgagcttcttggcgtcgccgccggcgccgtggggcaggcagatgcgcgccagcaggctccgcgcctggctctccttgtcgcccgcgcgcgcctcgctgttgagcgccaggtacgcgtaggactgtgcacccggcggcgggtcggacgggtgcaggaaggcgctcacgaagcccagcttgtgctgctccttggcgccctgcttgatcttgaggatgttgtcgtcggaggggttgaggtcgaaggtgaagagcttggccaggtcgccgcgcgtgtccagggagcggatggcgatctcgggcgtgttctcgaagcggtggtcctccaggctgcggttgcgcgggaagaaggagctgccgtaaccggtgtacgtggcgcccacgagcaggcggctgccccccgcgcccgcggcgggaggcagaactagccccacggtggacgcgttcgggtggttggccgccacgttcagcatgctggggaacaccgtgacgggctcggcgggcggcgcggcgggcgggaagcgcacggccacggccgagatgttgccccggcgccg

SEQ ID NO: 222219 - DNA, 815 bp, Homo sapiens
  chr3:129693119-129693934
  hyper
ctctcgcccgtctgcgttctacattggttctgcggccgtgtccctttcgtgtgtgtctgccctgtgtttctccgtcgtctccgtgtggatctcggtctttgtctcgccctctagctctctcgtgcgcctgtgtttaatcgtgcgcttctctcaatctctctgtccctccctttgccccctacacgcgtgttctcgtcaacagatctccagaggtggtgcagaaacgaccccgcgccggcgccccatcctgcggccagtgcctccgcgccccggctccggtccccaccgtccccgccccagatttccggaggagcaggcgggcggggtcccgcggggccggctgccgtcagcgccccttcccggcggccgcgacccctccccgctgacctcactcgagccgccgcctggcgcagatataagcggcggcccatctgaagagggctcggcaggcgcccggggtcctcagcgctgcagactcctgacctgccgactgcggatcccgagtccccggatcccggacccatcctgtggagcccactcctggcaggtaaccgccccaacccctctccttccgcagacggtgtccgggagcactggaaagggagccctctcggcccgccctcaccttcggttctctgagagcttcctggagaacagggccggtgcacaggcgggcgctgtgctcgcacccccgggtcctccccgagcgcaggccggggacccgacgggaggcacggcgcgggcacatcggaggctctcgctgctgggcactcaggtcgccagagtccgcagcgcggggtgggagctccgcggca

SEQ ID NO: 222220 - DNA, 384 bp, Homo sapiens
  chr3:130064515-130064899
  hyper
cactcacattaaaacttgtgaagagttaaaagccccagggaagagccaggccaagggcacgggtcagcgccggcttaaaagaccctctcagggcacgaggcgttcgctgcgggaatccacctgcagctgtgcggcgcggaccagggcgtgcggcgcggaccagggcttccggcgcgcgctctatccaactgcgccgcgggcgcccgagaggcgcgcgtttactgcgctcaggagctcggtgcagcctcttctggagagttgggggcggtttccagggtccggagtgtcccctgaccccgggaaagctgggtaagtatgcggtgcggggacttggggcctgaggcaggcgggggaggaaacctcgagtagacaggtggatgtgag

SEQ ID NO: 222221 - DNA, 540 bp, Homo sapiens
  chr3:130235723-130236263
  hyper
cggatctgcacgccctgcctatctttggggtacagagaaggcgcgtaccatgaaagccccaacttcccctctttcttttctcccacggtcgggaccttagggtaggagtttcaagaggggagaagccggtggagcagtaacagccttcataatgtctccagtcccgcttccgtcacctccctaaggctgcgcccccctcctgggggacgtgcgctgggcccggggccgccggggcggggaagggtcgggcccggggcggggagaagcgtttatatgtcggcgaggggcgtgggagctgccacccgcttgcctgcgggacaccggagtcaagaggctgcccacgccgctgcctgtccgttccacggttccgaggtctccaccgtctccccgcgcgccgcaggcggcaccaaactctgcgctccccgcggtgcgccctgcccgcgcagtgcgcgtccagaggaaatccgccccgggctttcgaagtgcagggctgggggctgcatggaagtttccccaaggtaagtccaggagccaacgctg

SEQ ID NO: 222222 - DNA, 105 bp, Homo sapiens
  chr3:132756102-132756207
  hyper
taagagcttggctacgctgaacgacaaaggttctagctggccagtccgaaaacactgagtccttaggtcaaatttgagaaatgacagggccagtgggagtcctaa

SEQ ID NO: 222223 - DNA, 164 bp, Homo sapiens
  chr3:132756373-132756537
  hyper
ctacaacaaattgttacgttttgagaagcagggaccacttataccacttctctggccaagtgtctggcaccgcgccactcagacacacacgcccaaccctttaggattaacgtagacacagtgttctcttccatggccattccgtctccacttctggttccaca

SEQ ID NO: 222224 - DNA, 420 bp, Homo sapiens
  chr3:132756999-132757419
  hyper
tctgctaggtagcaaccgaacccccagagacatcggagcgggcgctgccgagggcaatttggtgattggctggtctcaccacgtgaccggcgctgagccttccgtgcgaccggattggctgtcgcggacgctgacggacaaggccggggcgggccagagcctggtcggaggggcgcgcgcgggggcccgaggggcgaaggcgcgagtgcgcgagagcgcgtgcgcgagcggtggggctttctcctgagccgtcggagggagccggagcgcttctcccgaggtaagcggcgctccggggcgtccccccagtccttcccatgctgggtcccggcaagcgggttaggctgggctgggcggggctcggggaggtgtggggtcagcttgccccgggagcccagcttcagggaggatgcagccccg

SEQ ID NO: 222225 - DNA, 180 bp, Homo sapiens
  chr3:132757649-132757829
  hyper
tgcagggggacctgtcacatggggaaacgaagaagaagaaatgtagtgtcactttggccagcccgagggactcgaactaatcctgcggccgcgagcggagccgaattcctagcgcagctgtgcgaagagccctcctgcctaggtgccggcggcctcgccggggacggagcctccgtgctg

SEQ ID NO: 222226 - DNA, 49 bp, Homo sapiens; identical to SEQ ID NO: 199099
  chr3:133276458-133276507
  hyper

SEQ ID NO: 222227 - DNA, 560 bp, Homo sapiens
  chr3:133646157-133646717
  hyper
gccgtgtgttcccgcgggccctctcggtgcctcgtggcaccttactctctactcctcttgttctctaacgtgtttaatacactttcgtgcagaaaacataaatagactaaacggtgctttatcgcgggcagtcagagaggaagttttctcgaggctgtgtcccgtgagcaggcgccggtgggctcagccgccgggccctccgagtaggggaaggcgtgcgtgcgtgcgtgcggtgggcgcggggagccccgcaggcccgagggcgccccggcggggaagcgggctatcggaggcgcgctgagccgggtggtggagtcccgcccggctggctgtggggccgcgggggcgtcccgtgggcgggctgggcgtggcgcctccgcgggtggcttccccgggccgcggcggaggggcggcgccccctggtggcggaatgcgactccagggcgcaaggggccgcccaccccgcctcgcccacccggcgggggcctccgcgccttttctgagaaagccagaggaaaggagccgagaccgcagtcccctgggcccgtttcctcgtctgt

SEQ ID NO: 222228 - DNA, 99 bp, Homo sapiens
  chr3:133748217-133748316
  hyper
aggacaattctctcgcttataactctgcctggagttgtccgagtaagcggtaagcaggtacttccactgtcccattacttagtccgatgaaggcgtgtg

SEQ ID NO: 222229 - DNA, 240 bp, Homo sapiens
  chr3:133748397-133748637
  hyper
agcacgcgtcgcccggggatgagatcggagcgcggcacaggagggagcccggggctcccggagcctcctggctccggcagacagaagcgggtgcccagccgaaggtgcgccaggcgcggctccggcccggaagaccccgcggactccgctcaccttaatgttgccgaagaccgagcgggcacagcggccggctcggctagtagaggtgtcgctgccctgggacgcgccgagcttgggcag

SEQ ID NO: 222230 - DNA, 52 bp, Homo sapiens; identical to SEQ ID NO: 199100
  chr3:133969907-133969959
  hyper

SEQ ID NO: 222231 - DNA, 840 bp, Homo sapiens
  chr3:134092917-134093757
  hyper
agtcggccctctcccctctcccccagccccaagagacccgcgcgtttctagagccccgcaaagcccagcgcgctgcgctccctgggcagagcggcccttgccaggcactgcggctgcctcgaaagggcgcactgcgccccgaggacgctcgatcctcgaggctccgactcccggaaaaggccgggttgcgccgagactccagctttggctggggcacgtttctgtggcctcgcgcgctctcccgagcgccgagcggccttccttaccgctgcggcccgagggtgcccagcgcagtcagacaccacaacctccggctcggcccagctcagctcggcggcgaagatgtgttctcggccgtggcgccgacgctctggctgttcgcgccccagcgcgcagccccagggtcggcccgcgccggaggcggctgctatgccaggaatgtgagagtttcaggttccccctcgggatcaaagcgaaccacaaataacctctcagcgcaccgccctcctccgccctccgccttctcccgctccctcctcccggcccccgccttcctccggggaggcggcgctgctggccgagcgccggcccggcccccgagctccgttcctccgcgcccagcgccctccaggccgcggtgtgtccgcccctgccccatgctttgccttcggagctgctggagacaatttaatccaactctgcccattatcgcctccactcccagtcgccgacccgctctcacccttcatccctaaacccatcgacgggacgacagcaagggctgtaccacgcgtgtcctggggttgctgcgggaggggactccggctgtgtgtgtgtgtg

SEQ ID NO: 222232 - DNA, 593 bp, Homo sapiens
  chr3:134369513-134370106
  hyper
ccactgcggggaagcgacggcagccatgggggagagggtcgggttcgctgacctcgttcgggggagcaatgggcgccccccggcgggcaggcccttgtggcaaggaggccaaggtgccgggggacccggggacccgggtcgggcgcgcgttacctcctccgcgctgcagcagcgagctcgggttcgcctgctggtctgagagcgtaccctgtgcggcgcgccgcttctccgagtgcacgatcagcagcatgtcgatagatacagcgttgatgtccttcttcagctccatgatgccgcctcctttccgacctgggcgccgcggccgcacgctaggctgcttgcgctgcaaatggccccgtgcgcgcagctgccccacacgggagagggcgagggcgcggaagagggcgctcccccgccgctggagccgcagggcgctgcttttcgctgactctgccaaacacgccattagggcccgcctgggagggcgctaccctaatgaagcggctctaagtcacctttgaaaggaaatccccgggcccaagccttgacctgcaccggggccatagtcagcaggggcggccggtccagagcct

SEQ ID NO: 222233 - DNA, 1419 bp, Homo sapiens
  chr3:134513742-134515161
  hyper
gatgaacgaaggctcgtttgatcatttaaagcggatccagtcctgggtgggatgtaagggcacgaggcctccccagctccttcgctgggcaccctatggggggacagggtgagttgggcgggccgctgcggttctccgagagcaccacgagggggagcccggacccctcctagcgccttccgagccctcccgcacagccttgcaagcaaaagtttttcttaaactaacaatgccagtgtaaggaggtgctcgcgcctgattggccgggggaattttgcaggtttgattccttgattggacaggaggtgttaggggtggggagagagctgatggtgggggatcccgctccctcccgcgtcagtctggccggctccgtcctcccgtaggctccgctgtagctagcaatgtgacaccaggacgcactcgctctcgcgcgctctcccaggctcgttctccctcgccctctctctctcacacacgcacgcacacacccacctctcccataaacacacacacacacatgcacacccacacccacgcgcgcccgcaccgccccacgcgcacacactcctgcccacgcccacgcagcgctccgggaagtccggtccgggcgagagcgcgaaaggataccgagaagccacccgcggagagcgcagcggcgccctgggacgcggcgctctcccggcgctgctgcctcggcttggtctcggcctgcgggccgtcggccggcgatggccctggattatctactactgctcctcctggcatccgcagtggctgcgatggaaggtaacgtaccctccacggagcaagttggctgctggtgccggccgccttgggactgctgtgctccgcggttcgcggggttcctctggctgctttgcggtgcaggcatcccgggacccgagggcaaggaggtttgggagcctcggccgctgccgagcgcggggcttgggcggcacccaccagagcgcccccggctggctcttagcgcccgaaactggctcgcgagtcccccggcttcctcgccccggcactccctggtagcctcggtctcccgcagcccccgctcggagagctcggagcccgctgcattgcggtgcatgctccttagctctggggcagagccagagctgggcgttggggagaaaggggtgcctctggccatccggctcctggagtactggcgcccgtctgctcccaggcacggatacgcttctgagcagccgcgcgccacctccttttctccagctcgcagtccacgggctagtggactctgcttggcgtgcaagcactgcgcgcgggggccggagaagctctgccgtggtatcccgcaagtggccgccgaaggagaggggtggagttcattggccgtacccttggggaccagtctggtggtccgggcgcctgcgggactgc

SEQ ID NO: 222234 - DNA, 420 bp, Homo sapiens
  chr3:135684647-135685067
  hyper
tgcccgcgagctgagccgccggaggaggagccgcgggcaacgaggtaggcaaaggaacactggccgcacggcctggagccttcagctccctcgtcccggcccgagggggtggcgaggctcggggcggcgcgcggaggccggggcgggcggggccgggacctgggggcggggaccggcctggccagaggggccacacggagctgattgggctgtggaagtcggaattccagtcggtgcggtgcggtgcggtgcgttgcctcggcgcggccggccggtcccgggacacggcaccagggaggtgtggaaattgcctgccccaggggcgcccgcggaggagggtaggcgggggcggcctgggccctcccacttttcagggctcctgggccagttcgcccgcacagccctcgggaacttgttaac

SEQ ID NO: 222235 - DNA, 275 bp, Homo sapiens
  chr3:135685168-135685443
  hyper
cctcggcccgacttggccaaagaaggatgtgtcaccagctccgggccgcggacgggattcccggcccgccaggagccggggtacctgaaacaaaggtaaacggaggccgggcggcccctggtcctgcaccgcggccgcgctggagcgcctcggtgggtctctcccgcgccgacctggccgccgccgccgcggaggggcgttctcctgggggacctctcgatggaaaccagctggccgggcttggagttgatgttgcatccgaactctgttgtgct

SEQ ID NO: 222236 - DNA, 916 bp, Homo sapiens
  chr3:138066946-138067862
  hyper
catgatctggaagaaagacgtctcaggattcgaagggaatgcagctaaggtggcggcggaggttcgcctaggactggggaggcgtccctaggctcagaagttggcccggccggagcggagatttaaaggttggagcgcagaggctcttaaagaggccgagtcgaattcccactcggcgtccaccttaaagccagctccccggcaccacggatctgacccgggtaagtgctgggccgcgggagaggctgcggcgccgaccccagcccctggcgctctagcgcgccctgccgggcccaggggactcggcgcgggtgggctggacttcgtaggcgcgcgtcctgggggccggggtgcacgcgggggcgacagggtcgaggcacccggcccgggctccccactggcgcgcccgcagcggcgctctatttttagcaggcgctgtggcaatataaggaatgcgcggcgcgctaggcgctcggggcgcacgctggcggcgcggtcgctttaaggaggcgccggggcggggacggaccggagtggccggctggcggggagccgtcagtccggcggccgcggggcccggcgggcgcgacgctgcctcctcaccggcgcaggctaggagggggcggcctgagtgccgtagccgagccggggctggagcgcgcggtgagtggtcgggcggccttggaggggagggggcccggccgcgccgcctctcgccccggccgtcgctttgttccggggcgggaggtgtggccgccctccgggctcggccgcgctctccgcttgcggggtgcgccctgggaccggctgtgcgtggcgttttgcccccatcgcgggctcccgcgtaacggtgtgcgttcgtgaaatcggccacgaccaagaccccagtggggagggcctgcgcgccgctcagaga

SEQ ID NO: 222237 - DNA, 563 bp, Homo sapiens
  chr3:138153949-138154512
  hyper
cagcacctgccagcctgggtgagccaagccgggtgggagtgggaggtggggagatgcctttcgaggttcggaggaacttgcggtcagcggggagctggtgcgcgcaaacccgaggcagggcgggagcccggcgacctgcacaccccgttccccaccgctcccggggcgcagaccctggggacggtgaccgcccctcccgcggcgcgcagcaccctcacgtccacctctggtccgactgcggtgggagtggggaacttgggtttcatttaaggccccagagctcgagagaagagtcacgggcagaccacacccgggagaaaaacaagggcgtctgggacttcgcagacttactcgggttggaatcagaaggcatttcttccacccgcctgttgattcagagaacgaacgccggacgcaaaacgtagatgggcaaataccgcagtgacagaaacggcgggcccagttgctttcggccgaggcctggactgcggtagggggagggctccgcggggctggaggtggagtggcgggtacggctgggagaccgacggcgccgggccccg

SEQ ID NO: 222238 - DNA, 161 bp, Homo sapiens
  chr3:138327435-138327596
  hyper
gcaggaagactggacgcactgcgggacatggtgatgtcctgggttggggctgaggaaggcctatgcgcggagggtgcggccttcggctaaggcagaggaccagggttgggtccgtggcggcgggaggggtggcctcctgcgctggtcgccccaggggacct

SEQ ID NO: 222239 - DNA, 457 bp, Homo sapiens
  chr3:138654715-138655172
  hyper
ccccttccggtcgtcgaggcgctcttaatttggttggagagacaagtgcactacaagaaacagaggcagccaagcgcctgggccaccatcaagtaaggttgaaaaggggagggcaggtagatcgggacccgtgggcgccaatcaatgctatggtggcggagagtaaaggggacgaacacagcctggggccatccccggagtcccccagcgtccgcctgtggccgtgcctggttggccgcggatcccggcgggcgccgcaaagcggcgggattgccagcgcagagctccggctctctgccttgtccctgggtccgagcaccggagcctctggtgtctgcggggagaagtctcggattgagaaatacgggagggtctcgtcagtggctgcaggtgcggcagccactctggggacccagtgagaatggggtcgcctggctctgcgcgaacccctcacgtg

SEQ ID NO: 222240 - DNA, 253 bp, Homo sapiens
  chr3:138679339-138679592
  hyper
tgtaggacgagcgtggcgcgtccctccggaccggaagcggggctcaccccagcgacggggggcttcctcactttcgtaccgcgctccttccccgcagaggcccgccggaagcggcagccggcgatggggaccagggcccgggacaggcgggtgatgtctttcctggaggcagcgatgcaggaagcccgcggggagccccggcttcgccgctcggggttcaggtgcacgggcacagacgcgcaagcccagagca

SEQ ID NO: 222241 - DNA, 370 bp, Homo sapiens
  chr3:139258145-139258515
  hyper
ctgggagcggtggccgaggacgccctttctggcgtccgggggcaccggaccgcggctcgccgggatggaggcaggcaggcagcgtctcgggagggctctagggagcggcccggagctgctcggcggggcgcccagggcgcagcgggcagcgcttaccgagggcgcgcaggtactcctcgaaattctcgttgaccaacatcttccagtacccagtgaagtcgactggcatttcggggagtgactggagccagttggccacaagcgggcgggacggctggagactgccgggacagcggctgccggtgctacgcgggtggtgggcggcccggaaatgagcgccctccggggacagggggctctgcggggcggc

SEQ ID NO: 222242 - DNA, 395 bp, Homo sapiens
  chr3:139258547-139258942
  hyper
cgggaggatccattgtagcggtcgctcctccccgcttagcgagggcgggcgcaggggcgggggatgtcgaagggtcaggtttgtccaggccgcgccaccttcgtttcagacgttcagttcgtttcccctacaaaggaagaggagaccggagacgggacgtttgctttgttggccgaactcttcggctgctggggatttccttcaaacgccattaacttctcacactcagcagccactcgggagttgggaaacaatctcctggggtttgtgctggcgtgattaaggaaagaggccacttacaggcctttgtctaaagcctcgcgccggtggtggctggggtcaggaaagctgggaggttcaactacgggcgagaaaattggggcactttccacgtc

SEQ ID NO: 222243 - DNA, 1140 bp, Homo sapiens
  chr3:139653518-139654658
  hyper
gcaccactaggcgctgctctagtgtgcgcctggcgccctccccagaccagtcgacgcagaacgcccagagacccagccaagggcaagacccttagcgacgcccgtcagtcctctccgcccagatatcagttcaaagggcatggcaggtcagggtccctcgcgccaccccagatgaccctcaggcctcgggtggccactttctgggggagccctccatcccttgcggcagcttttccgagagtcggagtggaggcgcggggctggagggctctccggagccgcccaccagggtcctctgggggcccggtcccgactgggcagggggacctggacagggccccggagcgtggagacggctgaggaaagttgggggtcggggccttggggcggggagcgcggaacccggcgccgatgcccgcgttcatgaatatgcacgagccacctccctccctccgtgacgtcacgggccgtcccggggtgagcgcctgagccgctccgggtccgcgccagtgagcgcggctgctgccggcgagctagcggcgcagcggcgggaacccgaggccgagcgccgcggcggcagcgctagaagcgcacccatcgggcacggcgaggcggcccacggtgcggcaggcaccgggaggcgagagccggcgcggacagtaggcggcggctgcagctcgttggcggctgctgcgaggatgctgcctgggcggctgtgctgggtgccgctcctgctggcgctgggcgtggggagcggcagcggcggtggcggggacagccggcagcgccgcctcctcgcggctaaaggtgggtgctggggaagtttgctcttctcccaggagggaggcagggcaggcttgagggtgaaagcggcaaggacctaggctcaagctggatttgcccaccctcccttgccgcagcttctttggcctctgtgcgccctggattcccgaagtcagttccctgcgcagcggaccagagaggtccacccgcggacgtcaactcaacccctgggcggggtccgggggctgagcagaaggcgaggtctggggagtacggacaactttgagggctgtctgtgccggggtgggagcgcagtgggtgagtttcgagctctggcccagggacggctagagcagg

SEQ ID NO: 222244 - DNA, 1320 bp, Homo sapiens
  chr3:140660241-140661561
  hyper
gcacaaacctttttatgcattgtgcgagggttactctgagatagacaccaagggaactgctgggtcataaatccaattttttcaaagtaaatccgcttgcgaacccggaaccaagtcgatttttcccgccccgccagttccctgttcaggagagtgcagccgtgattggcgcgttcactcaggccaggggcgccccaggtctcaggtgctaggagcgcggtgacctaccaccctccgggcacgcgttctggccacgcctcgcggcccctttcattgaaagagcccgtagggatcacgtgaaagaacactgcagagtgcgtgacgtcacgacgctcacaccaatgggagcctctgtttatgtcgggagccatcaaatagtcatcttccccctaccatcccccgcccactctccgtcgcgctgcgctgcgtcgctttcagcctctggtgaagggcggcgcgcttaggcaggcggtggcgcggctggagtgccgcggggagggctgtgccggttgctttctgcagccgcatctcggccagctctcctcgccgtccccggggcgctgtgcgtctccagtccgggaccgaagccgcctgccgtagcgggcggccagatccgcgtcccgcctcagcggccggaggacatgcgggagagagaatgagccagagggacacgctggtgcatctgtttgccggagggtaaggtcctggcggggcgtgcgcactggggctgagggtgctggggccgaagacgcaggcgaggggggcgaggggggccgaggggggtgggggggtgggggggcgggagtgaggcctgggcggggagctgccacgggcctgcgggtgaggggagcgacccagcccgtgggtggtgaggggggctccggttcggggaagcaagggggtgaggcccgggcccgagggcgagagagtgaggcccgggcaaagagggttgaggcatgaaacccgggccgggagtgaggttttgggcccgcggggccggggtgaggcggaggccgaatccatgcgtctgaggagacgcgggcaagagctggggtcggcgcttgattacccggacgccgctggacctggccgcacgccgcaatctagcaggcgtcggggatccagggccgctttgaggagcctggcttcggatttcgcgtaggttgcatggcccaaggggacggggcggaaagtgcggaggctgaggacaaaatgggcgccggagactcctttagccctcgctccttgcagcgctcgcttgggcctctgcacgtcactcacgccccacctcggacctcgggccgctcatttccgggctcg

SEQ ID NO: 222245 - DNA, 540 bp, Homo sapiens
  chr3:140769702-140770242
  hyper
ggactttaagagatgagttggagcctgatctcaaaaataaagtgtggacgtgtgtgtctgaggaagggggataataaaccacccttttttcctcctggctgctatttcccacgtgcgttgagtaaaggcaccaaagctgcctagtgactgggtgtctcctccccgtcaggggcacccaccctggcgctccaggagcgcttgaatgaatccgggaggacccgcgcgcaggaatgaatgcgagagctagggagtgagcgggcgagtgggcgggtgagtgaatggcgaccgcgccgccgccttggcacaggggcgcgggcgcgggctccacttccctctcccgccagctggtggcctcgagaaggtggcggcgccggcagcggcccgagctgggacggccggggcgcgggatggtgggggaaggggcgttcccggcgaccgcgccttccgcggctattggattagtggccttcagggatgagctcagccagatcggctttcagctgcagcctccgggccggccgggaaggcggggagcgggcg

SEQ ID NO: 222246 - DNA, 900 bp, Homo sapiens
  chr3:140770298-140771198
  hyper
cggccggcgcgccccgcgcacaaaagcacccagccccaggggagggcgatgaacacaccacatcccgggcccgggccccagctgctgctaccgctgcgtgcgctcagggcgctggggaagacgcccggcgcgccgggggccagcggccgaggcgcggcccgtgcgccctgagcgcgggactcgtcgccctccgggtcaggcgccaagcttccaagcggctagagcgcgggccttggagcgcccccaggatcgcttcagtaaggcgcttccccactccaggcccgacccccggcgcctgagcgccaacttcgccaagaacgctcctaactccaggccatcctgcagcgcagagggggcgctgctgccgggcatcagccgtgaggacgcgcccctggccgtgcggagagagccggcatttgcgggtcactcgggcgcccctgagtgggcggcggcggcagcagacccctctccagggagtccaggacctgccagcgctggggattcttcccgaacaggcgcttgccctctcttttatggtaagtactctccagctcctggtgaggggcgcgcgggggccgggagccgagatccggctgcacggactttgtgcgggccagcactcgacacagctggcgctcctgacgtcccagtccctgagaattcctctctgcaggttgtggcagttcgagatggttgatttgcgcgcagccctggggcgtttggggcccggcctttggtatcatgggttctaagccctttgcttctctgcgtagcggacaacgcacaaaaaactgccatccgattcacccgctttggtttggatccaggatccgtcactcactggctgagtgaccttggacagggcgccaaacctgtttcctcatccgtaggatgggaatg

SEQ ID NO: 222247 - DNA, 957 bp, Homo sapiens
  chr3:142682100-142683057
  hyper
ggcggcccccgaagctgccggggccggggccggagggccttttgtgcccgcgccccggggctgcaggcgccgcggcatggtgcccggggctcggctagggcgcgcgcaggcgacctctggcgccggctcccgggcgctgggcagcccccgccggccgccgtcggagcctttgtgcccacgccgggggcgtcgctgcaggtttaggagaagacccgtgcctccgagcagccgctcctaaaaattaaataaatcaataagagaatcaattaataggcagcgctgcgaccgccaggagcgcggagcgcgcgaggctcagcggcttcctcgccaagcccctgctaccggcgcgcggccgcccgcgctgcggcagcggcggcggcgcggctgactgcggcggcagcgcggcagcggtgactgggcatcgcgcggtgcgggtgcctccgccgccgccgcccccggagcgggaggtggggatgtgcgagccgaggcgcggagggagggacgggcgcaccgaggaagggcgggggcctcccaggctagggtttcgcggccgcttcgggggatagagttgtcccctgtctcgagttccgtaccatccccctcctcgggccgccgcagcccgggccgccccgttaatgattgatgcgggggccgcaggctggtcggcgacgcggcggcgcgcgcgccgagtactagagtcggccctggggttcgaaacccgacagccacgcgggcgttctggaggacactggggagccgcgttcgcggggggcggggagctgcggctgcggggggaggggagggcgccggagccgggcagggcggagagatgcgccagcggtaatctccggaggtcgccggggaggggggcactccggaagtcggggggctttaagcccgcgtccggatcggggccgtgtcattgtcagctacctggggatgcgcctctcgctccct

SEQ ID NO: 222248 - DNA, 2390 bp, Homo sapiens
  chr3:142837797-142840187
  hyper
tcatctacaaaaccaagaagcgggacaagtatttttctgcaaattagaacggggcgttcccctcccccatcaccccaattccagaggacgtcaatcacagtggacgcagcaccgcgagcggaaatgcggagagcatcggggctccgcatgtggggcacaatgaaacaagagcagccccggccagaggtccagtaaagcggaaagacggtcccgcccgcacacccctccggaaaactgaagcgtctcctctgacccccaaggtcagaaagatttattacttccttcgagagggcgcagccacagacccactagagagggcgggcagggtgtcggaagccagagaacggcgctccgcgtcctcccaccgctccagggcgcagaggtgtcctcagtgcccggagaggttggcagtgtcggccccgagggaagcgtggagcggacggccgacaggggatttctgcccaaacttcatcaccaactctttctgagagcaaaaacatggggccgagtccggcagctgcacgcagaatccaactctctggcagctctcggcaccgacgagctccagatcccgcgttcgcatcccggcgctttgcgcgcagagctaagccttcggacccgtggactgcagcccccgcgcgtcgcggtaaagcgggtcgcgtctccagcccccgaggcgcagcgacggtgggagccggctcggcgttgggggcgggggcggggccggcgaagggggagggctgcgcggcggaggggaggagccgcggcgacagacggcggcgcgcaccaaccgggcgccggctggcaggagccgcgcagaggctggtccgagcgcgttgcgggcgcccggcgtaaggggagtcgggtagcagcatcctcctgggcgccgctttcgcgcggcggcggcggctgcggcggggtctttctttgcttaaatacctcgttggccagaagcgctggtaccgggggcgggttgggtcgggtcgggcagtgctgcacacctgggtttccttgcctagagctgtgtgttcggggtcctttggtccagtcggaggctgcggagcggcgggggttgcctgcgctgtccgcccgggcatcctcccggtgatggaagcagccgccgccgccgctgcggggtcgcgctgtgccccatccaccgctgccagagaggtgggaaaattcgccgcacggaggccgaaagcgagaggggctgcgccgctatgccgggagctgagtcccatataagccgcccccagccatcgcccccagccggcttcgttcccctgagcgagacaggaagctgcggtcccgagaaagcggaggagacgtcgctggagccgggaggcgccgggttcggcggagcgcggagcggggctctgggccgcgtgaaagtttttcttcccgagccgcagggcgcccgctgcccggaaactgcccagggataagtcggccgactccccagacccctcgaaggtgcggggacccccagcggaagcgagagggagcgaaatcgaggaacgagtgacagccggacagtccgccgggcggtgatccggggccgctcccgggcgcgccctcggctccaggtgagcggaggaaccgggcagaaccgagggtgggcgttacttaggaggaggaggctgggagggagattggggcgcatccgctcactccgcttcccctcgcaggtcctacccggagccgctgccatgggagagccagccttgggcgctggggaccagccgccgcgcccgcctcggagtcgcggcccgagtcccggcgccagcagccagcccgctgcgtccccttcccgggctgcagggctgcctccgccgcgccgccggcccggattgtgcctgtgatgagccgcagcccgcagcgagctctgcccccgggcgcgctccctcggctgctccaggctgcgcctgcagccgcgccgcgtgccctgctcccgcagtggccccggcgcccaggacgccgctggcccgcgtcccctctcggaatgaaggtgttccgtaggaaggcgctggtgttgtgcgcgggctatgcactgctgctggtgctcactatgctcaacctcctggactacaagtggcacaaggagccgctgcagcagtgcaaccccgatgggccgctgggtgccgcagcgggggcagccggaggcagctgggggcgcccagggccgcctccggccgggccgccccgtgctcatgcccgtttggacctccgcactccttaccgccctcccgctgccgccgtcggggcggctcctgcagccgcggcagggatggcgggggttgcggcccctccaggcaatggcactcggggcaccgggggcgtcggggacaagcggcagctggtgtacgtgttcaccacgtggcgctctggct

SEQ ID NO: 222249 - DNA, 420 bp, Homo sapiens
  chr3:145878769-145879189
  hyper
cccccatattcggccctcgagggccgcgcgggctcaggcgcccacggccccgcagcgccgcgcttctcgcgagaacgcagagacccgggtccgccctgagccgccgattgcgggcgggagccggcgggcaaggcgcgcggccggcagccggagcggcgcgtaacgcagctgagtgaggtcgtcggtggaggcacggagcagcaggcgcccggggcgctgcggaggccttataggctccccgaggggaggcgacggggcgggccgcgccctggctattggccgccggctgacccgccgccgctgcgcgcccggtgcggtcgcctcagctcgccctcctgggccccacgtctggactgtttgctcagcgcggacgctatttaaggagctgcctgcggctacgtgtggaggctcacgcagcgc

SEQ ID NO: 222250 - DNA, 214 bp, Homo sapiens; identical to SEQ ID NO: 199133
  chr3:148709993-148710207
  hyper

SEQ ID NO: 222251 - DNA, 580 bp, Homo sapiens
  chr3:148803984-148804564
  hyper
aacgaatacagctgcacaaatcgcccagggaacgcagaggaacgcggggaaggtcaggttcatttggggacgcctccaggccgttagaccgagcgccccaccccctccgcccccttcacctcttgaacatccaggacatggcgctgagtgggatgacaagaggagcgcctcggctcccctggatcgttttcgagccgcctcgatacgcctccttccaggccccgcagccctgaagccggggacaaattccgagcgccggatcaggagcgcacgactgaaaggtaagtcgccgcgagtccagtcagacgtcgacgccgtctccttctgcaacaatctgggagaccagcgtcgctctgtgactggcactaggaaagcccaatcacgaagaggagagtgcggagccaaaccagtcagagcacagaagggagggcaactccgccccgctgccattcaaagacggcggggggtccgggctgcaagggtggttccatccgggttcttccccgcccccaaggcgggcgcgcgggaaagccacgaggccccaggagtgcgactgcggtgcctgcggtgccggtgtttt

SEQ ID NO: 222252 - DNA, 210 bp, Homo sapiens
  chr3:150320966-150321176
  hyper
cagtgaaacaggtcggctcttcactccaggagtgtgcgcgggcgccgggccgcgcaggcgcattactgctcccctcccccgaccttggctgatcgcgcctgcgcagtggggagcagctcgctcctgggctttgggctggctgcagtctgtctgagggcggccgaagtggctggctcatttaagatgaggcttctgctgcttctcctagtg

SEQ ID NO: 222253 - DNA, 105 bp, Homo sapiens
  chr3:150802803-150802908
  hyper
gtgggttcaaattccgactcgtttcgtggctttcggcaagtgagtggtcctctctgagctggctcaatttctccatccataaaaagggtacagtaagaccgtgga

SEQ ID NO: 222254 - DNA, 451 bp, Homo sapiens
  chr3:150804737-150805188
  hyper
tatgagcagagaccgctgaagcgcccccggctcgggccgcccgacgtctacccacaggaccccaagcagaaggaggtaagggcgccggcggcctccccggcaaccggggccgcgctctgcagcactgacccggggccaagttggcccagcgggcatcgccggcgctgcggtggaagaggtcggggagggggattagaggcgggggccaggctgggggtgctgggcgaccccccggcggcggagaccgagcggctgtcagtccccgcgctccactggggcgctcgctttccatgtgccggtcgctttcccgttgccgggccttgcacggcgccgccgggcgcttctcgggcttcttccctgccgaaaccttgctcgctctcacccgtttctgcctgctttatttttcttcttgccgcttcggtaaatcgtcgtaaactttttgaaaaatgtt

SEQ ID NO: 222255 - DNA, 41 bp, Homo sapiens; identical to SEQ ID NO: 199149
  chr3:155722292-155722333
  hyper

SEQ ID NO: 222256 - DNA, 167 bp, Homo sapiens; identical to SEQ ID NO: 199152
  chr3:156799361-156799528
  hyper

SEQ ID NO: 222257 - DNA, 211 bp, Homo sapiens
  chr3:159706814-159707025
  hyper
tcctgccgcgcctcgggacaattataaaaatgtggccccctgggtcagcctcccagccaccgccctcacctgccgcggccacaggtctgcatccagcggctcgccctgtgtccctgcagtgccggctcagcatgtgtccagcgcgcagtgagtactcagcccgccaggtctttggctcgctcgggtgcggaggggcggctgcttgggaaga

SEQ ID NO: 222258 - DNA, 336 bp, Homo sapiens
  chr3:160167655-160167991
  hyper
cagcgcaggcgcagtctgcaggcaacattcaactgcaaggcatcggccaatgggaactattgctgggctcgttcgaaagtaaacggtggacggcgcggcccgaggcaggtggcgggagtcagtttaaggctggcgcccagctttccgcgcctgcgtgctaggcgcaggccgcctctcggaagcttggcctcgcaggagcggctctctatcctgtggggagcttcggccagtgggcctcgtgagctggggtcccgcctggggaatccgcatggcaccggtggtctgggggagaggctgggcctggcgcgggacgaggcgaagcgccggtggccgacg

SEQ ID NO: 222259 - DNA, 1581 bp, Homo sapiens; identical to SEQ ID NO: 199171
  chr3:160472497-160474078
  hyper

SEQ ID NO: 222260 - DNA, 53 bp, Homo sapiens
  chr3:169380561-169380614
  hyper
ccgcccgccgccgccgccactgtggctccctctgagccgcctaccctacccaa

SEQ ID NO: 222261 - DNA, 87 bp, Homo sapiens
  chr3:169380983-169381070
  hyper
ctggggctgcgctccgcctgccctccacccggggccccggcgcaagaggcagcccgcgctccctcccggagcgctagagacagatat

SEQ ID NO: 222262 - DNA, 163 bp, Homo sapiens
  chr3:169381408-169381571
  hyper
cctttctctcaatccacactcgctatctctccagcattgtcagtttggacaccttcgcacatgcgcgctagacgcccctccaacatctcagcgccgccaaaaaaagtttggagcgatttatcactttgatttggagatcttgtcagatggcaatcgccgagga

SEQ ID NO: 222263 - DNA, 240 bp, Homo sapiens
  chr3:169482522-169482762
  hyper
cccgcggctgacagagcccaactcttcgcggtggcagtgggtgcctccggagaagccccgggccgaccgcggcctccaggcggggttcgggggctgggcaggcgacccgccgcaggtccccgggaggggcgaacgggccagcagctgacattttttgtttgctctagaatgaacggtggaaggcggcaggccgaggcttttccgcccgctgaaagtcagcgagaaaaacagcgcgcgggg

SEQ ID NO: 222264 - DNA, 732 bp, Homo sapiens
  chr3:169529939-169530671
  hyper
aaagggcggacccacgggaactcctctccgtggactcctctcctgcccccggtcgcaaagggcgaccggggactcttctcctgccctcgtttctgggcgccccaaacctctggccacagctggggttcccaggggcccccctcccgcctcgacgccttgggctggcgggctgctgggaggactcctgccgtgcgaccccggcgcccctcgcgcgttttgtctgggccaggccgcgcagacgtgctccctacttcttaccgcgctggaccgccagggccgcgcccggagtactggcctgagtggaggcccaagccggggacctggccggcgcacgggcggcctcccgggagctccccatgctcctctcacccactggccgcggcggctgcgctgccatggcgaccgcgcgcgcacttacagtccgcctgcagctgtgaggcggctacacgagcctcggcgccagcctgcttcgagtcccgctggctgtgcctgcccgggccctgaggcctcactgctaaggcagtgaccgcctactctgtggaggtcctttgtcaccctgccctggttaaaggcagcctgagggagggcgtcctggctcctttgcagggaggagttcccgaggtttgaggggctccgctgctgagctagggctggggctacaaagaagattatgacaaagcccgctcctacaaagtgtgcaccggcctgccgggccagcgaagaagcagagta

SEQ ID NO: 222265 - DNA, 849 bp, Homo sapiens
  chr3:170626303-170627152
  hyper
ccccaccagcttttccccaggtcttcacctttcagctggcaaagagcgcctttcgtctgcgcacccgcgctggtcccctacagcagcggcgccggcagcggcggtggcggccgcggcagttccaagagacggggcggggccgccacactttccacaccccagcctccccgcccttacccgcccccactcagccctatttccgggataggccccggagcgtcacaggcaccgccctctcgggctaccattggctaccagattcccgaggctccgcccagtcacgtgaagagcgccctggcaaccccacgtgctgcggattagtgcacttccggcgtggagcgcactttcagcagtctggttgccgagggtgagctcgctggcagaggaacttgcgccttccaactcttaggtttgttgcgttcgggtcgcagtcgactttaatgggaaccaagcaaagcacccaatggcccctgccatcaggtgcgtggcagttatcacatgacgatcgtcagaactcgcgaggcgcgcagattcagcgagtgccagtgtggctggctgtgaagcgaactttgggttcgagcttctggttcagcttgcagcctttcttggggttcgaacctcctcctggtccttaaagaagaattcaggtgcagtattttattacccagctcggcaccgcaggtcctgaggaccccccattcaccccttggtgagatttttggcagcgactgccgccggatgcccctgtagagtcagcactgctccctggggtgggaactcccgaagcgtccgccagctaacaagccagcagtgaaatgaattaacccacttctcacaccaaaggctgtt

SEQ ID NO: 222266 - DNA, 154 bp, Homo sapiens; identical to SEQ ID NO: 199199
  chr3:171758579-171758733
  hyper

SEQ ID NO: 222267 - DNA, 105 bp, Homo sapiens
  chr3:174158358-174158463
  hyper
attcaagtaacttgcgtaagtcacgaagctataaccaggaatttggctctgcaagcaatgggctttaaaaattcttttaaaagttttattagattcaaagactat

SEQ ID NO: 222268 - DNA, 720 bp, Homo sapiens
  chr3:174158664-174159384
  hyper
ccaagcggctgacgctcgcggcggaggcgccggggccgccgctcgggggcgagggttcgcgccgcggctcgcgcccgcttctcccgctttacggctgctgaaaatccggcctggcccggcagccgtaccgcagacgagcccgcgcccgcgccgctcaggtaatcggagtccttttcttttcaaagttttgccaaaacaagctccgcgctctgaggcggcgcggcctcggccgagcggtccgtgtctccttgctcctccgtcctacccaagctggcgcgactgagctgtgggccgcacccctgcgcggggcccggggcgccgacccggcgtgaagtacgggggccgaggggcgcccggccggcggcgggttctgagcgactccgcggggtggcgcgcggggcacctggctctggcagtccgcgaggcgcgctggccaaaggagctcccaacccgctccaaggcccccgcccacctcccgaagccgcttgtcttaggagaggagcgtagcagctccgagtccccgcttctgacacgttcacacacgtatgcagtgcacgccggccaggcagcccgacacggcgcgctagcggggcgcaggtaaagagcggcgccgcgggcccgcgcgttcgaaatggcgcgcagcacagttccgcccccgcgcgtggaatgccgctccagtggacgcccaggatggctttcttaaggaagtttatgagaagc

SEQ ID NO: 222269 - DNA, 90 bp, Homo sapiens; identical to SEQ ID NO: 199207
  chr3:176915778-176915868
  hyper

SEQ ID NO: 222270 - DNA, 38 bp, Homo sapiens
  chr3:178936068-178936106
  hyper
agatcctctctctgaaatcactgagcaggagaaagatt

SEQ ID NO: 222271 - DNA, 40 bp, Homo sapiens; identical to SEQ ID NO: 199210
  chr3:179064154-179064194
  hyper

SEQ ID NO: 222272 - DNA, 840 bp, Homo sapiens
  chr3:179168753-179169593
  hyper
ggggcacgcacgggctcgtgctctgagttcctggaaggaggcctcggggagtgacgagaaaccaggggggtctgcaggacttggaccgccgaccgttcctcgctccccggggcgagcggtctggaccgcccgggaagtgcctgcgccggcggtcgtggggccagttcccgcgtggcagctgggcgcgacacaggcgcgccctcctcgtccctcccgggcagcgtcggccgcccgagcccggggagacccgccccgccccgcgccgtcacccgggccccgttccgcaggggtggctcgcggcgccccacgtccctgcgagaagcccgggatcgcttcgcggggcgcaccgacgagccgccgctcgcgagctcgccgcctacctggagggagctcaggcccgcgtcgaccgcgcgctgccggtgtccgctgggcgctcagcagcccctggagcgcggagccggcgtggagagcgcagctcacagccgagaccagagccgccggccacacccagtcccgcacctcccagcagccaactccgcggcgcgccggagccggggcggggacgtggctggaggcgcgaggcgcgaggcacgaggcgcgcgggcccggcggggacgtgccggggacgcgcagaccctcggagcgcgcgcagcccgggcggggggcgaagggagcgggcgccgcgcgcagcttctgcttcctattttctctctcgtttcctgccagaaggagaagaaaaacattcattcccgggcagtttcgttttcttgttggtgtggcgccggggcacgctgctaagtagcgcccgtctaagtggcgtggccagtttcctttccggcg

SEQ ID NO: 222273 - DNA, 780 bp, Homo sapiens
  chr3:179754456-179755236
  hyper
aaagaggggaaaaggtgggtgcacagcgggttctcagagggtgctcctgagccccctggagctccgggtactcggccggccggcggccactcggcagcgctgcgggctgccgggaactgttctccgctcggggtgctgaaagcggacgcgggagagcgcgcagagaaggcgaggagccgggtcggccaggctctcctgcaggcgcgggtcctgctcgcggggcgtctctagaactcactccttcttcgccgaactctttctcgcttcctgccaggttgcctcatgtctctctctctctgagctgcgaaccccctcctcccagccctgacgtgagcgcctacaccagccgccgccgcagctgccgagcggggcgcgcgccgttctcccagccgcgtgcctgccgagaggccgcgggaccgggcacgcgcgcgcgttcccaggggcctgggagcggcccgagggcggccccgggcggtgcgcgctccccgagcgcgtcctcggggctgcgcgcgcgcggcggcaaggcgaggtgccggcaggcggtggtcgcgctggtgtacaacgcccgcagcagcgcggcgttcaggtgcggcgtcggcgggcagggcgattctagcggagaggatggccggccggaagaaaggcgggaagacatgcatcgtctctccgggggccatccaccgcggctgagcctgttatcctacagacattataggctgagtgcaggggttgccgaagagtttacttcggttctgattcagctctcgaaagttacgtccg

SEQ ID NO: 222274 - DNA, 53 bp, Homo sapiens
  chr3:180396751-180396804
  hyper
aaggaaaaagcgggcgccggaaccagcctttcctctctcgccaggaggaacga

SEQ ID NO: 222275 - DNA, 540 bp, Homo sapiens
  chr3:180397131-180397671
  hyper
cctcccagtgcagctcagccaggaattcgctactcatgactgcaaacggatagagaagatacagagcaaagatccgccttcttgtacagcgggtgagcagcacccgcgtcaagcccaggcacctgcacagtgccgcggcaattgccgggggagccctagcaaccttcccgcgtccttagttaccaaacaggaaacgctccagcccgaaggcgaaacttccggttgagaactccctgcctgcaggccgaagaatctttttcttaccttgagcactgagggatgagcagcaacttgcccctcccgacgttcccgggggttgccaggcggcagcgtaactttccacgaaaaggcggctctcggatcgctcccggagcgtgtgaaaactgtggcccccggagctggctggaggaccacggggcagctggctggaagtaaaccacacgatcctccgattgcctgggggaagacgggagccaacagggattataaactaagtttcttttcaaggtgtgtttgctgtgttgtgtagatttcagctac

SEQ ID NO: 222276 - DNA, 1020 bp, Homo sapiens
  chr3:181430084-181431104
  hyper
caaagtcccggccgggccgagggtcggcggccgccggcgggccgggcccgcgcacagcgcccgcatgtacaacatgatggagacggagctgaagccgccgggcccgcagcaaacttcggggggcggcggcggcaactccaccgcggcggcggccggcggcaaccagaaaaacagcccggaccgcgtcaagcggcccatgaatgccttcatggtgtggtcccgcgggcagcggcgcaagatggcccaggagaaccccaagatgcacaactcggagatcagcaagcgcctgggcgccgagtggaaacttttgtcggagacggagaagcggccgttcatcgacgaggctaagcggctgcgagcgctgcacatgaaggagcacccggattataaataccggccccggcggaaaaccaagacgctcatgaagaaggataagtacacgctgcccggcgggctgctggcccccggcggcaatagcatggcgagcggggtcggggtgggcgccggcctgggcgcgggcgtgaaccagcgcatggacagttacgcgcacatgaacggctggagcaacggcagctacagcatgatgcaggaccagctgggctacccgcagcacccgggcctcaatgcgcacggcgcagcgcagatgcagcccatgcaccgctacgacgtgagcgccctgcagtacaactccatgaccagctcgcagacctacatgaacggctcgcccacctacagcatgtcctactcgcagcagggcacccctggcatggctcttggctccatgggttcggtggtcaagtccgaggccagctccagcccccctgtggttacctcttcctcccactccagggcgccctgccaggccggggacctccgggacatgatcagcatgtatctccccggcgccgaggtgccggaacccgccgcccccagcagacttcacatgtcccagcactaccagagcggcccggtgcccggcacggccattaacggcacactgcccctctcacacatgtgagg

SEQ ID NO: 222277 - DNA, 300 bp, Homo sapiens
  chr3:181444364-181444664
  hyper
agacggtcaccatattggtggaagcgtttgtctgatgttttaaaacgtataccaaacggggcgtcagggccacgtgctgtgccttcgaaacgccgccgcgggccctgcctttcagagctgcggcagccggggctggcgtggagggggcgctgaaacaccggcgggcgtcaggggccagcgctgagctgcagatctggccgcagcgctgagtgaagcgaattatctggagcgtgtttgatctgggactgcgtagtcagcttctgctttatttgtttgtttgtaatctcatatttagcaagc

SEQ ID NO: 222278 - DNA, 207 bp, Homo sapiens
  chr3:182510952-182511159
  hyper
gaccgaggaatcggccccaagctgcagactccggagatggccagacccacagacacgacttaatcccactcccagaacggggaggagggtggcagtggacagaaacagcgttcgagaacccggcacctttccacgctcgcttcttcccggacccacaacacagaaaccccccaactcggaacggcggcggggcgcgccaggcccccc

SEQ ID NO: 222279 - DNA, 170 bp, Homo sapiens; identical to SEQ ID NO: 199225
  chr3:182511623-182511793
  hyper

SEQ ID NO: 222280 - DNA, 240 bp, Homo sapiens
  chr3:183165185-183165425
  hyper
gatcctcccagcccccaacatcaccccggagtagatgcagacccccagggtcccggaggccgagaccacaccccgcgggcacgagcccgattggcagattgtagccgagtggtttcaacggtgacgccccccacccgaatgcctcgctgggattggctcatttcttggttcagacctggacggtggccagaggaggacaagaggcttttacaccgaacggaggtgatgtggacgacaacg

SEQ ID NO: 222281 - DNA, 231 bp, Homo sapiens
  chr3:183602814-183603045
  hyper
ttcccctcccactgctcagctggctccgggagcgacctgcgagagtggcccggcctcccggcatttgcagatgaggaggatggggccagagcgaagagggacaactgtcattttttcgagtaacggcacataccaggcgctttgcctaagatcgcatttaatcgtcacagcactgctagaggtagatgtcatcactgtttcactttgcctctggtcagaggggataggact

SEQ ID NO: 222282 - DNA, 86 bp, Homo sapiens; identical to SEQ ID NO: 199238
  chr3:183851915-183852001
  hyper

SEQ ID NO: 222283 - DNA, 105 bp, Homo sapiens
  chr3:184097688-184097793
  hyper
acccgcgatccgggccgctgctgctgggtcggaccccccgggctcagcccggcccctcgccgagctgccgccgccgccccgtttgctgaggaggaggcccccggc

SEQ ID NO: 222284 - DNA, 280 bp, Homo sapiens
  chr3:184098372-184098652
  hyper
cgggggcagaagggcgcggtgcctgggacccgggacccgcgggcagcccccggggcggcacacggcgcgagctgggcagcggcctccagccaagcccgtccccgcaggctgcaccttcggcgggaaggtctatgccttggacgagacgtggcacccggacctaggggagccattcggggtgatgcgctgcgtgctgtgcgcctgcgaggcggtgagtgcaccccgcggccggcccgggccctggcgggtggggagcgccgggtcgcgcgggcgtcggagt

SEQ ID NO: 222285 - DNA, 209 bp, Homo sapiens
  chr3:184099271-184099480
  hyper
ccccgcccgcagagcgcagcagttcggagcggcagccgagcggcctgtccttcgagtatccgcgggacccggagcatcgcagttatagcgaccgcggggagccaggcgctgaggagcgggcccgtggtgacggccacacgggtagggggctggcgaacagcggggttgtggttgaggctgggccaccaaagcggcgtttgacagtgctc

SEQ ID NO: 222286 - DNA, 180 bp, Homo sapiens
  chr3:184279170-184279350
  hyper
cactaagctacagccacatgagggcgtcgcagggcagacgcgggccacatgggggcgcccccggtccgtcttagctggttggcacctcctcggactcagtttaggttactaatcgccaatgggcgccaggaggcggggttctccctctgatggacagcatcgctccgcccaatctaattc

SEQ ID NO: 222287 - DNA, 405 bp, Homo sapiens
  chr3:184319506-184319911
  hyper
tggggtccttggcccgggagccccagcccgcagagcaaggggaaggctgcggcccgagccggcccccgacccacccgccccgcctcggcctcgtacaagcacctttgatctgcaaccttcagggggattaagagcctgagagcccccctccccggggtaccccgctccccaacgccctccctccgggctgacctcccagtctgccgcccgggccgggggccggctccgccgccggtggtccccgccgctcctggcggccgcacctccgggcaggccacttggattacaggggcagcagccgcggctggcggcttcggggagccccggggctggggcccgcgggcggggcgggaggggaggctgggggcggcgggcccctcctggccattttggccggggaatctg

SEQ ID NO: 222288 - DNA, 260 bp, Homo sapiens
  chr3:184319971-184320231
  hyper
gggctcaattagctaatgacagcaaagccttctccggtgtcgctgacccctgggcggcagcccagctcccccacccccggtatttatacagctgcggcccctcgctgggacggggggcagggggcttgactgggttatctctgcggagatccgccgcccaccccaaaaaggagaaagaaaaggcttagcacacggtcccacccaccgcccctcgatcctccttgttgcccctcggtcctcctcgtcgcccctcactcttt
